United States Patent Application Publication US 2004/0031072 A1 - sequence listing, part 39

SEQ ID NO: 232298 - protein, 116 aa, Glycine max
  unsure (1)..(116): unsure at all Xaa locations
  Clone ID: PAT_MRT3847_5178C.1.pep
ASHDGARDLKETDRNFTLLNGRYSETIQDALQRECPELGSCSSIHLVYAKDHIVYLGGSHIRFDTGTTDGTMITAFVAXAGEPEHDEPIGAFPENYCALGNGTHGVLTTVVAATAC

SEQ ID NO: 232299 - protein, 75 aa, Glycine max
  Clone ID: PAT_MRT3847_51790C.1.pep
ASKWCLIFFSLQGCLHHHHSHATRAPIFHWILWCDTNTLLHFFSSIHSLQEPLLILNQMETTIKGGPLLGLTSLT

SEQ ID NO: 232300 - protein, 131 aa, Glycine max
  Clone ID: PAT_MRT3847_51791C.1.pep
QGHNTEGHSWISVLGTAYNVSNWAMEHSAGDDPITNLAGQNVTDVLITYHSGTTWTHLVKAYHGYHLRDLKVSEVTIDYKKLASEFSILCLIDTHGHVHLCTLASVVHKNLIALYAVLRSTIALTHSSSGM

SEQ ID NO: 232301 - protein, 60 aa, Glycine max
  unsure (1)..(60): unsure at all Xaa locations
  Clone ID: PAT_MRT3847_51792C.1.pep
MGLVFGLKASFVAKKKKEQPTQIPTCHYVPSSKKSWMQEPPKTNLKNYLIINXLPIILND

SEQ ID NO: 232302 - protein, 74 aa, Glycine max
  Clone ID: PAT_MRT3847_51793C.1.pep
CMSWTSWMRELSPLSSDFFFSSSDFSKAKTNTFNKNKGNFFDQIKPRWAKTNYFRPFVSDPSNYTHFHTAPPHF

SEQ ID NO: 232303 - protein, 62 aa, Glycine max
  Clone ID: PAT_MRT3847_51794C.1.pep
LLAFRGASHVNQHRFHHSNNSYRAAVNPKVVGSHGNQLHRLGSAIGFPTLTLCSHKLDAAKW

SEQ ID NO: 232304 - protein, 81 aa, Glycine max
  Clone ID: PAT_MRT3847_51795C.1.pep
DALQWMQARHLLQSEMRVRKEGLLRRQMHHPSNKVQPDCAFSMMIGEDYNKAHQRTVSLTIVDVDFVLRQSSATTLVPQGD

SEQ ID NO: 232305 - protein, 80 aa, Glycine max
  unsure (1)..(80): unsure at all Xaa locations
  Clone ID: PAT_MRT3847_51796C.1.pep
QPIPYRFQLLNGKSSHAHQDYLRPEFTQEXGXKVGYVSIFNGHLCHDLSSSLHNYLYENILQQHDFWTXTESAVEYAYLD

SEQ ID NO: 232306 - protein, 63 aa, Glycine max
  unsure (1)..(63): unsure at all Xaa locations
  Clone ID: PAT_MRT3847_51797C.1.pep
FQETSIYRVTRSCLIFCFILYITGGRKXLIYYSSNNSNNTIPSPFIQYKPPHLLFSHSKVNCS

SEQ ID NO: 232307 - protein, 42 aa, Glycine max
  Clone ID: PAT_MRT3847_51798C.1.pep
CTPSTPTNSPNDMHHISMENTEGSRSERNGVLASGAQGGIDY

SEQ ID NO: 232308 - protein, 111 aa, Glycine max
  Clone ID: PAT_MRT3847_51799C.1.pep
GPTSPTKLPYDGRTSLSSWYSSSQQSSAANSPPWGRSLPVRTPKIDGKEFFRQARSRLSYEQFSAFLANIKELNAQKQTREETLRKADEIFGSDNKDLYLSFQGLLNRNAR

SEQ ID NO: 232309 - protein, 113 aa, Glycine max
  Clone ID: PAT_MRT3847_5179C.1.pep
VKQQTSITRRSKPMHLAKGCAWDTWPARTTTLATRPAETHYTTGMAHNGMAVWKQRARNNCSRPSSKMKTDTIWNAIAIKANSRSLAAPSNDTDARATNEVPHNAQSTLTTMY

SEQ ID NO: 232310 - protein, 101 aa, Glycine max
  Clone ID: PAT_MRT3847_517C.1.pep
TKRAEIFTFFEEKVLTPKGCFFLYSNKIFFDSPETLFLNTGGLNPLNYSSPTLFFGGFFSFGLTGATRVGVVPPPILDLKGPKVWCNFFIPFSILKILEMG

SEQ ID NO: 232311 - protein, 276 aa, Glycine max
  Clone ID: PAT_MRT3847_51800C.1.pep
AIQNYTAEEDTAKYSNNNNFYSFKKDGYNTNQNELSETTRLTGTSYTNNNNYFYSGKDAFAKQNELSVFLYTEGGYNTENQNSNNNYFYNGKDAFGKQNELSDTKYTEEGYNSMENQNNNNNYYNGKDAFGKQNELSDTKYTEEGYNSMENQNNNNNNNKYYYNNDQAANEKYFYNNNNNDDAANNRYYKTKSVNSNYNGERQGLSDTRFIEGGKYFYDVKSEKYNHPTQYGGSTRGVNSENWSSNRGYFGNNNVNSMEGYQNQEEFEDDQEDFDP

SEQ ID NO: 232312 - protein, 254 aa, Glycine max
  Clone ID: PAT_MRT3847_51801C.1.pep
MAVVSPMPATTQRMGSVRSLSDAGGKFLEEPNPSVVDQPIYVAVTKEVKESRLNLIWAIQNSGGKRICILYVHVRATMVPLLGGKFPASALKEEQVQAYWEEERQGMHRILDDYLRICQRMGVRAEKLHIEMDSIEKGILELISQHGIQKLVMGAASDKYYNRRMMDLKSKKAISVCKQAPASCHIQFVCKGRLIHTRDRSSNEGNADVTSPLVQQVPNSVRSLRSQSVTLGQDRRANLTNPALELFRRVRSAN

SEQ ID NO: 232313 - protein, 109 aa, Glycine max
  unsure (1)..(109): unsure at all Xaa locations
  Clone ID: PAT_MRT3847_51802C.1.pep
WLRPWGFCLALLFFAAVCFPPLVFLAVXGFCARASRWVSAFXSPAVFSLVGCPLSSSRCRVFRFSCPFFFSPSWAVFPFSSPGGPVVVXPSIFSRSVXXLCGFSLANRA

SEQ ID NO: 232314 - protein, 103 aa, Glycine max
  Clone ID: PAT_MRT3847_51803C.1.pep
PPSPLRPVGPCPFLAGGPPLIGRFPGSSAPFFRSPSPLPLGFTPQTPVQIVASLGSDPFFSGSVVGMGFFIVRGEIPGFLKKEQQQKHLPRMPTKNNPKKKGT

SEQ ID NO: 232315 - protein, 241 aa, Glycine max
  Clone ID: PAT_MRT3847_51804C.1.pep
MAPISKLIPFLFLTTLLVSLQVNARDSQFFSKVTPLNNNIKETETPKNEGQVNKPEQQPTFIPETENSYGLYGHETGLHPPTTTTTNAAPYTTTYKPYKTTTAEEDTAKYSNNNNFYSFKKDGYNTNQNELSETTRLTGTSYTNNNNYFYSGKDAFAKQNELSDTKYTEGGYNTENQNSNNNNYFYNGKDAFGKQNELSDTKYTEGGYNNMENQNSNNNYFYNGKDAVGKQNELSDTKYTE

SEQ ID NO: 232316 - protein, 376 aa, Glycine max
  Clone ID: PAT_MRT3847_51805C.1.pep
MAPISKLIPFLFLTTLLVSLQVNARDSQFFSKVTPLNNNIKETEVPKNEGQVNKPEQQPVFTPETENSYGLYGHETGLHPPTTTITNAAPYTTATTYKPYKTTTAEEDTAKYSNNNNFYNFKKDAYNTNQNELSETTRLTGTSYTNNNNDGNNNNYFYNGKDAFGKQNELSDTKYTEVGYNNMENQNSNNNYFYNGKDAFGKQNELSDTKHTEGGYNNMENQNNNNNNYFYNSKDAFGKQNELSDTKYTEGGYNSMENQNNNKYYYNNDNAANGKYFYNNNDAANNRYYKTKAVNNNYNDERQGLSDTRFMEGGKYFYDVNSEKYNHPTQYGGSTRGMNSENWSNNRGYFGNNNVNSMEGYQNQEEFEDDQEDFEP

SEQ ID NO: 232317 - protein, 46 aa, Glycine max
  Clone ID: PAT_MRT3847_51806C.1.pep
GRSGLVSVMKLGRFVLVGRGRWRVYAPPCGRVPPLFIGVPSIDTIS

SEQ ID NO: 232318 - protein, 146 aa, Glycine max
  Clone ID: PAT_MRT3847_51807C.1.pep
GRETLLGGNEKLNALVGVKAHRKKKGFSLEGKKNFPSIPLYKKKLLRTQGEGVKKLFFFGLKKGKIFILKKKFLAGETPPKKRDQKKQLHYSGNMGLPGAFNLIKIKGFFPKHFLKKRHSSFLHALEAAKGPIKKADNLSWKGATK

SEQ ID NO: 232319 - protein, 62 aa, Glycine max
  Clone ID: PAT_MRT3847_51808C.1.pep
RVRQKVGRVRENSISVSELLGRGGLALVSSSFIYNSDENTHLFLSIAMGGIIALLFKNNIVH

SEQ ID NO: 232320 - protein, 49 aa, Glycine max
  Clone ID: PAT_MRT3847_51809C.1.pep
RPKHSCSFCTLWGFFFLGAIANSCVFISLRFLFYSSLNFCLKISLDCPL

SEQ ID NO: 232321 - protein, 78 aa, Glycine max
  unsure (1)..(78): unsure at all Xaa locations
  Clone ID: PAT_MRT3847_5180C.1.pep
MCRAEWEGLMGLKKWESKVQKVGMGVLGSGGSGSGSGSGSSRSRMKMWMIRATTSVLLWTCIVQLTGVGDMWXAESFE

SEQ ID NO: 232322 - protein, 88 aa, Glycine max
  Clone ID: PAT_MRT3847_51810C.1.pep
NSNESTANRYSQCAANPHNFCPPSHTRFYRILSHEKPGISKFDDVLVQKNTILIDQSSFLSLEWTLGSTSIPRAPLLLYNTSANTGGK

SEQ ID NO: 232323 - protein, 38 aa, Glycine max
  Clone ID: PAT_MRT3847_51811C.1.pep
YDMILNLKGTADQTTEIILVNILALVILDPSAIIISEN

SEQ ID NO: 232324 - protein, 59 aa, Glycine max
  Clone ID: PAT_MRT3847_51812C.1.pep
SYLPLPYYNYFILHLCINIHSYLHLLSGIMCFSSLSPMIVSISVLREYVFYLHQSNIPL

SEQ ID NO: 232325 - protein, 52 aa, Glycine max
  Clone ID: PAT_MRT3847_51813C.1.pep
YYGTGLMLCPYWTLSQVGSSSRSCYEYDPSLQQVCQRIALGHNSRYLHSPPR

SEQ ID NO: 232326 - protein, 87 aa, Glycine max
  unsure (1)..(87): unsure at all Xaa locations
  Clone ID: PAT_MRT3847_51814C.1.pep
RQLLAATDFGDGGHTAAYYRRIYWKINLAEPLLCTANESHLGDEIQMMLSLLSAPQXPRHWEQARNWAKQLEANGXAPWKSATLHVT

SEQ ID NO: 232327 - protein, 63 aa, Glycine max
  unsure (1)..(63): unsure at all Xaa locations
  Clone ID: PAT_MRT3847_51815C.1.pep
ICRLYAKKEMRILMVDVESAGNTTIMYTTKLXEIVTTVPTIGFNVEAVEYKNINFTVWDVGSQ

SEQ ID NO: 232328 - protein, 52 aa, Glycine max
  Clone ID: PAT_MRT3847_51816C.1.pep
AWNDPCTVSACMNGMSGHIHKMIGWSRLLQHHSDLFEVINVSQNAKMQPSNI

SEQ ID NO: 232329 - protein, 30 aa, Glycine max
  Clone ID: PAT_MRT3847_51817C.1.pep
VKQVESYSLVHNITHAQICVDFNLLSLTKC

SEQ ID NO: 232330 - protein, 115 aa, Glycine max
  Clone ID: PAT_MRT3847_51818C.1.pep
NQKKFLNYMDFKTTPSEISRTARCAFLQSSTRRYIAGSRGAVISLEIRSAPPEMPAAFQSASLQCFKSRSILLDISIILSVVLQCFTRRSINCSAPHIPLLRTCYEFPDAWADAW

SEQ ID NO: 232331 - protein, 71 aa, Glycine max
  Clone ID: PAT_MRT3847_51819C.1.pep
VFFIQKTLLLNLKAFLKLFGPTFPLKEKKNSRKKRTKHQIQCMLNTLNNSMIQVHCNKVSKANGEPSKIKI

SEQ ID NO: 232332 - protein, 63 aa, Glycine max
  Clone ID: PAT_MRT3847_5181C.1.pep
FMLLGWRHYTLFAPLINRARNTEYPFSYCFLMICDVSSEEVHSSVVIGAFFVCWHLTATHDWF

SEQ ID NO: 232333 - protein, 41 aa, Glycine max
  Clone ID: PAT_MRT3847_51820C.1.pep
TGIWAKTTKSPPLSYIAQTYALVKLKKKPNAQETQSSCMCL

SEQ ID NO: 232334 - protein, 73 aa, Glycine max
  unsure (1)..(73): unsure at all Xaa locations
  Clone ID: PAT_MRT3847_51821C.1.pep
RVGLGFDSEKNGLVSRMELKRKVXHLLSHQNTKSRSLELKDKVMNTIAEGGQSLENLNSFVKWVKELGSTFYA

SEQ ID NO: 232335 - protein, 85 aa, Glycine max
  Clone ID: PAT_MRT3847_51822C.1.pep
MMNESTKIGTHFSNPSSLVTSLSSSREGSPDKTGPTLLFPKPPMGSKIVTSPTIANGVTVGSWFPSQMRPVSMSHLPFFAAWSDT

SEQ ID NO: 232336 - protein, 153 aa, Glycine max
  Clone ID: PAT_MRT3847_51823C.1.pep
PNSSSDLMRRRERANAFCEAIRALDATDLPANSVRDLFLPAIQNLLKDLDALDPAHKEALEIIMKERSGGTFESFSKVMGAHIGLPSSVTSFFGESGLLGKKETTEPPSEATVSPKAAAPSPAEDTRFKRIMLGNFSEMLRGKAKAPEEGQNQ

SEQ ID NO: 232337 - protein, 57 aa, Glycine max
  Clone ID: PAT_MRT3847_51824C.1.pep
VSFIEPEFLYLKYPLQLFHLHPFEICALFYCNLLLILSMIITSYTFFFNLGLQFQFL

SEQ ID NO: 232338 - protein, 576 aa, Glycine max
  unsure (1)..(576): unsure at all Xaa locations
  Clone ID: PAT_MRT3847_51825C.1.pep
MVAELLGVTLGPKGRNVVLPNKYGPPKIVNDGETVLKEIELEDPLENVGVKLVRQAGAKTNDQAGDGSTTSVVLARGLIREGTKVIAAGMNPVQIARGIEKTAAALVSELRLMSRELESLAEYNNIGCTCXVEDHELADVAAASAGNDYSVGNMISEALHKVGRMGVVTIETGRSTENCLEIVEGMQFDRGYLSPYFVNNRRKITRPLHNCKLLLVDKKITKTKELINILNNSAKEKYPVLIVAEGIEQEALAPVIKNKLRGALKVAAIKAPAFGERKTHYLEDIAILTGGTVIREDMGFNLEKAHKNDLGSATKVVITKNSTLIVTDGSTREAVEKRVCQLRRLVENTVENFQKKILNERIARLSGGIAILQVGAQTQVELKDKQLRIEDALNATKAAIEEGVVVGGGXCCLFRLSQKVDGIKKLLENEEQQIGAEIFRRALSYPTRMIAKNAGVNGNVIIDKVLSDDNLNFGYNAARDCYEDLMKAGIMDPTKVVRCCIEHSASVAKAFLTSSAVVVERKELKPIPIPRRKPMPTSGNELDSLPIPRRKPMPMPMPMATPVFNFGYSGLGPMGF

SEQ ID NO: 232339 - protein, 52 aa, Glycine max
  Clone ID: PAT_MRT3847_51826C.1.pep
KYLIYDKALHKKKKQDLNSLRVGNPLISQPKKLQIQTHSKYDLDYFKKAERG

SEQ ID NO: 232340 - protein, 60 aa, Glycine max
  Clone ID: PAT_MRT3847_51827C.1.pep
QHYIKKFRELIFSQLQRHSLNLEYSDITTIYSINLNFKDGYLIYMLELNPYDMMVIDCYY

SEQ ID NO: 232341 - protein, 79 aa, Glycine max
  Clone ID: PAT_MRT3847_51828C.1.pep
VRPRVLLDIILDMHKKPGLSGWCTLTCGQSNQQQMVLSNASMSNRLKKRYEWKTYRFCSIGLKVISTCTMPKENARSEN

SEQ ID NO: 232342 - protein, 76 aa, Glycine max
  Clone ID: PAT_MRT3847_51829C.1.pep
QRPTTGREITTVCFLADAINPFSGGVVVVSHDFRLLDKIAKDIMVCEHKTVRRWDGSIGEYKNHLRKKMSSTGVLS

SEQ ID NO: 232343 - protein, 268 aa, Glycine max
  Clone ID: PAT_MRT3847_5182C.1.pep
MSINMVSSVPWTKSFFPLWFWNKTRVLLTHHYRYHHRHSPLSDTDMTEEGVVVSLQEWQGWGTTSPLPTMVSQIVEDLKVLEEDLDAHMNFGGNGGKLQGNFRVQEDKKHRATYQALGDSEKKLQFYSARQIACRILGSRGYLCQKCWLPMEDCMCSKVTSCSLYPGIRFWLYMHPKDFLRQNNTGKILWQVFGVDAATLCLFGIPEHEEIMWNSLKMAGKSNVWCLYPNKNAVLKSVQNVFGEESVARDEVAPSKLKVDTTQHFILI

SEQ ID NO: 232344 - protein, 50 aa, Glycine max
  Clone ID: PAT_MRT3847_51830C.1.pep
GKPWGFIRIYTEILLGFRSKTCVLLFQTKRWVNLRNTPYILTYTRGGTPK

SEQ ID NO: 232345 - protein, 189 aa, Glycine max
  unsure (1)..(189): unsure at all Xaa locations
  Clone ID: PAT_MRT3847_51831C.1.pep
MSGRNRGQPLPPPHAAGLSPPLHDQLYGARAHHHHHLVGPVPPHPHHLLEDFRDSQLGLGPPRGGPIPLHPAAIIEERLAAQHQDIQGLLGDNQRLAATHVALKQELEAARHELQRVAHFRDSLRADTEARMPELHDKADXEAELCGAEAARTELLQVRADVKELTAVRQDLCGQVHAMTQDLARMTTD

SEQ ID NO: 232346 - protein, 63 aa, Glycine max
  Clone ID: PAT_MRT3847_51832C.1.pep
TKNVKENHSRSLWPAQRVIFFTLRHRTQKSSNKIIHSWNQVAIAFVSGFKVRPPMIAVYQNIR

SEQ ID NO: 232347 - protein, 67 aa, Glycine max
  unsure (1)..(67): unsure at all Xaa locations
  Clone ID: PAT_MRT3847_51833C.1.pep
LLLCVDGCCCCIRFSGCSCCKGCCCXKYCCCCCCKTCCWSCCGXRGSSRLCWSCCCDSPCWNDCCCN

SEQ ID NO: 232348 - protein, 465 aa, Glycine max
  Clone ID: PAT_MRT3847_51834C.1.pep
MDLREGQTQPILDPNQPSHVYHLALDIGGSLAKLVYLSKHNVHLVNGKEEKAMDLREGQTQPILDPNQPSHVYHLALDIGGSLAKLVYFTKDDDHLVDGEEGISHRKALEKSDSSKQYPVLNGKLNFKKFETSRINDCIEFIKSMKLHIGGSQPQENPGSQPIAIKATGGGAYKYPDLFKERLGIILDKEDEMDCLVAGANFLLEVVHQEAFTYMGDQKQFVQIDPNDLYPYLLVNIGSGVGMIKVEGEGKFERVSGTSIGGGTFWGLGKLLTKCKSFDELLELSYRGNNRAVDMLVGDIYGGMDYSKIGLSSTAIASSFGKAISDNKEREDYKPEDIARSLLRMISNNIGQISYLNALRFGMKRIFFGGFFIRRHPFTMDTLSVAVNFWSKGEAKAMFLRHEGFLGGVGAFMSSDKHGLKELLAHQVVQRSLSKLSFAVDKILHGSPDGDFNGDESIECSVYAA

SEQ ID NO: 232349 - protein, 49 aa, Glycine max
  unsure (1)..(49): unsure at all Xaa locations
  Clone ID: PAT_MRT3847_51835C.1.pep
NQPPKLLVSYLDRADXLQKAEPLPDYYCQLYATQPWSKISSSERAITTN

SEQ ID NO: 232350 - protein, 181 aa, Glycine max
  Clone ID: PAT_MRT3847_51836C.1.pep
MDLREGQTQPILDPNQPSHVYHLALDIGGSLAKLVYFTKDDDHLVDGEEGISHRKALEKSNGSKQYPVLNGRLNFKKFETSKINDCIEFIKSMKLHIGGSQPQENPGSQSIAIKATGGGAYKYADLFKERLGIIFDKEDEMDCLVAGANFLLEVVHQEAFTYMGDQKQFVQIDQNDLYPYL

SEQ ID NO: 232351 - protein, 185 aa, Glycine max
  unsure (1)..(185): unsure at all Xaa locations
  Clone ID: PAT_MRT3847_51837C.1.pep
DRIIFVNDTYFPXATPPPLLKFRKKELEVLRGDGTGKRKDFDRIYDYDVYNDXGNTDGGDPRAMLGGSSIYPYPRTVKTGKERTRTDTNSEKPGEVDVPEDESPGLXQASDILTYRITYLSHDVMPLGRAAIYHLMATLSEREGSXDVRGPVEGGIKTPTDILSDSSLLAALTDIFRADGENVLE

SEQ ID NO: 232352 - protein, 85 aa, Glycine max
  Clone ID: PAT_MRT3847_51838C.1.pep
MGRGRCFLDISIGQELEGRIVVELYDDVVPKTAENFRALCTGEKGIGPNTGVPLHFKVLFFFFPFLSIPFISYFLHIPIFYIYSI

SEQ ID NO: 232353 - protein, 60 aa, Glycine max
  Clone ID: PAT_MRT3847_51839C.1.pep
FRQGQAYMALHDIDAAVESFKKALTLEPNDAGIKKELAAARKKIADRRDLEKKAYSKMFQ

SEQ ID NO: 232354 - protein, 317 aa, Glycine max
  Clone ID: PAT_MRT3847_5183C.1.pep
MGQACVFPLKKHLIKLITWETSLDKILMQVDFLNFSMANLTSSIINGELTLLAKQLAEKSSSTFGANTEQNAKEECKAVMTRGRKVTMEEENKKEKMVEDDKQQLIIKLAPKPVQPFCELIKEEEEEEDEQMRETPIILKKERKEEKRKNKSECAREKKKKASSTEGREVPYPLVPSRKDKERHLARFMDIFKKLEITLPFGEAQQQMPLYVKFMKDMLTRKNTYIHSNAIVVEGNCSSVIQRILPPKHKDSGSVTIPCSIGEVFVGKALADLGAICDAILPRKGPVTRAMSKRLQEDWARAAEEDPRVLMNLRVDF

SEQ ID NO: 232355 - protein, 167 aa, Glycine max
  unsure (1)..(167): unsure at all Xaa locations
  Clone ID: PAT_MRT3847_51840C.1.pep
XXXXXSXXSRLLAXXSXLXXXXXXRSXXAXXSXXCXXXHXXSXHXXXXSXXAXQXRXLRXXQXXHXXXXXXXLSPXXXXXWAXXXXXXXAXTXXLLXQCXRXXXXPXAXXHIXPLXDXXXXPXSPXLISXXXRPXXSXXXYRXLQXPXESXXFXRXEFRASVRXVXX

SEQ ID NO: 232356 - protein, 59 aa, Glycine max
  Clone ID: PAT_MRT3847_51841C.1.pep
SNIGDKSCQTKVIFRHSIAHMRNLYDNYSDQIMIVFEHFIIHMENHTIYNCHMFTIASM

SEQ ID NO: 232357 - protein, 97 aa, Glycine max
  Clone ID: PAT_MRT3847_51842C.1.pep
RWLLAHYFADLPFHLLKKDLWKSPDTITGRSSPDVNADVDMLREKAARRYEMAVFMVNATKTVEDTELPEGDRYVLSGAYRTYLRDEALDVRSYDSC

SEQ ID NO: 232358 - protein, 42 aa, Glycine max
  Clone ID: PAT_MRT3847_51843C.1.pep
RLHMNKIHRIYKVTQNSFCSGNSLFYQKELSPRQKLLIAVNE

SEQ ID NO: 232359 - protein, 135 aa, Glycine max
  unsure (1)..(135): unsure at all Xaa locations
  Clone ID: PAT_MRT3847_51844C.1.pep
MLSKWIPPISLGAKSLLRRKCNLNPNPNIPRVQWFSVSSSKAAPMIEMAARDGELRVFLVAGEVSGDSIASRLMASLKILSPLPIRFAGVGGVKMTXEGMQSLXPIEDISVMGLXEXNATLYRIRVKLNETVKAA

SEQ ID NO: 232360 - protein, 110 aa, Glycine max
  unsure (1)..(110): unsure at all Xaa locations
  Clone ID: PAT_MRT3847_51845C.1.pep
TVHQFVVSDKLVYLKENTNLFVFVAAALVLAPWPCHGACYHRFPPRKTTGYGERSSAVKCPAFRLAVAAHIIRTLKTILEECVEPTQDYLNGXQLRSDSKTAYLQAFFYA

SEQ ID NO: 232361 - protein, 69 aa, Glycine max
  Clone ID: PAT_MRT3847_51846C.1.pep
HIKSNRTFTSFGQLFHTVYFYLFLFLHPISLTTTIGISIDFFYFLILRCFTFQKCLKYNICFHIRKFIK

SEQ ID NO: 232362 - protein, 88 aa, Glycine max
  Clone ID: PAT_MRT3847_51847C.1.pep
VSLVQRDLPFGVFCIPKAISPRQRPSSVSGSGRLQLENRTENKWYMLCDQIQSLIWGDTTHDWEDSTRPQLRFWEQARLGTVICCDIT

SEQ ID NO: 232363 - protein, 40 aa, Glycine max
  Clone ID: PAT_MRT3847_51848C.1.pep
ISRINKLKSQRTPILIFLRIKKTQSSLIITQIKIGVKISR

SEQ ID NO: 232364 - protein, 73 aa, Glycine max
  Clone ID: PAT_MRT3847_51849C.1.pep
FHTTYLLSSYRLTYISWTSTGVRRFSEIWKQELYRDRSIYIQQLVHLFIVFVNLFVCLYVCCVFCIVRKKIVT

SEQ ID NO: 232365 - protein, 73 aa, Glycine max
  Clone ID: PAT_MRT3847_5184C.1.pep
VFRNTYFQALVDVLYQNPTPTPCQKRRKELLTFNGDKEVAGEWEVLPLQDGSTCCENHWREMQCRGKGSVRVD

SEQ ID NO: 232366 - protein, 165 aa, Glycine max
  Clone ID: PAT_MRT3847_51850C.1.pep
MAFPEKDAGANFVLQSKGEWWHAGFHLTTAIVGPTILTLPYALRGLGWGLGLFCLTAMGLVTFYSYYLMSKVLYHCENAGRRHIRFRELAAHVFGSGWMYYFVILIQTAINYGVGVGAILLAGQCLQILYTSISPHGSLKLYEFIAMVTVIMIILSQLPSFHSLK

SEQ ID NO: 232367 - protein, 61 aa, Glycine max
  unsure (1)..(61): unsure at all Xaa locations
  Clone ID: PAT_MRT3847_51851C.1.pep
KRGPGPQCPVPGQRNQGIPPLRPAQVQRARVPPNRRAVHRAXGGGLFGKALQRRIIPALFV

SEQ ID NO: 232368 - protein, 231 aa, Glycine max
  unsure (1)..(231): unsure at all Xaa locations
  Clone ID: PAT_MRT3847_51852C.1.pep
MDAIKKKMQMLKLDKENALDRAEQAEADKKAAEDRSKQLEDELVSLQKKLKGTEDELDKYSEALKDAQEKLELAEKKATDAEADVASLNRRIQLVEEELDRAQERLATALQKLEEAEKAADESERGMKVIESRAQKDEEKMEIQEIQLKEAKHIAEDADRKYEEVARKLVIIESDLERAEERAELSEGQVRQLEEQLRIMDQTLKALMAAEGXYSQKEDXYEEEIKGLSDS

SEQ ID NO: 232369 - protein, 79 aa, Glycine max
  unsure (1)..(79): unsure at all Xaa locations
  Clone ID: PAT_MRT3847_51853C.1.pep
IQRLLVYEFMPNHSVDDQLPARVPSTIIRCGTMLSMSQDAVRGLAYLHHEMHFHLIFRDFRTSVILXDHNVNAQLCDFG

SEQ ID NO: 232370 - protein, 198 aa, Glycine max
  unsure (1)..(198): unsure at all Xaa locations
  Clone ID: PAT_MRT3847_51854C.1.pep
MLDELCNHGLIPQVTHLLSLNGRTSLSPLIYNGLIGLLRXKLSSGSLVAFMTLYELNISIILRDILSTFDLSHGVSTSQLVGGHCNRVYEALKLLNELLPVRAKDENDQLMLDKESFLDNSPDLLRRLGMDVFPMLIQVFNSGASLYVCYGSLSVMYKLVSLSKSDMLVALLKNANISSFLAGVFTRKDHHMLMLSLQ

SEQ ID NO: 232371 - protein, 107 aa, Glycine max
  Clone ID: PAT_MRT3847_51855C.1.pep
LPFVRPTSLPAPRELLLILLLPITVPGSNGEDYGIIIGGERHSKLLDGSSKFVLTYEDKEGDWMLVGDVPWGMFLSSVRRLRIMRTSEANGLAPRLEENIKQRCKPI

SEQ ID NO: 232372 - protein, 291 aa, Glycine max
  Clone ID: PAT_MRT3847_51856C.1.pep
MSTVSKDDNLVLSSEDSSCPEESELELGLGLSLSSGPSSKSHHHHVHAPTTLYARIYTAKDFPSSAAAASSSPSSSSSSSPNITAGTKRAAADSLVANNRPSQVVGWPPLRTYRVNSFNSHAKSTEVFNSVAEKSKINNTVVRKTNDNDNDNNINAKEKRHLRSSLFVKVNMDGIPIGRKVDLSAHSSYETLAQTLEDMFNESTTVTTCKGSNGEDYGIIIGGERHSKLLDGSSKFVLTYEDKEGDWMLVGDVPWGMFLSSVRRLRIMRTSEANGLAPRLEENIKQRCKPI

SEQ ID NO: 232373 - protein, 72 aa, Glycine max
  Clone ID: PAT_MRT3847_51857C.1.pep
NSARAKLLDGSSKFVLTYEDKEGDWMLVGDVPWGMFFSSVRRLRIMRTSEANGLGKQMLYFSKHNLPMFFFC

SEQ ID NO: 232374 - protein, 94 aa, Glycine max
  unsure (1)..(94): unsure at all Xaa locations
  Clone ID: PAT_MRT3847_51858C.1.pep
SSNNLNPKPYLHHTQSKFFILFSSILHNSHIYSFISLLTFILSNYTQFILNFNSIIFQFLHNLPSTNNXFTYNFYSHTFNYLYYNFYTYFIISY

SEQ ID NO: 232375 - protein, 121 aa, Glycine max
  Clone ID: PAT_MRT3847_51859C.1.pep
LFQRLLQPVSLVSDFFGQVIESFVLFGFHASRFVAVSRMFFVVFSTLHDIEQVCLFQFVIVMLDFAGAILYGLDVYFWCLGSSLVFYDLGACVLASPYASPCCSGLYLNPCTDAQKDKCSS

SEQ ID NO: 232376 - protein, 138 aa, Glycine max
  Clone ID: PAT_MRT3847_5185C.1.pep
QLSLIPMNKKNIIIIILYYVFIGTELFRCGTELFRCCRCCPWGGNWQEDLFSLTLSTPQSTINREPDKSRAPPRLRKDKRRERAGIEMQISENNNLFEQSRGKEKISNLKCSWPLLSESSDGGSDSTFSHSDDCSGPS

SEQ ID NO: 232377 - protein, 73 aa, Glycine max
  Clone ID: PAT_MRT3847_51860C.1.pep
FQLMYASKKSIASVHNLRVGHSDTPIHRTPGGDPSQRESAHFHNLSPLPWETQADYYDLDTRHRKRRHFDQQL

SEQ ID NO: 232378 - protein, 411 aa, Glycine max
  Clone ID: PAT_MRT3847_51861C.1.pep
MMTPDVVEFLCKDFCPSSLDDIAEMSWPLCQESAPTSHSMRFTRSLSGLSVRRSLVGSFEESLLSGRFLSGNNSKKIDGFLAVLSITGGNFSPKSQKLPFSVTSVDGDCYLLYYASIDLAGNSSSNKLRGQLLKRGFGKDDSQIVKSRLRIPMKGRIQLVLSNPEKTPLHTFFCNANLSDMPFGTKTFLRQKVTLELTGSTSPQLKQRSTGLNSGDKGIPSMQKNHDISCDGEVMHTDATNVVNKTKSTNQGNGKGSSLLNLINKEDSSKQSLKTKMLGVPSSVKLVNECITEKCERNERKECWDKTCDESGKPLNSCSKVKDNSSSGGPLRYALHLRFICPFPKKTNRSTQKSKNNSLQENSGLDMEGERRFYLCNDLRVVFPQRHSDADEGKLNVEYHFPEDPRYFDIN

SEQ ID NO: 232379 - protein, 144 aa, Glycine max
  Clone ID: PAT_MRT3847_51862C.1.pep
GIVGSSSSLPSVFIDIDNCRMPILHLNCSTLYGIQSLDMCKVWGQYRIPSLHPVLESNAAVQLMIFCKNPVYNGTGAPALWWARPVREKLLLVARVAQVKICHYAYSKVVWIRTHFVSIKFNFYFIAKTIFNLDFKTHSMILVF

SEQ ID NO: 232380 - protein, 172 aa, Glycine max
  Clone ID: PAT_MRT3847_51863C.1.pep
TAGIDHFSELSQVRPQNGITSISPKNVSSPLSLSPLGRKFSERIKTAGGCRDVVEEIKNCNITSRSIEQSLDNSNSRLMLNYKDDDSRVARKSFDDVEFLCKDFCPSSLDDIADMSWPLCQESAPTSHSMRFTRSLSGLSVRRSLVGSFEESLLSGRFLSGNNSKKIDGFLA

SEQ ID NO: 232381 - protein, 84 aa, Glycine max
  unsure (1)..(84): unsure at all Xaa locations
  Clone ID: PAT_MRT3847_51864C.1.pep
MVDGREGQARETLQRGVQGLGYKMPNDNRCPHTSLIRIGGVHTXADVRWLAGMRTIHAYTADVRPDGSHYRCIWCMVTRPDLDS

SEQ ID NO: 232382 - protein, 134 aa, Glycine max
  Clone ID: PAT_MRT3847_51865C.1.pep
MSVLLINVKGMKERKCWDKTCHDSGKPLNSCSKVKDNSSSGGPLRYALHLRFICPIPKKTIRSAQKSKNNSLQEKSRLDMEGERRFYLCNDLRVVFPQRHSDADEGKVQADKIDVLVCVYCAIWNLFVRISWSS

SEQ ID NO: 232383 - protein, 84 aa, Glycine max
  unsure (1)..(84): unsure at all Xaa locations
  Clone ID: PAT_MRT3847_51866C.1.pep
ALLFFFSVFWGFYPLYNAVFTFPQERRMLIKERSSGMYRLSSXFLARTVGDLPIELALPTAFVIIIYWMGGLKPHPVTFLLSLL

SEQ ID NO: 232384 - protein, 75 aa, Glycine max
  Clone ID: PAT_MRT3847_51867C.1.pep
SGPYDAHQAFPEEREELEHDTQCENQAKDSGGPIMAHMQSLLSQLAVAEEPVISKEITCTAHLFANDILEKLEPD

SEQ ID NO: 232385 - protein, 57 aa, Glycine max
  Clone ID: PAT_MRT3847_51868C.1.pep
PLTPKGSLRSCASLAFSAFSSSGSGERTPGSGSPLRSQLDLQLGVGRKVLRPRKGVG

SEQ ID NO: 232386 - protein, 209 aa, Glycine max
  Clone ID: PAT_MRT3847_51869C.1.pep
MLVFRLKPGSYKETATLALSHFRHLVFNFTRAGDSGCPPRAGFGVRRGYNVVSSLGDPPEVWSGGGIVVRPGNSNFDVAGGGAAPNSGDSKEGCWGGSNLGNSFPTPKEICKGLDKFVIGQERAKKVLSVAVYNHYKRIFNETSSSKWPAGDSDNNNVKTDAVDDDRVELEKSNILLMGPTGSGKTLLAQTLARFVNVPFCIADATSLT

SEQ ID NO: 232387 - protein, 110 aa, Glycine max
  Clone ID: PAT_MRT3847_5186C.1.pep
QKGKRGFPQTRHIKPQINKSNFAPGDKKPSLGNNRWKKRGGTSNFGRKTSCLEKKTPGARKEPPLYGNQSPLGNQPARATFSLGPPWGPWVRGEPFYHTCWRPPQKQVDP

SEQ ID NO: 232388 - protein, 72 aa, Glycine max
  Clone ID: PAT_MRT3847_51870C.1.pep
NIWSSDFFKTVIITSLVSELRVVELLDGLCEKMQDYTLKIDTNTYEWFKVDSWDNLTTNKQEARAYSKDISS

SEQ ID NO: 232389 - protein, 98 aa, Glycine max
  Clone ID: PAT_MRT3847_51871C.1.pep
FCVAVCPLVLPLPVRFCLFSASRSCSPLFFFSPSRSLPPPSPPPPVLFPSPPPPFPPPAPSPPPLSPPPSPPSLSVPPLSPPPSPFPSSPPVCPPSPP

SEQ ID NO: 232390 - protein, 96 aa, Glycine max
  Clone ID: PAT_MRT3847_51872C.1.pep
KYPGGPPFVLESRHIERIFPPPPLATETTTWFRGRFDLPYRLIPTRYRFMMLPRMMIYPAPPFVSDDDYRAMMIFNFSFFYLIFLVLPCRRNIYLK

SEQ ID NO: 232391 - protein, 66 aa, Glycine max
  Clone ID: PAT_MRT3847_51873C.1.pep
PCVATLTILQLFTNNSCSWSFYCYMSTKSWSLFVASLLLAINNSSNLRSVSKSKTFYCCNNNLRIC

SEQ ID NO: 232392 - protein, 84 aa, Glycine max
  Clone ID: PAT_MRT3847_51874C.1.pep
VIAGIDVAVRSMKVGGIRRVIIPPSLEYQNTSQEPIPPNVRSFFFSRLIACLCFYTIGGIRRVIIPLSLSLHTLLLFLSANISY

SEQ ID NO: 232393 - protein, 276 aa, Glycine max
  Clone ID: PAT_MRT3847_51875C.1.pep
MSSMGYSRSFLASFLLAVLLNVTNGQPLVPAIFTFGDSIVDVGNNNHQLTIVKANFPPYGRDFENHFPTGRFCNGKLATDFIADILGFTSYQPAYLNLKTKGKNLLNGANFASASSGYFELTSKLYSSIPLSKQLEYYKECQTKLVEAAGQSSASSIISDAIYLISAGTSDFVQNYYINPLLNKLYTTDQFSDTLLRCYSNFIQSLYALGARRIGVTSLPPIGCLPAVITLFGAHINECVTSCNSDAINFNEKLDTTSQNLKNMLPGLNVVGCDMY

SEQ ID NO: 232394 - protein, 21 aa, Glycine max
  Clone ID: PAT_MRT3847_51876C.1.pep
AGLQVGYGALPQKIIEYLWRA

SEQ ID NO: 232395 - protein, 155 aa, Glycine max
  Clone ID: PAT_MRT3847_51877C.1.pep
TLGFLIGAKRSMEDTKGDKGAVTVGTTGTISLLMTRELDQMSSVPHQEVSSTSKPRISVSSGSATPKRPQPRKSFEASSSSSSRSSSILNHISPGIGPKTKLNGKHTHQIPILGYQNLPLETSPVTKKKDKKKKSKIVEVVDIKCGSLLSSSRSR

SEQ ID NO: 232396 - protein, 76 aa, Glycine max
  Clone ID: PAT_MRT3847_51878C.1.pep
EEKTLPIPLINPLPELDTSGTPIPNPLTIPSLSKPIPKRITYIKAYTRLLFQLQYCQSQCLRTPFHMVWQYQSHLP

SEQ ID NO: 232397 - protein, 71 aa, Glycine max
  Clone ID: PAT_MRT3847_51879C.1.pep
RIKVVTIISDIGSIHFIRPTSFGNHTKVAVVVNCVNMVFGYFIQVGQFKGCWSQVYVTHARTCQFVYLLHW

SEQ ID NO: 232398 - protein, 49 aa, Glycine max
  Clone ID: PAT_MRT3847_5187C.1.pep
KISWNVLDLKKENYFSCAVGRTQTNARYTLASPDEVVAFLKELHTLSQS

SEQ ID NO: 232399 - protein, 251 aa, Glycine max
  Clone ID: PAT_MRT3847_51880C.1.pep
RVRGGASPPLCSCRAASSFSSHYRIPFFTIIPSHSKTLLHAPRFSFQPFNTLQDAAKLDDPDAKSPSLSKKSFWVNPRSPRAKQLQQNSPHARSSSLTKLAKSLDSCNPTEEHVSEILNVLGNNVAERDAVFILNTMANPNTALLALKYFQQKISPGKHVVLYNVTLKVLREVKDFEGSEKLFDEMLQRGVEPNLITFSTIISSASVCSLPDKAMEWFEKMPSFGVEPDASVASFMIHAYAHSGNADMALK

SEQ ID NO: 232400 - protein, 208 aa, Glycine max
  Clone ID: PAT_MRT3847_51881C.1.pep
TRPHDLVLLFCSAWCVFYVGSCSAQLQSSQTQVLLQLKKHLEYPKQLEIWRDRWTDLCSISSPGQVNVTCKDNFVTELTILGDDKPTTKGRDFDGFAIPNQTLSESFSMDSLVATLARLTSLRVLNLVSLGMWGPLPDRIHRLYALEHLDLSSNYLYGSIPPKICTMENLQTLRLVDNFFNGTIPSLVNSSSHLTVLSLKSNRLKGPF

SEQ ID NO: 232401 - protein, 53 aa, Glycine max
  unsure (1)..(53): unsure at all Xaa locations
  Clone ID: PAT_MRT3847_51882C.1.pep
ENSVYIYVDGDLFTGDELISDSISYNETDNGMLWDVEEXSVVKVAVNVEIVAN

SEQ ID NO: 232402 - protein, 243 aa, Glycine max
  Clone ID: PAT_MRT3847_51883C.1.pep
MKPKTCELCHQLASLYCPSDSAFLCFHCDAAVHAANFLVARHLRRLLCSKCNRFAAIHISGAISRHLSSTCTSCSLEIPSADSDSLPSSSTCVSSSESCSTNQIKAEKKRRRRRRSFSSSSVTDDASPAAKKRRRNGGSVAEVFEKWSREIGLGLGVNGNRVASNALSVCLGKWRSLPFRVAAATSFWLGLRFCGDRGLATCQNLARLEAISGVPAKLILGAHANLARVFTHRRELQEGWGES

SEQ ID NO: 232403 - protein, 241 aa, Glycine max
  Clone ID: PAT_MRT3847_51884C.1.pep
MKGKTCELCDQQASLYCPSDSAFLCSDCDAAVHAANFLVARHLRRLLCSKCNRFAGFHISSGAISRHLSSTCSSCSPENPSADYSDSLPSSSTCVSSSESCSTKQIKAEKKRSWSGSSVTDDASPAAKKRQRSGGSEEVFEKWSREIGLGLGLGVNGNRVASNALSVCLGKWRWLPFRVAAATSFWLGLRFCGDRGLASCQNLARLEAISGVPVKLILAAHGDLARVFTHRRELQEGWGES

SEQ ID NO: 232404 - protein, 78 aa, Glycine max
  Clone ID: PAT_MRT3847_51885C.1.pep
ISPTFITDISTQSHSTHGCLPLNPGSSIECYYHGSWILMPLLSQTQHLHSEEDPYTGPIEPSYLQKPCICETQTYTLT

SEQ ID NO: 232405 - protein, 108 aa, Glycine max
  unsure (1)..(108): unsure at all Xaa locations
  Clone ID: PAT_MRT3847_51886C.1.pep
KGKRRFVCGDGEKMTLIPETRVEEVYIKLIDELEKRVSTLVGIECPKDEKLPRRKIFDKPNTRXFTIILMEHNLVVRQKFINVVRLIMKKRDKLSLXDGINPYYMEWT

SEQ ID NO: 232406 - protein, 96 aa, Glycine max
  unsure (1)..(96): unsure at all Xaa locations
  Clone ID: PAT_MRT3847_51887C.1.pep
ARSYAQNNGMYELMLVGIVVRTMDATXRWEIETIFGCNMXGESGKKCNGGIFLSVTLDEGEGSGFXLKNEXLFGRNDMKFNVKKNKSDGAVTDKYL

SEQ ID NO: 232407 - protein, 72 aa, Glycine max
  Clone ID: PAT_MRT3847_51888C.1.pep
NVNKTCFFTNLFWVLGIIKKGENIISSLTQNCPKIGLSTPKSFQIWDIKNKPFGKITYFILWPIYHRFRNEL

SEQ ID NO: 232408 - protein, 266 aa, Glycine max
  Clone ID: PAT_MRT3847_51889C.1.pep
DEHGKFKVQLPFSVSKHVKRIKGCTVKLINSSEPYCAVASAATSSSLRLKSRKQGQHIFSAGFFSFKPLRQPNLCNQKPSIQNIKGLDYAKHIFPPKIDPSFPPPLQDPKTPGGLLPPIPGLPDLPPLLPPLPLLPPLSGILSPLVPAGITNEFPNVQPSDQKLVDPNNLIFPPNPFQPTPSVPNPLQQPPLIPNPLEPSGPSPLVPNPFQPPSSATSPPLFPFPTVPGLTPSPPSLALPIPFPPLFPPPSSPGTPSASSAKNASP

SEQ ID NO: 232409 - protein, 86 aa, Glycine max
  unsure (1)..(86): unsure at all Xaa locations
  Clone ID: PAT_MRT3847_5188C.1.pep
GGENNGSAPVGPMYWGGKNVVPPPEKDXGAPNPAQIEGGTIGGAFAMPMGGNVIQGRGSGKRATKEIALGSPRGPANGQSPPPFGM

SEQ ID NO: 232410 - protein, 47 aa, Glycine max
  Clone ID: PAT_MRT3847_51890C.1.pep
PHLLNQQEDMAHHTTEPEMTNLTILVLSTTIDRKSTSTTTIESIYST

SEQ ID NO: 232411 - protein, 178 aa, Glycine max
  Clone ID: PAT_MRT3847_51891C.1.pep
MGCNQSKIENEEAVARCKERKRFMKDSVASRNAFAAAHSAYATCLKNTGAALGDFAHGEVQNPQFHSNDNNTSSSSSYVTAAQPFEIPLPPPPLPDFSPAPPLQRAASMPEIKINNPDSRPRPEPVTTIVEEDDEEDKELENEGSLRMRRSNRVNSNKGVRRRSARASSSYASSFQTT

SEQ ID NO: 232412 - protein, 57 aa, Glycine max
  Clone ID: PAT_MRT3847_51892C.1.pep
TCSLWSRLFLSKTISIIHTWSYNQRLTLLLAFHIVTLISLYISLIIHIQDLHFKIFS

SEQ ID NO: 232413 - protein, 67 aa, Glycine max
  Clone ID: PAT_MRT3847_51893C.1.pep
MSTIDSQLSQKLKLLAGISIGSSTWWSSHQPPQNMEISAFSFAGVMAVFAAKNPWFCSTIALLTEDI

SEQ ID NO: 232414 - protein, 52 aa, Glycine max
  Clone ID: PAT_MRT3847_51894C.1.pep
THILMLPYPLIPTPSSAPTPTPLEPTLAPPSALTPSPTLALSPLLAPTLGPS

SEQ ID NO: 232415 - protein, 75 aa, Glycine max
  Clone ID: PAT_MRT3847_51895C.1.pep
NLKSRLQYYGHGRTLKNAEPSLSDLTLQLQTQNMHLQAQRLSSAKHYQTHPNMAPEHSYMWRDRSTTKKSTRDLK

SEQ ID NO: 232416 - protein, 443 aa, Glycine max
  Clone ID: PAT_MRT3847_51896C.1.pep
MGIPHFLCIPFPVQGHVNRLVGFSLLLVKHGCKVTFVHTEFSLKRTKTSGADNLEHSQVKLVTLPDGLEAEDDRSDVTKLLLSIKSNMPALLPKLIEDINALDADNKITCIIVTFNMGWPLEVGHKLGIKGALLCPASATSLASAACIPKLIHDGIIDSQGLPTKTQEIQLSPNMPLIDTENFPWRGFNKIFFDHLVQEMKTLELGEWWLCNTTYDLEPGAFSVSPKFLPIGPLMESDNSKSAFWEEDTTCLEWLDQQPPQSVIYVSFGSLAVMDPNQFKELALALDLLDKPFIWVVRPCNDNKENVNAYAHDFHGSKGKIVGWAPQKKILNHPALASFISHCGWNSTLEGICAGVPFLCWPCATDQYLDKSYICDVWKIGLGLDKDENGIISREEIRKKVDQLLVDEDIKARSLKLKDMTINNILEGGQSSKNLNFFMDWAK

SEQ ID NO: 232417 - protein, 84 aa, Glycine max
  Clone ID: PAT_MRT3847_51897C.1.pep
MLPYPLIPTPPPAPTPPPLEPTPAPPPALTPPPTLALPPSLAPTLAPPPPPAPTLPPPSAPTPALPPPPIPAPPPVSTFLPPLE

SEQ ID NO: 232418 - protein, 92 aa, Glycine max
  unsure (1)..(92): unsure at all Xaa locations
  Clone ID: PAT_MRT3847_51898C.1.pep
MSLNNTMVVLKVCLLRLFLAGVTSARMELSFFRSDQSSRYDDHEXSTSCCDLCMCMRAMPPQCSCEDITLNSRDSDRKSRICTRSSAGHCRC

SEQ ID NO: 232419 - protein, 163 aa, Glycine max
  unsure (1)..(163): unsure at all Xaa locations
  Clone ID: PAT_MRT3847_51899C.1.pep
PPIEFESIKKALPKGFKKRVXKKGVVYGGWGQQQLILAPPFFGWFITPCGGAFLNKALLNRCQLVLFPQLGSGFLIKAKTMGGKFRVGVEVXKREKNGLFPKESVCKTVKTVMDNKIFQLGKKVKANPHKVRGLFLSTNFETFCVDAFSQRSQDFVLFQPQFN

SEQ ID NO: 232420 - protein, 34 aa, Glycine max
  Clone ID: PAT_MRT3847_5189C.1.pep
NREAHSPRDDIKRKRWLIGHNLDLINGKFPLSQS

SEQ ID NO: 232421 - protein, 91 aa, Glycine max
  unsure (1)..(91): unsure at all Xaa locations
  Clone ID: PAT_MRT3847_518C.1.pep
IAFLKSRRGFVRIAMEKGKPLVPVFCFGQXPIPFKHPMHVVVGRPIELEKTPEPTPEEVAKIHSQFVEALQDLFERHKARAGYPNLELRIV

SEQ ID NO: 232422 - protein, 83 aa, Glycine max
  Clone ID: PAT_MRT3847_51900C.1.pep
PIICDRDQGVFQIKPTLIDDADQLEIRRVNEGRMNRKVYPRSPMPDRRVGALIQDFTSLTLQLPTELRQRQHKFKSHSKSYLE

SEQ ID NO: 232423 - protein, 231 aa, Glycine max
  Clone ID: PAT_MRT3847_51901C.1.pep
MTTEGRDMAEDVADMTDDVPEQPTEAPEMRADAQGADSGEGSDGDDAAEGFPGGPRDPSVLTSFAEHVAHAVWSGQERPDLKLVSHGRKLTLIGRPVPEIEGLVAATGLSPLIDCSVITGDPGLISAFVERWHSETSTFHLPVGELTITLDDVSSILHLPITGALHSFHALSTEEARFLLTELLEVSAEEARAETALTRGAYVRLGWVRDIYETRCQARRWIVAARAYLLH

SEQ ID NO: 232424 - protein, 43 aa, Glycine max
  Clone ID: PAT_MRT3847_51902C.1.pep
NPLPAGSLIKKSTSLARYFQLDSSSELHAFYINLAPHFSPLAF

SEQ ID NO: 232425 - protein, 142 aa, Glycine max
  unsure (1)..(142): unsure at all Xaa locations
  Clone ID: PAT_MRT3847_51903C.1.pep
MKXKTLCFLPVWGREVAWPFLGSPQKKKIFXSFFAPIFKDLKKKRNQFQFFPFGVLKVLSEKLKWFLPFLIEKAKGFSKGILESIFKGIFKGILSLRKINQFFKLLFIKFKFKKINELRENKKDSPIFKNNPMISEPPISIQ

SEQ ID NO: 232426 - protein, 75 aa, Glycine max
  Clone ID: PAT_MRT3847_51904C.1.pep
SGVNIPLVYRHGSDAGRFTWLFLRGGLAILSIGCECWSSLIQQESFAFASSDQGYMVALVGHDSQSGNGCHKELF

SEQ ID NO: 232427 - protein, 98 aa, Glycine max
  unsure (1)..(98): unsure at all Xaa locations
  Clone ID: PAT_MRT3847_51905C.1.pep
SASGALSGLWGVCPPGCWRGSCGWRGLSWAARARRCVGFPRVCRRRWWPLPPPFSPLRSFPPAPSPSGPAALSXXLGRGVVVVVSSGPGGVARGRVFD

SEQ ID NO: 232428 - protein, 67 aa, Glycine max
  Clone ID: PAT_MRT3847_51906C.1.pep
SPVLINKTKKKKKKKKKKKKKKKKKKKKKKKKKKKKKKKKGGGPQLLTSSTRNLFPARSLKASNLSL

SEQ ID NO: 232429 - protein, 39 aa, Glycine max
  Clone ID: PAT_MRT3847_51907C.1.pep
AHTYALTSIRILFFLSLINNSIIYKGCYTLSVIYTLQSL

SEQ ID NO: 232430 - protein, 58 aa, Glycine max
  Clone ID: PAT_MRT3847_51908C.1.pep
VGNWKFQNHCFSSLKASGVPKEFVFQLVYVFYYKNIFHIIRCKLYPTAHLIKLVCSNS

SEQ ID NO: 232431 - protein, 329 aa, Glycine max
  unsure (1)..(329): unsure at all Xaa locations
  Clone ID: PAT_MRT3847_51909C.1.pep
MFNYTPYSHVYLLPSPWPCPCPPKKPLSMSMMSLTTVAAFKSLTMAESCLLSLPSLFYAKNNTLSLSIPTKPLNLHLPCSNSSLFPLTTKTTRHSSLLTFVAQTSDWAKEEEEEETSWENQGDTAWGTEEGGHEEGGFAEKAEEDKXFVGNLPFDIDSENLASLLRAGWHRLRLXQVIYNRATDRESXGLGFVTMSTLEELKKAVEMFSGYELNGRVLTVNKAAPKGAQPERPPRPPRSFSSGLRVYVGNLPWEVDDARLEQIFSEHGKVEDARVVYDRETGRSRGFGFVTMSSETDMNDAIAALDGQSLDGRAIRVNVAQDRPSRSSF

SEQ ID NO: 232432 - protein, 78 aa, Glycine max
  Clone ID: PAT_MRT3847_5190C.1.pep
AWNLWADLCACMVVRRYIVGGRPDEQKELKRREGEERATAGKGKRRREKNHRVVYGGHIGSFFLFDVLKYDVPFLKSC

SEQ ID NO: 232433 - protein, 53 aa, Glycine max
  Clone ID: PAT_MRT3847_51910C.1.pep
SSVWYSHPKTGGPGSRTCRVCGNPHGLIGRYGLMSCRQSFRSKAKAMGFIKHR

SEQ ID NO: 232434 - protein, 48 aa, Glycine max
  Clone ID: PAT_MRT3847_51911C.1.pep
YGCEKTTEGGSLPFNKAYLIFFTKHGTVRAQSWRFPLLYLFMIPPKTT

SEQ ID NO: 232435 - protein, 30 aa, Glycine max
  Clone ID: PAT_MRT3847_51912C.1.pep
IVSSKETRSGFGYHCLNCIIHHYCLYLWLN

SEQ ID NO: 232436 - protein, 106 aa, Glycine max
  Clone ID: PAT_MRT3847_51913C.1.pep
HRLKDQYVVRDLFWCHPDAVKLCNACHFVFFIDSTYKINRYRLPLLDFVGVTPIGMTFTVGFANLEGERVNNLVWALEQFRGLFLRNDRLPVVIVTDKNLALMNAV

SEQ ID NO: 232437 - protein, 80 aa, Glycine max
  Clone ID: PAT_MRT3847_51914C.1.pep
LLPKLLLLIQLSMCTLFSQLREVVLSMSMLANGVMSCSLSNPSHVSKPQSVHDSRYPNIYPRLCSLPFQLCSSPYPNSHL

SEQ ID NO: 232438 - protein, 51 aa, Glycine max
  unsure (1)..(51): unsure at all Xaa locations
  Clone ID: PAT_MRT3847_51915C.1.pep
PPKSLXQIKGFXVSXLASHGQLSGALVIYDKIKQSGHKLEAKXITSLIVRF

SEQ ID NO: 232439 - protein, 97 aa, Glycine max
  unsure (1)..(97): unsure at all Xaa locations
  Clone ID: PAT_MRT3847_51916C.1.pep
DWKNPAETQLKPLVXQPPFGKSRSIKKVNTVGPYQLLPSRNGKRNAPCNGPLNTVGVLNTQRETPXIARLIAPGGLVTFSGILDTCEGFTAQALNWG

SEQ ID NO: 232440 - protein, 150 aa, Glycine max
  Clone ID: PAT_MRT3847_51917C.1.pep
QDFPHATSVDFASLFPKIGNADIHQGSNCGDKFKFWEDRWMGGEVSLIARYPRLYVISSQQNHIIQHMGVFRDKGWEWDFRWRRPLFDNEIDMAVSFLREVEGHRIQPQHGDQWVWKADPSGQYTAKSAYGVLWGEMFEEHHDGFFEELW

SEQ ID NO: 232441 - protein, 107 aa, Glycine max
  Clone ID: PAT_MRT3847_51918C.1.pep
PPSSQKKVFISAVVASVVAKLCCGSYASNQRFHFSSFFRTEVPIVVVRVFPRRWREMCSIRDDNPIPGRALCLCPYVFYFLDHRRREEMFLYAFGGSRKNFQVILIF

SEQ ID NO: 232442 - protein, 131 aa, Glycine max
  Clone ID: PAT_MRT3847_51919C.1.pep
PTLLFLLLLSLFAFGCKALAVIVQTSTFRFSSLSITASPLGLVRSPFFRVRVFALAIKRRRLSSVTLVPEELFFSHTLQLITCGLFSLGFCGFPLPVLSVFYTECIVALFRALFWFFFFFNFGSMDGFAMR

SEQ ID NO: 232443 - protein, 85 aa, Glycine max
  Clone ID: PAT_MRT3847_5191C.1.pep
TNHLKKPWTMVKILLQPKQCGPAFWRPSQKKIDTRLVGNPGKNFLKRQRKGSRGTLHYLAGNKGGVQYLENGWLQGTKNIAVAML

SEQ ID NO: 232444 - protein, 89 aa, Glycine max
  Clone ID: PAT_MRT3847_51920C.1.pep
WLNLSKFATKRASSSQRPKNTDPFCLLPSFTFLSHFSSTNTIEEKPCVEPVEYNYSGLEPTRPHEKPRVVVLGSGWAGCRLMKGLDPRV

SEQ ID NO: 232445 - protein, 43 aa, Glycine max
  Clone ID: PAT_MRT3847_51921C.1.pep
NWGLIPLGAGYLFGGNRVPSFNHSYNIDYMCRAHQLEMQRYNW

SEQ ID NO: 232446 - protein, 71 aa, Glycine max
  Clone ID: PAT_MRT3847_51922C.1.pep
RGELFMLFGKVVSNGHPSFCRKHSGGLEIFVMHVYGEGGKFRLLRNLGVRSVCLSKVPPAWSVAWAYKWKV

SEQ ID NO: 232447 - protein, 64 aa, Glycine max
  Clone ID: PAT_MRT3847_51923C.1.pep
PHLSRRYSLEDYGISVIRYTAVSTNIAPSIRSHETVRSCACDSQNAMVLSHVPPYPELGRCDMG

SEQ ID NO: 232448 - protein, 100 aa, Glycine max
  Clone ID: PAT_MRT3847_51924C.1.pep
MTSKLNHRDDGSNGDSASKPIHFLRIMHPDNLLQGKLRLPAEFVNKYGKHLSNTMFLKLPNGAEWRVNLEKRDGRVWFQEGWKKFVEHHSLAHGHLLVFK

SEQ ID NO: 232449 - protein, 132 aa, Glycine max
  unsure (1)..(132): unsure at all Xaa locations
  Clone ID: PAT_MRT3847_51925C.1.pep
FRGPKIDQKPAEGLRXKLLSIQAVIDDGEQKQFGKXQVRNWLIELLVAMLGVKDVLEEIQHSRPQVQPQSESQTCSCKVPKFFKSSSFSSINKEVNSSMEKVLDDLDGLASRMDSLGLKKATDLVTGSGSLE

SEQ ID NO: 232450 - protein, 74 aa, Glycine max
  Clone ID: PAT_MRT3847_51926C.1.pep
IRLEQVATTFGIFTANMMFRPAQTIMRGGSNIFLALHDNSHFLMTVVCISLPNTHTRLIQPGVSSKARTLLIKK

SEQ ID NO: 232451 - protein, 87 aa, Glycine max
  Clone ID: PAT_MRT3847_51927C.1.pep
SIYYTQFSIQPNANIGGSIIITAHNNMYLINNNGWTLVGCLILLINTLLAKTQEDDDEQEQKLGIIIHPSFLLKFIQHRHRRRLPPS

SEQ ID NO: 232452 - protein, 114 aa, Glycine max
  Clone ID: PAT_MRT3847_51928C.1.pep
MHSTSPHVGKNNVLKDVMIWGGGIGCLVGIVNERFVQPRIYSLVPKLLESTAMLDVHNIALGGKHAALATKQGEVFCWGHGKWGRLGQKIDMGISCRKIGGCVNEVRGGGGGGG

SEQ ID NO: 232453 - protein, 65 aa, Glycine max
  Clone ID: PAT_MRT3847_51929C.1.pep
TLSSALVATCHKVPTITVTSRIYLSSEDNPISTSSTTTRMLLPGINREQNLHPSSYRRSLTLDQL

SEQ ID NO: 232454 - protein, 43 aa, Glycine max
  Clone ID: PAT_MRT3847_5192C.1.pep
GKKLLYYKMGIQSFVMRDVMEGKLFHFSRAISEGCMPKLSFFL

SEQ ID NO: 232455 - protein, 85 aa, Glycine max
  unsure (1)..(85): unsure at all Xaa locations
  Clone ID: PAT_MRT3847_51930C.1.pep
MVLESTMVCVDNSEYMRNGDFLPTRLQAQQDAVNIVCHSKTRSNPENNVGLITLANDCEVLTTLTPDTGRILSKLHTVQPKXNXT

SEQ ID NO: 232456 - protein, 59 aa, Glycine max
  unsure (1)..(59): unsure at all Xaa locations
  Clone ID: PAT_MRT3847_51931C.1.pep
CSSFIVPTLAIQRVVYSSTYLILMHYNCYSTVSCLFTPFPAFNLPKQHPXXXXXXXXXX

SEQ ID NO: 232457 - protein, 43 aa, Glycine max
  Clone ID: PAT_MRT3847_51932C.1.pep
MDYHDPPIPPFYDIAKLRKWSFFRALIGKNNDTILLLYTTILT

SEQ ID NO: 232458 - protein, 325 aa, Glycine max
  Clone ID: PAT_MRT3847_51933C.1.pep
SMYFHLPKLDEDTSCEFKDLPEPIQMPGCVPIHGLDLHHQIQDRSSQGYELFLQRVKRFCTVDGIFINSFIEMEKEPIRALAKEWNGYPPVYPIGPIIQTGIESDGPIELDCIKWLDKQQPKSVLYVSFGSGGTLSQVQIIELAMGLESSNHTFLWVVRAPSSSASSAYLSGQNENPLEFLPYGFLERTKGQGLVILSWAPQIEILSHSSIGGFMSHCGWNSTLESVLQGVPLIAWPLFAEQRMNAVMLSDDLKVALRLKGNGNGVVEKEEVAEVIKSLMEIESGKMRKIMKRLKEAAINAIKEDGSSTKTMHQSTIKWMQLVGI

SEQ ID NO: 232459 - protein, 77 aa, Glycine max
  Clone ID: PAT_MRT3847_51934C.1.pep
TMTSIVSMVIMLDRHTMKDSVCGFECSLWNIDTECKPYRTWQLIIASICELDGIWQVVQACIARVMYCLSPISSRIG

SEQ ID NO: 232460 - protein, 56 aa, Glycine max
  Clone ID: PAT_MRT3847_51935C.1.pep
APSTGSYYLMDPLEQCYCCKCPKLTRYQRDTRDMYSLKILGTQRAMTGTCQLHWKN

SEQ ID NO: 232461 - protein, 108 aa, Glycine max
  Clone ID: PAT_MRT3847_51936C.1.pep
IAELNSNLKGAMFVYADVYNILGDILTNYEAYGFENPYSSCCSMAGRFGGLIPCGPTSIICWDRSKYVFWDPWHPTDAANVIIAKRLLDGENNDIFPMNVRQLIQYLT

SEQ ID NO: 232462 - protein, 89 aa, Glycine max
  unsure (1)..(89): unsure at all Xaa locations
  Clone ID: PAT_MRT3847_51937C.1.pep
AYREVSHKDPLSQFSLPPGLRVYATDDELXVQYLCPTGAGHQLYIPNIDEIEFYTVNPCVLTSPAIFSEKEWDCFSPRDRQYPNGDRPN

SEQ ID NO: 232463 - protein, 65 aa, Glycine max
  Clone ID: PAT_MRT3847_51938C.1.pep
RQFIVLQQVVYISPPLEMRTQGTGSPSDLVQSTSFFNGFCCPVGFQSFYLFNCVQECIIDVSFSF

SEQ ID NO: 232464 - protein, 76 aa, Glycine max
  unsure (1)..(76): unsure at all Xaa locations
  Clone ID: PAT_MRT3847_51939C.1.pep
KKHEMLLAEFCYFLDLILVLAYANLCLHTKITDLDRIHQVNMLYGPELNAIQAFGXSRNFFNPNMMEGGTVYPHSD

SEQ ID NO: 232465 - protein, 35 aa, Glycine max
  unsure (1)..(35): unsure at all Xaa locations
  Clone ID: PAT_MRT3847_5193C.1.pep
FSTSATVAAKTSSXGLFSWLTEKHSXTLPPLDIPL

SEQ ID NO: 232466 - protein, 61 aa, Glycine max
  Clone ID: PAT_MRT3847_51940C.1.pep
AYKSRWEIYCSLICSSLIIHPQMHTLMTIPKSYRMALMYRNSQISLRTALSKRSDAEGQTH

SEQ ID NO: 232467 - protein, 70 aa, Glycine max
  unsure (1)..(70): unsure at all Xaa locations
  Clone ID: PAT_MRT3847_51941C.1.pep
VKYTINLHIDACSAISCQQVXQGKKXLGNHDYHNKSSSFVKFIFHLASFPYFDHLQDSAIFHKYSSLISQ

SEQ ID NO: 232468 - protein, 93 aa, Glycine max
  Clone ID: PAT_MRT3847_51942C.1.pep
MGSRGHTLLEVGPDDGVAVITIVNPPVNSLSFDVLRSLKESFDQAIQRDDVKAIVVTGAKGKFSGGLDISAFGGIQEAKERPKPGWVSVEIIT

SEQ ID NO: 232469 - protein, 52 aa, Glycine max
  Clone ID: PAT_MRT3847_51943C.1.pep
NVPRALPIPVTSGGPGLPGGTTTGAAYYQAETCWIYCLFADSRELTRACRGQ

SEQ ID NO: 232470 - protein, 242 aa, Glycine max
  unsure (1)..(242): unsure at all Xaa locations
  Clone ID: PAT_MRT3847_51944C.1.pep
VIEWHDRASDPGPNGQQLRTYRTASVTVFANYFSARNISFKNTAPAPMPGMEGWQAAAFRISGFFSYFSGCGFYGAQDTLCDDAGRHYFKECYIEGSIDFIFGNGRSMYKDCRLHSIATRFGSIAAQDRQFPYEKTGFSFVRCKVTGTGPIYVGRAMGQYSRIVYAYTYFDGIVAHGGWDDIDWNTSNNNKTVFFGVYKCXGPGAAAIRGVPLAQELDFESAHPFLVKSFVNGRHWIAPSDA

SEQ ID NO: 232471 - protein, 220 aa, Glycine max
  Clone ID: PAT_MRT3847_51945C.1.pep
MQGWFSGQSSEEEAKPASSLLADWNSYASAQTSEDSSTFPFDIESAVRSANDTVSGTFSVVSKGVRDLPGNFQSATSNVPSGKALVYFGLFLASGVFFVFIAFTLFLPVMVVMPQKFALCFTLGCGFIIGSFFALKGPKSQLAHMLSKERLPFTLAFLGSMIGTIYVSMVLHSYILSVVFSVVQVLSLGYYSISYFPGGSAGMKFLTSAFTSSIMKCFGR

SEQ ID NO: 232472 - protein, 218 aa, Glycine max
  Clone ID: PAT_MRT3847_51946C.1.pep
FNIIEGVARGLLYLHRDSRLKIIHRDLKASNILLDAEMNPKISDFGLARIYKGEDEVNTKRVVGTYGYMSPEYAMEGLFSEKSDIYSFGVLLLEIISGKRNTSFRNDDQSLSLIGYAWNLWNEDNISFLVDPEISASGSENHIFRCIHIAFLCVQEVAKTRPTMTTVLSMLNSEISHLPPPRQVGFVQKQSSSSLESSSQENQFNSNNHVTLTEMQGR

SEQ ID NO: 232473 - protein, 160 aa, Glycine max
  Clone ID: PAT_MRT3847_51947C.1.pep
MQGWFSGQSSEEEAKPASSLLADWNSYASAQSSEDSSAFPFDIESAVRSANDTVSGTFSVVSKGVRDLPGNFQSATSNVPSGKALVYFGLFLASGVFFVFIAFTLFLPIMVVMPQKFALCFTLGCGFIIGSFFALKGPKNQLAHMLSMERLPFTLAFLAV

SEQ ID NO: 232474 - protein, 33 aa, Glycine max
  Clone ID: PAT_MRT3847_51948C.1.pep
LWGWGSVSRFFVGLVTFMKGIGRHGLWPLSPWF

SEQ ID NO: 232475 - protein, 121 aa, Glycine max
  unsure (1)..(121): unsure at all Xaa locations
  Clone ID: PAT_MRT3847_51949C.1.pep
HTPAVKIPAGKAQAAAKEQQETKTDAAARKKEXHATAGEHQEAKARQHADXNTPKXTPEDENRNPRTEATQDTGGNSTGHTPTAXQRERQQPXREXQRATPEAAXADAAEQTXRPASKXPP

SEQ ID NO: 232476 - protein, 87 aa, Glycine max
  unsure (1)..(87): unsure at all Xaa locations
  Clone ID: PAT_MRT3847_5194C.1.pep
ELVGKRXYHPGRDELTITSERFRLREDDRKDCLRTLLSLIEEAGKANKLVDDARSSYVKERLHTNPAFMERLHAKSMRLRESNQVPA

SEQ ID NO: 232477 - protein, 81 aa, Glycine max
  Clone ID: PAT_MRT3847_51950C.1.pep
MTAMILSDNVIPRADVIKRAVRIGAEIRNVKLSGDLPEQTIASINGLLLEHKVIFFRGQLHLDDAEQESFAIRFGELTQIK

SEQ ID NO: 232478 - protein, 146 aa, Glycine max
  unsure (1)..(146): unsure at all Xaa locations
  Clone ID: PAT_MRT3847_51951C.1.pep
ALTFEFRALLMTANRLESLWENIERCLRTGDLMVGPNASDVTPWALSLCLASTEXIVFDSRXPYDMYYAALFHAVSLYSTDILPFLDMIEWMSLDPRNFRYNNXNELYLNCYNESGTIRLLXVPILGXTSKATASRQSVYHAAFAL

SEQ ID NO: 232479 - protein, 134 aa, Glycine max
  unsure (1)..(134): unsure at all Xaa locations
  Clone ID: PAT_MRT3847_51952C.1.pep
TTGDWIFTLQNSPIRDLFRVAAWKKGCSMVKIVMSANAAVKRSDWASLVQVFLTNSLSTEHLDACQWTKSXPHSCEFIFPKXDSGPDTLLDNWISLCPKSTXPLPTLLTDDPQQSTVFDILLGISQDFEIAGNT

SEQ ID NO: 232480 - protein, 116 aa, Glycine max
  Clone ID: PAT_MRT3847_51953C.1.pep
MLIQIVARLRHRIGPQYNEVQAQMETNCVRSSLGDVETPIGAMLDLRISQSKIALSKDTVGGTILRSDLLANFLTEGDFRACVDLQRTHRVSGMIYMAATCGIPWNSGLSLACAMN

SEQ ID NO: 232481 - protein, 92 aa, Glycine max
  Clone ID: PAT_MRT3847_51954C.1.pep
SPNFFFFPREFYKNSFPPKTLESFIFNLVRPFPFLQFFPFSLKPTNSNLFLPNQKTKIFNFFVFGKKTIPFFLLKLYNLNQTYCSYLPILLI

SEQ ID NO: 232482 - protein, 72 aa, Glycine max
  unsure (1)..(72): unsure at all Xaa locations
  Clone ID: PAT_MRT3847_51955C.1.pep
ASSAVWPPSGFTVPPFASFPSFGRLVIAWCFCCFRGPVSGCGPRAVSSYAPLCRPSWSGCNXLVGLGRFRAS

SEQ ID NO: 232483 - protein, 73 aa, Glycine max
  Clone ID: PAT_MRT3847_51956C.1.pep
MNIMSGCSESSTKPNTIINNSPKSKPPFKPAKDDTKPVLQDPILRSDPIETEEAVLRLPPFKIPTSTSTPEMA

SEQ ID NO: 232484 - protein, 87 aa, Glycine max
  unsure (1)..(87): unsure at all Xaa locations
  Clone ID: PAT_MRT3847_51957C.1.pep
YRLRNLFVFTFTTMTLNMVVLMAMVATNILSLYHLYSTLQLPKPPPRVPDQLLHXLHTICVTINHLTHLQNTSNPTKKSTIPTDLIA

SEQ ID NO: 232485 - protein, 51 aa, Glycine max
  Clone ID: PAT_MRT3847_51958C.1.pep
SNSQFNSLTLYVSTWILFTCDGGDPISALIPRSDVNPRIMLLESFAVTIGA

SEQ ID NO: 232486 - protein, 71 aa, Glycine max
  Clone ID: PAT_MRT3847_51959C.1.pep
ANHLAHGVLWVGYGSGANAPIRFKESPNWLIKNSWGESWVKKGYSKICIDCNVCGVSSMVSTVDAIHVFTP

SEQ ID NO: 232487 - protein, 41 aa, Glycine max
  Clone ID: PAT_MRT3847_5195C.1.pep
SCDVAYSVTCFSTFSFRGSAYFCSFGKEVDNTVLHDDLDKV

SEQ ID NO: 232488 - protein, 44 aa, Glycine max
  unsure (1)..(44): unsure at all Xaa locations
  Clone ID: PAT_MRT3847_51960C.1.pep
WDTKFYKTKYLLEDYPIXLEFYFTSLLFIMFDLFFISYQKDYNG

SEQ ID NO: 232489 - protein, 123 aa, Glycine max
  Clone ID: PAT_MRT3847_51961C.1.pep
MGRSRGKGKKLTISNEEDAISEEEEKVPKQKRRGRPQKLYKEDFDEEEIEEILEEDATSGDNVMNVVSSKEVKISSTTKHGRKRKRNLQEKIEPIEEKIESIYELRKSNGFRHNGSWRKNKPC

SEQ ID NO: 232490 - protein, 72 aa, Glycine max
  unsure (1)..(72): unsure at all Xaa locations
  Clone ID: PAT_MRT3847_51962C.1.pep
TRVFTIADEVVLVGFRASPFGXRVRFHLVERGVNYDSKQEALRTKXPLLLRMNPVHKKIPVLIHNGRPICES

SEQ ID NO: 232491 - protein, 40 aa, Glycine max
  Clone ID: PAT_MRT3847_51963C.1.pep
LNCTFWYFINCCYLANLIPLFIVLQKMISYYFYCEFLSIY

SEQ ID NO: 232492 - protein, 71 aa, Glycine max
  Clone ID: PAT_MRT3847_51964C.1.pep
ISCDPIVMKTTSLNLTRRAMIMLKPLFVLPGHISLSVHTITWGRSYPVCCMKHLHITIKGICPGCSVHRIR

SEQ ID NO: 232493 - protein, 71 aa, Glycine max
  Clone ID: PAT_MRT3847_51965C.1.pep
LALFFVAVFEILCVFVSCSWVFSYVWVVVCWDVFAFTGSCFCVLVCFFSLVGGLVLDFGLVTLGVSVELCC

SEQ ID NO: 232494 - protein, 138 aa, Glycine max
  unsure (1)..(138): unsure at all Xaa locations
  Clone ID: PAT_MRT3847_51966C.1.pep
LPRVRFNPNPCPDAWSLEFYKRTGSHCAIMCATGWTVTPLHDVQVTIDWVIYSHECVPRTYRVLKSQNPLEANRWMGKLTVPQGTIQSDKRMPTSIRRGAGSQNAVLMNMPTAALXMRRYFEGDHGYEDNKMTYAYIK

SEQ ID NO: 232495 - protein, 48 aa, Glycine max
  Clone ID: PAT_MRT3847_51967C.1.pep
VGGWSQVYKGLTLVTVRGAGHEVPLHRPRQAFILFRSFLENKSMPSTS

SEQ ID NO: 232496 - protein, 188 aa, Glycine max
  unsure (1)..(188): unsure at all Xaa locations
  Clone ID: PAT_MRT3847_51968C.1.pep
MVNLRTQKRLAASVVGCGKRKIWLDPNETSEIANANSRQTVRKLVQDGLIIRKPVTMHSRARARELTAARRIGRHRGFGKRKGTKDARMPSQIVWMRRLRVLRRLLVKYRAAGKIDKHLYHELYHLSKGNTFKHKRALVEHIHKAKAGKARERHIKEXMDAKRAKSKSARERRQERVQQKRAAMLADE

SEQ ID NO: 232497 - protein, 78 aa, Glycine max
  Clone ID: PAT_MRT3847_51969C.1.pep
PLTSIYKPQSSNPFCCWRIKFILLLGTAKVGNMLFFRVGDSPTIPPPLPCPLNFPNFNIFWFYYYQGVGYTSTGGGDL

SEQ ID NO: 232498 - protein, 68 aa, Glycine max
  Clone ID: PAT_MRT3847_5196C.1.pep
YEDTYLAATGGSGIFEETYNQVKLHQIRFPFKLFYTLYLKNIKHLPHNLLCKPIKPSPSIKPIPSTKT

SEQ ID NO: 232499 - protein, 55 aa, Glycine max
  unsure (1)..(55): unsure at all Xaa locations
  Clone ID: PAT_MRT3847_51970C.1.pep
MGSSRLSFIVGLXXLTFSFIMIIDSRVAEAPTLPKSALLPSKVYIPTVPLSTLPL

SEQ ID NO: 232500 - protein, 168 aa, Glycine max
  unsure (1)..(168): unsure at all Xaa locations
  Clone ID: PAT_MRT3847_51971C.1.pep
RRKTKMFVDPKNAKTATLAEVVEALQYMVSPQGRNTWTVDDLVPYVEKLTILSEEQERIIEPVSHGPTRKHEFPAQEFNILQSSVETQGIARRRETVEAEPYLYPRMVERGHGMYYRPQAFTQYPTQMYHYRSEGHQSDTSANEHSLXWCYENISQIFMAYYDPFTTT

SEQ ID NO: 232501 - protein, 62 aa, Glycine max
  Clone ID: PAT_MRT3847_51972C.1.pep
TKGPIAILDHSGSKESSISLYVPCIQNKNMAIFSSTAFLYKTRYLNSIVMFQRYQDLCKNNG

SEQ ID NO: 232502 - protein, 68 aa, Glycine max
  Clone ID: PAT_MRT3847_51973C.1.pep
APNNKNTTHSAQGCPAHGRLSYGKGQLTRSSHHHHRDGRGCRGARGTCVGYSGALGCEGADLWQITDD

SEQ ID NO: 232503 - protein, 27 aa, Glycine max
  Clone ID: PAT_MRT3847_51974C.1.pep
GDSRNPSGGALSDYQLMRPRARYKKLA

SEQ ID NO: 232504 - protein, 103 aa, Glycine max
  unsure (1)..(103): unsure at all Xaa locations
  Clone ID: PAT_MRT3847_51975C.1.pep
RHQTQAIDIFSLSCVLFFYITGRRHPFKEHIKRNINILKNQIDLFLLEFIPKAKDLIXYLLNPNPDLKPXTTKVLYHPFFXSSKIRLSFLHNTSNEIKLKNRE

SEQ ID NO: 232505 - protein, 69 aa, Glycine max
  Clone ID: PAT_MRT3847_51976C.1.pep
LFSQHARQVPNQLPLKELGHILEGNKVAYSFFGWAPSKFEWGVLYVLATNAPGFVSKQAVGGCFHGSFF

SEQ ID NO: 232506 - protein, 73 aa, Glycine max
  unsure (1)..(73): unsure at all Xaa locations
  Clone ID: PAT_MRT3847_51977C.1.pep
XESXCLGXTXLXLLIXVSVVXVXTFRXVMHXXAARSXXSHSNXFXRGFEXGXXXXGIXFXXXFXYSSXXXLXI

SEQ ID NO: 232507 - protein, 59 aa, Glycine max
  Clone ID: PAT_MRT3847_51978C.1.pep
RPYMTTEASLFSEYAIPKTPVNISLYATSYFDFALSSSYTPKFSTNVALSLQFSSVNYM

SEQ ID NO: 232508 - protein, 59 aa, Glycine max
  Clone ID: PAT_MRT3847_51979C.1.pep
WQLVLRTARAKGALLRGRCRDNLSLAGAPKTVKWIHPLQRQEDACGRYFIKNNSTIYYI

SEQ ID NO: 232509 - protein, 221 aa, Glycine max
  Clone ID: PAT_MRT3847_5197C.1.pep
VVYFRRALKLNKNFLSAWTLMGHEFVEMKNTPAAVDAYRRAVDIDPRDYRAWYGLGQAYEMMGMPFYALHYFKKSVFLQPNDSRLWIAMAQCYETDQLRMLDEAIKCYRRAANCNDREAIALHNLAKLHSELGRPEEAAFYYKKDLERMESEEREGPKMVEALLYLAKYYRAQKKFEDAEVYCTRLLDYTGPERETAKSILRGMRSTQSNFPSMDVEHFPP

SEQ ID NO: 232510 - protein, 262 aa, Glycine max
  unsure (1)..(262): unsure at all Xaa locations
  Clone ID: PAT_MRT3847_51980C.1.pep
ARAEVYELKTFSELHVAEEQLTGATTREACVRITNNWHIGTHGDIASRRALLQEANRSKRGDDEKETLSPSPFPSTLSPVLEPFSSSESPSDSPISSPEISHSPSPSLSTFFFILSPSPSPEVAPTPDLSPPANPPMVVFTPPQSNWGSMPSPASSSNQGNAYSSNTKQHTVIIWSTVGGFSFLILVSAIVFACFRSNKVVTVKPWATGLSGQLQKAFVSGVPSLKRTELEVACEDFSNIIGSLPEGTIYKGTLXSGVEIAV

SEQ ID NO: 232511 - protein, 93 aa, Glycine max
  unsure (1)..(93): unsure at all Xaa locations
  Clone ID: PAT_MRT3847_51982C.1.pep
DKXGIXXDQXRLIFAGKQLEXGRTLADYNIQKESTLHLVLRLRGXMQXXVKTLXGKTITLXVXNSXAIXNXQAXIQXRXGFPXNQXRXYFRXE

SEQ ID NO: 232512 - protein, 91 aa, Glycine max
  Clone ID: PAT_MRT3847_51983C.1.pep
MQANKPLEPSKPLEPKKPLEPKKPLDPKKPLDPKKPLQPNENMEPNENGKANKNVEANENVKANENVKANENVKPNKPVEPNEPTNCPVSR

SEQ ID NO: 232513 - protein, 85 aa, Glycine max
  unsure (1)..(85): unsure at all Xaa locations
  Clone ID: PAT_MRT3847_51984C.1.pep
VVWAMLLTHDRHGHGQVYTFRFHSSSSPFSITTTTTSPQRQFPTIQISRSLTPQSLFPPQRFLXSQFRPFFAFPRQRASPAITAL

SEQ ID NO: 232514 - protein, 99 aa, Glycine max
  Clone ID: PAT_MRT3847_51985C.1.pep
LEFTFKANPIYLSFFPSHKFTFFPLPFKYNTKHARTRAYSYIPFAHSSSSSCSLSLSEASAEQLITQVLGHSVTGMIVRLWSFEGWVGAFGSPKTLTKT

SEQ ID NO: 232515 - protein, 111 aa, Glycine max
  Clone ID: PAT_MRT3847_51986C.1.pep
FFYLSNLYRFFCHNMTGKHALISFLPTVPRLECLQLLKSERPFCLNQLFSFLGNRIISWHINNSNFASSIKLCITLHYIYVTLTVHKIWRCNFGDFYLIKIWELNLSKMRT

SEQ ID NO: 232516 - protein, 53 aa, Glycine max
  Clone ID: PAT_MRT3847_51987C.1.pep
SKWILEPSVENSHYYLLVQRQNFFVTNDCTKRYFVVNLTSSELSSELNPFVVL

SEQ ID NO: 232517 - protein, 39 aa, Glycine max
  Clone ID: PAT_MRT3847_51988C.1.pep
TYSHVISPYIYLVLIYVLLLLFIFYCLCLWIDHPYIHVL

SEQ ID NO: 232518 - protein, 174 aa, Glycine max
  Clone ID: PAT_MRT3847_51989C.1.pep
MAQMAWQMVLLLMLHNQEASFPWKEELEVLVRGGVPMALRGELWQAFVGVKARRVEKYYQDLLSSESDSEVKTDQQSMESTDSNGKTGADFGHMPEKWKGVKGQIEKDLPRTFPGHPALDEDGRNALRRLLTAYARHNPSVGYCQGPCFFKELHVLFFPTFFIKAVFSIIFQSI

SEQ ID NO: 232519 - protein, 107 aa, Glycine max
  unsure (1)..(107): unsure at all Xaa locations
  Clone ID: PAT_MRT3847_5198C.1.pep
TTEGGGXCXSNHFTSKTDIISXXRSLWESGEHAWGPXNFVLGGAFFIFILGTRVLGEXGXRLFWGRAISALGXVMRSTLIVFLRRAEKSGVNIVRDIKGGVSPXSIN

SEQ ID NO: 232520 - protein, 89 aa, Glycine max
  unsure (1)..(89): unsure at all Xaa locations
  Clone ID: PAT_MRT3847_51990C.1.pep
AKCSQELHHTHPNRTTTTPIHNNPPTPPEKPNPPPPPPYNPTPPPNATPHPPTXPPPLTPPPPPPPHPPPPPPPHPPPPPHPPPTPSTP

SEQ ID NO: 232521 - protein, 200 aa, Glycine max
  Clone ID: PAT_MRT3847_51991C.1.pep
MKRHWRNRSHDDDGLPDSDSDTRSSRRFPLTRLMALFFFSIFLFSLTFLLPHPPIQSASTAKTLLQLKQTQQGDVSDSVELQKDKLLGGLLADGFDEQSCLSRYHSATYSKGLSGNPSSYLISRLRKYEALHKKCGPYTESYNKTVKDLRSGHVSESPECKYVVWISYSGLGNRILTLASVFLYALLTDSCSIGLIPGVD

SEQ ID NO: 232522 - protein, 103 aa, Glycine max
  unsure (1)..(103): unsure at all Xaa locations
  Clone ID: PAT_MRT3847_51992C.1.pep
PTRPKTPERLPEDDRWGSKTEYRTEWLPRVVIFLAVTCFXALALSPCLAEDTGLAMNFYRESCTHAXDIIIEQVKLLYKRHRNTAVYCLIDISHDCAAHSCDA

SEQ ID NO: 232523 - protein, 87 aa, Glycine max
  unsure (1)..(87): unsure at all Xaa locations
  Clone ID: PAT_MRT3847_51993C.1.pep
KGCFGRDQVLFLPRGAKPKPIAKSLGGNKTFFYEHFKGPMIKMSPLXGLPGSQEEIRNHCNFVKGNFFNWGPLAPKKFSRNGMVSPL

SEQ ID NO: 232524 - protein, 262 aa, Glycine max
  Clone ID: PAT_MRT3847_51994C.1.pep
REKCCGFNFSEKTQNRRLSRMSNSGDANVTTEEQEAEAEQQSEEWETMARAWLCSFPEPKEVSMAEVEAWIDSNLASLPEGLRSMPRPDLCHRLISFQNCMRLPNQEREVNQLDLPHARFQRTDQWIPVYSWLETLDKEDVVKSKEISDWLTDNPKVQEQLCSRHSRYHLMHYIKKCHLKILKRREKKKGVEQPDKDSSLKVQKDVAMKHPAPPPCSSVSNLPKDSDLFLAKRNEAYRKYEILLELEKLLTPVFKKQPSVNQ

SEQ ID NO: 232525 - protein, 138 aa, Glycine max
  Clone ID: PAT_MRT3847_51995C.1.pep
VKRVPTNPMGAQSLFEWPPLDLLVVRSMRPSGVVEVIESVKNNRRLGDPRSQSPSSKRSVMLFVIFVSPCDQLRGFKETRSLGCRISRQSPKVSVATDTICSGLRFHAARSLHIWVFVRRSPPWFRKCWMSAVSLLEW

SEQ ID NO: 232526 - protein, 50 aa, Glycine max
  Clone ID: PAT_MRT3847_51996C.1.pep
PIVSRLIDNNNPNHLLGFQLIHSFGSTSTITKPARVSYSIQPMHIQPPSV

SEQ ID NO: 232527 - protein, 38 aa, Glycine max
  Clone ID: PAT_MRT3847_51997C.1.pep
VELVKHHKHSLIALRSAHNHDGVTHDNCDYTNSTRCSE

SEQ ID NO: 232528 - protein, 80 aa, Glycine max
  unsure (1)..(80): unsure at all Xaa locations
  Clone ID: PAT_MRT3847_51998C.1.pep
YKNILYFVDYDIKFLVHVISIKIILNKITVQPEGYGFAXFVSHAPAYIILQTYNGTQMPVTXQTIRLNWAFFGIGEMRPD

SEQ ID NO: 232529 - protein, 74 aa, Glycine max
  Clone ID: PAT_MRT3847_51999C.1.pep
SRRNRIELLPVHLVYNKVKTVYAQESRLTVLNIKKKIYISNRIMYFYFAFTIFGGHILLFIWLNCLDIGVFIII

SEQ ID NO: 232530 - protein, 63 aa, Glycine max
  Clone ID: PAT_MRT3847_5199C.1.pep
LVQEVESFTQRKIATAQELEALKGEEPCREPPFQYVSHVRTYPTFMFGGSVGSRVATVAFIRK

SEQ ID NO: 232531 - protein, 59 aa, Glycine max
  Clone ID: PAT_MRT3847_519C.1.pep
VLQDSIATNETPCDSSLLELLYKSNSFNAFLYFSHMTFLTCCIAFGYTIQQFTYPFFNV

SEQ ID NO: 232532 - protein, 221 aa, Glycine max
  Clone ID: PAT_MRT3847_52000C.1.pep
RGGGASAESSPGAEPPHGPSLPPPPPLPPNVVPQSVGAGRRDEDVDRRYGATRHSQRLSPRHEEKERRRSEETVVSQDDAKRRKEDDFRDRKREEIKVEEREREREKANILKEELDLNAASKRRKPKREHLPTGEPGEYSPVAHPPSSAGIGMSLAYDGRDRGDRKGPIMQHPSYVDESSLRIHGKEVASKLNRRDSDPLYDREWEDEKRQRADQKRRHRK

SEQ ID NO: 232533 - protein, 74 aa, Glycine max
  unsure (1)..(74): unsure at all Xaa locations
  Clone ID: PAT_MRT3847_52001C.1.pep
MAGKGGKGFLAEKTREAKKDKDKVKKRPVSGXSRAGIHFPGGRIHRHLNQRVQPNGLLGATAAVNLAPILEYLT

SEQ ID NO: 232534 - protein, 59 aa, Glycine max
  unsure (1)..(59): unsure at all Xaa locations
  Clone ID: PAT_MRT3847_52002C.1.pep
REKPKGLLLRRPQVEMMMRKTRIKLLVMSFSGAVRPYAAFSFAYLVYCFFIVIXFXPSV

SEQ ID NO: 232535 - protein, 145 aa, Glycine max
  unsure (1)..(145): unsure at all Xaa locations
  Clone ID: PAT_MRT3847_52003C.1.pep
HIKNETVSRKAFALQDKLWSIYAAGNTVPXPFLRATDISPIALLSDNVLGGIQQDTGGTGTVEALQELFSGDGQSKKGRRGLNEMPLPPSIYQRLTSSSTLMNLAQALAYHKMCYEDMPLQELQATQEQRTIQNLSDTLRTILRL

SEQ ID NO: 232536 - protein, 116 aa, Glycine max
  unsure (1)..(116): unsure at all Xaa locations
  Clone ID: PAT_MRT3847_52004C.1.pep
MRYMRPRREMGRRETDPTTLRSDSRSEKVASTEGQFVSGKTFRMTXMGWSHSSEDFAEMEDQXDPXQIDARLRQRIDPQYNEVQAQMETNLFKLALADVETPQGSMLDLIIPESKI

SEQ ID NO: 232537 - protein, 422 aa, Glycine max
  Clone ID: PAT_MRT3847_52005C.1.pep
MNTASFRGYSATTNTIQSSLPYVSNSAEQSLKTKGTHRAQAGIGGDISNSIFKNETVSHKAFLYFHDFVAKCLTKEPRLRPTASEMLKHKFFEKWKSGSAAMLPKLEKARQIRASMALQAQALPAASEDQELDSKLNDEYGGTVPSRPHNIGVEGAADLSSHGTTRKLHKVEDVDTSEGNFGTVIIHGDELHKTTQDADSAASVSALTSGSGDRLADSGIESQKVGIMNTASFRGYSATTNTVQSSLPYVSNSTEQSLKTRGTHRAQAGIGGDISNSIFKNETVSRKAFALQDKLWSIYAAGNTVPIPFLRATDISPIALLSDNVLGGIQQDTGGTGTVEALQELFSGDGQSKKGRRGLNEMPLPPSIYQRLTSSSTLMNLAQALAYHKMCYEDMPLQELQATQEQRTIQNLSDTLRTILRL

SEQ ID NO: 232538 - protein, 82 aa, Glycine max
  Clone ID: PAT_MRT3847_52006C.1.pep
KLVKVAGSVRTGGKGTVRRKKKAVHKTTTTDDKRLQSTLKRIGVNAIPAFEEVNIFKDDVFIQFLNPKVSAFIVANTWVVRG

SEQ ID NO: 232539 - protein, 53 aa, Glycine max
  Clone ID: PAT_MRT3847_52007C.1.pep
RDAYRQMKIFSAVLLGCFHFKLNDEKKNVSYKTMITLHIDGGLEIKAFHRYRD

SEQ ID NO: 232540 - protein, 55 aa, Glycine max
  Clone ID: PAT_MRT3847_52008C.1.pep
FNLPEQTDSFLSTPGVTFVGNENIPNVHSSSSYSWSRGHRHNNSSLYGALTIGSL

SEQ ID NO: 232541 - protein, 83 aa, Glycine max
  Clone ID: PAT_MRT3847_52009C.1.pep
GPPFFGTVLVPRFPCFSHKSAVLIFSYGPGEKIIVLTIEKRLFFFGMSCFSYSPPFWKRNLWPFGRFFNFGFVQILFGLNPPP

SEQ ID NO: 232542 - protein, 49 aa, Glycine max
  Clone ID: PAT_MRT3847_5200C.1.pep
CGSRTAPCDSCGRSVMLKDMDIHQIAVHQRWLILIFFLITVTCEGLHLG

SEQ ID NO: 232543 - protein, 72 aa, Glycine max
  Clone ID: PAT_MRT3847_52010C.1.pep
IFQVTHFHRKSAVGKKFNHIREKKMNVSSLGKRNPRFIFYFFKKKKLKSLYLVARDVGDLYYKPISSNSWCR

SEQ ID NO: 232544 - protein, 66 aa, Glycine max
  Clone ID: PAT_MRT3847_52011C.1.pep
DNGELESYLRVSIDQTPSMVGVPSRYTRLTGFSNRRRHQHSGTQPGEPLDLSDSFKCKTGSYRTRG

SEQ ID NO: 232545 - protein, 169 aa, Glycine max
  unsure (1)..(169): unsure at all Xaa locations
  Clone ID: PAT_MRT3847_52012C.1.pep
GWGFLLIAQACKPLFXKTWFWGFVRAFSPGFKVFLGLLLFPPVAFLAWFPFVSGFQLGGLFTQAFCRGLRFFGFFGGQSTVRSSIPKGCPWFFFFGGSLFSGVWALCCFFFFGGFFFLFFLCPFCLVFFFFFFFVFFFFLLFLFFFLFGFLFFCCFGPVGLSFLFFVIG

SEQ ID NO: 232546 - protein, 69 aa, Glycine max
  Clone ID: PAT_MRT3847_52013C.1.pep
IDVSPNFNFSKPIYAGGLTARLALVAGPCKFLPPALPRPSTPAHPAHPHTHPPKQRSERHTVMTGNLSW

SEQ ID NO: 232547 - protein, 48 aa, Glycine max
  unsure (1)..(48): unsure at all Xaa locations
  Clone ID: PAT_MRT3847_52014C.1.pep
XLXXDLPDMDVIXLSGXFCSDKXAXAVNWXXGRGXSVVCEAIITEDVV

SEQ ID NO: 232548 - protein, 97 aa, Glycine max
  unsure (1)..(97): unsure at all Xaa locations
  Clone ID: PAT_MRT3847_52015C.1.pep
TFIPKLQHQQQLAHLNTPLLPFLMLPPGLPPSVEPSVVLPLGFPSVFPPWAFPSFYPSLFLPRAPFPLFLLIWLFPFPSCWXSLLFPPFGAFFTLFF

SEQ ID NO: 232549 - protein, 73 aa, Glycine max
  Clone ID: PAT_MRT3847_52016C.1.pep
SCTSLGTIEAMLVLIERTTFFWSLLSSSGPKPSGSATTFIPDLLRLSRPAAPVLLFNLCRLNSVPFCRLLAAV

SEQ ID NO: 232550 - protein, 53 aa, Glycine max
  Clone ID: PAT_MRT3847_52017C.1.pep
ASILFPQDGIRVSVDLFLWRCGSFSLVPLYGSGFVEVVLYHVCQFFWFYYLCT

SEQ ID NO: 232551 - protein, 127 aa, Glycine max
  unsure (1)..(127): unsure at all Xaa locations
  Clone ID: PAT_MRT3847_52018C.1.pep
EPGERTPATLFFEHHNPIHEXNTHTPAEARSRGRRTIKQSPQKQSENEGKEKKKTMNNPGQPAAPTDEAPTIGPIKRQKERETKAYEEKQNRASTTKGRKHAANAHGFHRTEVTASKEETTYGSKME

SEQ ID NO: 232552 - protein, 98 aa, Glycine max
  Clone ID: PAT_MRT3847_52019C.1.pep
EHVFFFFERFLINVYLDVLFGSLDKIYLRGLSFLLTPLIVFSGNWHTDTSMPQKNFYGLTDLIFNLTTKDIFISGNCCSNTNATLGYKSLKGFCSMLF

SEQ ID NO: 232553 - protein, 53 aa, Glycine max
  Clone ID: PAT_MRT3847_5201C.1.pep
IPRAKDKIQIIFQKSTCLHPSHYCGGSTSTYSITAGYYYRASWHEDHSKLRDF

SEQ ID NO: 232554 - protein, 55 aa, Glycine max
  Clone ID: PAT_MRT3847_52020C.1.pep
NPYIPFSYVHICVPISLKCGIWISPRNSVSHFLWFQDRLNKKPNNSNSYMTILAP

SEQ ID NO: 232555 - protein, 52 aa, Glycine max
  Clone ID: PAT_MRT3847_52021C.1.pep
YPCLNCTLQKMLANQFYLATFKSSTHYLLECLHCSYFDTSHFLSALRDILSP

SEQ ID NO: 232556 - protein, 110 aa, Glycine max
  Clone ID: PAT_MRT3847_52022C.1.pep
RRLLAGQQFVGPNSPFLHPGRVREKKMGGRFKRFAVSPSVELAADARRTPSPITTGGKVQNQLEQNMALLDSMHVGEHCAVGLHAPKQVSVASHRIKRNQKIPIAPCSNT

SEQ ID NO: 232557 - protein, 80 aa, Glycine max
  unsure (1)..(80): unsure at all Xaa locations
  Clone ID: PAT_MRT3847_52023C.1.pep
FRCPXSSXXLDHCXLLXLVXGXXYXFPVXXKXLALLVXIGXXGTLXFNGXPSEXIXXRXEMLPGLHXTCXYPQFCGRKTX

SEQ ID NO: 232558 - protein, 54 aa, Glycine max
  Clone ID: PAT_MRT3847_52024C.1.pep
LINMIETKTPLKIIKFYDNLIKLIDISHQYRDSLRNNNVSLTLCIRCEMDGKKS

SEQ ID NO: 232559 - protein, 95 aa, Glycine max
  Clone ID: PAT_MRT3847_52025C.1.pep
AVIPGGAFLIMAGVNKLEGRPILPNSMGGRLGLNQRRESSVPILPDWRGYHEKPGLNISHSPWWVTGDLWGAKPHKQYALEPFWAPFYGWSSSCH

SEQ ID NO: 232560 - protein, 439 aa, Glycine max
  Clone ID: PAT_MRT3847_52026C.1.pep
MMLKIKRVPTVVSNFQKDDAADSPRPVGGCGRNCLKACCIPDAKLPLYGFKKANIGKDLALHACAGEPPLAFLDSLLLGEWEDRMQRGLFRYDVTACETKVIPGEYGFVAQLNEGRHLKKRPTEFRVDKVLQPFDENKFNFTKVGQEEVLFQFEASEDGQVQFFPNAPVDVDNSPSFVAINVSPIEYGHVLLIPRIFECLPQRIDRESFLLALQMAVEADNPYFRLGYNSLGAFATINHLHFQAYYLALPFPIEKAPTKRIASVNGGVKISELLKYPVRGFVFEGGEMLEDLSNVVSDACICLQNNNIPFNVLISDCGKQVYLLPQCYAEKQALGEVNAELLDTQVNPAVWEISGHMVLKRRKDYDEASEGNAWRLLAEVSLSQERFQEVNDLVFEAIGCGELEDVNVQSVKKEVDAVSTSEHPTVVVVAGSQECVVLQ

SEQ ID NO: 232561 - protein, 436 aa, Glycine max
  Clone ID: PAT_MRT3847_52027C.1.pep
MMLRIKRVPTVVSNYQKDDAADSPRPVGGCGRNCLKACCLPDAKLPLYAFKKANGKDLALHACAGEPPLTFLDSLLLGEWEDRMQRGLFRYDVTACETKVIPGEYGFVAQLNEGRHLKKRPTEFRVDKVLQPFDENKFNFTKVGQEEVLFQFEASEDGQVQFFPNAPVDVDNSPSFVAINVSPIEYGHVLLIPRIFECLPQRIDRESFLLALHMAVEADNPYFRLGYNSLGAFATINHLHFQAYYLALPFPIEKAPTKKIASLNGGVKISELLKYPVRGLVFEGGDTLEDLSNVVSDACICLQNNNIPFNVLISDCGKQVYLLPQCYAEKQALGEVDAELLDTQVNPAVWEISGHMVLKRKKDYDEASEGNAWRLLAEVSLSQERFQEVNDLIFEAIGCGELEDVNVESVKEVDAVSTSEHPTVVVAGSQECVILH

SEQ ID NO: 232562 - protein, 54 aa, Glycine max
  Clone ID: PAT_MRT3847_52028C.1.pep
CLHQGCIGLAASAAGATSSHASRTAVIISVCSFKSISRATVVTHSHQDYARSIA

SEQ ID NO: 232563 - protein, 89 aa, Glycine max
  Clone ID: PAT_MRT3847_52029C.1.pep
IDSLCVVFSGFSSGRRVSEFPCSGGCDLSWLAGFVEQADFLSTGFHFVLSCLSMQWNSITKYNDYIPKIQQAIKKYQDVSKRYINKGRP

SEQ ID NO: 232564 - protein, 99 aa, Glycine max
  unsure (1)..(99): unsure at all Xaa locations
  Clone ID: PAT_MRT3847_5202C.1.pep
MGARAVIGDSRATMAYASSLPICCQSSASSDGTSQSQSTIATPAFQTFIXASSSXIRHAFTQRRTLTELIDRSSMYRHDTLVEAYSQIRKNFDYLRVNY

SEQ ID NO: 232565 - protein, 44 aa, Glycine max
  Clone ID: PAT_MRT3847_52030C.1.pep
QKRALLDYKNLSIAAYYFAYEWLRGRKSLSALDTDFVNHSLIHS

SEQ ID NO: 232566 - protein, 53 aa, Glycine max
  Clone ID: PAT_MRT3847_52031C.1.pep
VDLLITERVFLMCMQSLILMFSLSISSQYMYHSVCPYAAWPLTYVKNVLVIHV

SEQ ID NO: 232567 - protein, 45 aa, Glycine max
  Clone ID: PAT_MRT3847_52032C.1.pep
TRSGSYMKTSDTGHLGVSCFYGYGTHTLSVGLNSRSELERFDEYS

SEQ ID NO: 232568 - protein, 119 aa, Glycine max
  Clone ID: PAT_MRT3847_52033C.1.pep
KIVKSTTEKPALKGDQVLLKVTASGLCGTDLHYNHADMGIGHEGVGIVEELGPNCTILKKGDRVGWGYEHDSCGSCQECLRGNETFCAKRVMYGFADLDQGSMAEGAVWRESFLFKIPD

SEQ ID NO: 232569 - protein, 28 aa, Glycine max
  Clone ID: PAT_MRT3847_52034C.1.pep
IKILNTCYIKINRYQRKVVVQDHLITSS

SEQ ID NO: 232570 - protein, 120 aa, Glycine max
  Clone ID: PAT_MRT3847_52035C.1.pep
LTPLTNGTLTHKCRGGEATTNYRGPWNQNQKFYFFNNRGGCLGTFHQEGSPSEIAAGGDGPMKGGSHSGSHQGTPHQYWEGPSPHNHQKPARPSGNYHIHGHTRQHPEPEFDFLRGPLSW

SEQ ID NO: 232571 - protein, 60 aa, Glycine max
  Clone ID: PAT_MRT3847_52036C.1.pep
FTLGDEKTPIEDYIQWVKRSILSLSFLCLCLWSESHERRWQCFSRFSCYLSSREGCCIHF

SEQ ID NO: 232572 - protein, 86 aa, Glycine max
  Clone ID: PAT_MRT3847_52037C.1.pep
PPPKHILAETHQENRGKVPKHIPIMDLMSSIFNCFVPSSSSQVSDYAKGSSQLKSPSSEKPKSKPKSKGAPIVVSYFPVNHYPSRL

SEQ ID NO: 232573 - protein, 89 aa, Glycine max
  unsure (1)..(89): unsure at all Xaa locations
  Clone ID: PAT_MRT3847_52038C.1.pep
DKLLKQMEAAQAQKPFYYREHLHTGKSMKVQVTKRPXAQPDRGYTWLTDINDTYQEGYRCEEICIKKEAFEGEENDXAKSLGTRTDFSI

SEQ ID NO: 232574 - protein, 133 aa, Glycine max
  Clone ID: PAT_MRT3847_52039C.1.pep
ALFFSHHPLLHGNKLLLALQSQRITSSKPNNTCAFTYPSIRCCSSLNQKNSINLKTCKNCKTQFDPSLNHPHACRFHTSHFGGETKRKFESVYEGGTMNTPDSGKVFQYWHCCGSEDPFDPGCTASPHSSYDD

SEQ ID NO: 232575 - protein, 125 aa, Glycine max
  Clone ID: PAT_MRT3847_5203C.1.pep
LSLETTRPLNTTQYNSLISRAQEEERENQKSKREKEKSGVSAHSCPAVFLGCAPPSIPLLRDPPGLAPWPVFSLLPASRCIAGMRFLVSLSPRLLASMVWGRIRLLHLQIRRGNILYFLRAYCGL

SEQ ID NO: 232576 - protein, 59 aa, Glycine max
  Clone ID: PAT_MRT3847_52040C.1.pep
FLDFQQFISLSSSSFFYYDQIPTNTKTYPSQINSLKLQVSTAPINNYNNSRPTCPHLNG

SEQ ID NO: 232577 - protein, 133 aa, Glycine max
  unsure (1)..(133): unsure at all Xaa locations
  Clone ID: PAT_MRT3847_52041C.1.pep
MATFYFFSPSLSLNTVFYTKRCXVSQTSLLSLPIPKTLLSLFTLRLTFSILTEFQNGPYSVPSHYDFDLLTIYSCNYGFLAALFSSNYNSYVPICELTFSTISFXTTLGIRXTCLIPXCVPNKLLVYSSKFSH

SEQ ID NO: 232578 - protein, 142 aa, Glycine max
  Clone ID: PAT_MRT3847_52042C.1.pep
EVLTVLEESAVVMQDILPSDASQDAPMEIAPQHTATLTVVVADDAFDQDVAGSLPMSPVNDTPENIKEFVECNTDDDQGISKGDDNQDMNDETEDLNLADGNMDDEDCQHPLNVDESDSMTGSEEDSIQEQKSTDIPVQLIS

SEQ ID NO: 232579 - protein, 53 aa, Glycine max
  Clone ID: PAT_MRT3847_52043C.1.pep
KLIKDLTLTLEVTTSAKCVASYLETMASKRVQQLGYIIFILFDIFFYLGEKLM

SEQ ID NO: 232580 - protein, 285 aa, Glycine max
  Clone ID: PAT_MRT3847_52044C.1.pep
MNDHLVLFVDRLVRPVPIPVPLAQQPPEPVTPVNEAAVAGPSGSSPSAEDDGDDDGEDAPLLQLAECRICQEEDSVSDLETPCSCSGSLKYAHRKCVQRWCNEKGDIICEICHKSYEPGYTAPPPRPQPEETTIDIGGGWTISGMPLDLRDTRLLAIAEAERQFLEAEYDEYAASNASGAAFCRSAALILMALLLLRHALSVSDGDNSDDDPSNFFSLFLLRAAGFLLPCYIMAWAISILQRRRQRQEAAALAATQVAFVLQSGQRRGLQFAIAPGSPTVPQEQV

SEQ ID NO: 232581 - protein, 65 aa, Glycine max
  Clone ID: PAT_MRT3847_52045C.1.pep
SQFQNWRDSGAHQAVNTPSHTQMERGLTRKRYNRTPKFNETKKSLDMTPRSIIDLTTANVSARTT

SEQ ID NO: 232582 - protein, 147 aa, Glycine max
  Clone ID: PAT_MRT3847_52046C.1.pep
RLLPYVKGNVGFVFTNDDLKTIRDMIVSNRVAAPARAGAIALNDVSVPAGNTGMEPGKTSFFQALGIPTKIARGTIEITAEVKLIKAGDKVGPSEATLLNVLNISPFTYGMNVAQVFQDGNIFESSVLDVTNEDLLARFMSSGSTIT

SEQ ID NO: 232583 - protein, 82 aa, Glycine max
  Clone ID: PAT_MRT3847_52047C.1.pep
GVKLREAVWSKAGAHIFSDGRLDYLRNPHLIHAHSILAICAVQDALIEIDDGYRDGGGPLGEGLAPIYPDGAYDTHALADGP

SEQ ID NO: 232584 - protein, 50 aa, Glycine max
  Clone ID: PAT_MRT3847_52048C.1.pep
VHIISIENHDNKRGGYHTSDCNTQLLYSPESKIRRVDSSDSSINSSKSQL

SEQ ID NO: 232585 - protein, 85 aa, Glycine max
  Clone ID: PAT_MRT3847_52049C.1.pep
VAVPFPFTQYTAPLAQAFPSTSKPSLAAIISCQFLPFVGLVSISLVTLLIPIFFAIKLSHYCSYWSSPRPLPFLTPPPPPPPPKQ

SEQ ID NO: 232586 - protein, 95 aa, Glycine max
  Clone ID: PAT_MRT3847_5204C.1.pep
DPVHASTEHTGASIMLRHDQVHAEVTIGIKVFLEAPSDFARIKVERTNIYLTNHTTIITNSLGDLPFTRTFTLEPLYVQQSNALLTTLHSLKVSH

SEQ ID NO: 232587 - protein, 60 aa, Glycine max
  Clone ID: PAT_MRT3847_52050C.1.pep
SFVPHTELHVNCIFLAIHGSGPMNTRRLTMIGSAAMSLQHMTSITMARPLQLYNNWYGKT

SEQ ID NO: 232588 - protein, 437 aa, Glycine max
  Clone ID: PAT_MRT3847_52051C.1.pep
MDPTKKRKLDENGFINNDSSEPLKLSPSEARKLIERFTTDQLLDILQDTVARHPDVLAAVRAVSDPDVSQRKLFIRGLGWDTTTDGLRSLFSTYGDLEEAVVILDKATGKSKGYGFVTFRHVDGALLALREPSKRIDGRVTVTQLAAAGNSALNANAVDVALRKIYVANVPPDLPADKLLAHFSVYGEIEEGPLGFDKQTGKSKGFALFVYKSPEGAKAALIDPMKTVEGRQLSCKLAITDGKQGKRSGPDSGQAHHGNVQHGHGDGVGAGMGIPPNSGSGSGPGQYGGPGHYGPTVGMGSYGGFGGQPPMGNNNHPLNSSNPVPGSMAGAGGYGGGMGGPYGGYGGGPGSTGFAGAGGMGAGGGGVGGGGLGGAGGGSMYRLPGSGGMPAGGGGYPDSGHYGLSASSGYQNQHHPPSGASPVPRVPPMYPNVPPYY

SEQ ID NO: 232589 - protein, 80 aa, Glycine max
  Clone ID: PAT_MRT3847_52052C.1.pep
IFMRVFCWSKMSYPLKRKMREIPRRTSWSNALSNETLGQTLANPLRVHPWTSIVISFSSRRELFFLSSHSMRLIKGPRVF

SEQ ID NO: 232590 - protein, 191 aa, Glycine max
  Clone ID: PAT_MRT3847_52053C.1.pep
MYTSRKKIHKDKDAEPTEFEESVGQALFDLENTNQELKSDLKDLYINSALQVDVSGNRKAVVIHVPYRLRKGFRKIHVRLVRELEKKFSGKDVILVATRRILRPPKKGSAAQRPRSRTLTAVHEAMLEDVVLPAEIVGKRVRYQIDGSKIMKVYLDPKERNNTEYKLETFAAVYRKLSGKDVVFEYPVSES

SEQ ID NO: 232591 - protein, 103 aa, Glycine max
  Clone ID: PAT_MRT3847_52054C.1.pep
TCWHVILVATRRILRPPKKGSAAQRPRSRTLTAVHEAMLEDVVLPAEIVGKRVRFRIDGSKIMKVYLDPKERNNTEYKLETFAAVYRKLSGKDVVFEYPVSEA

SEQ ID NO: 232592 - protein, 191 aa, Glycine max
  Clone ID: PAT_MRT3847_52055C.1.pep
MYTSRKKIHKDKDAEPTEFEESVGQALFDLENTNQELKSDLKDLYINSAVQVDVSGNRKAVVIHVPYRLRKGFRKIHVRLVRELEKKFSGKDVILVATRRILRPPKKGSAAQRPRSRTLTAVHEAMLEDVVLPAEIVGKRVRYQIDGSKIMKVYLDPKERNNTEYKLETFAAVYRKLSGKDVVFEYPVSES

SEQ ID NO: 232593 - protein, 191 aa, Glycine max
  Clone ID: PAT_MRT3847_52056C.1.pep
MYTSRKKIHKDKDAEPTEFEESVGQALFDLENTNQELKSDLKDLYINSAVQVDVSGNRKAVVIHVPYRLRKGFRKIHVRLVRELEKKFSGKDVILVATRRILRPPKKGSAAQRPRSRTLTAVHEAMLEDVVLPAEIVGKRVRFRIDGSKIMKVYLDPKERNNTEYKLETFAAVYRKLSGKDVVFEYPVSEA

SEQ ID NO: 232594 - protein, 68 aa, Glycine max
  Clone ID: PAT_MRT3847_52057C.1.pep
STKPQQSIHQKPESTLNQNNKTSQLLQKLKFNAVPAQLQCFNIEQNKKRLKPLNRQEGFQYSKTFYIQ

SEQ ID NO: 232595 - protein, 40 aa, Glycine max
  Clone ID: PAT_MRT3847_52058C.1.pep
VIVVVLLRWVSKLIELCPRLRMGEGSSFHFISSRSTQSIF

SEQ ID NO: 232596 - protein, 57 aa, Glycine max
  Clone ID: PAT_MRT3847_52059C.1.pep
MELLIHKLNPTKVVALSIRQTINAKTLLPNSSRDPIAYQRRDKISICKSHHVTQCYP

SEQ ID NO: 232597 - protein, 98 aa, Glycine max
  unsure (1)..(98): unsure at all Xaa locations
  Clone ID: PAT_MRT3847_5205C.1.pep
RSRVRPRVLTGVAGVFRAFNIXXAGIIGWHGLYLALSDSAIPVDRTGSLNDSFIAKHSVDWLXTKGACLVSYPMDTLMXRKMMTSADAGMDKSNGRPS

SEQ ID NO: 232598 - protein, 70 aa, Glycine max
  unsure (1)..(70): unsure at all Xaa locations
  Clone ID: PAT_MRT3847_52060C.1.pep
YLILFXXXITXIFIFXFCCFPSLYQLXXTCCLLGESECVGAKGESISCSPPHWYFPGGGPPPXXPPPPPP

SEQ ID NO: 232599 - protein, 95 aa, Glycine max
  Clone ID: PAT_MRT3847_52061C.1.pep
LCTLNSEKSSNCKKNTDLEQFVGCSKSTRNSTHITHTHKFVACESLREFEISGVRMVLVLVRGAVVDFGSSGVRVELALVRAACCSSHFDSKNRV

SEQ ID NO: 232600 - protein, 65 aa, Glycine max
  Clone ID: PAT_MRT3847_52062C.1.pep
FPVLHLWQSCILQHMRDMPLPLLLPLRYLFLLVPFLSLSFVAVYKVLSYPYPFMHKLGCYFWPPP

SEQ ID NO: 232601 - protein, 105 aa, Glycine max
  Clone ID: PAT_MRT3847_52063C.1.pep
GTLTHARQSLLLASQDNHSIAIQVDYPLDQARETAVESFSQILRLLRLVNRSRLKHIQTVIKADLLWSTTMTLRESGSTRDDRGSRDRDSSLQPCQWQYAHEDID

SEQ ID NO: 232602 - protein, 245 aa, Glycine max
  unsure (1)..(245): unsure at all Xaa locations
  Clone ID: PAT_MRT3847_52064C.1.pep
MALSLLIHCSPTVNPLRRSPKPTLRRVNHRVCVASAATPLLQVNDLRAKIVESNVDILHGVNLTVNQGEVHAIMGKNGSGKSTFAKVLVGHPDYEVTGGSVVFKGENLLEMEPEERSLAGLFMSFQSPVEIPGVSNDLFLAMAYNARMKKLGREEVGPIEFLPYLMEKLQLVNMKADFLNRNVNQGFSGGERMRNEILQLLMLWADLAILDEIDSAQNIHAXMISHYRRILDLLNPTHVHVMDKV

SEQ ID NO: 232603 - protein, 51 aa, Glycine max
  Clone ID: PAT_MRT3847_52065C.1.pep
TLCDSDSIHYYTFPEMLLQIGFNERVPITQEFFIETVAVKHNDHIPSVLFP

SEQ ID NO: 232604 - protein, 45 aa, Glycine max
  Clone ID: PAT_MRT3847_52066C.1.pep
GGKKFQGWKGLWITKITFLLISPNTFPNFDHFIEYTHRFFKLFID

SEQ ID NO: 232605 - protein, 133 aa, Glycine max
  Clone ID: PAT_MRT3847_52067C.1.pep
MASDAKLSSSESLNGLKFGQKIYFEDVGLATPATSLTSSSSSSSAATVTSSSSSRKGRGGSVQPAQPPRCQVEGCKVDLSDAKAYYSRHKVCGMHSKSPSVIVAGLQQRFCQQCSRFHQLPEFDQGKRSCRRR

SEQ ID NO: 232606 - protein, 77 aa, Glycine max
  Clone ID: PAT_MRT3847_52068C.1.pep
KGRRLEMILYNSLILFFLFLMILSIGTYNFRRLFLSILILLTLYLVSHDYINFLCHLTFVISILKPIYYLLYINNSY

SEQ ID NO: 232607 - protein, 186 aa, Glycine max
  Clone ID: PAT_MRT3847_52069C.1.pep
TRAESARANGVFRALVPHPPSTPMPDITVDFRAPPPSPVASGRSSTVTNDDVLTEFLEASLRVPDLVLPDKIFPKQNHLEAPPEVDFVSLCFHCDDALRDIVSDSLARIGCFQLLNHGIPLQLMTAVAEAAAGIFQVPPANRVSATRSPEKPWGFEEYHAGEEESDGSEEFVWCNDHELKSKMDGI

SEQ ID NO: 232608 - protein, 295 aa, Glycine max
  Clone ID: PAT_MRT3847_5206C.1.pep
MGYICDFCGDQRSMVYCRSDAACLCLSCDRNVHSANALSKRHSRTLLCERCNSQPAFVRCVEEKISLCQNCDWLGHGTSTSSSTQAREAINCYSGCPSAAELSSIWSFVLEIAAISESTCEQELGLMSINENKCVGVPPEDQNVSGSDEVTDLPALNKSLVGASLMPESSSEPCILDQPAGPTNECLPKLYCPATKCPALSEDDNLYDDFNMDEVDLDLENYEELFGMALSHSEELFENGGIDSLFGTKGMSAGDSNCQEAIAAEVLNSSYLLSVIIMAFFTNGASHVMFCILHR

SEQ ID NO: 232609 - protein, 62 aa, Glycine max
  Clone ID: PAT_MRT3847_52070C.1.pep
IHALYFEADSKIWWMVNYTGRNYCSNNNDHLCNNVIDQESNQVLGISQIHCILHCIYVKTYI

SEQ ID NO: 232610 - protein, 66 aa, Glycine max
  Clone ID: PAT_MRT3847_52071C.1.pep
VKLPINLNKNLGRKKIFSDHHQQRSSRNFLITTRSPYPQFINRSFYNSNKSINHKRKDKPRVFIVF

SEQ ID NO: 232611 - protein, 49 aa, Glycine max
  Clone ID: PAT_MRT3847_52072C.1.pep
TAPHSLHSRFNEFVLLSPFYTKEISKPHFQKSCRSIHISTSSHHPFLIR

SEQ ID NO: 232612 - protein, 70 aa, Glycine max
  Clone ID: PAT_MRT3847_52073C.1.pep
FSQYSLSSPYLGVNATKISNYFERKHVSLETKSNIRQTCCMPQITIQSLILYLAKPPTPTHTKKGESHLN

SEQ ID NO: 232613 - protein, 44 aa, Glycine max
  Clone ID: PAT_MRT3847_52074C.1.pep
MTNASLESNRTFRGQHIRFAQAKRFSSFSIAVVRITPPVPGRVG

SEQ ID NO: 232614 - protein, 69 aa, Glycine max
  Clone ID: PAT_MRT3847_52075C.1.pep
NNHLGTTKPSPPFATYASGRLAKTTIPFLIVVSPQNHRNQSHRRWLGPPATSSLLTPRLISLSVWRQRF

SEQ ID NO: 232615 - protein, 31 aa, Glycine max
  Clone ID: PAT_MRT3847_52076C.1.pep
SLIITSRIRLIHHCLVLRKSKKTFVDCYPFL

SEQ ID NO: 232616 - protein, 158 aa, Glycine max
  Clone ID: PAT_MRT3847_52077C.1.pep
MNSLSMALLHPNLLPTFNSNTLTFPSIKLKPSLSHVPSPTPTRFSLSVSAAETTAFAAPPTPQPEKLGVVVKPTEKPRLVLKFIWMEKNIGIALDQMVPGHGTIPLSPYYFWPRKDAWEELKELLENKPWISQKQMIILLNQATDIINLWQQSGGNLS

SEQ ID NO: 232617 - protein, 64 aa, Glycine max
  Clone ID: PAT_MRT3847_52078C.1.pep
YIYSTALWQFMEWNPNFVKENLCSIGRNLIEEIAGSSLIFTWATSNATKEDSMDYGGCIDGNKK

SEQ ID NO: 232618 - protein, 75 aa, Glycine max
  unsure (1)..(75): unsure at all Xaa locations
  Clone ID: PAT_MRT3847_52079C.1.pep
SEQSSSYDDNEYSNPCCDLSMARXPVPPQCNCEDIRLNSSHSTCKICMGSRSHPRQCSFVVSTAFCFEPCQSSDG

SEQ ID NO: 232619 - protein, 116 aa, Glycine max
  unsure (1)..(116): unsure at all Xaa locations
  Clone ID: PAT_MRT3847_5207C.1.pep
MGYICDFCGDQRSMVYCRSDAACLCLSCDRNVHSANALSKRHSRTLLCERCNSQPAFVRCVEEKISLCQNCDWLGHGTSTSSSHXKRQAINCYSGCPSAAELSSIWSFCVRNRCHK

SEQ ID NO: 232620 - protein, 56 aa, Glycine max
  Clone ID: PAT_MRT3847_52080C.1.pep
LLVDLGSAQLIPRCPTLVAASKLVSEVTTDSGLASVEIDTAQIPRMNVSGAVVQKI

SEQ ID NO: 232621 - protein, 161 aa, Glycine max
  Clone ID: PAT_MRT3847_52081C.1.pep
MPFESSAKSSQSPPAEGDKHKHLDREIREMVSAITHRVTDFHKAGSTHHLEKEHEDDTRIITLTGTNDGATLRSELDEKSGKTSHGESEELSTFVNSNFQAINNSIMFGGSYQANDPGVHLDISDFTDDQPPQSQKHKVEKLGKKGKKEKEGSLSDHQFGF

SEQ ID NO: 232622 - protein, 77 aa, Glycine max
  Clone ID: PAT_MRT3847_52082C.1.pep
PPGNFFGTKFKGLGAKEFFPQNGPPKFYPGLKKPRFFFKMGPFPPGIFRGLNVPPREGVLFFGGFPPRFLWGPPPFF

SEQ ID NO: 232623 - protein, 265 aa, Glycine max
  unsure (1)..(265): unsure at all Xaa locations
  Clone ID: PAT_MRT3847_52083C.1.pep
MAHSNNSCSLSETEYEMVKHIIDIPDLEELRLSECSIYKVPYNLRKVNEEAYTPQWISIGPIHLDKQELNPMQEHKKRYFHCFWERVSNEQAMRNFKHHLETKEDHIRHCYADKFPDIPKEKFVDMLLLDAVFIMELLLRNCEWKSNSFKHEHEYKHTKSFRVRHSDDLILTQSWLSRNITRDMILIENQIPFFVLQKLYDECXSLVTTRRRNTLQGLVDLAIEYFAFYDTQMSSSDETKRVLDKNQSRTTSVALFEVQEPLHKS

SEQ ID NO: 232624 - protein, 141 aa, Glycine max
  Clone ID: PAT_MRT3847_52084C.1.pep
MTHANNTSGASLSETEYEMVKHIIDIPDLEELRLSECSIYKVPYNLRKVNEEAYTPQWISIGPIHLNKQELKPMQEHKKRYFHCFWERVSNEQAMKSFKRHLEMKEDHIRRCYADKFSYIPKEKFVDMMLVDAVFIMELLL

SEQ ID NO: 232625 - protein, 114 aa, Glycine max
  unsure (1)..(114): unsure at all Xaa locations
  Clone ID: PAT_MRT3847_52085C.1.pep
VQAHMETHVTKSPLDDVETPNGSMWHLQISQSKIALTKNTVGGTILRRDLLANFLTXEGNFRASVDLQRTHRIKPMIKLVATIRIPENTSISLACAMNSSFMEHANSDINTICS

SEQ ID NO: 232626 - protein, 94 aa, Glycine max
  unsure (1)..(94): unsure at all Xaa locations
  Clone ID: PAT_MRT3847_52086C.1.pep
WLERTTFYVFAENRIKSWFXADYGMFRFCIVYTELGWRKGSEQNKPIENWLAXTVDRQKQPWMLFLAHRVLGYSFAGFYAALGSLVEPMSREEL

SEQ ID NO: 232627 - protein, 140 aa, Glycine max
  Clone ID: PAT_MRT3847_52087C.1.pep
REEDAVRFVELYTGQTITFGKIQKQIKCELLNVQSSSSLKLSKNLSAAPQLVAAAFEEDSNEDSNLDGSARSSWDETNSSDDLDDLDYQMNGEEQEDDEDNQESVTALGVDHDDNVEMRIDPENISHLWKLVDRNGHSPV

SEQ ID NO: 232628 - protein, 68 aa, Glycine max
  Clone ID: PAT_MRT3847_52088C.1.pep
TSLIDCSYTPRTWHQQPPPPPSASATQLQPRKVSWLVCMCCCCWQCSTEQITAVARVRIRTRGKPDFA

SEQ ID NO: 232629 - protein, 104 aa, Glycine max
  Clone ID: PAT_MRT3847_52089C.1.pep
TAVALSCAATASCCSYLFHLHRRSLRRRERCLTSKQIWRHSRGRRRTLYFLLLKGLTAFLREVYAFFLYFLLFGLTRRRRLFSAGGPSFPDIRFRGHFFAREEG

SEQ ID NO: 232630 - protein, 56 aa, Glycine max
  Clone ID: PAT_MRT3847_5208C.1.pep
PDPVHAASVTYVATRTAAGGYSADINPHHDTTNAYGADTGRPHSSGGYDGDTNKHH

SEQ ID NO: 232631 - protein, 224 aa, Glycine max
  Clone ID: PAT_MRT3847_52090C.1.pep
KLGIRLERRQKGEEENRKREGEKVLFAVENTQNIGSALKNLHLNCKATELLKLEEEKTKLQAEMKISLEKLGVIRKELGNLNKKEANVESQIQAVQLEIKQRLRNTEEKELALQRVMKEKGMLLEFRDNGMLEIEHMIIELQQYVFDYDLKEAEINILGEELQIDLIRAEELQTARIIAANNKNNVLSSISYSGMFGKLKEEMQNLRATIFDTKLLLEGISHAT

SEQ ID NO: 232632 - protein, 41 aa, Glycine max
  Clone ID: PAT_MRT3847_52091C.1.pep
KRIIINSEVTKILLRRRAMPSIDSDSPMMILHCDAGYILED

SEQ ID NO: 232633 - protein, 49 aa, Glycine max
  Clone ID: PAT_MRT3847_52092C.1.pep
KPGMFTINLALKRGANRSLKAAANGPSGRKHPAFPWEGAKPLKFIKPQA

SEQ ID NO: 232634 - protein, 93 aa, Glycine max
  Clone ID: PAT_MRT3847_52093C.1.pep
GNPFLGDSPVPQKQGVGVCFKGGGKKEKNTGNSRFQRGKAPEVFICPVDIMIKPIRVSFSGPPFVGRLKNPFLRGCKKKKIFFLCPPWEGLKK

SEQ ID NO: 232635 - protein, 84 aa, Glycine max
  Clone ID: PAT_MRT3847_52094C.1.pep
LELIPLFSIFIAWDLPSLALNNISSFRFMPVVDTISIQGQFNLTLLCHYRHFQVGQINASAREEKMELLTISKFNRSIGGEQKG

SEQ ID NO: 232636 - protein, 72 aa, Glycine max
  Clone ID: PAT_MRT3847_52095C.1.pep
LVATLAVAPAAAAVTAGVTLYAIQHASQEPSLESPLNSPMAMCVASSVGTMMCFETCSLSFTLCVRFAGQWP

SEQ ID NO: 232637 - protein, 28 aa, Glycine max
  Clone ID: PAT_MRT3847_52096C.1.pep
ITKSTKAEERVVEAMVLENACSIEEKIK

SEQ ID NO: 232638 - protein, 120 aa, Glycine max
  Clone ID: PAT_MRT3847_52097C.1.pep
EILCSAIGFFNSPEYLVGYWASLNKLKFDLGNLRFGERFMFLDLSCKCVFGKVPNSVDGLEKLNVSYNHVCGQSSKNKFSACAFVGNDCLCGFPLLTLQHSICVFSFVADDFKCLISLYC

SEQ ID NO: 232639 - protein, 47 aa, Glycine max
  Clone ID: PAT_MRT3847_52098C.1.pep
ATVLAVPIPRAQIEFPCLYHSVRCVQIECMTCLESQTHWTKHVMLRC

SEQ ID NO: 232640 - protein, 54 aa, Glycine max
  Clone ID: PAT_MRT3847_52099C.1.pep
EISQFYFMLFSVYFVLGQSIVIGPSDIERLFLNSSLGIRGRRFCYAIHYSELLF

SEQ ID NO: 232641 - protein, 84 aa, Glycine max
  Clone ID: PAT_MRT3847_5209C.1.pep
QNPVLMAFGEVNIVELRDPVAVVNHEPPPHVPTTKPENGPYCQPNGFGNVEVDRKSALNEGQNSNATLGKNNFDLESSCTQTSL

SEQ ID NO: 232642 - protein, 122 aa, Glycine max
  unsure (1)..(122): unsure at all Xaa locations
  Clone ID: PAT_MRT3847_520C.1.pep
PFTYGYEYNTTVSQTQADMSQSVSSPSSIEVAVVPDGNTMSEISNCSYSKVAPVTETVQFXIADKDAGVLRYREMMKNLKFEKTIRYASRLAYAETRLXMRGRFANRTVADPLAGYGVDAWG

SEQ ID NO: 232643 - protein, 134 aa, Glycine max
  Clone ID: PAT_MRT3847_52100C.1.pep
FVLSSDASLHSTEDTRGKPYSTFEAADAEKELDMLLDSFGETNILDSSGFKSNTSIPVSSGVASVYPPHISNKDPVPSKTAPITASLDDVLDDLLEGTSTLTNPNVLLRPQEEKPVHHSMQSSSNSGSKSKVAD

SEQ ID NO: 232644 - protein, 299 aa, Glycine max
  Clone ID: PAT_MRT3847_52101C.1.pep
IRLEEIAVKTLSRSSWQGVTEFINEVKLIAKLQHRNLVKLLGCCIQGQEKMLIYEYMANGSLDSFIFDDKKRKLLKWPQQFHIICGIARGLMYLHQDSRLRIIHRDLKASNVLLDENSSPKISDFGMARTFGGDQFEGNTSRVVGTCGYMAPEYAVDGSFSVKSDVFSFGILVLEIVCGKRNKGLYQTDKSLNLVGHAWTLWKEGRALDLIDDSNMKESCVISEVLRCIHVGLLCVQQYPEDRPTMASVILMLESHMELVEPKEHGFISRNFLGEGDLRSNRKDTSSSNDVTITLLEAR

SEQ ID NO: 232645 - protein, 54 aa, Glycine max
  Clone ID: PAT_MRT3847_52102C.1.pep
DIPKLLLLLTDVARGFYRSGSYYLTLYLGEIKKLFPPLFPMGFVMLVLIRVLES

SEQ ID NO: 232646 - protein, 318 aa, Glycine max
  Clone ID: PAT_MRT3847_52103C.1.pep
ARGLTSGGQLGDKEFLVEVEMLSRLHHRNLVKLVGYFINRDSSQNLLCYELVPNGSLEAWLHGPTAARRPLDWDTRMKIALDAARGLSYLHEDSQPCVIHRDFKASNILLENNFHAKVADFGLAKQAPEGRSNYLSTRVMGTFGYVAPEYAMTGHLLVKSDVYSYGVVLLELLTGRKPVDMSQPTGQENLVTWARPILRDKDRLEEIADPRLGGKYPKEDFVRVCTIAAACVALEANQRPTMGEVVQSLKMVQRVTEYQDSVLASSNARPNLRQSSSTFEFDGTSSMFSSGPYSGLSAFDNDNISRTVVFSEDLCEGR

SEQ ID NO: 232647 - protein, 76 aa, Glycine max
  Clone ID: PAT_MRT3847_52104C.1.pep
IWCIQYGSWFGRDAWLRLPRFPPSVGKSWVATWHYLYRLKIIQSWGNIKSFSDFRMKSLAYLELRPISTRIGILPP

SEQ ID NO: 232648 - protein, 153 aa, Glycine max
  unsure (1)..(153): unsure at all Xaa locations
  Clone ID: PAT_MRT3847_52105C.1.pep
GVVLLELXTGRKPVYMSQPTGQEYHVTWARPILRDKERLEEIADPRLGGEYPKEDFVRVCTIAAACVAPEANQRPTMGEVVQSLKMVQRVTEYHDSVLASSNARPNLRQSSSTFEFDGTSSMFSSGPYSGLSAFDNDNISRTVVFSEDLCEGR

SEQ ID NO: 232649 - protein, 48 aa, Glycine max
  Clone ID: PAT_MRT3847_52106C.1.pep
TGTHTTPGLEHKREPYLSRTQTHPLKRDNKPETEMWGIIHFLSPPNYF

SEQ ID NO: 232650 - protein, 43 aa, Glycine max
  Clone ID: PAT_MRT3847_52107C.1.pep
ITRDPAIFKWTLHLSCLNDVLWDNNRGEDTVATLRYSFCDRGY

SEQ ID NO: 232651 - protein, 285 aa, Glycine max
  Clone ID: PAT_MRT3847_52108C.1.pep
MDTKPTEISSGKMFGGYNKRFKHFSLTLGCSMNFHIYFPPSPSPSHKFPVLYFLSGLTCTDENFIFKSGAQRAASAEGVALVAPDTSPRGLNVEGEADSWDLGVGAGFYLNATQEKWKNWRMYDYVVKELPKLLSDNFPQLEISKASIFGHSMGGHGALTIFLKNQDKYKSVSAFAPIANPINCPWGQKAFSNYLGDNKSEWEDYDATRLVTKFPNVSSTILIDQGEDDKFLPDQLLPHKFEEACKKANVPLLLRFQPGYDHLYYFIATFIDDHIRHHAQALRLN

SEQ ID NO: 232652 - protein, 108 aa, Glycine max
  Clone ID: PAT_MRT3847_52109C.1.pep
PSNMLQYTIVTIGSLSSINELPLEIKSKILFPPKVFQNGIYLQLKPKSIDHFHKFGTDAFIHFTHTLAHWPLNGQKKQANKTRMFKKIILTNFKRKSKNYRKKKNKMG

SEQ ID NO: 232653 - protein, 102 aa, Glycine max
  unsure (1)..(102): unsure at all Xaa locations
  Clone ID: PAT_MRT3847_5210C.1.pep
AEGGPNRKARGHESSGPTKPGDFAIGGKLATINNMCAYGLNPGISGPRLLGTIPQSNSQQTVWNQMATVRTPPKFEPSKQSFXQTSNDPPGGGNLGDKTGEW

SEQ ID NO: 232654 - protein, 48 aa, Glycine max
  unsure (1)..(48): unsure at all Xaa locations
  Clone ID: PAT_MRT3847_52110C.1.pep
LYILNRNIYIYSTYNNNLCNTIILHYIYAELYTITLYSIHILXSHNIY

SEQ ID NO: 232655 - protein, 64 aa, Glycine max
  Clone ID: PAT_MRT3847_52111C.1.pep
LYDRGGNFLDPNTRGAMTIPCFLKEARKHTFTTLEPKARYLSFKGRFQNWFLLALSLENLGWKC

SEQ ID NO: 232656 - protein, 122 aa, Glycine max
  Clone ID: PAT_MRT3847_52112C.1.pep
YSRLSPFYLYKYYHNIIMFYTSILIKNNFTLKKSTIQRAHRATFCTKCLIKNRLLYPSRGHNISEGTANFFQTCSRENRNLVKFCIHCLLSKTTMVIQWANSHAGYYRSTISLPEKFRPNTI

SEQ ID NO: 232657 - protein, 197 aa, Glycine max
  unsure (1)..(197): unsure at all Xaa locations
  Clone ID: PAT_MRT3847_52113C.1.pep
MLASPRAAATVTTQPQESWESMLPGPPSRNNFGSADLSPHGLMAFPSGSSISIVDTRSMQLLSSFPIPPPPSSAAPFVTALRWSPLPLSRHLLSSEPSSNHLLLAAADRQGRIALLDFRLKSALLWFDTDSKQGVQDLCWAQARPDSYLLAAINGPSTLSLYNAATGRCVWKYDASPEYFSCIRPRXPFDSRRICAV

SEQ ID NO: 232658 - protein, 44 aa, Glycine max
  Clone ID: PAT_MRT3847_52114C.1.pep
LFYYRMGHKAGRRCLVSVPHSLLLVFLYSQVELLILKECLINPL

SEQ ID NO: 232659 - protein, 329 aa, Glycine max
  unsure (1)..(329): unsure at all Xaa locations
  Clone ID: PAT_MRT3847_52115C.1.pep
GSRHVERGTTADCWARLYDCWSAVDDIGSLSVIYQMLESDAAKGILYFRQSLLLLRLNCPEAAMRSLLLARQHASSEHERLVYEGWILYDTGHYEEGLRKAEESINIKRSFEAFFLIAYALADSSIDPSCSPTIIPTLEEALKSLHHNLRKGLSINILETXILSGEGGYIRSASCISALILSRTXGWTAIRNRKSLRNDKAAAYMEMTELIKKAKNNASAYEKRSEYCDREQAKEDLEMVTRLDPLRVYPYRYRAAVLMDDHKEEEAIAELSRAIAFKADLHLLHLRAAFHEHKEDVLGALRDCRAALSVDPNHQEMLELHSRVNRHEP

SEQ ID NO: 232660 - protein, 47 aa, Glycine max
  Clone ID: PAT_MRT3847_52116C.1.pep
VCRYVNSNKLIVCSFIVSPSRGFEKYTPLERLWIWQKLVQIKKGKAF

SEQ ID NO: 232661 - protein, 245 aa, Glycine max
  Clone ID: PAT_MRT3847_52117C.1.pep
DPHLALVRSILRFNLSLFALSANRTFHLQRDQQPTRPPTRPYGCEKTTEGGTFHLQRDPQAEGEMGLTFTKLFSRLFAKKEMRILMVGLDAAGKTTILYKLKLGEIVTTIPTIGFNVETVEYKNISFTVWDVGGQDKIRPLWRHYFQNTQGLIFVVDSNDRDRVVEARDELHRMLNEDELRDAVLLVFANKQDLPNAMNAAEITDKLGLHSLRQRHWYIQSTCATSGEGLYEGLDWLSNNIANKA

SEQ ID NO: 232662 - protein, 41 aa, Glycine max
  Clone ID: PAT_MRT3847_52118C.1.pep
MASEKAHINIGACGHVDPDEASTINELKKPDVDNEASHHTI

SEQ ID NO: 232663 - protein, 128 aa, Glycine max
  Clone ID: PAT_MRT3847_52119C.1.pep
EPQLGFVAHTDKSFTTILHQNHVNALMVETTNGNWIDVDFSSPTSFVVMAGDALMAWSNDRIKSPNHMVMMNGNETRYSLGLFAFYRGILKVPEELIDEEHPLQYKPFDHLALLNFTYSANMKAYCGV

SEQ ID NO: 232664 - protein, 28 aa, Glycine max
  Clone ID: PAT_MRT3847_5211C.1.pep
SRLVFYMSSKSFAHTIVDSTVMSLPVFL

SEQ ID NO: 232665 - protein, 126 aa, Glycine max
  Clone ID: PAT_MRT3847_52120C.1.pep
LPFRGGEPPPLKNLCPLGAAGPQFLGRLRPQGGGHYCWIGLSPPLLWKGEKKGRLFFRNNWQEKKGGFSLSPIVKEQIMAPPLAKGGWGSFSPPQKDYRGFLYSPLTKGGGKFFLGPNFRIRWLKV

SEQ ID NO: 232666 - protein, 223 aa, Glycine max
  Clone ID: PAT_MRT3847_52121C.1.pep
PTRPPTRPPTRPAKHPSFQFLSVSAFCNRTFHLQRDPQAEGEMGLTFTKLFSRLFAKKEMRILMVGLDAAGKTTILYKLKLGEIVTTIPTIGFNVETVEYKNISFTVWDVGGQDKIRPLWRHYFQNTQGLIFVVDSNDRDRVVEARDELHRMLNEDDLGAAVLLVFANKQDLPNAMNAAEITDKLGLHSLRQRHWYIQSTCATSGEGLYEGLDWLSNNIANKA

SEQ ID NO: 232667 - protein, 178 aa, Glycine max
  unsure (1)..(178): unsure at all Xaa locations
  Clone ID: PAT_MRT3847_52122C.1.pep
MGLTFTKLFSRLFAKKEMRILMVGLDAAGKTTILYKLKLGEIVTTIPTIGFNGLVFHSLNIEPDGRNCGXRLSVREPRPVSELFCIIMTICGXSNGDRVVEAELPRMLNEDEXRDAVLLVFANKQDFPNAMNAAEITDKLGFHSLRQRHWYIQSTCATSGEGLYEGLDWLSNNIANKA

SEQ ID NO: 232668 - protein, 258 aa, Glycine max
  Clone ID: PAT_MRT3847_52123C.1.pep
MANAIIMPGFLLRPTTQTTPFRLPNHTHSFHSPRCSLSLTPQSAKAFAVPRRKALSLILSSYFLSEAGLALAQQSPVFREYIDAFDGYSFQYPGSWIQVRGAGADIFFRDPFVLDENLSLEISSPSSSQYKSVEDLGPPQEAGKKVLKQYLTEFMSTRLGVRRESNILSTSSRVADDGRLYYQVEVNIKSYANNNELAVMPEARVVRLEWDRRYLSVLGVENNQLYELRLQVPENVFSEEENDLRRIMDSFRVNKIAA

SEQ ID NO: 232669 - protein, 248 aa, Glycine max
  unsure (1)..(248): unsure at all Xaa locations
  Clone ID: PAT_MRT3847_52124C.1.pep
VIFLSKKKEINNPLSLFFFTLSLSLSTLSTFPVSPLVQSILRFNFSLSALSAIEPFISKGIHRPKGEMGLTFTKLFSRLFAKKEMRILMVGLDAAGKTTILYKLKLGEIVTTIPTIGFNVETVEYKNISFTVWDVGGQDKIRPLWRHYFQNTQGLIFVVDSNDRDRXVEARDELHRMLNEDELRDAVLLVFANKQDLPNAMNAAEITDKLGLHSLRQRHWYIQSTCATSGEGLYEGLDWLSNNIANKA

SEQ ID NO: 232670 - protein, 48 aa, Glycine max
  Clone ID: PAT_MRT3847_52125C.1.pep
ALDSSLYSSLYRNGKAINLLSQTKNTQFLKTIIYKISKINPCLAQVDN

SEQ ID NO: 232671 - protein, 128 aa, Glycine max
  unsure (1)..(128): unsure at all Xaa locations
  Clone ID: PAT_MRT3847_52126C.1.pep
DPRKGLLISHLLGSQEPEIPAHMVCPLAVSGPFCGCRACPLPCPCGRCGPFRSPSCXLLPSIRGCLLAALQSCCPSPSHAVLAFFAFGFCSRPSASWSFVRGASCLVSLGLPPALPXALVVSRSFVLA

SEQ ID NO: 232672 - protein, 110 aa, Glycine max
  Clone ID: PAT_MRT3847_52127C.1.pep
LVDAIRVMDLMEENGVQPNEVTYGGMIEAYCKGRKPGEAVNLLEDMVTKGFVPSSVLCCKVVDLLCEEGSVERACEVWRGLVRKGWRVCGAVLSTIGHWLCKEGNGVEAK

SEQ ID NO: 232673 - protein, 29 aa, Glycine max
  Clone ID: PAT_MRT3847_52128C.1.pep
KKVPPFFSPCFRVIVWVTYKTSFRGLLGF

SEQ ID NO: 232674 - protein, 81 aa, Glycine max
  Clone ID: PAT_MRT3847_52129C.1.pep
SRKFEFCSSYVLIDLHSLVFFFYFFFFFFFLFFFCDKNQMCKSLVNKKCLIRSVQECTLKQTPPLQFTISTKTKWWAHHEP

SEQ ID NO: 232675 - protein, 299 aa, Glycine max
  unsure (1)..(299): unsure at all Xaa locations
  Clone ID: PAT_MRT3847_5212C.1.pep
MAEVLTKASLVSSSSSSWHGVGQRHHRRVSTVSNTCSFGSGVGKFSSLKMKSQVLRSWSSSSEFQGIKLVFHVNRGLPNRVNSRLRASTGAQMSFRLGKVQKWWEKGLQPNMKEVTSAQDFVDSLLSAGDKLVVVDFFSPGCGGCKALHPKICQFAEMNPDVQFLQVNYEEHKSXCSISCTNATIKKFKDALAKHTPDRCSLGPTIGLEEKKDALAKHTPDRCSLGPPKGLEXEKELLALGQHKDLSFTYSPRTLQPAHADEELGTEPAPAPGSKSLPLPSMILNSEVSKKRTLTTSGR

SEQ ID NO: 232676 - protein, 119 aa, Glycine max
  Clone ID: PAT_MRT3847_52130C.1.pep
SKKGFRFGFSQHHHQSGGARKQVLMATVASSMVASSSPSSQPFCSFSNPNSSSSSLSFKTKAITRTRPRTKTRTRTTRVTWLNPHPRGALGEATPPPTRSPPFPKDGSIKGLALPQKPR

SEQ ID NO: 232677 - protein, 106 aa, Glycine max
  Clone ID: PAT_MRT3847_52131C.1.pep
SCGGSKARALVFFFFFFFFFFFFFFFFFFFFFFWGRKKKKKGGKKKRGKGKKGREKKKGQTKRGGEQTKRKKTKKKKRPKKKKKKKRQKKSGGGGGGGNRPKKEPA

SEQ ID NO: 232678 - protein, 197 aa, Glycine max
  unsure (1)..(197): unsure at all Xaa locations
  Clone ID: PAT_MRT3847_52132C.1.pep
TRPAFLVMLSLATCVSXRVSNELGANQAGLAYRSACVSLALGFISGCIGSLVMVAARGIWGPLFSHDMAIIKGVKKTMLLMALVEVFNFPLAVCGGIVRGTARPWLGMYANLGGFYFLALPLGVVFAFKLCLGLVGLLIGLLTGIVTCLTLLLVFIARLNWVEEAAKAQTLTGQEQVKELSKYDAEERIDAHEKDVV

SEQ ID NO: 232679 - protein, 50 aa, Glycine max
  Clone ID: PAT_MRT3847_52133C.1.pep
KKGEEKKIKKKKKQTKQRLSRSRRSIGPRLTFPFMPPYSSHIAPPKPHSL

SEQ ID NO: 232680 - protein, 61 aa, Glycine max
  Clone ID: PAT_MRT3847_52134C.1.pep
IQLGTLANLCYFVFRRRFGLRSDSQGLVKRPSGSKSFSWSYSVNISDVDDYDSDHVKIYAL

SEQ ID NO: 232681 - protein, 60 aa, Glycine max
  unsure (1)..(60): unsure at all Xaa locations
  Clone ID: PAT_MRT3847_52135C.1.pep
HAHARMHDYFTNTSLSPETGXPTNQNRNHILIXFRNATITTLRHEPANPDRRNSAPDSND

SEQ ID NO: 232682 - protein, 59 aa, Glycine max
  Clone ID: PAT_MRT3847_52136C.1.pep
ATYSYTHSCLSKHSIGIGTLVDQNAQQWRLSLESRPGSYHQRRKHLLAYIPSRLGYGDG

SEQ ID NO: 232683 - protein, 93 aa, Glycine max
  Clone ID: PAT_MRT3847_52137C.1.pep
PSSYIPLLKKMPLEGIFIEPTSTSIPDLSLHISPPSTSSFSSLICSNNNNNNNTSGGGGGINYEAHNSRSTNFPSQAHTELSLGRNFSVGGGG

SEQ ID NO: 232684 - protein, 37 aa, Glycine max
  Clone ID: PAT_MRT3847_52138C.1.pep
QKINVGGTRVRGGDSYTKFLPDLVTFKSKAFLPLLRT

SEQ ID NO: 232685 - protein, 47 aa, Glycine max
  Clone ID: PAT_MRT3847_52139C.1.pep
QHGVCIAILSVSFPGLGCSDFASGVIGSRLCFLFLWLLMCFCGPGCL

SEQ ID NO: 232686 - protein, 140 aa, Glycine max
  unsure (1)..(140): unsure at all Xaa locations
  Clone ID: PAT_MRT3847_5213C.1.pep
AVGMISYVVPVYIAEIAPKNLRGGLXSVNQISATTGTMLSYLXLGLIVNWRALAIIGSSSCAVLIPVLLFIPESRRWXKMGMIDQFXNLLACVTRXLTLDIFVEGHEINKSAPSTEKKSXIRVADPKMKGYCLPVMVGIG

SEQ ID NO: 232687 - protein, 38 aa, Glycine max
  Clone ID: PAT_MRT3847_52140C.1.pep
TLITVMSLFFKVASCFQTMLGIVVHISALQYDMLTFKE

SEQ ID NO: 232688 - protein, 91 aa, Glycine max
  unsure (1)..(91): unsure at all Xaa locations
  Clone ID: PAT_MRT3847_52141C.1.pep
SQKRVIRVLIWYTPPLTNSSSTEHSRACKWTKSQPHCXELILPIEVCGPNHGFXMPPPQWANQTXWHPPFLIGPPHQPIVFDIFPVHPPYP

SEQ ID NO: 232689 - protein, 145 aa, Glycine max
  Clone ID: PAT_MRT3847_52142C.1.pep
DRIQNLSHSRKPSTDTDSGSGTDVAQWNVLQFNTGNTSPFIIKCGANSNSELIIKAEARVKEPKGGEIVRVAPRPSILENMSLEEMKQVFAELPEALSLLALARTADGTRARYSRLYRTLAMKVTSLKDMVSELEKGGALKDVRT

SEQ ID NO: 232690 - protein, 516 aa, Glycine max
  unsure (1)..(516): unsure at all Xaa locations
  Clone ID: PAT_MRT3847_52143C.1.pep
MNSFAKSEPVSSSASSSSSTYQQVPEQDANNDLDRVADNTFRRYTSNVTKGSGKGTAIVWFRNDLRVLDNEALYKAWLSSETVLPVYCVDPRLFATTYHFGFPKTGALRAQFLLECLADLRKNLMKRGLNLLVQHGKPEEILPSLAKSFQAHTVYAQXEPCSXELNDERLLMIGLEPVVTSPVVLHVVWCTGMCHFDGLPFDATRTQKXKLDCHKDNETEQAIRSRIKLKPSHNNDPQSSLCVVCSLCVCXASSNTIVMSMKFVGGETAPLSMVYGYFXRRTCCMVYIRDQECGSLVRNYSTEFSPWLASXKLSPRFIYEEVKRYENDRLANSSTYWVLFELKXVLTLMSVSFSFSFFYFFDNESVQFKNSCGSXLGQMWYWDILVMDDFFKHLLGKNDEXKYSCHFTWWETYIFDYDPCSNYGIXTYGSEVVYGPIECLXTSIPKQAXQRYDPEGEYVAYWLPQLRKIPKEKRNFPGNLIYIPQIVPLKFGTTSGPNKDKFFGARRTTDRGSKRR

SEQ ID NO: 232691 - protein, 93 aa, Glycine max
  unsure (1)..(93): unsure at all Xaa locations
  Clone ID: PAT_MRT3847_52144C.1.pep
ICCEAYKFHERVQLDSICXNELGDPDAIARVPGRMDVSYLSNWASEDNLRLLNLMYDATPSDYVSVIVTDYGMLPPTSVPVIVREYGREHLLM

SEQ ID NO: 232692 - protein, 81 aa, Glycine max
  Clone ID: PAT_MRT3847_52145C.1.pep
RAESAREKKSKKRKIKRLTQYKNHSFNHISLSLSRKFLLSGKIFSLVFSGKPRDLCLLDAIPRFPLIFRSEIAIFCSSFLF

SEQ ID NO: 232693 - protein, 48 aa, Glycine max
  Clone ID: PAT_MRT3847_52146C.1.pep
ASSTWGSIPFIFSDYAIMILYQPQHLSSSVLSLSVFAKQLSQSYKLPS

SEQ ID NO: 232694 - protein, 54 aa, Glycine max
  Clone ID: PAT_MRT3847_52147C.1.pep
LTFYSQVPTTTPALLSSISAINPILSFYLSLAQILFIVTNPKPKPGWEGWELNK

SEQ ID NO: 232695 - protein, 38 aa, Glycine max
  unsure (1)..(38): unsure at all Xaa locations
  Clone ID: PAT_MRT3847_52148C.1.pep
SYHARXASVEIFHKFRCXKLQRLSKLNTFPMEDSWRLP

SEQ ID NO: 232696 - protein, 54 aa, Glycine max
  Clone ID: PAT_MRT3847_52149C.1.pep
LILMLIVSIHTAPINKKNRCHVCNCGIHRDEMTHISAFVSFHWNMIILEYEICL

SEQ ID NO: 232697 - protein, 55 aa, Glycine max
  unsure (1)..(55): unsure at all Xaa locations
  Clone ID: PAT_MRT3847_5214C.1.pep
CMFYFRLRYKYSCSGYVRYSYTFSSFSHLCFVTLLRILLLLFFSPHSRLLGXTNK

SEQ ID NO: 232698 - protein, 48 aa, Glycine max
  unsure (1)..(48): unsure at all Xaa locations
  Clone ID: PAT_MRT3847_52150C.1.pep
HCXNVIQFKFSHDLRHECKLKLFFHQKQLHWINLLYSKQLVIIFFRSF

SEQ ID NO: 232699 - protein, 109 aa, Glycine max
  unsure (1)..(109): unsure at all Xaa locations
  Clone ID: PAT_MRT3847_52151C.1.pep
MGFSHSDLESESKKWVIAGIGVCSLKPIKTKRVAGGGDNEEEEEEETRSTTPTAKEARIPEKLPCPPAPRKRRPPSRCGSNGGGGXLVKEFFTPPDLESVFKCHVEKAK

SEQ ID NO: 232700 - protein, 122 aa, Glycine max
  unsure (1)..(122): unsure at all Xaa locations
  Clone ID: PAT_MRT3847_52152C.1.pep
ASTSVWKACKGKLKVCCCVCTHVAANSXEVRRVYQGSVCAGLIFISVAIIMSWSYNKRGCSPQDMVVEGVVLRSHVIIGHVQAVIGECECRGMCSSIKHWVPVFLVFFFVPLVFLSFELVAV

SEQ ID NO: 232701 - protein, 124 aa, Glycine max
  unsure (1)..(124): unsure at all Xaa locations
  Clone ID: PAT_MRT3847_52153C.1.pep
XXAPXXXXXCXXXLXPXAXXRXXXXGXCGTXXXTLXXXXXXXXLWWGXXSXXCXXXXXXXXXLACXLDXXXXXVXXVXXXLXXXXFXXXXXAXXGEXXVXXXXXLVVXXCGXXVLXXXXXXVCX

SEQ ID NO: 232702 - protein, 60 aa, Glycine max
  unsure (1)..(60): unsure at all Xaa locations
  Clone ID: PAT_MRT3847_52154C.1.pep
RHSARXTXXDGQXFYSLLFEXNSXVXLDGFXLXFXXXXFGLAAAGPLQVSQLXXECQLHP

SEQ ID NO: 232703 - protein, 63 aa, Glycine max
  Clone ID: PAT_MRT3847_52155C.1.pep
ARARAAYIEKLTHVKIIPSNEARPKMIQRWLRRETKLMAGQHRSLGLFWRHGASRLVWVDELL

SEQ ID NO: 232704 - protein, 48 aa, Glycine max
  Clone ID: PAT_MRT3847_52156C.1.pep
MATTSICMSFSLVIAFKGLSLSSSTSFFGGSTGTLRAGPNSVVSLPRR

SEQ ID NO: 232705 - protein, 63 aa, Glycine max
  unsure (1)..(63): unsure at all Xaa locations
  Clone ID: PAT_MRT3847_52157C.1.pep
LXYRQFVAEITEKVRKMAADRQITFKMYKRRGERDLKEKAKEKKDGRKTRARQRRWGGGRQKL

SEQ ID NO: 232706 - protein, 80 aa, Glycine max
  unsure (1)..(80): unsure at all Xaa locations
  Clone ID: PAT_MRT3847_52158C.1.pep
XXXTKXXSXXXXQXXLXQXSSXXXDXXXXGXIXXQXNXKXCXLPIQFXVXXNMXGXXRXGXLTHSIXXXXXXXCGNGXXA

SEQ ID NO: 232707 - protein, 129 aa, Glycine max
  Clone ID: PAT_MRT3847_52159C.1.pep
MKRARKSNRVSWATGENLCQVKLFLSDDYPSIVGQKSQDHLQAKTSSMLHSSINEPNDLPPGFESSHFLNQPKVELSNIPLIKWECPPLVVVRSQWRVAAGEESLVKENQKLAEMRVLGALYARVCGLA

SEQ ID NO: 232708 - protein, 173 aa, Glycine max
  unsure (1)..(173): unsure at all Xaa locations
  Clone ID: PAT_MRT3847_5215C.1.pep
ISTSGITLPEILDDEWLPKECKPPILEENGAINLNDVRTXSNDSEEHHVTEKKEERRTALNAFALSSMPKGLNLAHLLXAEQGFKRATSFTSKSPADEXINTIEEAAEPLGCAVPKKNDKMRLANVNAGRXGHLNVAAEICXVVPSLHMLEVLQARGDALECHELYTKLCTRL

SEQ ID NO: 232709 - protein, 211 aa, Glycine max
  unsure (1)..(211): unsure at all Xaa locations
  Clone ID: PAT_MRT3847_52160C.1.pep
RLREDDRRGRKEESTKAISHAIFVIFILSVSARCCGQEDLDNDILAPMEKAEQEALYSTIQGFVGDSWNGSDLYPDPCGWTPIQGVSCDLFDGFWYVTALNIGPVHDNSLSCAQELEFRRELFELKHLKALSFFNCFQSQDMFPATIPTGNWQKLAGSLESLEFKSNPGLIXNIPSSFGVLKNLQSLXILENIVTSEIPSNICNLIKFNKL

SEQ ID NO: 232710 - protein, 56 aa, Glycine max
  Clone ID: PAT_MRT3847_52161C.1.pep
FEPACKFSIIQEGSIPGKAEITSPQNKPFLSGNRERQPYQRIRAYPKDDETASYAC

SEQ ID NO: 232711 - protein, 97 aa, Glycine max
  Clone ID: PAT_MRT3847_52162C.1.pep
DVSQHRARHAHPRPVPAIGIHPIVGRTSTHTKTTAPISREIYPTPLDQLYHFRHRRTGNIFNAVLRKRLSMTRAHKPSLSLSTVRKSTTGKEHISAL

SEQ ID NO: 232712 - protein, 99 aa, Glycine max
  Clone ID: PAT_MRT3847_52163C.1.pep
IIYPATFSIKRKEHSIGCFLCIQLRRYPYVLYVGYELPPTIQWEIIARIPTSNQFWPKQAYYRSINDLDRELDLFKSAFEAEMFKFFRDLFIYGTKVHW

SEQ ID NO: 232713 - protein, 729 aa, Glycine max
  unsure (1)..(729): unsure at all Xaa locations
  Clone ID: PAT_MRT3847_52164C.1.pep
MDDERDFELLFYSWNNKNPTDQLFIISFLVAALVGILTIAYTAFQWRRNINLSWMKAIARSKKNPKARHXFLPWQIRVEVDGDEIEVLELAEGVXCCKYLKLHGRCRIVAXEDERCCTCGAVAHLSCSSSAHKDCKCVSMIGYERVTHQWTVCWTDVADQPDETALCSYCEELCAXGLFLSGPPIWSIMWCHPXGSGDFRSPLAHETDXICDLGQFRRLILSPLYVKELNWNLPXGGFLSSITHGAXNEIASSVRASIRNQSKKYKHGNEPSVESGNSESIGEVSTESTGEFSSNXNGHHEVGEKSSSNKGVRHQDSELDNKLDRKPTLRRNSSINQKDESHSLGVKQKYDLIDLPLDARPLLVFINKKSGAQRGDSLRMRLNILLNPVQVFELSSTQGPEMGLYLFRKVSHFRVLVCGGDGTVGWVLNAIDKQNFVSPPPVAILPAGTGNDLARVLSWGGGLGPVERQGGLTTFLQHIEHAAVTVLDRWKVTISNPQGKQQLQPTKFLNNYLGIGCDAKVALDIHNLREENPDKFYNQFMNKVLYAREGAKSIMDRTFADLPWQIRVEVDGVEIEVPEDAEGVLVANIGSYMGGVDLWQNEDENYDNFDQQSMHDKILEVVSISGTWHLGKLQVGLSRARRLAQGQSIKIQLFAMFPVQIDGEPWFQQPCTINITHHGQAFMLKRVAEEPLGPASAIIAEVLENAETHNVINASQKRALLHEMALRLS

SEQ ID NO: 232714 - protein, 34 aa, Glycine max
  Clone ID: PAT_MRT3847_52165C.1.pep
SQATLFFNVHILTFTSGVMTGIFCTDYYSHLMRA

SEQ ID NO: 232715 - protein, 66 aa, Glycine max
  unsure (1)..(66): unsure at all Xaa locations
  Clone ID: PAT_MRT3847_52166C.1.pep
VTRLGHLVNAGSIXSRAQIYLESLPHXVHQILDPLLGPTLXDXVIKLTSVQHQTRVQYRTLFRAFV

SEQ ID NO: 232716 - protein, 99 aa, Glycine max
  Clone ID: PAT_MRT3847_52167C.1.pep
SKFQIPFSALNIKRGSYSRRHCTGCRSNHVKHISKPNRHQNTHHSCRHRLLHRHCPQLVLEHQMLQHCQTAHHYLMYQQVQSPEMVQPPLFARMSDFHH

SEQ ID NO: 232717 - protein, 44 aa, Glycine max
  Clone ID: PAT_MRT3847_52168C.1.pep
TVPNRIPPCLRFLFIHKQGLGWFLHETKHAFNHLEIFARGRESS

SEQ ID NO: 232718 - protein, 179 aa, Glycine max
  Clone ID: PAT_MRT3847_52169C.1.pep
MKLKQQKMRVVVGSVWLCLFLLAVGESEGADLAAKCNLLVQKVLPCLNFATGQAAVPTKDCCEATSEIKKSDPECLCFAIQQTHKGSPEVKNMGIQEARLLQLPSACNLKNASTTNCPKLLGLSPNSADAAIFRNGSLKTNSASTVSEEIHKGSYGNMLRPVLVADLIAVLLVMIPIGS

SEQ ID NO: 232719 - protein, 78 aa, Glycine max
  unsure (1)..(78): unsure at all Xaa locations
  Clone ID: PAT_MRT3847_5216C.1.pep
GGLKWLVLLQVAKRGSLLMVNDPKKGRAIDPQEAELTLEKPEGILIKREGNGQPIXANLAFRRGRTQVRATNRISNQV

SEQ ID NO: 232720 - protein, 82 aa, Glycine max
  Clone ID: PAT_MRT3847_52170C.1.pep
LMGVGATLQSLGIMSGTPLITIVGSPGTSQTPAAEAFDSCLIPLSSISKICYENLRMKNDLLVCRFGNENGICKLHCLLLLT

SEQ ID NO: 232721 - protein, 76 aa, Glycine max
  Clone ID: PAT_MRT3847_52171C.1.pep
LSMKLSFFTSPPLQGKNSLDLMIPNLSCLRLLHDSTPLMMTKTLNLHHLQFNIWRTNALGTSTNAFVFSCYMIPLL

SEQ ID NO: 232722 - protein, 50 aa, Glycine max
  Clone ID: PAT_MRT3847_52172C.1.pep
LSGALLHYILTLGTLTILTKKFLLTISITLSLPFFISTQIGQPDSQNPLF

SEQ ID NO: 232723 - protein, 215 aa, Glycine max
  Clone ID: PAT_MRT3847_52173C.1.pep
PNTALDREFVFRKTFAGEFPNATMVYFQLVFAAITLILIAGALLGRMNFYAWMLFVPLWVTFSYTICAFSIWSTDGWLFKMGLIDYSGGFVIHLSSGVAGFVAACWVGPRAVKDRERFPPNNILLMLAGAGLLWMGWSGFNGGDPYAASIDASLAVLNTHVCTAMSLLTWLFLDILFFGKPSVIGATQGMITGLVCITPCCRVVQGWAAIIMGND

SEQ ID NO: 232724 - protein, 52 aa, Glycine max
  unsure (1)..(52): unsure at all Xaa locations
  Clone ID: PAT_MRT3847_52174C.1.pep
RKPNXLIYHTDIXRGGVVYKYGRATNNTNNDVGHETYALYPRITLIHIESQA

SEQ ID NO: 232725 - protein, 164 aa, Glycine max
  Clone ID: PAT_MRT3847_52175C.1.pep
SKDNIQQKHKDKPNENSLKEPQTKSGSKKPTGTSLLKTPDRHQVFVTHSSTTLHKQVGLFGLVCGLQLSGRWSNFLVDQWELDFGIVKLLGKLPLAKLFWDGRRLDFLDAWAPDRITCGQFILQKVNFRPFKTPFAKKLKTCSHFVKVLFNIFCHKSLLLTTSK

SEQ ID NO: 232726 - protein, 54 aa, Glycine max
  Clone ID: PAT_MRT3847_52176C.1.pep
SLPKSNPNSKTYKKYSNLTKPFSFNQKIDLSKLNLFQNPIFNIPYSKKNLYRTI

SEQ ID NO: 232727 - protein, 103 aa, Glycine max
  unsure (1)..(103): unsure at all Xaa locations
  Clone ID: PAT_MRT3847_52177C.1.pep
MCCVDKDQDQPQQTELLEVISSCCLTHNTTLIEIFHTTAQYQCGKTVXIHIINARSHPSEEMSQCGSRREPKKIDARLRQRIDPQYNDVHAQMETNLFKLSLD

SEQ ID NO: 232728 - protein, 42 aa, Glycine max
  Clone ID: PAT_MRT3847_52178C.1.pep
IGKFLAALPSLLKRPKQGSKTEEACSRSPAADMTLGPLLSSS

SEQ ID NO: 232729 - protein, 62 aa, Glycine max
  Clone ID: PAT_MRT3847_52179C.1.pep
ICFHPRLYLFTKRVRFLPAIYSKIASQLLNVGCSGRCWRRAFLHKQGFHPSTWLSCEPFLLE

SEQ ID NO: 232730 - protein, 46 aa, Glycine max
  Clone ID: PAT_MRT3847_5217C.1.pep
LTQFSLQFPKPRSEHTNLTCKRFCELLHRQVILLNLGKVSLSLGSS

SEQ ID NO: 232731 - protein, 48 aa, Glycine max
  Clone ID: PAT_MRT3847_52180C.1.pep
HNDDGTAACDIIGHLRDGDVVVVTGEVVVISRSTSNVMHGDSSDAACF

SEQ ID NO: 232732 - protein, 110 aa, Glycine max
  Clone ID: PAT_MRT3847_52181C.1.pep
SQVPKILFWGRVTHPQKKKKEKGGFLGGGGKGNPKGAKNQKCFKAHKVCLKAPPGFSPKKGPPIKNWGGEGLRKGMVYPRAMVISCHPMKNLGGGPLQFFVPKVAMGQSG

SEQ ID NO: 232733 - protein, 391 aa, Glycine max
  unsure (1)..(391): unsure at all Xaa locations
  Clone ID: PAT_MRT3847_52182C.1.pep
MSFPQPCDCPHRCPLGHRIRPWETSGERLMLEDGFTFASRGIRVLXTRFGDGVFNSSKLGYKEIXTDPSYAGQFVLMTNPHIXGNTGVNFDDEESRXCFLTNPVIRSSGFQFLNLEMSTYSWRXLSNMEGYHVDTRANTRQFRKEGSLVGVVSTDKSSRVEELSLCXVGLIQQSKNWDFSTKGHGXQTFHVFAIMIFGIXQNILKRLASYGCKITVVPSTWPASETLKMKPDGVLFSNGPGDPSAVPYAVETVKNILGKVPVFGICMGHQLLGQALGGKTFKMKFGHHGGNHPVRNLRTGQVEISAQNHNYAVDPATLPEGVEVTHRNLNDGSCAGLAFPAQRIMSLQYHPEASPGPHDSDYAFRDFVELMMQEKNKKSEPQISTVSSLDA

SEQ ID NO: 232734 - protein, 54 aa, Glycine max
  Clone ID: PAT_MRT3847_52183C.1.pep
MYERERQARKEKKIAAKSMTPSKRSMPRQSESPSLKKRKQLTMDDYLSSGKKKK

SEQ ID NO: 232735 - protein, 427 aa, Glycine max
  unsure (1)..(427): unsure at all Xaa locations
  Clone ID: PAT_MRT3847_52184C.1.pep
VGAELVFSSKDSTITXDEDIDRIIAKGEEATAELDAKMKKFTEDAIKFKMDDTAELYDFDDEKDENKFDFKKIVSENWVEPPRRERKRNYSESEYFKQTMRQGGPTKPKEPRIPRMPQLHDFQFFNTQRLSELYEKEVRYLMQTHQKNQIKDSIDVDEPEEVGDPLTAEELEEKEHLLEEGFSSWSRRDFNTFIRACEKYGRNDIKGIASEMEGKTEEEVERYAKVFKERYKELNDYDRIIKNIERGEARISRKDEIMKCYWEERLDRYKNPXGLELKIQYGQNKGKLYNEECDRFMICMMHKLGYGNWDELKAAFRRSPLFRFDWFVKFAKTQEMPRRCDTLIRLVEKEKQEYDERESQARKEKKLAAKSMTPSKRSMPRQTESPSLKKRKQLTMDDYLSSGKKKKYMGVCVYITLGIAGRMMRRL

SEQ ID NO: 232736 - protein, 65 aa, Glycine max
  Clone ID: PAT_MRT3847_52185C.1.pep
MGPPGGSTGAGGVTTLWQEKKNRGGARQLGVKSRGKGFGMGPPPVFKRGGGANELNKARKGDTLF

SEQ ID NO: 232737 - protein, 87 aa, Glycine max
  Clone ID: PAT_MRT3847_52186C.1.pep
FMDKDLVQQAELFVHLSASDRITLKLVYGFMPRPLIFIASIPSRFVDIFPAFTNILSISCISVVRIYRFAFSYGSNVDMAIPDSSLR

SEQ ID NO: 232738 - protein, 68 aa, Glycine max
  Clone ID: PAT_MRT3847_52187C.1.pep
NLLPYIYTRTFSTNHLSTQYYINKYYIIPSPIKFYSIIKKQNEFLSPYKTICRHLSHNSLFNPLTFLN

SEQ ID NO: 232739 - protein, 470 aa, Glycine max
  unsure (1)..(470): unsure at all Xaa locations
  Clone ID: PAT_MRT3847_52188C.1.pep
MISQISMLSLFFFLFSSFLIVFFFRKTSALHILNQWFLSFENRLHLHQSFKIPRYNLHSLDNSLYRKILTYLDSLPSVEDSDYTNLFSGPNPSDIFLHLDPNHTVHDTFLGARLSWTNASGDALVLRLKKKDKRRVFRQYFQHILSVADEIEQRRKKDVKLYVNSDAGEWXRSAPFTHPASFETVAMDAELKNKVKSDLDQFLKSKQYYHRLGRVWKRSYLLYGAPGTGKSSFVAAMAKFLCYDVYDVDVSKFTDGADWKVMLMQTTAKSLIVIEDLDRLLTEKSKSNTTSLSSVLNFMDGIVSCCGEERVMVFTMNETKEEVDQAVLRPGRIDVHIHFPLCDFSTFKILASSYLGLKEHKLFPQVEEVFQTGARLSPAEVGEIMISNRNSPTRALKTVISVLQVHSEGQRLSQSGSGRNSDDNEPGAVICRESVHTVREFRKLYGLLRLGSRRKEESYSGPIEKEAPRI

SEQ ID NO: 232740 - protein, 71 aa, Glycine max
  unsure (1)..(71): unsure at all Xaa locations
  Clone ID: PAT_MRT3847_52189C.1.pep
LLRYVIGLALISLQVWTIASIYESLGEFGWFFGDFFFPHNIRRYLYXXXYLFFNNTERTILFVGVWGAAII

SEQ ID NO: 232741 - protein, 43 aa, Glycine max
  Clone ID: PAT_MRT3847_5218C.1.pep
VTGSTPTSLLPLTKYLNYRLTSNLHLPSYQSTLHLTIYYSTLN

SEQ ID NO: 232742 - protein, 54 aa, Glycine max
  unsure (1)..(54): unsure at all Xaa locations
  Clone ID: PAT_MRT3847_52190C.1.pep
SWFVFLCIXXYSCSSLXFYXFXPLLFSKNQFLKNIFNLIVLRLTGESIFPCLYC

SEQ ID NO: 232743 - protein, 110 aa, Glycine max
  Clone ID: PAT_MRT3847_52191C.1.pep
MISQINMLSLFFFLSSSFLILFFFRKTSALHILNQWFLSFENRLHLHQSFKIPRYNLHSQENSLYRKILTYLDSLPFREDSDYTNLFSGPNPSDIFLHLDPNHTVHDTFL

SEQ ID NO: 232744 - protein, 55 aa, Glycine max
  Clone ID: PAT_MRT3847_52192C.1.pep
LHRYMWPSMAMIQFQLQYTGLRKCGFCPNIKSCFRQLVPAQPKVCYLNISPLKGS

SEQ ID NO: 232745 - protein, 101 aa, Glycine max
  Clone ID: PAT_MRT3847_52193C.1.pep
STHEEASIILRILKNKVLSSKIKLPLEYVTLTMMIVFELDTAFGSRRFQRKSHGWCLGEKLKSNEKGIYGKERNQKESNFVYPIFQLALFFFFCSGGFQTV

SEQ ID NO: 232746 - protein, 59 aa, Glycine max
  Clone ID: PAT_MRT3847_52194C.1.pep
EERKGKRERWCAIMKATGKDLLAIHACNLFCLPENYQMKYFLYYILFWAQLLYFAEDFN

SEQ ID NO: 232747 - protein, 51 aa, Glycine max
  Clone ID: PAT_MRT3847_52195C.1.pep
GSRDYGRYREYYEQDVGSRDSELRVRAEGLRITHNTVDDDPCQRTMDEEYP

SEQ ID NO: 232748 - protein, 85 aa, Glycine max
  unsure (1)..(85): unsure at all Xaa locations
  Clone ID: PAT_MRT3847_52196C.1.pep
MFGIIGGNKGHKIKGNLVIIQKNLLEITNITXVKGLTGTGINTIGRLLHTVSALVSHIYIHHNSDNSAYTHEKEKVGNATNLRRQ

SEQ ID NO: 232749 - protein, 50 aa, Glycine max
  Clone ID: PAT_MRT3847_52197C.1.pep
LHLLNVIDVRDMQYTFLYNLCEQLNLGYLWNIILICSPQDGFVPISTGRI

SEQ ID NO: 232750 - protein, 158 aa, Glycine max
  Clone ID: PAT_MRT3847_52198C.1.pep
AKQHTINDYAKRLAIEASRAEAVVSSSLNCLTSKKLGVQCSAPTWAFSQCQLLNISYCPPTEDGIPQAKSLVLVVYNPLGWNRSDIVRIPVNDANLVVKDSLGNNIETQYIEVDNVTANLREFYVKVYVGVSPQQAPKYWLLFQASVPPLGWSTYFIS

SEQ ID NO: 232751 - protein, 139 aa, Glycine max
  unsure (1)..(139): unsure at all Xaa locations
  Clone ID: PAT_MRT3847_52199C.1.pep
FPPPEIRVPPEVFVFYPRFAIPIFFGPPRFLEPPPFAPVPIFXALPPPFFCLFFPYPRPRCWAPPPPFPVRFXKKPCFPLPPPPPPLFPIFLLFSGPMPGPPLFFPPRGFFGFWGVFCLLRFPLHFLGEALFFVMFFVC

SEQ ID NO: 232752 - protein, 70 aa, Glycine max
  Clone ID: PAT_MRT3847_5219C.1.pep
LQGRSSLAKVRGRKALKDRALSYSKRSKVNQIPKLRDRRIMIQLTLMDYGLSRHGEATAGATMLMAGALS

SEQ ID NO: 232753 - protein, 341 aa, Glycine max
  unsure (1)..(341): unsure at all Xaa locations
  Clone ID: PAT_MRT3847_521C.1.pep
MQRTAVATDEPRRRSGDASAAEGEKVFKGSEVFGDTSPNYLKTILALALWLGTIHFNAALVLFAIFFLSLHKAFLLFGLLFVLMVIPVDEKSKFGRKLSRYICKHVCAYFPITLHVEDMKAFHPSRAYVFGYEPHSVLPIGVVALADNTCFMPLPKIKVLASSAIFYTPFLRHIWTXLGLTPETKFTFSMGLXDAGYSCILIPGGVQEAFLIEHGSEIAFLKSKRGFVRIAMEKGKPLVPVFCFGQSNVYKWWKPGGKLVLNFARAVKFSPVYFWGIFGSPIPFKHPMHVVVGRPIELEKNHEPTPEEVARIHSQFVEALQDLFERHKARAGYPNLELRIV

SEQ ID NO: 232754 - protein, 582 aa, Glycine max
  unsure (1)..(582): unsure at all Xaa locations
  Clone ID: PAT_MRT3847_52200C.1.pep
MLEKVEEFNTERMMEEFERVTKDAERIQRETLKRILEDNASAEYLLNLGLNGRTDPESFKAFVPLVTHKDLEPYINRIIDGDFSSVLTGKPITTMSLSSGTTQGKPKYVPWNDELFDTTLQIYHTSFAFRNREFPINNGKALGFIYSSKQFKTKGGVLAGTATTNVFRNPGFQHAMKAIQSPLCSPDEVIFGPHFFSPRVXHLLCGLIFREEVQLVSSIFAHSIVYAFRTFEQVWEELCVDIKEGVLNSKVTVPSIREAMSKLLKPDPELANLIHNKCMGLSNWYGLIPELFPNVKYVHGIMTGSMEPYLRKLRHYAGELPLLTSDYGSSEGWIGTNVKPTVPPELATYTVLPQIGYFEFIPLRELEEIKGDASFLCMEPKPVGLTEVKVGEEYEIVITNPAGLYRYRLGDVVKVMGFHNSAPEIKFVRRSNLLLSINIDKNTEKDLQLAVESASQLLAEEKLEVVDYTSHIDLSKEPGHYVIFWEISGEASEEVLGGCCNCLDKSFVDAGYTSSRKVNCIGALELRVVRRGTFQKILEHSLALGAAVSQFKTSRCVGPTNTKVLQILNENVVKNYLSTAFN

SEQ ID NO: 232755 - protein, 65 aa, Glycine max
  Clone ID: PAT_MRT3847_52201C.1.pep
IPHTHSIFTFLSRSQTQIIKNKVLAMASKRILKELKDLQKDPPTSCSAGILFCDFGFDASTLYDP

SEQ ID NO: 232756 - protein, 45 aa, Glycine max
  Clone ID: PAT_MRT3847_52202C.1.pep
VLSAKNVSQTFHLNNSNVDQIYHDRLRKYGSSIMRYSILRKVVRS

SEQ ID NO: 232757 - protein, 72 aa, Glycine max
  Clone ID: PAT_MRT3847_52203C.1.pep
RVSARASAPAAVFFLGCPFVSSEPWFPGDFPCGVRTVHHLCQVWSWVPFGLLGQFFFKPAALPGFVPRFPFG

SEQ ID NO: 232758 - protein, 163 aa, Glycine max
  Clone ID: PAT_MRT3847_52204C.1.pep
KRGKTPSLGNPIYYGGPKKKTGGGVGKFKGKGNPKKKKKGDNKSRGAKNQKKIKTTSFTGQKKKKTLGSLFLKKAPHLGGGTPNLKTLKKLALGGGPPPHNGTKFKKGDSPKIMGGNLKKNSPGGGPGAQTKPLKGGFKVIFGENPAAIFEKIWEGLGKGPIF

SEQ ID NO: 232759 - protein, 78 aa, Glycine max
  unsure (1)..(78): unsure at all Xaa locations
  Clone ID: PAT_MRT3847_52205C.1.pep
IPVEVAKRLREPRLVVKCIWMEKIMRLGLERVLPGHGTVPIRPYSLWARNDALAERKACVQSXPRISERTMRMLLNQA

SEQ ID NO: 232760 - protein, 49 aa, Glycine max
  Clone ID: PAT_MRT3847_52206C.1.pep
LVVSFCFRWMSFLRFSLCGFWVQGIPLVLAWVSSWIWGHPCHCRLPAPG

SEQ ID NO: 232761 - protein, 47 aa, Glycine max
  Clone ID: PAT_MRT3847_52207C.1.pep
IIMLILISRLKFVFFFHLLLLIYSILGIVMLSVCLNLMNFDCGTGCV

SEQ ID NO: 232762 - protein, 53 aa, Glycine max
  Clone ID: PAT_MRT3847_52208C.1.pep
HILLQFLHIYHTISIPALFLKSNLHFNKKNQISTIKNIMNPIQHLKLPQIKLT

SEQ ID NO: 232763 - protein, 66 aa, Glycine max
  Clone ID: PAT_MRT3847_52209C.1.pep
PRVRPRVRPRVRSSALLQLSLSLSLSLSLSIYPTITINHHSHKLFIPQITNISQFVHPLNHTSSTF

SEQ ID NO: 232764 - protein, 79 aa, Glycine max
  Clone ID: PAT_MRT3847_5220C.1.pep
YSQDPSVERGYHMCHIRNSLSERHYDYTTILSYVSLKSGCRTYLTTHVKDKHLSTYLQFQIITKHKDEKNKIGLTHLGV

SEQ ID NO: 232765 - protein, 41 aa, Glycine max
  Clone ID: PAT_MRT3847_52210C.1.pep
ARLRRSELGLRLTGKTDHGQTYLFDSECSAVFLIREWYFYM

SEQ ID NO: 232766 - protein, 94 aa, Glycine max
  unsure (1)..(94): unsure at all Xaa locations
  Clone ID: PAT_MRT3847_52211C.1.pep
NIGNPDLPMAMGMGPDQKGVRIKRIGPTGSKSYGLKPFDGILNFDWVNISNGXTRVIPFLTTTFDLVHLRLGEPMGSSNLAFQKSTGDKALLKV

SEQ ID NO: 232767 - protein, 121 aa, Glycine max
  Clone ID: PAT_MRT3847_52212C.1.pep
GQKTVFLIKSLSFFGSHPSLNGKHKPGGSQKSKGVTLTIPKAFLIKLLKIFIFYPNKGFFFKACPPLPGNFPFKKNPLPPPPVFQTFKNFILRIITPRGTYPLKGVFSLAPLGFPTGGPNI

SEQ ID NO: 232768 - protein, 116 aa, Glycine max
  Clone ID: PAT_MRT3847_52213C.1.pep
HVGGGGVRPFSDANSRRRRSVSVVRYQISDSESDLDRSQNSKSRSNLKKTDVGNKLMHKPVASDQRPVLRKSLSQKDLRAYDGYSSHSSVLTDDEGTSAHSNKMGIGKLRSGYAHK

SEQ ID NO: 232769 - protein, 70 aa, Glycine max
  Clone ID: PAT_MRT3847_52214C.1.pep
AFMVRILGTNSSGENVSACLLHLMMTITVLVAINFSKRNIYSLNCAHDYLVTSIATVRYASSPEPHCMQF

SEQ ID NO: 232770 - protein, 35 aa, Glycine max
  Clone ID: PAT_MRT3847_52215C.1.pep
KASDLLGWSLLSFFKEKCSRFFYLTQRDCYNGPQI

SEQ ID NO: 232771 - protein, 55 aa, Glycine max
  unsure (1)..(55): unsure at all Xaa locations
  Clone ID: PAT_MRT3847_52216C.1.pep
VXIXXRQSXKLVXLLLCHXXXSSXXSYLEVLWSXLXSKIRAXLXREKPXSXXITS

SEQ ID NO: 232772 - protein, 273 aa, Glycine max
  unsure (1)..(273): unsure at all Xaa locations
  Clone ID: PAT_MRT3847_52217C.1.pep
MQCILLYHLQLVRQLQGQEENPFGDDASTTPKKIFQLLNQTIETLSGVLAPELALQLYLQCAEAANDCELEPVAYEFFTQAYILYEEEISDSRAQITAIHLIIGTLQRMHVXFGVENRDTLTHKATGYSAKLLKKPDQXRAVYACSHLFWXDDHDNMKDXERVLLCLKRALRIANAAQQMANAARGSTGSVMLFIEILNKYLYFFEKGNLQVTVAAIQGLIELIMNEMQSDTTTPDPAANAFLASTMRYIEFQKQKGGAVGEKYEAIKVSHAG

SEQ ID NO: 232773 - protein, 149 aa, Glycine max
  unsure (1)..(149): unsure at all Xaa locations
  Clone ID: PAT_MRT3847_52218C.1.pep
SPTNAARGCRGLNPGSFLTLAKGSESGGSYGQWXSAIGRTAATTTLAESTVVLTTLLIKRTLDGHWNVIDVRYGLVGGYAVITYRCAVAQPSGAIVCGFVAAWVLIGLNKLAANVEYDDPLDAAQLHGGCGAWRCLFTGLFAKKEYVEE

SEQ ID NO: 232774 - protein, 294 aa, Glycine max
  Clone ID: PAT_MRT3847_52219C.1.pep
FKIIDTVRKHILTGGPKRLPFTVPPLVFSSLKLVRQLQGQEENPFGDDASTTPKKIFQLLNQTIETLSGVLAPELALQLYLQCAEAANDCELEPVAYEFFTQAYILYEEEISDSRAQITAIHLIIGTLQRMHVFGVENRDTLTHKATGYSAKLLKKPDQCRAVYACSHLFWVDDHDNMKDGERVLLCLKRALRIANAAQQMANAARGSTGSVMLFIEILNKYLYFFEKGNLQVTVAAIQGLIELIMNEMQSDTTTQDPAANAFLASTMRYIEFQKQKGGAVGEKYEAIKVSHAG

SEQ ID NO: 232775 - protein, 41 aa, Glycine max
  unsure (1)..(41): unsure at all Xaa locations
  Clone ID: PAT_MRT3847_5221C.1.pep
ASLVKIIRYQAACLNHLPKNHANFQPSIIKVFXFSFSYLEI

SEQ ID NO: 232776 - protein, 107 aa, Glycine max
  Clone ID: PAT_MRT3847_52220C.1.pep
VTHFKCGGVSLGVGMQHHVADGASGLHFINTWSDVARGLDVSIPPFIDRTILRARDPPRPVFDHIEYKPPPAMKTQQPTKPGSDSDNAAAAAAVSIFRLTREQLNTL

SEQ ID NO: 232777 - protein, 72 aa, Glycine max
  unsure (1)..(72): unsure at all Xaa locations
  Clone ID: PAT_MRT3847_52221C.1.pep
SLMPMGGGGGLKNIYMGGPGVTIRASSNFLFHNFYLSFSEILYLVNWVFPIXHXILCGGGGXXFXKGXGXKD

SEQ ID NO: 232778 - protein, 169 aa, Glycine max
  unsure (1)..(169): unsure at all Xaa locations
  Clone ID: PAT_MRT3847_52222C.1.pep
SLSTPWAXGAGHVNPQKALSPGLLYDASTQDYIYFLCSLNYTLDHLRLLVKHPDANCSKKFADPGDLNYPSFSVVFGSNKVVRYTRTLTNVGEPGSAYDVAVSAPSTVDITVNPNKLEFGEVGERQTYTVTFVSNRSVNDSATSGFGSIMWSNEQHQVRSPVAFTWTYF

SEQ ID NO: 232779 - protein, 84 aa, Glycine max
  Clone ID: PAT_MRT3847_52223C.1.pep
MDFAAFVSHGSYVDKTFLSSDTNQVGITSRNPIQAQEHVIAERKRREKLSQRFIALSAILPGLKKMDKASVLGDAIKYVKQLQE

SEQ ID NO: 232780 - protein, 59 aa, Glycine max
  unsure (1)..(59): unsure at all Xaa locations
  Clone ID: PAT_MRT3847_52224C.1.pep
LFSRXXNILLRRIVGXXNIKIMPFSITEFIYWRIPCRIYYCCGGDIXPQLHHNLXXLKR

SEQ ID NO: 232781 - protein, 55 aa, Glycine max
  unsure (1)..(55): unsure at all Xaa locations
  Clone ID: PAT_MRT3847_52225C.1.pep
GKLHSLFQIVNQNVKHSYCRVHHNDLXXRKLMHFHATSYKFTVIISQMKERLISF

SEQ ID NO: 232782 - protein, 54 aa, Glycine max
  Clone ID: PAT_MRT3847_52226C.1.pep
KIIELLSPSFPILVSLICGLLTQKYIFSPSNILHIIVIGNKFLENSPILSSQLL

SEQ ID NO: 232783 - protein, 47 aa, Glycine max
  Clone ID: PAT_MRT3847_52227C.1.pep
MKYKISFLEYFSLSPHSFPIHIHILTSLKKLFIIFFHQKSFKSKLKF

SEQ ID NO: 232784 - protein, 55 aa, Glycine max
  Clone ID: PAT_MRT3847_52228C.1.pep
TTNFVFFYDAKDNFVLILGKGGKHQLVEEEINPIRNLKITLTEKSNMDRTNAPKL

SEQ ID NO: 232785 - protein, 78 aa, Glycine max
  Clone ID: PAT_MRT3847_52229C.1.pep
TRLHQLQSACELTTHTHTRIYHHSRSQVSNRHRSTPYAVTKFVTVHTMVKDHMEAGLRKNSTAVQTVLDDLARIDVAG

SEQ ID NO: 232786 - protein, 153 aa, Glycine max
  Clone ID: PAT_MRT3847_5222C.1.pep
VVSKQWLSILLGQLMDNSRDGRALASSECPDVGSSTVSFSSSCSLHVGQVHVGRVSHEVIGYDRSCGLIIARRTGVKRIGLMFKGTSPSAFRFFGYRHCVLSYVRWLLVVTGCNIVPCNLTFPTELLHALLLIWHSYSVNTLEFMAAMRGMNE

SEQ ID NO: 232787 - protein, 121 aa, Glycine max
  Clone ID: PAT_MRT3847_52230C.1.pep
RPPTRPERRREIESAGRPETHPTPQGGGAQQTQPEAATATARTGKDAPPDEHDKAGHRHPKRTGKTEQPERTENGKTARKKEKEPDDPDRDEDRKATRARKNHPRGGTRGGGKKRKNGGSK

SEQ ID NO: 232788 - protein, 101 aa, Glycine max
  Clone ID: PAT_MRT3847_52231C.1.pep
LEPNDASNPCMNHTIHDSKTKTVTLMVPSQLEHRLIPLQQHSDEDMDEPAGPGAASRDMVPPKESPAKTLRNGSLGLEKSAEHVVTGSYPMHINRLNRRNS

SEQ ID NO: 232789 - protein, 70 aa, Glycine max
  Clone ID: PAT_MRT3847_52232C.1.pep
HLSDRTSPPWLQHMPSQVVPWQRPDVLAVLAHVGLYSARIAHRFSISAIGTTSACRLAVVSIIWRCLEIA

SEQ ID NO: 232790 - protein, 164 aa, Glycine max
  Clone ID: PAT_MRT3847_52233C.1.pep
MASSQEKRIMVLAMDAHEHSNYALEWTLDHFFTPFGANAPFNLVIVNAKPSPPPAVSMAGPGALGSEIFPAVQVQLKANAEQIAEKAKQFCASKSVLEVLVEVVEGDARNVLCDAVDRHRASVLVLGSHGYGAIKRAVLGSVSDHCARHAHCSVMIVKRPKFKY

SEQ ID NO: 232791 - protein, 108 aa, Glycine max
  unsure (1)..(108): unsure at all Xaa locations
  Clone ID: PAT_MRT3847_52234C.1.pep
XGGXXXXXEXXGGXXGXXGWXXGRRVXGEGXXXVXQVEVGGXXXXVHKXXQSHVLLLKXKXPQLSHLKXSXYXXGXGGXXXXXXXXXXGXKPLSPLKHISTIKYSKQH

SEQ ID NO: 232792 - protein, 104 aa, Glycine max
  unsure (1)..(104): unsure at all Xaa locations
  Clone ID: PAT_MRT3847_52235C.1.pep
MPNAVPSKRRYIVGDHVSEVAKMTAPNMKXTVSYFIAVGNLADDTIKLEGFPHKLVAGGEXQVFIGLKMAQEEFXTVWTTQVXPATTPQDDGRPYPHAMAQDST

SEQ ID NO: 232793 - protein, 495 aa, Glycine max
  Clone ID: PAT_MRT3847_52236C.1.pep
GSQLKLGSSYLQRAPLDVQIPLAKILNEEDWQIDNFRLLETVEAFLCGWNSGDSDSQVEGLINLSQKIHDKPSQSDVEILTGSFISSENFRGMPLLEAILDRKTKDGALLIKKWLQESLRRENLTVNVKSRPGLVTKPELQAMIKALSRSQSSLLRNKGIIQLASATLFSLDESNYAKWDAFSSAEKILGVSSGETSQSLAIQIGDLINKSALLGSHVNEGKREISKGLLSLQDALLLMIIGYIVAGENFPTSGSDGPFSWQEEHLLKEAVVDALLENPSVANLKFLDGLREELETNVSKYKSEETAEEPSKLDIDDFDDQWGKWGDEDVDDDNKNEKVYGDVQLKLELRDRVDKFFKFLHKLSGLKRKNIPLRDGSLTTEANFDEDRKGLLYKLLTRVLGKYDVPGLEYHSSTVGRLFKSGFGRFGLGQAKPSLADQNVILVFVIGGINGLEVREAHKALGESGRPDIELLVGGTTLLTSNDMLDLLLGDSSYI

SEQ ID NO: 232794 - protein, 67 aa, Glycine max
  Clone ID: PAT_MRT3847_52237C.1.pep
RSICRGMGPSWDSVVMCKRHKIHTADPGVTNGASVTPPPPPSLTHCHMLHLLFAKVYHSTTTSKKLH

SEQ ID NO: 232795 - protein, 138 aa, Glycine max
  Clone ID: PAT_MRT3847_52238C.1.pep
GKRNPPFFTLKRALRGTLQKKNWGPGGWAPQKKKKRFRGPKGQNKGGKKKIPGGPPNPKNPPAPLKEIFTMGGQKKKEKKTFPEGLLRRGFGQKLGGFFFFPPFKRGLKKKFKPGFLIPPPRGGAQKLFFVAPLKKHF

SEQ ID NO: 232796 - protein, 42 aa, Glycine max
  Clone ID: PAT_MRT3847_52239C.1.pep
YGSTITVWYDVLIRHDNLRFTFQCVHCNRYTVVFRQPGLNYG

SEQ ID NO: 232797 - protein, 38 aa, Glycine max
  Clone ID: PAT_MRT3847_5223C.1.pep
LTRNARHPIGTAHEDSHLKERHHSKASLNCTLMMTLLH

SEQ ID NO: 232798 - protein, 72 aa, Glycine max
  Clone ID: PAT_MRT3847_52240C.1.pep
LKSFSTSDHRFVAYVHKLKENEIPKVLISHPITYYVANTIKNRKEKKFLIVGFFFQCVYFFLIIIVIIPIDI

SEQ ID NO: 232799 - protein, 92 aa, Glycine max
  unsure (1)..(92): unsure at all Xaa locations
  Clone ID: PAT_MRT3847_52242C.1.pep
DFPGRPTRPGRLNKAVILQGSNHLQLFAXGHSRFTYTVLVDGWFKKTNXWGQAIIXFQTDKPSWLAFLDIGPLDIGGTNQKFRVEGGPFFFK

SEQ ID NO: 232800 - protein, 63 aa, Glycine max
  Clone ID: PAT_MRT3847_52243C.1.pep
MELSAFSSYLSSLLIASLYPIFFESTLVPMLSSSSSPRLWSLLESQVKTVFSDQNVLGESFVV

SEQ ID NO: 232801 - protein, 187 aa, Glycine max
  Clone ID: PAT_MRT3847_52244C.1.pep
MYFFHLQMKMQLARALGLQPRQIAIWFQNRRARWKTKQLEKDYDVLKRQYEAIKADNDALQFQNQKLQTEILALKSREPTESINLNKETEGSSSNRSENSSEIKLDISRTPAIDSPLSTQQNNNNRTLFPSSARPTGVAQLFQTTPRPEIQCQKIDHMVKEESLSNMFCGIDDQSGLWPWLEQQHFN

SEQ ID NO: 232802 - protein, 71 aa, Glycine max
  unsure (1)..(71): unsure at all Xaa locations
  Clone ID: PAT_MRT3847_52245C.1.pep
MESRVVFENDLNLKATELRLGLPGTEDKTVHAISIRNNKRQVPETSQESVSXISKASPDQHVESDPAPPAK

SEQ ID NO: 232803 - protein, 71 aa, Glycine max
  Clone ID: PAT_MRT3847_52246C.1.pep
MNHQQQSPAVTAYPAGAQSNLAAPPPPVGYPTKDDLPSQQNVPVKTTTRGDGFWKGCCAGLCCCCALDCCL

SEQ ID NO: 232804 - protein, 61 aa, Glycine max
  unsure (1)..(61): unsure at all Xaa locations
  Clone ID: PAT_MRT3847_52247C.1.pep
HERPGGHMMDRLMTVGIKEAARAYLHHXGLLSQRRHTDAAQEAKHVLDNILRELATTQYCT

SEQ ID NO: 232805 - protein, 55 aa, Glycine max
  Clone ID: PAT_MRT3847_52248C.1.pep
KKNSLWVVMEHVWSIVADANSWHSVVWLGNGARDFVNYANNHHDKKKKKKKKKER

SEQ ID NO: 232806 - protein, 60 aa, Glycine max
  Clone ID: PAT_MRT3847_52249C.1.pep
SPVEPLVRVFFTCLRCPFYNPQCTLAMEVLNEHQARPIPLCQAPLPSSPVLAIPHGLNGP

SEQ ID NO: 232807 - protein, 47 aa, Glycine max
  Clone ID: PAT_MRT3847_5224C.1.pep
KKKKKKKKKLKFKKKKKKKKKRIIKKKKKKKKKKKKKKKIKKNWAAL

SEQ ID NO: 232808 - protein, 170 aa, Glycine max
  Clone ID: PAT_MRT3847_52250C.1.pep
TPLRRANRKTPDARERHTRGAKRKRQTPTAQGTKKGNQQRPALHSRTTQAGRKNYRATEGRHTQGTHTEARKREARSTAQKTKTPKNKEATTRPEKTTQTPTTKTSKTGMPHWPRDKHHRQQKIQTDTPIPKTQSAHRALAGQGTMHGQKKRGKSTATHRTQGKQREGRT

SEQ ID NO: 232809 - protein, 79 aa, Glycine max
  unsure (1)..(79): unsure at all Xaa locations
  Clone ID: PAT_MRT3847_52251C.1.pep
PVALAPGGPSGPGHGGSGRGNGPGVPAXGHGSVAPEGPGWVPGPGGPASGAGLGGPAFSRPAGRGFSGSDRCSGRCHDS

SEQ ID NO: 232810 - protein, 370 aa, Glycine max
  Clone ID: PAT_MRT3847_52252C.1.pep
VNRRKKCGLPLYIRLFHLQNRGLGSSKSKRISIRYHINTSSSSPKPLSVSEHKAMVALLVATTSDPASINPANALLGMPGWKPGPHFQDDMKSYVNEGVRVLVHGKSIVAEDELDKRWEEVTGEVIDEVIFFSKHTAASNKPALTVHPIGVPHLRQGDVPPQGGRPGWAALPNPRMGPWLRLLKNLAQAHNLVPEFEITLEATHHGPLTNKPTMFLEIGSTEDYWKRQDAAQVMAQLVWEGLGLGGVSDVGNWSRENDNKKILLGIGGGHYAPRHVDVVLKDNVWVGHLLSGYSLPMEDPNQSKGEKNVEIGGTWRQSIKAAYEATYSAFPGGEILAHLDHKSFKGWQKNAITGFLAEQNIKIGKPNNFY

SEQ ID NO: 232811 - protein, 105 aa, Glycine max
  Clone ID: PAT_MRT3847_52253C.1.pep
DILWKYGKTCWLCSSFFYCSNGFEHVLRDQNCGTIRDSSYFTNGDWRRVCFVCFWGDLVFFSVGFYCGVYDAVNCKALAPIHVLKLYICLMNLKGCFCFFTMVAS

SEQ ID NO: 232812 - protein, 76 aa, Glycine max
  Clone ID: PAT_MRT3847_52254C.1.pep
QSKGEKNVEIGGTWRQSIKAAYEATYSAFPGGEILAHLDHKKKASVPRSFKGWQKNAITGFLAEQNIKIGKPNNFY

SEQ ID NO: 232813 - protein, 78 aa, Glycine max
  Clone ID: PAT_MRT3847_52255C.1.pep
RIKFFSLKPPLFLGVFHFFIWFPLLYPFLLRDTGKTVGFPWPQVSFLLCQICNMRVEFVPSPKQNSSFQKKKKKKKKP

SEQ ID NO: 232814 - protein, 43 aa, Glycine max
  Clone ID: PAT_MRT3847_52256C.1.pep
EKNLGGGFLLRTLGLVSVRKVVFFLITPPLDIGVCHEEDTKLG

SEQ ID NO: 232815 - protein, 84 aa, Glycine max
  Clone ID: PAT_MRT3847_52257C.1.pep
VVISSVSSDSYCCELALGLSRVGDGTLALPLRNLTALLIAIVPIRGEWAVAWLTGLHTMHMFKSRPFNPPNIIYVTGPWTVRSR

SEQ ID NO: 232816 - protein, 84 aa, Glycine max
  Clone ID: PAT_MRT3847_52258C.1.pep
EKLIKLMVDESDPKLPFGYIKLDEMANRAKINFPPLKALMSAMHQKGYAASRFPIETNAITANCPMTECIKIAKELLQLQVFAA

SEQ ID NO: 232817 - protein, 98 aa, Glycine max
  Clone ID: PAT_MRT3847_52259C.1.pep
RARTSCSRCTRRCCCATPRWPTRPRSRPAASCRPASSRTRPTRHSSSCARPRTCATTSRTRASCAWPSTTRPRRTRRPWTRSCASWGTSACPRPTRCT

SEQ ID NO: 232818 - protein, 83 aa, Glycine max
  unsure (1)..(83): unsure at all Xaa locations
  Clone ID: PAT_MRT3847_5225C.1.pep
HHPVVSQEYGKGLPVESAWVGMRDYSPQLVVPSILEFVNRFEGGIEGIMKRNHDGVVKMGTMLAESWGTVLGXPPDMCASMIM

SEQ ID NO: 232819 - protein, 202 aa, Glycine max
  Clone ID: PAT_MRT3847_52260C.1.pep
GSGEDRKSDKAKGELMLAVWMGTQADEAFPEAWHSDAAMVSGSDALANIRSKVYLSPKLWYLRVNVIEAQDLMPTDKGRYPEVFVKAILGNQALRTRISQSRSINPMWNEDLMFVVAEQFEEPLILSVEDRVAPNKDEVLGRCAIPLQYVERRLDEKPVNTRWFNLERHIVIEGEKKDTKFASRIHMRICLEGGYHVLDEST

SEQ ID NO: 232820 - protein, 46 aa, Glycine max
  Clone ID: PAT_MRT3847_52261C.1.pep
HTKPTFTLQDVTPYTCNAAEGIIVTSEFQSTLISHNPSDAVGTYYD

SEQ ID NO: 232821 - protein, 452 aa, Glycine max
  Clone ID: PAT_MRT3847_52262C.1.pep
LNLEAGAQVEHHENNKYTEATHKLMNASRKAQTLIRQFGCRSEQVDATIEDLQNKLKETTVAFELVTDERDLNKNRVSELESGIQSLQSACSELKDKLEDYHALEEKLEEKEAEISSMHNALLAKEENSLFPASQMRDLFDKIDRIKIPIVESKEDDLEPHTSAPMRKLFYIIDSVPRLHDQINSLSHDKEKLQSILETRDLDIKDLKDEVKQLNRICEDSKMIKNELSELTYVLEKIMDILGAGEWVVDRKSKGSKELIPALEKHIIAILSESENSKSKAQELDIKLVGSQKVIDELTTKVKLLEDSLQDRTSQPDIVQERSIYEAPSLPAESEIIEVEEGSSLSKKAISPVPSAAHVRNMRKGSTDHLALDISGESDNLINRVDKDDDKGHVFKSLSTTGFVPKQGKLIADRIDGLWVSGGRVLMSHPRARLGLIGYLFVLHIWLLGTIL

SEQ ID NO: 232822 - protein, 54 aa, Glycine max
  Clone ID: PAT_MRT3847_52263C.1.pep
CHAGDHLLNVSSYSLARAHDHTGGELLHTEDKKHRSSIFTSTPQAVPRGRLSTH

SEQ ID NO: 232823 - protein, 30 aa, Glycine max
  Clone ID: PAT_MRT3847_52264C.1.pep
SLFALNKGSLFLIFPKQDIHKENSQSLSIN

SEQ ID NO: 232824 - protein, 126 aa, Glycine max
  unsure (1)..(126): unsure at all Xaa locations
  Clone ID: PAT_MRT3847_52265C.1.pep
MVTTCPRLFRHIVSLKRMMSSAEDLTAYVQTSIMLTLCLETIGTTIPSIYFWVPTVLFNSNALTLWGGGCLCTANWLWRDSLLHAWGYTGAFHSSNSDRAVXAKEHLRTTGTEGDLRYSVWLGYAN

SEQ ID NO: 232825 - protein, 141 aa, Glycine max
  Clone ID: PAT_MRT3847_52266C.1.pep
GKSLYIWPLKVIGLLGLIVLCLWLALRPKNPSYSIMFISIQHPSNSSENCTIFYSLQIENPNKDSSIYYDKTILSFLYGEPDDEVGETTIVPFHQGTGNTRDVSDTVNAKPRPFKPLFSAISNATTELKVALITRYRYKTW

SEQ ID NO: 232826 - protein, 45 aa, Glycine max
  unsure (1)..(45): unsure at all Xaa locations
  Clone ID: PAT_MRT3847_52267C.1.pep
KRXXXQEWANKINVNYGKLVPGLSWNYYGKTRLSLVRIVRKQRED

SEQ ID NO: 232827 - protein, 70 aa, Glycine max
  unsure (1)..(70): unsure at all Xaa locations
  Clone ID: PAT_MRT3847_52268C.1.pep
PESASSPANRPLPSXRTCRLGFSPPPRSISSAWEESSVTNNLYTDALAMFFLFFFLLLFLFLREHQNLFR

SEQ ID NO: 232828 - protein, 75 aa, Glycine max
  Clone ID: PAT_MRT3847_52269C.1.pep
VINFILPTRPSVYSNMVKLVKKFTFRKLTLQPRGLLNLANQLEELAASFPPGLSECVQAFSSFRSGKTRLFCNES

SEQ ID NO: 232829 - protein, 56 aa, Glycine max
  Clone ID: PAT_MRT3847_5226C.1.pep
HTLCFVQLMIFNYDLSGDDDNNINTHLSIVLLACHVFELEIYPINYFFLEPICTLT

SEQ ID NO: 232830 - protein, 104 aa, Glycine max
  unsure (1)..(104): unsure at all Xaa locations
  Clone ID: PAT_MRT3847_52270C.1.pep
CRGSLLFFPCVFSSRWGCVAGSGFVGWLPSPRWLCLPVSPFRLLSPVLSRGVRVSAFSSCCLGGPVVSRGFSPAVLSRLRPXVIRSQGSPRGFRAGSCWRPAAL

SEQ ID NO: 232831 - protein, 132 aa, Glycine max
  Clone ID: PAT_MRT3847_52271C.1.pep
SSGRAPRNFRLVDELEKGQKGIRDGTASSGMDDGDYIYLRSWTGTMIGPYNPVHDGRIYQLNEVCDKDYPNQPATVQDDSLLTMTRATDEAGVVESQTYLLRASWQRTSAMEDILTLLKNEMAATHKLKLVQ

SEQ ID NO: 232832 - protein, 65 aa, Glycine max
  Clone ID: PAT_MRT3847_52272C.1.pep
VEPFPIAEVEARLCKLDEISTLSSINLTHAYRSEKYSVQNRSELENFSPNTHGSFCCCCFSTYPC

SEQ ID NO: 232833 - protein, 57 aa, Glycine max
  Clone ID: PAT_MRT3847_52273C.1.pep
SSHLLSLCYCKLHFNNNSDILNVGRFVFPYLFSPHCNRRRLSYPQLGFPRMRPDSYE

SEQ ID NO: 232834 - protein, 76 aa, Glycine max
  Clone ID: PAT_MRT3847_52274C.1.pep
RADRISKLQLVILCQMIQMHRLQYRVWNVLLDRKEGRLYCTSVILAALIFVHNLQVGITLGKANGLASVHEGDRVS

SEQ ID NO: 232835 - protein, 37 aa, Glycine max
  Clone ID: PAT_MRT3847_52275C.1.pep
LEPLEPIRLEHEVSHNTKSHHDHHHHNQHSITLVISL

SEQ ID NO: 232836 - protein, 152 aa, Glycine max
  Clone ID: PAT_MRT3847_52276C.1.pep
MVTKFLIFFFLSIIALTSVTAEDGTGFVGSPNRKFLGLKTKEKLSHFRFYWHDILTGSNPSAIQIIPSVPKYNTTTSFGLVRILDNPLTLGPELSSKQVGRAEGLYASASRSELSLLMVMNFALTEGKYNGSTITIMGRNRALSKVSREMPV

SEQ ID NO: 232837 - protein, 51 aa, Glycine max
  Clone ID: PAT_MRT3847_52277C.1.pep
PRVRKKKKKKKKKKKKKKRKKKKKKKKKKKKKKKKKNKKKKKNKKKRKNNT

SEQ ID NO: 232838 - protein, 66 aa, Glycine max
  Clone ID: PAT_MRT3847_52278C.1.pep
RRSWPSLLFCCLLLFLLLLRFRFRCLPLAPPRCSRLFSPLFRLSARCCPRSRSCGRLSPVFRLVWS

SEQ ID NO: 232839 - protein, 53 aa, Glycine max
  Clone ID: PAT_MRT3847_52279C.1.pep
CCVFARTNRGRGALNTAKTVKKRTDRWGRERNAIDEHRKDSNSECFGGEHIPH

SEQ ID NO: 232840 - protein, 41 aa, Glycine max
  Clone ID: PAT_MRT3847_5227C.1.pep
RLKTAQERAVEYAAKSGLELYDENSCFTRKTQGCFSQFLCQ

SEQ ID NO: 232841 - protein, 350 aa, Glycine max
  Clone ID: PAT_MRT3847_52280C.1.pep
MSFLRSFARNKDISKVGRRGIHCMQKLCAEKISPDSLEKAQNRVIDAALTLVRENTRLKKELVHSLGGAVATSTLLGVPLGHNSSFLEGPAFAPPFIREGIWCGSANSTTEEGKDLKDLRIMVDVGDIPIQEMRDCGIGDERLMKVVSDSVKLVMEEDPLRPLILGGDHSISYPVVRAISEKLGGPVDVLHFDAHPDLYDEFEGNYYSHASSFARIMEGGYARRLLQVGIRSINKEGREQAKKFGVEQFEMRHFSKDRPFLENLNLGEGAKGVYISIDVDCLDPGYAVGVSHYESGGLSFRDVMNMLQNLKGDIVGGDVVEYNPQRDTPDRMTAMVAAKFVRELAAKMSK

SEQ ID NO: 232842 - protein, 44 aa, Glycine max
  unsure (1)..(44): unsure at all Xaa locations
  Clone ID: PAT_MRT3847_52281C.1.pep
YRSSSCHNGQMCGQNCPFGSRDSXTTGCTSIGCTGGKDTFRSSS

SEQ ID NO: 232843 - protein, 66 aa, Glycine max
  Clone ID: PAT_MRT3847_52282C.1.pep
RERKKDLVPNPNGGTYGGINPLVGRAASILKLTRVPKATRPKSLAWPWGFWGPPHNKKLGKRVEGT

SEQ ID NO: 232844 - protein, 88 aa, Glycine max
  unsure (1)..(88): unsure at all Xaa locations
  Clone ID: PAT_MRT3847_52283C.1.pep
HHPQLLLFAPQTFSEPLIVXXKRXSKGXKGGIQKAADPXAKKDWDDTMXXXXXQVKNVGKTLVSRTQGTKIASEGLKHRVFEVSLADL

SEQ ID NO: 232845 - protein, 39 aa, Glycine max
  Clone ID: PAT_MRT3847_52284C.1.pep
SQIAYQYIYKLQQTTILPITQFSHYIIHHNLYTCTNPLT

SEQ ID NO: 232846 - protein, 82 aa, Glycine max
  unsure (1)..(82): unsure at all Xaa locations
  Clone ID: PAT_MRT3847_52285C.1.pep
MAAXSSMALSSPSLAXGKGVKLGPSAPEVGRVSMRKTSPSRSSSGSHGNGPDRVKYLGPHSLGXAPVLPKPVSFPGDYGLXT

SEQ ID NO: 232847 - protein, 80 aa, Glycine max
  Clone ID: PAT_MRT3847_52286C.1.pep
TFLPPYFLKMWNWNYPRNFRSSFSFGLRIGLIKKTNNSNSYMNIFAFLFLENVELEFPEEFRSHFPWLQDRAYKTTNKSN

SEQ ID NO: 232848 - protein, 160 aa, Glycine max
  Clone ID: PAT_MRT3847_52287C.1.pep
MRAVVQRVASASVEVEGRIVSEIGPGLLVLVGIHDSDSDADADYICRKVLNMRLFPNENTGKAWDHSVMQKNYQVLLVSQFTLYGFLKGNKPDFHVAMAPQRAKPFYASLVDRFRNAYNSDAIKDGVFGAMMKVNLVNDGPVTMQLDSNSPKNTVDAAES

SEQ ID NO: 232849 - protein, 76 aa, Glycine max
  Clone ID: PAT_MRT3847_52288C.1.pep
TPPPGPPLFSGVYLFYKKVTYIFEKLVLICSPPKFKFYRGFCPFPLLSLYWGAFCGKLLPFNIGFLFKKKKKILIY

SEQ ID NO: 232850 - protein, 522 aa, Glycine max
  Clone ID: PAT_MRT3847_52289C.1.pep
MELVLNSTTIGVGVVSLILLLYLFLRGGSWKSGEEGPPTVAGAWPIIGHLPLLLGSKTPHKTLGDLADKYGPIFSIKIGAKNAVVVSNWEMAKECYTTNDIAVSSLPDLISANLLCYNRSMIVVAPYGPYWRQLRKILMSEFLSPSRVEQLHHVRVSEVQSSITELFRDWRSNKNVQSGFATVELKQWFSLLVFNMILRMVCGKRYFSASTSDDEKANRCVKAVDEFVRLAATFTVGDAIPYLRWFDFGGYENDMRETGKELDEIIGEWLDEHRQKRKMGENVQDLMSVLLSLLEGKTIEGMNVDIVIKSFVLTVIQAGTEASITTLIWATSLILNNPSVLEKLKAELDIQVGKERYICESDLSKLTYLQAVVKETLRLYPPAPLSRPREFEEDCTIGGYTVKKGTRLITNLSKIHTDHNVWSNPLEFKPERFLTTDKDIDMKGQHFQLLPFGGGRRICPGINLGLQTVRLTLASFLHSFEILNPSTEPLDMTEVFRATNTKATPLEILIKPRLSPSCYESI

SEQ ID NO: 232851 - protein, 141 aa, Glycine max
  unsure (1)..(141): unsure at all Xaa locations
  Clone ID: PAT_MRT3847_5228C.1.pep
EHTFNAALNGAEDMDYIXRHPLATSGGYPHVLERNNGDLGNGRLESGDGKAMTSLPLTREAVSHIERIHKPDKRATTQIDMVRPMDEILTAPEINDKPETLWCTILPMEHKAGDRHTNIDVVGDILEKRYTHKCQDGINPY

SEQ ID NO: 232852 - protein, 50 aa, Glycine max
  unsure (1)..(50): unsure at all Xaa locations
  Clone ID: PAT_MRT3847_52290C.1.pep
DGLDYHFLIQIXRVNFFSVNYCAPKACPYPLFLNLPAKISFKSHTFLNNI

SEQ ID NO: 232853 - protein, 91 aa, Glycine max
  unsure (1)..(91): unsure at all Xaa locations
  Clone ID: PAT_MRT3847_52291C.1.pep
RRKLLPSTPVKLKIERTHHMNRQLYRXFFSTTNMLIXALLLIALTASYLILQRFEDYGSRYLYVSRGGIQWKKQDRTSAHMNGLGGMFILL

SEQ ID NO: 232854 - protein, 59 aa, Glycine max
  unsure (1)..(59): unsure at all Xaa locations
  Clone ID: PAT_MRT3847_52292C.1.pep
XNXYSXYRSFTSIISSFVCSTSNLMGKMRGAIQCMHCALKSVPITFQYKISAKNKLFKK

SEQ ID NO: 232855 - protein, 102 aa, Glycine max
  Clone ID: PAT_MRT3847_52293C.1.pep
EVIFWSHFKYALYLNNPYERLNALSFFQWPYVCFQNLIVPALDNAAIVHQEHGAEDSTHKPNPEPVDMVNFEAEDSANFVCERGSRERSRRNVKTLTSEIIA

SEQ ID NO: 232856 - protein, 58 aa, Glycine max
  Clone ID: PAT_MRT3847_52294C.1.pep
EKCYNNYNSLICLSEVCYMDPMIYLGLINNQIFKDIIHHEIPFYSFFQCPSWFPSISL

SEQ ID NO: 232857 - protein, 101 aa, Glycine max
  Clone ID: PAT_MRT3847_52295C.1.pep
EQSWYSVISGVYTASNFIHGLSSLRRPPLYDRSKVACETSVQASTSVLQRARECAFLITGSICEYPRPQPVVDADYAQLQCNRKIVRGESTASWIEVIYSL

SEQ ID NO: 232858 - protein, 100 aa, Glycine max
  unsure (1)..(100): unsure at all Xaa locations
  Clone ID: PAT_MRT3847_52296C.1.pep
LRGRTDCAAAADVDPTPDQAKETTRFLGERNRPCGRFAAEIRDSRKNQRVWLGTFHSSEDAARSYYTAAHXLRVPKAGCNFLPSYGPTEARPPLSDSALP

SEQ ID NO: 232859 - protein, 262 aa, Glycine max
  Clone ID: PAT_MRT3847_52297C.1.pep
MSAIIVCGKRSALFQDLPPKRIRCSSSSSPVHLSPPPSSLLHHLAALFPDMDHHLLEKALQDCGNDIDSAIRSLNQLRLGAPPPPSLDSTPIASDTAPPQLQGGAKCDAEVSGSDDPAAGLKYPTSGAEWVELFVIEMMNASNMDDAKSRASRMLEALEKSICARASVETERNIHQENMMLKEQVEALIQENVILKRAVGIQHERQKEYEDRNQELKHLKQLVSQYQEQVRALEVNNYALTMHLKQAEQSSSIPGRFHPDVF

SEQ ID NO: 232860 - protein, 177 aa, Glycine max
  unsure (1)..(177): unsure at all Xaa locations
  Clone ID: PAT_MRT3847_52298C.1.pep
LEDKLFSVNSLSASAYDGEKNIFSAVPLPEETFTVDVSKGEDERPVSYLVSLTLVSRLELRKLRDYLSGSVLSIPRDVLHGLDLVVKENPSKQCVSLGRCFFPMNPPLRKKDLNHGIIAIGGFQQSLKSTSQGLSLCLDYSVXSFRKKLLVLDFLHEHIMDFNLRESGRFRRQEHVL

SEQ ID NO: 232861 - protein, 51 aa, Glycine max
  Clone ID: PAT_MRT3847_52299C.1.pep
AHNMRDTLHIMLQMSRDMMFGGQMPVIRVRMMAGQFAKDRSDVVEENNGVK

SEQ ID NO: 232862 - protein, 63 aa, Glycine max
  unsure (1)..(63): unsure at all Xaa locations
  Clone ID: PAT_MRT3847_5229C.1.pep
TLSFFSSHPFFILNMFILQSKEIDIXTPTSFFQPLSTLSKPYYIIAENTITHTPPTQFLPLLF

SEQ ID NO: 232863 - protein, 62 aa, Glycine max
  Clone ID: PAT_MRT3847_522C.1.pep
FFKGLKWKNGGVLRNFCNNHEILSEVVRCTLKPYKARLLFKLTCIDITCRFTYITQWSHSNY

SEQ ID NO: 232864 - protein, 169 aa, Glycine max
  Clone ID: PAT_MRT3847_52300C.1.pep
INFVESIRATNMSRLKLYVMQLTELTDSSSSILMVQRSRKNGFPFINRMKSGPMHEQIATAFQAYGEVGKVTVHHLTSISLLSTMHEDICHVAEKKGVAMIILPFHKRWGGEDEEVTEDLGQGLREVNQRVLQNAACSVAVLVNRGVARRYEQEPETSVAARKRVCIII

SEQ ID NO: 232865 - protein, 70 aa, Glycine max
  Clone ID: PAT_MRT3847_52301C.1.pep
VALQLKKTKKFKQKNKNQINWDNIRKKIGIHGLFVPGAPALPSLACDCHSTSMVFPNFDLLAIFLQLSHL

SEQ ID NO: 232866 - protein, 56 aa, Glycine max
  Clone ID: PAT_MRT3847_52302C.1.pep
HHIVKYVLYYLVREIIHHRYKSCLSLSDRSSVILQENFHTPKGEGDRSKKEAISER

SEQ ID NO: 232867 - protein, 101 aa, Glycine max
  unsure (1)..(101): unsure at all Xaa locations
  Clone ID: PAT_MRT3847_52303C.1.pep
TRSYGCYNTTEGVVCVQSYGVGALKMLIFVKTLTWXTITLXVYSSYTIYFVKANIQDKEGIXWISQRLIFSGKQLEYGRTLFDYNIXRNQPFHFFLKFRGG

SEQ ID NO: 232868 - protein, 243 aa, Glycine max
  Clone ID: PAT_MRT3847_52304C.1.pep
PRVRIYTSCYDGTVRLMDAEKEIFDLVVDSDECIFALSQPTNETNCLYFAEGYGGLTIWDNRIGKRSSHWVLHESRINTIDFNCENPHIVATSSTDGTACTWDLRYTDGDKLRALRTFTHKRSVQSAYFSPSGCSLATTSLDNTIGIYSGVNLEDAAVINHNNLTGRWLSTFRAKWGWDDSYLFVGNMKRGVDVVSSVERKIVMTLESQHMSAIPCRFDTHSYEVGMLAGATSGGQVYIWTSR

SEQ ID NO: 232869 - protein, 55 aa, Glycine max
  Clone ID: PAT_MRT3847_52305C.1.pep
VSPPSPTIIVTSFIFVIIYFFSLSFIQCLNMCLLMYWYIPSIPILGRRKRHRLQN

SEQ ID NO: 232870 - protein, 460 aa, Glycine max
  unsure (1)..(460): unsure at all Xaa locations
  Clone ID: PAT_MRT3847_52306C.1.pep
MAPQKLNDYERKRLENIRRNDEMMAALKLHSKATQLSNFKRSQRVGTKSYNMKSEKKPKTETPIVIRRSLRTRGIPPDSKGLVGDSVGPTTPTKTKPSVVNLGPISMADARESAHSDSSFVESLMGMAQLKAQDASVEKGKVEASLGLESLYLDPXNIARVVPGRITSLRFFPSSSVKMVAVGNNFGNVGFWNVGESEVHLYRPHRAPISGILKYANYVXRIYTSCYDGILRLMDVEKEIFDLVFECDESIYALSLPTNETNCLYLAEGYGGLTIWDNRIGKRSSHWVLHESRINTIDFNCKNPHIAATSSTDGTACTWDLRYTDGDKLTALRTFTHKRSEQSAYFSPSGCSLATTSLDNTIAIYSGVNMEDAAVINHNNQTGRWLSTFRAKWGWDDSYLFVGNLKRGVDVVSAVQRKMVMTLESQHMSAIPCRFDTHSYEVGMLAGATSGGQVYIWTSR

SEQ ID NO: 232871 - protein, 104 aa, Glycine max
  unsure (1)..(104): unsure at all Xaa locations
  Clone ID: PAT_MRT3847_52307C.1.pep
SLYTGLFRHTTDRTNLQKSSQGLHEQRXLQGRXIKHXXXEXQXXQXXXXFLIWSTSSTPPPRHNLFSPVPSSIALFLMFSSQHDSASSAVTLYRALSFISSKVL

SEQ ID NO: 232872 - protein, 50 aa, Glycine max
  Clone ID: PAT_MRT3847_52308C.1.pep
TNSILQIKITRLGSITINVRRNYYMPLPNEERRKHVGLRILNLAAPFYWP

SEQ ID NO: 232873 - protein, 39 aa, Glycine max
  Clone ID: PAT_MRT3847_52309C.1.pep
LYIQTSCCLRFESNTYNRVLGNDKTDTCLEEVDPLSVIY

SEQ ID NO: 232874 - protein, 203 aa, Glycine max
  unsure (1)..(203): unsure at all Xaa locations
  Clone ID: PAT_MRT3847_5230C.1.pep
MARPQQRXYRGVRQRHWGSWVSEIRHPILKTRIWLGTFETAEDAARAYDEAARLMCGARARTNFPFNPNVSHSSSSSSKLLSSTLTAKLHRCYMASLQVTRQALASESQRTPPSVQNATTSTTTPISNNFSVKSEQTHAVLPHKRPEEEQESEANRGVKRVNSVENVPLQFKPLEEDHIEQMIEEXLDYGSIELCSVISPQAL

SEQ ID NO: 232875 - protein, 114 aa, Glycine max
  Clone ID: PAT_MRT3847_52310C.1.pep
ELRSHFSWLHDRPNKSTDNYDSYMNICASVVLGNVELEFPEEFRYHFIWIQDRPNKLPNNYNSYMNIFASLFHKNVELGIPEEFRSHILRLQDRPNKKTNNSNSYMPIPCLLIS

SEQ ID NO: 232876 - protein, 176 aa, Glycine max
  Clone ID: PAT_MRT3847_52311C.1.pep
ASDEEDTTSASISHNQKVQQQQPALSNGVAASYSELSPRSGGLVDYDDDDDEDYRPPPKKKPEASEEDEGTMESLSRKRKLPSKNPELAKKLSKNSKSKDSVFAALCSTLSQAVLPGKKPSINVHTDPCREDNKEKEPNVSRNCCENSNATAEANHVEKETSAYRNFSDGLYGTFR

SEQ ID NO: 232877 - protein, 56 aa, Glycine max
  Clone ID: PAT_MRT3847_52312C.1.pep
PAGVADSAPAPAAICKKDACRVECAIPYVFSLRGICYRIYNEMLLTYNYDKFLHPA

SEQ ID NO: 232878 - protein, 56 aa, Glycine max
  Clone ID: PAT_MRT3847_52313C.1.pep
TYTHGYGSTHPTIRYVPILILECIKSYMTRLTHPRVGPRNLAYIYFIHKSTGYITS

SEQ ID NO: 232879 - protein, 73 aa, Glycine max
  Clone ID: PAT_MRT3847_52314C.1.pep
RNRNPFHNDSIMATSEDTELRERFSTTPTRQEPRFRTLMFDPTPSVVARLMLCSPASSVSQTSRAHWEDLLRC

SEQ ID NO: 232880 - protein, 74 aa, Glycine max
  Clone ID: PAT_MRT3847_52315C.1.pep
QTSRFWHHYKCSGTMTIMKSFDSRSHRFSIPNRQAPLQSLQAPICFASSSLRSYLLLRSSTSPKYLRKVSSIDI

SEQ ID NO: 232881 - protein, 79 aa, Glycine max
  unsure (1)..(79): unsure at all Xaa locations
  Clone ID: PAT_MRT3847_52316C.1.pep
MEVVQVGCRSEPGSKEWEMKPGGMLVQNENXDSGRNPALLPTIRVKVKFGSIYHEVNISSQATFXELKKMLSGLNCLHH

SEQ ID NO: 232882 - protein, 286 aa, Glycine max
  unsure (1)..(286): unsure at all Xaa locations
  Clone ID: PAT_MRT3847_52317C.1.pep
RIVGRGGKDMGASENNTAKPRVRPIVRLGIFLISHTNILSVVCFIAGVVALLLLPILAKNTYISENALMPDLXGSANNMLSTHHVSDANKLIKDLTDLEFRSGASPIDSQKLIAHYMSALDAEVTFHKFYPQFDQFHPLHFFTSPNSGIISENATCSSFGINTVGIIRAPCGDGKEASVLVTPYNPNKVGLGEAFSLGIAYSVFSLLSRVTWLAKDIVWLVADSQYGEYSGVAAWLRAYQAPSIQRLDIVNSETCYGSSIFNELGQGLYLDGKLYGGFRHAGTMGW

SEQ ID NO: 232883 - protein, 51 aa, Glycine max
  Clone ID: PAT_MRT3847_52318C.1.pep
VYPSFSLDWRLIILRVSKKSIIKHLWDKTLQHVSFIYLLKKLHIQTAGIKL

SEQ ID NO: 232884 - protein, 74 aa, Glycine max
  Clone ID: PAT_MRT3847_52319C.1.pep
HKYINPQPKWSEFREASFGHGELKIVNSTHTFWSWHRNDDDEPVKADDIWITSLASSGCVDQKTHELRSTLLTP

SEQ ID NO: 232885 - protein, 65 aa, Glycine max
  Clone ID: PAT_MRT3847_5231C.1.pep
KIASKFYHNNLLEYKEKNKIAITIECQCIWDCKCSCCSYWRVKNKLSPINRASFFFFDGRTDKTC

SEQ ID NO: 232886 - protein, 40 aa, Glycine max
  Clone ID: PAT_MRT3847_52320C.1.pep
PPTEKVFPLFKKELSSPKVLGGLFPRVNTPSFQSKKRAPA

SEQ ID NO: 232887 - protein, 148 aa, Glycine max
  Clone ID: PAT_MRT3847_52321C.1.pep
MFGSARILSDVTLRLRQNLSVHGVRVQNINIGGGVGGEIPDNKRLVYALQNLHGIGRSKAQHIVAELGVENKFVKDLSKRELYSIRELLSKYLIGNDLKKCVERDVGRLVGIQCYRGIRHVDSLPCRGQRTHTNARTRRSRKTFSGSR

SEQ ID NO: 232888 - protein, 63 aa, Glycine max
  Clone ID: PAT_MRT3847_52322C.1.pep
CLRTPTLQLNCIATQLRETKSRCALAVTLNIRTRSLEPEMLYNCYSPSCCNTNIRSTYGGNSW

SEQ ID NO: 232889 - protein, 84 aa, Glycine max
  Clone ID: PAT_MRT3847_52323C.1.pep
HKQAIEATMRGSYINHQTFPKEHEKEENKKEANNSQSQKKKLERMPTEDINASAEAFIKNFRHHLLLQRLQSIENHKLMLAREK

SEQ ID NO: 232890 - protein, 58 aa, Glycine max
  Clone ID: PAT_MRT3847_52324C.1.pep
FFLYLLLYCISLKDIYVTLPNFLSLTFLHIQIYLYSMYIINIPINLSYTIITQLLYCR

SEQ ID NO: 232891 - protein, 54 aa, Glycine max
  Clone ID: PAT_MRT3847_52325C.1.pep
RAIRTKCVRVNREEVMLGNFITRVSHFKRVWSFERSAWGGLIVIAVCCTRVLLS

SEQ ID NO: 232892 - protein, 110 aa, Glycine max
  Clone ID: PAT_MRT3847_52326C.1.pep
WINFFLPCNYFNLIRVSLALFAPLLVSLPNKVWFLITKPSSLLLISDFKNCNRSPSLLPFELIPPFMLPAKVGHSTFLVQEIASTSPHSLRVVLVLGIGISLQKMSVLQE

SEQ ID NO: 232893 - protein, 178 aa, Glycine max
  Clone ID: PAT_MRT3847_52327C.1.pep
VRDFTAKPHMIVIRSFDVNKPGAEIDELKGGVAGGSILTGVLKLGDEIEIRPGIVSKDSAGKIQCKPIFSRVVSLFAEHNDLKFAVPGGLIGVGTRVDPTLCRADRLVGFVLGLRGHLPNIYTELEVNYFLLRRLLGVKTADGKHAKVAKLAKNEVLMVNIGSTATGAKVVAVKADAA

SEQ ID NO: 232894 - protein, 137 aa, Glycine max
  Clone ID: PAT_MRT3847_52328C.1.pep
VRQMFERVSIQSCEGSSEKNRGNYDRLGRTAIYAFVYPNFMINRYGPWMDTNLVVPLGPNKCQVIFDYYLEHSLKDDKDFIEKSLQDSEKVQIEDIVLCEGVQKGLQSPAYRVGRYAPTVEQAMHHFHCLLYENLAK

SEQ ID NO: 232895 - protein, 89 aa, Glycine max
  Clone ID: PAT_MRT3847_52329C.1.pep
PSLYPVPCTGKSRILAIISVLEAVTVRKIFIGIKYVMSAVILPRRRKKKNVKKAKPYDYDYNIWRGNASYMARKEKIKASSYAYLYLNV

SEQ ID NO: 232896 - protein, 48 aa, Glycine max
  Clone ID: PAT_MRT3847_5232C.1.pep
VHLGFSTWYYNKNYIFFRGSKSFIKCLRLHLHYTKAYTISRVNVLIKS

SEQ ID NO: 232897 - protein, 74 aa, Glycine max
  Clone ID: PAT_MRT3847_52330C.1.pep
PHTEDRPFVQQRGGKSFLWLAQAQTKSTLMPPRNPINPTLFGHLTEGPGFPLWLQEGDFSHPTGPSAKRYSPKY

SEQ ID NO: 232898 - protein, 51 aa, Glycine max
  Clone ID: PAT_MRT3847_52331C.1.pep
FKTSLLDRNNIRLPIHHLLPYKQGSTNPIFFTYKLLSHQDKSPPTSTSNIF

SEQ ID NO: 232899 - protein, 500 aa, Glycine max
  unsure (1)..(500): unsure at all Xaa locations
  Clone ID: PAT_MRT3847_52332C.1.pep
MLGSLPILPLPAPPSDGNLGPLPESQVIDNEEQNKSNSASVPAPATVATHTRTIGIIHPPPDIRTIVDKTSQFVAKNGPEFEKRIIANNTGNVKFNFLNSSDPYHAYYQHRLSEFRAQNQSSGLQPPSQPADSAVPESAPSDSNGVAAAAEKIDVSAQFKAVRKVLEPPEAEQYTVRLPEGITGEELDIIKLTAQFVARNGKSFLTGLTSREVNNPQFHFLKPTHSMFTFFTSLADAYSKVLMPPKGLTEKLKKSVSDMTTVLERCVNRLEWERSQEQARQKXEDEIEQERIQMAMIDWHDFVVVETIDFADDEDEELPPPMTIEEVIRRSKVTAMEEDIVEPGKEVEMEMDEEEAQLVEEGMRAASLEDRDDVKQNEVRVTEDPEPPMRIVKNWKRPEERISAERDSTKFVVSPITGELIPISEMSEHMRISLIDPKYKEQKERMFAKIRETTLAADDEISRNIVGLARTRPDIFGTTEEEVSNAVKAEIEKENDEQPS

SEQ ID NO: 232900 - protein, 218 aa, Glycine max
  unsure (1)..(218): unsure at all Xaa locations
  Clone ID: PAT_MRT3847_52333C.1.pep
RAKKKVLGKNNEETRSYFTWNLEMESVLTDVLRDQRNLGNKGDGGWKRSALNTAAAVLSTSFNXNVRSDNVKNRIKLWRSWYGIVSDILGQSGFDWDGTKHMITVENENAWNEYCISYKSEKPFQFKVLQNWDDIVWIGEKEGIAASLDKMVNSFDRMLKKIDGKVDDEDIQEVLREATLILDFNRQQWAKAIKWLTDDPKQLVIVKIFQFTKRQIMF

SEQ ID NO: 232901 - protein, 86 aa, Glycine max
  unsure (1)..(86): unsure at all Xaa locations
  Clone ID: PAT_MRT3847_52334C.1.pep
SXXXXNSXXXQTXXHXXNXXXQXXNLXXIXXXXXHXXXXXXXTKLXXXXXXXNXYXYXXIXNXXXXYXXXXXIXXXXKXXXXXXTX

SEQ ID NO: 232902 - protein, 102 aa, Glycine max
  unsure (1)..(102): unsure at all Xaa locations
  Clone ID: PAT_MRT3847_52335C.1.pep
SVPRFVVXRXAVSFLXRXRLLXXFAXXAFXLGXVSAAGXXLVLGRPRPXXFXXGWGWAXXXGXAFGVGXWGLXXXPAVXRXPSXLFSXLXXNXFXLAXXFVL

SEQ ID NO: 232903 - protein, 51 aa, Glycine max
  Clone ID: PAT_MRT3847_52336C.1.pep
AVTNLWDWGVCPNYMLNIQNSQIFTTVKIAKDSCYNKVRILHFSNNKKNLN

SEQ ID NO: 232904 - protein, 114 aa, Glycine max
  Clone ID: PAT_MRT3847_52337C.1.pep
SADHINKITKLTSACGLSRTELGTYSCAKHEGGSHFIRGILPLSLAPLTFPFLLPFITADHLPPRDPAFSEPIPPCSSLRRCGSESGTARSGRRHRADMHAPSIRRPRLSSGPF

SEQ ID NO: 232905 - protein, 87 aa, Glycine max
  unsure (1)..(87): unsure at all Xaa locations
  Clone ID: PAT_MRT3847_52338C.1.pep
GGRWESRLIGAISSPRVGGPSPVKGLGAAGGVCLSFWGPRPQVLGPAFIFWELVWGEAWFFFAMEKGKFSFXXXXXCFXKKKKFFXX

SEQ ID NO: 232906 - protein, 56 aa, Glycine max
  Clone ID: PAT_MRT3847_52339C.1.pep
VRLSLGLYSCCFLYLIISVKNCRVIQSHAISSKCEQCWFPQSLHPSSFLSSLWLSI

SEQ ID NO: 232907 - protein, 76 aa, Glycine max
  Clone ID: PAT_MRT3847_5233C.1.pep
GGTRVRTDWARWHRLIIYLYNNYGSLNDHTGYDDHHPDSSSLTDQYPIIVISNKEADLALSQHFIWSSLQSHYTFV

SEQ ID NO: 232908 - protein, 30 aa, Glycine max
  Clone ID: PAT_MRT3847_52340C.1.pep
LMRTWSNDVQNFCCVGSGYFVFMSLNINTV

SEQ ID NO: 232909 - protein, 68 aa, Glycine max
  unsure (1)..(68): unsure at all Xaa locations
  Clone ID: PAT_MRT3847_52341C.1.pep
MVKELLPPPIKRPGVFLPFILSPSNLKCKFKKTPATVLFIDGPNKKSPHRILLFLKKKKRPKQKKKXP

SEQ ID NO: 232910 - protein, 128 aa, Glycine max
  Clone ID: PAT_MRT3847_52342C.1.pep
FDGRREVHIHPSSINNRPKGFQYPFLVFLEKVETNKVFLRDTSVISPYSILLFGGSIDVLHQTGQLIIDGWLKLTAPAQIAVLFKELRLALHSILKELIRKPENATVLNNEIIKSIITLLLEEGSIPQ

SEQ ID NO: 232911 - protein, 42 aa, Glycine max
  Clone ID: PAT_MRT3847_52343C.1.pep
YYNLDYSRSNMDDQHQKLILPPVNVQIFPFKMWLKIKESEFY

SEQ ID NO: 232912 - protein, 138 aa, Glycine max
  unsure (1)..(138): unsure at all Xaa locations
  Clone ID: PAT_MRT3847_52344C.1.pep
LELSLYRSVCISDYITLSYLFCHDPPTAHEGTVSYVNYLIHTCNWHDLNLNSNALAAAEAYDISDXSDINIISADAVFRNATIGHMTTXIHHIPIGNDXATVHGLWXCDALRLAFDXHLTHIKSHAYGHPVQRRNDIC

SEQ ID NO: 232913 - protein, 147 aa, Glycine max
  Clone ID: PAT_MRT3847_52345C.1.pep
NLLRMIRPKVRWLPLDESMWFHRQVAYAMLIFTVIHTAAHYVNFFNVERVQVRPQIALQIHYTEAGGITGHIMLLCMLLIYTTAHHRIRQQSFETFWYTHHLFIPFLLGMYTHATSCFVRDTVPNWSPFDKENFWTHCIGYEGWRWE

SEQ ID NO: 232914 - protein, 69 aa, Glycine max
  unsure (1)..(69): unsure at all Xaa locations
  Clone ID: PAT_MRT3847_52346C.1.pep
PWASNISKPDSLRPKLSPKLKTVATTTIDCSTTNNNNNNNASSDLKAFSDALALFSILLSXPLHVGADI

SEQ ID NO: 232915 - protein, 47 aa, Glycine max
  Clone ID: PAT_MRT3847_52347C.1.pep
MRAYETQNKYESSEVEVQDRGVFDFLGKIKDEEDKPHPQEEVIATEF

SEQ ID NO: 232916 - protein, 98 aa, Glycine max
  Clone ID: PAT_MRT3847_52348C.1.pep
HFSPMDKLMAKVHASLKIRSPKHPQLFTVPGIIFFHRNLYFLAINTGVFKILIFIGNHDVNATRLFPKHLLLTMSCREKVPSKYEMLGGDALTETKKE

SEQ ID NO: 232917 - protein, 64 aa, Glycine max
  Clone ID: PAT_MRT3847_52349C.1.pep
EGTYRGGFHTPTNEWATTTTLMLFFYSGVIDVMRRMRLKDPSTTGCLAPPLTLMRELRGGSINK

SEQ ID NO: 232918 - protein, 351 aa, Glycine max
  unsure (1)..(351): unsure at all Xaa locations
  Clone ID: PAT_MRT3847_5234C.1.pep
MGSISTSSIRAPPTRRTTVTPFSSLLPKPKPHFLSLSTSKSHAFPLSKPLTISPNSHPLIPKSIPTLSSSSPLNLKSRLRNGETLYGLFLLSFSPTLAEIAGHAGYDFVVVDMEHGPGGIHDALPCLHALAAGNTGAILRVPESTAGWAKKALDLGPQGLMFPMIDSLQSAQDAVSYCLLPPTGLRAAHPPHRAAKYGMDDAXLGNYLDELLIMCQVESEEGVANTGCDXPAVDGVDCVQXGPLDLSASLGYLWDPGNKKVREVLKDAENKVLESRNDDVEIGAYLAGFATVYDGARDLRSRGYHMVSGAVDVGLFRSAAVEDVTRFKMGGDGSESDEGEEKEGDEKYWSE

SEQ ID NO: 232919 - protein, 65 aa, Glycine max
  Clone ID: PAT_MRT3847_52350C.1.pep
GFFFMGFLSLFFWVRFGPLNCTVSLSFIILIYLVMVFLEFRGCGANIVGMPTSFVPYPLPYLLPF

SEQ ID NO: 232920 - protein, 90 aa, Glycine max
  Clone ID: PAT_MRT3847_52351C.1.pep
PPFSRGPLPFKGRVPPGPMGGLLGSLPGFKSPKSSFKGCERVLHFFVGVESPLLGSPFIGAKALIFTPFLGVPKFGVSFPVGDFSFFQFF

SEQ ID NO: 232921 - protein, 52 aa, Glycine max
  Clone ID: PAT_MRT3847_52352C.1.pep
YIAVQYISGPHNSLTICYGYNKRLQERSPTANAVSFRSQTTLQKERKKGATI

SEQ ID NO: 232922 - protein, 65 aa, Glycine max
  Clone ID: PAT_MRT3847_52353C.1.pep
FYKDLKFSDQHELITSSSKRLIVNLLSCVDCLVLFTVDCEVASLGGGELVMCLFKQKKKQLRSIA

SEQ ID NO: 232923 - protein, 45 aa, Glycine max
  Clone ID: PAT_MRT3847_52354C.1.pep
ISDDRKVISSCSRPRMLTCVDYCKERLHQIVNEEITKRRIIFNGN

SEQ ID NO: 232924 - protein, 83 aa, Glycine max
  unsure (1)..(83): unsure at all Xaa locations
  Clone ID: PAT_MRT3847_52355C.1.pep
FNVKGFQTVKNSVLDNPXISRTIFIHILKIYRINKSECFSTIMDLMLYIFVRYFKRLIYHLINLITYFNVELMLCFNCNYYIF

SEQ ID NO: 232925 - protein, 51 aa, Glycine max
  Clone ID: PAT_MRT3847_52356C.1.pep
GLSASSPLHLVPSTKHIICFTVNVIQSDNPTYQKIHTINGDPFIGILKTPV

SEQ ID NO: 232926 - protein, 94 aa, Glycine max
  Clone ID: PAT_MRT3847_52357C.1.pep
SGVVPSAVFSFLSGLKTNPWLPDKAHRFSRGGGVFFKPGGNRVFLLLKWAVYRVSFNKAPPFLKAPRGSVFCFPLGFFLEFFRGFFFSKGLVFS

SEQ ID NO: 232927 - protein, 39 aa, Glycine max
  unsure (1)..(39): unsure at all Xaa locations
  Clone ID: PAT_MRT3847_52358C.1.pep
TLRRIERAAIAAATPITYHSRELLLLIHEHLQAXWGATK

SEQ ID NO: 232928 - protein, 56 aa, Glycine max
  Clone ID: PAT_MRT3847_52359C.1.pep
RLLNHFKVLAMSSQTLKQSYQEHVKLMPLIWKIESSLDRFPHDSCGHLHFQIILHY

SEQ ID NO: 232929 - protein, 306 aa, Glycine max
  Clone ID: PAT_MRT3847_5235C.1.pep
MELLKPLHPHHAPILRIPFHAVPSSSSSSSQSKVPLPMISKVHVAVGKSLDKAVPLLRWTLNHFRNAEIVIVHAYQPSLTIPTLLGKLPASQASPAVVSAFRKAEREQTVKLLDKYLSICRAARVRASVIVTEADQVQKGIVDLVIKHNIEKLVIGAIPENCMKVKRNSGKANYTAKNAPPFCEVWFIYKGKHIWTREASETPCYSSSCTQPEIATRESLRCRSFQYGNELFDSEYLQPNSARTTTGSGSRSWVQGEIIETEAIFSSSCSSHCSPQNPFSGIFRYIFRRPWEERITNLLKPREKLS

SEQ ID NO: 232930 - protein, 65 aa, Glycine max
  Clone ID: PAT_MRT3847_52360C.1.pep
KDQDPKVDRWPRIEKSPGKFIRRFRLPENAKMDQVKAAMENGVLTVTVPKEEQKKPQVKSIQISG

SEQ ID NO: 232931 - protein, 73 aa, Glycine max
  Clone ID: PAT_MRT3847_52361C.1.pep
FNTDSKQGIRDLSWTEALLWLVFVYMNMVLLHLLICRTFDVFFQMIIFALIPITKHMHKEIVVFYYLLWLTIF

SEQ ID NO: 232932 - protein, 75 aa, Glycine max
  Clone ID: PAT_MRT3847_52362C.1.pep
RMNTCFPKKLLLVHRSALVFGFSCKKCFCQSFIRYKKYHKFASNLSKDLHVLSFNRAYQIFGKKGSSHGGYLWSL

SEQ ID NO: 232933 - protein, 90 aa, Glycine max
  Clone ID: PAT_MRT3847_52363C.1.pep
SSNKYNIVHLILICHFVLMDVCCLVVDTGQGVYLGLQRLEVALVLLKGFVILHDDGLFLLTGIHHDVLLIGGYLIQEDLDLLLLYDVECI

SEQ ID NO: 232934 - protein, 35 aa, Glycine max
  Clone ID: PAT_MRT3847_52364C.1.pep
FPYRVVLICRHLCSLSMNCKGYREAQELAFRSSMV

SEQ ID NO: 232935 - protein, 101 aa, Glycine max
  unsure (1)..(101): unsure at all Xaa locations
  Clone ID: PAT_MRT3847_52365C.1.pep
NLRYKASGLDTNVLAGARCVSGVWAAQGPMRLVVNTVMARSFERSMEAGTLGMIGHKRFMSDIPSKTSETNLSGFRPLSTHLPLYQPQLSXTLSIFNRIAG

SEQ ID NO: 232936 - protein, 249 aa, Glycine max
  Clone ID: PAT_MRT3847_52366C.1.pep
MSWLLRSTKSKLLSSSSSLSRTFPSLSRSGPTLDLPQIGAISPLPDLFHRNTATMPFAKENASGGNLAGLPKVPANTLGSDSNAINSPRYKASGLDTNVLAGARCVSGVWAAQGPMRLVVNTVMARSFERSMEAGTLGMIGHKRFMSDIPSKTSETNLSGFRPLSPHLPLYQPQLSSTLSIFNRIAGAFLAGVILLFYMIYMKLGLVSLTYDSFYQFIFYSSKLNLLVMEISALAVSYHLYSAIRHLFL

SEQ ID NO: 232937 - protein, 79 aa, Glycine max
  unsure (1)..(79): unsure at all Xaa locations
  Clone ID: PAT_MRT3847_52367C.1.pep
PIRSEPVDLGGSKEAHGGWLRRVLVLAFCVDGIWXAYIYQGVFEENVSXTKLFDCERFEHLAYLNMAQNVVCSIWTFIM

SEQ ID NO: 232938 - protein, 244 aa, Glycine max
  Clone ID: PAT_MRT3847_52368C.1.pep
MSWLLRSTKSKLLSSSSSSSLSRTFPSLPRPQIGAISPLPDLFHRNTATMPFAKENASGGNLTGLPKVPANKLGSDSDATNSSRYKASGLNTNVLAGARYVSRVWAAQGQMPLEVNTVMARSFERSMEAGTLGMIGHKRFMSDIPSKTSETNPSGFRPLSPHLPLYQPQLSSTLSIFNRIAGAFLAGVILVFYMIYMKLGLVSLTYDSFYQFIFYSSKLNLLVMEISALAVSYHLYSAIRHLFL

SEQ ID NO: 232939 - protein, 32 aa, Glycine max
  Clone ID: PAT_MRT3847_52369C.1.pep
PTRPPTRPLTLAFTLGRTQSGSLQLLLIPIHN

SEQ ID NO: 232940 - protein, 151 aa, Glycine max
  unsure (1)..(151): unsure at all Xaa locations
  Clone ID: PAT_MRT3847_5236C.1.pep
MELLKPLHPHHAPILRIPFHAVPSSSSSQSQSQVPLPMISKVHVAVGKSLDKVVPLLRWTLNHFRNAEIVIVHAYQPSLTIPTLLGKLPASQASPAVVSAFRKVEREQIMKLLDKYLSICRAARVKAAIIVTEADQVQKGXVDXXLSIILR

SEQ ID NO: 232941 - protein, 56 aa, Glycine max
  Clone ID: PAT_MRT3847_52370C.1.pep
GYKFMIYPILYYDSGTRFNHFKLERKCEDSLSIMWLRYYNVVLPINSVSCFAMFHF

SEQ ID NO: 232942 - protein, 68 aa, Glycine max
  Clone ID: PAT_MRT3847_52371C.1.pep
HVMVKTVIITSCVVFFSFGLLYLLVSPQKMDEVSTFHLNDKTALDTMQKIKNILIYLDISLLSSSRSR

SEQ ID NO: 232943 - protein, 150 aa, Glycine max
  Clone ID: PAT_MRT3847_52372C.1.pep
MTAVNKQFLWKLGGGDQILFWEDSWVGDGSVLREKYPDLYQVSSQKFQTVASMGIFGENGWEWKFSWRRHLFDSELGEATAFIDQTSALSPVADLKDDWVWGAQPTGIFSTNSAYNCLRSEQPLHQPNSGFRQLWEIKIPPAALSFAWRL

SEQ ID NO: 232944 - protein, 60 aa, Glycine max
  Clone ID: PAT_MRT3847_52373C.1.pep
SPRANLLIHLNFKLKGFMWPILAYGPIKWANFLKPKIVSFLTLGLGGCGSSQQGNWGRGQ

SEQ ID NO: 232945 - protein, 84 aa, Glycine max
  Clone ID: PAT_MRT3847_52374C.1.pep
GIGAVIGLPRRWRTPPTRQNCQSPYIRMKTHYLPDAHGASYKRCLPPNVGTANRGTDIMRTFAVLSSHADDKEADLQIGHPEPD

SEQ ID NO: 232946 - protein, 66 aa, Glycine max
  Clone ID: PAT_MRT3847_52375C.1.pep
KILKPENMAPTNRPHVNSACAMGSALMAPPTMDIPATTPATLRLTLPTTQINQGLGMECGFSLPCG

SEQ ID NO: 232947 - protein, 64 aa, Glycine max
  Clone ID: PAT_MRT3847_52376C.1.pep
TLNEVLKGKIFVGPSHVSPCDEIANLINARFVGAGGSPRTSFSWGGGEGQNHSPHFEWTWPDFS

SEQ ID NO: 232948 - protein, 80 aa, Glycine max
  Clone ID: PAT_MRT3847_52377C.1.pep
LLLLLPPLTITLFTVFLQIQTTSSLSSSLQTPLILPLKTQTLPYGLVSLPTPSSTRKVSFYHNVTLTVSLTVGTPPQSVT

SEQ ID NO: 232949 - protein, 73 aa, Glycine max
  Clone ID: PAT_MRT3847_52378C.1.pep
EKGRPLPKPGEWDVNDPTSTKEYTEIMNNAPDDKNTGGYPHTPRKTAAHPHRIPAVEPGNTPTPKWLSCMHKP

SEQ ID NO: 232950 - protein, 45 aa, Glycine max
  Clone ID: PAT_MRT3847_52379C.1.pep
LTPCFIPLLVCHVQQIKQFCLDIFHFSSSCLAFISFCLNSCSPSW

SEQ ID NO: 232951 - protein, 77 aa, Glycine max
  Clone ID: PAT_MRT3847_5237C.1.pep
SQAMNENRDIAKTLLLYSRWTHYTGQKQKEDVISLYTRVRELQPKWEKGFFYIAKYCDEVLGDARKRQEELLGDARK

SEQ ID NO: 232952 - protein, 58 aa, Glycine max
  Clone ID: PAT_MRT3847_52380C.1.pep
FGLTKAWCFLIGYKAHFCYEHFRHSFVKFFFERGISFKQGRSFWGVGFDFLRLCLLYF

SEQ ID NO: 232953 - protein, 124 aa, Glycine max
  Clone ID: PAT_MRT3847_52381C.1.pep
IEKCDLAIAKWMIDASVPFNAINSAYYQPMIDAISSMGPSYKGPNFHRVRGCLLNKWVDDVRKLVDGYRIVWKQTGCTLMADGWNDGCRRTFINFLVYCPKGTVFLAVMYVSHAPQSAEMLHKL

SEQ ID NO: 232954 - protein, 343 aa, Glycine max
  Clone ID: PAT_MRT3847_52382C.1.pep
PTRPLLEKRKKQKKKAKKIESSYDDEDSKEARLTRIVEKCHNQLTAFGEEQEISPWGVKVFGDKKAFPSLESPDVGSCNLFQSFLNNCLNSVVELTADKGDIFLEGLLVNGWLSKLAFLCGHVEKPVAVWAFNTMLYSSKEELHNSSSEFWCAILSSEKEVDQALVKIDWFPEYMDLRRALDSYGFLFRFSSSAEPNNLDSDIEGPPQNIRAWIRFVSACCLIRSKKAIFSTVEAEEIVEIIICLFLDRQFQGLLVLLNDCMEAIVNYFTDQEWCSSCENIAKFIACRVSKDLNCIQTIECISEANSRCKQLRSAVAYQTLLSCFDGVYSLPLIYQVCARLCI

SEQ ID NO: 232955 - protein, 162 aa, Glycine max
  Clone ID: PAT_MRT3847_52383C.1.pep
MQAPLDPGPSSHSSMCYSHSLSNGNSSTSKPYEAVKLELPSLQYPELDLGSWGSSPPPSLLESVDDFLQSPTPISTLESDCSSPQNSGLLDALLYQAKTMSSSKNHCSDKSSNSSTATPGDRADSSALNVYETEWEDYADPVSPFGATSILNECTGLRANMN

SEQ ID NO: 232956 - protein, 115 aa, Glycine max
  unsure (1)..(115): unsure at all Xaa locations
  Clone ID: PAT_MRT3847_52384C.1.pep
MASLAPYTATATLVISKMLANPINFITATTPASXASRNASFKTVALFSKKKATPTPSKKAVAAAPANDKLTKMYGPNIRIFLPEYLSDLSEIPXFSTKQIHGDYLYNPFHLTTNT

SEQ ID NO: 232957 - protein, 61 aa, Glycine max
  Clone ID: PAT_MRT3847_52385C.1.pep
GFLLNFDVKSFTIYLKLFLCVYCFYLHLILACLWLDHSFMCKVRIYGIGKCFKSLELDRAG

SEQ ID NO: 232958 - protein, 189 aa, Glycine max
  unsure (1)..(189): unsure at all Xaa locations
  Clone ID: PAT_MRT3847_52386C.1.pep
MSPIVLLTFLVLLLCFPFSCYSCNETCGDLHVPFPFYVNTSCESISSAFHLSCSNSSALLLRIGSVSYTVLEFFPDGVLVDFPGSSSCRLYNDLNSFGRNFAGNNKDMFGVSVDNVIXLYDCEDSSLCKADCETIDMPGCDGKGGGSLACCYPLSDHTIWHAGDGFSVFSQFGCRGVSNWAVLRGSTWG

SEQ ID NO: 232959 - protein, 281 aa, Glycine max
  Clone ID: PAT_MRT3847_52387C.1.pep
AVMFCGVFGGHSPMENFVYIRVWKIVTAFLLCNWQENLATTSLDLDFKMEADKNIHGFDIWKQSYIKTCAAVDQDLKQHTGIDSFLSGSTALTIIKQGEYLTIANIGDCRAVLATTSDDGILTPHQLTTDFKPNLPQEAERITQSRGRVFCMEDEPGVYRVWMPNGKTPGLAISRAFGDHCMKDFGLISVPDVTHRKITTRDQFVILATDGVWDVISNQEAVKIVSATSHKEKAAQRLVKCAIHEWKRKKSGIAMDDMSAICLFFHSSPSHQLPPAIKIVD

SEQ ID NO: 232960 - protein, 74 aa, Glycine max
  unsure (1)..(74): unsure at all Xaa locations
  Clone ID: PAT_MRT3847_52388C.1.pep
MTMEYITLXLIIIYAKDINNGNLLSKMDVYSDVLLCMNPLHTHDSTTHIHKDSSCNPTXHYPVKLSFNESLSME

SEQ ID NO: 232961 - protein, 37 aa, Glycine max
  Clone ID: PAT_MRT3847_52389C.1.pep
DKLRCMLNLDHLEQVSAALSNNFNLNESSIYGCVSLC

SEQ ID NO: 232962 - protein, 59 aa, Glycine max
  unsure (1)..(59): unsure at all Xaa locations
  Clone ID: PAT_MRT3847_5238C.1.pep
AXXXPKXRRCRXMXXLGXKPPIPXVHSRIHMRXAXQFGDKTIKARQILVSXGIXRRIDC

SEQ ID NO: 232963 - protein, 66 aa, Glycine max
  unsure (1)..(66): unsure at all Xaa locations
  Clone ID: PAT_MRT3847_52390C.1.pep
LYQAVTIRPMVCPSSASTMVETKNGEWFLGLASPTYLNSTLSGDNRFDPLGLSEDPXNFKWYVQAD

SEQ ID NO: 232964 - protein, 69 aa, Glycine max
  Clone ID: PAT_MRT3847_52391C.1.pep
TSHSHTVDLQPGLGDPHLVHTVHTAADAAMVLGFDAIVGDNHLITLTAICLRLRPVLLARSLAEPALSV

SEQ ID NO: 232965 - protein, 425 aa, Glycine max
  unsure (1)..(425): unsure at all Xaa locations
  Clone ID: PAT_MRT3847_52392C.1.pep
MESDLQQHPPMFLDHHQQQMNSGLTRYRSAPSSYFSSIIDHEFYEHVFNRPSSPETERMLTRFVNSLGGGDADAEDSLATTQNPPTVVAVKEEVNQQPPDVTSMNNEPLVLQQQQQQQQQQQQSNNMYNYGSSGTQNFYQSTGRPPLPNQMKTGHGSSSNLIRHGSSPAGLFSNINIDITGYAAVVRGMGTMGAAANNTSEEANFSPATRMKNNAPNFSSGLMSSRAEVGNKSNTQNNNAENEGFAESQGNEFIPAGFPVGPWNDSAIMSDNVTGLKRFRDEDVKPFSGGLNAPESQNETGGQQPSSSALAHQLSLPNXLQKLQNTSAEMAAIEKFLQLSDSVPCKIRAKRGCATHPRSIAERVRRTKISERMRKLQDLVPNMDKQTNTADMLDLAVEYIKDLQNQVEALSDNRAKCTCLHKKQQ

SEQ ID NO: 232966 - protein, 196 aa, Glycine max
  Clone ID: PAT_MRT3847_52393C.1.pep
MSSRAEVGNKSNTQNNNAEGEGFAESQGNEFIPAGFPVGPWNDSAIMSDNVTGLKRFRDEDVKPFSGGLNAPESQNETGGQQPSSSALAHQLSLPNTSAEMAAIEKFLQLSDSVPCKIRAKRGCATHPRSIAERVRRTKISERMRKLQDLVPNMDKQTNTADMLDLAVEYIKDLQNQVQTLSDNRAKCTCSHKKQQ

SEQ ID NO: 232967 - protein, 95 aa, Glycine max
  Clone ID: PAT_MRT3847_52394C.1.pep
MESDLRQHPPMFLDHHHHQQQMNSGLTRYRSAPSSYFSSIIDREFYEHVFNRPSSPETERMLTRFVDSLGGGDAADADAEDSLANTQNPPTTVCG

SEQ ID NO: 232968 - protein, 50 aa, Glycine max
  Clone ID: PAT_MRT3847_52395C.1.pep
ENGFRSETPPQQAQYNPDKTPEFVIKILQFLVPLLILGLAFVVRHYTKKE

SEQ ID NO: 232969 - protein, 65 aa, Glycine max
  Clone ID: PAT_MRT3847_52396C.1.pep
WRLFTRSRGREEPSPVSEFEGLGFFWAWICFLLGFKMLLGSSVLFNGYAHIFCSVMPDLLNFLYF

SEQ ID NO: 232970 - protein, 105 aa, Glycine max
  Clone ID: PAT_MRT3847_52397C.1.pep
YPKMRFHSFEEVYMNYIPLEMLPTHNPKICSYKYQVEAAIACTSSLLLLSIAYGKSFKSQNKWQNLTSLYRPLKIGFVGISVLSLGGFCFLILLSTLHKITGYVS

SEQ ID NO: 232971 - protein, 134 aa, Glycine max
  Clone ID: PAT_MRT3847_52398C.1.pep
MASDRKLHTFEEVAKHNQTKDCWLIISGKVYDVTPFMEDHPGGDEVLLSATGKDATNDFEDVGHSDSARDMMEKYYIGEIDASTVPLKRTYIPPQQAQYNPDKTPEFVIKILQFLVPLLILGLAFVVRHYTKKE

SEQ ID NO: 232972 - protein, 55 aa, Glycine max
  unsure (1)..(55): unsure at all Xaa locations
  Clone ID: PAT_MRT3847_52399C.1.pep
XMXSSRHKQSFSXKVKXAXXLXXGTXAXXLYXXIGKSKXASXNXTLNLTHHXYKT

SEQ ID NO: 232973 - protein, 74 aa, Glycine max
  Clone ID: PAT_MRT3847_5239C.1.pep
SSRDLFYCIYCHIQFLSMKLTAVNPRLDFNLDELFTKEVRSLLITQFFHFFLLLLRLNNGCGFLVSFDIMRNYG

SEQ ID NO: 232974 - protein, 53 aa, Glycine max
  unsure (1)..(53): unsure at all Xaa locations
  Clone ID: PAT_MRT3847_523C.1.pep
GWALGLPWDQNPKGLASTGEKMGGPKHXGFYPFFGGNQKYSPSLMALKEKNLF

SEQ ID NO: 232975 - protein, 86 aa, Glycine max
  Clone ID: PAT_MRT3847_52400C.1.pep
FSILSACLSSISFTIFSFNSLIPLFSKTFPPSVSKSFFSVISSKVFSCKLFSSESILETSFAGSSSPILILFTVNIQNYYFLSTLC

SEQ ID NO: 232976 - protein, 121 aa, Glycine max
  Clone ID: PAT_MRT3847_52401C.1.pep
LGEETPPPGIRPPPLGGPLFEWVRPLFMYPPGSMVTPPPPVGPVFPPPEGGYFFPPGGGFFYQLLLPLGFFFFFQARILPFCPPSPPSRPPPLIVVAFWVFPPPKDGVLVSSSSLKRVFIR

SEQ ID NO: 232977 - protein, 134 aa, Glycine max
  Clone ID: PAT_MRT3847_52402C.1.pep
MASDRKLHTFEEVAKHDQTKDCWLIISGKVYDVTPFMEDHPGGDEVLLSATGKDATNDFEDVGHSDSARDMMEKYYIGEIDSSTVPLKRTYIPPQQAQYNPDKTPEFVIKILQFLVPLLILGLAFVVRHYTKKE

SEQ ID NO: 232978 - protein, 91 aa, Glycine max
  unsure (1)..(91): unsure at all Xaa locations
  Clone ID: PAT_MRT3847_52403C.1.pep
NLGSICLYVNXLILSPEXXFSNSSSGQTKXRPXRXHSNMISHVGQGXXXPPXSSPXSKSFXPXKXLHEEXRTAXFVDNAXXQNXSGVVVVV

SEQ ID NO: 232979 - protein, 207 aa, Glycine max
  unsure (1)..(207): unsure at all Xaa locations
  Clone ID: PAT_MRT3847_52404C.1.pep
LDLLKHQPMLLLALRVNNIDTVVLPFGTDGKKRPNSLISTMKKMLTVGIGSIGRLTGIGQQKRSIDASGILFWHERAARVPMSTGQQLHIQQKSFAFGTIKAKAQRLGLSQIGLQLHPSATFGRIQKMKAWASPVHSLGVKHIGAIEANLPLYAQLNTLSQQKQVTLNVQVPKTPTRLFSLHTXPMTFVGTENVQNARSQQRSAFLH

SEQ ID NO: 232980 - protein, 57 aa, Glycine max
  Clone ID: PAT_MRT3847_52405C.1.pep
SERNGVHFAGSVVFLSYARYASLQPRKSHHLPQPWTWSIIKQHHVCFLPSKKEGRLI

SEQ ID NO: 232981 - protein, 76 aa, Glycine max
  unsure (1)..(76): unsure at all Xaa locations
  Clone ID: PAT_MRT3847_52406C.1.pep
VVYTVMSRFPCDSLYRINIFLFGNTPTISSLLFAFIFFHPHNFXFFIQXQNXXNIRXSIEVFEILIKFSHPNTLLR

SEQ ID NO: 232982 - protein, 126 aa, Glycine max
  unsure (1)..(126): unsure at all Xaa locations
  Clone ID: PAT_MRT3847_52407C.1.pep
SDGYNKGTALGVENNGTFVLVYPGFSGPDPXRDAKDSXGPGVAPPPHGVAGFKGRVGTNPGPWTGLYPSKRFGPAVVFNNXKAWADHGIYWVGPFVEVPGVAISHQSIFKGLPIKALGSFRSTGLI

SEQ ID NO: 232983 - protein, 190 aa, Glycine max
  Clone ID: PAT_MRT3847_52408C.1.pep
KKRGKRGAKQTPPPLVFSFLKAFFFFTPRGAQTPPPLKKKTPNPQILTGSPPQGGPGKKGPPPPPPQGLSFFKKKNPGLIVLFKKKKKPFSPPLKKKRGLGNPQTQFSRGPLALWPKKGPFSPLGPPRPGPRFLKRGPPKNGGPQRAGKFRALKNKTKILFTKLDPKKKNLPNWARGGGKLVGEGEKKWA

SEQ ID NO: 232984 - protein, 70 aa, Glycine max
  Clone ID: PAT_MRT3847_52409C.1.pep
WLQAPLLKHRKDLSESLDRPNIHTKRDSCLQVTKHLLPLILSRDIVYNGPTFDNGSTLGGKDLSSYVRGA

SEQ ID NO: 232985 - protein, 120 aa, Glycine max
  Clone ID: PAT_MRT3847_5240C.1.pep
KSCSDRFEPSREPSRSSSTVRSLSYRDDDEDDETKTLARILRLVVKAPLRRRKRTVQIVRILATITLISTVGMEILARSQSLHVQKKKIHQNAERSAVVYLNKLNLNSSSKVSPKLMEQL

SEQ ID NO: 232986 - protein, 52 aa, Glycine max
  Clone ID: PAT_MRT3847_52410C.1.pep
WVLHGYIEFKNFKHMFQWCNSFSQKRNGVIFKRLKSISWTPPIFIYFYFNLS

SEQ ID NO: 232987 - protein, 171 aa, Glycine max
  Clone ID: PAT_MRT3847_52411C.1.pep
MGNCWSLQSGSPGDHPNSNTAPNLNNQSGNIQFSAGLSNTRLTQNGNSTSLGRSSHSGGISSRFFGPSSSNNYSTGNNTSTSLWGGSETSQASRVRDEEEFPQGQILDNVDLRAFTLAELKAATKNFRAETVIGEGGFGKVYKGLIDDRAAKKRGEGLTVAIKKLNSESTQ

SEQ ID NO: 232988 - protein, 144 aa, Glycine max
  unsure (1)..(144): unsure at all Xaa locations
  Clone ID: PAT_MRT3847_52412C.1.pep
VGCRWIYTVKYXADDTLDRYKARLVAKGYIQTYGIDYEETFAXVAKMNTVRIIISLAAXQFGWEMHQFDVKNAFLHGSLEEEVYMEIPPGYGASNGGNKVCRLKKALYGLKQSPRAWFGRFTQAMLSLGYKQSQGDHTLFIKHS

SEQ ID NO: 232989 - protein, 150 aa, Glycine max
  Clone ID: PAT_MRT3847_52413C.1.pep
HQKALQGYKEVKVQKRCFTDISFDKIAAESMEGREALSAAAVKHSVPCAETLADIAAYCNERKLASRNVKDACDKLYIWFLLKKKEVLLSEARILGLGPRFMSIYIQKLAIERRIYYDEVEGLTVEWLETTSTLVLSMSTSKCAFRRGCP

SEQ ID NO: 232990 - protein, 113 aa, Glycine max
  Clone ID: PAT_MRT3847_52414C.1.pep
MLGGNHLGVLSDLQNIGPAKHFPVDLREFNLEKVPGLDGTKITDIAAGAEHSVIVTEHGEIKTWGWGEHGQLGLGDTRDQTSPVTVSLDYDLNEAASIRVFCGSGFTFAVTMP

SEQ ID NO: 232991 - protein, 168 aa, Glycine max
  Clone ID: PAT_MRT3847_52415C.1.pep
MSDLEGRVKAYRLVAYTTVSFSIISLLSVCLTLPMLKSYVSNVGMKMDSELSSCQHNAKDIWSEVSQLKGMPLLVAGNRTARSAYGSCQECCSGGAQGQPGQPGQSGRPGNPGAPGSPGQPGQTPQTPCEQVHPPSCTPCPGGQPGNNGPPGPPGAPGAPGQPRTEED

SEQ ID NO: 232992 - protein, 55 aa, Glycine max
  Clone ID: PAT_MRT3847_52416C.1.pep
NTCTCNFHHCSLELSLFFVTLRYIKHQSRGREKLLNGRSNINITFIFCRLELVSI

SEQ ID NO: 232993 - protein, 61 aa, Glycine max
  Clone ID: PAT_MRT3847_52417C.1.pep
VFNRQIKHVSVRTIFWAVTSKCKHVLYALIEHSHTNFTQHSHTRRVVPKLREKMKTLFTVT

SEQ ID NO: 232994 - protein, 55 aa, Glycine max
  Clone ID: PAT_MRT3847_52418C.1.pep
ATFSKSPYKELDNRARQCQKMPHMTGVRVLGSNTKLEWRVSVACYASFHSSRSMI

SEQ ID NO: 232995 - protein, 57 aa, Glycine max
  Clone ID: PAT_MRT3847_52419C.1.pep
TGVASVFLENVELEFSSELRYHVLGCQYRRNKKSNNSNSYMNSCASGYHENVGMGLS

SEQ ID NO: 232996 - protein, 53 aa, Glycine max
  Clone ID: PAT_MRT3847_5241C.1.pep
NDFCYIINPKGGGSPCSSPGSRMLLSVHNKNHSSCVALEFSVELDNLLGDSHV

SEQ ID NO: 232997 - protein, 83 aa, Glycine max
  Clone ID: PAT_MRT3847_52420C.1.pep
LYTIKLTRSTDRSHRCLPKLQENKGSKVSYLNFGQHQTAWESNGNTIHFSKCLCNHPKLPRVILTTWLHLPPFRESCCSAVKR

SEQ ID NO: 232998 - protein, 246 aa, Glycine max
  Clone ID: PAT_MRT3847_52421C.1.pep
MGDHLARAEDFENKAEKKLSGWGLFGSKFEDAADLFDKSANSYKLAKSWDKAGSTYIKLANCNLKLESKHEAAQAYVDAAHCYKKTNINESVSCLDNAVNIFCEIGRLSMAARYLKEIAELYEPEQNIEQAVVYYEKSADFYENEEVNTSANQCKQKVAQFSAQLEQYQRSIEIYEDIARQSLSNNLLKYGVKGHLLNAGICQLCKDDVIAITNALERYQDSWKTTLLLRVKEKLKAKELEEDDLT

SEQ ID NO: 232999 - protein, 131 aa, Glycine max
  Clone ID: PAT_MRT3847_52422C.1.pep
IPAKDHIIWKELLDLLISNMYTQLLTHILRWPSSELVLDTSLSSGFKSSFSLLWDTSAMDLLGGAEQTGTTDRILTAGAMNRGVGALIMPNLSEVGMPGLRGVPVLNLDAACCGLEPTDEVGHMVLTMEDK

SEQ ID NO: 233000 - protein, 131 aa, Glycine max
  Clone ID: PAT_MRT3847_52423C.1.pep
MSVPKSRWDAKVDACKSWGWSEEMVLDAFRKHPIFMLGSKDKINEVMRFWVDQLGWDPLALAKMPKIFGYSLKGRIIPRGLVVRYLIGKGLRKKSASLLTPFSASERLFLENYVMRFKEETHQLSKVYVEK

SEQ ID NO: 233001 - protein, 56 aa, Glycine max
  Clone ID: PAT_MRT3847_52424C.1.pep
QNSYQEIVNYDWNHFLSCLEGFLSPSFSWEPLCENLDLYWSISMSSLSPTFFPTEF

SEQ ID NO: 233002 - protein, 133 aa, Glycine max
  Clone ID: PAT_MRT3847_52425C.1.pep
QNPSSIDSCVFRAHSQASSNRIFRPPGVSSSSIVRTMCPTSFVGSRPQHVAPRLRTGTPRSPGIPIYERFGMIRAPTPLFMAPAVRIRSVVPVCSAPPRRSMAEVSQSKEKEDLKPEDKEVPRTSFELGHLRI

SEQ ID NO: 233003 - protein, 112 aa, Glycine max
  unsure (1)..(112): unsure at all Xaa locations
  Clone ID: PAT_MRT3847_52426C.1.pep
MVTVTGAAVPIPSFTGLNASACYESAAAVKVSTPQATWFCCIQASIKDVGITAEAIAASADLTSNAIAIELSLSTEDXSLVISPNSFSKAHEEKIVFYNNAGLRHNVEFHKD

SEQ ID NO: 233004 - protein, 56 aa, Glycine max
  Clone ID: PAT_MRT3847_52427C.1.pep
YVSLLFGSRPQMFLSCSTCIFNRELDGILVKPQESDPSKMGLHVSKSRAISNSYRK

SEQ ID NO: 233005 - protein, 90 aa, Glycine max
  Clone ID: PAT_MRT3847_52428C.1.pep
WIDVLSIHILRVEGCVKKLLCLVGFVVLVSTIGGVESARKWGKSTTTDNEAYKLAPCASSMHDENDSVSQRCCAQVKNIVQNRRCLCADL

SEQ ID NO: 233006 - protein, 264 aa, Glycine max
  Clone ID: PAT_MRT3847_52429C.1.pep
MARGLKKHLKRLNAPKHWMLDKLGGAFAPKPSSGPHKSRECLPLILILRNRLKYALTYREVIAILMQRHVLVDGKVRTDKTYPAGFMDVVSIPKTNENFRLLYDTKGRFRLHSVRDEESKFKLCKVRSVQFGQKGIPYLNTYDGRTIRYPDPLIKANDTIKLDLESNKITDFIKFDVGNVVMVTGGRNRGRVGVIKNREKHKGSFETIHVQDATGHEFATRMGNVFIIGKGTKPWVSLPKGKGIKLSIIEEARKRLAAQNETVA

SEQ ID NO: 233007 - protein, 77 aa, Glycine max
  Clone ID: PAT_MRT3847_5242C.1.pep
TYEKEAKEYEFRHEGFQMNLKAWLVLPVEGMGPGRTITMGTVGRWGLLWSLPQIPLVATELFIDQEMVTHARPGEYL

SEQ ID NO: 233008 - protein, 64 aa, Glycine max
  unsure (1)..(64): unsure at all Xaa locations
  Clone ID: PAT_MRT3847_52430C.1.pep
RHAVANILSFFILHIIFFITFSIRFFSALNFYTFIHXFLPYFNYILTQFLTHIRYYQFLIFIYY

SEQ ID NO: 233009 - protein, 157 aa, Glycine max
  Clone ID: PAT_MRT3847_52431C.1.pep
MARGLKKHLKRLNAPKHWMLDKLGGAFAPKPSSGPHKSRECLPLILILRNRLKYALTYREVIAILMQRHVLVDGKVRTDKTYPAGFMDVVSIPKTNENFRLLYDTKGRFRLHSVRDEESKVCLFMHNLSNVYTHSLLKVYLWMVNTKITFKLVNGNL

SEQ ID NO: 233010 - protein, 116 aa, Glycine max
  Clone ID: PAT_MRT3847_52432C.1.pep
FFFFFFFFFFFFFFFFFFFFFKEKKTVLFQATTKQNPNTKNTVLQGPLPTGDLLLSVYGGFIHNKVHFFVKKNYGGDSILLWDPGGFFTKEGAQKEHNEGWQSSPPSTKFFWGENP

SEQ ID NO: 233011 - protein, 75 aa, Glycine max
  Clone ID: PAT_MRT3847_52433C.1.pep
KDQSKSQGGRLPNNDGPAVCQRVNFVPLRGLKKMEFKRLISMSGFVGGSYCTMCISTLFLFNFSKLRNHLLLLKE

SEQ ID NO: 233012 - protein, 87 aa, Glycine max
  Clone ID: PAT_MRT3847_52434C.1.pep
PWPTVCRSAAVTRRTIRPCRFPCRYHLRSHAIANGAIQGKGPPRRPTAGTRRRRRRSGRGRTPRHSKPSSKRSDKRRERVGSHDAWA

SEQ ID NO: 233013 - protein, 54 aa, Glycine max
  Clone ID: PAT_MRT3847_52435C.1.pep
LLQSNNDCFLTFHYSHENQSDDNSYQIMIVFRRFIIHMENHIIYNHHMFTIANM

SEQ ID NO: 233014 - protein, 88 aa, Glycine max
  Clone ID: PAT_MRT3847_52436C.1.pep
FDLTYNKRAQRDLSMAGKTTLINSVLTALPISLLSLFKIPQKTVQSLICLQRTFLWGGDNDHKKIPWVKWADIWLPKTDGGLGIKDIF

SEQ ID NO: 233015 - protein, 73 aa, Glycine max
  Clone ID: PAT_MRT3847_52437C.1.pep
MGTEVMGRWGTWEELLLGGAVLRYGTRNWNVVAAELRARTACPYTITPEVKNKLIIQLINLIFLSLFSPFFQK

SEQ ID NO: 233016 - protein, 62 aa, Glycine max
  unsure (1)..(62): unsure at all Xaa locations
  Clone ID: PAT_MRT3847_52438C.1.pep
TQHKVXQQTYTLQYXVEMGELMNMVCTISPRTAQWLHTDVGSHCVMSTSQLHSHLYKVXLFT

SEQ ID NO: 233017 - protein, 78 aa, Glycine max
  Clone ID: PAT_MRT3847_52439C.1.pep
KRGGKGEKKIVKKKKNLARIKNPILGEKGSKGKKKPVGGPKKRKKKQVGPNKEKGVKPRKKLGPNCFVLNSRVTKGVY

SEQ ID NO: 233018 - protein, 92 aa, Glycine max
  unsure (1)..(92): unsure at all Xaa locations
  Clone ID: PAT_MRT3847_5243C.1.pep
TGSXXKKKXXTKSQPEKIRVSSRKXNPRAPRGRFSPRXGAPRGFKKRQNPXXKKKRKGKTNNSYRKLNKLGPXXXTKKQAPRXKTHHHKKKX

SEQ ID NO: 233019 - protein, 124 aa, Glycine max
  unsure (1)..(124): unsure at all Xaa locations
  Clone ID: PAT_MRT3847_52440C.1.pep
IERQKQTCNANANATIIPFPSLPFPTKPYRSTLHYTLSINCGNSIRNAVSEYSINPHPLSVSAPFPTNFPYLFFLLLSIIMRXSILQPHPHPHRIKRWPRIDASSFHRRKDKVVVIMGATGSGK

SEQ ID NO: 233020 - protein, 72 aa, Glycine max
  Clone ID: PAT_MRT3847_52441C.1.pep
ARIRSKRSSFTSLRPRNFSLYASFLIVPEMHLGKHRVEQMRLLPLTLQEEASSTIPSTFFCFLINFDLLLLN

SEQ ID NO: 233021 - protein, 106 aa, Glycine max
  Clone ID: PAT_MRT3847_52442C.1.pep
GKFHPLLNFGKKKTGPRPPPNKKEVKVKPSGNRLGWFPNAEPPEWFYGNIIGNRRFYPFWFTNPPECLQFNLDSCGQNLSRNISGVLILTWVDVHDVYSHPINTYS

SEQ ID NO: 233022 - protein, 89 aa, Glycine max
  unsure (1)..(89): unsure at all Xaa locations
  Clone ID: PAT_MRT3847_52443C.1.pep
XTHTTVEVSQPKRHHKPXYXIEXCQPXTQXSSFGXKLSEITSKVSKGVMAXXKSTSYYSQTQFXPRPHGTNRGPIWXTQXKCQNWGSKP

SEQ ID NO: 233023 - protein, 453 aa, Glycine max
  unsure (1)..(453): unsure at all Xaa locations
  Clone ID: PAT_MRT3847_52444C.1.pep
MRMDYLKQKFPFNHRNLFLKLLLTIFFIGLAFRILFFHSLSPQISPVLESPFPEKVTLPEPQTSTVPEEEHVPEPPPVIEHVSEPPPVLEHVPQTEDQLSPTDSEKCDYFNGDWIPNPXGPVYTNDSCDLIESHQNCLKNGRPDRDFLYWRWAPRECDLPQFDPHRFLNLMRNKAWAVIGDSISRNHAQSLVCILSKVEKPVLVYHDEEYKCKRWNFPSYNFSLSLIWSPFLVEAAIFEDKNGVSSSEVELHLDKLDSKWTDQYLDFDYISFSTGKWFLKSAIYYENDTILGCHSCPKKNLTELGFNFAYCNALKLVMNFIVSSNHKGIFFRTFTPDHFENMEWLNGGTCKRTTPIKGEMEMKYLRKMLRDVELDEVGKAATEAXKNGVSLKLVDVAPFSLLRPDGHPSPYRQFHPFEKDQNASKVQNDCLHWCLPGPIDSWNDIIMDMVVNG

SEQ ID NO: 233024 - protein, 127 aa, Glycine max
  unsure (1)..(127): unsure at all Xaa locations
  Clone ID: PAT_MRT3847_52445C.1.pep
MGSMSDSDRKRRHFSSLSPTPAAAIAKKLPFLPVSEDKKLDIVVLQYQNQKLTQKLETQKLEYAGLENRFSHLKERQKSYDSTXESVKKSXEQLVDDLEFVSERTRESSSXTXSRFASIMEDGSPST

SEQ ID NO: 233025 - protein, 58 aa, Glycine max
  Clone ID: PAT_MRT3847_52446C.1.pep
YIGSRMIVLMVTDTLFEANDKCISGHGGKKTVSSLFIIFCTLNYFFRSENVLSLQFIE

SEQ ID NO: 233026 - protein, 46 aa, Glycine max
  Clone ID: PAT_MRT3847_52447C.1.pep
MIVERIADIELQLHMTLLSGTVERVIHLLCPIKGRIHNHSKVLKRV

SEQ ID NO: 233027 - protein, 47 aa, Glycine max
  Clone ID: PAT_MRT3847_52448C.1.pep
HHMMHMFSLLTIIIFIMKSSSTYIRHGRAAYIKCCFYFNFECLEANE

SEQ ID NO: 233028 - protein, 417 aa, Glycine max
  Clone ID: PAT_MRT3847_52449C.1.pep
MGNSHAKKRDTQFSRNVVEGRVPSPKNKTLSPSPSLEPPLPREPPPPAAMSLNKGSGKLSAKEKYALIPDNFTTLEQVTIALRKEGLESSNLVLGIDFTKSNEWTGSVSFNNRSLHAIGSTPNPYEKAISIIGKTLAPFDDDNLIPCFGFGDATTHDQEVFSFHSDHSPCHGFEEVLACYQKVVPNLRLSGPTSYAPVIEAAIDIVEKSHGQFHVLVIVADGQVTTSAASEHGELSPQEARTIKAIVDASSYPLSIILVGVGDGPWEDMKKFDDKIPARDFDNFQFVNFTDIMAKKSSPSEKEAAFALAALMEIPFQYKAATELGLLGRATGRSNKIVPRPPPAPYSQLVPPARVLSNTPTFMEDERNQMACAVCLTNAKDLAFGCGHMTCRECGHKLTNCPMCRERITSRLRVYSG

SEQ ID NO: 233029 - protein, 77 aa, Glycine max
  Clone ID: PAT_MRT3847_5244C.1.pep
DPTNQSETCGVAWILEPEMRGKLGKHECLCHLMKIDSERPKTEQGMKIETRIALICLKLFNYLGFINKGFKLNENIE

SEQ ID NO: 233030 - protein, 178 aa, Glycine max
  Clone ID: PAT_MRT3847_52450C.1.pep
MGNSHAKKRDTQFSRNVVKGRVPSPKDKTLSSLQSPSSPSQSPSPSLEPPREPPPPVMFFNTGSGKLSAKEKYALIPDNFTTLEQVTTALRKEGLESSNLVLGIDFTKSNEWTGSVSFNNKSLHAIGSTANPYEKAISIIGKTLAPFDDDNLIPCFGFGDATTHDQEVFSFHSDHSPC

SEQ ID NO: 233031 - protein, 242 aa, Glycine max
  Clone ID: PAT_MRT3847_52451C.1.pep
QNVVKGRVPSPKDKTLSSLQSPSSPSQSPSPSLEPPREPPPPVMFFNTGSGKLSAKEKYALIPDNFTTLEQVTTALRKEGLESSNLVLGIDFTKSNEWTGSVSFNNKSLHAIGSTANPYEKAISIIGKTLAPFDDDNLIPCFGFGDATTHDQEVFSFHSDHSPCHGFEEVLACYQKVVPNLRLSGPTSYAPVIEAAIDIVEKSHGQFHVLVIGADGQVTTSAASEHGELSPQEAGTIKSIVD

SEQ ID NO: 233032 - protein, 53 aa, Glycine max
  Clone ID: PAT_MRT3847_52452C.1.pep
PTHSNVTIPTPPSSLYHTRILPYPTGISAPNSRNSPSYTYLYTVDTGKCLRTS

SEQ ID NO: 233033 - protein, 72 aa, Glycine max
  Clone ID: PAT_MRT3847_52453C.1.pep
DAFHVPEFARRFCPPIYPLQEQEWQLIEGTPLICLHALKIMPSPLPPSFASETVIDCQPLVIHLQEESCLRI

SEQ ID NO: 233034 - protein, 188 aa, Glycine max
  Clone ID: PAT_MRT3847_52454C.1.pep
MKTINASQVVSIPKGVKVDVKARQVTVTGPRGTLHKDFRHLQVDMIKIGGKRLKVEMWWGKHKQLAAVRTACTHIENMILGVTKGYRYKMRFVYAHFPINAAIVDNGKTIEIRNFLGEKEVRKVTVYEGVTLTRSEDVKDEIVLTGNDVEAVSQSAANIHQSTLVRDKDIRKFLDGIYVSEGGVIEAN

SEQ ID NO: 233035 - protein, 53 aa, Glycine max
  Clone ID: PAT_MRT3847_52455C.1.pep
KNFPLKKAPAFGKSPQIKLENLPEVERAFVPLGFEWGHKPGPSVFIKMPHNQP

SEQ ID NO: 233036 - protein, 239 aa, Glycine max
  unsure (1)..(239): unsure at all Xaa locations
  Clone ID: PAT_MRT3847_52456C.1.pep
MSGDAQNPQAALSLQSSLAEPHNRFEIGVNQPMIXCKYPYMDQFYGLFSAYGPQISGRIMLPVNLTSDEGPTYVNAKQYHGIIRRRQSRAKAVLENKMIKRRKPYMHESRHLHATRRPRGCGGRFLNTKSSTDGNGKNESEVIKTSGRQFQSSASQSSEVLQSEVGMLNSSKQTNRSSPNISGSEVTSMYSREGFDGFSVNPLGSSVHSLADMIGSEHGIIRPTKWVAAVPGNCYNLKI

SEQ ID NO: 233037 - protein, 126 aa, Glycine max
  Clone ID: PAT_MRT3847_52457C.1.pep
HLFISNTHILSSVAFFFLFFLQKMASDQHNTFHEEGGGKSACSRSRKGPKKPPQRGLGVAQLERLRLQESWKKMNEGSSSGGGVLQVPLPTLHDHHHHQQQQLFQCHPPPVFAASGGVPMRYGAPS

SEQ ID NO: 233038 - protein, 51 aa, Glycine max
  Clone ID: PAT_MRT3847_52458C.1.pep
IYLYFSITTLSLRLFFCIPSQHYFNFLMLKRQAPVVIFIYFRVGECKIFVG

SEQ ID NO: 233039 - protein, 154 aa, Glycine max
  Clone ID: PAT_MRT3847_52459C.1.pep
SGKVRPLDVEVLEEVAGENWNGDCIVYAFNAGLLSKISCRGKLEVSLETLHCEIYTVSPIRVFGHDVLFAPIGLLDMYNSGGAVEALDCTMDVAQCIIKIKGRGCGRFGAYSNVRPKLCVVDMKEEEFFYNREDGLLTITLAGEGNSKDIEFVY

SEQ ID NO: 233040 - protein, 147 aa, Glycine max
  Clone ID: PAT_MRT3847_5245C.1.pep
CFPIQSPLCLVHYLTLDIRLQLCKCLLKKAKILKHIRLTNNTKPHHNPSSSVCSLWMQHNINYFQFYYKKLECHYHFISGSLKESPGNNNNIPQMHPIFLLKKQISHKSKGLLVVSLLHLEAKREAVVEMGRKSIEVKATQASLRLK

SEQ ID NO: 233041 - protein, 92 aa, Glycine max
  Clone ID: PAT_MRT3847_52460C.1.pep
PAIWYSQLHAPLSSPLSTPRCRLHHIPSPSQNSNPFVSLLRFGRGSFPIIFSIVSLCSPKCDYNGSGLLWDMDREKNSFHGVGASVLHGMIF

SEQ ID NO: 233042 - protein, 40 aa, Glycine max
  Clone ID: PAT_MRT3847_52461C.1.pep
KLINDIITHTNIFFSHMILNRKSSGFFISVNMELAQFPFT

SEQ ID NO: 233043 - protein, 61 aa, Glycine max
  unsure (1)..(61): unsure at all Xaa locations
  Clone ID: PAT_MRT3847_52462C.1.pep
GLPPFHSTRAAMRTETKLAKQCINGRILKLSYNMTFYFEQVTYAYSLIGEGXALXRPVPER

SEQ ID NO: 233044 - protein, 167 aa, Glycine max
  unsure (1)..(167): unsure at all Xaa locations
  Clone ID: PAT_MRT3847_52463C.1.pep
RGISKLTFDFTYPNPHTAEHKFLTLDSTLLSFLQRHFPLWPPIYLVADNRILVISYGNIGTSEPEAEVFFGPGPGHVAEAEIIGLSVSTLGSTIYINVKNRGLFAYQSRGHLLWSVEPVLYQFGYRQGCRKNLTNCYFASVPLLDHCEGSIYISNTEGELYXLSVRS

SEQ ID NO: 233045 - protein, 96 aa, Glycine max
  Clone ID: PAT_MRT3847_52464C.1.pep
IEKGPRPLIETKNFFFKGQSSPPNFSQFRGSPPTPFNYMGPQGGLLQGPPLIRIWAPPRERENFLGGNNNGGAFHLERLSPNFPLLRGNRGTLFFG

SEQ ID NO: 233046 - protein, 230 aa, Glycine max
  unsure (1)..(230): unsure at all Xaa locations
  Clone ID: PAT_MRT3847_52465C.1.pep
MATSDHPVQESRFSRMHYFSTDDDQDEDDDDTDLDFVDDSNVSPAEEEEPKKSDILGGENFNRRREFRVVLDPRGKWVQEWNRVFLLVCATGLFVDPLFFYALSISDTCMCLFVDGWLVITVTALRCMTDALHVWNMWLEFKMAKRSSSFIGRDTNASXGGGGGGGGYALRYLKAKRGFFFDLFVILPIPQIVLWVTIPVLLKXGSITLGVTAFLIMFLFQYLPKIITLF

SEQ ID NO: 233047 - protein, 54 aa, Glycine max
  Clone ID: PAT_MRT3847_52466C.1.pep
LLEVEHSFSLVRGTGAFPGGMETGCNVQESLCLLHTSLYKHSATSLLLFRRPVF

SEQ ID NO: 233048 - protein, 188 aa, Glycine max
  Clone ID: PAT_MRT3847_52467C.1.pep
MGMATITMGGNHNSSITPRHYNTHKVFLFCNYILLGAASSCIFLTLSLRLIPSLCGFFFILLQVFTIAGAVSGCAAVGTNRWYSAHMVATVLTAIFQGSVSVLVFTRTGDFLGQLKSYVREEDGAVILKLAGGLTILIFCLEWVVLTLAFFLKYYACVEGNSGAVVPVRSGKVQQDEDLKDWPWPFQV

SEQ ID NO: 233049 - protein, 107 aa, Glycine max
  unsure (1)..(107): unsure at all Xaa locations
  Clone ID: PAT_MRT3847_52468C.1.pep
RPGNESEGSATSAALPSHCPREQAAQCKHRVQIWVSTQSRLYVSNPDFPSQMQRLVTEGLAAWXGSLAPKGIRAAPGSSGTVRCPGSTTIQGLLEPNSELTYACXRX

SEQ ID NO: 233050 - protein, 78 aa, Glycine max
  Clone ID: PAT_MRT3847_52469C.1.pep
QTIDCGSHLWFPPKHQGFSWGMQLLWVAGLISPPTRIHVLVMWQLCLNPRPPRKKVACNNLVSMLNPHPHRKWNFLLP

SEQ ID NO: 233051 - protein, 179 aa, Glycine max
  Clone ID: PAT_MRT3847_5246C.1.pep
MSSSGSHGTEGSSSNIPIEYQQQQQQSPVTLSRYESQKRRDWNTFGQYLKNQRPPVPLSQCNCNQVLDFLRYLDQFGKTKVHLQGCMFYGQPEPPAPCTCPLRQAWGSLDALIGRLRAAYEENGGSPETNPFASGSIRVYLREVRECQAKARGIPYKKKKKTTKGNMEESSTSSSIHFS

SEQ ID NO: 233052 - protein, 56 aa, Glycine max
  Clone ID: PAT_MRT3847_52470C.1.pep
NTLDTYMGAWFKIGRVEAQLLPTQLEHNLSFSSLGALAEFHPLQGLAGAEHKMEAS

SEQ ID NO: 233053 - protein, 59 aa, Glycine max
  Clone ID: PAT_MRT3847_52471C.1.pep
PIQWFIFIGHHHPYISLDHRIRPPILTGYSIIPSRFHVNKHQCLTYLRIINTCTPTKYK

SEQ ID NO: 233054 - protein, 132 aa, Glycine max
  Clone ID: PAT_MRT3847_52472C.1.pep
MSTNEKKKKKSSLLSRLRVAVQKVKLLLNATVLSHAWHAATILRGVSLSKRQISFNDRPGLMMCTASDETDSEDLVSPAHSLQRTISCPSDDDIDKRAEMFINNFRRQLKMERQISLQLRYCRENSLELVSP

SEQ ID NO: 233055 - protein, 139 aa, Glycine max
  unsure (1)..(139): unsure at all Xaa locations
  Clone ID: PAT_MRT3847_52473C.1.pep
GSSSTARALRRQRLINANSTEELERGXVDAEADGASYTDAKRVPGVNYIGPPKAEPEQSDVTTESKQCLTWLDQQPSRSVRYLSCGSRGSGSVXQLREIARGWEKSGXQFXWAVKRPTQDYKTKPIHDTRTATTTMDSE

SEQ ID NO: 233056 - protein, 90 aa, Glycine max
  Clone ID: PAT_MRT3847_52474C.1.pep
VVYSDNKLGIYHVNKVLLPLDFFQTNKAPALAPTTLAKAPKAAKQNSSEDDQEETDQNHNKSGAVSLVSLGGAMLMSIGIALVTVATMWS

SEQ ID NO: 233057 - protein, 155 aa, Glycine max
  Clone ID: PAT_MRT3847_52475C.1.pep
GFYVPRSSLLCLVPPSWSGSCIRVPLLSRVPSSGSGAKKWLQLPLPWRLFSSTRRLARPLGFHWRSAVGPVECRAVPHVDRRECALPGSGLRRRSRCGVRALSSSVCCACSGLCLLADLHVCRLRSASCRSACLELFFASGNNVVFKNMEMGMSN

SEQ ID NO: 233058 - protein, 239 aa, Glycine max
  Clone ID: PAT_MRT3847_52476C.1.pep
MEVGMSLNALVRLPLSNSRFHDDAAPMIIRHSLFSSRKQQQQQQSYKVPQRHQVFVVEAKGKKGMMSRQFQRNAPPPLPKIEDDGNPKFVIFIRMANVYLWYPLSIVSGGTTAKIMVAAKDNFLGKYIYKDTLDRNLAAVIYRDEKEVQKSAFKQYRVLRTATDFRYGYKLVENGNIRAALSTTDVIELPTQDKLKTVLDKVKDFFGDAKESFGKITSLGTTETEESEEDTKEKAKVKG

SEQ ID NO: 233059 - protein, 116 aa, Glycine max
  Clone ID: PAT_MRT3847_52477C.1.pep
TRPVEAKGKKGMMSRQFQRNAPPPLPKIEDDGNPKFVIFIRMANVYLWYPLSIVSGGTTAKIMVAAKDNFLGKYIYKDTLDRNLAAVIYRVRFSPPPPLQFFYFIFYLCVACDTAI

SEQ ID NO: 233060 - protein, 132 aa, Glycine max
  unsure (1)..(132): unsure at all Xaa locations
  Clone ID: PAT_MRT3847_52478C.1.pep
ITRAYGLNPGILGSRLLGTIPXPFSQYTDWNQMATVXTPLNFDPSKQSXFCQLSIDLLGGGILVDKTGDWITLIQNFPFRYLLRVVAWKKGCLTVKIAIAGNALVKMSXWALLVQVFLTYMNCPEHLVACMW

SEQ ID NO: 233061 - protein, 89 aa, Glycine max
  Clone ID: PAT_MRT3847_52479C.1.pep
FARPGVRPNDNAYWVRSYYYRGKVSWCNLAQVVGPPVVTKLYYTVFKFKWAAIGIRGILSPLKWVFILRDKIGSLGFCLKKKKKKKNPQ

SEQ ID NO: 233062 - protein, 84 aa, Glycine max
  Clone ID: PAT_MRT3847_5247C.1.pep
YLFYFTYPIIYCILVCFLTLISNYHVLNVKAASMFKGPVPPIVPFSLGSLGFMTPFCILQHVFMHIIFFIIISVSISTWKLNLT

SEQ ID NO: 233063 - protein, 57 aa, Glycine max
  Clone ID: PAT_MRT3847_52480C.1.pep
RTFSFLGQDCLVKPKICKQNDHSEPWLSFPRKGVRQIRGSGLTATGLPFEKPTIMSS

SEQ ID NO: 233064 - protein, 117 aa, Glycine max
  Clone ID: PAT_MRT3847_52481C.1.pep
MKSEAQPELNTFYPIKPECQADVPATRFKPRAGKTLSQRRWQASFSQDGHLDIAKVLRRIQRGGVHPFIKGEVWEFLLGCYDPNSTLEERNELKQRRRGQYDMWKAECQKMVPVIVS

SEQ ID NO: 233065 - protein, 79 aa, Glycine max
  Clone ID: PAT_MRT3847_52482C.1.pep
TPFFSLGVGKQHAENFPPFHFFRQKNFSTMEPTLSPFAFNFLLKTLPFQLYLFSIPKTPSSLSFFPTNLQLFHDNPNWS

SEQ ID NO: 233066 - protein, 73 aa, Glycine max
  Clone ID: PAT_MRT3847_52483C.1.pep
VVSIMGRIQCLVVVCTVILNNNAFMFDSLRLFCEYLANNSSFRIIVVRVHDHLQLIGTDPQSLRSSYVCSSTL

SEQ ID NO: 233067 - protein, 107 aa, Glycine max
  Clone ID: PAT_MRT3847_52484C.1.pep
RGDPRGRPRVRTPILRDREPRQGQKGEAPSGTTPGPTPPDQQAQNQTTRPRRRETHAPAERKRERPRERPTTKDKPDTSNPPPPPKQPQRRRPPPQGKGNREQAPSH

SEQ ID NO: 233068 - protein, 94 aa, Glycine max
  Clone ID: PAT_MRT3847_52485C.1.pep
LFFFFSFCFFFFFFFSKQKTGGNKNHAHWNFFGHIFRVRPLIYNIDPYTSFSYCLFHMIEAYYWNPFCCPGGCPFNLIRLTTGTEEHGYLLNDP

SEQ ID NO: 233069 - protein, 628 aa, Glycine max
  unsure (1)..(628): unsure at all Xaa locations
  Clone ID: PAT_MRT3847_52486C.1.pep
MIVEDENCGVGSGGGGRWLRGFGSLIRRKQVDSVHVRRHGQLARKLSAVDLVGIGVGATIGAGVYILIGTVAREQAGPALVISLLIAGIAAGLSAFCYAELACRCPSAGSAYHYTYICIGXIAWLVGWSLILEYTIGASXVARGITPNLALFFGGTYSFLGHTLPLXIVVDPCAIXFFLLPSCLGRPTRPARVFVTTVNVCVMLFIILVGGYLGFKSGWVGYELSSGYFPYGVNGMFAGSAIVFFXYIGFDSVSCTSVEVKNPQRDLPIGISTALTICCVLYMLVAAVIVGLVPYYELNPDTPISSAFSSYGMQWAVXRYIITTGAVTALFASLLGSVLPQPRVFMAMARDGLLPHFFSDIHKGTQIPLKSTIVTGVFAATLAFFMDVSQLAGMVSVGTLLAFTTVAVSVLIIRYVPPDEVPIPSSLLTSVDPLLRQSSGDIGEDGSVSPVDPASYCENSHLEALLGHPLIIKEVCKDEQNEKARRKLASWTIALLCIGILIVTSAASADWCPRILRLTLCGMGGILLLCSTIVLACVKQDDTRHSFGHSGGFACPFVPFLPAACILINTYLLIDLGVATWLRVSVWMLIGVLVYLFYGRTHSSLLHAIYVPSAYADEIHRSQASHLA

SEQ ID NO: 233070 - protein, 84 aa, Glycine max
  unsure (1)..(84): unsure at all Xaa locations
  Clone ID: PAT_MRT3847_52487C.1.pep
ENGELFVACHVXGFPSCRXCYACFRSVLNLRCPXATLEYKFYGRCPRVARDVEDNFDADDFDDALPVKNHRDDLDRNPNVSHIG

SEQ ID NO: 233071 - protein, 133 aa, Glycine max
  unsure (1)..(133): unsure at all Xaa locations
  Clone ID: PAT_MRT3847_52488C.1.pep
LQFQDLNEHKRSIHLEVIRDGRRVEISIYDVVVGDVIPLNIGNQVPADGVLITGHSLAIDESSMTGESKIVXKNSSDPFLISGCKVADGSGTMLVTAVGINTEWGLLMASISEDNGEETPLQVRLNGLATLIG

SEQ ID NO: 233072 - protein, 180 aa, Glycine max
  unsure (1)..(180): unsure at all Xaa locations
  Clone ID: PAT_MRT3847_52489C.1.pep
LLQALFFGGEDNLPSFLARHTLPGLEIVVDPCAAALILLVTLLLCLGIKESSTAQSIVTTVNVCVMLFIILGGGYLGFKSGWVGYELSTRYFPYGVMGMFTGSAIVFFSYIGFDSVTSTAEEVKNPQRDLPIGISIALTICCILYMLVAAVIVGLXPYYELNSDTPISSAFSSYGMQWAV

SEQ ID NO: 233073 - protein, 52 aa, Glycine max
  Clone ID: PAT_MRT3847_5248C.1.pep
TFNITILNVSLVSFLTIPNTSGKLSTIPTFGTCLTITQKALVDSLTISTIET

SEQ ID NO: 233074 - protein, 106 aa, Glycine max
  unsure (1)..(106): unsure at all Xaa locations
  Clone ID: PAT_MRT3847_52490C.1.pep
DTLLYRALTAISGACSLHYRNVNRCHLIRYAGVIAIARWYPKLXYLTLSLLHNFCDIXMAELAEHCSLLTEIVLSHCRPTTHAVLTHLVKRCCTELESCHMVYCSG

SEQ ID NO: 233075 - protein, 73 aa, Glycine max
  Clone ID: PAT_MRT3847_52491C.1.pep
AHINIECLMDYTDVRGFMKRDEFEQLMLSILERLKGPMQNALAEASLTGENVHTVDAVGSRSRVPSINTILTE

SEQ ID NO: 233076 - protein, 53 aa, Glycine max
  Clone ID: PAT_MRT3847_52492C.1.pep
QIGVHHATDTQHSRLVHTDASYFKLLTRGGKNDASDKSTTQHSKRSHLKYKAD

SEQ ID NO: 233077 - protein, 75 aa, Glycine max
  Clone ID: PAT_MRT3847_52493C.1.pep
LLCLLHVVIERWNYLTSQTESSSMLNKNGGRDSILGRLRSKWPADSLLGHTTNPLLAARKIITVNLQIRHFNNAC

SEQ ID NO: 233078 - protein, 51 aa, Glycine max
  Clone ID: PAT_MRT3847_52494C.1.pep
AVLHNQEVTKFKLMLFMKGVCVGLHLAALRLSSASGKRSFSHDREKPRPER

SEQ ID NO: 233079 - protein, 110 aa, Glycine max
  Clone ID: PAT_MRT3847_52495C.1.pep
GKGNKPCKAPLWQPNRESFVFKPLDRKPLWEIHPPQVINPELLRKAFDLVKREGLEVPKNVPLVEPLKHPVYTPQGSYPPIKVPTPDTMLRAKRILNINDEANMVLPVPL

SEQ ID NO: 233080 - protein, 34 aa, Glycine max
  Clone ID: PAT_MRT3847_52496C.1.pep
AATLLITPSYRRILSKSSGAENVYTIWPEDSARA

SEQ ID NO: 233081 - protein, 47 aa, Glycine max
  Clone ID: PAT_MRT3847_52497C.1.pep
FKFLKCAQRFRRKKKKKKKKKKKKKKKKKKKKNGKKKKKKKKKHRRA

SEQ ID NO: 233082 - protein, 105 aa, Glycine max
  unsure (1)..(105): unsure at all Xaa locations
  Clone ID: PAT_MRT3847_52498C.1.pep
EPPEGKGEEKKEEKKPEEKPKERGXXXKXKXHXDXXFAKXRRTIVGGKXXQXXSPDGSKDGGTXKGTXDXKEMXXXXNEKXKRNXEXXXXPXKDXXXKEKEGXET

SEQ ID NO: 233083 - protein, 105 aa, Glycine max
  Clone ID: PAT_MRT3847_52499C.1.pep
LMCLHIVSIQNCKHAENLPFPFYKTTPGQNKGGQAGLKINPPHKNQIKGALPVSQSRQPKVADLTSHYGLSPRVGPFTVKKTLKKGLEKKLGAHTSGKGEAMDPS

SEQ ID NO: 233084 - protein, 98 aa, Glycine max
  Clone ID: PAT_MRT3847_5249C.1.pep
LAVLGVHLRIRANFISMFKGTVFTQLINAGLQQPDLPRGCSCLTFKLILGAQRAVVSLRQLDWAGTRCNQGFHDEIARLWRVFHIPYSYTKGCVVGHH

SEQ ID NO: 233085 - protein, 139 aa, Glycine max
  Clone ID: PAT_MRT3847_524C.1.pep
SQVENDNENDDVVERKNPLALAHFANHPAKGMLPNVMICPYDFPLTENNMRVYIPNILFGTAEVNIKRLGSFWFKSGVSRNSQSDVLTLKTVVLVATRSLQDEELLLNYRLSNSKKWPEWYAPVDEEEDIMTGKDESSQ

SEQ ID NO: 233086 - protein, 122 aa, Glycine max
  unsure (1)..(122): unsure at all Xaa locations
  Clone ID: PAT_MRT3847_52500C.1.pep
VDACCKGCKMTVTSALQGIYGVTXVNLDRIANKSTLVDYVKPSKAELRVPYRTSKNAKLSPYLPYYVLAHLYTLSVYDWKTSLTYLRLINHANLYXLALTNSTDVHYTTALIYEYPSSFSLI

SEQ ID NO: 233087 - protein, 64 aa, Glycine max
  Clone ID: PAT_MRT3847_52501C.1.pep
MLEAKCLKKAVVPSTLIEDPSPGSLQCTRLALRVCEDPSSCFVYIASGPHIYKLHIALGESSVS

SEQ ID NO: 233088 - protein, 40 aa, Glycine max
  Clone ID: PAT_MRT3847_52502C.1.pep
MVHEQTLLLKLPSSTAYCNFILTPAVVFDDQRLMIRMTYL

SEQ ID NO: 233089 - protein, 305 aa, Glycine max
  Clone ID: PAT_MRT3847_52503C.1.pep
MSITSSTSFKSLTMAESCLLSSPSSLFNNKTKPSLFSPPSKPLTLQFSCINSSVSLSLAARAHRSPLVTRVAQTSDWAQQEEDDTATFQDEEQGLSETQAGLSSWEPNGEDAGEESFAEPPEEAKLFVGNLPYDVDSQKLAMLFEQAGTVEIAEVIYNRETDQSRGFGFVTMSTVEEAENAVEKFSRYDFDGRLLTVNKASPRGTRPERPPPRHSFEPSLSIYVGNLPWDVDNTRLEQIFSEHGKVEDARVVYDRETGRSRGFGFVTMSSETDMNDAIAALDGQSLDGRAIRVNVAAQRPKPSSF

SEQ ID NO: 233090 - protein, 270 aa, Glycine max
  Clone ID: PAT_MRT3847_52504C.1.pep
MGDNDSLSEFLASAVDAACKAGEIIRKGFYQTKNVQHKGLVDLVTETDQACEDLIFTHLKQLYSTHKFIGEETTAAGGNAELTDEPTWIVDPLDGTTNFVHGFPFVCVSIGLTIGKVPTVGVVYNPIINELFTGIRGKGAFLNGNPIKVSSQTELMSALLVTEVGTKRDKLTIDACTNRINSLLFKVRSLRMTGSCALNLCGIACGRLDVCFELGFGGPWDVAGGAVIVREAGGVIFDPSGADFDITSQRVAASNPFLKDALVDVLHQIV

SEQ ID NO: 233091 - protein, 151 aa, Glycine max
  unsure (1)..(151): unsure at all Xaa locations
  Clone ID: PAT_MRT3847_52505C.1.pep
SRGRATRRFVMVSKPTTTVAAISSRLEWRIDHFEKLMKLMKNGQNLISKQISCTSRSSVVWELHVYPNGKREEDVNNVSFFLRQVXLQRXEDPVMTEFQIYALDASDCRISVCRDTKDFSNQQGRGKFQVHRDKMLASLRPDGKNVLFFAF

SEQ ID NO: 233092 - protein, 61 aa, Glycine max
  Clone ID: PAT_MRT3847_52506C.1.pep
LLSSGRGRVFCSRDVWVLDSHHPTECPFEATKSYSPLLVSHLFMPKFSLWFHNNVNGSYIH

SEQ ID NO: 233093 - protein, 76 aa, Glycine max
  Clone ID: PAT_MRT3847_52507C.1.pep
KGCPITIPHLFRPGKIFPITRAPYRMGSLTFIPDQSLNNTHDDKTVRTRFLRYLPNLEERQFLYEATLLLLLFTGS

SEQ ID NO: 233094 - protein, 92 aa, Glycine max
  unsure (1)..(92): unsure at all Xaa locations
  Clone ID: PAT_MRT3847_52508C.1.pep
NTGYRSRTPXVKCACXMLAVVAHTIFVCKTITDVCVESTNNYMHLQQYTSYSFSFNQHAYFYASDLEFHSMDTFLFNIDVTVLSNIPYYKKH

SEQ ID NO: 233095 - protein, 58 aa, Glycine max
  Clone ID: PAT_MRT3847_52509C.1.pep
QTLPSPTNFFFLILKKNCLVSCTLGGGLQLHSLPKNKLAYYKKPYWSDSHSCFPELIS

SEQ ID NO: 233096 - protein, 77 aa, Glycine max
  Clone ID: PAT_MRT3847_5250C.1.pep
RCISNISSSDFFMLQVMPVDPLYSFLQRPLSTTEAFRCFLLEPRNTLKECMLPSQSSLFIYFPFPFLLYIQQDVLPP

SEQ ID NO: 233097 - protein, 28 aa, Glycine max
  Clone ID: PAT_MRT3847_52510C.1.pep
QQIFLSSLDSQLLKSPFRESDPKIRLGL

SEQ ID NO: 233098 - protein, 100 aa, Glycine max
  unsure (1)..(100): unsure at all Xaa locations
  Clone ID: PAT_MRT3847_52511C.1.pep
ALLEASFLWISGGSRLVQSLITETLPSWVLSTQGLXHEGGETGIAVAILRGYALACYAGHGGTFRRGFDSSYPAXKPLPNVLEIHLQFLARALDGKISVS

SEQ ID NO: 233099 - protein, 173 aa, Glycine max
  Clone ID: PAT_MRT3847_52512C.1.pep
MQGGKKAGESIKETATNIGASAKAGMEKTKATVQEKAERMTARDPVQKELATQKKEAKMNQAELDKQAARQHNTAAKQSATTAGHMGHGHHTTGTGTGTATYSTTGEYGQPMGAHQTSAMPGHGTGQPTGHVTEGVVGSHPIGTNRGPGGTATAHNTRAGGKPNDYGYGTGGT

SEQ ID NO: 233100 - protein, 125 aa, Glycine max
  Clone ID: PAT_MRT3847_52513C.1.pep
QNDNNMDPQRKAFYEYFSALMEPWDGPALIAFTDGHYLGATLDRNGLRPGRFYVTHSGRVVMASEVGVVDIPLEDVSQKGGLNPGMMLLVDFEKHIVVNDDALKEQYSLARPYGDGSKAEVELKT

SEQ ID NO: 233101 - protein, 114 aa, Glycine max
  Clone ID: PAT_MRT3847_52514C.1.pep
VCVFKGNLYGADSNGRTVRVRPDDGGLTLAAEPVFGGDKKFLVESEGALLLVDMYLSYYSCTQGLFHEDFDEEDVAGMGWERTVKFDVFRLDEEGKKWVELTDLRDRVSGFVHE

SEQ ID NO: 233102 - protein, 178 aa, Glycine max
  Clone ID: PAT_MRT3847_52515C.1.pep
MSLSICLHRFFPSKYNREIKSLKMEVETLLMEIIQSRKDCVEIGRSNSYGNDLLGMLLNEMQKKKKGNGNNNSSINLQLVMDQCKTFFFAGHETTALLLTWTVMLLASNTSWQDKVRAEVKSVCNGGIPSLDQLSKLTLLHMVINESMRLYPPASVLPRMVFEDIVLGDLYIPKGLSI

SEQ ID NO: 233103 - protein, 50 aa, Glycine max
  Clone ID: PAT_MRT3847_52516C.1.pep
FVPFIAPQSGYPDKCLCTLHSHPKDHRGLLTKYSIKGLNIVCVTRWFSGL

SEQ ID NO: 233104 - protein, 67 aa, Glycine max
  unsure (1)..(67): unsure at all Xaa locations
  Clone ID: PAT_MRT3847_52517C.1.pep
SFPGMVLGLYALXLAGGYFFPCFPWGLPDGIKPSXMALGYVFGLPAPRSPRLFFVPTKGVVCPFFLK

SEQ ID NO: 233105 - protein, 55 aa, Glycine max
  Clone ID: PAT_MRT3847_52518C.1.pep
TPSTTLLSSSTISSSFLPDFLFLHQQCQQEFTLLFFPDLMQSPMITFHATFWVRL

SEQ ID NO: 233106 - protein, 152 aa, Glycine max
  unsure (1)..(152): unsure at all Xaa locations
  Clone ID: PAT_MRT3847_52519C.1.pep
VPIMVVEWTVLSCIAPTSEPTGVPRRLXHELLLGNIHLDXLTLLMDLGEVSLAMLLRRSMIRLNDNDSLHEEHIXSCQMAQALESNLRKPSXYHYDILTLRLTTLLXLLIDIPPTNGLLPQTPMHTKSLTVLKKHMILRLIYERAKESITQK

SEQ ID NO: 233107 - protein, 71 aa, Glycine max
  unsure (1)..(71): unsure at all Xaa locations
  Clone ID: PAT_MRT3847_5251C.1.pep
KAMGHLQLLYCSLRLPSLLFGAXYQGTLDRIXFLXPSTSSXQSNXTXCXKKDASISXSGVYNSPXXQQXGP

SEQ ID NO: 233108 - protein, 208 aa, Glycine max
  unsure (1)..(208): unsure at all Xaa locations
  Clone ID: PAT_MRT3847_52520C.1.pep
RSSEAAMVVEAQIIKPIGKGIVHRICAGQVILDLSSAVKELVENSLDAGATSIEISLKDFGEQWFQVIDNGCGISPNNFKVLALKHHTSKLSEFHDLQSLTTFGFRGEALSSLCALGNLTVETRTASEPVATHLTFDNSGVLVAERKTARQIGTTVMVKKLFSNLPVRSKEFSRNIRREYGXLVSLLNAYALIAKGVRFVCTNTXCKM

SEQ ID NO: 233109 - protein, 74 aa, Glycine max
  Clone ID: PAT_MRT3847_52521C.1.pep
DCWIHFEYILHHLVPIKRLINGLQACYIKVCKLSFLATIFRTNKLSDQTVLIPNVTSCWGSPYISFNWLPWTFS

SEQ ID NO: 233110 - protein, 164 aa, Glycine max
  Clone ID: PAT_MRT3847_52522C.1.pep
ETPQQRSSARQREGNTEGRSRTTDQNEQPEGAHTHEKRSAREHLQLGLFTRGYLEWSNYPISYLPGGLEANILVELILQHSNIKQLWKGIKHLPNLRALDLSYSKNLIEAPDFGGVLNLEWIILEGCTNLARIHPSGGLLRKLAVLNLKNCIRLVSLPSNICEA

SEQ ID NO: 233111 - protein, 64 aa, Glycine max
  Clone ID: PAT_MRT3847_52523C.1.pep
LLDLFSRQTVHHRCHRVHKGSPMCPITTASHTYHITILRQLTILICPPISCRTLTDPMSKRIFG

SEQ ID NO: 233112 - protein, 37 aa, Glycine max
  Clone ID: PAT_MRT3847_52524C.1.pep
SAGLGSSNSLIYTLTSFQYRNFLKGGPFQDGLASIIT

SEQ ID NO: 233113 - protein, 76 aa, Glycine max
  Clone ID: PAT_MRT3847_52525C.1.pep
SGRRKQPSFSCSLRCSRPVPAPSLPRGQNRAGPSHFQFPKPWVLCETFIIQRMNDGGRIFSNPQCFRVFGVLFSSI

SEQ ID NO: 233114 - protein, 134 aa, Glycine max
  unsure (1)..(134): unsure at all Xaa locations
  Clone ID: PAT_MRT3847_52526C.1.pep
KKESFSFIKIEGNEPGGGVGTNKFPDIHPIRTAAHSQDYSXDYQEPAPAPLVDPTEFTSWSFYKAGIADFAATFMFLYITDLTGIGVPRAKSKCNTAGNQGIPWAFGGMIFALLYXTAGILGGHINPAVTFWLF

SEQ ID NO: 233115 - protein, 119 aa, Glycine max
  Clone ID: PAT_MRT3847_52527C.1.pep
GICYVPATISSPNAARRRQKGSIIPITFLAPIRIFISRTPKTPVRILVFIPNAPKGFVRVPSLVTTIHRVPIVFSYHDIHHIAKNMESVLVVYCDGEMISSYEGGLFEYLSGSKSHQNK

SEQ ID NO: 233116 - protein, 101 aa, Glycine max
  unsure (1)..(101): unsure at all Xaa locations
  Clone ID: PAT_MRT3847_52528C.1.pep
STRPCSRPGIGGYGIGLTVLGNLPIYEMQAADYIFPXFHQNANEALQFRYRSGNQLNSGGLTERAPYGAEGHGGHYHSQTAEGGMWHVPGIKVWQRECGRP

SEQ ID NO: 233117 - protein, 48 aa, Glycine max
  Clone ID: PAT_MRT3847_52529C.1.pep
IGIGLRFKLVQLSFPTLLYRKKLTCSGSSNKGRYLKYPCKNQKLPNLA

SEQ ID NO: 233118 - protein, 74 aa, Glycine max
  Clone ID: PAT_MRT3847_5252C.1.pep
PTDRFRETRHNPSAFLLTVIGNFIYKPTLTNIRSEKLKRQTEDSRVQLHALKDTMDKSTTIYRPLQVSQKELLE

SEQ ID NO: 233119 - protein, 95 aa, Glycine max
  Clone ID: PAT_MRT3847_52530C.1.pep
HIHHIWIPLSCKHVKNLEKVCAGLARGAKDNLLRVNGPAKMPTNVLHITTKTFPCGECTNTWDIFELPVHMIVIDLYRFAHVVKQITCITIEPRV

SEQ ID NO: 233120 - protein, 187 aa, Glycine max
  unsure (1)..(187): unsure at all Xaa locations
  Clone ID: PAT_MRT3847_52531C.1.pep
QVVLITGAASGLGALLAQQLAXYGSXLVLGDLNIEGLNTVVEPLRQAGVEVVAQVCDVSCEADVQALVQSAVTQFGRIDVGINNAGMSPPMKSFIDTDEADLDLSFAVNAKGVFFGMKHQIRQMLRQGGGIILNVASVAGLGAAPKLAAYAAAKHAVVGLTKTAAVEYANKGIRVNAICPFYTTTPM

SEQ ID NO: 233121 - protein, 111 aa, Glycine max
  Clone ID: PAT_MRT3847_52532C.1.pep
SYKNYFCFLYSREEGPIFFGDLLPIHWLPGGQDFAKIMEGMRDRNSQLELQDQEGTNIGSSLSKLILTSGTNTLDSIFSNCPTTTNGSTRSNSVLDYLEPFGSLGYEPLGS

SEQ ID NO: 233122 - protein, 148 aa, Glycine max
  unsure (1)..(148): unsure at all Xaa locations
  Clone ID: PAT_MRT3847_52533C.1.pep
FWSLGQTRGAGAKYLNMTLTKNKXEAYGNHLIERTKAXTRAXTKDANISIKEIEEVLIVGGRTREAXNTRGGTNELKIXSSKGVNPEXGINKDAAIQGGLPHGDGXTVHILDGTTLFLGQETMGGIFTRLIYRNTTISTNKSQVFSTA

SEQ ID NO: 233123 - protein, 36 aa, Glycine max
  Clone ID: PAT_MRT3847_52534C.1.pep
ELPSIGQKDLRILHHRRILVTISKGFNIRTRGRTRG

SEQ ID NO: 233124 - protein, 193 aa, Glycine max
  unsure (1)..(193): unsure at all Xaa locations
  Clone ID: PAT_MRT3847_52535C.1.pep
PIYSNMLGTLFEITPKKNPQLGDLDVFLSVVDINEGALFLTHFNSKAIVVLLINEREANIELVGIKEQQQRQPQEERPLEVRKYRAELSEQDIFVIPAGYPVVVNATSHLNFFAFGINAENNQRNFLARSKDNVISQIPSQVHDLSVPGSAXDIENLIKSQSESYFVDAQPQQTEDGNKGRQGPVSAILKAXY

SEQ ID NO: 233125 - protein, 233 aa, Glycine max
  Clone ID: PAT_MRT3847_52536C.1.pep
MASSENVASIEPCMLRPPVTDSWLAEFFARDADALTKALQKSLSGTVLPDEENYFSPFLPKSDPAVATPTVSSLSGSDQDSAPRRRAPLPPSGKISKRKSRASKRSQTTFITADPANFRQMVQQVTGVRFGGAGQPIAPAAGVVKPEPQRASGLARFPAGAGCLPTLDTSAFLLDHHQQVVGPSSVNSGPATGLSGPGPLPFAQPLLDASFASAGLDFDTFSSFPTLESWKVM

SEQ ID NO: 233126 - protein, 189 aa, Glycine max
  unsure (1)..(189): unsure at all Xaa locations
  Clone ID: PAT_MRT3847_52537C.1.pep
FVSQNCGANKATANSPYEKNLKTLLSSLSSNATTTLFYNNTVLGSTNTTSDTVYGLFMCRGDXSLRLCKECVANATEKLSSDQSCSLSKQAVMWYAECIVRYSNVGFFSTVATSPEYSLSNPNNITNNSTNSFMNFLSNTMNQTAEAAANSAKRFSTKEANLSQSQTLYCLAQCTEDLSPQNCTTCLAQ

SEQ ID NO: 233127 - protein, 115 aa, Glycine max
  Clone ID: PAT_MRT3847_52538C.1.pep
AGRDSPEFCRFFFSSVEALSVLGAWPVRSAYVLLRKTAGRVVLRFPRYAKDRRTVKTNLVTGPGPLSLRRLDRLIRTSVRTITRLRRILCIPFYHLLTTMQAHKQAHQSAQRFQA

SEQ ID NO: 233128 - protein, 116 aa, Glycine max
  Clone ID: PAT_MRT3847_52539C.1.pep
NIRKPKASVNRPPTPDVAENAPEREPTLQELINIKLIETGEKERLMELLRERLVDCGWKDEMKTLCRAVVKKKGRNNVTVDELIHVITPKGRASIPDSVKAELLQRIQTFLVSAAL

SEQ ID NO: 233129 - protein, 313 aa, Glycine max
  Clone ID: PAT_MRT3847_5253C.1.pep
MEEALFKTVKKSKGEIMGSSPATYCVTGATGYIGSWLVEALLERGYTVHATVRDPEKSLHLLSLWTRGDRLRIFKADLNEERSFDEAVKGCDGVFHVAASMEFNVVQKENIEACVQANIIDPAIKGTINLLKSCLNSNSVKRVVFTSSISTITAKDSSGKWKPLVDESCQIQSELVLKTQASGWVYALSKLLTEEAAFKFAKENGIDLVSVITTTVAGPFFTASVPSSVKVLLSPITGEPEFFKILSAVNARMGSIALVHIEDIYSAHIFLMEHSNAEGRYICSSQSCPLSMLANLLAKEHSYSNKKRQRLRN

SEQ ID NO: 233130 - protein, 366 aa, Glycine max
  Clone ID: PAT_MRT3847_52540C.1.pep
DELNLISKSRPSRPVGGCDVQHDVPAVFFSNGGYTGNVYHEFNDGIVPLYRLEQHFKKKVVFVILEYHNWWIMKYGDILSRLSDFPPIDFQGDNRTHCFTEAIVGLRIHDELTVDSSLMRGNKSIADFRNLLDKAYWPRIKGLIRDEERKAQEKLREQVSSSESSEASQQQYITIRQQVQENPMKKPKLVILSRSGSRAITNENLLVKMAKEIGFLVQVLKPDRTTEMAKIYRTLNASDVMIGVHGAAMTHFLFLRPGSVFIQVVPLGTTWAAETYYGEPARKLGLKYIGYQILPRESTLYEKYDKNDPILRDPTSINKKGWEYTKKIYLDSQNVMLDLRRFRKRLHRAYEYTLSKSKLSLQHQPM

SEQ ID NO: 233131 - protein, 91 aa, Glycine max
  unsure (1)..(91): unsure at all Xaa locations
  Clone ID: PAT_MRT3847_52541C.1.pep
QSMTESKRADPKLRXNKMGAGTMAKKPAGHAKAAKDPNKPXRPPSAFFVSMEDCRRVFTIEHPENIALPAESIAAGAKWKTMSDAERAPYV

SEQ ID NO: 233132 - protein, 213 aa, Glycine max
  Clone ID: PAT_MRT3847_52542C.1.pep
MTTLLLRILHLTLNFLSPYAPANSSFTSLPITAPSQVVGWPPLGAYRMNSYNSHAKSPATEVFNSTLDKRASNSAGVRKSADGGSDSSNIISKEKGNLRTSLFVKVKMDGIPIGRKVDLGAHDSYETLAQTLEDMFDESTTVLTHKVGSNGEDHGTEVGTDGHSKLLDGSSDFVLTYEDKEGDWVLVGDVPWCYFAAPRLEEKNRRSNTSSYR

SEQ ID NO: 233133 - protein, 58 aa, Glycine max
  Clone ID: PAT_MRT3847_52543C.1.pep
SNSSKDSPQDPTFANALSYPMGYSGGISQMNPGVDPALALALPVAKHEENGSLYAGIC

SEQ ID NO: 233134 - protein, 84 aa, Glycine max
  unsure (1)..(84): unsure at all Xaa locations
  Clone ID: PAT_MRT3847_52544C.1.pep
PCLXFXLGPGFVXRGPPRSPXXFVGRXWPLWLLPLFGCPXASPVLXGLXGAGGAXPPPPLRFLXFXXVRQRQYISFLPSKPKGF

SEQ ID NO: 233135 - protein, 46 aa, Glycine max
  Clone ID: PAT_MRT3847_52545C.1.pep
SRDAQPIRLERLERRLAALFTSYASYNQSIYLHFVGVHVLSILQIG

SEQ ID NO: 233136 - protein, 139 aa, Glycine max
  Clone ID: PAT_MRT3847_52546C.1.pep
VDGARRVRVRERGLADPAPEANVEIQNNLDRWRVVTHANAKSKSEKFPPPHQDGAVGYPLDDSNKRAVSFGATETSSASTIFDSKSWGSVISHDAARDKGRKTSKADSQMASSWKFMRSFKLSAIGHSFDLLFRSNSSK

SEQ ID NO: 233137 - protein, 133 aa, Glycine max
  Clone ID: PAT_MRT3847_52547C.1.pep
MHMHVVYCIYLQRNLSFIFVCFPNLLGYYNVHLRSCIPYRYKEDIDGKMSNELEVLVVSSQKGRGLMFPKGGWELDESVEEAVCREFLEEARVLGIIEVYIFFIRLFFYLNCIKCFSYFFIFIYLIIFSIFIF

SEQ ID NO: 233138 - protein, 62 aa, Glycine max
  Clone ID: PAT_MRT3847_52548C.1.pep
FRSLPCSATLLSAAVPLSELSSSSYLGSNIWSSCKLANRMHLHCVANKTSLITLSSGLFEHV

SEQ ID NO: 233139 - protein, 83 aa, Glycine max
  Clone ID: PAT_MRT3847_52549C.1.pep
VKVQRSFFFFLVLSSSTLNKPNLVAYSECFFCTCNCLLHRLSQTYHTKKKTETETETETVGMNRIASSKLYLFLPVLVLNEEK

SEQ ID NO: 233140 - protein, 73 aa, Glycine max
  unsure (1)..(73): unsure at all Xaa locations
  Clone ID: PAT_MRT3847_5254C.1.pep
MMNAPDTNDHTDXTVEHCFVGLLGACYAFPTAYGHVDXRLCLATTPEFFDGNYPVNSGVPTHENSLYARSNLP

SEQ ID NO: 233141 - protein, 135 aa, Glycine max
  unsure (1)..(135): unsure at all Xaa locations
  Clone ID: PAT_MRT3847_52550C.1.pep
HYSTELSLRYRGNGLISLVIQRALIRIGAXMCYENPSAISYRGLELLSTPSAISYLCTLILHXFCRKSQSKGLSLKPHLSGNXLIHDXCLAIQLNPQLMGLDLRSXLDTAGMMGGLLMKSSMLMKSTYDGTMSQT

SEQ ID NO: 233142 - protein, 437 aa, Glycine max
  Clone ID: PAT_MRT3847_52551C.1.pep
MDLENFVYEKVSEEIEARKEASEIVPFHLHTHNTLLSLVDDIDVPADSVSKQSEKVRVASPYGDPSSNMLRDVDHSSPVFLRTNWQVQGYLQEQAHTIEKNGSAVSFNGLEIILRQLQKLAPELHRVHFLSYLNGLSHDDYISALENLHCYFDYSAGTEGFDYIPSVSGNGFGRYEIGLLCLGMMHFHFGHPKLALEVLSEAVRVSQQQSNDTCLAYTLAAISNLLFENGISSTAATLGSSYSPFTSIGISLSVQQQLFVLLRGSLKRAESLKLKRLVASNHLAMAKFDLTHVQRPLLSFGPKTSMKLSTCPVNVCKEIRLSSHLISDFSYESSAMTIDGAFSTAWLRNLQKPTGSLVLCQENGSGNSSNASQFIAQPTSIPGSVLQVLGLSYILRATAWELYGSSPLSRINALVHATRFADASSSSDAALAYVKLI

SEQ ID NO: 233143 - protein, 114 aa, Glycine max
  unsure (1)..(114): unsure at all Xaa locations
  Clone ID: PAT_MRT3847_52552C.1.pep
TQNQITLTPHSXNQHNQQXAETHPEIPAAVNKKCRHMSXNTKNXTIKKSPQFTTEPLNLSTISKFDTIHTMHPRHPTRPKHKIPNSQNTLAIQHTKNSNHKSASNRKPRSTNPN

SEQ ID NO: 233144 - protein, 84 aa, Glycine max
  Clone ID: PAT_MRT3847_52553C.1.pep
EKVKGCNLFLTNLTTFCNDFSGTVWFSGPSWNSKKIATLKMGRGGTAAAAEEIAEPGSRPVILKEPRYRGVRQDRGGGSPANQR

SEQ ID NO: 233145 - protein, 193 aa, Glycine max
  Clone ID: PAT_MRT3847_52554C.1.pep
MLLPRFSYLLRHPPPLHAMARAVTCATQPSHFHASLGIATSRHPVSLPSKSSLFCRTFHALARCQSEEMTRRRVAGVRAGQREYRKARRRAPPKSKGKELQLCVDICIEEDLPDDPEILSIAELLRLNVPMAMKLVFDGLKGSRYKTRDTAIVMLVGFDSVETSVLLCNDELIRKLTKEWRNEDRATDDLSCH

SEQ ID NO: 233146 - protein, 88 aa, Glycine max
  Clone ID: PAT_MRT3847_52555C.1.pep
RRLPLTGESLDSRGLYIYDDGLQFIIWFGRLISPDIAKNLLRSDLAEELAKDCIFKKEERGKESTRVNYFCHFRQFCILKFSFLSHLV

SEQ ID NO: 233147 - protein, 107 aa, Glycine max
  unsure (1)..(107): unsure at all Xaa locations
  Clone ID: PAT_MRT3847_52556C.1.pep
QGKEEDNTQWRKDDHFEGKRTWGGVIEREPTRTKKREQHGSGXNKRGNTKGCSEKRPPWLLQSHTQASPVLCLCFVLGQWQKGLKREVAHSLRVLFELQEKWVCECE

SEQ ID NO: 233148 - protein, 226 aa, Glycine max
  unsure (1)..(226): unsure at all Xaa locations
  Clone ID: PAT_MRT3847_52557C.1.pep
MAPLTILCLSHLTLILTLTESLQNGVYNRRWSVSSHASDSYNPPHSAAYPTLDDLMSNDRLSDNNNLPSAPPLTHSPPILYLDRRDEFYGYSSYSSSSLDQGDPSRLSDNNDDSVNSESLQIVPAQHKGSLRVLLLHGNLDIWVHGAKNLPNMDMFHKTLEDMIGRFPGTVASNKIEGTGSRKITSDPYVTISVSNAVIGRTFVISXSENPVWEXHFYVPGAHHAA

SEQ ID NO: 233149 - protein, 62 aa, Glycine max
  Clone ID: PAT_MRT3847_52558C.1.pep
KTLEEAMKKRERRWRDQTSPGHIRKTVAKDGTTELGMCRNGVEMFPNMCSLLSCTDACMDVW

SEQ ID NO: 233150 - protein, 130 aa, Glycine max
  Clone ID: PAT_MRT3847_52559C.1.pep
MSKNRGFNLRRRLIRVSKWIFRKIRTRAPREYHCLGDSPPSPMVKLLTWGRKLTAGAKSRLKVASGSGYAQLGTDPDPSVPKGHLAVYVGQKDGELHRVLVPVIYFNHPLFGELLKQAEEEFGFHHEGGI

SEQ ID NO: 233151 - protein, 65 aa, Glycine max
  unsure (1)..(65): unsure at all Xaa locations
  Clone ID: PAT_MRT3847_5255C.1.pep
VKLSPLFRFSQKIVTRTTHYLIPSKSDSSLLASTTNPFFFILLAXRFNPHPFPRPIPKTTTVRRR

SEQ ID NO: 233152 - protein, 75 aa, Glycine max
  Clone ID: PAT_MRT3847_52560C.1.pep
SDRSPCPGAHVGNIGDRLQLIPNDKFKSVYHRVHANLIGPRISVACFFTERLKSSPIPYGPIKELLTEDSHPTYR

SEQ ID NO: 233153 - protein, 229 aa, Glycine max
  Clone ID: PAT_MRT3847_52561C.1.pep
MGGALGKSESPRKGSMPETKLEAKMVEAMQRRESQGSSVKSFNTIILKFPKIDESLRKCKAIFEQFDEDSNGAIDQEELKKCFSKLEISFSEEEINDLFEACDINEDMGMKFNEFIVLLCVVYLLKNDPAALHAKSRIGMPKLEGTFETLVDTFVFLDKNKDGYVSKNEMVQAINETTSGERSSGRIAMKRFEEMDWDKNGMVNFKEFLFAFTRWVGIDEVDDEENDEA

SEQ ID NO: 233154 - protein, 159 aa, Glycine max
  unsure (1)..(159): unsure at all Xaa locations
  Clone ID: PAT_MRT3847_52562C.1.pep
MGGALGKIESPKKGSVPETKLEAKMVEAMLRRESQGSSVKSFNTIILKFPKIDESLRKCKAIFEQFDEDSNGAIDQEELKKCFSKLEISFTEEEINDLFEACDINEDMKSRIXMPKLERTFETLVDTFVFLDKNXDGYVSKNEMVQAINETTSGERSSG

SEQ ID NO: 233155 - protein, 52 aa, Glycine max
  unsure (1)..(52): unsure at all Xaa locations
  Clone ID: PAT_MRT3847_52563C.1.pep
EAEANENXCMPXKAMNXAKXGQKEAXNDXKIXIKXXMMNSHXXXNVSPRENX

SEQ ID NO: 233156 - protein, 191 aa, Glycine max
  unsure (1)..(191): unsure at all Xaa locations
  Clone ID: PAT_MRT3847_52564C.1.pep
SCSVSNFNPRSLGTTSCSFFSLVIRGTHFWFIDRQWEVHLGKSESPRKGSMPETKLEAKMVEAMQRRESQGSSVKSFNTIILKFPKIDESLRKCKAIFEQFDEDSNGAIEXEELKKCFSKLEISFSEEEINDLFEACDINEDMGMKFNEFIVLLCVVYLLKXDPAALHAKSRIXMPKLEGTFETXVDTFVF

SEQ ID NO: 233157 - protein, 88 aa, Glycine max
  Clone ID: PAT_MRT3847_52565C.1.pep
MGGALGKIESPKKGSVPETKLEAKMVEAMLRRESQGSSVKSFNTIILKFPKIDESLRKCKAIFEQFDEDSNGAIDQEELKKCFSKLEI

SEQ ID NO: 233158 - protein, 86 aa, Glycine max
  unsure (1)..(86): unsure at all Xaa locations
  Clone ID: PAT_MRT3847_52566C.1.pep
PKNXKQLLNSFPPQWTAYYLSLHLPMGPVIKTSNTFIFSKNTQTKPTKXXTPYHLFTFKFLQKTIYAAGIRPPFFTSFSSDSHLPK

SEQ ID NO: 233159 - protein, 82 aa, Glycine max
  Clone ID: PAT_MRT3847_52567C.1.pep
SALTFRSRIALCSDLSRSKEDEDDAPHALVEVIATAFHILSGSHHGENTHRLAKKLIRSVRRSISVRLLSSILCACIIIICP

SEQ ID NO: 233160 - protein, 48 aa, Glycine max
  Clone ID: PAT_MRT3847_52568C.1.pep
MPLHDILTVIKNVQKKMRSNRPIPYWSHVRTDNYCRYTLVPHWRRTTY

SEQ ID NO: 233161 - protein, 146 aa, Glycine max
  Clone ID: PAT_MRT3847_52569C.1.pep
GVGSRGFFPGDMPPLRIPPSGAFFRGFILPFHPPKGSSSCGGFFFYRVVETPAGVPGAPQWDSPSGVCSWPAGFLSEFFPAMGFFLRFGPPPPPFFGVFFFRMFFLKVFPPPWEGFLKGLFFAGAAPGFFFFLGESFLGRKTKRKK

SEQ ID NO: 233162 - protein, 112 aa, Glycine max
  unsure (1)..(112): unsure at all Xaa locations
  Clone ID: PAT_MRT3847_5256C.1.pep
KSKKGKIGCLGARSAGGTTMVAIALKRPCIEACEVATIKYGVAAGNTNQLTVYEPGLDRRREELAQALNPFFSXTEAEKDVFAADTATASAHIPTITQVLGAGLPHHLTYCE

SEQ ID NO: 233163 - protein, 50 aa, Glycine max
  Clone ID: PAT_MRT3847_52570C.1.pep
LIKQGIQHWGDHKETNGTNLLGGHKRTKQDRCTLSNLLYLIEEVLHLSTI

SEQ ID NO: 233164 - protein, 25 aa, Glycine max
  Clone ID: PAT_MRT3847_52571C.1.pep
IIRGSRDFFSMTLFKLVSLSLVYID

SEQ ID NO: 233165 - protein, 168 aa, Glycine max
  unsure (1)..(168): unsure at all Xaa locations
  Clone ID: PAT_MRT3847_52572C.1.pep
SSRIGSSGSSSSRCHCLHQSKQPQNQWNWNHNSYNSPSSISFASNATHGSTSKLVPRFRRQQSCIIEFNFGKKREATEPVLDSLESMEGKEVKTTLALGXEVQENVPWQSETFPSIAEALIDSKSAKESNNITWLLMQGNDTIGKRRXALAIAESVFGSTNLLLQFDM

SEQ ID NO: 233166 - protein, 73 aa, Glycine max
  Clone ID: PAT_MRT3847_52573C.1.pep
NEHCPRWATVGECFGYPLDTGGGYVVQANCIQRGWACSSQGGYSPFVPLHCQEGNKIVGLYRKKNTHCCLSAI

SEQ ID NO: 233167 - protein, 54 aa, Glycine max
  Clone ID: PAT_MRT3847_52574C.1.pep
KALVDIANDYASQCFPEVEGQATPARVDQFPCVSVLGSSNMNTLTGSPITGGKT

SEQ ID NO: 233168 - protein, 76 aa, Glycine max
  Clone ID: PAT_MRT3847_52575C.1.pep
FFNFNLESRVTLIYSNIINKTHKLCFSYTITTRCVHDSATRGLSHPHRRHKRSSTPYKSNLILYTLVMHNEIRNLS

SEQ ID NO: 233169 - protein, 73 aa, Glycine max
  Clone ID: PAT_MRT3847_52576C.1.pep
SEFGRGYATLIPHQGCSASHLLMTRRMGGYRRPTFGSWRRLMLLCVMPAAALILPHPRQRSARQPTRGPLGSE

SEQ ID NO: 233170 - protein, 351 aa, Glycine max
  Clone ID: PAT_MRT3847_52577C.1.pep
MTMTWARFDSWKQQYYTTSGVVVGYAVCSSLLAIINKYAITKFNYPGLLTALQYLTSALGVYVFGKLGFLHHDPFTLPTAKKFFPAALVFYLAIFTNTNLLRHANVDTFIVFRSLTPLLVALADTVFRSQPCPSNLTFLSLLVILAGAFGYVATDSAFTLTAYSWAFAYLITITTEMVYIKHMVMSLGLNTWGFVFYNNLLSLMMAPFFSFVTGENVEIIAAVRSGGLFDPAAFYAVSLSCLFGLLISFFGFAARRAVSATAFTVTGVVNKFLTVAINVLIWDKHASPIGLVCLFFTIVGGILYQQSVTGLGSAPAQPKQLDTESNKGGGEDDDDGDLTGESDGLIKATSI

SEQ ID NO: 233171 - protein, 75 aa, Glycine max
  Clone ID: PAT_MRT3847_52578C.1.pep
QGGPLRVHRSHLNLKNKTNRRSHEEHRTRNKVRNDHSRDSATPWLCFFFFFLSCLNSIHFLMLEPLPLLSSSAAV

SEQ ID NO: 233172 - protein, 71 aa, Glycine max
  Clone ID: PAT_MRT3847_52579C.1.pep
GFSLSSTHPSNLFNSPYIQLSYGESATITLNELLTTRTRGRRLFFFFFSLSLRRGRFLVSPRFNRERIAFD

SEQ ID NO: 233173 - protein, 90 aa, Glycine max
  Clone ID: PAT_MRT3847_5257C.1.pep
CSSGFLSMAFHRAPLCSPILRSSYSLCGPPYSTSVPRFDSLHNRAHRNVIGMRVSGLVPNCGSRLCISLRWSCSSNGIALIRVPEAHRSW

SEQ ID NO: 233174 - protein, 45 aa, Glycine max
  Clone ID: PAT_MRT3847_52580C.1.pep
YNSVFLYTENKNSIPSINGWRHNVVVLMNHLKALLMRHYLLCING

SEQ ID NO: 233175 - protein, 185 aa, Glycine max
  unsure (1)..(185): unsure at all Xaa locations
  Clone ID: PAT_MRT3847_52581C.1.pep
FPGSTPTPSXRSSLQGYQGPSYIPFWGTARIERRVPLSLVIDIIIEQGCLQSIYGIHTFRVESIAHGKAAPVDELQVQGVSDPSLLRKMIITEASKITQDVSTSGNHAGPSTDVENIALMPRATEGSVVLRSPSKSLKMAGSPHTSSLERRVAGGLLLNKLEEVNKSVKRLELLIEKSHASSSIS

SEQ ID NO: 233176 - protein, 110 aa, Glycine max
  Clone ID: PAT_MRT3847_52582C.1.pep
GGTVAPPTAQAAIVQFGSVQIAEPNTIVKPVWQDTPPGPSLDSSSAREEGEVPESELDLDTRRRLLILQHGQDTGEHTSSEPPLPVRHPTQVDAPRVPSRRGWFSVEEEM

SEQ ID NO: 233177 - protein, 47 aa, Glycine max
  Clone ID: PAT_MRT3847_52583C.1.pep
LLSNRWHTKLHLVMASFQLEETRNFYLGAKSSLKRVTNLLWEQRHIH

SEQ ID NO: 233178 - protein, 164 aa, Glycine max
  Clone ID: PAT_MRT3847_52584C.1.pep
MACIKGVNRSASVALAPDAPYLAAGTMAGAVDLSFSSSANLEIFKLDFQSDDQELPLVAECPSSDRFNRLSWGKNGSGSEDFALGLVAGGMVDGNIDIWNPLTLIRSESNQSSLVGHLVRHKGPVRGLEFNAIAPNLLASGAEDGEICIWDLVNPSEPTHLPPL

SEQ ID NO: 233179 - protein, 84 aa, Glycine max
  unsure (1)..(84): unsure at all Xaa locations
  Clone ID: PAT_MRT3847_52585C.1.pep
RLQTHACEHENFIYSVIVKPKNWPLAYNFTNWEKGKVTQFKRFAAYTTFAIWRNRXKARSDRRSHYLTILNAEWEMPCSRVIKH

SEQ ID NO: 233180 - protein, 72 aa, Glycine max
  unsure (1)..(72): unsure at all Xaa locations
  Clone ID: PAT_MRT3847_52586C.1.pep
DCSGXXNSLFYLGVWIHTXDLXPHXCNVGXLNLVTGPPFMXXWLKLNVKVXYEATNSVVLEYLNTLPHVXDL

SEQ ID NO: 233181 - protein, 50 aa, Glycine max
  unsure (1)..(50): unsure at all Xaa locations
  Clone ID: PAT_MRT3847_52587C.1.pep
QEKLFLTLKSSLKTVCMLVLINCNLIWLCVCVHNIFNKIXYQLSKIKLLK

SEQ ID NO: 233182 - protein, 125 aa, Glycine max
  Clone ID: PAT_MRT3847_52588C.1.pep
ASLVRGWNVQEHIVFFIINMLSPPVPPKYSGTESYLISHAPFLNVFLVGISSVDSVQIFSLHGVVPLLAAVLMPICEAFGSSVPNVSWTAVTGEKLTCHAVFSNAFILLLKLWRVDRPPCGHVMG

SEQ ID NO: 233183 - protein, 51 aa, Glycine max
  Clone ID: PAT_MRT3847_52589C.1.pep
SCYGLFWLLLIRSHRFIILNGDRSLNLLNRLFLGGRDRFPRRRQALKSKFS

SEQ ID NO: 233184 - protein, 109 aa, Glycine max
  Clone ID: PAT_MRT3847_5258C.1.pep
LPGGPPGGPPDTPARPGEPTPVPNNRTKQSPPKNRPGAIPVPKGDPPEVPNKKQTRPQRGTPTRSDPGGEPILTGEPKTPATPTKNPTTTPVYTCAKPPARGRFPFGTR

SEQ ID NO: 233185 - protein, 130 aa, Glycine max
  unsure (1)..(130): unsure at all Xaa locations
  Clone ID: PAT_MRT3847_52590C.1.pep
LYTVISIINHICLPNSVXFVEGISPLVLAVHHIPSSTELLISYIXTAQSTITRQMALKDHYLYTCTCPTCSKVGHYNDIQQSAILNGYKCKTEKCFGFLLSKTDGKGFQCTGCGLITHTEDITTITPELK

SEQ ID NO: 233186 - protein, 61 aa, Glycine max
  Clone ID: PAT_MRT3847_52591C.1.pep
KIFSSKPSTLYNSLLIKLLFDQDIPRLYKGFKVPTKILGIGPNLQSKYIFRGGLIPSGLKN

SEQ ID NO: 233187 - protein, 105 aa, Glycine max
  unsure (1)..(105): unsure at all Xaa locations
  Clone ID: PAT_MRT3847_52592C.1.pep
XAVXMLXASSFIAXLXAALSXXXXSRXGXXGLQCXXXSXXCXGSXXXXIXXXLYXCLPXPLNGMDVXIMSXXKLXQVQXXXXMXXXVXDAATEGSSRIPSLRTRA

SEQ ID NO: 233188 - protein, 74 aa, Glycine max
  Clone ID: PAT_MRT3847_52593C.1.pep
QKIFQSAWFMQGLPLRTLIIHSIRPEKIPFIRDGLSGPVIFSAVVTCANGSALPFAPIGKVMGFSLRPLSSSGY

SEQ ID NO: 233189 - protein, 37 aa, Glycine max
  Clone ID: PAT_MRT3847_52594C.1.pep
CDSNDGYGDCWKSHSKEFDSNSGLVEFNGVHYYKFTT

SEQ ID NO: 233190 - protein, 134 aa, Glycine max
  Clone ID: PAT_MRT3847_52595C.1.pep
MDSPKRQGQKFLVAVTAVAAVVVKRVSRLQRRLAVREQWRMELRSPKKLLSNISSKTLPFRKKKRGEEDWGKGGVWQKAILMGDKCEPLDFSGVIYYDSNGKQVNEMPLRSPRASPVPPGHYFIHHSHHYYHHQ

SEQ ID NO: 233191 - protein, 297 aa, Glycine max
  Clone ID: PAT_MRT3847_52596C.1.pep
KNTPGCQPDVQTYSILLKSCLQVFAFDKIQSLLSDMTNRGIKPNTVTYNTLIDAYGKARKFSEMESILVEMLADRYCQPDVWTMNSTLRAFGNIGQIETMEKCYEKFQNAGIQPNVQTFNILLDSYGKAQDYKKMSAVMEYMQKYHYSWTIVTFNIVIDAFGKAGDLKQMEYLFRLMRSERIKPSCVTLCSLVRAYARAGKPEKISGVLRFVENSDVLLDTVFFNCLVDAYARLGCLAEMKGVLEMMKQNGCKPDIVTYRTMIKTYTYKGMDSHAKELRELLPTVNRPPLKRDKPDF

SEQ ID NO: 233192 - protein, 36 aa, Glycine max
  Clone ID: PAT_MRT3847_52597C.1.pep
KNTRGQGEYVTPFFTFYVSFVYINVWCSSGLNIDLN

SEQ ID NO: 233193 - protein, 59 aa, Glycine max
  unsure (1)..(59): unsure at all Xaa locations
  Clone ID: PAT_MRT3847_52598C.1.pep
XCPXXXFXLFXXVERDIIQLISNASKLATXSIKTXXXKRDQMKLLLNTKQQSRKLILGS

SEQ ID NO: 233194 - protein, 35 aa, Glycine max
  Clone ID: PAT_MRT3847_52599C.1.pep
MAAKMFSILMLPALSACVANATIFPQYSQAPKLPF

SEQ ID NO: 233195 - protein, 163 aa, Glycine max
  Clone ID: PAT_MRT3847_5259C.1.pep
NVIQTVQLGGILVWQVVANCSYNARGNFAYSIAINSAFFAEVMAAIIAIEKAVENRWNFLWLKTDSSFQLSSAKYNPVIKGLIILQERNDRLMILESRFPALAFQHIHIFSNSEWLDADQITHILLVNQLKTHICQLSNVHLTIMYVFRFASSACLSLDSLNS

SEQ ID NO: 233196 - protein, 161 aa, Glycine max
  Clone ID: PAT_MRT3847_525C.1.pep
MAGSIGSGGNTSTGVEWHVRPPNPKNPIVFFDVTIGNIPAGRIKMELFADIAPKTAENFRQFCTGEYRKAGLPVGYKGCQFHRVIKDFMIQAGDFVKGDGSGCVSIYGLKFDDENFTAKHTGPGLLSMANSGQNTNGCQFFITCAKCDWLDNKHVVFGKLN

SEQ ID NO: 233197 - protein, 184 aa, Glycine max
  unsure (1)..(184): unsure at all Xaa locations
  Clone ID: PAT_MRT3847_52600C.1.pep
MSVVGFDFGNESCIVAVARQRGIDVVLNDESKRETPAIVCFGDKQRFLGTAGAASTMMNPKNSISQIKRLIGRQFSDPELQRDLKTFPFVVTEGPDGYPLIHARYLGEARTFTPTQVFGMMLSNLKEIAEKNLNAAVVDCCIGIPLYFTDLQRRAVLDAATIAGLHPLRLFHETTATALAYGIX

SEQ ID NO: 233198 - protein, 883 aa, Glycine max
  unsure (1)..(883): unsure at all Xaa locations
  Clone ID: PAT_MRT3847_52601C.1.pep
MSVVGFDFGNESCIVAVARQRGIDVVLNDESKRETPAIVCFGDKQRFLGTAGAASTMMNPKNSISQIKRLIGRQFADPELQQDIKTFPFVVTEGPDGYPLIHARYLGESRTFTPTQVFGMMLSNLKEIAEKNLNAAVVDCCIGIPLYFTDLQRRAVLDAATIAGLHPLRLFHETTATALAYGIYKTDLPENDQLNVAFVDVGHASMQVCIAGFKKGQLKVLSQSYDRSLGGRDFDEVLFNHFAAKFKEEYKIDVFQNARACLRLRAACEKLKKVLSANPEAPLNIECLMDEKDVRGFIKRDEFEQLSLPILERVKGPLEKALAEAGLTVENVHMVEVVGSGSRVPAHXKILTEFFKKEPRRTMNASECVARGCALQCAILSPTFKVREFQVNESFPFSISLSWKGPSPDAQENGPDNQQSTLVFPKGNPIPSVKALTIYRSGTFSIDVQYDDVSGLQTPAKISTYTIGPFQSTNGEKAKVKVKVRLNLHGIISLESATLLEEEEEIEVPVSKESAGENTKMDIDEVPAEAAAGSRPPSTNDTGANMEDAKSXICCTPSTNDNDVNMQDANSKASTDASGVENGIPEGGDKPLQKDTDTKVQAPKKKVKKTNIPVAELVYGAMVPVDVQKALEKEFEMALQDRVMEETKDKKNAVEAYVYDMRNKLNDKYQEFVTASERDDFTAKLQEVEDWLYDEGEDETKGVYIAKLEELKKQGDPIDERYKEYMERGTIIEQLVYCINSYREAAMSNDPKFDHIDINEKQKVLNECVEAENWLREKKQHQDSLPKYATPVLLSADVRKKAEAVDRFCKPIMTKPKPLPPKPATPEAPATPPPQGGEQQQQPPQENPNASTNENAGDNANPAPPPASAEPMETDKPENTGSA

SEQ ID NO: 233199 - protein, 91 aa, Glycine max
  Clone ID: PAT_MRT3847_52602C.1.pep
LGIIFREGTEIRGREVKWGRRQMALVSQEPVLFNDTIRANFAYGKGGDAPEAEIIAAAELAYAHNFTCSLQEGYDTIVGERGIQLSGGQKQ

SEQ ID NO: 233200 - protein, 73 aa, Glycine max
  Clone ID: PAT_MRT3847_52603C.1.pep
SRRPPPPPKKQPQQEPLPTSHTQLEQTQSKQTIKTPPTSQNKLHLPPNIHYQGGHPTPTTASTTIVLKDQFIT

SEQ ID NO: 233201 - protein, 65 aa, Glycine max
  Clone ID: PAT_MRT3847_52604C.1.pep
IFRQKWFVRNFRRIAKIHRLKFLTIIFSTNFDSRKYAFFFCRVANHQISQHYCNRFCLIVPFTCF

SEQ ID NO: 233202 - protein, 62 aa, Glycine max
  Clone ID: PAT_MRT3847_52605C.1.pep
QSAVAVTTRNLEASPMVTISGGSDSVAVSTRAIIIQALPPWVFVILMVATMPMGIPYPLQNV

SEQ ID NO: 233203 - protein, 176 aa, Glycine max
  Clone ID: PAT_MRT3847_52606C.1.pep
IGTIAVRLIAGRSRLHNLSLVVEQVTRLLATVPCRGALALLRSEPMIEFPPRLVQSSKVGHSVRSWGMTGRESNPASLFQLYVSYDRYAEATYLLLDCIDSFASMRPADIIRRKRPLAVWFPYTTIERLLYQLDELIRMGRMVDHCDKLKKMLHDSLQNHLKMLKVDSDDAVSVSS

SEQ ID NO: 233204 - protein, 87 aa, Glycine max
  unsure (1)..(87): unsure at all Xaa locations
  Clone ID: PAT_MRT3847_52607C.1.pep
GWAWSLNQFRSFLXNLTISSSRPRPQGSYHYFQINITHTINYVFTRSKICCILLYSLNGVSHFYPXTSLKLAKYYSFSYIFYKYNLI

SEQ ID NO: 233205 - protein, 65 aa, Glycine max
  unsure (1)..(65): unsure at all Xaa locations
  Clone ID: PAT_MRT3847_52608C.1.pep
TFNPPTKYVEVFFSIENILCLAPAVWLFIILFPLVGCPNCGRLLVVGTFIGLHQHKKNFGLXXGV

SEQ ID NO: 233206 - protein, 160 aa, Glycine max
  unsure (1)..(160): unsure at all Xaa locations
  Clone ID: PAT_MRT3847_52609C.1.pep
LKLTDTRARNNKMTLMHYLCKVLAEKLPELLDFHKDLGSLEAATKIQLKYLAEEMQAPGKGLEKVVQELTASENDGPVSENFCQVWXVARPLAGAVGRSWARLLANVGRYAVALPGLGGAGPARLPFARLAASLLALGTGCIFPHEDMSMQIVFVCWPAD

SEQ ID NO: 233207 - protein, 79 aa, Glycine max
  Clone ID: PAT_MRT3847_5260C.1.pep
NVIQTVQLRGVLVWQVVADCSYSKGVNSAFFAEVMAAIIAIDKPVENRWDFFWLKTYSSLLKCPVLHTFIAKEMLVLIS

SEQ ID NO: 233208 - protein, 81 aa, Glycine max
  unsure (1)..(81): unsure at all Xaa locations
  Clone ID: PAT_MRT3847_52610C.1.pep
VEEAYNKLIVELXXSVPTLXGIECPKDEKLPRRXIFXKPKTRCFTILPMXFNLVVRQKFXXFVRFIMXKRDKLSCQLETTG

SEQ ID NO: 233209 - protein, 61 aa, Glycine max
  Clone ID: PAT_MRT3847_52611C.1.pep
IHGAINEREGADTTCKTSTELIVNHTVHYTTPKTDLYTPMYNIADRLARVYGHGLYSTVLL

SEQ ID NO: 233210 - protein, 68 aa, Glycine max
  Clone ID: PAT_MRT3847_52612C.1.pep
MELIFRAINPPSLRSEKKNDVRVENALFQCSRTAPVLWNYLNFHLFLRVRCSLVKILLDILLIVQNTS

SEQ ID NO: 233211 - protein, 82 aa, Glycine max
  Clone ID: PAT_MRT3847_52613C.1.pep
FEDPRFSKLCMHVGRTYIMIQEQSYLSLDFECTSMCDLVDLNDMKSYTSQIYTPEDLIKFIDNGVAELGDCFIEEQPILHVA

SEQ ID NO: 233212 - protein, 95 aa, Glycine max
  Clone ID: PAT_MRT3847_52614C.1.pep
LVNINQSYLALKILERACNTLSCNLNCKMCSAVLMKSRSGFIRVPPETSRCSFFILLSTPSCLLLLLPHFTFAMSLQPIISPKYLKLIKLKRNKI

SEQ ID NO: 233213 - protein, 49 aa, Glycine max
  Clone ID: PAT_MRT3847_52615C.1.pep
FFAPMVHPLASSSSPFSLILPSLLQTSHINGLHTNANAHPQSALLNVVY

SEQ ID NO: 233214 - protein, 107 aa, Glycine max
  Clone ID: PAT_MRT3847_52616C.1.pep
GEFISRRTQVWIMVSCRHNSNTFQERLPQHKIYIVETNRRQDDSIVKGFQRHAIKSIMNQPNTNLIVSKTDGKMDKSSKRDKHKNVMFSQHKEEAENKRGQLIQHHH

SEQ ID NO: 233215 - protein, 90 aa, Glycine max
  Clone ID: PAT_MRT3847_52617C.1.pep
CCISHKRLHFKKLDKDYSNLNKWAKKKNIMKKPKTVVGGYTHEHGTAKTLRHDLICAFKPREVVTFPTLLFVGVRWVCVFLPFVFQFMVY

SEQ ID NO: 233216 - protein, 177 aa, Glycine max
  Clone ID: PAT_MRT3847_52618C.1.pep
MERAMAIQLFAYSFFIVIVLLFPPAMCAEFNYDLSSPNGPLNWGNNPQWQLCKNGKNQSPINLQKLSADVEFISGIQRNYQPANATLISSEHDIMVNWTENAGHITINGTQYQLAQGHWHSPSEHRINGIRYDLELHMVHISSAGRLAVTGVLYKFGRPDDEFISKIEDDLQLMAEN

SEQ ID NO: 233217 - protein, 189 aa, Glycine max
  Clone ID: PAT_MRT3847_52619C.1.pep
MELRSLILQPNLTHLFPTFTCCVKLKPSFQHLQNNSNNKELSLKIRSRRVGVLAAITSLILGGNGIFRTQSANAFEFTAARRRQKGEEALSGVRGHAQDLLHVRDLLELESWRAAQKTLRQSSAILKKDIYIIIQSKPGIERAQLRKLYSTLFNNVTRLDYAARDKDGPQVWQCYKNIVVAVNDILSRI

SEQ ID NO: 233218 - protein, 29 aa, Glycine max
  Clone ID: PAT_MRT3847_5261C.1.pep
AGINLSVISKNSPTFIHHPESVTLSKLIP

SEQ ID NO: 233219 - protein, 118 aa, Glycine max
  Clone ID: PAT_MRT3847_52620C.1.pep
MLSIKRVPTVVSNYQKEETGEAAAAGGCGRNCLKSCCIQDARLPLYAFKRGEKVGGKELPLLGCKKHPVDFLDSLVLGEWEDRMQRGLFRYDVTTCETKVIPGKYGFIAQLNEGRHLK

SEQ ID NO: 233220 - protein, 248 aa, Glycine max
  unsure (1)..(248): unsure at all Xaa locations
  Clone ID: PAT_MRT3847_52621C.1.pep
MGTSQSREGLEVTDSDSDYENEEETEHYEDAKTTHSTELDDVDAKLKALKLKYQTPSSSAKPLPQNAVKLYLHIGGNTPNAKWILSDKHTSYAFHKDTDENENDDVWLLTVGSKVRARVSSEMQLKMFGDQRRVDFVADGVWALKFPSDDTYRRFVTEFQSCMFENVYGIECTEENKVKIYGKEFIGWVKPEAADDSVWEDAVSGEPSPSPSPSRRRNDLMEEFEEAANGGVQTLTLGALDNSXMVND

SEQ ID NO: 233221 - protein, 57 aa, Glycine max
  Clone ID: PAT_MRT3847_52623C.1.pep
CHTVHVVNGLPESRSHIAAFSAGNLCPRLRLDMGLVNKVVVRIMSVVVPLHVRERQV

SEQ ID NO: 233222 - protein, 83 aa, Glycine max
  unsure (1)..(83): unsure at all Xaa locations
  Clone ID: PAT_MRT3847_52625C.1.pep
HASEKAQSLHYLDKLLAIAMVTLCELSLFTKADLLNQLLVLKAVLSLLRAAKATGLPPNTLSKIXASRLNIDHGMTVISQNHN

SEQ ID NO: 233223 - protein, 100 aa, Glycine max
  Clone ID: PAT_MRT3847_52626C.1.pep
NGKKMVEKRGFRKFLEKWGKTFWPTYKVLDIFQKVFYRSNPAKEGFVEMWVNKYVQKMTFYSYLYKTVGAGNPLEDLKLALNPLGRLVRANALRRGMNKL

SEQ ID NO: 233224 - protein, 51 aa, Glycine max
  Clone ID: PAT_MRT3847_52627C.1.pep
CSLGNLKDQILVSCRNTSYIVFDFGWKDSTLDGVAIYINIYMTEFKLRCCH

SEQ ID NO: 233225 - protein, 70 aa, Glycine max
  Clone ID: PAT_MRT3847_52628C.1.pep
LSDYIDASDDSTYYLQRKLVQPALAGDSTGGVQTFFSPVSTTCAVFQVIVGGAVFDGGGGGAVAAAPASG

SEQ ID NO: 233226 - protein, 110 aa, Glycine max
  unsure (1)..(110): unsure at all Xaa locations
  Clone ID: PAT_MRT3847_52629C.1.pep
PKKTVVSYVFKENRFGHLPRFGISFPKTRFFXAGTPVTSKAKTVALKGEELVRTPFPVDPNGCRGPLFPKKIKRDPFHRAIPYPKGGPENKGLFRNCGPTPYPGAPPWAQ

SEQ ID NO: 233227 - protein, 76 aa, Glycine max
  unsure (1)..(76): unsure at all Xaa locations
  Clone ID: PAT_MRT3847_5262C.1.pep
AGGXSGXGFGXCALXVPTAVXGAGRXPLXGGXVGHWHXHGPLLRPDIMSWGPXSXXXXLXLAVXGVGHXLXXLXFL

SEQ ID NO: 233228 - protein, 82 aa, Glycine max
  Clone ID: PAT_MRT3847_52630C.1.pep
HVWCPTTLQQLCFTEIQSLKHKYLALDLYQIMSKIHQLNLSSLVNIVQNQSSIRRFLLGFHLSYTHFQMRKLIWIMIPYSKF

SEQ ID NO: 233229 - protein, 67 aa, Glycine max
  Clone ID: PAT_MRT3847_52631C.1.pep
EHGIRLTYSRTKMFEGFNRPLMPLKGGKRLCFTNSLKQCRGGRSKIETRGSLKITGTQSPPHHIFHL

SEQ ID NO: 233230 - protein, 69 aa, Glycine max
  Clone ID: PAT_MRT3847_52632C.1.pep
GKVPKHLLMIYMALMSYFLNCFTPSTSCQVSDYAEGSSQLKSPSSEKQKSRGAPLVVSYFPINHYPSRL

SEQ ID NO: 233231 - protein, 50 aa, Glycine max
  Clone ID: PAT_MRT3847_52633C.1.pep
DDPILKKKKYTHTCVCVCKSTFNALHIRNPLYATSILSNPINFPSNGNSY

SEQ ID NO: 233232 - protein, 64 aa, Glycine max
  Clone ID: PAT_MRT3847_52634C.1.pep
CTPLIRNVARSHEKVPSFFPKPLSQSREQGRAPLRLREHRPEGPHFPSHFTGFGTVPRAQLKRG

SEQ ID NO: 233233 - protein, 42 aa, Glycine max
  Clone ID: PAT_MRT3847_52635C.1.pep
PEYILYLDFMTQYKDLTPQFSAVPQNILVTTHSMPPTVKSSL

SEQ ID NO: 233234 - protein, 47 aa, Glycine max
  unsure (1)..(47): unsure at all Xaa locations
  Clone ID: PAT_MRT3847_52636C.1.pep
QIWLDCINNLSFQKKKKKKKKKKKKKKKKKKKKKKXXXXXXKKKKKK

SEQ ID NO: 233235 - protein, 444 aa, Glycine max
  Clone ID: PAT_MRT3847_52637C.1.pep
MLALHFRPCFPLPFHRSLTVRVSSLLSFPLSLSSAVPLRAMSKPPSAFDALMSGARAAAAAKKKSQSLSQSSPSSPKKRKTPPSSSSQNPSDLKPPSPPKTVTPQEGAVKPEPLKVRHVSSSSFSQEKTAELKKQAPQLKKKPSDFDPASISAWEKGQPVPFLFLCLAFDMISQESGRIVITDIVCNLLRTVMYSTPEDLVKVVYLSANRIAPAHEGMELGIGDASIVKALAEAYGRTEVWIKTQYQKKGDLGLVAKESRSSQPMMFKPEALTITKVFNTFRLIAKESGKESQEKKKNHIKALLVAATDCEPQYLIRLLQTKLRIGYAEKTLLAALGQAAVYTEEHSKPPPDIQSPLEEASEIVKQVYSVLPDYDKIISALLTEGLWMLPKKCNFTPGVPIGPMLSKATKGVSEILNKFQDVEFTCEYKYDGERAQIHYLENGS

SEQ ID NO: 233236 - protein, 165 aa, Glycine max
  Clone ID: PAT_MRT3847_52638C.1.pep
SWSQGSRALGICRTMLMHHHSSRLFLRLSRLLSFTCLYFPDLEVRDNSRIYLRMLVCIPGKKLRDILNLGDTILGISQSSHPTSFFNVQSPRPSQKLKTFKNLSSCIHLERLVPLLVKQFWSLSLSNLVVSNTKPAYLESIRDLKAPVEENEFSDSSNTQIIPES

SEQ ID NO: 233237 - protein, 55 aa, Glycine max
  Clone ID: PAT_MRT3847_52639C.1.pep
KQFVSCEGCCHFRHLMSLLASISFVLWYENFVMRISCSETYLWITKFPQARAAFR

SEQ ID NO: 233238 - protein, 73 aa, Glycine max
  Clone ID: PAT_MRT3847_5263C.1.pep
LRNSKRFLTGCSSHQQSYMEFRNNMVVSCSSLKHQISCCCTSCITTKATNFAQIMNLSQSVVGDLRFFLMGSV

SEQ ID NO: 233239 - protein, 118 aa, Glycine max
  unsure (1)..(118): unsure at all Xaa locations
  Clone ID: PAT_MRT3847_52640C.1.pep
ANLNKAGYHIWEKXILTDPHYPSTPNADSYKTSARDKLIRQXYIIVAIIEDQWSDLLGGHRGERMTFKLPNXPCTTYSSSFTSQHSXLASIYLYVIRCVDILALASLYVVSAACPQDM

SEQ ID NO: 233240 - protein, 71 aa, Glycine max
  Clone ID: PAT_MRT3847_52641C.1.pep
IFFSIIKTCIIHILPLFDDDNHYQVNFFQYHQNLHYSQCHIVIYSYIKQNVTLLYIAIVILYVSILGPDLN

SEQ ID NO: 233241 - protein, 52 aa, Glycine max
  unsure (1)..(52): unsure at all Xaa locations
  Clone ID: PAT_MRT3847_52642C.1.pep
DAYNNKKYLPLDLRRRKTRAIQRRLTEHQPXLRDDRETKRELYIPLERYAVN

SEQ ID NO: 233242 - protein, 169 aa, Glycine max
  unsure (1)..(169): unsure at all Xaa locations
  Clone ID: PAT_MRT3847_52643C.1.pep
NGGGHVPTRPYGCELAPVGEGGGEPPKGSLGWAIDTHFGSFEALIQKVNAEGAALQGSGWVWLGLDKELKRLVVETTANQDPLVTKGPNWAPXXXXXXXEQAXXXQHKNGRPDXXKNTGKXXXXKHAXEGDEKESERGSSDRAAREEGKKGEGRKNNKTPPRRSEKQID

SEQ ID NO: 233243 - protein, 56 aa, Glycine max
  Clone ID: PAT_MRT3847_52644C.1.pep
KQVLFLITKIGYINRKIYYVFDIFMNLIQCGCVFLKNGFLSLLFFANKAIELNFHF

SEQ ID NO: 233244 - protein, 136 aa, Glycine max
  unsure (1)..(136): unsure at all Xaa locations
  Clone ID: PAT_MRT3847_52645C.1.pep
VPNPSDYDKLDPLHATSQTNIKGAQKKAKSKKHPQGARGGHVVATLHGSLTRLCDTKWWNLCQHGARIKTKQIKSSCVFHDMEGVQLFSKIGRDSNINPRIFSYAELYIRSRGFFXEEVLGSGGFGKVYTGVMPSD

SEQ ID NO: 233245 - protein, 240 aa, Glycine max
  Clone ID: PAT_MRT3847_52646C.1.pep
MAARALLTRKTLATVLRNDAKPIIGAGIAAATHSRGLHVYTLPDLDYDYGALEPAISGEIMQLHHQKHHQTYITNFNKALEQLQDAVAKKDSSAVVKLQGAIKFNGGGHVNHSIFWKNLAPVREGGGEPPKGSLGWAIDTHFGSFEALVQKVNAEGAALQGSGWVWLGLDKELKRLVVETTANQDPLVTKGPNLVPLLGIDVWEHAYYLQYKNVRPDYLKNIWKVINWKYASEVYEKESS

SEQ ID NO: 233246 - protein, 28 aa, Glycine max
  Clone ID: PAT_MRT3847_52647C.1.pep
TKKTLFLRVLGNPTDFFKGGLNTFTQKS

SEQ ID NO: 233247 - protein, 241 aa, Glycine max
  Clone ID: PAT_MRT3847_52648C.1.pep
MAARALLTRKTLATVLRNDAKPIIGVGITAAATHSRGLHVYTLPDLDYDYGALEPAISGDIMQLHHQKHHQTYITNYNKALEQLQDAIAKKDSSAVVKLQGAIKFNGGGHVNHSIFWKNLAPVREGGGEPPKGSLGWAIDTHFGSFEALIQKVNAEGAALQGSGWVWLGLDKELKRLVVETTANQDPLVTKGPNLVPLIGIDVWEHAYYLQYKNVRPDYLKNIWKVINWKYASEVYEKESS

SEQ ID NO: 233248 - protein, 56 aa, Glycine max
  unsure (1)..(56): unsure at all Xaa locations
  Clone ID: PAT_MRT3847_52649C.1.pep
XRXKSXSXSXVXXXXLHXVLITPIVAXXXHXXSXSXRSTXKXXXSSRIPSLRTRXC

SEQ ID NO: 233249 - protein, 68 aa, Glycine max
  Clone ID: PAT_MRT3847_5264C.1.pep
ENVETNNSCFINPVHYQRRFIIFGGLQIKRNTYLLKVWANHILKHQNCPMYCIKVKERNANSFIKIDI

SEQ ID NO: 233250 - protein, 114 aa, Glycine max
  Clone ID: PAT_MRT3847_52650C.1.pep
FSSEVLFWVSSISIYEGGQSDNRVKSYCRLILLRAYVLNLERLDILRDTIGHPSKNYCRYILLIASIMNIERLDIQRETIGQPSRKLLSIDFVQSFCCEFRGSPYPTGLSWTSE

SEQ ID NO: 233251 - protein, 397 aa, Glycine max
  Clone ID: PAT_MRT3847_52651C.1.pep
EDDPESQLIVDCNALTVHIENESVIIHNFIRDKYRLKFPELESLVHHPIDYARSARARADEMDLTLVDLEGLLPSAIIMVVSVTASTTTGKPLPEEVLSKTVEACDRALDLDSAKKKVLDFVESRMGYIAPNLSAIVGSAVAAKLMGTAGGLASLAKMPACNVQLLGAKKKNLAGFSTATSQFRVGYLEQTEIFQTTPPSLRMRACRLLAAKSTLAARVDSIRGDPSGKTGRAFKDEIHKKIEKWQEPPPAKQPKPLPVPDSEPKKKRGGRRLRKMKERYAITDMRKLANRMQFGVPEESSLGDGLGEGYGMLGQAGSGKLRVSVGQSKLAAKVAKKFKEKNYGSSGATSGLTSSLAFTPVQGIELSNPQAHAHQLGSGTQSTYFSETGTFSKIKRT

SEQ ID NO: 233252 - protein, 136 aa, Glycine max
  Clone ID: PAT_MRT3847_52652C.1.pep
MTFPSMGIVANWVLLWLKLSIYSHWNPKVLFLELDRTHKRQIYIAASSGNWSEALSYFKIHPHWWRIPLTSRGVTALHVAVSMRKTSFVEKLVDRVDRMNMQDLEIRMADGNTAFCLAAITGNVKCAKILLGKNPG

SEQ ID NO: 233253 - protein, 67 aa, Glycine max
  unsure (1)..(67): unsure at all Xaa locations
  Clone ID: PAT_MRT3847_52653C.1.pep
KPWWQKSNFGFSPPLDPGPPFRGVXKFFPPQNAGHNPQGGGSXLAHCPLAPCPTAPGIGVKACPVFK

SEQ ID NO: 233254 - protein, 77 aa, Glycine max
  Clone ID: PAT_MRT3847_52654C.1.pep
LFWVQKGRGKELSSFNALSSTKVHYEGRNSIQGCAVNNVAISHILNTIENSFFVCYPWIYPLKNGKLFHPLVMVFYL

SEQ ID NO: 233255 - protein, 40 aa, Glycine max
  unsure (1)..(40): unsure at all Xaa locations
  Clone ID: PAT_MRT3847_52655C.1.pep
GVEFYINRDFYEGELHGXRCSGSGVYHYFESVRYEGEWLD

SEQ ID NO: 233256 - protein, 88 aa, Glycine max
  Clone ID: PAT_MRT3847_52656C.1.pep
DWASLSAHRYRRAQGADKAGREWGATNAMGAKNEDSKQVTIPKPPPQGSGGHQEEILGDTSRARAARGRVCKASVSRRISAQDRNTAT

SEQ ID NO: 233257 - protein, 82 aa, Glycine max
  Clone ID: PAT_MRT3847_52657C.1.pep
KIKGAPLPKIFRGRRPILKNLEKSSKTGLFFFAPKTWKFLKMLPPGPIKIFSIGISTPLRNKNFYWPSWFGLHLKMGKKSPC

SEQ ID NO: 233258 - protein, 83 aa, Glycine max
  Clone ID: PAT_MRT3847_52658C.1.pep
LVHTLCSEKCGPKILLFYLGAWTLYVGTNLTVDPVTHTKVLTTHMGSVMQMAQVNVNIGVNAVVNGGPGTIVKITGFGPSEHS

SEQ ID NO: 233259 - protein, 64 aa, Glycine max
  unsure (1)..(64): unsure at all Xaa locations
  Clone ID: PAT_MRT3847_52659C.1.pep
XYDAQISXXXXKLQKKLXDAEYQXVGSRALGCXFXKNLALXXVSXXXGKLTXTHXDVXXXSNLS

SEQ ID NO: 233260 - protein, 67 aa, Glycine max
  Clone ID: PAT_MRT3847_5265C.1.pep
VVIIHNFFYYNHTNHIKAHFQCLTTVMLSKIFSKLSRRKYSLFLKPYFSRALYHYILPLSFYYRTLL

SEQ ID NO: 233261 - protein, 55 aa, Glycine max
  Clone ID: PAT_MRT3847_52660C.1.pep
TDPDVRYMTSVSKSVLHHGFGPSDFEVYQHMIIHIMLVLVASTSISDWNSMEPSM

SEQ ID NO: 233262 - protein, 51 aa, Glycine max
  Clone ID: PAT_MRT3847_52661C.1.pep
PGQAHQPKSLTYILSIVADVHRTFFYVCIFLYPADIKYFIWNTILFCLNLT

SEQ ID NO: 233263 - protein, 83 aa, Glycine max
  Clone ID: PAT_MRT3847_52662C.1.pep
KTQMVNFTNKLNATPNGEDPSNPNLETVGQITSSPANLVCSQIITVDWLLHINSCREKILINGPDFGCTEHPAAEAREDPDPQ

SEQ ID NO: 233264 - protein, 363 aa, Glycine max
  unsure (1)..(363): unsure at all Xaa locations
  Clone ID: PAT_MRT3847_52663C.1.pep
MELQLILVKMILALAMAMMMMMPCYSVAVDINQQVRQVAAKHNVSCLLVFGDSSVDSGNNNALHTTMKSNFPPYGKDFFDSRPTGRFSNGRLATDFVAEALGYRKAIPPFLDPNLKPEDLQYGVSFASAATGFDDYTAEVSNHTSVSKQIEYFAHYKIEXENAEGEETGEFITSIALYIISXGTNDFLQNYFLEPTRPEAFSLLEFENFLLSRFSKDVEAMHRLGARRLIIVGVLPLGCIPLIKTIRNVEGCDKSLNSVAYSFNAKLLQQLDNLKTKLGLKTALVDVYGMIQRAVTNPKKYGFVDGSKGCVGTGTVEYGDSCKGMDTCSDPDKYVFWDAVHPTQKMYKIIADEATESFINNFF

SEQ ID NO: 233265 - protein, 70 aa, Glycine max
  Clone ID: PAT_MRT3847_52664C.1.pep
SLVLYFPFSSAFLFCPRFVLVCSLFAVSPNLYRPSSFRCLVRVCLLVPWFWLVPPPRPFKYIQVKKPLFI

SEQ ID NO: 233266 - protein, 121 aa, Glycine max
  Clone ID: PAT_MRT3847_52665C.1.pep
MEFRSKSCRNESLQIENYSGGRVAPTSMQDLRSYSYSASYAGSAYPYKIGKEKEVKVDKGKSTVSNSKVSKSWSFNDPELQRKKRVAGYKIYSAEGKMKGSLRKSLRWIKNTYTQAVHGWW

SEQ ID NO: 233267 - protein, 59 aa, Glycine max
  Clone ID: PAT_MRT3847_52666C.1.pep
KPTLMNGSLLYEKCTRPHKLWNFTKAMINCTSLYRIRDHMTNSEKTSALIIHCILLEIA

SEQ ID NO: 233268 - protein, 69 aa, Glycine max
  Clone ID: PAT_MRT3847_52667C.1.pep
VVVGEGAAAPVLREDRRAGPEGCLPCPGSWPSRGGQKSLKGMSTVGFPNCSVQEGKVGFLSAEFCSRDP

SEQ ID NO: 233269 - protein, 52 aa, Glycine max
  Clone ID: PAT_MRT3847_52668C.1.pep
FFFFFFLNRKHIYNFFISKVRDILHESGGRDIFTFHLTHLVKISHQVIDKDK

SEQ ID NO: 233270 - protein, 244 aa, Glycine max
  Clone ID: PAT_MRT3847_52669C.1.pep
MATIILRSNEVVHALGLFCILLLVHKGDAYEFVVGGQKGWSIPSDPNSNPYSQWAQKSRFQVGDSLVFNYPSGQDSVIQVSSQDYASCNTDAYSQKFSDGHTVINLNQSGPHFFISGNKNSCLKNEKLVVIVLADRNNKNTNQTSPPSPNCPSPSPSPSLSTQSLAPSPAPSQQVAPPPLSPVAAPPQQEAPSPPSPATNNPTPAPVSDQPSPPSPPHNAASSILVNFACSVGAFIASVLVFSF

SEQ ID NO: 233271 - protein, 46 aa, Glycine max
  Clone ID: PAT_MRT3847_5266C.1.pep
VPQHVSSLYMSYKNGFESFGVVVVHFYSYSIEYYFIFRIFFFLYSL

SEQ ID NO: 233272 - protein, 78 aa, Glycine max
  Clone ID: PAT_MRT3847_52670C.1.pep
RDMGFRQERLDGWDNHRPENEDVLQCALQVETYITPRETGRLMVEKLILHDTQDNGETSTCTLKSTTMNMKYTIPSKI

SEQ ID NO: 233273 - protein, 471 aa, Glycine max
  unsure (1)..(471): unsure at all Xaa locations
  Clone ID: PAT_MRT3847_52671C.1.pep
MDPVSVWGNTPLATVDPEIHDLIEKEKHRQCRGIELIASENFTSFAVIEALGSALTNKYSEGMPGNRYYGGNEFIDQIENLCRSRALQAFHLDAQSWGVNVQPYSGSPANFAAYTAVLNPHDRIMGLDLPSGGHLTHGYYTSGGKKISATSIYFESLPYKVNSTTGYIDYDRLEEKALDFRPKLIICGGSAYPRDWDYKRFREIADKCGALLLCDMAHTSGLVAAQEVNSPFEYCDIVTTTTHKSLRGPRAGMIFYRKGPKPPKKGQPENAVYDFEDKINFAVFPXLQGGPHNHQIGALAVALKQAASPGFKAYAKQVKANAVALGNYLMGKGYSLVTGGTENHLVLWDLRPLGLTGNKVEKLCDLCNITVNKNAVFGDSSALAPGGVRIGAPAMTSRGLVEKDFEQIGEFLHRAVTLTLEIQKEHGKLLKDFNKGLVNNKAIEDLKADVEKFSATFDMPGFLVSEMKYKD

SEQ ID NO: 233274 - protein, 90 aa, Glycine max
  Clone ID: PAT_MRT3847_52672C.1.pep
DARQFAILFVSRKEFVTRPDMILNCFYSGVRAMGMALFMDAISTPLTTHICYYPYAPPCFSSPLYTIQPPCLWMSSSLKCSSFDFQIIFS

SEQ ID NO: 233275 - protein, 103 aa, Glycine max
  unsure (1)..(103): unsure at all Xaa locations
  Clone ID: PAT_MRT3847_52673C.1.pep
YAYTGITADGPAMRADELEKHVADDSLKDQIAAHDTWCSTRVNKMAKHMSLLQSXVAELKLVTDGTIVEGWRNAISTISSRETYLGHIPRLAPEAMVSSRASC

SEQ ID NO: 233276 - protein, 407 aa, Glycine max
  Clone ID: PAT_MRT3847_52674C.1.pep
MDPVSVWGNTPLATVDPEIHDLIEKEKRRQCRGIELIASENFTSFAVIEALGSALTNKYSEGMPGNRYYGGNEYIDQIENLCRSRALQAFHLDAQSWGVNVQPYSGSPANFAAYTAVLNPHDRIMGLDLPSGGHLTHGYYTSGGKKISATSIYFESLPYKVNSTTGYIDYDRLEEKALDFRPKLIICGGSAYPRDWDYKRFREVADKCGALLLCDMAHTSGLVAAQEVNSPFEYCDIVTTTTHKSLRGPRAGMIFYRKGPKPPKKGQPENAVYDFEDKINFAVFPSLQGGPHNHQIGALAVALKQAASPGFKAYAKQVKANAVALGKYLMGKGYSLVTGGTENHLVLWDLRPLGLTGNKVEKLCDLCNITVNKNAVFGDSSALAPGGVRIGNDLTSLLYATIQILLY

SEQ ID NO: 233277 - protein, 72 aa, Glycine max
  unsure (1)..(72): unsure at all Xaa locations
  Clone ID: PAT_MRT3847_52675C.1.pep
MADIGLKTGPAESRFPTTDHTRRXSTRCIEIHRCLNAQGGQLSERERFCKYYXNFXPIEWLDRWNEQRESWT

SEQ ID NO: 233278 - protein, 37 aa, Glycine max
  unsure (1)..(37): unsure at all Xaa locations
  Clone ID: PAT_MRT3847_52676C.1.pep
CYAVSDDKDVVSSTGLTTPXYXIMTLQKMISSLAESQ

SEQ ID NO: 233279 - protein, 378 aa, Glycine max
  unsure (1)..(378): unsure at all Xaa locations
  Clone ID: PAT_MRT3847_52677C.1.pep
MAVMAVHQFAQCITCHAWSPDQSMVALCPNNNEVHIYRLVEDKWEKLYVLQKHDQVISGIDWSARSNRIVTASHDRNSYVWNLEGSEWVPTLVILRLNRAALCVQWSPKENKFAVGSGAKTVCICYYEQENNWWVSKLIRKRHDSSVTSVSWHPDNILLATTSTDGKCRVFSTFIKGVDARDSKKGTSPDSKFGEQIVQLDLSSSWTFGVKWSPSGNTLAYVGHNSMIYFVDDVGPSPLAQNVVFRDLPLRDVXVLFVSERKVIGVGFDCNPMVFAADERGIWSFVRYLGERKAVSSGSRYGSQFSEAFGKFYGQSKHGVSNDTVETSRTRGTVHENCINCIMPLGDHGTLLRRFSTSGLDGRIVVWDLENEQDLLEL

SEQ ID NO: 233280 - protein, 119 aa, Glycine max
  unsure (1)..(119): unsure at all Xaa locations
  Clone ID: PAT_MRT3847_52678C.1.pep
MAVMAVHQFAQCITCHAWSPDQSMVALCPNNNEVHIYRLVEDKWEKLYVLQXENKFAVGSGAKTVCICYYEQENNWWVIKLIMKRHDSSVTSVSWHPDNILLAXTSTNWKCLIFITFIK

SEQ ID NO: 233281 - protein, 64 aa, Glycine max
  Clone ID: PAT_MRT3847_52679C.1.pep
QIVSFNQFSEAFGKFYGQSKHGVSNDTVETSRTRGTVHENCIKYISPFMTSVLFPNVIGYVTYF

SEQ ID NO: 233282 - protein, 78 aa, Glycine max
  unsure (1)..(78): unsure at all Xaa locations
  Clone ID: PAT_MRT3847_5267C.1.pep
XXLIXXXTPLXXISHXFSFXXHXHXSXXTXQYXSNRXIYAXXYXKCXAXQEATNFSLXDXXXTXXXXKKRLEVLXHXX

SEQ ID NO: 233283 - protein, 133 aa, Glycine max
  Clone ID: PAT_MRT3847_52680C.1.pep
PLNIHGITLKGKHDENWGQLFPPMIHQMKNRHAFRVDAYPRQEGLLSFNSDYMVWYRRKTKMFVDPQNAKTATLAEVAETLQYMVSPQGRNTWTVDDLVPYVEKITILSEEQERVTEPVPHGPALERQFPAQQ

SEQ ID NO: 233284 - protein, 232 aa, Glycine max
  unsure (1)..(232): unsure at all Xaa locations
  Clone ID: PAT_MRT3847_52681C.1.pep
MAVMAVHQFAQCITCHAWSPDQSMVALCPNNNEVHIYRLVEDKWEKVHVLQKHDQVISGIDWSTRSNRIVTASHDRNSYVWNLEGSEWVPTLVILRLNRAALCVQWSPKENKFAVGSGAKTCCICYYEQENNLWVSKLIRKRHDSSVTSVSWHPDNILLATTSTDGKCRVFSTFIKGVDARDSKKGTSPDSKFGEQIVQXLDLSSSWTFGVKWSPSGXTLAYVGHXSMIYFC

SEQ ID NO: 233285 - protein, 58 aa, Glycine max
  Clone ID: PAT_MRT3847_52682C.1.pep
LKWAPIICRMASYRKSCRNGMLGCQDVNLQKNPCIFTASEMKICCMFGTTHPKKKVTV

SEQ ID NO: 233286 - protein, 54 aa, Glycine max
  unsure (1)..(54): unsure at all Xaa locations
  Clone ID: PAT_MRT3847_52683C.1.pep
LSVWAGPPGFGWSSKSWMPXXIXLXVMXDVXFFXXCXXXVVXVXNXXXNIKHDV

SEQ ID NO: 233287 - protein, 159 aa, Glycine max
  Clone ID: PAT_MRT3847_52684C.1.pep
MSKQVASSTMPQEKLLLNPFEVSDDQILERIYITHFHCVEKYDVGVLYSVASNVIKHSIEIADMIIKDGQQIEQVREETDPLTSFQRLPAMKRIACQMMCTARGEQYAHQTTMLILEQLRDYSWDAKAVIVLAAFALEFGKFLQLAHIPRDKLGQSLAE

SEQ ID NO: 233288 - protein, 50 aa, Glycine max
  Clone ID: PAT_MRT3847_52685C.1.pep
WLPIPVKNIIIIIIIKENYKTEVDNKMKVTIRPTTHAVETDGPGKKLWLS

SEQ ID NO: 233289 - protein, 80 aa, Glycine max
  unsure (1)..(80): unsure at all Xaa locations
  Clone ID: PAT_MRT3847_52686C.1.pep
LKKVFLPLFILPGEADTVADPSVSKTLYXKANCSNKKLQLYKEAHHGFFEGEPDEKKTQVFGDNKSWLDEHSFKNKQFSF

SEQ ID NO: 233290 - protein, 264 aa, Glycine max
  Clone ID: PAT_MRT3847_52687C.1.pep
MESSSDEMVLKGIFLPFISPSHLVPVVDIARIFAMEGVDVTIITTPANAAVFQSSIDRDCIRGRSIRTHVVKFPQVPGLPQGLESFNASTPADMVTKIGHALSILEGPFRQLFRDIKPDFIVSDMFYPWSVDAADELGIPRLIYVGGTYFAHCAMDSLERFEPHTKVGSDDESFLIPGLPHEFEMTRSQIPDRFKAPDNLTYLMKTIKESEKRSYGSVFKSFYAFEGAYEDHYRKIMGTKSWNLGPISSWVNQDASDKASRSRD

SEQ ID NO: 233291 - protein, 232 aa, Glycine max
  Clone ID: PAT_MRT3847_52688C.1.pep
DLYSFKLRLLTNEEQQQLLKLLPVVDTAKLPDSLEVMFSSSQFKENLTYFQQLLAEGVFDISLLGAKSEDCKILKRLALSNLSKSKWVAHHNFLKKCKNKAGKSNTMGSTGTTSTNVLNNRASTDVANIKRMRDSRNQNLPEIKTIMRSPKRTIAKASCEGKEAVEDGACYSPKHLFALPPDASFLLLDSLNFAQESSDQDLLLRCHLHFFTAELLQQLKLVLKQPSAANLL

SEQ ID NO: 233292 - protein, 60 aa, Glycine max
  unsure (1)..(60): unsure at all Xaa locations
  Clone ID: PAT_MRT3847_52689C.1.pep
CLYSVSKLPSEAGVANDTCGSGRGGSPSNDGIKSAANNXDXDINKYFCTQVGKGKKIVDI

SEQ ID NO: 233293 - protein, 70 aa, Glycine max
  Clone ID: PAT_MRT3847_5268C.1.pep
IPSPGEGPRTFSLFLPIPGVLKEPKGKDSRFLPKFQIFKPRGKWGSLLNYGPKNPLSVFPPPIFGDLGFG

SEQ ID NO: 233294 - protein, 101 aa, Glycine max
  Clone ID: PAT_MRT3847_52690C.1.pep
SRTPPICLLSFEIHVKHEHLGQIGCGKRGRTATVDHGISRGASNLGTSGMFLRGPSFNGRYRPPSGRRDVRYMRSLGLMLEAETICTEANRIRIRNHISVS

SEQ ID NO: 233295 - protein, 96 aa, Glycine max
  Clone ID: PAT_MRT3847_52691C.1.pep
MGNIDLATLHDCLSDDYVKAYFEQFHSTLIMMFTDVGSAITYNELTRDAVLDPTVLVAVAVAHAFALFVSVSVAGNISRGHLNPAVTFGLAIGGNI

SEQ ID NO: 233296 - protein, 53 aa, Glycine max
  Clone ID: PAT_MRT3847_52692C.1.pep
EVCGVRFTRNDKLKIHMRKHTGERPYSCPHCPARFLHSYDHKNHMHLHTGVRP

SEQ ID NO: 233297 - protein, 36 aa, Glycine max
  Clone ID: PAT_MRT3847_52693C.1.pep
ERKLHPDYYSDCMYIYSVTGYKTGQGYLNFCPQLKG

SEQ ID NO: 233298 - protein, 175 aa, Glycine max
  Clone ID: PAT_MRT3847_52694C.1.pep
VRGMNARRSLNTLDLSYLEIPTAEFEAVQCMESYIDQWGCHLELVVKQLLETECRLSAIVFEKIGPEAWMGCFAKIAMESGILSFIRFGKIITDRKNDPLKLLNLLSIFKVLNGLRLKFNQLFSVKACKEIRTVTEDLIKKVVNGTSEIFWQLPAQVKLQRPTSPPPDGSIPKLV

SEQ ID NO: 233299 - protein, 67 aa, Glycine max
  Clone ID: PAT_MRT3847_52695C.1.pep
RLAYWRFRLEKDWRHECSKTDLQLSINRSANDVTVEVVEGDPRNVVCDADNEDRAAMQDVGSHGDGA

SEQ ID NO: 233300 - protein, 68 aa, Glycine max
  unsure (1)..(68): unsure at all Xaa locations
  Clone ID: PAT_MRT3847_52696C.1.pep
YLHRIVLITLGTHVHGSCSSIEATIINAGCGAFWSLASGLFVPLPCLXPPCAVGVPGGXALGLSSSPF

SEQ ID NO: 233301 - protein, 96 aa, Glycine max
  Clone ID: PAT_MRT3847_52697C.1.pep
YWTSCLTTHCISEDSESTGRGLVIINCSMVMRSGFGGIQSSLSKSFSATLRTDFLCRGLMWSSFVANGAHVTDVVEVPRKAISVNRMVTTGHATVR

SEQ ID NO: 233302 - protein, 61 aa, Glycine max
  Clone ID: PAT_MRT3847_52698C.1.pep
TWRRSISLEDFQDLAQEENKQEGGVCMLSRALANLTSISLTHPLHTSHGFMNIIGQISKEQ

SEQ ID NO: 233303 - protein, 150 aa, Glycine max
  Clone ID: PAT_MRT3847_52699C.1.pep
MEPSKNSQKPSHFHDYLPVMANKLGGDGLIDELCNGFNLLKDSDRGVITFESLKRNAALLGLQGLRDEDLRLMLRQGDFDGDGVLSQLEFCALMFRLSPELMEGSKLWLEEVLQQVRDRGTVIFVFCYQLWVSLPHSMVWFGCLNCHACI

SEQ ID NO: 233304 - protein, 176 aa, Glycine max
  Clone ID: PAT_MRT3847_5269C.1.pep
GVGKTTLVKNVYDREKVNFADAHAWIVVSKEYDVTDLLGTLLTKIRHTQESTAPPPLSVGAKSDVYDLTEAINKIVQEKKCLIVLDDVWNKDAYNQMCNAFQGIHGSRVMITTRMEDVAALAQPKRRLVLQPLGSTESFKLFCSRAFHSNLNRECPLELNTVATKVVERCRGLPFA

SEQ ID NO: 233305 - protein, 92 aa, Glycine max
  Clone ID: PAT_MRT3847_526C.1.pep
LIFQFQIHATCSGNRPCFEGGRHAGEGGTPDPGSSLSQWCFVSLHQGLERNYRVGFQMVTLIAKLQNYRAWLVVVEKENLNKEMGLVLHSEG

SEQ ID NO: 233306 - protein, 57 aa, Glycine max
  Clone ID: PAT_MRT3847_52700C.1.pep
IHMTKKKKDFFPITFSEGYVSLIKISTRGMPLLSKEVRIVAIAGYAAFHKKSLGGKT

SEQ ID NO: 233307 - protein, 54 aa, Glycine max
  Clone ID: PAT_MRT3847_52701C.1.pep
KKNKRYRIEIMPHLKRCNLPNRNPWEARKSLTSFKCTKGKILKLQQKAGSFSQN

SEQ ID NO: 233308 - protein, 111 aa, Glycine max
  Clone ID: PAT_MRT3847_52702C.1.pep
RENVLCQYDYWTGTTLSLYHQSLVKVYSAKALPFCNKPAQKNIHSSLLFTFIFQKYFLVVSLLPGQLSTRGCRDPGWVRRGHRPSRRVPSKNSLDRRPIRPGTFFLRHAIS

SEQ ID NO: 233309 - protein, 398 aa, Glycine max
  Clone ID: PAT_MRT3847_52703C.1.pep
MKGVFSAPGDYVHFKSQVPLHKIPIGTKQWRYYDFGPKAVPPLICLPGTAGTADVYYKQIMSLSMKGYRVISVDIPRVWNNTEWIQAFEKFLDAIDVHHIHLYGTSLGGFLAQLFAQHRPRRVRSLVLSNTFLETRSFSAAMPWAPIVSWTPSFLLKRYVLTGIRDGPHEPFIADSVDFVVSQVETLSREDLASRLSLTTDAASVGPLLLSVSFITIMDTNDYCAIPQQLKDQLGERYPEARRAYLKTGGDFPFLSRPDEVNLHLQLHLRRVGVEPRPDLVHNIPKGDIGGSPSKENNEDDSDESHKDNGGGSENPPAEYEINPTSPESLGSGNLDKQPLDSSECCHLFPGGFPREKHIVPPGTPLHFVWEYIVFFHLLHIRSLCIIWNYSLEFRQFV

SEQ ID NO: 233310 - protein, 67 aa, Glycine max
  Clone ID: PAT_MRT3847_52704C.1.pep
PGSTHPSVLKEGGKVVTIVPPGFHPAILFILSTDGAILEKLNPYFESGKLKPILDSNTHFSTRSSLN

SEQ ID NO: 233311 - protein, 95 aa, Glycine max
  unsure (1)..(95): unsure at all Xaa locations
  Clone ID: PAT_MRT3847_52705C.1.pep
WRRWAATFIQAAWRRYWKKKIERSLREAEDELQDAFANEEGSSXSLGATIYASRXICCQCTRNLRENSRHNRMQQRLLPLLPQKPAEPDFTSRKH

SEQ ID NO: 233312 - protein, 90 aa, Glycine max
  Clone ID: PAT_MRT3847_52706C.1.pep
MSNPDENIVFQAKNSVDLDKFVDITLGEQEKHGARRMMKLALLCVDVTSRRPSMAQIVHELEQIQREIAPMYSQFNEEIGAVTLGSELFQ

SEQ ID NO: 233313 - protein, 67 aa, Glycine max
  Clone ID: PAT_MRT3847_52707C.1.pep
DSPGCWNCESLALEASLLRGPLWPSWNRLMLKYTFYEQHVYFVHFAGRFSFLLLKKKKLVFPFIKTR

SEQ ID NO: 233314 - protein, 66 aa, Glycine max
  Clone ID: PAT_MRT3847_52708C.1.pep
GIDLPFSCRAGSCSSCAGMIKQGSVDQSDGNFLDDDQIAAGFVLTCVAYPQSDVVIETHKQEQLTA

SEQ ID NO: 233315 - protein, 83 aa, Glycine max
  Clone ID: PAT_MRT3847_52709C.1.pep
ALYTVPCKVQIVEAVEMAATNLAARGIVLESLTRDNYDNWSALVKNYLMGEGLWGDVKLVFYYSYLTILMFIYLLLCIPSLLF

SEQ ID NO: 233316 - protein, 48 aa, Glycine max
  Clone ID: PAT_MRT3847_5270C.1.pep
NQMMLLMSDIYKYEYVKKNSKLVFHDSPSNPLHHTHPRLLLSFLNIEK

SEQ ID NO: 233317 - protein, 69 aa, Glycine max
  Clone ID: PAT_MRT3847_52710C.1.pep
HVYNTKLQNMAEDSSLMMATPTLINLIGLDIRPAHHQSLYGTLHAMMSWTVVSLYDAGVTCDTPLGAQE

SEQ ID NO: 233318 - protein, 68 aa, Glycine max
  Clone ID: PAT_MRT3847_52711C.1.pep
QALKRRERESEVHSVLEFFVVYTSVFLVRVRSPLLFDINITHDRLSPEMKRSIHGGRLKERLAMLDYY

SEQ ID NO: 233319 - protein, 357 aa, Glycine max
  Clone ID: PAT_MRT3847_52712C.1.pep
MEEINKNPSGTSLLVPSVLELAKENLTTVPQRYIQPQHQDMVLISEEDHSTLEIPVIDMHRLLSVESGSSELDKLHLACKEWGFFQLVNHGVNSSLVEKVRLETQDFFNLPMSEKKKFWQTPQHMEGFGQAFVISEDQKLDWADLYYMTTLPKHSRMPHLFPQLPLPFRDTLEAYSQEIKDLAIVIIGLMGKALKIQEREIRELFEDGIQLMRMNYYPPCPEPEKVIGLTPHSDGIGLAILLQLNEVEGLQIRKDGLWVPVKPLINAFIVNVGDILEIITNGIYRSIEHRATVNGEKERLSFATFYSPSSDGVVGPAPSLITEQTPPRFKSIGVKDYFKGLFSRKLDGKAYIEVMRI

SEQ ID NO: 233320 - protein, 51 aa, Glycine max
  Clone ID: PAT_MRT3847_52713C.1.pep
MHQIVQSQTMISKDLWEQNNLPATCSWPSPSHLFEKHLFMYPVGIVVSKFF

SEQ ID NO: 233321 - protein, 66 aa, Glycine max
  unsure (1)..(66): unsure at all Xaa locations
  Clone ID: PAT_MRT3847_52714C.1.pep
VSLYDEWVNKGDAPSLPETLKNYYKLVSLGFKIVFLAXRYLVKMAXTEANLNITNWHRMKHLILKE

SEQ ID NO: 233322 - protein, 77 aa, Glycine max
  unsure (1)..(77): unsure at all Xaa locations
  Clone ID: PAT_MRT3847_52715C.1.pep
LLGLGVNPAVHEVEESDKWXVVRELEAIVGANNGGNKMQFPAVFIGGKLFGGLDKVMATHISGELVPILKEAGALWL

SEQ ID NO: 233323 - protein, 84 aa, Glycine max
  Clone ID: PAT_MRT3847_52716C.1.pep
KLNNNQRRKGLLLFDEPNRRELDHLSPTLDGFGDPQLNKIKKKLLNTIVTLKPNGPYCIQETNFNSYSRLAPTNSFPSVNTIPS

SEQ ID NO: 233324 - protein, 76 aa, Glycine max
  Clone ID: PAT_MRT3847_52717C.1.pep
MYLMQLCSGIDENAIGACAQLVFAPIDESFADDALLLPSGFRIIPLDPKTDGLVSSRIWVLSSTLDTGSGNACSAG

SEQ ID NO: 233325 - protein, 34 aa, Glycine max
  Clone ID: PAT_MRT3847_52718C.1.pep
QIYSSRASKGVAFISIPPRKGLFPHGLCLPISHQ

SEQ ID NO: 233326 - protein, 87 aa, Glycine max
  Clone ID: PAT_MRT3847_52719C.1.pep
MMMKSAMCALVLEALVVVEVGPMAEAAVTCIPTQLTPWIPAFKSCSAPSSACSPKLVEQNPCFCGYLKNPNLKQYVNSPNAMIAVSS

SEQ ID NO: 233327 - protein, 211 aa, Glycine max
  Clone ID: PAT_MRT3847_5271C.1.pep
MDKGVPPSLFVNDGSFMERFKQLQQEQDKGKNVKLEDSKPIKGGSSGKLAFSLKQKSKLVPPPVKLSADEDEEETEAGYVSNDAPLKRQKLGQEEGIDQSSRQLDVAPHSPSDPTVKKVADKLASFVAKNGRQFEDVTRQKNPGDTPFKFLFDERCAEYKYYEYRLAQEEMLLCNQRNHRCPRMGGTSTSSSNRLMSSEIISAHTYQIPAS

SEQ ID NO: 233328 - protein, 59 aa, Glycine max
  Clone ID: PAT_MRT3847_52720C.1.pep
FFFFFFFFFFFFFFFFWKKKSFTCLLIMGSIQQPLFLLSMKRLYFFTLKVTTNNQKIRD

SEQ ID NO: 233329 - protein, 78 aa, Glycine max
  Clone ID: PAT_MRT3847_52721C.1.pep
IIAPLVELWWSQLLKGAWLLPQRLYRALTPQGLQGNPCSLVIGDTKEMCTVLMQAARPQQSTSFLLSKERRRPIYTLT

SEQ ID NO: 233330 - protein, 108 aa, Glycine max
  Clone ID: PAT_MRT3847_52722C.1.pep
SEMLELLQSSSEMSTLLQISAFPLLVLEFPRHPSTKFPAFVRGVLPFMRSDFIASFSAFIILFFSFMIEHSIFIFAFIPDFFISCSDVTSFIYFCFYSKFFIFFSFMG

SEQ ID NO: 233331 - protein, 98 aa, Glycine max
  Clone ID: PAT_MRT3847_52723C.1.pep
NSGQPPNYEMLKEEQEVAMLGAHHNPAPPTSTVIHIRSETSVPDHVVWSLFNTLFMNTCCLGFIAFAYSVKVRMALAEIQGVPVSLGLHLPTCCLGWG

SEQ ID NO: 233332 - protein, 128 aa, Glycine max
  Clone ID: PAT_MRT3847_52724C.1.pep
ESVSEKVPLLPTGVTSSVHELALMMNNNDNNKNKSIGIVNRNPKWSDKFNEMTNFDDVNVAAQSSLPPRPRVARLIPSAPAAASFNFNAYEYYWRTKSASPKGTSSVNLNQLDQEKLKSRLLCLGHEY

SEQ ID NO: 233333 - protein, 33 aa, Glycine max
  Clone ID: PAT_MRT3847_52725C.1.pep
RGEPLDCINLSASMRGLDAYTQLLRDGPYTNNC

SEQ ID NO: 233334 - protein, 72 aa, Glycine max
  Clone ID: PAT_MRT3847_52726C.1.pep
KVRVQKTYVKVVIPKVNNRHELQSTNNALLCGDISKLQKPVKFSPYAPSIQWIPQNVLFSWLGVWAWILMFQ

SEQ ID NO: 233335 - protein, 70 aa, Glycine max
  Clone ID: PAT_MRT3847_52727C.1.pep
AGRSRILVYSSYRNANIQPITFHAPSDKVPNKSTKNLRKKKKRSSAYLDLLPMPTEQPKTPAQNEQNSSP

SEQ ID NO: 233336 - protein, 42 aa, Glycine max
  Clone ID: PAT_MRT3847_52728C.1.pep
MTPILKRVEVAPIKDDGSIPVVYERDLHCDGYVMTIIRTCRH

SEQ ID NO: 233337 - protein, 73 aa, Glycine max
  Clone ID: PAT_MRT3847_52729C.1.pep
GTCMIQEWPFYKHTLMVNGDFFNRTSRILFICQPVSSISTPKTSGDFVFFYKPSKKLAQTQTGDSIAHGNRNP

SEQ ID NO: 233338 - protein, 142 aa, Glycine max
  Clone ID: PAT_MRT3847_5272C.1.pep
TKLKFWIPKKPGSLFKGSRCPPKWVKPVWVFGAPKKKLKPSPKAWENHYGLGNFPFLGPSSFWFPPPILRKSGPRAVILLLFPNGHLEPALYSRHCFPQKPPGLFFEKPPGHPLDQRVFRTMDPPFLDRLDPNGWFWASPLY

SEQ ID NO: 233339 - protein, 62 aa, Glycine max
  Clone ID: PAT_MRT3847_52730C.1.pep
NHLKVYLFFLIFFFMNILILNVLFFCLFSCFSYTFSSSRPLYCKVYITLFLAFNGCPLSFGV

SEQ ID NO: 233340 - protein, 125 aa, Glycine max
  unsure (1)..(125): unsure at all Xaa locations
  Clone ID: PAT_MRT3847_52731C.1.pep
MAGGGFTSGGGAGDFEAKITPIVIISCIMAATGGLMFGYDVGVSXKTVEEKGLDSNYCKYDNQGLQLFTSSLYLAGLTSTFFASYTTRRLGRRLTMLIAGVFFICGVVLNAAAQDLAMLIXGRIL

SEQ ID NO: 233341 - protein, 522 aa, Glycine max
  Clone ID: PAT_MRT3847_52732C.1.pep
MAGGGFTSGGGAGDFEAKITPIVIISCIMAATGGLMFGYDVGVSGGVTSMPPFLKKFFPTVYRKTVEEKGLDSNYCKYDNQGLQLFTSSLYLAGLTSTFFASYTTRRLGRRLTMLIAGVFFICGVVLNAAAQDLAMLIVGRILLGCGVGFCYQAVPVFLSEIAPSRIRGSIDIFVQLNVTIGILFANLVNYGTNKIKGGWGWRLSLGLAGIPAVLLTLGALFVVDTPNSLIERGRLEEGKTVLKKIRGTDNIELEFQELLEASRVAKEVKHPFRNLLKRRNRPQLVISVALQIFQQFTGINAIMFYAPVLFNTLGFKNDASLYSAVITGAVNVLSTVVSIYSVDKVGRRILLLEAGVQMFLSQVVIAIILGIKVTDHSDDLSKGIAILVVVMVCTFVSSFAWSWGPLGWLIPSETFPLETRSAGQSVTVCVNLLFTFVIAQAFLSMLCHFKFGIFLFFSGWVLVMSVFVLFLLPETKNVPIEEMTERVWKQHWFWKRFIDDAADEKVAHVSNGNGFDPTSRL

SEQ ID NO: 233342 - protein, 57 aa, Glycine max
  unsure (1)..(57): unsure at all Xaa locations
  Clone ID: PAT_MRT3847_52733C.1.pep
LCFRLVCCVVLYALYYVPPVSSFVFDCLSVSLPKSGPQCEASSSRPEKKSSSXGXLV

SEQ ID NO: 233343 - protein, 116 aa, Glycine max
  unsure (1)..(116): unsure at all Xaa locations
  Clone ID: PAT_MRT3847_52734C.1.pep
SVQKVVAGASLVHAFFTNMHNXEHYDACKWTKSKPHSXKLIFPIKVCGPNNGFEMXRYEWANQTSWNLSXSLFDNPXHSTLFDIFLGISQDFELAGYTLMPAFSVPQATDISSENR

SEQ ID NO: 233344 - protein, 81 aa, Glycine max
  Clone ID: PAT_MRT3847_52735C.1.pep
MDHRPKSKDSLSYSTLFTLQPLMNFQLPKQDDDFDYYGSSSQDESRDSEGGGITNHGNGNVHDKEVNLFKKRRWSLNSDNE

SEQ ID NO: 233345 - protein, 131 aa, Glycine max
  unsure (1)..(131): unsure at all Xaa locations
  Clone ID: PAT_MRT3847_52736C.1.pep
MTRSSVMKMKVRVFFVATALVAWQCRAYDMFPVRMNTGYGARTPEVKCAPWKLAVEAHNIFGFETIPEECVEAKNEYIHGEQFRSDSKTVDQQTYFYAKNLKVHLRDTFEXTIHGAAFSNVPYSLADPMRK

SEQ ID NO: 233346 - protein, 144 aa, Glycine max
  Clone ID: PAT_MRT3847_52737C.1.pep
MTVSSENCVSSSQSSLTRLAPLEAVLFDIDGTLCDSDPLHYYAFREMLLEIGFNEGVPISEEFFIDTVAGKHNDDIASVLFPGDLERGLKFVDDKEAMFRRLAAEQLKPLNGLDKVRKWIENHGLERAAVTNASRANAELMISI

SEQ ID NO: 233347 - protein, 40 aa, Glycine max
  Clone ID: PAT_MRT3847_52738C.1.pep
DSCIISTVRSKSSYSILAYGSYRHTCSLNGITRFRTTSRF

SEQ ID NO: 233348 - protein, 127 aa, Glycine max
  unsure (1)..(127): unsure at all Xaa locations
  Clone ID: PAT_MRT3847_52739C.1.pep
YTFCWSSIIYNQIQGGGLYCWEVRIRYFILFQDFSISNKNLSICFGNNGHIVXVLSHVKAFGLVLDIILGYVLWQRSIGPFXAKLTSVPVMDFNGCESIGSLDGVLYSFSPTGVIKNFIRMYAEKSI

SEQ ID NO: 233349 - protein, 384 aa, Glycine max
  Clone ID: PAT_MRT3847_5273C.1.pep
MDAISCLDESTTTESLSISQAKPSSTIMSSEKASPSPPPPNRLCRVGSGASAVVDSDGGGGGGSTEVESRKLPSSKYKGVVPQPNGRWGSQIYEKHQRVWLGTFNEEDEAARAYDVAVQRFRGKDAVTNFKPLSGTDDDDGESEFLNSHSKSEIVDMLRKHTYNDELEQSKRSRGFVRRRGSAAGAGNGNSISGACVMKAREQLFQKAVTPSDVGKLNRLVIPKQHAEKHFPLQSAANGVSATATAAKGVLLNFEDVGGKVWRFRYSYWNSSQSYVLTKGWSRFVKEKNLKAGDTVCFQRSTGPDRQLYIDWKTRNVVNEVALFGPVVEPIQMVRLFGVNILKLPGSDSIANNNNASGCCNGKRREMELFSLECSKKPKIIGAL

SEQ ID NO: 233350 - protein, 87 aa, Glycine max
  Clone ID: PAT_MRT3847_52740C.1.pep
WDKALLLLLLLYACRKTLADSRPRVRGRFAKNDDFGESHKQGSSNHEDDDEEIIVKEDDDMVDSSDIFAHISGVNSFKCNYSIQSLI

SEQ ID NO: 233351 - protein, 83 aa, Glycine max
  Clone ID: PAT_MRT3847_52741C.1.pep
MPPRGTENTGPLCSRNRRNNDADAEESAQTAETERRTEPETKAEKHIQKLLLLGAGEPGKSTTFKQKKHQDQTGRDEAEPKSH

SEQ ID NO: 233352 - protein, 224 aa, Glycine max
  unsure (1)..(224): unsure at all Xaa locations
  Clone ID: PAT_MRT3847_52742C.1.pep
TPEIWMKPNSDKYYKCVSRPRNVIGLKKTNGYLLVHANGGLNQMRTGICDMVAVAKIMNATLVLPSLDHDSFWTDPSDFKDIFDWRHFMKVLKDDIEIVEYLPVQYASLKPLVKAPVSWSKASYYRGEILPLLKQHTVVQFTHTDSRLANNGLASSLQKLRCRANYHALKYTAEIEELGKVLVNRLRNNKEPYIALYFRYEKDMLSFTGCXYNLSVXEAEELRV

SEQ ID NO: 233353 - protein, 84 aa, Glycine max
  Clone ID: PAT_MRT3847_52743C.1.pep
HFLTHYFKRALITPKFETFRFLKKERMLWVLGAKTSNFNITGKRTTLSSNWNWGNFPTSNRKPTFPKAGLIPSCTQWHIFSFGQ

SEQ ID NO: 233354 - protein, 132 aa, Glycine max
  Clone ID: PAT_MRT3847_52744C.1.pep
RYWLFAAVKLRCLLVTNDEMRDHIFELIGSNFFNQWKERHQVHYTFVKGNLKLQMPPSYSLVIQESEKGYWHVPLAPGTSCESTRCWLCITRPCGHDVVATVSNGVSSLDSQVDENNATSVTGKRKERSPPS

SEQ ID NO: 233355 - protein, 90 aa, Glycine max
  Clone ID: PAT_MRT3847_52746C.1.pep
SIGANQYFRILVKKQFFLLKNRKLFWGITFFLHFLLISTLNTHDGAWGSKIQRFIFAPLALGNKTIHLKLLEPTTNQRKLFTDGKRFPGC

SEQ ID NO: 233356 - protein, 76 aa, Glycine max
  Clone ID: PAT_MRT3847_52747C.1.pep
GEQIPKPLTFKKIAIVSPNYLPNSFCKPPHPGWYCGLFTKNSATALFLVGENPSREFSFTFIPPRRVGRRGICLKE

SEQ ID NO: 233357 - protein, 58 aa, Glycine max
  Clone ID: PAT_MRT3847_52748C.1.pep
PQVKQEPTVLALTSLSPVILHGNQLPSTAHTHRPACDTVLTPSIEQLRKAIQTLPHKE

SEQ ID NO: 233358 - protein, 131 aa, Glycine max
  unsure (1)..(131): unsure at all Xaa locations
  Clone ID: PAT_MRT3847_52749C.1.pep
KKQKKPKKGNPTPKLRLKPPFITPKREIGDPKKTPGPGGKKPPQRGGPKKHIWAKKTPKNKKKQGAALPKKKAKGEGAPIKRAPNFLPGGPQATPAPXKRPRGPSPKGFPAKGPMEAFGPEKPLPSSTNGF

SEQ ID NO: 233359 - protein, 401 aa, Glycine max
  Clone ID: PAT_MRT3847_5274C.1.pep
MDAISCMDESTTTESLSISLSPTSSSEKAKPSSMITSSEKVSLSPPPSNRLCRVGSGASAVVDPDGGGSGAEVESRKLPSSKYKGVVPQPNGRWGAQIYEKHQRVWLGTFNEEDEAARAYDIAAQRFRGKDAVTNFKPLAGADDDDGESEFLNSHSKPEIVDMLRKHTYNDELEQSKRSRGVVRRRGSAAVGTASSISGACFTKAREQLFEKAVTPSDVGKLNRLVIPKQHAEKHFPLQSSNGVSATTIAAVTATPTAAKGVLLNFEDVGGKVWRFRYSYWNSSQSYVLTKGWSRFVKEKNLKAGDTVCFHRSTGPDKQLYIDWKTRNVVNNEVALFGPVGPVVEPIQMVRLFGVNILKLPGSDTIVGNNNNASGCCNGKRREMELFSLECSKKPKIIGAL

SEQ ID NO: 233360 - protein, 254 aa, Glycine max
  Clone ID: PAT_MRT3847_52750C.1.pep
MAVVGVLALQGSFNEHIAALRRLGVQGVEIRKPEQLNTISSLIIPGGESTTMAKLAEYHNLFPALREFVQMGKPVWGTCAGLIFLANKAIGQKTGGQYLVGGLDCTVHRNFFGSQIQSFEAELSVPELVSKEGGPETFCGIFIRAPAILEAGPEVQVLADYPVPSSRLLSSDSSIEDQTENAEKESKVIVAVRQGNILATAFHPELTADTRWHSYFVKMSNEIREEASSSSLVPAQVSSTSQYQQPRNDLPIYR

SEQ ID NO: 233361 - protein, 84 aa, Glycine max
  Clone ID: PAT_MRT3847_52751C.1.pep
LFRPVDSKRTHNNDLFFFDFQGSLQRPVTNECRSQLKKKANSRRMPVSFLIPLIGLPILAVPAAEELDIYLNIAINVYVKSFGR

SEQ ID NO: 233362 - protein, 194 aa, Glycine max
  unsure (1)..(194): unsure at all Xaa locations
  Clone ID: PAT_MRT3847_52752C.1.pep
VADGVFFTXLNKVLTPYFSNRHYSNIXIKITPIHTKIIITSTRTQAILDEKXRTITKLTSLIHNKFKFPENTIXLYTNRINNTYLCTITQAKSLLYNLLNNLSILTTYYNILRFIIXTKTQKYEIMFNIKLRSHRSKSIIFKHIYIISSRQPIKDYIYSAXRHVLLRQTILIMQINIMLYYYPNKKHSSQTPLA

SEQ ID NO: 233363 - protein, 37 aa, Glycine max
  Clone ID: PAT_MRT3847_52753C.1.pep
RIDKIKIVIMRVFSLIPIKIYINQLLSIVYTQKTKLI

SEQ ID NO: 233364 - protein, 417 aa, Glycine max
  unsure (1)..(417): unsure at all Xaa locations
  Clone ID: PAT_MRT3847_52754C.1.pep
HASGEVFVLAHRAALNLAYQNRSRVPEKPSCLLELTGRDLIGLPLKSPLSFNEVNYALPMLSILMDKGTGVVTSVPSDAPDDYMALHDLKAKPALREKFGVKDEWVLPFEIVPIIEVPQFGNKCAETVCLQMKIKSQNDKEKLVEAKKQTYLKGFTEATMPVGEFXXRKVQEAKPLIRNKLLETGQAIIYSEPEKRVMSRSGDECVVALTDQWYITYGESEWKKLAEECLSNMSLYSDETRHGFEHTLSWLNQWACSRSFGLGTRIPWDEQFLVESLSDSTIYMAYYTVSHHLQNGDMYGSSESAIKPQQLTYDVWDYIFCGGPYPKSTDISSSLLERMKREFEYWYPFDLRVSGKDLIQNHLTFCIYNHTAIMAKHHWPRGFRCNGHIMLNSEKMSKSTGNFRTLRQAWEEFPSNN

SEQ ID NO: 233365 - protein, 110 aa, Glycine max
  Clone ID: PAT_MRT3847_52755C.1.pep
MVSAQFSILNENGSQKPFLNQLLLPNGPPDRLPSSNCVDFEFSDVFGPSPVEASNSISVSSEKHGNSVATRGSSENIYKDPDCIHIRSQSLLAPTTCIGQFLQLIMLTFH

SEQ ID NO: 233366 - protein, 71 aa, Glycine max
  Clone ID: PAT_MRT3847_52756C.1.pep
MLAPNAPLMDRCPGCYFSAFLLIDTDLWAAKGRPPMADSIIGGCSTHPLLQVNGRPLLQGEYTLPDPVDIL

SEQ ID NO: 233367 - protein, 53 aa, Glycine max
  Clone ID: PAT_MRT3847_52757C.1.pep
KLPAWKIYSISIFSLVVTVKKWKPCFFGKLLFSFGWFKKKSNNGFKKEFYPLF

SEQ ID NO: 233368 - protein, 45 aa, Glycine max
  unsure (1)..(45): unsure at all Xaa locations
  Clone ID: PAT_MRT3847_52758C.1.pep
LNSYFQNAEXXMSFPFNHSXRXDDXDDDKRPAVXPXXGNXFNNPP

SEQ ID NO: 233369 - protein, 112 aa, Glycine max
  Clone ID: PAT_MRT3847_52759C.1.pep
RGLQGSSFHCFFLGTNPPLLAQRLSLFSPPTNRGKYPLAHKWEGFCVVKDCVVTQKWEGNTKGYKGLDFDQDEEDAFWVLPLWLTNIKMYPFLSLSLSLYFSLYLFVVVLLL

SEQ ID NO: 233370 - protein, 46 aa, Glycine max
  unsure (1)..(46): unsure at all Xaa locations
  Clone ID: PAT_MRT3847_5275C.1.pep
QCQFRXYVVLYYYYLLLYILGTEANXSSKKRPRVVSNEATHRGRVG

SEQ ID NO: 233371 - protein, 51 aa, Glycine max
  Clone ID: PAT_MRT3847_52760C.1.pep
IFIKIRFYEYLHTLMHNECTITIEIPSNNRYIIYTDVRIPILIKSIKIGRH

SEQ ID NO: 233372 - protein, 168 aa, Glycine max
  Clone ID: PAT_MRT3847_52761C.1.pep
GITMLQDPRHASLIHQSNKKGNVTNQKGSILRNKNIYHSTQSSAGKDNSKAIGHSVKLKKTASSAEKGTEIQSSLTRKPLSPVSPAVLSKANISNFQEDHRKSQNVATQQKSQMLTATPPSRPYIAGDEENMTPKNMALPVPTTPLTSVPMLTAITPDSVYSGPTAAS

SEQ ID NO: 233373 - protein, 39 aa, Glycine max
  Clone ID: PAT_MRT3847_52762C.1.pep
LLLETLFLAHINEKYLSRTVISPQGFVAKRGRSGFITYI

SEQ ID NO: 233374 - protein, 155 aa, Glycine max
  Clone ID: PAT_MRT3847_52763C.1.pep
MKYLLVTGGVVSGLGKGVTASSIGVLLQACGFRVTSIKIDPYLNTDAGTMSPFEHGEVFVLDDGGEVDLDLGNYERFLDLKLTRDNNITTGKIYQSVIEKERRGDYLGKTVQVVPHITDAIQEWIERVAQIPVDGKESPADVCVIELGGTIGDIE

SEQ ID NO: 233375 - protein, 375 aa, Glycine max
  unsure (1)..(375): unsure at all Xaa locations
  Clone ID: PAT_MRT3847_52764C.1.pep
PKLGQFCHVPLSNILTLHDVPNIWHIPLLLKDQKAHEAILKALNLLGVAAEPNLKEWTSRTKVYDRCHEIVRIAMVGKYTGLSDAYLSVLKALLHASVARNRKLIVDWVPAGDLEDATYNEDPEAYKAAWSLLKGANGVLVPGGFGDRGVQGKILAAKYAREHNVPFLGICLGMQIAVIEFSRSVLGLHDATSTEFDPKTKNPCVIFMPEXSKTHMGGTMRLGSRRTYFHVADCKSAKLYGNASFVDERHRHRYEVNPDMISQLESAGLSFVGKDETGKRMEIVEFPSHPFFIGAQFHPEFKSRPGKPSPLFLGLISAACERTIVPASNGYGKLTNGIHSPLLKAAAAHNGNNGFKSSNSSLNGVYTSTTTNGVC

SEQ ID NO: 233376 - protein, 82 aa, Glycine max
  Clone ID: PAT_MRT3847_52765C.1.pep
HGRFQSRRKWSQQPSNAHTPNLTVSYGVPNHGLLKATDGDKLQPITVKASNSGYCFSAISCWILINRTMHGHNGVLLPLPQL

SEQ ID NO: 233377 - protein, 78 aa, Glycine max
  unsure (1)..(78): unsure at all Xaa locations
  Clone ID: PAT_MRT3847_52766C.1.pep
GAIMDKASTPAVTXGSIYMEQVHVKLGEELYFTVCTQHIPIGTTPQDARTETGSPRGIHHKQGDQMVIHIATDLRPRT

SEQ ID NO: 233378 - protein, 265 aa, Glycine max
  Clone ID: PAT_MRT3847_52767C.1.pep
ECSTSILKSYPSMADYQKSGLYKWAGDAENFDKEGPYIELVTSPNNPDGHRREAMVNRSQGLLIHDLAYYWPQYTPISSPSDHDLTLFTVSKSTGHAGMRIGWALVKDKGVAKKMTKFIEISTIGVSKDSQLRAAKVLKAVSDSCEQENSQDGESFFTHSYNIMAQRWKQLRAVVEAGDLFTLPQFSPAFCTFFGQETEPQPAFIWLKCEGDIEDCESLLREHKIVARSGRHFGASPKYVRISMLDTDETFIQLIDRLSAIQQGK

SEQ ID NO: 233379 - protein, 79 aa, Glycine max
  Clone ID: PAT_MRT3847_52768C.1.pep
HFPNLHSLFPFNPHFSSLEGASSHLNLYDRGNRSSRVTETRYLLIDLLIIFLFGKSLQNFFYASCCCKYLREASRTREK

SEQ ID NO: 233380 - protein, 50 aa, Glycine max
  unsure (1)..(50): unsure at all Xaa locations
  Clone ID: PAT_MRT3847_52769C.1.pep
MLSINQIDVSXXXFTCKKYIIHLKTPLSSCSIGINSMLHKKTSFYNRLTD

SEQ ID NO: 233381 - protein, 63 aa, Glycine max
  unsure (1)..(63): unsure at all Xaa locations
  Clone ID: PAT_MRT3847_5276C.1.pep
VLSYLVLKLAYVVVGVQHGCPPLRLLHRVTPPDGSGCRRRRTRPPPICRXHARANYVAAALER

SEQ ID NO: 233382 - protein, 195 aa, Glycine max
  Clone ID: PAT_MRT3847_52770C.1.pep
VVSPVSTPSRSFNWTKGGEPVSAPPYKTPKPLPVIVHSPAQAPSSAHKARQFHHAPEPPISSPESPFNKDHPPASSPSTTFYKHHHTRNTVTSPAPASSHSISPSTSKHQDGSNPPLPLPTSRQRHHAPPPMNTGSSVSPSGLPIQSPVSQVSPAPSPLFKISPHSTKIPLPPPKVSPSRPSSKTPKKPVRPRFQ

SEQ ID NO: 233383 - protein, 69 aa, Glycine max
  Clone ID: PAT_MRT3847_52771C.1.pep
QIYVIYGWPNITAGSANYSTMKGKVTVTRVLINITLEKLSLGGLCKDTPPTQHSFARFLKKRGQDCSLI

SEQ ID NO: 233384 - protein, 37 aa, Glycine max
  Clone ID: PAT_MRT3847_52772C.1.pep
TLKGVLLSNSPFKMKSQKFKAALAVAHGKGLNLGTFC

SEQ ID NO: 233385 - protein, 113 aa, Glycine max
  Clone ID: PAT_MRT3847_52773C.1.pep
APELALDVHSSPYLKGGMNLSGFHSLETYLHLIDGYLSHETPFRSEARRDIALVNKSCDMLVDELRIPHCWYQLANKGLVCNAHGRWVKPKRDNDDIPSHASEVFNAGLGVVM

SEQ ID NO: 233386 - protein, 97 aa, Glycine max
  Clone ID: PAT_MRT3847_52774C.1.pep
RPLVRPRVRVPLRPYVEPFVQAHSAEGYLDFFPVEDDTKNGAAHIGEWKPGAYGPVAPPAHWGETPNVRRTGLPRDRSPSDMPTNQHRQGRSRHHGY

SEQ ID NO: 233387 - protein, 29 aa, Glycine max
  Clone ID: PAT_MRT3847_52775C.1.pep
EIECSPLCHKVVLSNGLLIPSMDVELGVC

SEQ ID NO: 233388 - protein, 103 aa, Glycine max
  Clone ID: PAT_MRT3847_52776C.1.pep
MSRRPFWGKCSPISTLLLGPGSTGLGDSSVYTFYITSLLRLLINFISLFQRPIAFPGELCVIYSSHFMYQPAYTQSQPITMKLAYFPHLYSCVFRVWPPPPPP

SEQ ID NO: 233389 - protein, 60 aa, Glycine max
  Clone ID: PAT_MRT3847_52777C.1.pep
SKRHDIGPYLHACRVATVALLLLYQSAYGYRLLRGSRSKSNRSEHRIGTELCFLTFTRIG

SEQ ID NO: 233390 - protein, 77 aa, Glycine max
  Clone ID: PAT_MRT3847_52778C.1.pep
TGNIIIMSNDIMKIPEAIKLARNARRKVVEYIVLSIMTKAAILELAIDGHSLVWTAVEADVGTCLLLISNSMLLLRL

SEQ ID NO: 233391 - protein, 72 aa, Glycine max
  Clone ID: PAT_MRT3847_52779C.1.pep
IIDYKSSTHCIMQCIQVQQNTFWLVFFSFHTRAHSNILYLYVSLAYFIYVTDNSITVQIYLGLVITLSESST

SEQ ID NO: 233392 - protein, 162 aa, Glycine max
  Clone ID: PAT_MRT3847_5277C.1.pep
IQLETAARRRQKGSADSIDKSDELLNLAFALLPPEFLYSLQTSGIPNHKLKLKVRTPIMLIRNLDQTDGLCNGTRLIITKLGSNVIEAEVITGPNTGNMTYIPRINMSPSESPWPFKLIRRQFPFIVSYAMTINKSQGQSLHHIGLYLPHPVFSHGQLYVAL

SEQ ID NO: 233393 - protein, 137 aa, Glycine max
  unsure (1)..(137): unsure at all Xaa locations
  Clone ID: PAT_MRT3847_52780C.1.pep
FLHSLSFSLLISNSSHPLFLSQVPFMEMEDHQHQHHHHHFGMNDLRQVVNNGPRPAHTTFPSMPPHPTEELFPGHHHRNLTPLPTHHPQQQQHFEVMMFGRDIMPPGLHDFASTPHDSAVATTTITLPTPPVTCGXD

SEQ ID NO: 233394 - protein, 103 aa, Glycine max
  unsure (1)..(103): unsure at all Xaa locations
  Clone ID: PAT_MRT3847_52781C.1.pep
MVIDGSFSLHSSLRRFLNRCPKLQCFPQFQSLELRGDLVTEEEAVNVLXGCFDLHPTYTIPLMGCFLLIAGRIADKAVALLRLVPNLRAISEDTGGEDIMQNL

SEQ ID NO: 233395 - protein, 72 aa, Glycine max
  Clone ID: PAT_MRT3847_52782C.1.pep
LSLYICILFPKKWDRGDLLSPSTFKPNLTCELNKLFENSCLFQAPVSNYIKIKCLETSTSSNMTKLEQLKKE

SEQ ID NO: 233396 - protein, 122 aa, Glycine max
  Clone ID: PAT_MRT3847_52783C.1.pep
ETGNETGTRTTPTTPPDRMKAIVDVAEGFVYLVSSVGVTGARASVSGSVQSLLQEIKEATTKPVAVGFGISKPEHVKQVAGWGADGVIVGSAIVKVLGEAKSPQEGLKELEVLTRSLKAALP

SEQ ID NO: 233397 - protein, 311 aa, Glycine max
  Clone ID: PAT_MRT3847_52784C.1.pep
MALALKSSCLLQLKKPEAGFNVCFSSKKAIISVKRYTPVAAIRIMDAVGLSATFTRLKKEGKVAFIPYITAGDPDLSTTAEALKLLDSCGSDIIELGIPYSDPLADGPVIQAAATRSLAKGTNFNVIIDMLKEVVPQLSCPIALFTYYNPILKRGTEKFMSTIRDTGVHGLVVPDVPLEETETLRTEAKKHGIELVLLTTPTTPPDRMKAIVDVAEGFVYLVSSVGVTGARASVSGSVQSLLQEIKEATTKPVAVGFGISKPEHVKQVAGWGADGVIVGSAIVKVLGEAKSPQEGLKELEVLTRSLKAALP

SEQ ID NO: 233398 - protein, 59 aa, Glycine max
  Clone ID: PAT_MRT3847_52785C.1.pep
FVKEKSHVRISIKYFPGGSCSIYIYNLDPNHLMSVLMKDKHTMKNMIFVLHTRVEKQTI

SEQ ID NO: 233399 - protein, 198 aa, Glycine max
  Clone ID: PAT_MRT3847_52786C.1.pep
WSSNSATKAYLDTLQLCNNHKRQYGTWRIQNPGSNEFLSALAAGMKAKLIVEVTSCVSLTTLALAAAARQTGGRVVCILPESILNDSQQVINNSGLKDQVEFRTEDPSKLLPFYENIDFFLVDCKDNENYARLLNLVDVNLTRSIVVAKNMVGGDGDKKGIRWCLRGKDEKLEVRSLKHPLGNGMEVTRISKSDNTNN

SEQ ID NO: 233400 - protein, 73 aa, Glycine max
  Clone ID: PAT_MRT3847_52787C.1.pep
DSTSSVFMFHRTQRPLYLCCHRIQRPCFYVSQDSMSFALCFHRTQHPCLYILQDSTSFVLCFIGLNVLRLYVL

SEQ ID NO: 233401 - protein, 361 aa, Glycine max
  unsure (1)..(361): unsure at all Xaa locations
  Clone ID: PAT_MRT3847_52788C.1.pep
MALWMEKGSEPLTETEKADLEAIAALKESAAFEFKEKGNQYVKMGKKHYSDAIDYYTRAIDQKALSDSETSILFANRAHVNLLLGNLRRALTDSNEALKLXPLSYIKAIYRAAKASLSLNMLAEAREYCLKGLQFDPNNEDLKKLDRQIGLKISEKEKHEAEFSKAVAETKELVSAIENRGLKIGKAMYLELTGLRKPVLDKSNILHWPVLLLYAEVMSSDFIEDFCETDMFSVHLDMIFAEDQPLSWDVENNYKREFIELYYETGSGLCLSKEKLLHCLLEGTAAAHREGVGDEEKDTVEDYKQHMGSPKWIKVNERRTLHDVLKEPNFIIPGIPVFYVVSKRSSFYGKFKAGKWAPPSI

SEQ ID NO: 233402 - protein, 71 aa, Glycine max
  Clone ID: PAT_MRT3847_52789C.1.pep
GLVVPYFLGAYTVESFVYPVLDGRSSSALVLSFFLAHCVHCRSILRKPFIMGAVLTDRWFLVWAPFHERRA

SEQ ID NO: 233403 - protein, 96 aa, Glycine max
  unsure (1)..(96): unsure at all Xaa locations
  Clone ID: PAT_MRT3847_5278C.1.pep
LSQERTQKACFYRDKDERTKGFYHEYTKCEPIQCVLDXSEEVDGRRTKITDNIIEGSENWCISQGDEHGEAQQLEADINQLVQEVFALAPDEKLFF

SEQ ID NO: 233404 - protein, 121 aa, Glycine max
  Clone ID: PAT_MRT3847_52790C.1.pep
MNKDKIFKLAKGFRGRAKNCIRIARERVEKALQYSYRDRRNKKRDMRSLWIQRINAGTRIHGVNYGNFMHGLMKENIQLNRKVLSEISMHEPYSFKSLVDISRNAFPGNKNVVIPPRKVAF

SEQ ID NO: 233405 - protein, 110 aa, Glycine max
  Clone ID: PAT_MRT3847_52791C.1.pep
MALWMEKGPEPLTESEKADLEAIAALKESAAFEFKEKGNQYVKMGKKHYSDAIDCYTRAIDQKALSDSETSILFANRAHVNLLLGNLKRALTDSSEALKLCPSNIKAIYR

SEQ ID NO: 233406 - protein, 60 aa, Glycine max
  Clone ID: PAT_MRT3847_52792C.1.pep
RSKDGETHKWGLPLSHVLLWHQPLSQHQHILGHRQGFPESIQTLLWKDWRSADCPFLPPG

SEQ ID NO: 233407 - protein, 61 aa, Glycine max
  Clone ID: PAT_MRT3847_52793C.1.pep
SLLRSRALKPVHAVISTHFILSSGAVRSNAVACHRRPYDARCFERASPCSVVVVVSQRIAV

SEQ ID NO: 233408 - protein, 48 aa, Glycine max
  Clone ID: PAT_MRT3847_52794C.1.pep
LTPYEILTITLLYNINYTSAISPLFLSPSNTIHKPLIHLHSQPRPQFL

SEQ ID NO: 233409 - protein, 98 aa, Glycine max
  Clone ID: PAT_MRT3847_52795C.1.pep
TVAKKRQKGTVAKKRQKGPVAKKRQKGTVAKKRQKGTVAKKHQKGTVAKKRQKGTVAKKRQKGTVAKKRQKGTVAKKRQKGSPQVRRGYPLSLSISLA

SEQ ID NO: 233410 - protein, 77 aa, Glycine max
  Clone ID: PAT_MRT3847_52796C.1.pep
MGAGQALKRIPRIKFPQRHPKPSGSAPEIQASSSTTDASLAFFKSSNASSSVGGKASLQPKRTPVSKEEIEAILLGG

SEQ ID NO: 233411 - protein, 43 aa, Glycine max
  Clone ID: PAT_MRT3847_52797C.1.pep
ASRPLGHRVFKEGPGTWVGKEIFPPRGKFLAARGCPLVKFKGG

SEQ ID NO: 233412 - protein, 65 aa, Glycine max
  Clone ID: PAT_MRT3847_52798C.1.pep
NNLTLLIHNLFSLIISLFYFDNENFSSKFLKDYIGHSFIKINSTKHEIVTLLNYHAIITHLIIYG

SEQ ID NO: 233413 - protein, 451 aa, Glycine max
  Clone ID: PAT_MRT3847_52799C.1.pep
MGDAENALPPSKKRAAGRELTRDTPIDDEEDAPELETGTFKRASQEVMGTRRIVKVRRQPTNSAPSANPFAGIRLVAPTESSANPAETTTEVKSAGENTVADESKSNDTAKDSEKAGDGEAKQPESKTNEAEDKLTESKDAAEESNADKEHTAEKESTDDESKVDKEQKKDVTESGNEDKKDATHNESASKLDKEQTGDGKDSENDDENENTDNVDKKDSKAESAEPSAEGGHLKSFQLLSSSQNAFTGLAGTGFSNSSFSFGSISNEGSGSIFGLKSDKPYGLGLSNNGSSLLGASGASAVSKNEGSGLAMQEVVVETGEENEEVVFNADSVLFEFADGSWKERGKGELKVNVSSETKKARLLMRSKGNFRLILNARLYPDMKLTNMDKKGVTFACINSASEGKGGLSTFALKFKDGSIVEEFKATVMEHKGETSTVLKTPENSPKASDD

SEQ ID NO: 233414 - protein, 88 aa, Glycine max
  unsure (1)..(88): unsure at all Xaa locations
  Clone ID: PAT_MRT3847_5279C.1.pep
ARXMTPXRRGLXGVPLDTRRRRQRCCXGLXYXSCTSXGXXXRRRFLRCGCVLGLGCFLGQQHSQGDLNGRIQXGDGLLCLLRKYKLKE

SEQ ID NO: 233415 - protein, 260 aa, Glycine max
  Clone ID: PAT_MRT3847_527C.1.pep
SVCPTTLKRTRIQHGIPRWPSRKINKVNRSLKKIQTVLDSVQGMEGGLKFDPSMGAFVAGGSIIQEIDAPKSTIKDPVPVTQDAFSVPPAPCSEGENFSIKLEGKLKKTNVSSVDYSEDSKSMAINDGSCQMASLCTKVQDCPEQACLGSVLAKEHDKRILNKGGLSVEKFKHNIVGQSSKSLIADEMDIGVDGDDGVVERNHPTSSSLTDSSNGSGSMMHSSSSGSRSFENQDQSKVKSTIIDCGSKLIVKATYREDTI

SEQ ID NO: 233416 - protein, 41 aa, Glycine max
  Clone ID: PAT_MRT3847_52800C.1.pep
KSVNCSSQWYTGDIRFFWVIKKYKKNVVGSIHFIIKIKINN

SEQ ID NO: 233417 - protein, 174 aa, Glycine max
  Clone ID: PAT_MRT3847_52801C.1.pep
SDKPFGLGLSNNGSSLLGASGASAISKNEGSGLAMQEVIVETGEENEKVVFNADSVLFEFADGSWKERGKGELKVNVASETKKARLLMRSKGNYRLILNARLYPDMKLTNMDKKGVTFACLNSASEGKGGLSTFALKFKDGSIVEEFKAAVMEHKGETSTVLKTPENSPKASDD

SEQ ID NO: 233418 - protein, 77 aa, Glycine max
  Clone ID: PAT_MRT3847_52802C.1.pep
RAVYRLHKKPETNYFTPARANILCFSASNKCHVSNPGTNIMGRLWLTWITGGATFVAGARRRRHVFLFFPEGHPRKR

SEQ ID NO: 233419 - protein, 68 aa, Glycine max
  Clone ID: PAT_MRT3847_52803C.1.pep
KKKKGQYTRRIHKKKKCVRDRSKSEDCVYLVRNNCLGGVIDGFGNSLDCAGVASVVSHPPLILWRGRG

SEQ ID NO: 233420 - protein, 112 aa, Glycine max
  Clone ID: PAT_MRT3847_52804C.1.pep
LFQNNKPKASSAFAQISIGRYMQSWVGPCLCTFNSMSRIMVYASTELLITNSYNLLFTIRQISLIKSKFLVSKHVHSNHLRPLECSPNVVYSYAGFLNVINFFQSFLLKIFY

SEQ ID NO: 233421 - protein, 47 aa, Glycine max
  Clone ID: PAT_MRT3847_52805C.1.pep
MPIRHIPLRRAEEASHPHTLKGGVAELISTFIFELAGSRSGYVLTSS

SEQ ID NO: 233422 - protein, 639 aa, Glycine max
  unsure (1)..(639): unsure at all Xaa locations
  Clone ID: PAT_MRT3847_52806C.1.pep
RRVPVVLDRAYENYHRQGPYQVLFDWGTVESDPCNWFGVLCTMVRDHVIKLNISGSSLKGFLAPELGQITYLQALILHGNNFIGTIPRELGHQRKHICFCCTSIGDNQXRPPYCKDKGYLVDWARDYLEMPEVMSYVVDPELKHFRYEDLKAICEVITLCINPDHSVRPSMRELCTMLESKIDTTINLELKASSLAWAXAGRIPKCLEYLPRLSFQGNCLQGQELKQRSSIQCAGASPASAKSQPVVNPNHQPAEYVSKHHRASKPVWLLALEIVTGTMVGSLFLVAVLAAFQRCNKKSSIIIPWKKSGSQKDHTAVYIDPEFLKDVRRYSRQELEVACEDFSNIIGSSPDSVVYKGTMKGGPEIAVISLCIKEEHWTGYLELYFQREVADLARLNHENIGKLLGYCREDTPFTRMLVFDYASNGTLHDHLHCYEEGCQFSWTRRMKIAIGIARGLKYLHTEVEPPFTISELNSSAVYLTEEFSPKLVDFESWKTILERSEKNSGSIGSQGAICVLPNSLEARHLDTKGNIFAFGVLLLEIISGRPPYCKDKGYLVDWAKDYLEMPDEMLCVVDPEMKFFRYEDLKVICEVITLCVNPDTTVRPSMRELCSMLESRIDTSVSVELKSSSLAWAELALLS

SEQ ID NO: 233423 - protein, 71 aa, Glycine max
  Clone ID: PAT_MRT3847_52807C.1.pep
MKMADAKQKRNEQLKRWIGSETDLEPPVVKRQKTKVKFDDGAVFLAACSSGDTDEVLKLLHRGADINYANV

SEQ ID NO: 233424 - protein, 62 aa, Glycine max
  unsure (1)..(62): unsure at all Xaa locations
  Clone ID: PAT_MRT3847_52808C.1.pep
RCEYHGILKNISMTSPCLLRIFLNMGMNSGFTWYPSIVSICHLSNKINHPSSRIPSLRTRXC

SEQ ID NO: 233425 - protein, 67 aa, Glycine max
  unsure (1)..(67): unsure at all Xaa locations
  Clone ID: PAT_MRT3847_52809C.1.pep
PTRPVLLQIYLKPAVXXXVXDASLKSGMFTYSQTLIDKPVTKPIIIKQQDIYNSHTKPPIIFTYRAP

SEQ ID NO: 233426 - protein, 68 aa, Glycine max
  Clone ID: PAT_MRT3847_5280C.1.pep
STTVCKSYNQLAEETGLTNVYVAQLLTRQAQLNPHTAPLLRAALPDLPQDLVSEMMIPPLTSYDPNLI

SEQ ID NO: 233427 - protein, 43 aa, Glycine max
  Clone ID: PAT_MRT3847_52810C.1.pep
GIQGRKVKIYAQSKAKLVSKHDHKTRFNNKKKLNFGRKREIRV

SEQ ID NO: 233428 - protein, 122 aa, Glycine max
  Clone ID: PAT_MRT3847_52811C.1.pep
RTLGCSYGLLKVQLHRSPAGVVKRGRRPVSRHRLALLQVWCMPLQTALSPVVFIQIVFVSIFLCAKLPRQLRGDLLSSTLLSTSFFLSIPLWFSSLSLLSILQVTYFGTSIYFFGSVKNCVL

SEQ ID NO: 233429 - protein, 87 aa, Glycine max
  unsure (1)..(87): unsure at all Xaa locations
  Clone ID: PAT_MRT3847_52812C.1.pep
SSTAARRRRRGEHXAVGDEGRERLSIVTFFAPSYEVXHGPMRECVGENHPCECKRYSEGECSEHYVTNRLQGEKALGFAKSQTKNKN

SEQ ID NO: 233430 - protein, 56 aa, Glycine max
  unsure (1)..(56): unsure at all Xaa locations
  Clone ID: PAT_MRT3847_52813C.1.pep
DSISIINDGLIEKLSPMNLNSFMANTIKQEWRIELIGYSTDYPRAEFRAYVRVXAT

SEQ ID NO: 233431 - protein, 51 aa, Glycine max
  Clone ID: PAT_MRT3847_52814C.1.pep
GGRKQHEGGQHATTAPFPSLKDRTLKTLMAMLCEHQQNTLSLSSNKEPMAS

SEQ ID NO: 233432 - protein, 72 aa, Glycine max
  Clone ID: PAT_MRT3847_52815C.1.pep
LKRPPLLTKMVLLMVFQFGRVFAEFNQKGFSAVFKATITLSLIKQLEAGILNRVLFSSLLACVKLNNLLSLT

SEQ ID NO: 233433 - protein, 112 aa, Glycine max
  unsure (1)..(112): unsure at all Xaa locations
  Clone ID: PAT_MRT3847_52816C.1.pep
TSDGEVFGTRAPQKKLDDDIXTRIQVKEGTPKRSLLSLETADSPGLLVEIIKVIADVNIDVESAEIDTEGLVAKDTFHVSYGGAALNSSMAQVLVNCLRYYLRTPETDIDSY

SEQ ID NO: 233434 - protein, 108 aa, Glycine max
  unsure (1)..(108): unsure at all Xaa locations
  Clone ID: PAT_MRT3847_52817C.1.pep
AXFXPCXXVFFXXXPFPWXALLAXCCCXXLXFLSXXXPGLSCVLSFXXXXXXLLXXLXXXXXXVXXXPCXPPSFXAPFXXXXXGAGXXXXXCXLXLFSXXXCXXVFLL

SEQ ID NO: 233435 - protein, 282 aa, Glycine max
  Clone ID: PAT_MRT3847_52818C.1.pep
MTLTNAFLAPSFAVHGGRVSDPRSIPLFSLPSDAFFRSPTSLSRDKNILYASAYDLNAVGSASLQSGDNPDSLPMPIVLIDQESDSEATIVQLSFGNRLGALLDTMKALKDLGLDVSKGTVSTEGLVKQTKFFITQSDTGRKVEDPDMLERIRLTIINNLLKYHPESSELLAMGEVFGIKAPKKKLDDDIKTRIQVKEDGPKRSLLYIETADRPGLLVEIIKVIADVNIDVESAEIDTEGLVAKDTFHVSYGGAALNSSMSQVLVNCLRYYLRTPETDIDSY

SEQ ID NO: 233436 - protein, 116 aa, Glycine max
  Clone ID: PAT_MRT3847_52819C.1.pep
ASVIKTLSIFSTDRVAYCYGSYTNHLLMVIEEERSVKDTITLTSKTNFKPRCRIAQPMWILLRPCVSSKVYAYFSNSSDNLIKGHVVMINPTEWDRWFHCSVLVWVASSSQRPDHT

SEQ ID NO: 233437 - protein, 230 aa, Glycine max
  unsure (1)..(230): unsure at all Xaa locations
  Clone ID: PAT_MRT3847_5281C.1.pep
LGSSNDTLGETGENGGKVPPGGKRVSPQNPPQKKGGKKKGDPGGAPRGGPTPLKGGGPKGPVKGGKTGGPPSKKKKPPRGGGGGFFNGPTGGFFSPQGGGDTGGVPPPPRPRKRGCKRGAPPVVPPPGEKKLGGGGEHPGEKKQEAPLGGAPPPPRGKPPPTPHPEMEGGPLAPTPFGGRDPPPAGGEPPXNTTRGGVKEKTKKGPIGAPPPPPPFPVGDEAGGKFVLKE

SEQ ID NO: 233438 - protein, 71 aa, Glycine max
  Clone ID: PAT_MRT3847_52820C.1.pep
NNRSCYCTKDSCWEQATKPHAYTMEGMAIATFFSDIQKAHRLPEKTIALVTEQDTAFLRTNSIAGKVEWEH

SEQ ID NO: 233439 - protein, 78 aa, Glycine max
  Clone ID: PAT_MRT3847_52821C.1.pep
SRITAHSSLSLCPDAHDVDLSSVPASSIEMLHMLHHSVYSHRARFAQLVRGKSTVISKPSTQCLIIVQFPQTGSLLLR

SEQ ID NO: 233440 - protein, 83 aa, Glycine max
  Clone ID: PAT_MRT3847_52822C.1.pep
GWLFFVLVFFFFGPPPGPNFLTKAFFAFYKTPGFSLPLGQVPPKLSKPGNFFFTGALKKNPRPGPFKKPKPPPKAFKKKGFSL

SEQ ID NO: 233441 - protein, 129 aa, Glycine max
  unsure (1)..(129): unsure at all Xaa locations
  Clone ID: PAT_MRT3847_52823C.1.pep
VRRVSMRKTGAKQATAGSPWDGPDRVKYLGPFSGERPSYLTGXEFPGDYSLEHXGLSADPETLARNRELEVIHSRWAMLGAXGCVLRELLSRRRVRGGEAVWCKAGSQIFSEGGLDYMGNTCIEHAQSM

SEQ ID NO: 233442 - protein, 87 aa, Glycine max
  Clone ID: PAT_MRT3847_52824C.1.pep
FFTNIAAMSNYDLPPPDTHSETSVPQWTPPLPTYPPPTSYFSSTFDDSDSSSSTSTFGIIVGVLVGVFGLILLYGIWHKYLRKKCSK

SEQ ID NO: 233443 - protein, 62 aa, Glycine max
  Clone ID: PAT_MRT3847_52825C.1.pep
QLYYLAHPFQFPDTGSAVVPSVSSSLLPFGSETQVEYPTVPFVGLLHPAPHVVVSYLQLFYL

SEQ ID NO: 233444 - protein, 39 aa, Glycine max
  Clone ID: PAT_MRT3847_52826C.1.pep
PNMNMIRSDSDSDSDSDFTLTHSNRSICLSTKSMSLLTS

SEQ ID NO: 233445 - protein, 73 aa, Glycine max
  Clone ID: PAT_MRT3847_52827C.1.pep
TREAKPSLKNFGLGRFTGLPPQPQLRPLKLDSPTAPQVLLWFLCVVSLLFLFDFLFSCWVMDYESFFDTFLRG

SEQ ID NO: 233446 - protein, 150 aa, Glycine max
  Clone ID: PAT_MRT3847_52828C.1.pep
EVYSPFLFSIDIITATTNLVSWQPPPSPITSFTESASPPWTFFVRSKPLGTQSRRMRILCVLDFDGGRALCQRLSYLVGVVCLHGNRLVAPPEAFYREVLSAMRLRIVPRIQRRTSLVAFGSAEGKLTAATTVSSGTRFSSAVDDDDETI

SEQ ID NO: 233447 - protein, 42 aa, Glycine max
  Clone ID: PAT_MRT3847_52829C.1.pep
IPISDNGPYCFIGRPSRSRHCLPLTDSAGCCCSSSFPRSNYL

SEQ ID NO: 233448 - protein, 59 aa, Glycine max
  Clone ID: PAT_MRT3847_5282C.1.pep
TRPACRDGGYILDGCREFVASGAEGTDSAMTCATCGCHRNYHRREDFCDCPSHPAANGA

SEQ ID NO: 233449 - protein, 78 aa, Glycine max
  unsure (1)..(78): unsure at all Xaa locations
  Clone ID: PAT_MRT3847_52830C.1.pep
KIPQQRVXQDGAVDHSGVVRGGGATVRRGGRVRGWRRRRTRYEWWRGWRRSGSGDRALXARXEVCXVHEXVREELPKR

SEQ ID NO: 233450 - protein, 45 aa, Glycine max
  Clone ID: PAT_MRT3847_52831C.1.pep
NGNDAVSITVSQSPDLNALEVISRIHRTPSRTSHYYTHSKVITIG

SEQ ID NO: 233451 - protein, 82 aa, Glycine max
  unsure (1)..(82): unsure at all Xaa locations
  Clone ID: PAT_MRT3847_52832C.1.pep
GRAPYTEAPTXWVPLIRRLLSSHLXTMSSRFWACFSLPPQVGDPXMXPKKKTPPPPSXXGXWXWSCFPPXXGPLFXFSPPGV

SEQ ID NO: 233452 - protein, 57 aa, Glycine max
  Clone ID: PAT_MRT3847_52833C.1.pep
RDIVCAMNKFIRSKVFRLSFTIISLVFIKWNIHLKMEYLLKKFTKMEYFFKKIYQMR

SEQ ID NO: 233453 - protein, 85 aa, Glycine max
  Clone ID: PAT_MRT3847_52834C.1.pep
PAPRSQRQRAIDLCCANVTPFLSGTVKWCQANGHLRNSAHCGQQCALRCCARLVWYAHSPRWTMALLLLAFVRVVSLKRSSGYGT

SEQ ID NO: 233454 - protein, 162 aa, Glycine max
  unsure (1)..(162): unsure at all Xaa locations
  Clone ID: PAT_MRT3847_52835C.1.pep
ASTLQVNVSVDEGIGCRVCGCAGEKLCISSLTGGRVKCGNGTHGCVPSAXHHQMPPGGGLLLCLLLLLLLSLLRVTLCLRGRPSLLRCHRWLNLAPDVGQVAVAIRTQGRLQLPFRQCFNRNIDKLLARGLACDCDAVISKQGRRKRVQELQLLVDRRHCLV

SEQ ID NO: 233455 - protein, 56 aa, Glycine max
  Clone ID: PAT_MRT3847_52836C.1.pep
DKQLYQFLKPRQLKRAWGVVGLCRGALCRTVTVMQLCRTITYLIMQTNSYVGQLHI

SEQ ID NO: 233456 - protein, 71 aa, Glycine max
  unsure (1)..(71): unsure at all Xaa locations
  Clone ID: PAT_MRT3847_52837C.1.pep
VLFCFCGFXFFFFTXGKQGINHLYQVLARNLVPGRYRCRLVIFWFRAGFNFWCLNPVGDFLEGVSHGFLGW

SEQ ID NO: 233457 - protein, 85 aa, Glycine max
  unsure (1)..(85): unsure at all Xaa locations
  Clone ID: PAT_MRT3847_52838C.1.pep
TFAILVLDCQNTLYLHYGKQYSKDXYISFGNSTELLEYCRLLCKFLGFITAQSRNCPHETTGYVFLWCVTMSSIYNLIFPLIIVI

SEQ ID NO: 233458 - protein, 89 aa, Glycine max
  Clone ID: PAT_MRT3847_52839C.1.pep
SKTKRRGPEHLKAPDADMSTGQEPRVFADNVARLNSASSPLDPQGPTLEQLLSFATDPNPPIISNPSPLSSTPSCYPTPLPPERIDSPS

SEQ ID NO: 233459 - protein, 187 aa, Glycine max
  Clone ID: PAT_MRT3847_5283C.1.pep
MDPATGVQNVKLVVVGDGSVGKTSLLISYTTGSFPHEYCPTVFDNYSCMVLLGSKQVSLGLMDTAGQEDYDRIRPLSYPNTDIFLICFSITSKASLNNVKNKWLTEVKHHCPNTPFILVGTKTDLRESTPNSINAEEGKQFATTLEAVRYLECSAILNTGVKEVFDTAIKHAAFGKKEVKKVKKEKS

SEQ ID NO: 233460 - protein, 75 aa, Glycine max
  unsure (1)..(75): unsure at all Xaa locations
  Clone ID: PAT_MRT3847_52840C.1.pep
XISNXTNQYSSLXIIMXIAIXLGIAPXHFXVPEVTQGXXLXSXLLLLTXXXXAPISIIYXISPSLDVSXLXXLXM

SEQ ID NO: 233461 - protein, 94 aa, Glycine max
  Clone ID: PAT_MRT3847_52841C.1.pep
SRGGFWVSHPPSLKVGESGRVFFQPCEGGITGFFSMGFLGGGLRQQWWVGLGFPTWVSRFFFRSGSALGGVFNQVKDLGVLFFFLGAKKKNKQF

SEQ ID NO: 233462 - protein, 42 aa, Glycine max
  unsure (1)..(42): unsure at all Xaa locations
  Clone ID: PAT_MRT3847_52842C.1.pep
EXPGRPTRPNHLIKVVILQVFFYFLTYYLRAGSIFTYAVLFS

SEQ ID NO: 233463 - protein, 280 aa, Glycine max
  unsure (1)..(280): unsure at all Xaa locations
  Clone ID: PAT_MRT3847_52843C.1.pep
EISQLSTPFGTSAQRVAAYFSEAISARLVSSCLGIYATLPHTHQSHKVASAFQVFNGISPFVKFSHFTANQAIQEAFEREERVHIIDLDIMQGLQWPGLFHILASRPGGAPYVRLTGLGTSRKAPELVHSWGGXVGAINYYSALVDSLGSSYGEESEERXHVVEQQLLSREIRNVLAVGGPSRTGDPKFQNWREKLQQCGFRGISLAGNAATQASLLLGMFPSEGYTLVDLEGADMSWVGVFFSTRGNSYSTTFHERIPQKPFFTFIGSCTHFMSAFFLF

SEQ ID NO: 233464 - protein, 281 aa, Glycine max
  Clone ID: PAT_MRT3847_52844C.1.pep
MAFFPANFMLQTPHQDDHQPPPSLNSIITSCAPQEYHGGGASFLGKRSMSFSGIELGEEANAEEDLSDDGSQAGEKKRRLNMEQVKTLEKSFELGNKLEPERKMQLARALGLQPRQIAIWFQNRRARWKTKQLEKDYDLLKRQYEAIKSDNDALQAQNQKLQAEILALKSREPTESINLNKETEGSSSNRSENSSEIKLDISRTPAIDSPLSTQQNNNNRTLFPSSARPTGVAQLFQTTPRPEIQCQKIDHMVKEESLSNMFCAIDDQSGLWPWLEQQHFN

SEQ ID NO: 233465 - protein, 80 aa, Glycine max
  Clone ID: PAT_MRT3847_52845C.1.pep
FFNHVRFKFGEHNPCALQYMHTVFQSGIEGLSSGTDQFRPKVRVICIKHRHTLECVFQNGTQTGLRVELYINPVKPLLSQ

SEQ ID NO: 233466 - protein, 70 aa, Glycine max
  Clone ID: PAT_MRT3847_52846C.1.pep
FGVIPNTLRRPAYAQHEPVVLPLAWPAPPSYSVDLQLEKKPNAINSSTNHVVTNVFSFEPFMWDLGCLVE

SEQ ID NO: 233467 - protein, 118 aa, Glycine max
  Clone ID: PAT_MRT3847_52847C.1.pep
YPPIATATLHSQSHSQPHSHHHHHHAVASFNRMLLMRPPPPTFHFDNILSSLVKNKHYLTVISLFKQFQSNGVTPNLCTLNILINCFCHLAHITFAFSVFANILKRSYHPDAITLNTL

SEQ ID NO: 233468 - protein, 140 aa, Glycine max
  unsure (1)..(140): unsure at all Xaa locations
  Clone ID: PAT_MRT3847_52848C.1.pep
WLGLMLLQAGYTAHATIHDTKDRKXETEXIEMHYDTTYSNQNFFEPDLMDIDCIDGALKVRSGAVHVTCANIIAQVTDPEYHISEPAIKGTDNVKNAAKEPPLKHVESTSYSAYTILRANRPSDPNLGELSWTHPVYCKQ

SEQ ID NO: 233469 - protein, 40 aa, Glycine max
  Clone ID: PAT_MRT3847_52849C.1.pep
FSLTICKVLDHSSLWLIYAYRQPGCIRSKKVIPKYFKTLI

SEQ ID NO: 233470 - protein, 94 aa, Glycine max
  Clone ID: PAT_MRT3847_5284C.1.pep
KKLKKKKKKKKKKKKKKKKKKKKKKKKKKKKKKKKKKKKKKKKKKKKRGGPFLKNQIFFPGLCKKKLFFWGPKNKFLGPFFKNVVLEKTLVYPI

SEQ ID NO: 233471 - protein, 44 aa, Glycine max
  unsure (1)..(44): unsure at all Xaa locations
  Clone ID: PAT_MRT3847_52850C.1.pep
FPTKRMDDKSLLKQGAXGSTKLVIQYRIRKNCVIIAVMTNISRR

SEQ ID NO: 233472 - protein, 95 aa, Glycine max
  unsure (1)..(95): unsure at all Xaa locations
  Clone ID: PAT_MRT3847_52851C.1.pep
RFALPSGHDMIGASPSPGPSEIVAMWRPDPDPYPDPXPACGSLTYPAFPRLLALLTIRTYLCSLKRRLLLSQSCLSIITHICYAVSSASTFLTVP

SEQ ID NO: 233473 - protein, 278 aa, Glycine max
  unsure (1)..(278): unsure at all Xaa locations
  Clone ID: PAT_MRT3847_52852C.1.pep
MACRGCWECLLKLLNFILTLAGLAMVGYGIYLFVEYNKTPDNTLTVGDDQTLVQLGRPMLVAVSLSNSFLDDLPKAWFIYLFIGIGAVLFVISCFGCIAALTRNGCCLSFYSVLVLLLILVELGCAAFIFFDKSWKEEIPKDKTGDFDMIYXFLRENWNIVXRWVALGIVIFEALLFVLALIVRAANRPTEYDSDEEYINPRQQVRQPLLNRPAGPVSGAPATGTLDQRPSRNDAWSTRMREKYGLDTSEFTYNPSESHRYQQVNSQPTEEGSRCAIM

SEQ ID NO: 233474 - protein, 494 aa, Glycine max
  unsure (1)..(494): unsure at all Xaa locations
  Clone ID: PAT_MRT3847_52853C.1.pep
MKLSALQQTYLTRRANSFRGSAQLDSSADGSVKSPAAIFWLVIHGVCCLISLVLGFRFSRLVFFFLFSTSLYTAPFRSGSEIAAPHDVPPAANRTAMLSTASRVVVGRHGIRIRPWPHPDPVEVMKAHRIIERVQREQRALFGVKNPRTVIAVTPTHVRTFQTLHLTGVMHTLMLVPYDLVWIVVEAGGVTNETASIIAKSGLRTIHVGFSQRLPNSWEARHKLESRMRLHALRIVRKEKLDGVVVFADDSNMHSMELFDEAQNVKWIGAVSVGILLHSDESSYMVQSEEEGASMPVQGPACNATDKLVGWHTFNSLRYTGRNAVYIDDXSRGAPVLPRKLEWSGFVLNSRLVWKDVDGKPEWVKDLDKFDGVDEEIETPLSNSTSTSVVEPLGNCGRQVLLWWLRVEARTDSKFPSRWIIDPPLDITIPSKRTPWPDAPPELPFNEKILTGTQEQTNKPSTRTKSPRSRRSRSKRKHDTKVIGVQVSTHSEQN

SEQ ID NO: 233475 - protein, 57 aa, Glycine max
  Clone ID: PAT_MRT3847_52854C.1.pep
RIEFFSVKNRFLFGVYHFLIRVPPPQKIRVAPKKKKGCFRWPKMYFLVCQNCNMRGE

SEQ ID NO: 233476 - protein, 187 aa, Glycine max
  Clone ID: PAT_MRT3847_52855C.1.pep
MATLSSFSFVPFCMFFFLVCLTSPAYVSSLPLSLRRQASILVSMKQDFGVANSSLRSWDMSNYMSLCSTWYGIQCDQDNISVVSLDISNLNASGSLSPSITGLLSLVSVSLQGNGFSGEFPRDIHKLPKLRFLNMSINMFSGNLSWKISQLKELEVLDAYDNAFNCSLPQGVIGLPKIKHLNFGGNY

SEQ ID NO: 233477 - protein, 85 aa, Glycine max
  unsure (1)..(85): unsure at all Xaa locations
  Clone ID: PAT_MRT3847_52856C.1.pep
ESAGXXSRTHQMTNSLLFLPRPTLIVFFFKRVRLFKTPNYFTTHSQLESSLFISLQTITYATAHTSQYLIQTQPIINPCNNINSF

SEQ ID NO: 233478 - protein, 66 aa, Glycine max
  Clone ID: PAT_MRT3847_52857C.1.pep
STLFLYSHSYHILNYIDKPSPLFLFTSKHSEMGVGWLLEYLSDLMGHGHHHHKKKKMQFQTVELKV

SEQ ID NO: 233479 - protein, 56 aa, Glycine max
  Clone ID: PAT_MRT3847_52858C.1.pep
KSPQPQPWAPLQTTTSATSTQSHIADFIIILSALKVPTATTQLAQVHNTTQRICIC

SEQ ID NO: 233480 - protein, 111 aa, Glycine max
  unsure (1)..(111): unsure at all Xaa locations
  Clone ID: PAT_MRT3847_52859C.1.pep
MLNLLDRAKNFALEKVYDKAXPYACEIEFIFKYVGKDNXESLANDTGHNLYLTLIHISEINYSRKSGFKETVSCKISDAILGQVQDTTVEAVPDNVSYSIWISLAEDIGAD

SEQ ID NO: 233481 - protein, 67 aa, Glycine max
  Clone ID: PAT_MRT3847_5285C.1.pep
PNGLAKRLDRRDSSGLSLSMPREAYRIPLPKGSRSLPEGSHPRIDRISPIIRIGRKKPDNYPTIPPP

SEQ ID NO: 233482 - protein, 36 aa, Glycine max
  Clone ID: PAT_MRT3847_52860C.1.pep
LSQAGSLTLSSEPHLYIGCSVMFGACCRSWHPPYLG

SEQ ID NO: 233483 - protein, 79 aa, Glycine max
  Clone ID: PAT_MRT3847_52861C.1.pep
KKKKKQKKKKKKKKKKKNLGDPYLQAHTYNAIKSNIQNPKFYITEYHFTTSSTRKTLSLPNFISSLNILLFQAAVISLT

SEQ ID NO: 233484 - protein, 57 aa, Glycine max
  Clone ID: PAT_MRT3847_52862C.1.pep
TLRILCYLAGNVSMNDCIIFYFTSCGFRYVFYKLSIIKCRAIYWLFFVKALGLVVLR

SEQ ID NO: 233485 - protein, 90 aa, Glycine max
  Clone ID: PAT_MRT3847_52863C.1.pep
WVQCLPMVHVPTVFFSRSCPTVTPLPLINWAQILLRHFILVTVTAARANHSFMVRFFKLHRRLHPSSPIPHRHEYPRRSGEHMTIFPTWG

SEQ ID NO: 233486 - protein, 68 aa, Glycine max
  Clone ID: PAT_MRT3847_52864C.1.pep
YVLTILTMCSPTFAELHARHNNFSFHLSTPIVTNEFTAYVRLHVELSYCSSLLPPHAPMPHARYPYMS

SEQ ID NO: 233487 - protein, 72 aa, Glycine max
  unsure (1)..(72): unsure at all Xaa locations
  Clone ID: PAT_MRT3847_52865C.1.pep
GXXFFFFFLFLFCFFLGXGGNLTILFRWGIIKSSLFYLTGFYKVKKKNTILLLFFRGKTGGMWMDVDGNLNF

SEQ ID NO: 233488 - protein, 87 aa, Glycine max
  Clone ID: PAT_MRT3847_52866C.1.pep
LLNAFLIVLSSFRYCCILCLVYKKKKKKKKKKKKKKKKKKKKKKKKKKKREKKKKKKKKKGGRLKESKFTSRGLEGKNFFMGQQKLN

SEQ ID NO: 233489 - protein, 88 aa, Glycine max
  unsure (1)..(88): unsure at all Xaa locations
  Clone ID: PAT_MRT3847_52867C.1.pep
TLTPRFLPGLPPHRKTRPPTGLNNLTLAYTHHGWGSRTTMVNFNHIFKYLKRLHFIXXRIFIYSKLKLRTPRGTPITLWTKQKIHPGK

SEQ ID NO: 233490 - protein, 84 aa, Glycine max
  unsure (1)..(84): unsure at all Xaa locations
  Clone ID: PAT_MRT3847_52868C.1.pep
GFRTSDLLRFSQSLSWVRKRLHINIVVIGHVDXGKSTTTGHLIYKLGGIDKRVIXRFEKEAXEMXKRSFQVCRVLDNLKASXKX

SEQ ID NO: 233491 - protein, 63 aa, Glycine max
  Clone ID: PAT_MRT3847_52869C.1.pep
LSPPINNIIYPIPMNHTSICIIIPLYLIKTYLSKTTPPLLDSHPITIIFSTIYTLLYVIYIYS

SEQ ID NO: 233492 - protein, 108 aa, Glycine max
  unsure (1)..(108): unsure at all Xaa locations
  Clone ID: PAT_MRT3847_5286C.1.pep
AITRPPTRPRXGTKAQRDRGKTPKDDTTGAGAHPAEDHPEKEDQAHPKKTEATKRQRXDPQHKEGHAQTETNQAKPTQEDDETPTGATRDPKRHQAKTATPKNTRRRN

SEQ ID NO: 233493 - protein, 39 aa, Glycine max
  Clone ID: PAT_MRT3847_52870C.1.pep
GTLSDISIRIHFTFVGVTRVNFAPHLHRGLIKCSCSPPH

SEQ ID NO: 233494 - protein, 68 aa, Glycine max
  Clone ID: PAT_MRT3847_52871C.1.pep
EGGGPPPRIVGREYKGVFWDEFSEITSHILAVFRSSSIPSLRFLFHQNSVHTISSSQLTGRRSSISTS

SEQ ID NO: 233495 - protein, 88 aa, Glycine max
  Clone ID: PAT_MRT3847_52872C.1.pep
QHARGIARKERLVAHSLQVLFSQGSTFEVRGESVDIVHIDNWELNLQGLPLTGVPLLSSISVFEMFGMNPFDYCSKFLTILNYSFTLF

SEQ ID NO: 233496 - protein, 112 aa, Glycine max
  Clone ID: PAT_MRT3847_52873C.1.pep
SARDQGFFLSLLFVFSDTFGALLSVFLQEGIATDIEVAERGSFPGKDQQYPQPTQAMNAQGPQNGPFKKAPNCGFNGNLVLPQNTGAKISRSKHQTGYAEACGEVGNPGNAM

SEQ ID NO: 233497 - protein, 64 aa, Glycine max
  Clone ID: PAT_MRT3847_52874C.1.pep
LVEETEISRTRDHVRQCYKQRLIPSQWKHSLSFQAQALIRSQSSHQHERENARSIQSRKRKQVL

SEQ ID NO: 233498 - protein, 201 aa, Glycine max
  Clone ID: PAT_MRT3847_52875C.1.pep
ASGIGQGRHPPTLHSHRRSLHPSWSVITSPLASEIHIPRNISCPVSPIGSPLLRPRSPQHMNGRMSPSPISSPRTASGASTPLNGGSGAIPFSNHLVYIQEGLGNLPKSSNGVYVSGPAHHDLNVDIFRGMQQTSHITSELVPSESDVLGKQFARTPHNEPYDVQSVLADRVCRQLLGDNVKINPSLDLSPNSLLSRANGL

SEQ ID NO: 233499 - protein, 51 aa, Glycine max
  unsure (1)..(51): unsure at all Xaa locations
  Clone ID: PAT_MRT3847_52876C.1.pep
LIVIYMIIIHCEFTAIRLLACSHLIHGSYPWQIRXXVVPWPLDNLHAVSVX

SEQ ID NO: 233500 - protein, 71 aa, Glycine max
  Clone ID: PAT_MRT3847_52877C.1.pep
VWLLQGVRLVAGQAGLLESGITLLRLRPHPPGGSLLQAHLDMLLHRARPRAQDLTVVAMMLKAPLLTVQVR

SEQ ID NO: 233501 - protein, 637 aa, Glycine max
  unsure (1)..(637): unsure at all Xaa locations
  Clone ID: PAT_MRT3847_52878C.1.pep
KASPLSLEQFISITAPLLDLEKEAEISSSIATGASRNLDTAQKRGSTILNLKCVDVQTGLMGKSLIEFQSTKGDVLPAHKFGTHDVVVLKLNKADLGSPALGQGVVYRLKDSSITIAFDDIPEDGLNSPLRLEKVANEVTYRRMKDALIQLSKGVHKGPASDLIPVLFGERPPTVSKKDVSSTPFNKNLDHSQKEAVSKALSSKNVFLLHGPPGTGKTTTVVEIILQEVKRGSKILACAASNIAVDNIVERLVPHXLVRLGHPARLLPQVLDSALDAQVLRGDNSGLANDIRKEMKALNGKLLKTKDRNTRKDIQRELRTLSKEERKRQQLAVTDVLKSADVILTTLIGAFSKKLDSTSFDLVIIDEAAQALEIACWIPILKGSRCILAGDHLQLPPTIQSVEAEKKGLGRTLFERLAEMYGDEITSMLTIQYRMHELIMDWSSKELYNSKIKAHPSVTAHMLYDLEGVKRTNSTEPTLLLIDTAGCDMEEKKDEEDSTFNEGEAEVTVTHAKRLVQSGVLPSDIGIITPYAAQVVLLKMLKNKEDQLKDVEISTVDGFQGREKEAIIISMVRSNSKKEVGFLSDRRRMNVAVTRSRRQCCLVCDTETVSGDGFLKRLIEYFEEHGEYLSASEYQNE

SEQ ID NO: 233502 - protein, 55 aa, Glycine max
  Clone ID: PAT_MRT3847_52879C.1.pep
MPIRESAVGTPQAARHPDTFRAAVAEFIATFNVVFAGACSGIAYNSLTEKGAATP

SEQ ID NO: 233503 - protein, 68 aa, Glycine max
  unsure (1)..(68): unsure at all Xaa locations
  Clone ID: PAT_MRT3847_5287C.1.pep
MVASFSGLKSMAGYLSWCTCYGVAWLACCGGXVHCMSVLPSIEKKKIETLCYLLDLDDSHLSNVVRFL

SEQ ID NO: 233504 - protein, 98 aa, Glycine max
  Clone ID: PAT_MRT3847_52880C.1.pep
WVSQRQRDHLGTRGSGIFTLTPPSGRAGIRLTEYLGLFLLHLVALLLHPSCWGILCYTSHQPMKSPCGAPISSFLPQSRSLMGTGPGAHLFMLPQFCM

SEQ ID NO: 233505 - protein, 70 aa, Glycine max
  Clone ID: PAT_MRT3847_52881C.1.pep
WFKMVLLSFKVNVINDIQILIAKWLIYQSVSNGPFGRVENNKIKIKWFIYLWKSSFWFFIFLNWFKMILL

SEQ ID NO: 233506 - protein, 95 aa, Glycine max
  unsure (1)..(95): unsure at all Xaa locations
  Clone ID: PAT_MRT3847_52882C.1.pep
SXLPXXXPXFPXPXVXXXXNXQXPXXXHHQGGFYMTFEDGLIMTWXFPRFSGVXTWLFRXXFXXXTLXHXHRXDWKIXDXEKPXRRXSSELQPNQ

SEQ ID NO: 233507 - protein, 86 aa, Glycine max
  Clone ID: PAT_MRT3847_52883C.1.pep
MSSGIRAWSVATSVGVVEALKDQGICRWNHALRSAQHHLKNHVGSFSQANKLSSSAMSSTTLKHGKTNQSEESLRTVMYLSCWGPN

SEQ ID NO: 233508 - protein, 122 aa, Glycine max
  Clone ID: PAT_MRT3847_52884C.1.pep
GAPHPKQASGNVFTENLRHMFNALVPKPYFFFEKKIGVGTSPAPHGGGPPLQTFPFPPTAYQEPPPPSPLKCPQLIPFAKTLQVVAKDPPIRHKTPLFSKRGQQQPPLPSKEGVLVFGEPKT

SEQ ID NO: 233509 - protein, 80 aa, Glycine max
  Clone ID: PAT_MRT3847_52885C.1.pep
EYYSLLHASINIDPPRHAPQYQLDVTNTRCYACCRVTIPLHKRKFEFLNRIMHTQPAQEPDFMQQCCSIHHSAFINARIS

SEQ ID NO: 233510 - protein, 632 aa, Glycine max
  Clone ID: PAT_MRT3847_52886C.1.pep
RRNLRGPSNGSRGKVVLLFDDNPLSKIGVRFDKPIPDGVDLGGACEGGQGFFCNVTDLRLESSAVEELDKLLIHSLFEVVFSESRSAPFILFMKDAEKSIVGNGDSHSFKSKLENLPDNVVVIGSHTQNDSRKEKSHPGGLLFTKFGSNQTALLDLAFPDSFGRLHDRGKEAPKQNRTLTKLFPNKITIHMPQDEALLASWKQQLDRDVETLKIKGNLHHLRTVLGRCGMECEGLETLCIKDQTLTNENAEKIIGWALSHHLMQNSEAKPDSKLVLSCESILYGIGILQSIQNESKSLKKSLKDVVTENEFEKRLLADVIPPSDIDVTFDDIGALEKVKDTLKELVMLPLQRPELFCKGQLTKPCKGILLFGPPGTGKTMLAKAIATEAGANFINISMSSITSKWFGEGEKYVKAVFSLASKISPSVIFVDEVDSMLGRRENPGEHEAMRKMKNEFMVNWDGLRTKETERVLVLAATNRPFDLDDAVIRRMPRRLMVNLPDAPNRAKILKVILAKEDLSSDINMDAIASMTDGYSGSDLKNLCVTAAHRPIKEILEKEKKEQAAAVSEGRPAPALSGSADIRSLNMEDFKYAHQQVCASVSSESINMTELQQWNELYGEGGSRVKKALSYFM

SEQ ID NO: 233511 - protein, 137 aa, Glycine max
  unsure (1)..(137): unsure at all Xaa locations
  Clone ID: PAT_MRT3847_52887C.1.pep
RNPGRPTTPSXAQEXEKQGADESLKDQTPAXDKTQTTKGKKEAKEKNPRQRRAGEQKHHTDGKEHEGKQNPERNNSAGENHAVQKPLTEQRRKEXTTSASDPRTAKVTEGSKPEGTAMHAGAREKSMDKMAGTDGNT

SEQ ID NO: 233512 - protein, 376 aa, Glycine max
  Clone ID: PAT_MRT3847_52888C.1.pep
MVSTRRNSGSFSNSNKRPSSSSSSEDKTPSPPPKRQKVDNGAATSEKPMPAAENSKELSTLEPPADPGECAVHDAQIAGAASSDGKAEATPPIADGSTPTVVADKPRGSFSSWRVHPKQNPNFEPSVPWCRLLSQSAQNPNVLISTPSFTIGSSRSCNFSLKDQTISANLCKIKHTQDMYGNVVAVLGLEGSKGSVVVNGTLVKKSTSCMLNSGDEVVFGLLGNHSYIFQQINPEVTVKAAEIQGGVGKFFQFERRAGDLAGASILASLSSLRPELTRWKSPSQTASKPQQGTDVSSHSVLPDGTETELDGLEGNSAPNVATDKASDVGTSDKNSPMDCDPDDAGTEAGNVKISGVNAFLRPFFVLAGSTCKLKLS

SEQ ID NO: 233513 - protein, 628 aa, Glycine max
  Clone ID: PAT_MRT3847_52889C.1.pep
RGPSNGSRGKVVLLFDDNPLSKIGVRFDKPIPDGVDLGGACEGGQGFFCNVTDLRLESSAVEELDKLLIHSLFEVVFSESRSAPFILFMKDAEKSIVGNGDSHSFKSKLENLPDNVVVIGSHTQNDSRKEKSHPGGLLFTKFGSNQTALLDLAFPDSFGRLHDRGKEAPKQNRTLTKLFPNKITIHMPQDEALLASWKQQLDRDVETLKIKGNLHHLRTVLGRCGMECEGLETLCIKDQTLTNENAEKIIGWALSHHLMQNSEAKPDSKLVLSCESILYGIGILQSIQNESKSLKKSLKDVVTENEFEKRLLADVIPPSDIDVTFDDIGALEKVKDTLKELVMLPLQRPELFCKGQLTKPCKGILLFGPPGTGKTMLAKAIATEAGANFINISMSSITSKWFGEGEKYVKAVFSLASKISPSVIFVDEVDSMLGRRENPGEHEAMRKMKNEFMVNWDGLRTKETERVLVLAATNRPFDLDEAVIRRMPRRLMVNLPDAPNRAKILKVILAKEELSPDVDLDAVASMTDGYSGSDLKNLCVTAAHRPIKEILEKEKKERAAALAEGQPAPALCSSGDVRSLNMEDFKYAHQQVCASVSSESVNMTELLQWNELYGEGGSRVKKALSYFM

SEQ ID NO: 233514 - protein, 53 aa, Glycine max
  Clone ID: PAT_MRT3847_5288C.1.pep
MRSSGSSDCGLSMAYYFKTRERLTIGISDEFCKRAQADRRTPVLIRRPPEREA

SEQ ID NO: 233515 - protein, 278 aa, Glycine max
  Clone ID: PAT_MRT3847_52890C.1.pep
LLLKLVLTSSTFLCQVSHLRLNLSLSKCILISPLLVCCAYNSFSCLFLLQWFGEGEKYVKAVFSLASKISPSVIFVDEVDSMLGRRENPGEHEAMRKMKNEFMVNWDGLRTKETERVLVLAATNRPFDLDEAVIRRMPRRLMVNLPDAPNRAKILKVILAKEELSPDVDLDAVASMTDGYSGSDLKNLCVTAAHRPIKEILEKEKKERAAALAEGQPAPALCSSGDVRSLNMEDFKYAHQQVCASVFFESVNMTELFQWNELYGEGGSRVKKALSYFM

SEQ ID NO: 233516 - protein, 322 aa, Glycine max
  Clone ID: PAT_MRT3847_52891C.1.pep
NSARGEELRLFLEAKERLPLAKTTDVASRMLDGAVRLPRQLFSGEAELGEVAQPAKGGRDLLRIFKELKQSVANDWVGSKPLVVEEDKEFMERKDKLVDFEHHLSNVSQQAESLVKFQQDMGETVGELGLAFVKLTKFETEEAIFESQRVRAADMRNVATAAVKASRLYRELNTQTIKHLDKLHEYLGTMLAVNNAFSDRSSALLTVQTLSSELASLHSRVEKLEVASSKIFGGDKSRMRKIEELKEAIRVTENAKICADREYERIKENNRSELERIDQERNSDFLSMLRGFVVNQAGYAEKTATVWEKLAEETAAYSSDSS

SEQ ID NO: 233517 - protein, 89 aa, Glycine max
  Clone ID: PAT_MRT3847_52892C.1.pep
DDGRKVFDKMRVRNVFAWTTVISGLVACGKLDTARELFEQMPSKNVVSWTAMIDGYVKHKQPIEAFNLFERMQQVDNVRPNEYTLVSLV

SEQ ID NO: 233518 - protein, 457 aa, Glycine max
  Clone ID: PAT_MRT3847_52893C.1.pep
MGERGDEAVTPAGRLFLQAEMKQVIHCVIGLKNPIDAELVKSQVRNSTMLQHPRFTSLMVRGEGGVEHWRPTEIDIDRHVLIIEEAVGEREEEDESAINKYLAELSIDSDGLSMEKPLWEIHLLKAHKCVIFRIHHALGDGISLMSMLLASCRKLNNPNALPTIAASASTSASKTNLINFRNLLATLWFCFIFALEFILRCLWIRDPKSALTGGAGVELWPRKIATATFSLEDMKTVKTAANATINDVLFAVISSGISRYLDFRAPNGLRDGVQLTGLAMVNLRKHPGLQELSNMMRSNSGARWGNKFGMILLPIYYHRTNTSDPLEYLKRAKAMIDRKKRSLEASFSYKIGDFVMSTLGPKFASLLNYRILCHTSFTISNVVGPQEEIMIGGNPITFLRANNSALPHALILNMVSYAGRADMQVQVAKDIIPDPEFLAKCFEDALLEMKEQVTAKI

SEQ ID NO: 233519 - protein, 111 aa, Glycine max
  unsure (1)..(111): unsure at all Xaa locations
  Clone ID: PAT_MRT3847_52894C.1.pep
XEXLXXXLVXXXXXXLXXXXXPPXRXVLXXXXXXSWXXVPXWXVXXXXGLXGXRPXGCXPGFPXXXWVVXXPLXXXXWXXLXXGXSXXFSXXXXLRLXSXRSPXXRXSGET

SEQ ID NO: 233520 - protein, 179 aa, Glycine max
  unsure (1)..(179): unsure at all Xaa locations
  Clone ID: PAT_MRT3847_52895C.1.pep
VIASLFVILCSCYICCLLCVFFIEQKNHQTLVFSFRMGQQYQKLSPHWEGVSTLCWPTSKTLFSSNAGAFGPSKALYGDANMIWNDPPPTFKAIADAGYNPVGTPLLDPASNDGGELSRIMSAATKNATENHMHSRDAKLMVYELGPTYGGYTLHTGAQFGTTGATLARTTNWVGPWVX

SEQ ID NO: 233521 - protein, 60 aa, Glycine max
  Clone ID: PAT_MRT3847_52896C.1.pep
LLFFFPSNNSLKRVADFRKIDLDVILLTTFIYKNNLNIYCNYIKMMFLNFKTQISIYHSS

SEQ ID NO: 233522 - protein, 34 aa, Glycine max
  Clone ID: PAT_MRT3847_52897C.1.pep
SFTFLTYSITIVKKRSYKRRNKEEEINYILITYI

SEQ ID NO: 233523 - protein, 86 aa, Glycine max
  Clone ID: PAT_MRT3847_52898C.1.pep
SHSSKPTNLNTHFFFSTPFKKPSKKPTLFLLIASLTLVFQSRLNKQNTLNFFFNIHVPLSNTLGHSSHFKPTKHRTTSINKRIPTN

SEQ ID NO: 233524 - protein, 116 aa, Glycine max
  Clone ID: PAT_MRT3847_52899C.1.pep
MGVDYYKILQVDKHATDEELKKAYRKLAMKWHPDKNPTNKKEAETKFKQISEAYEVLSDPQKRAIYDEYGEEGLKGQVPPPDAGGHTFFQTGDGPTTFSSSPRNADDIFAEFFGFS

SEQ ID NO: 233525 - protein, 63 aa, Glycine max
  Clone ID: PAT_MRT3847_5289C.1.pep
EWRSGHIKISISQLLFRLCGFHVAFRVANQINLNKQKQLVSCIQGYCVSDMVLVSISSCIIDD

SEQ ID NO: 233526 - protein, 70 aa, Glycine max
  Clone ID: PAT_MRT3847_528C.1.pep
LQVERGFQGQHGYLVSFYGTDGQNKSSFFPFSGVTEELKAFINDVSENTLKGARDVAVLAAMLESGAKRQ

SEQ ID NO: 233527 - protein, 68 aa, Glycine max
  Clone ID: PAT_MRT3847_52900C.1.pep
MQGVRRDVEKEGNRPIMIEELASELGLSPSVPIHVVLQDWIRHSDGKLSFLGFVRLLHGVSSRTFQKA

SEQ ID NO: 233528 - protein, 79 aa, Glycine max
  Clone ID: PAT_MRT3847_52901C.1.pep
MSAWDRDNPLRQALTLYLITWIFGLAVYFIVATLSYMFIYDKRTFNHPRLIKIQVRLEMIHANTVMPVMDGMTAPMFLL

SEQ ID NO: 233529 - protein, 29 aa, Glycine max
  Clone ID: PAT_MRT3847_52902C.1.pep
LINPIHFYFLLYITLILLSHYLYIHIFIL

SEQ ID NO: 233530 - protein, 78 aa, Glycine max
  unsure (1)..(78): unsure at all Xaa locations
  Clone ID: PAT_MRT3847_52903C.1.pep
FGRLVKGSLGGFALGSKLCACVPVLYWGFKNALTLCNNNNKLSCAFCLCDCALPLSLFQLAPGLAXFSVSYCGSNDPH

SEQ ID NO: 233531 - protein, 53 aa, Glycine max
  unsure (1)..(53): unsure at all Xaa locations
  Clone ID: PAT_MRT3847_52904C.1.pep
TCSKTPNKNSPTNEPLFNKQNXXLEKCTQQGKPCIKTNLLLCAQDMFPHKKSS

SEQ ID NO: 233532 - protein, 68 aa, Glycine max
  Clone ID: PAT_MRT3847_52905C.1.pep
PLLPVLSYLTSTFLFLPQPFFPPFNICTHFVFISLNSFSSLFNLSLILMAPLMGGCFWLWWQLKQQCQ

SEQ ID NO: 233533 - protein, 207 aa, Glycine max
  Clone ID: PAT_MRT3847_52906C.1.pep
MNQMRGISGSGSSSREARRRKARSTSPVKDRSKTSSSKLTSSSSSSKRSTSPSATLLDVDDDVTSLFHDYPSPNPNPNPNPRSFPHSVKQKCWEKADKVKGRDPDRWRRDALGNTLFRKLVGCPGCLCHDYDHIIPYSKGGESTLENCQVLQATVNRSKGNRTEISKAELIQKSSYCRVSDRDMDLLELSGYGNVRRGPDSGGCRIQ

SEQ ID NO: 233534 - protein, 123 aa, Glycine max
  Clone ID: PAT_MRT3847_52907C.1.pep
LVVRKRGPKKPRVPWGQNLGGLGLRGLTLLNLGPNSGFSSAGLGSNIFFLGAPKLNSRGGFLKTLDGENPGVPQIKCFGKNPLFARWGKKKKAPTRRLFQKFPNLNGKWAPPFMGTLNAGGGG

SEQ ID NO: 233535 - protein, 81 aa, Glycine max
  Clone ID: PAT_MRT3847_52908C.1.pep
VDRRLRAERVLHAVLGPSSPLSRSTRATLMTAYSTYYRFVLKAQDGSAKARYETNLRIEALAPLHECNLLHTVPLMLNPYF

SEQ ID NO: 233536 - protein, 108 aa, Glycine max
  Clone ID: PAT_MRT3847_52909C.1.pep
SYFSYIILWEINLSIYIYLYNYKVRLQHHRTDYYYYKFLCCRCVQYIQNYIFNITCKYSHMNRVFLSSKKLLRNYNLAMHKVEKEMKKLCTWHRWLWIRFKLFQMQNL

SEQ ID NO: 233537 - protein, 60 aa, Glycine max
  Clone ID: PAT_MRT3847_5290C.1.pep
IMLRFQFFPSIPISGPVFAFFSFQVELFTASIVPVARFDLELFYHLFPLSISILILKCDL

SEQ ID NO: 233538 - protein, 76 aa, Glycine max
  Clone ID: PAT_MRT3847_52910C.1.pep
PWVMRKENDAPDHAMNSCNGVYCDDFSTNKPHKPSMWAHTWSGWCSGFGGPILQGPVEDKSFAVARFTQKGGSEVH

SEQ ID NO: 233539 - protein, 77 aa, Glycine max
  Clone ID: PAT_MRT3847_52911C.1.pep
FFSISESHGKQSSRCMMPSLTSEPKNVEIFGVYEIIVSWFSGVDQAPHLLTKTSDLLCATLNFWWPILHLEARRVKH

SEQ ID NO: 233540 - protein, 92 aa, Glycine max
  unsure (1)..(92): unsure at all Xaa locations
  Clone ID: PAT_MRT3847_52912C.1.pep
ARNSARXDNSVIARXYXXXSSIXXXXXXHXSRXXDCRXXXXXLDKXXXHGNXXXXQPXXRXQXXXXGXTXXQXXXTSEXRTXSPAXXXAGPX

SEQ ID NO: 233541 - protein, 129 aa, Glycine max
  unsure (1)..(129): unsure at all Xaa locations
  Clone ID: PAT_MRT3847_52913C.1.pep
LRFFVGAFISYFLAGLATLFAAFSVLFGAVFCCALLLGVYSFLPPILFSPQGVSFVSRPASRVFCSLFSPFLVAPPPCFPSCCVLSRLRSWGGSCFLFAIPPVVSAGCRWXXLRYXXPVAWVGSGGPGP

SEQ ID NO: 233542 - protein, 89 aa, Glycine max
  Clone ID: PAT_MRT3847_52914C.1.pep
RLLNRRTMGEDLFWAVRGGGGGSFGVVLAYKIKLVRVREKVTVFQVGRTLEQNATDIVYNWQHVAPSIDNDLFIRLILEVVNGTQTATK

SEQ ID NO: 233543 - protein, 38 aa, Glycine max
  unsure (1)..(38): unsure at all Xaa locations
  Clone ID: PAT_MRT3847_52915C.1.pep
PAFLDASERGVHHNVIXRFGVDHTVLANIPCYRQHGYG

SEQ ID NO: 233544 - protein, 59 aa, Glycine max
  Clone ID: PAT_MRT3847_52916C.1.pep
LKGGKKKRQGIERRVEFGKFEFLCLVLFQQFLKTRFLTREKEPYAVLSLSCVVYLFNSF

SEQ ID NO: 233545 - protein, 70 aa, Glycine max
  Clone ID: PAT_MRT3847_52917C.1.pep
PNGEVESSKYRAASHRFSLKARLFLSSFLLVSVFVPSSSFGVSSITSKFSPLGLSVSHKPSTYFGVKSTA

SEQ ID NO: 233546 - protein, 103 aa, Glycine max
  Clone ID: PAT_MRT3847_52918C.1.pep
MEEVTFECDLIHSILKRFWTLQALERENVEANDPPDSEVGVGTSKKNRSTSANANALKLTSELLRIFITEAVQRAATIAEAEGASQIEPTHLEIILPQLLLDF

SEQ ID NO: 233547 - protein, 51 aa, Glycine max
  Clone ID: PAT_MRT3847_52919C.1.pep
QGKQYYVILGHNQSQLQLSVQVGNQCCWEINIRGCHVVVVLLSTSQGKSVT

SEQ ID NO: 233548 - protein, 34 aa, Glycine max
  Clone ID: PAT_MRT3847_5291C.1.pep
LKNGCIQDHHILKYLGGGFEAQKKKKKTPLGSLL

SEQ ID NO: 233549 - protein, 63 aa, Glycine max
  Clone ID: PAT_MRT3847_52920C.1.pep
SKHLIAYALIPEIKGRLSILGSLSTLTENKLIHTLPEPNNVFTKHTKIFFQRNPLKFYHPYFL

SEQ ID NO: 233550 - protein, 164 aa, Glycine max
  Clone ID: PAT_MRT3847_52921C.1.pep
DNEGKISSIPRAVRKTKMRKHGDMTYEGDADWEILIDDQALNESQVMTDGDRTLRSRLKHDSSLNTGEDSENVAVVAVSAGLKARKAGPIEKIKFKEVLKRKGGLKEYLDCRNQILSLWNRDVTRILPLAECGVSDTHSEDGSPRSSLIREVYAFLDQYGYINV

SEQ ID NO: 233551 - protein, 55 aa, Glycine max
  Clone ID: PAT_MRT3847_52922C.1.pep
FVCFFTGKTILALRRGKNNIPLNYKPSGDTNRGSWTSHMEKKEYALVLSQLKHDL

SEQ ID NO: 233552 - protein, 73 aa, Glycine max
  unsure (1)..(73): unsure at all Xaa locations
  Clone ID: PAT_MRT3847_52923C.1.pep
VYAPWSXGPPLHRRSALASIVIPQPLYKPIDPSAHPFCRLLSAVPYVSSRSRPLCRFPSCPFCDFWQPSDAGR

SEQ ID NO: 233553 - protein, 46 aa, Glycine max
  Clone ID: PAT_MRT3847_52924C.1.pep
DGPAFGFDLGSTYPPVGLWHHYRVDIIAHDQGYRTTPSYVAFTASE

SEQ ID NO: 233554 - protein, 50 aa, Glycine max
  Clone ID: PAT_MRT3847_52925C.1.pep
TIIEPSPSLGYTPIIQSTSKDVLYSMCYYPRSLGSIFLFHKGNRIIAFPK

SEQ ID NO: 233555 - protein, 274 aa, Glycine max
  Clone ID: PAT_MRT3847_52926C.1.pep
MDATSIMHLLKGFCDHTQWKYAGFWKLDQHFPMTLTWENGYQKRDEVKESMWGDLSFKSPDELYSSSGENSDYSARLLLIEMSHRKYSLGEGVVGKIALARDHCWVSYEDILTSKFDTDLITECPDEWLLQFACGIKTIVLVPVLPQGVLQFGSFEAVAEDKEFVTNIKEKFYSTHYLEADITPLNLGTDCQDVSFSDLMHNLMGSLDESSSSVTKSILKSEVSTSPAALNSNGSRLNPTMLSFIQDDCFFSRENLLESLKRENENEIGSSSTE

SEQ ID NO: 233556 - protein, 53 aa, Glycine max
  Clone ID: PAT_MRT3847_52927C.1.pep
DPNRACSRPAPEWAPRRHVPMQYEVAAAVALAIACLRVMRQYGWAWQFARNIP

SEQ ID NO: 233557 - protein, 126 aa, Glycine max
  unsure (1)..(126): unsure at all Xaa locations
  Clone ID: PAT_MRT3847_52928C.1.pep
MIEISTDSVMKMKVVVFFVATLLVAWQCHAYDMLPLRTNNDYGAHTLEVKCTRWRHAVEAHSIYGFETIHEXCVDAPREYIDGDQYTSDSKSVKQQAYFYDKDLDIYHNDTFVFSIYRNVPSIIQY

SEQ ID NO: 233558 - protein, 54 aa, Glycine max
  Clone ID: PAT_MRT3847_52929C.1.pep
CRWRAPPMFTSGINSIALVVRRISSFISSKFARETYIPLIDHVIKCIISRSMSR

SEQ ID NO: 233559 - protein, 273 aa, Glycine max
  Clone ID: PAT_MRT3847_5292C.1.pep
PRVRCTSALLRFAKKTNIPVLLIGHVTKSGDIAGPRVLEHIVDVVLYMEGEKYSSHRMLRAVKNRFGSADELGVFEMSHSGLQAVSNASEMFLSEQLLDSEILAGLAVAVIMDGSRTFLIEIQALCLSGSTGSRQVNGIQQKRADMIISVLIKQAGLRLQEHAVFLNVVSGLALTETAGDLAIAAAICSSCLEIPIPNDIAFIGEIGLGGELRMVPRMEKRVYTVAKLGYRMCIVPKVAEKALGTEGLEKMEVVGCRNLKEVINTVFLNIMRR

SEQ ID NO: 233560 - protein, 78 aa, Glycine max
  unsure (1)..(78): unsure at all Xaa locations
  Clone ID: PAT_MRT3847_52930C.1.pep
RSLTRYTNGPVFLAPYRETRYHLNEWIGNTPQNYKELFNLXHLSARNVIERSFGVLKKRWSYIKNSLFFLYKNTNQNY

SEQ ID NO: 233561 - protein, 47 aa, Glycine max
  Clone ID: PAT_MRT3847_52931C.1.pep
DYRAAAYIVELFYPLLNFDRPYMHGNFSYSDGCLNHTTLSKSLLSVK

SEQ ID NO: 233562 - protein, 150 aa, Glycine max
  unsure (1)..(150): unsure at all Xaa locations
  Clone ID: PAT_MRT3847_52932C.1.pep
FQRXXSVXASXXQRVEQILXXDGIFITKHPNRRPPPPTSPSQNSXHGNQPTQVSSPRLDDEQQQEADRRAKFVYELMIDHAPPAIVGLVGRKEYEQCARDLYFFLQSSVILKQLVFDILELLLTSAFPELDNVFKQLHEEKHKFGEFRTE

SEQ ID NO: 233563 - protein, 279 aa, Glycine max
  Clone ID: PAT_MRT3847_52933C.1.pep
MTGKDLEIEGYTVGGLSIGGHETCVIFPTLKVAFDIGRCPPRAVSQNFLLITHAHMDHIGGLPMYVATRGLYRMKPPTIIVPISVKEDVEKLFEIHRKMDQSELKHNLIGLDVGEEFYLRKDLKVKAFRTYHVIPSQGYILYSEKQKLKPEYVGLSGNEIKNLKSSGVEITYTLTEPEIAFTGDTMSDFIVDENNTDVLRARILVLECTFVNNSITVEHARDYGHTHLSEIISYAESLQNRAILLIHFSARYTVEEIQHAVSALPPSLSGRTFALTEGF

SEQ ID NO: 233564 - protein, 55 aa, Glycine max
  Clone ID: PAT_MRT3847_52934C.1.pep
INSLVKYYNIKAHLSSSNLIFFYIRTFIKFFYCSTPSNHNYGLHCYLEILNRALF

SEQ ID NO: 233565 - protein, 76 aa, Glycine max
  Clone ID: PAT_MRT3847_52935C.1.pep
RIRCFSPFLNPVSFGHFNFSRTPSLLNRKLFTEGLSLEKGPPPMLRWVMLLFFRPGICFCLIGKPIGGLLAYTPLF

SEQ ID NO: 233566 - protein, 72 aa, Glycine max
  Clone ID: PAT_MRT3847_52936C.1.pep
CVLIVTHCRNPCVPKATLSFFNQILIDLDDGCREIFFSDHYHFYNPKADQSLSSHSPCSKVLCSYPPLYSIS

SEQ ID NO: 233567 - protein, 81 aa, Glycine max
  Clone ID: PAT_MRT3847_52937C.1.pep
AKRSYEEDSNSSYIWASICEARGLMEEDCLWKGGNGRCILAFKHKRIPNISGNIIQPCDREMGQEDILGHKLGGTRETPGT

SEQ ID NO: 233568 - protein, 41 aa, Glycine max
  Clone ID: PAT_MRT3847_52938C.1.pep
PNKSKGGRLWPIYCSPLQNALNLIRLPTALMFHLRYTRRVF

SEQ ID NO: 233569 - protein, 117 aa, Glycine max
  Clone ID: PAT_MRT3847_52939C.1.pep
RPPRVSLWALSIWGGGPFRGGPLIPQGPIGHEALVGPCPPPRGAGAGPPHKGAMAAPLLGAAVRNGAPEGFPPPYFQRGESVNSKKEMGLSEFLGVLPVGRAFPPGVFFRIPAQGGD

SEQ ID NO: 233570 - protein, 49 aa, Glycine max
  unsure (1)..(49): unsure at all Xaa locations
  Clone ID: PAT_MRT3847_5293C.1.pep
FKLKFITLXLVHIWGKPFTSLSYLPLWLATXLVELPCPLLLKLQQRLKR

SEQ ID NO: 233571 - protein, 42 aa, Glycine max
  Clone ID: PAT_MRT3847_52940C.1.pep
DSGWGGPKTSFKRFFFAWTRAPLEAVVEVVVALLLGTLIQGK

SEQ ID NO: 233572 - protein, 103 aa, Glycine max
  Clone ID: PAT_MRT3847_52941C.1.pep
LLHSDTVPYIEVVLRENQQDDEYFKERVERLESEREERNGVMFKASESLTSTKESLSSVIEGLEGEKDATFVENGNGEWSDVESRMLLEDARLISRLAIEVET

SEQ ID NO: 233573 - protein, 50 aa, Glycine max
  Clone ID: PAT_MRT3847_52942C.1.pep
CKETSLRYSLKISFCEAQYIVCKNKTLCTKFVNFWVIGQPHLSRQIAMYY

SEQ ID NO: 233574 - protein, 151 aa, Glycine max
  unsure (1)..(151): unsure at all Xaa locations
  Clone ID: PAT_MRT3847_52943C.1.pep
MGSPREPEKEKKKMLALAPIXNPLAGKNLRNRTLNLVCRAAAHKCLKRGVKEVVKSIRRGHKGLCVIAGNISPIDVLPHXPILCEDSPSPYIYAPSKEDLAGAGATKXPTSCVLAHTKPAKGEIEQGAQEKLNSDYAQVVSEVTELTTSLF

SEQ ID NO: 233575 - protein, 70 aa, Glycine max
  Clone ID: PAT_MRT3847_52944C.1.pep
WLPQIILACLMYIQKKILLLLKSIRHLLRGALLYTKEEDLFLRAEKAGNENDNEFQLANLFQKQSLTWSS

SEQ ID NO: 233576 - protein, 70 aa, Glycine max
  Clone ID: PAT_MRT3847_52945C.1.pep
KKKKKKKFNLKKKKKKKKKGKKKKKKKKKKKKKKKKKKKKKKRGGRFKGPKFTNPGLQHKSFFIGQPKLN

SEQ ID NO: 233577 - protein, 73 aa, Glycine max
  Clone ID: PAT_MRT3847_52946C.1.pep
SHSPNFFTGAILWLMRTEGHSECHFLGGNPFSWANLPRILNPINPVTQIDLPKKSFKNFKDILNHWNYTPRRV

SEQ ID NO: 233578 - protein, 60 aa, Glycine max
  Clone ID: PAT_MRT3847_52947C.1.pep
QPEHPLLEASGKMSNSFLNGGANDGANMVPIMQSIGHCQKVWQEPVVQINLGSEYSPTRK

SEQ ID NO: 233579 - protein, 239 aa, Glycine max
  unsure (1)..(239): unsure at all Xaa locations
  Clone ID: PAT_MRT3847_52948C.1.pep
LDRELADAKKQLENERRSRQESDRAAKKAEADLSDYKSRVEGSGCDRDKVEKDKKKALKELRQLQERLDSLEVEKDEQERLAWKFQEEADALHDQLDQEHKLRVNAEKSVKTLELQLAEFRDQAEEASRSRSSAEQXSATXQVEVEDLKDQVEDLSDRLSSAEAFRRTHASLVEEAKKALDREISNREAVEEAKRSIERENNELRDQLDEERVARGNANRNRKKAQSELEGLNAQINLL

SEQ ID NO: 233580 - protein, 44 aa, Glycine max
  Clone ID: PAT_MRT3847_52949C.1.pep
RSRVSSTRPLIVAISYKMLELGYTAIFCETHFISNARLQNLTEK

SEQ ID NO: 233581 - protein, 84 aa, Glycine max
  Clone ID: PAT_MRT3847_5294C.1.pep
GVFKLSNISGKKREPIPASAVEADTDVDSDSSSDEEDEEINEDTKPILHLKKVAHAGCVNRIRSMTQRPHISATWGHTGHVQVW

SEQ ID NO: 233582 - protein, 88 aa, Glycine max
  unsure (1)..(88): unsure at all Xaa locations
  Clone ID: PAT_MRT3847_52950C.1.pep
METDRPDGRTPNQLRPLVCSCSILHRSHGSASWAQGETKVLAAVYGPKAGTKKSEXPEXASIEVIWKPKTXTIXXVEKEYEMIFEENF

SEQ ID NO: 233583 - protein, 74 aa, Glycine max
  Clone ID: PAT_MRT3847_52951C.1.pep
MMRKTCGLLFLLLLVVTADQTVKQTEAKECLTRRHGFHGLCLLDQQCAHVCRNEGFIGGQCQGLLRQCFCTRTC

SEQ ID NO: 233584 - protein, 90 aa, Glycine max
  Clone ID: PAT_MRT3847_52952C.1.pep
MHIFVKTLTGKTITLEGESSDTIDNGRAKIHDKEGIPPVQQRLIFAGKQLEDGRTLGDYNIQKEATLHLVLRLRGGMHIFLKTLNGETIT

SEQ ID NO: 233585 - protein, 310 aa, Glycine max
  unsure (1)..(310): unsure at all Xaa locations
  Clone ID: PAT_MRT3847_52953C.1.pep
MAASKLFSASLLVSMVTLLVLSSDKCLALQCRVSYETITVVNEFPHDPQAFTQGLLYTGNDTLFESTGLYGESSVRKVALCTGKVDIIHKMDDSYFGEGLTLLNSKLFQVTWVRTNGFIYDPKTFKPSRXISEDNILNGIAWDGWGLATDGKVLFGSDGSSTLYQMIQTDPQTFKAVSKQVVYYKGHEVHNLNELEYINGEVWANVLPTDCIVRISPSDGSVLGWILLQDLKKELVEAGAISEDNILNGIAWDGEQKRIFVTGKLWPKLYEIKVSPIKEPIEEGTIEQLCLPEPYVPPSNLVLADPAQRE

SEQ ID NO: 233586 - protein, 37 aa, Glycine max
  Clone ID: PAT_MRT3847_52954C.1.pep
SMTITMPIINDLHLRSQPKGSLVISTFNPFALFRFYI

SEQ ID NO: 233587 - protein, 64 aa, Glycine max
  Clone ID: PAT_MRT3847_52955C.1.pep
FVAPFCPRNFSSWGFQFPRGGILVCFRGGRKERKKKKIKDQKFKKKKKKKKKKKKKKKKKGGRR

SEQ ID NO: 233588 - protein, 68 aa, Glycine max
  Clone ID: PAT_MRT3847_52956C.1.pep
QELSDMTAIKAEDILTTLQSLELIQYRKGQHVICADPKVLDRHLKAAGRGGLEVDVSKLIWTPYKEQS

SEQ ID NO: 233589 - protein, 75 aa, Glycine max
  Clone ID: PAT_MRT3847_52957C.1.pep
GAELYNESPCLRTAHTRNYLLNIILWIDTGCHDDTHRIESMRPINTLSWATISPPEISSGDQTTCNHQMSLKTFS

SEQ ID NO: 233590 - protein, 174 aa, Glycine max
  Clone ID: PAT_MRT3847_52958C.1.pep
RSIRFYLSLSLSWVRSRHQPPREPDASKRRRSSVLPLEVGTRVMCRWRDNKYHPVKVIERRKVPNAIPNDYEYYVHYTEFNRRLDEWVKLDQLDLNSVEAVVDEKVEDKGATGLKMTLFSKEEDYLTSCSRDLRSLMMLCPFPQPKKKLQSVKYLSVELGNVFKLRLARLPERG

SEQ ID NO: 233591 - protein, 434 aa, Glycine max
  Clone ID: PAT_MRT3847_52959C.1.pep
MGSLEAPTAAENGSAPAAGNGKSPSVNGAEAALEPDASKRRRSSVLPLEVGTRVMCRWRDNKYHPVKVIERRKVPNVIPNDYEYYVHYTEFNRRLDEWVKLDQLDLNSVEAVVDEKVEEKGATGLKMTRHQKRKIDETHVEGHEELDAASLREHEEFTKVKNIATIELGRYEIETWYFSPFPPEYNDCLKLYFCEFCLNFMKRKEQLQRHMRKCDLKHPPGDEIYRSGTLSMFEVDGKKNKVYGQNLCYLAKLFLDHKTLYYDVDLFLFYVLCECDDRGCHMVGYFSKEKHSEESYNLACILTLPPYQRKGYGKFLIAFSYELSKKEGKVGTPERPLSDLGLLSYRGYWTRVLLDILKKHKGNISIKELSDMTAIKAEDILTTLQSLELIQYRKGQHVICADPKVLDRHLKAAGRGGLEVDVSKLIWTPYKEQS

SEQ ID NO: 233592 - protein, 173 aa, Glycine max
  Clone ID: PAT_MRT3847_5295C.1.pep
ARASIGKIFAEVSNSGLPGNLVKVSLSNRKVTDASVQWASLPSSISKIGREVMKHRDAAQIAATEAMQEAAAAESLLQCLRTYSELTNSAKEHNPQPAVEQFLTLHASLNSTRTIAESLSKPIPDGSSPDYERSTVEEALKVKSDRQKQSASWVQAALATNLSSFAVFTRESQ

SEQ ID NO: 233593 - protein, 86 aa, Glycine max
  Clone ID: PAT_MRT3847_52960C.1.pep
NRRGRRCHWHGSVRASVRICCFAVQRDWRHIYIEFMTPRLSNYAGCSVPVFLPVNLLSRESKICRFFKRLSLVICLATESTAMFCL

SEQ ID NO: 233594 - protein, 80 aa, Glycine max
  Clone ID: PAT_MRT3847_52961C.1.pep
KWVLRVNYRIGVKLREKKLYNSKLLRISSSEYFRQTVRFILLCSSLCLEKIQISPYGLKFVIANKSTYYAQTTTMPYPTR

SEQ ID NO: 233595 - protein, 59 aa, Glycine max
  Clone ID: PAT_MRT3847_52962C.1.pep
FKMGFFSPVVLKTYLCRLNIPPSVVSGLKTPLQGEIVEKIFLLGVFILSYMCEPRLLTP

SEQ ID NO: 233596 - protein, 125 aa, Glycine max
  Clone ID: PAT_MRT3847_52963C.1.pep
FGSRAEILVNVVPITKEDDRIHNYQVPSDDCFAHLEVQFRFFALSQKVDGVLGRTYRLDFENPAKPGVAMPVVGGEDKYRTNSLLSPDCVSCVFSQESSAEKETMEYGTLDCTKFSNGLGIVCRK

SEQ ID NO: 233597 - protein, 387 aa, Glycine max
  Clone ID: PAT_MRT3847_52964C.1.pep
MVIEEGEMKSQGEVESWLQQEAKKNHHSPLFSSSSYLGRQTSSIYSLTLDEFQHSLCESGKNFGSMNMDEFLSSIWNAEENSQAITNNNVPLSSTLTILRKQPSLPRQPSLSLPAPLCRKTVDEVWSQIQKEQNKNNNISNVLNDNTESAPRQPTFGEMTLEDFLVKAGVVRETTCAPPLPVSHSHQPHYANNNNNVAMAPSFVGRHVGAVSNVVAPGYQQVVGEASGGYGKRDHNGGGYHCFGGGGGGYGVGPTMGMGGPVSPANSSDGIGNDGGQFGLDMGGLRGRKRVVDGPVEKVVERRQRRMIKNRESAARSRARKQAYTVELEAELNQLREENSQLKQALAELERGRKQQCFEEVNVSVKTKAQKAKEKLRALRRNMSCPL

SEQ ID NO: 233598 - protein, 68 aa, Glycine max
  unsure (1)..(68): unsure at all Xaa locations
  Clone ID: PAT_MRT3847_52965C.1.pep
VSLLLCXNPMLTECYVLSQYLLHLFALRNVPCFTFKCTQLTPLSLLILHLPRALKSPHSMHAAILPFA

SEQ ID NO: 233599 - protein, 96 aa, Glycine max
  Clone ID: PAT_MRT3847_52966C.1.pep
EFGTREITDIKKFLQIAKPDEKPQGAQGAKKPATKKVLIIKHGKRITKFKLRGPKYLYTFKTTDKDKASKLTQSLPQGLERVEIKSKKIISKKRRR

SEQ ID NO: 233600 - protein, 107 aa, Glycine max
  Clone ID: PAT_MRT3847_52967C.1.pep
SRSPENIRVAPFIFPFLYLASPLLTPPLAPPHHRRSHHRRHPFFPLISLSPFFARWRCQSLGLVAPHKSKRSKKKKWLDSSFQERGRERVARVNLKQKKNYKLNEMN

SEQ ID NO: 233601 - protein, 115 aa, Glycine max
  unsure (1)..(115): unsure at all Xaa locations
  Clone ID: PAT_MRT3847_52968C.1.pep
CTSYHDRLFFFNCLFPSTYPACSPKVHYHSSGLMLNPNLYNCGKVCLSLFSTYHLSNSXNCIPQKSTMLQMLVSIQALILNEKPFFNEPEYTSTYSGSYCLTISYEFNQSSFILF

SEQ ID NO: 233602 - protein, 105 aa, Glycine max
  unsure (1)..(105): unsure at all Xaa locations
  Clone ID: PAT_MRT3847_52969C.1.pep
MAFSSQNTFDDTFDQAFDDTFDQAFEDFALQYCXSRRRRKEKKRRVYIERNREEDNLQLWNDYLSETLTYPHNLFRRLFIMNKPLFMHIVDRLSNEVELFLYKKD

SEQ ID NO: 233603 - protein, 80 aa, Glycine max
  unsure (1)..(80): unsure at all Xaa locations
  Clone ID: PAT_MRT3847_5296C.1.pep
CVSGVTFKYDIIGEGSHSSEDSPEKENQCKSKKIDARLGQSIXPQYNEVQAQMETNLGRLSLDDAETPNSSMLXLKISQS

SEQ ID NO: 233604 - protein, 46 aa, Glycine max
  Clone ID: PAT_MRT3847_52970C.1.pep
FLIDNPTRYTVLDNILGISQNFKTVGKLLCQLVLFPRLVPHILKTR

SEQ ID NO: 233605 - protein, 335 aa, Glycine max
  unsure (1)..(335): unsure at all Xaa locations
  Clone ID: PAT_MRT3847_52971C.1.pep
PIVRTEPWWFWLCPFFLSLVTGTRRTICGQHGILDQWISKVKDGQHLLEDELQLLCEYVKEILIEESNVQPVNSPVTVCGDIHGQFHDLMKLFQTGGHVPETNYIFMGDFVDRGYNSXLEVFTILLLLKARYPANITLLRGNHESRQLTQVYGFYDECQRKYGNANAWRYCTDVFDYLTLSAIIDGTVLCVHGGLSPDIRTIDQIRVIERNCEIPHEGPFCDLMWSDPEDIETWAVSPRGAGWLFGSRVTSEFNHINNLDLVCRAHQLVQEGLKYMFQDKGLVTVWSAPNYCYRCGNVASILSFNENMEREVKFFTETEENNQMRGPRTGVPYFL

SEQ ID NO: 233606 - protein, 196 aa, Glycine max
  unsure (1)..(196): unsure at all Xaa locations
  Clone ID: PAT_MRT3847_52972C.1.pep
RGNHESXQLTQVYGFYDECQRKYGNANAWRYCTDVFDYLTLSAIIDGTVLCVHGGLSPDIRTIDQIRVIERNCEIPHEGPFCDLMWSDPEDIETWAVSPRGAGWLFGSRVTSEFNNINNLDLVCRAHQLVQEGLKYMFQDKGLVTVWSAPNYCYRCGNVASILSFNENMEREVKFFTETEENNQMRGPRTGVPYFL

SEQ ID NO: 233607 - protein, 216 aa, Glycine max
  Clone ID: PAT_MRT3847_52973C.1.pep
MAIDCITSIPMMPQPPTQETTKEQEQQQPLVFDASVPRHQLHIPSQFIWPDEEKACLDEPELLVPFIDLGGFLSGDPVAAAEASRLAGEACQKHGFFLVVNHGIDQRLISDAHLYMEHFFGLPLSQKQRAQRKPGEHCGYASSFTGRFSSKLPWKETLSFQYSADKNSSPTLVKDYLCSKMGNEFEQFGKVYQDYCDAMSRLSLGIMELLGMSLGL

SEQ ID NO: 233608 - protein, 79 aa, Glycine max
  Clone ID: PAT_MRT3847_52974C.1.pep
MDLDQWISKVKDGQHLLEDELQLLCEYVKEILIEESNVQPVNSPVTVCGDIHGQFHDLMKLFQTGGHVPETNYIFMGDF

SEQ ID NO: 233609 - protein, 206 aa, Glycine max
  unsure (1)..(206): unsure at all Xaa locations
  Clone ID: PAT_MRT3847_52975C.1.pep
VYGFYDECQRKYGNANAWRYCTDVFDYLTLSAIIDGTVNIFHSLLFKYLSPMCLCASWXLCVHGGLSPDIRTIDQIRVIDRNCEIPHEGPFCDLMWSDPEDIETWAVSPRGAGWLFGSRVTSEFNHINNLDLVCRAHQLVQEGLKYMFQDKGLVTVWSAPNYCYRCGNVASILSFNENMEREVKFFTETEENNQMRGPRTGVPYFL

SEQ ID NO: 233610 - protein, 289 aa, Glycine max
  Clone ID: PAT_MRT3847_52976C.1.pep
MAETCDSNNKVIREYHHDASFMSRCDIFTDVTEYQLCLAYAGESGKGKFEPKWDTDNVTPQLIEQFKLNCDASGLPVKVFVSIGGDDPFKVAAGGADDWVLNATTTLHHMINEYHIDGIDVNYTTIQCNQTLFVNCIKGLIKGLREALCTTGFVASLAPDATTNETFYLPLYRSIDNSWIGTVVFQCFVDFEPLDPNRPVESLVRQVEKIVGEYDYYDSKILLGYSAIKEDWNKVSPPLFFLALNRLVHSWPRVKGASVKVISDTYAFIPPTWIPKLLSLAVSDAGKYP

SEQ ID NO: 233611 - protein, 326 aa, Glycine max
  Clone ID: PAT_MRT3847_52977C.1.pep
SSNWLQTVASNPEAILFKFVPISSLLTGIPGSGYLSHAINLYLRYKPPPDDLQCFLEFQIPRQWAPMFYDLPLRHQRKKCSSPSLQFGFMFPKLHVSCAQVVSEQKPVVGLRLYLEGRKSDRLAIHVHHLSSLPNTMIHSSSGISLWRGSDDNESSDIFLEPIRWKGFANVCTAVVKHDPNWLHETSGVYIVSGAQLISKGSWPKNVLHLRLLYTHIPNCSIRKSEWDGAPEASRKSSFLTNLSTTFSFTQQSPPQKQAPTVLDSGVYPDGPPVPVRSGKMLKYVDTSEFVRGPHDAPGHWLVTAAKLVTEGGKIGLQVKFALLDY

SEQ ID NO: 233612 - protein, 68 aa, Glycine max
  Clone ID: PAT_MRT3847_52978C.1.pep
RPKLAQSRNLMEHSCDNTRPQVLNVHTKLSQEVTVSRASSVTSLSLVPIPHLFATMTLSSPVLAKSLK

SEQ ID NO: 233613 - protein, 64 aa, Glycine max
  Clone ID: PAT_MRT3847_52979C.1.pep
GRKWCRKETSVSEKLWHKRMEHEGHVVIKIILVLYFRPRKTRSRLMESRNLKSMLPPKFMSDLS

SEQ ID NO: 233614 - protein, 90 aa, Glycine max
  Clone ID: PAT_MRT3847_5297C.1.pep
FRLEFGSLLNVPQKRVGKKEILFKNENATQPVFFGRKLDKLFSKFKGSPLEFTLPCPSSFSSSSSCVSPKLIFKVQLVAGIAVVSQSYSQ

SEQ ID NO: 233615 - protein, 51 aa, Glycine max
  Clone ID: PAT_MRT3847_52980C.1.pep
WIEGNPVRTGPGPFKMCWQCMRSKPGVDPTAPFTFVDLEPLQRETEPVKPA

SEQ ID NO: 233616 - protein, 71 aa, Glycine max
  Clone ID: PAT_MRT3847_52981C.1.pep
PTRPRGARVHFSFYRNFGKTLRKLGGRSERERLDPGLKLVGWSGLGCRGGWWGVNFLLSLFCIIFGFFLSL

SEQ ID NO: 233617 - protein, 42 aa, Glycine max
  unsure (1)..(42): unsure at all Xaa locations
  Clone ID: PAT_MRT3847_52982C.1.pep
KRARRLPCNVFIERYNNLFLLPPPDRVKRWFKNQVIKXQCLF

SEQ ID NO: 233618 - protein, 70 aa, Glycine max
  Clone ID: PAT_MRT3847_52983C.1.pep
NCKVVLKNNPPFISFFFLGENPMGLGICSSCVFPTPLGKVYWQKEFFFLLTKKKRKKKRNKQKKKKKKNT

SEQ ID NO: 233619 - protein, 54 aa, Glycine max
  Clone ID: PAT_MRT3847_52984C.1.pep
GIPGSTHASGKISRLRRECPFDECGAGVFMGSHFDRHYCGKCCLTYCFNKPEDK

SEQ ID NO: 233620 - protein, 44 aa, Glycine max
  Clone ID: PAT_MRT3847_52985C.1.pep
LEPASSHRVVPSINCGLVPARELPASILTRNIALRNHGDICVLC

SEQ ID NO: 233621 - protein, 55 aa, Glycine max
  Clone ID: PAT_MRT3847_52986C.1.pep
GTNINNFQYAPLLSLKITLTWKFVLHILGHRHQLKRYFWEFQSIWKFSRLNDFKL

SEQ ID NO: 233622 - protein, 52 aa, Glycine max
  Clone ID: PAT_MRT3847_52987C.1.pep
KKLCDLPIQLALCTQSYRAPMITHIEQQSLHQGQIAFDSGLNVQRPVISTDV

SEQ ID NO: 233623 - protein, 87 aa, Glycine max
  Clone ID: PAT_MRT3847_52988C.1.pep
RLEAVTHFLGEWGCLPCAGHYLDYSLSPGIAGALSMQSPAARAILQLSTRGAPWTALGTHAWAGQWPEVGSQPGVVAHACNPSTLGG

SEQ ID NO: 233624 - protein, 86 aa, Glycine max
  Clone ID: PAT_MRT3847_52989C.1.pep
LLWFFFFFFFFFCLKLFLICFTFQNPKIWPKCLTRTEYSYNTTLFFLLISASLEVGGFMEKTSPPANNNQYHPLGFLHFLLLLLLP

SEQ ID NO: 233625 - protein, 54 aa, Glycine max
  Clone ID: PAT_MRT3847_5298C.1.pep
VFMHGSTLRNWLAFNSLATPKATKHLCHDPKDNLDDHDDGSNTSNNNNSALQYI

SEQ ID NO: 233626 - protein, 76 aa, Glycine max
  Clone ID: PAT_MRT3847_52990C.1.pep
NFYLVPELLPANVFYLKHFFLSGKNFFLGPPFLGIFVLNPFFFSLKKKKIFYPRCPKTKNFFFWGNIKKPGACWGD

SEQ ID NO: 233627 - protein, 78 aa, Glycine max
  Clone ID: PAT_MRT3847_52991C.1.pep
LRAINLKHNQASPLKHSYQIYELQNPVILPNFQQSTRYKFNHFNLSILNIKEIGKMSISSLSQILKLQPLFARLILDI

SEQ ID NO: 233628 - protein, 60 aa, Glycine max
  Clone ID: PAT_MRT3847_52992C.1.pep
ISVIAGIALPLSGAIVTLYHRDDADGAYRSDQPRVLCAITGESRGGEAGDDALRRELSGH

SEQ ID NO: 233629 - protein, 109 aa, Glycine max
  Clone ID: PAT_MRT3847_52993C.1.pep
FFLEPQSREDIENASQLRRGKPLKHGGLRKRGSGGGQKPSPLNQNGKRGFGPGCQKPNYGNKIWEMMGGTLNFGRKTSSLKTRTQGPETHLFWTPKKGHTLENQTDRWL

SEQ ID NO: 233630 - protein, 131 aa, Glycine max
  Clone ID: PAT_MRT3847_52994C.1.pep
LEGWCDVEHGGDGWRVEELPGDCGVEFIHDESVKKYFASSFEWCRKAQIIDLQAEGYWEELLDTTQPAIVVKDWYSGRRDAGCLYELTVKLLSEHEDVLAEFNSGQVAVPADSDDGGWTEISHTFTDYGPG

SEQ ID NO: 233631 - protein, 54 aa, Glycine max
  Clone ID: PAT_MRT3847_52995C.1.pep
MLPKIKMVKCLNESPRDSGAAKRVAELGGRRSYFNTDEKDVCQILNFAEEEEGQ

SEQ ID NO: 233632 - protein, 34 aa, Glycine max
  Clone ID: PAT_MRT3847_52996C.1.pep
NDYPSTTLLFNPTTRTQTTILKINLTHNIFLCLI

SEQ ID NO: 233633 - protein, 68 aa, Glycine max
  Clone ID: PAT_MRT3847_52997C.1.pep
TSMDIVRSLFIVAKHGSDRLLSNADYGRNRSNVNAIITSLVRYSLWVVPSLKSVWREVQCTGFIDLVS

SEQ ID NO: 233634 - protein, 43 aa, Glycine max
  Clone ID: PAT_MRT3847_52998C.1.pep
QFQSISPYYQIFLKLMTTSYHYTYLQLYSTISRHTKHSQIIHS

SEQ ID NO: 233635 - protein, 149 aa, Glycine max
  Clone ID: PAT_MRT3847_52999C.1.pep
MVGPIIRSLWSSTRKSFSSSSSSFSPSPPLSHSRFFSRAFAAAPATAPAAATTASSLDPSRLRNLAVIAHVDHGKTTLMDRLLRQCGADLPHERAMDSISLERERGITISSKVTSVSWKENELNMVDTPGHADFGGEVERVVGMVEGAI

SEQ ID NO: 233636 - protein, 329 aa, Glycine max
  Clone ID: PAT_MRT3847_5299C.1.pep
PRVRKKVTSFDRSVGNYASQKTASPRVPETDSSDGSGAHPPENQSFFSQGIGLQLAPPTQRLPVVSSYGSSETDHTTPHVSETRDKDHTWLGTNQTFPSLDPSHGELRSNISSTAGQIFDKASQYGMLGNIPQAFTSGFPFSRIHTQNQNLASLGGQVANTQSANVTFTASMNQTDEYCEKAPTSQSELASAQDMSQLSAIDEDRLRDPAIQILTAETGTQPSVTFSASLHGTPSKVTHNVWTSFSSKQHPNASRFLSQPQQINDCEMISSSQKPGDEGLEKDCNDHSGTGPCSAYSNNSVGNSLKEISVLQTLPESVVASEQAACSSH

SEQ ID NO: 233637 - protein, 57 aa, Glycine max
  Clone ID: PAT_MRT3847_529C.1.pep
CNTSHYTSEYFRVSLFYSFPLCRKLPNYNSYSSSMIKCPLNINSSFITILKLLIGIR

SEQ ID NO: 233638 - protein, 37 aa, Glycine max
  unsure (1)..(37): unsure at all Xaa locations
  Clone ID: PAT_MRT3847_52C.1.pep
SYGCPISATYDTXTVVSSLHIQKLPINLAMSMPSAEM

SEQ ID NO: 233639 - protein, 271 aa, Glycine max
  Clone ID: PAT_MRT3847_53000C.1.pep
MAAPRNVTATRDEEKGEEDDSPSAKKPKSERFPLNTWEFAVAVAVFFVFSTGLFCVYLSLPSAAYTNLKLPRTLSDLRLLKEHLSAYASNHPAQFILGYCSTYIFMQTFMIPGTIFMSLLAGALFGVVRGILLVVFNATAGASSCFFLSKLIGRPLVSWLWPEKLRFFQAEIAKRRDRLLNYMLFLRITPTLPNLFINLASPIVDVPFHIFFSATLIGLVPASYITVRAGLALGDLKSIKDLYDFKTLSVLFLIGFVSIAPTLLKRKRVYE

SEQ ID NO: 233640 - protein, 271 aa, Glycine max
  Clone ID: PAT_MRT3847_53001C.1.pep
MAAPRNVTATRDEEKGEDDDSPSAKKPKSERFPLNTWEFAVAVAVFLVFSTGLFCIYLTMPSAAYTNLKLPRTLSDLRLLKEHLSTYASNHPAQFILGYCSTYIFMQTFMIPGTIFMSLLAGALFGVVRGILLVVFNATAGASSCFFLSKLIGRPLVSWLWPEKLRFFQAEIAKRRDRLLNYMLFLRITPTLPNLFINLASPIVDVPFHIFFSATLIGLVPASYITVRAGLALGDLKSIKDLYDFKTLSVLFLIGFVSIAPTLLKRKRVYE

SEQ ID NO: 233641 - protein, 353 aa, Glycine max
  unsure (1)..(353): unsure at all Xaa locations
  Clone ID: PAT_MRT3847_53002C.1.pep
MAAEKLRDLSQPIDVPLLDATVAAFYGTGSKEERNAADQILRELQNNPDMWLQVMHILQKTQNLNTKFFALQVLEGVIKYRWNALPVEQRDGMKNFISDVIVQLSSNDASFRAERLYVNKLNIILVQILKHEWPARWRSFIPDLVSAAKTSETICENCMAILKLLSEEVFDFSRGEMTQQKIKELKQSLNSEFQLIHELCLYVLSASQRTELIRATLSTLHAFLSWIPLGYIFESPLLETLLKFFPVPAYRNLTLQCLTEVAALQFVNYYDVQYVKMYNIFMVQLQGILPPTTNIPGAYGQGSSEEQAFIQNLALFFTSXYKFHIRILESTPRDIAALLVGLEYVNHISYGDD

SEQ ID NO: 233642 - protein, 231 aa, Glycine max
  Clone ID: PAT_MRT3847_53003C.1.pep
MDLQQRPLKLHFIPYLSPGHVIPLCGIATLFASRGQHVTVITTPYYAQILRKSSPSLQLHVVDFPAKDVGLPDGVEIKSAVTDLADTAKFYQAAMLLRRPISHFMDQHPPDCIVADTMYSWADDVANNLRIPRLAFNGYPLFSGAAMKCVISHPELHSDTGPFVIPDFPHRVTMPSRPPKMATAFMDHLLKIELKSHGLIVNSFAELDGEECIQHYEKSTGHKAWHLGPAC

SEQ ID NO: 233643 - protein, 57 aa, Glycine max
  unsure (1)..(57): unsure at all Xaa locations
  Clone ID: PAT_MRT3847_53004C.1.pep
LIHSSHHLSSTLLFQNLTISIXIKTPHPTITIYTFLIQKIILKFPSILTNFINCIQS

SEQ ID NO: 233644 - protein, 273 aa, Glycine max
  unsure (1)..(273): unsure at all Xaa locations
  Clone ID: PAT_MRT3847_53005C.1.pep
RLDRSGTGSRQKRTPSISQGARITEHHVGPLDPTRPVSLMEIETRSRAQTPASSAVAVKARLKDVSNALMTSKELLRIINRMWGHEDRPSSSMSLISALHTELERARLQVNQLIQEQRSDQNEINYLMKCFAEEKAAWKKKEEEIVEAAIESVAGELDVERKLRRRLESLNKKLGRELADTKTSLLKVVKELESEKRAREIIEQVCDELARDADEDKSDIEKQKRVSTKVCEEVEKEKEIMQLTDRLREERAQKKLSDAXYQLEEKMPAVDKL

SEQ ID NO: 233645 - protein, 51 aa, Glycine max
  Clone ID: PAT_MRT3847_53006C.1.pep
MATEPKAAADEEQEAPGSRSFFTEIIASISDIKFGKDGRYILSRDYMTLKV

SEQ ID NO: 233646 - protein, 87 aa, Glycine max
  Clone ID: PAT_MRT3847_53007C.1.pep
GILTWYIKSFFKKKICTPGLVGPKISFLIFPPKIRLFSSFFLFFPLGPFFKGFYLFKAFVASNPIFPYCISSTLVFWRCHYPHHAYR

SEQ ID NO: 233647 - protein, 38 aa, Glycine max
  unsure (1)..(38): unsure at all Xaa locations
  Clone ID: PAT_MRT3847_53008C.1.pep
PRVSWSCXQLRXXXLGFLXXPXSPXXXPSIXNFIKXKL

SEQ ID NO: 233648 - protein, 61 aa, Glycine max
  Clone ID: PAT_MRT3847_53009C.1.pep
PRDHPRGSPTRFRRTRNRTGDRCIWMINGYQRNFFFFLGRREERTRLHKRRYGLGLILWGW

SEQ ID NO: 233649 - protein, 69 aa, Glycine max
  Clone ID: PAT_MRT3847_5300C.1.pep
KYVICNLRLWKSRFFIWGDTKLIALTSTVGRALLNGMEPIVLTPYVWRLRRGYSALEAANGRFCYWIRT

SEQ ID NO: 233650 - protein, 77 aa, Glycine max
  Clone ID: PAT_MRT3847_53010C.1.pep
GFPFCTLLATLPFCRILGSFRHLGPPAYSRPKLTYIPSFPIMGPIRAWPKNGYNCYPREIVIPIRFQRKYKQASCSL

SEQ ID NO: 233651 - protein, 70 aa, Glycine max
  Clone ID: PAT_MRT3847_53011C.1.pep
DWQNLQQLNYEIKMTNDFKRLIFLPKIKDKLAGDGCYLSILYHARILPLVDGDKFLFELVEGYEGPRRIG

SEQ ID NO: 233652 - protein, 68 aa, Glycine max
  Clone ID: PAT_MRT3847_53012C.1.pep
PVTGLFHLQVQIHTKQLSIILQNGLGSEIEKIIYSRSKPEMDHNLIMFPVTLLLIRIALKVVDYVFVT

SEQ ID NO: 233653 - protein, 39 aa, Glycine max
  Clone ID: PAT_MRT3847_53013C.1.pep
VGSNNYLVGNQKKIPLLKDEEPVNRKNRSFYVKLVAICV

SEQ ID NO: 233654 - protein, 48 aa, Glycine max
  Clone ID: PAT_MRT3847_53014C.1.pep
TERTFTNNTRNFFPKHYRDYAKYISYLQRYSERLTTILLACGDLPQQL

SEQ ID NO: 233655 - protein, 69 aa, Glycine max
  Clone ID: PAT_MRT3847_53015C.1.pep
HEKYKADLSPVNCKIEKGGKEQHIMYLPMSSSKASNSFLSKCKHDSTHIIVIRVKSEDLQNKNWKVTKS

SEQ ID NO: 233656 - protein, 96 aa, Glycine max
  Clone ID: PAT_MRT3847_53016C.1.pep
CKELAIAAAMNLSDSKVSHLNVSKNCQASSFSGIGKGIIICLHCRFLFFLFMPYLFLIFFSVEYICELKIIIISAKQMLDVSLITGLSKKCAVLFF

SEQ ID NO: 233657 - protein, 78 aa, Glycine max
  Clone ID: PAT_MRT3847_53017C.1.pep
GSFLKFVPSVFNSPGPPPAFGRSNTSLKLGVPPSGLLKRVWGHKFYPGGNSPDFDLFFLNGYVFGINHQGVPRVPFFG

SEQ ID NO: 233658 - protein, 92 aa, Glycine max
  unsure (1)..(92): unsure at all Xaa locations
  Clone ID: PAT_MRT3847_53018C.1.pep
GFGTGERFFLGTLNYRVKALHCRVTVRYLLRIIEHVEKVRVDAGEFKLGPIKWVECPKELRTKSSEGSLVGGSWLAESTLSCCAAVVXLVSV

SEQ ID NO: 233659 - protein, 82 aa, Glycine max
  Clone ID: PAT_MRT3847_53019C.1.pep
FGHIIFLISRMVITMSHSQVGVRIMSCCRPTRSCSQSQCPFAQGHVFAVALYLKKSSASTVVASPPVYPIWCRPHRSGSVPA

SEQ ID NO: 233660 - protein, 49 aa, Glycine max
  Clone ID: PAT_MRT3847_5301C.1.pep
KKPLKDISVATGVAEGTIRNSYKDLYPHVSKIIPSWYAKEDDLKNLCSP

SEQ ID NO: 233661 - protein, 46 aa, Glycine max
  Clone ID: PAT_MRT3847_53020C.1.pep
AQLNLYSKTHSQGMAVPLNHSYATHTQHRRHDYHDERPTAYPSPRN

SEQ ID NO: 233662 - protein, 52 aa, Glycine max
  Clone ID: PAT_MRT3847_53021C.1.pep
IIQDNPQILYASIVLRTMACRFGITVCAISSNSKHYSLLESLRLLFFFIGKC

SEQ ID NO: 233663 - protein, 74 aa, Glycine max
  Clone ID: PAT_MRT3847_53022C.1.pep
ETMGSNSILPIKKERYVDGGAFFHENPNTNRVPPKFNSQPNQRVPFYKNPGFLINRKLPSTTKNLKKRHSGGRG

SEQ ID NO: 233664 - protein, 38 aa, Glycine max
  Clone ID: PAT_MRT3847_53023C.1.pep
FQKEGAHNTLSTYKAAQHIPNTELPPTHPTTLNLALNY

SEQ ID NO: 233665 - protein, 104 aa, Glycine max
  Clone ID: PAT_MRT3847_53024C.1.pep
VKSTTPNHSSNDGIATPLSNNPALTSSNTEGPTSKLPHMSLNFTLLREINKLTVSLMKKSGSTGVGANYSKASKDSSTLIKTTTKASNNESQKHSSFTPITDPP

SEQ ID NO: 233666 - protein, 356 aa, Glycine max
  Clone ID: PAT_MRT3847_53025C.1.pep
MGKKKKRVSSKVWCYYCDREFDDEKILVQHQKAKHFKCHVCHKKLSTAGGMAIHVLQVHKESVTKVPNAKPGRESTDIEIYGMQGIPPDILAAHYGEEEDDVPSKAAKVDIPPTQLVGGMIPPPLGTGYPPRPTLPTMPPMYNPAVPVPPNAWMVPPRPQPWFSQPPAVSVPPAAPYTQQPLFPVQNVRPPLPATAPALQTQITPPGLPTSAPVPVSQPLFPVVGNNDTTTLNIQLMHIFFSVDANLRGYLSFTSIYHLIGVPVGVASNSHSYASGPNTGGPSIGPPPVIANKAPAPQPATNEVYLVWDDEAMSMEERRMSLPKYQVHDESSQMSSIDAAIDKRILESRLAGRMAF

SEQ ID NO: 233667 - protein, 321 aa, Glycine max
  Clone ID: PAT_MRT3847_53026C.1.pep
MGKKKKRVSSKVWCYYCDREFDDEKILVQHQKAKHFKCHVCHKKLSTAGGMAIHVLQVHKESVTKVPNAKPGRESTDIEIYGMQGIPPDILAAHYGEEEDDVPSKAAKVDIPPTQLVGGMIPPPLGTGYPSRPALPTMPPVYNPAVPVPPNAWVVPPRPQPWFSQPPVVSVPPAAPYTQQPLFPVQNVRPPLPATAPALQTQITPPGLPTSAPVPVSQPLFPVVGNNHTTTQSSAFSAPPLPSSVPSVTPVMSTNVPVDTHLSSNSSVTSSYQAIGVPGGAASNSHSYASGPILGGSFIGPPPVIANKAPASQPATNEVYF

SEQ ID NO: 233668 - protein, 300 aa, Glycine max
  Clone ID: PAT_MRT3847_53027C.1.pep
MMPSVNPDKDSEPFVETDPTGRYGRYSELLGCGAVKKVYRAFDQEEGIEVAWNQVKLRNFCDDPAMLDRLYSEVRLLRSLTNKNIIALYNVWRDEQRNTLNFITEVCTSGNLREYRKKHRHVSIKALKKWSKQILKGLNYLHLHDPCIIHRDLNCSNVFVNGNTGQVKIGDLGLAAIVGKNHCAHTILGTPEFMAPELYDEDYTELVDIYSFGMCVLEMVTVEIPYSECDNVAKIYKKVSSGVRPAALNKVKDPEVKAFIEKCLAQPRARPSAAELLRDPFFDEIVDDDDENDDCSCSYQ

SEQ ID NO: 233669 - protein, 186 aa, Glycine max
  Clone ID: PAT_MRT3847_53028C.1.pep
VRAKKHEGLSVAVIRVQAPGDNSGEQTRKDGGFETCSIFGIGTPSAWKSPWFFNTFLSSPRLDTEITIEDFGYFMSPGDRSYDALGLLKHISEQTAATYANAQEILGNETPKALPKDASENDKDKDHENNYPVNQSGNHSQLPSNALIERRTLDFSECETPGRDENSKSSAMSFSSPSSYLMKGCR

SEQ ID NO: 233670 - protein, 110 aa, Glycine max
  unsure (1)..(110): unsure at all Xaa locations
  Clone ID: PAT_MRT3847_53029C.1.pep
EKAGRFLALNWCNRGPLEELAHMSFNLHRSLFEELDGSXSYSYRTLTTLSLIVTEFEGSFSATSMLSSXLTDLLVVGTIEMTVQVHLWLFIPALIDRSVEKHGVKIEITK

SEQ ID NO: 233671 - protein, 57 aa, Glycine max
  Clone ID: PAT_MRT3847_5302C.1.pep
SPSPPNQQCCHTFKINQNLKNLEKQNMMPNHPCFPFIALLFNYFFLLVVSTYYASLS

SEQ ID NO: 233672 - protein, 130 aa, Glycine max
  unsure (1)..(130): unsure at all Xaa locations
  Clone ID: PAT_MRT3847_53030C.1.pep
FEANPTFSEEQLIDVGPGSGHEWQAPRQNDLRGPCPGLNAFVNHGFLPRNGYATISQFIDATTTVVGMGPILAAFLAVLGASIDGDGLSWSIHGTPXSVLVDHSHGSATALADSHYKYESDAFPTRIDLY

SEQ ID NO: 233673 - protein, 42 aa, Glycine max
  unsure (1)..(42): unsure at all Xaa locations
  Clone ID: PAT_MRT3847_53031C.1.pep
XKPMDFKYMIVXXXXKCYCKKGMGQXXQVGSKMSSXRXXXXS

SEQ ID NO: 233674 - protein, 210 aa, Glycine max
  Clone ID: PAT_MRT3847_53032C.1.pep
MKPNWELKNCCNHDQVVFLVTVAVCTVVILALRRTVLLRPFKLVTVFLHEASHAIACKLTCGHVEGIQVHADEGGTTQTRGGIYWLILPAGYLGSSFWGMVLILASTNLLTARIAAGCFIAALLIVLFIAKNWTLRGLCIGFISFLGVIWILQETTKVRILRYIILFIGVMNSLFSVYGVYLVELTRKARGLISFVFLCGAVYLGAVILS

SEQ ID NO: 233675 - protein, 343 aa, Glycine max
  unsure (1)..(343): unsure at all Xaa locations
  Clone ID: PAT_MRT3847_53033C.1.pep
MKNTERIANLALAGLTLAPLVVKVDPNLNVILTACLTVFVGXCYRSVKPTPPTETMSNEHAMRFPFVGSAMLLSLFLLFKFLSKDLVNTVLTGYFFVLGIVALSATLLPFIKRFLPKHWNEDLIVWRFPYFRSLEIEFTKSQVVAGXIPGTFFCAWYALRKHWLANNILGLAFCIQGIEMLSLGSFKTGAILLAGLFVYDIFWVFFTPVMVSVAKSFDAPIKLLFPTADSARPFSMLGLGDIVIPGIFVALALRFDVSRGKQPQYFKSAFVGYTVGLVLTIVVMNWFQAAQPALLYIVPSVIGFLAAHCLWNGDVKQLLEFDESKTANSSQEDADAKSSKKVE

SEQ ID NO: 233676 - protein, 158 aa, Glycine max
  unsure (1)..(158): unsure at all Xaa locations
  Clone ID: PAT_MRT3847_53034C.1.pep
PASVSYKVQVVAGIPGTFFCAWYALRKHWLANXILGLAFCIQGIEMLSLGSFKTGAILLAGLFVYDIFWVFFTPVMVSVAKSFDAPIKVKFFANEMEISVCLCVNFNCIFTMISDKKNVINLFLILSFKLFCSFYSPQQIQQGHFQCLALVILLSLVG

SEQ ID NO: 233677 - protein, 83 aa, Glycine max
  Clone ID: PAT_MRT3847_53035C.1.pep
KKPWFLGFSLIAHLLLQVYRIQHELVDMDLWLSVFLLHSLEGGLFLGFYQRKDSTFGPLYIRLIKNSHLVNDYLIISIHFRVM

SEQ ID NO: 233678 - protein, 76 aa, Glycine max
  Clone ID: PAT_MRT3847_53036C.1.pep
MKNTERIANLALAGLTLAPLVVKVDPNLNVILTASLTVFVGCYRSVKPTPPTETMSNEHAMRFPFVGSAMLLSLFL

SEQ ID NO: 233679 - protein, 58 aa, Glycine max
  unsure (1)..(58): unsure at all Xaa locations
  Clone ID: PAT_MRT3847_53037C.1.pep
QRNVISQIPXQVQELEYPGSAQAVEKLLKNQRESYFVDAQPKKKKEGNKGITGPLPSI

SEQ ID NO: 233680 - protein, 81 aa, Glycine max
  Clone ID: PAT_MRT3847_53038C.1.pep
EGIKRDSTKQLEHHNTKEMVMMKESIIEVKLGRSQMSMVEGEFQGTWGVKRRRREVAAAASSRDDNHHQQSPQQEVGENSS

SEQ ID NO: 233681 - protein, 50 aa, Glycine max
  Clone ID: PAT_MRT3847_53039C.1.pep
TGTLIKPRAATYIFSLTDTMTLHILLEIVKLIFRDRSYCFSSSTFVHWST

SEQ ID NO: 233682 - protein, 65 aa, Glycine max
  Clone ID: PAT_MRT3847_5303C.1.pep
SIVAAVIYIITQLSDDKKPPKDISVATGVAEGTIRNSYKDLYPHVSKIIPSWYAKEEDLKNLSSP

SEQ ID NO: 233683 - protein, 99 aa, Glycine max
  unsure (1)..(99): unsure at all Xaa locations
  Clone ID: PAT_MRT3847_53040C.1.pep
LLNQLKDLKAELAXLRVVKDTRRALYKLLQSKEVRLSIAHVLTDISQKQQAQLREAYKMKKYLALDLQPKKTRAIRXRITKHHXCLKTVREKTIELLFP

SEQ ID NO: 233684 - protein, 83 aa, Glycine max
  Clone ID: PAT_MRT3847_53041C.1.pep
RKYHTVLTAKNKSPGASKDFLCKCLQKAFNQKETSTALNRGNKSQQIELTQYKYRPFKCVFSSHCLQLYSKKMDFVHMKHNLE

SEQ ID NO: 233685 - protein, 61 aa, Glycine max
  unsure (1)..(61): unsure at all Xaa locations
  Clone ID: PAT_MRT3847_53042C.1.pep
VSCSLFCPALVGASVFGVSASFRCCVVRLSFLWGCLFXLXPWCLGGPALIHLWLFRXPFNG

SEQ ID NO: 233686 - protein, 57 aa, Glycine max
  Clone ID: PAT_MRT3847_53043C.1.pep
LRTRLSHSYVTSFDSKHRIIMTNFCMLYLVASSSKIQYDYGLFLKQLSLQYLNETKK

SEQ ID NO: 233687 - protein, 45 aa, Glycine max
  Clone ID: PAT_MRT3847_53044C.1.pep
LTRPVRPFFSFLVVNDLSFPFDFILFKNKPFKSSLQCILIQTRIY

SEQ ID NO: 233688 - protein, 183 aa, Glycine max
  Clone ID: PAT_MRT3847_53045C.1.pep
PRVRGRVGSENVPNLSDVTKKTKGRQKIEMKTIANKCSLQVTFSKHRTGVFKKASELATLCGVDLAVIMFSPNNHVYSFGSPNVDSVIQRYTTEGPPPLFTQDLNEAPCTMDEGELQAHLNCLSNQIDAEKQRVEDLNHLLMAAKDHIWWDVPIESMSNAQLEKYHKMLKEIKLKHMRHTHGE

SEQ ID NO: 233689 - protein, 152 aa, Glycine max
  Clone ID: PAT_MRT3847_53046C.1.pep
RPFNFKVLLFLFPLLSFITYGAILPNYEATAKNGPNETPKFQNNDLIGDKFMKCCKDNEISCSEVCTYPPPAFSFSEQWCMMTYISDFIKCYTGGHNNTECCEDHGVVGIYGACRDFCDGTQAYTMSPSYLVCGPVTNIISKCNRDSIKHND

SEQ ID NO: 233690 - protein, 49 aa, Glycine max
  Clone ID: PAT_MRT3847_53047C.1.pep
DSGRKLKQEMKIQGDKIRIQNDLMRWIMHTAVQFSNATTIRVLNPDKLT

SEQ ID NO: 233691 - protein, 63 aa, Glycine max
  Clone ID: PAT_MRT3847_53048C.1.pep
PGIFRVRLHCFPLLCSKLEEHSGLLSSITGSQNLMCLYPRERLCIADGRLLTALGHVQDMSHE

SEQ ID NO: 233692 - protein, 66 aa, Glycine max
  Clone ID: PAT_MRT3847_53049C.1.pep
KQYGLCYFQTVLITKNRLIKHWTLNPIYKHFLMPTPKFPTFVKRQLMKTHNMPILLLSMLTKSRQG

SEQ ID NO: 233693 - protein, 54 aa, Glycine max
  Clone ID: PAT_MRT3847_5304C.1.pep
CLSLLNGAQHIRFVYPHFSLTISGCDIGRVLCGDQCLVCTMQYNELCEGQYLNL

SEQ ID NO: 233694 - protein, 258 aa, Glycine max
  unsure (1)..(258): unsure at all Xaa locations
  Clone ID: PAT_MRT3847_53050C.1.pep
GYGASAVCPYLALETCRQWRLSNKTVNLMRNGKMPTVSIEQAQKNYCKXYCGAQIFEVYGLGKEVVDLAFRGSVSKIGGLTFDEVARETLSFWVKAFSEDTAKRLENFGFIQFRPGGEYHANNPEMSKLLHKAVRQKSQSAFSVYQQYLANRPVNVLRDLLEFKSDRAPIPVGKVEPASSIVQRFCTGGMSLGAISRETHEAIAIAMNRIGGKSNSGEGGXEDPIRWKPLTDVVDGYSPTLPHLXGLXHGDTXTSAIK

SEQ ID NO: 233695 - protein, 69 aa, Glycine max
  unsure (1)..(69): unsure at all Xaa locations
  Clone ID: PAT_MRT3847_53051C.1.pep
AXXFLXFRISXTGPTSXXXXLHITKDPDXHLNIXXNHKSSQLIIXXILTXXWXTXKLSEXAXIHEEXLF

SEQ ID NO: 233696 - protein, 920 aa, Glycine max
  unsure (1)..(920): unsure at all Xaa locations
  Clone ID: PAT_MRT3847_53052C.1.pep
RCKVILNLLDQAVELEPTPSVVXICLAVGTXVDQPLIQNGLRMXSASIVADTAQCFSTHQFACLIGYGASAVCPYLALETCRQWRLSNKTVNLMRNGKMPTVSIEQAQKNYCKAVKAGLLKILSKMGISLLSSYCGAQIFEVYGLGKEVVDLAFRGSVSKIGGLTFDEVARETLSFWVKAFSEDTAKRLENFGFIQFRPGGEYHANNPEMSKLLHKAVRQKSQSAFSVYQQYLANRPVNVLRDLLEFKSDRAPIPVGKVEPASSIVQRFCTGGMSLGAISRETHEAIAIAMNRIGGKSNSGEGGEDPVRWKPLTDVVDGYSPTLPHLKGLQNGDTATSAIKQVASGRFGVTPTFLANADQLEIKIAQGAKPGEGGQLPGKKVSMYIARLRNSKPGVPLISPPPHHDIYSIEDLAQLIFDLHQVNPKAKVSVKLVAEAGIGTVASGVAKGNADIIQISGHDGGTGASPISSIKHAGGPWELGLTESHQTLIENGLRERVILRVDGGFRSGVDVMMAAIMGADEYGFGSVAMIATGCVMARICHTNNCPVGVASQREELRARFPGVPGDLVNYFLYVAEEVRGILAQLGYEKLDDVIGRTDLFQPRDISLAKTQHLDLNYILSNVGLPKWSSTEIRNQEPHTNGPVLDDVLLADPEVADAIENEKVVNKTIKIYNIDRAVCGRIAGVIAKKYGDTGFAGQLNITFTGSAGQSFACFLTPGMNIRLVGEANDYVGKGIAGGELVITPVDKTGFEPEDAAIVGNTCLYGATGGQVFVRGRAGERFAVRNSLAEAVVEGAGDHCCEYMTGGCVVVLGKVGRNVAAGMTGGLAYILDEDDTFIPKVNREIVKIQRVSAPVGQMQLKSLIEAHVEKTGSTKGAAILKDWDKYLSLFWQLVPPSEEDTPEANAKYDTTTADQVTYQSA

SEQ ID NO: 233697 - protein, 66 aa, Glycine max
  Clone ID: PAT_MRT3847_53053C.1.pep
FLLFIFTPTLFNHISQQNSQPTLLQSNSNIIHIPLLNSLALDRNLLKSSINLNSLTLKKHLNLSQH

SEQ ID NO: 233698 - protein, 41 aa, Glycine max
  Clone ID: PAT_MRT3847_53054C.1.pep
SLCSVYKTMERACHVHVKCLGATLMLGVPITENNQAPPVNC

SEQ ID NO: 233699 - protein, 102 aa, Glycine max
  Clone ID: PAT_MRT3847_53055C.1.pep
LAKMLGGIVREIQLKICGAGEKVGSGKVLKIGEIKGGEKKRIFLALGARPHGYVGYSPLEGEIHECVRRPGETVVGVGDHKGDVSENGETPGGGGGGRNTSV

SEQ ID NO: 233700 - protein, 182 aa, Glycine max
  Clone ID: PAT_MRT3847_53056C.1.pep
KLMRSRLLPEGYQVRFIWSDEKKIWDSQFPKPFDVCQTYALCGANAICDFNGKAKHCGCLSGFKANSAGSICARTTRLDCNKGGIDKFQKYKGMKLPDTSSSWYDRTITTLLECEKLCLSNCSCTAYAQLNISGEGSGCLHWFSDIVDIRTLPEGGQNFYVRMATVTASELQLQDHRYSRKK

SEQ ID NO: 233701 - protein, 52 aa, Glycine max
  Clone ID: PAT_MRT3847_53057C.1.pep
LCFSLAGPEKTSTPSSWPLMSVMDLSIALVWPLGAETLSLFHLLETSFKHAS

SEQ ID NO: 233702 - protein, 234 aa, Glycine max
  unsure (1)..(234): unsure at all Xaa locations
  Clone ID: PAT_MRT3847_53058C.1.pep
MAMQTVYLKEHEGLVHSSVGQLSSVTSAPWWSALGSQPVYGEYCGQMKSFSLEISNYVDQFGAGKQAARGVEQLLDKGHTTQFTIFPDDCKMSGDAQNPQATLSLQSSLAEPHNRFEIGVNQPMICAKYPYMDQFYGLFSAYGPQISGRIMLPINLTSDEGPTYVNAKQYHGIIRRRQSRAKAVLENXMIKRRKPYMHESRHLHATRRPRGCGGRFLNTKSSTDGNGKNESEVI

SEQ ID NO: 233703 - protein, 71 aa, Glycine max
  Clone ID: PAT_MRT3847_53059C.1.pep
VYQKTEANAGGKNLVGTKTLPQTPIQQASYFKGPHSLNTKKIRAPHRKRGPIMPPNKKPIMGQVLLSKPTP

SEQ ID NO: 233704 - protein, 103 aa, Glycine max
  Clone ID: PAT_MRT3847_5305C.1.pep
KKNIGENFFFYEKIRIHQPLWLIQLSIWGGSLFYEKNLGLLLTLLKKNPQTLKKKKNLPKAFFSYPGPLNSLLTVGNWLDPPKNWGLGKRAFSPPHKLPFGHF

SEQ ID NO: 233705 - protein, 141 aa, Glycine max
  Clone ID: PAT_MRT3847_53060C.1.pep
HCFSATTAPPPSQELDLDNLKLLKVLGKGAMGTVFLVQDTTNTPFDLKVVDKTCVHAKLDAERRARWEIQVLSTLSHPFLPSLMGTLESPQFLAWALPYCPGGDLNLLRYRQTDRSFSPAVIRFYEAEIFCALDHLHSMGI

SEQ ID NO: 233706 - protein, 70 aa, Glycine max
  Clone ID: PAT_MRT3847_53061C.1.pep
MKEYHQGKVDSLRDIAFNETCYIAQGSPALSIDESTQARKFLQSWKRDVYPQRLASSRVIAGHWETSVHT

SEQ ID NO: 233707 - protein, 132 aa, Glycine max
  unsure (1)..(132): unsure at all Xaa locations
  Clone ID: PAT_MRT3847_53062C.1.pep
GANGLNLXEAQHVVLVEPLLNPAAEAQAISRVHRIGQKNKTLIHRFIVKDTVEESIYKLNRSRSNHSFISGNTKNQDQPVLTLKDVEALLSRAPLTMPESDENPNRDTNLRHLPPSVAAAVAAERRLNEQRT

SEQ ID NO: 233708 - protein, 55 aa, Glycine max
  Clone ID: PAT_MRT3847_53063C.1.pep
SPFQLFKIFTTLSAQTPTPYSRVFFFSFIQLVYQAFQDLKSGNQLNAINVFYLSH

SEQ ID NO: 233709 - protein, 25 aa, Glycine max
  Clone ID: PAT_MRT3847_53064C.1.pep
NLPPMISQSHISRYSLYVSAHRRNV

SEQ ID NO: 233710 - protein, 41 aa, Glycine max
  Clone ID: PAT_MRT3847_53065C.1.pep
TAALHIYLITMLNEQLPTFLEPLHFNTFINPHHLINQLNKN

SEQ ID NO: 233711 - protein, 60 aa, Glycine max
  Clone ID: PAT_MRT3847_53066C.1.pep
YVWTGHIQFIYAQKLHVTMFSESLNSSSCIQELLVVLFSTMSSPTVVHAPVLNTQTEPLY

SEQ ID NO: 233712 - protein, 224 aa, Glycine max
  Clone ID: PAT_MRT3847_53067C.1.pep
PRVRANPTIDGIRSVIQRIGSSKGGRPILWHNMREEPVIYINGKPFVLREVERPGKNMLVFKGIDRERVEKMEARLKEDILREAKQYGGAIMVIHETDDKHIFDAWEDVTSDVIQTPLEVFKSLEAEGLPIKYARVPITDGKAPKSSDFDTLANNIASAAKDTAFVFNCQMGRGRTSTGTVIACLVKLRIDYGRPIKILGDDVTHEESDRGSSSGDEAGGYVTT

SEQ ID NO: 233713 - protein, 69 aa, Glycine max
  Clone ID: PAT_MRT3847_53068C.1.pep
PAVRSSTTDHSVDGWVILERVSDDEFNNYKLVFCPQRAVDDKCVDIGISIDHDDGTRRLVVCKNELLVV

SEQ ID NO: 233714 - protein, 245 aa, Glycine max
  unsure (1)..(245): unsure at all Xaa locations
  Clone ID: PAT_MRT3847_53069C.1.pep
RFLTRLISSNYPLVFLSLALYLLSTVSSREVSEGQRGFSIDLIHRDSPLSPFYKPSLTPSDRIINTALRSIYQLNRASHSDLNEKKTLERVRIPNHGEYLMRFYIGTPPVERLAIADTASDLIWVQCSPCETCFPQDTPLFEPHKSSTFANLSCDSQPCTSSNIYYCPLVGNLCLYTNTYGDGSSTKGVLCTESIHFGSQTVTFPKTIFGCGSNNDFMHQISNKVTXNSXVLGSXXPLSLVSQLG

SEQ ID NO: 233715 - protein, 188 aa, Glycine max
  Clone ID: PAT_MRT3847_5306C.1.pep
MPPAKRKAEGTAAAAASSAAAPMRVTRAAAKRAAASSDPPPVPVVKKAAKKAKVAAAAKKQKRNEKENEDVPVESENKAEEKEEGGDASEKNVLDASNKTIVVEHCKQCNSFKTRANLVKVGLEKADIGITVILNPEKPRKGCCEKTTEGGGKKFITLLDLKRPFKPMKDLDMDKVISDIIEEISKTS

SEQ ID NO: 233716 - protein, 60 aa, Glycine max
  Clone ID: PAT_MRT3847_53070C.1.pep
IRPLSTLYSLRKGYLTSLTDCHFFYLFVFFTAADGGLGSFEKPAPSNNLERECKKKMDNK

SEQ ID NO: 233717 - protein, 125 aa, Glycine max
  Clone ID: PAT_MRT3847_53071C.1.pep
MNNMVHTFVVGDDQSTPYLDKLHSWLKRVGANVKAHISDNELCIEEEEKENISSVHSEKLAFAFGLIDSHHTPQILRIVKNLRMCRDCHDSAKYISLAYGCEIYLSDSNFLHHFKDGHCSCKDYW

SEQ ID NO: 233718 - protein, 51 aa, Glycine max
  Clone ID: PAT_MRT3847_53072C.1.pep
GLFQRRSRGLHRPMTRHMHHLIIITAHLDIQKTKTLNFKTLTRDKPIILLK

SEQ ID NO: 233719 - protein, 63 aa, Glycine max
  Clone ID: PAT_MRT3847_53073C.1.pep
PFGCFFFFFLFFKFKKLKRAHSSLTPERKLRGQVRGQPRFSLNGGTLCQQDKNHHSGGGAKIT

SEQ ID NO: 233720 - protein, 48 aa, Glycine max
  Clone ID: PAT_MRT3847_53074C.1.pep
FGHLCKIYTYSVILYYIGLHYDEVVMLNIYNFMVLYLVLILSLGFLGI

SEQ ID NO: 233721 - protein, 86 aa, Glycine max
  Clone ID: PAT_MRT3847_53075C.1.pep
ANWHPCQACHYLRCCVKPGFPPCLHALPLCAGTGYLNARNLLHYHPFYSQIRLLLVLHMTTYLWLPHYLIYTRVASLFRGSDNVLS

SEQ ID NO: 233722 - protein, 194 aa, Glycine max
  unsure (1)..(194): unsure at all Xaa locations
  Clone ID: PAT_MRT3847_53076C.1.pep
SIIFFVLFFCGATTTYYPSSIVDDLLHNEGGHLVEDGASYNMLDIITSCGVTTAPPAKDERSLTVVEPCTNLLKRRGATIISPPYLLCIIDGRHPCRQNDSSAAVMLRGGVTTTRCVVVDLPPGRAADTGDDNNAAVGGRILLRIAADEEHNNXLVVCSPHAADDDXCDDSVSIDHDDDTTRRVVVYHNTPVLH

SEQ ID NO: 233723 - protein, 123 aa, Glycine max
  Clone ID: PAT_MRT3847_53077C.1.pep
WRNVGAPQPYDQVPEYGIRIDFDIPVTRRCLQCQDPYKGGGTCGFDTGTQSFMCLCKEGNSPTHGKDYDATRHNRKVHVIAGTVSGVSAAGAFGIGAGIWYLKKVRAKAPVTCGVQSNENRLF

SEQ ID NO: 233724 - protein, 761 aa, Glycine max
  unsure (1)..(761): unsure at all Xaa locations
  Clone ID: PAT_MRT3847_53078C.1.pep
MHMASLGDIGLAAAINILSAFAFLLAFAILRIQPINDRVYFPKWYLKGLRSSPLQAGIFVSKFVNLDFKSYIRFLSWMPAALQMPEPELIDHAGLDSAVYLRIYLLGLKIFVPIAVLAFSVMVPVNWTNSTLERSNLTYSQIDKLSISNIPTGSNRFWTHLVMAYAXFTFWTCYILKREYQIVATMRLHFLASERRRPDQFTVLVRNVPPDPDESVSELVEHFFLVNHPDHYLTQQVVYNAKKLSSLVSKKKKRQNWLDYYELKYSRNQSTRPSKKTGFLGLCGNRVDAIDFYTDEIKRLSEEIELEKHKVMKNSKYTMPAAFVSFRTRWGAAVCAQTQQSRNPTVWLTEWAPEPRDVYWDNMAIPYVSLTIRKLIIAVAFFFLTFFFMIPIAFVQSLANIEGIEKAAPFLKSFIEMQFIKSFIQGFLPGIALKIFLIFLPAILMIMSKFEGFISTSALERRAATRYYIFQFINVFLGSIITGTAFQQLDKFIHQSANEIPKTIGVSIPMKATFFITYIMVDGWAGCAGEILRLKPLIFYHLKNFFLVKTEKDREEAMDPGTFGFNTGEPQIQLYFLLGLVYAVVTPFLLPYIIVFFGLAYVVYRHQIINVYNQEYESAAAFWPDVHGRIIFALVISQLLLMGLLSTKEAANSTPLLITLPILTISFHLYCKGRYEPAFVKHPLQEAMMKDTLERAREPNFNLKEFLQNAYIHPVFKGDDDSDSDVMSENWEEQEPVLVQTKRQSRKNTPLPSKHSGSLSS

SEQ ID NO: 233725 - protein, 243 aa, Glycine max
  Clone ID: PAT_MRT3847_53079C.1.pep
MEERKQSRYVKLTKDNVSMEDITPGELNQPIEVPQLAVHKCMECGQPLPESYTPPADEPWMTGIFGCTEDRENCLTGLLCPCVLFGRNVETLHEETPWTGGGPCICHAICIEGGISLAIATAAATSIFPAIEPGTVCLIIEGLLFTWWMCGIHTGQVRQSLQKKYHLKNSPCNACCVHCCFHWCALCQEHREMNGRLSDNIFSEMTVVNPPPVQEMKSTDDKETPETSSPNNIEHTELEIEAV

SEQ ID NO: 233726 - protein, 118 aa, Glycine max
  Clone ID: PAT_MRT3847_5307C.1.pep
EVRKQSWLATSLISVSMLNYARQIISVMFVVHHGQSPLSGASMATSFASDTGLSLLVGMASASYTFCAQSYGAMQHHMLCIHVQRAMLVLMIVSINLAFIWAHTRSILVALVQHPEIS

SEQ ID NO: 233727 - protein, 241 aa, Glycine max
  Clone ID: PAT_MRT3847_53080C.1.pep
MEERKQSRYVKLTKDQTPLEDITPGELNQPIQVPQLDVRKCPECRQPLPESYAPPADEPWMTGIFGCAEDRESCLTGLFCPCVLFGRNVERLKEDTPWTGPCICHAICIEGGISLAIATAAATSIFPAIEPGTVCLIIEGLLFTWWMCGIHTGQVRQSLQKKYHLKNSPCNACCVHCCFHWCALCQEHREMNGRLSDNIFSEMTVVNPPPVQEMKSTDDKETPETSSPNNIEHTELEIEAV

SEQ ID NO: 233728 - protein, 52 aa, Glycine max
  Clone ID: PAT_MRT3847_53081C.1.pep
HPTISIHPHLLHQLMKKMFISLNIKPLINLTSIKLTLFSEPNETNPSLPYFN

SEQ ID NO: 233729 - protein, 137 aa, Glycine max
  Clone ID: PAT_MRT3847_53082C.1.pep
PPHFFFLGKGPPPRKNQVFRGGLKPLGMERPRFFGFGFLRIVSPQKSFFSKKSRLTLCRGCFPPRLVRTRGGGGGFFNKGGGPPLFLPKKGGGLVSHLKKGGPLGWGGINKLNGKNFFFQKKFFFLKLGPFFYIIFF

SEQ ID NO: 233730 - protein, 54 aa, Glycine max
  Clone ID: PAT_MRT3847_53083C.1.pep
FNLIFEWCNPLTLNLNHNYTMMFKIQNCIQFQNTHTHLCKALATYSMQCNAESK

SEQ ID NO: 233731 - protein, 119 aa, Glycine max
  unsure (1)..(119): unsure at all Xaa locations
  Clone ID: PAT_MRT3847_53084C.1.pep
MWNTWSCDHSLPLGRGRGLATWSTPSDSYRDIITCPFVNVALGSKDRTSDGREYGGXVSENCVAHMLSAGTYSDDAAEATEVVSYAVQDQDVPRCSTGLYKXSPTGTWRLSFSNDETLP

SEQ ID NO: 233732 - protein, 227 aa, Glycine max
  Clone ID: PAT_MRT3847_53085C.1.pep
MQSSISLSSSYAPTISGPRHSFPLSGRTLAPSNLRFCGLRRQAFTSTPLNHHFRLRRRRLPHSAAVSAALCDNGTLPTSSYMLIQLCLRCLMSYLHAVEKGLKTAIVEGDVVGGTCVNRGCVPSKALLAVSGRMRELRNDHHLKSLGLQVSAAEYDRQAVADHANNLASKIRGNLTNSLKALGVDILTGFGTILGPQKVKVVSSNNVVTAKDIIIATGSVPFVPKGH

SEQ ID NO: 233733 - protein, 121 aa, Glycine max
  unsure (1)..(121): unsure at all Xaa locations
  Clone ID: PAT_MRT3847_53086C.1.pep
XSKXTXXXPYXXRXXTXXLXNXXXLXEHXTXPXTGSTSXXXQXNXXITEXXXXXSYNXXDXXXFXLRGXSXXXGTDXFXXPHGAGMXKTPVMTXVINPXEEVXRNFKTGNNXSPSSXKSIX

SEQ ID NO: 233734 - protein, 56 aa, Glycine max
  unsure (1)..(56): unsure at all Xaa locations
  Clone ID: PAT_MRT3847_53087C.1.pep
AFXHINFILYNLHSSIKRGXIFXDIYLKFGINVKKYHMSGKXFYKGRFPLXXXGGD

SEQ ID NO: 233735 - protein, 84 aa, Glycine max
  unsure (1)..(84): unsure at all Xaa locations
  Clone ID: PAT_MRT3847_53088C.1.pep
RTSPRRTDKKGHGNHKGGNREAKRKRGKSGAQRKEGXRSRKQEKPPKRKKRRREKAPKKKKQDKTGKRGQHKSTKKAGERPKKK

SEQ ID NO: 233736 - protein, 111 aa, Glycine max
  Clone ID: PAT_MRT3847_53089C.1.pep
MCDRSSPLRNTMELTAQQLSQYNGTDPSKPIYVAVKGRVYDVTSGKSFYGPGGPYAMFAGKDAGRALAKMSKNDDDISPSLDGLSDKEIGVLNDWENKFQAKYPVVARLLN

SEQ ID NO: 233737 - protein, 64 aa, Glycine max
  Clone ID: PAT_MRT3847_5308C.1.pep
RRFLSAVISSSLRRISTFRSRLGSMVLIRMREFPYLEAVHPFHEGRSMEISKIPSSILQVVPSS

SEQ ID NO: 233738 - protein, 42 aa, Glycine max
  Clone ID: PAT_MRT3847_53090C.1.pep
GGIICRDGSEFDQREALEELQKVITFLSNSRFRRIIYQDARH

SEQ ID NO: 233739 - protein, 90 aa, Glycine max
  Clone ID: PAT_MRT3847_53091C.1.pep
ARAKHLREAIVKSELPTFPTTRHTSVSNTTYYQFNSDTATPHEKRDQQQQRSGGCETQGPLIVKERLSTAYYRLEKMAMTYHIGLLDDRK

SEQ ID NO: 233740 - protein, 110 aa, Glycine max
  Clone ID: PAT_MRT3847_53092C.1.pep
FLKYCSINITFHEPKRRRISLCRLSLFELELRCCCHGGSATQRLVGLIAAGTYLMVSLYHLKPCYCASSRVSIMRRQKLQYLDIYDCLHYLPLCFYESIIINFLINIKKK

SEQ ID NO: 233741 - protein, 164 aa, Glycine max
  Clone ID: PAT_MRT3847_53093C.1.pep
AENLLQLQHRTQKCTLGCPVLDRCLAGGVPCASVTEFVGESGCGKTQLCLQLALSAQLPPSHGGLSASSIFIHTEFPFPFRRLRHLSRAFRASHPDLPCSDPCDRVFLRAVHSAHELLNLIPTIETFLLHSKSPWRPVRIIVIDSIAALFHSDFQNTGSDFRRR

SEQ ID NO: 233742 - protein, 41 aa, Glycine max
  Clone ID: PAT_MRT3847_53094C.1.pep
KQLPNYSHLKFLYHTFSIFPTLSSNKIYCLLLSFSFHGKLT

SEQ ID NO: 233743 - protein, 88 aa, Glycine max
  Clone ID: PAT_MRT3847_53095C.1.pep
YNFFFMNFVLYIKVKYIISNLPHLYRKNKIMKKSVNNQFIKWIYIIIKRHYSNVVITVLIILINALTYVINVRSFVSLQVNIAWENVS

SEQ ID NO: 233744 - protein, 82 aa, Glycine max
  Clone ID: PAT_MRT3847_53096C.1.pep
GLGSECNKVAKFLVRLRFDLIIIVQRETLIKGDYEVELLEVQLRILLGELSCLAMDPTVLPINKCFCGSLVASISGELHLPL

SEQ ID NO: 233745 - protein, 57 aa, Glycine max
  Clone ID: PAT_MRT3847_53097C.1.pep
FFGDRPFFGEGALCKRVFGFKVVADGIFILRFGRLLKFYPPSLMVWPKIILYGGPPI

SEQ ID NO: 233746 - protein, 77 aa, Glycine max
  unsure (1)..(77): unsure at all Xaa locations
  Clone ID: PAT_MRT3847_53098C.1.pep
DLEKSVPTLVGIECPKGEKLPRRKIFDKPKTQWLTILPMWFDLVVRXKILHFVRFSMRIGGXLNCHGGITPYSMELT

SEQ ID NO: 233747 - protein, 95 aa, Glycine max
  unsure (1)..(95): unsure at all Xaa locations
  Clone ID: PAT_MRT3847_53099C.1.pep
FPARSHQNXCICQFISPQNLRSIVVKMPLHILFLGIHGFACSCGIPHTCQCITINFGLSDSTLMCHPLPNTSTHHVKFGSIRIVLDDPILHQFPG

SEQ ID NO: 233748 - protein, 133 aa, Glycine max
  unsure (1)..(133): unsure at all Xaa locations
  Clone ID: PAT_MRT3847_5309C.1.pep
STFTILFSLAQERDMPVHASLPEIIWXGGWSDTPFPSAWPELPSPLPACVGIDQLPXKLMVHTPHPHSSFYKNYLHXKTMNVQFTQRAYARTYGGCTCMADIYDTXSKDRYLYXICIHQETIEGGKKICASSM

SEQ ID NO: 233749 - protein, 189 aa, Glycine max
  Clone ID: PAT_MRT3847_530C.1.pep
MMACSSSTMQSVYPRVSGANFHVPLSSPSLVPIYNNNLSFSKLRNSIHLAAVPLPPLTKASAGNGGPTDEGVSLGTMKLPLDTDLQRFDSLLFQWANSLCQGANLPLPVPLKVDKIPGGARLGFITIGDGKTEVLVHIDCLVFPPTENSAPIFRAIRNGPLKDKAPPGEPRIMRSLLQALQKSVEIARL

SEQ ID NO: 233750 - protein, 52 aa, Glycine max
  Clone ID: PAT_MRT3847_53100C.1.pep
FWKACSDMCFMILQFYTFQIYLMWYSKLITYVSSSQCFKFQLKWFDIRINKY

SEQ ID NO: 233751 - protein, 127 aa, Glycine max
  unsure (1)..(127): unsure at all Xaa locations
  Clone ID: PAT_MRT3847_53101C.1.pep
SILLESKNLPPSPAYALPLIGHTHVIKEPLHTKATQXSQTNMGPTYLICLGTRRVTRCDLTYQQSKRCLHXNDISFANQSHTLGGQHLNYNKNTIRRDSYGHYWRNLPCLTTAELEATTRLAMLTSA

SEQ ID NO: 233752 - protein, 52 aa, Glycine max
  Clone ID: PAT_MRT3847_53102C.1.pep
LPQSSDVRKSDFNEVKSFVVLYSRIRIQHLVAQKGKENERCMGMRRHEVMVA

SEQ ID NO: 233753 - protein, 47 aa, Glycine max
  Clone ID: PAT_MRT3847_53103C.1.pep
LQFYINTPPHHIHSSLIYFPTKLVSKTNLTTFNYLYLTKSSTSQPSK

SEQ ID NO: 233754 - protein, 132 aa, Glycine max
  unsure (1)..(132): unsure at all Xaa locations
  Clone ID: PAT_MRT3847_53104C.1.pep
LFTRPGLPMGPYFVGDLTFEVSKMTCPYNKCTASFWTAFGSKDDDAIDCEATAHMLVHFAEIQEKVDLNISHKESLTAWTTHVRPATTLLAEGCPYLNAMVHDTPSSTIPDDLGIGVXLWTINNLCAFGLNP

SEQ ID NO: 233755 - protein, 161 aa, Glycine max
  Clone ID: PAT_MRT3847_53105C.1.pep
MAQDILRIIPTLLSAASIAVMVTNNQTVLIFAIRFQAHFYYSPSFKFFVAANGVVVALSLLTLVLNFLMKRQASPRYHFFLFLHDIVMMVLLIAGCAAATAIGYVGQFGEDHVGWQPICDHVRKFCTTNLVSLLLSYFAFISYFGITLLSAYKIVSSSPKN

SEQ ID NO: 233756 - protein, 95 aa, Glycine max
  Clone ID: PAT_MRT3847_53106C.1.pep
FFPKREGGLKNGFKRGGFKGAIQPPGGLGFLIANPNRGPVLVIFWGIFQDFEMVGNIFMPPFFVPQASASFFENREPSACCGIRVFFRWLVGLFQ

SEQ ID NO: 233757 - protein, 76 aa, Glycine max
  unsure (1)..(76): unsure at all Xaa locations
  Clone ID: PAT_MRT3847_53107C.1.pep
IEVCGPNKGFAMWSSEWANQNXWRLSFIVGDPSQCAVFDIFLGVSHDFEIAGNTLMPAFSVPPAFARFFENAGSSA

SEQ ID NO: 233758 - protein, 70 aa, Glycine max
  Clone ID: PAT_MRT3847_53108C.1.pep
RGVYDKSKNVVSMSMSHIYNVRRGCIHRLFECSHCVLFQRCIYCVLEDKAYILRNKVLSRGIIVIVLWRV

SEQ ID NO: 233759 - protein, 57 aa, Glycine max
  Clone ID: PAT_MRT3847_53109C.1.pep
LVSMPCVAYEITFPFILQQTYFSHQGLLAYTQRYCSLEPYTFTRFKRNLHACLYNFV

SEQ ID NO: 233760 - protein, 135 aa, Glycine max
  unsure (1)..(135): unsure at all Xaa locations
  Clone ID: PAT_MRT3847_5310C.1.pep
RVHSKALISLYPIRYVTPLHGFLQSGGRRNLASSSLSDFRSLTNGTNTSYVRNKXSNLSRSFISKPTYKDVIEIDLSTTNSCTFCYQXKNPKYIDNSXXAQTTPSVVAFNQKSDLLVITPAKRHTXTNPTNTLFG

SEQ ID NO: 233761 - protein, 78 aa, Glycine max
  unsure (1)..(78): unsure at all Xaa locations
  Clone ID: PAT_MRT3847_53110C.1.pep
PKEDHXLKLHRRFPKSRQNKHTEKEIMDDLAENNSHLLHRTPKRKQAKCMEEDDKPEVVERGSKDEKHKEDDQEEGKG

SEQ ID NO: 233762 - protein, 138 aa, Glycine max
  Clone ID: PAT_MRT3847_53111C.1.pep
MARKLSIVVLCIVQMLLLLVENDAEIVVSTVEAPAPQPHKNTTHTLSSAPAPLPHTNTTKSHVPNLQHGITEGSLKPQECGPRCTARCSNTQYKKPCLFFCQKCCAKCLCVPPGTFGNKQVCPCYNNWKTKRGGPKCP

SEQ ID NO: 233763 - protein, 41 aa, Glycine max
  Clone ID: PAT_MRT3847_53112C.1.pep
TFLNHLLNLITTTIIIIIFSNLYNLQSLKTLPLNQINLPIY

SEQ ID NO: 233764 - protein, 137 aa, Glycine max
  Clone ID: PAT_MRT3847_53113C.1.pep
MARKLSIVVLCLVQMLLLLVEVCPGYDVLEDKKRRTQPHKNTTHTLSHAPAPQPHKNTKSPVPNLQHGITEGSLKPQECGPRCTARCSNTQYKKPCLFFCQKCCAKCLCVPPGTYGNKQVCPCYNNWKTKRGGPKCP

SEQ ID NO: 233765 - protein, 87 aa, Glycine max
  unsure (1)..(87): unsure at all Xaa locations
  Clone ID: PAT_MRT3847_53114C.1.pep
CFQTPXNLRTLFPQTLLWKNSITLSSVNLRPLVFFHRLPFLVLRPSTIRGLPYAMPSSFAHPPSCQTVNPKHSLCSTNPCSYVYDIF

SEQ ID NO: 233766 - protein, 81 aa, Glycine max
  unsure (1)..(81): unsure at all Xaa locations
  Clone ID: PAT_MRT3847_53115C.1.pep
NTTQSWTNLGAXLALNSNINMAIPYPYFIATDKVAMDAGLLHPLSLSVILTHDHLMKIQRPQGPAVPKVRSGPRPRHRLHR

SEQ ID NO: 233767 - protein, 38 aa, Glycine max
  unsure (1)..(38): unsure at all Xaa locations
  Clone ID: PAT_MRT3847_53116C.1.pep
THHLLEALLTSKXXXFLXXXHQLDTSDLFXVRIPXXME

SEQ ID NO: 233768 - protein, 139 aa, Glycine max
  Clone ID: PAT_MRT3847_53117C.1.pep
HGKFKNTTSQVLFPNFKRSYPKIFTTLKSTTFCPTNCFKDHFGSQIRWPKYGTPQILEGTAPQGKPLLPKQTNKQRAQPLDHESNPPPQRKPLKQKHFLNQHDHWFQKPTDYYKGPLSAKKALPEELPESEFDKRGRGV

SEQ ID NO: 233769 - protein, 130 aa, Glycine max
  unsure (1)..(130): unsure at all Xaa locations
  Clone ID: PAT_MRT3847_53118C.1.pep
CIGALRTSXCQHMFKEKEQVFPLVIEKFSSEEQGSLVWQFLCSIPVKMMAEFLPWLASYISSDEYQGLLSCLCTIIPKEKLLHQVIFGWMEGLKIKHRKCTHDTKVQWKDVGMSNLLSHNEKVYSICGSS

SEQ ID NO: 233770 - protein, 122 aa, Glycine max
  Clone ID: PAT_MRT3847_53119C.1.pep
GLTLRNFGPKKREEHGGSSRFSFGSSFRKTGKYVKEEEFLIEKGAEDSDGNQKGYHKHNHRITISDVVFKHRWSNVSSSDLMFLNSEMLNDASSNRFSNLESNADMMSSTRRVVENEQIMNI

SEQ ID NO: 233771 - protein, 110 aa, Glycine max
  Clone ID: PAT_MRT3847_5311C.1.pep
GPLLGAGFVVAGFRGPAPPQEKEEKKASSSMPMREPTPPAGFGAGSTNPVFQICPLDVIIKVLVLTVLFGGDHVSLDVGMVKEKGGLAKWLIKFKRYLGVGWNLDILFSD

SEQ ID NO: 233772 - protein, 87 aa, Glycine max
  unsure (1)..(87): unsure at all Xaa locations
  Clone ID: PAT_MRT3847_53120C.1.pep
MTKSAELSQGNGGVSIPTPISQSGPQEQNQRFQGGSGNMIFKSGPLLISSKGIGWTSLKXRWFILTQTSLVFSEVIKCLPSEGNESE

SEQ ID NO: 233773 - protein, 108 aa, Glycine max
  unsure (1)..(108): unsure at all Xaa locations
  Clone ID: PAT_MRT3847_53121C.1.pep
KEFLKTLSGKKEPLIFPTITETRPSHACFELALGEIYGGDLXIFNPAPIEAFFRFGKKLQRFDHELRRKNKDETMGTRFGPGKMPYALPNPCSEEGFTLRGLTSGIFI

SEQ ID NO: 233774 - protein, 135 aa, Glycine max
  unsure (1)..(135): unsure at all Xaa locations
  Clone ID: PAT_MRT3847_53122C.1.pep
CPQARXLRFKCKVRHGPGFYDCSLQMEVEADGQCHSXFVRISEDDQXGLAAGQXAAFYEGRXXAXGSGVILEFWDDQXFPVCTKALEIARMEDKSKIGNPVKIKVKPDNPQEVCDSAELASKTSQGNKKLKSCWH

SEQ ID NO: 233775 - protein, 46 aa, Glycine max
  Clone ID: PAT_MRT3847_53123C.1.pep
IIFIVFVLSVYTSFLNLPSLIFNLLLIYLTFMCTCIVVKWLLCVMA

SEQ ID NO: 233776 - protein, 61 aa, Glycine max
  Clone ID: PAT_MRT3847_53124C.1.pep
YAHHGYFKEAINLFNEMQELGVCANDVTFVGLLTACIHTGLVEEGFKYFDEILKNRSIQLR

SEQ ID NO: 233777 - protein, 57 aa, Glycine max
  unsure (1)..(57): unsure at all Xaa locations
  Clone ID: PAT_MRT3847_53125C.1.pep
NVILNSRLDAGTNCLYIDAKIVLMFCPKYHFGECFFMHFWNIFXNGNSGRNMGIGEV

SEQ ID NO: 233778 - protein, 106 aa, Glycine max
  Clone ID: PAT_MRT3847_53126C.1.pep
AIINVFLFSSFLKKKKKKKKKKKKKKKKKKKKKKKKKKKKKKKKKKKKKKKKKKKKKKKKGGALLGNKVLLPGACKKKLFFWGPKIKFPGRGFKKGGWGKTWGYPN

SEQ ID NO: 233779 - protein, 55 aa, Glycine max
  unsure (1)..(55): unsure at all Xaa locations
  Clone ID: PAT_MRT3847_53127C.1.pep
STTMSSIRATLPESELGSSPQPHIMCAILFGILLFCAWTKXLMVVVNCYCSDQVP

SEQ ID NO: 233780 - protein, 76 aa, Glycine max
  Clone ID: PAT_MRT3847_53128C.1.pep
MAATFMAATTSSGTLKATPFLGQGKGANANALRDVVSMGTGKYTMVLFFFLFYVLLSQKFYGVDYVVWLICYVGLC

SEQ ID NO: 233781 - protein, 61 aa, Glycine max
  Clone ID: PAT_MRT3847_53129C.1.pep
FIFLQHDSPTPPLVIGHNKDTLEITDNVTQGPVMITRSSEKFLILFREKRESGNAGWMRGG

SEQ ID NO: 233782 - protein, 189 aa, Glycine max
  unsure (1)..(189): unsure at all Xaa locations
  Clone ID: PAT_MRT3847_5312C.1.pep
PRVRRSSEGLNRQRGFQVTESSFWVPFVRGPVLSILDVSPLDLIRRYVDDINSAAQEFRKRYIESGSSDSPVQKEPLFPVSSPGAEANGEISRGTISRAVNAVSPSTGKQRPKKTLAAMLVESTKKQSIALVQKEVAKLAXRFLALFNPALFPHKPPPAAVVNRILFTDSEDELLAXGSMEYXTDWKAI

SEQ ID NO: 233783 - protein, 91 aa, Glycine max
  Clone ID: PAT_MRT3847_53130C.1.pep
RLMATVSIKVVGCPANTYPNFWVTHHVWARLPQIFGEFLGLTPHDSDPLQTATNPTFYTSFTLYLIPSLHSYGGCYTWSSAPPLPQPSPPP

SEQ ID NO: 233784 - protein, 70 aa, Glycine max
  Clone ID: PAT_MRT3847_53131C.1.pep
LQSKSILIISTMKPNTLLISFLTKKKCPKENGRERGGKELREVNFFSKSSFTLFFKKIFFFFFFFHKNQN

SEQ ID NO: 233785 - protein, 64 aa, Glycine max
  Clone ID: PAT_MRT3847_53132C.1.pep
VFLFVFFFFFFSPKNSKHIRDGHNIQCFFTADIARTYKTPLNSSIHPFFFFAPKTYPYPIYSHS

SEQ ID NO: 233786 - protein, 66 aa, Glycine max
  Clone ID: PAT_MRT3847_53133C.1.pep
YRNGSNVKGYYVWSLFDNFEWSSGFTSRFGMIYVDYKNDLKRYKKFSALWFENFLKKETKLYGSSK

SEQ ID NO: 233787 - protein, 207 aa, Glycine max
  Clone ID: PAT_MRT3847_53134C.1.pep
MGETGIIVSFQGNLDPRAEEFRPLNLQCQWYPLPLPTPLSTSSTRSLLLTPLPFASHSALRAELQAFGDIRALQTDSLRHGILTVHFFDLRHAESAFAAIRSMHLHFPQFLLSAHPISAHYVLPSSNAFPDAHNQGTLVIFNLHPNLSTVQLRRLFQPFGPIKELRDTPWKKNQRFVEFFDIRDAAKALKHMNGKEIHGKQVVIEFS

SEQ ID NO: 233788 - protein, 526 aa, Glycine max
  Clone ID: PAT_MRT3847_53135C.1.pep
MGETGIILSFPGNLDPRAEEFRPNTINIQCQWYPLPPPLPLPLPIPLPPPNLTTSSTRSLLLTPVPLTSHSALRAELQAFGDIRALQTEALRHGILTVHFFDLRHAQSAFAAIRSMQLHFHPNPGLLSAHYVLPNSNSLPDSHNQGTLVIFNLHPNLSSDQLRRLFQPFGPIKELRDTPWKKNQRFVEFFDIRDAAKALKHMNGKEIDGKQVVIEFSRPGGHTRKFFHHHSKTTVPPLNFNAPRLHSSQKKSPGSPSNSTGSIDAEMGSMSLTGGEVEEQHSSSQGPTRRNLGRKHTTLVVGNTKQQQVPRSRHWKGKQAKKHETRFLIKEDAIVESGPKDTRTTVMIKNIPNKYSQKLLLNMLDNHCRHCNEQIADGDEQQPLSSYDFVYLPIDFNNKCNVGYGFVNMTSTEATLRLHKAFHLQHWEVFNSRKICEVTYARVQGLEALKEHFKNSKFPCEMEHYLPVVFSPPRDGKELTEPLPIVGNKQQQQAISSGGGGSGSVGDDDETNEEVGSSVVILKDSI

SEQ ID NO: 233789 - protein, 336 aa, Glycine max
  Clone ID: PAT_MRT3847_53136C.1.pep
MGRQPCCDKVGLKKGPWTAEEDKKLISFILTNGQCCWRAVPKLAGLLRCGKSCRLRWTNYLRPDLKRGLLSEYEEKMVIDLHAQLGNRWSKIASHLPGRTDNEIKNHWNTHIKKKLKKMGIDPATHKPLPNANEQNQNQTRQDQQLHHQPVELEEPNQQPLQVDFDPKVDPNKEPEKPETSLESSTITEEAKEEDQIITPLFDTMELMNGFCTDEVPIIEPHEILMPCAPSSSSTTSSSSSSNSTNFLEDLQLPDFEWSCNYNDNNTITNNNNNEDKDDDNNNNSSMALWDDDIIGNRYWLINEDDDSDENQVFDASLTQFSKMFMESESWGYGLF

SEQ ID NO: 233790 - protein, 79 aa, Glycine max
  Clone ID: PAT_MRT3847_53137C.1.pep
MSRARVYCDVNETRPREYWDYETLNVAWGDQDNYEVIRKIGRGKYSEVFEGYNVASNSRCVIKILKPVKKKKIKRYVCL

SEQ ID NO: 233791 - protein, 104 aa, Glycine max
  Clone ID: PAT_MRT3847_53138C.1.pep
ERRDLQYVVSDGADLSRSNSVVTGRKLGVLNVNRYYLEWGVFIYYYKVGRYIHSGIYVEIYIYYFFFLYLSTFIYIPFYHLLTTMQAHKQAHKQAHKSAQRFQA

SEQ ID NO: 233792 - protein, 70 aa, Glycine max
  Clone ID: PAT_MRT3847_53139C.1.pep
NFPSVNFFERSFLFVVKVASSLFNYGPRNFFCGFSPCFFMGGGPCIDWNRSLYLIKESCNNMDRISKTPP

SEQ ID NO: 233793 - protein, 39 aa, Glycine max
  Clone ID: PAT_MRT3847_5313C.1.pep
EVGERSRMRCSMLYNPAEAAYSITVHGNNTYHIQCHHSK

SEQ ID NO: 233794 - protein, 65 aa, Glycine max
  unsure (1)..(65): unsure at all Xaa locations
  Clone ID: PAT_MRT3847_53140C.1.pep
RIYGVLILATLFQFNGLYITFVNTEYNHKRLIKVDALICLLAFIDYXFETIPDATTLERTVCRTG

SEQ ID NO: 233795 - protein, 48 aa, Glycine max
  Clone ID: PAT_MRT3847_53141C.1.pep
LRFNVRSVFLRITRLWVLGFVSSSPWSIKDWNLTFWTMLKDSESIAKV

SEQ ID NO: 233796 - protein, 86 aa, Glycine max
  Clone ID: PAT_MRT3847_53142C.1.pep
PARPVQGFVFLSRGRFFWGPRIQTVFPPWRSFLVQTKHNVKGFTIQPQLAVHNQAVCRVHIVVPCIPPSCVKVAVGVMVDFVMFLV

SEQ ID NO: 233797 - protein, 83 aa, Glycine max
  unsure (1)..(83): unsure at all Xaa locations
  Clone ID: PAT_MRT3847_53143C.1.pep
EVITPLRSAALNPRXKIPCKRICKTSICSQTARXLYRFXTSPTDDLFMGFSQVGSTSALCATGEEKLWLRAHSATSSVDDGGC

SEQ ID NO: 233798 - protein, 103 aa, Glycine max
  Clone ID: PAT_MRT3847_53144C.1.pep
QVKCYMKQLLSGLEHCHSRGVLHRDIKGSNLLIDNEGILKIADFGLATFFDPKQKHPMTSRVVTLWYRPPELLLGSTSYGVGVDLWSVGCILAELLTGKPIMP

SEQ ID NO: 233799 - protein, 64 aa, Glycine max
  Clone ID: PAT_MRT3847_53145C.1.pep
KCFFFWFKRQTVATSNMSIMFFSKVTYTLFFDHFFISRQPFTSYNQNQQHYLYAYIKYYVQKFV

SEQ ID NO: 233800 - protein, 58 aa, Glycine max
  Clone ID: PAT_MRT3847_53146C.1.pep
TNKPKFIALHNAMSMKMYAYLTLYRVAFHGHIIQEPNTLLTHMVNPLTMKMSITSCQP

SEQ ID NO: 233801 - protein, 62 aa, Glycine max
  Clone ID: PAT_MRT3847_53147C.1.pep
LQDHLLHFLRENAIQNWYHHTHSRKMDPWDYPLTVDVEEEKQPRTLSRDLIYAVRLLLGGLC

SEQ ID NO: 233802 - protein, 47 aa, Glycine max
  Clone ID: PAT_MRT3847_53148C.1.pep
SRWLSIKSISMRYIGKLALIIQKNNIARSWIISVHGTGDDRDSSATW

SEQ ID NO: 233803 - protein, 118 aa, Glycine max
  Clone ID: PAT_MRT3847_53149C.1.pep
PHERFTPLGPNRLINALHPQCVHALWTRARATNHPLENGQRLCAAYRRRRQSWRWRADELTDAYSWRHDIDNSSARQDRIFYTLAVLYCILDTVALVQLARIQLIVPEYGWTTQKVLH

SEQ ID NO: 233804 - protein, 50 aa, Glycine max
  Clone ID: PAT_MRT3847_5314C.1.pep
IHKVIYAVVAFCRCKKMFNVKVGYMSTCFLNRFSPQYQGSPNIYKSPFSY

SEQ ID NO: 233805 - protein, 107 aa, Glycine max
  unsure (1)..(107): unsure at all Xaa locations
  Clone ID: PAT_MRT3847_53150C.1.pep
HVNADICQLYHLLVYELEQVVLAFGAESDRSLGIPGENLKGIHSAREFVWWYNGHPYGQNLEPDLKSTDTAVILGQGNVALDVARILLXPTTELATTNIVSHALATR

SEQ ID NO: 233806 - protein, 65 aa, Glycine max
  Clone ID: PAT_MRT3847_53151C.1.pep
MLDYQDLLTSDDLLSDSFRDKEIQNGMLWEVDGKWVVIGAVYVDTGANPSADGRGEDDGVDDAAV

SEQ ID NO: 233807 - protein, 44 aa, Glycine max
  Clone ID: PAT_MRT3847_53152C.1.pep
YGFCIFRITISLIYVYSNASISLLISEKFIIVQPLILTIVLIQP

SEQ ID NO: 233808 - protein, 103 aa, Glycine max
  Clone ID: PAT_MRT3847_53153C.1.pep
TLSFTSLIALTNQVTGNEMNNNGNDSSTSPNLLLLHHHLLLLRTFLTPPLFLPLHVAVQGDPDSTNRSRAARHVISHRRHRPISNSSSLPSKSYREVPRDVVW

SEQ ID NO: 233809 - protein, 111 aa, Glycine max
  Clone ID: PAT_MRT3847_53154C.1.pep
PFGVPSSMGLASWGHQSHSCFFLSKKDLSPGGLGGLLSCPSGPSFTSSASFFFCVWWGVFCMCASLALILVFSQCFDGRFFSLGSLPLLGTHVFPWRGSGPCGKTSYQSTL

SEQ ID NO: 233810 - protein, 72 aa, Glycine max
  Clone ID: PAT_MRT3847_53155C.1.pep
LYFFHQIKSMRQRVLTSHGKVLTSLAFLFIPNAVPYIFCKNKRAGLHILFHQRDIIKAPCLKNKEKRSSPKY

SEQ ID NO: 233811 - protein, 73 aa, Glycine max
  Clone ID: PAT_MRT3847_53156C.1.pep
EFGTRARQRYNLYRSVFALDSILVSLYNSICVDLPVSFCALFCPFNRWVMSKASLFTSIYLCKTLFLLDSSAN

SEQ ID NO: 233812 - protein, 78 aa, Glycine max
  Clone ID: PAT_MRT3847_53157C.1.pep
SIYLFIFTLTFTHTRHLFAEIAYQITQVPRVFNTRFLPFYTTCAIRCTCRKPYSNILKNTYSAIFIPSIFILNCDHVL

SEQ ID NO: 233813 - protein, 95 aa, Glycine max
  unsure (1)..(95): unsure at all Xaa locations
  Clone ID: PAT_MRT3847_53158C.1.pep
GRRLEKQSQPPVHTAEEQTXTGGAGTKGPPDSPQNGQARNTPDETRADGNTKQPPTKENTTGTKTYTGEAQDLTKGAKHEQTELAILQEQEEKNG

SEQ ID NO: 233814 - protein, 92 aa, Glycine max
  unsure (1)..(92): unsure at all Xaa locations
  Clone ID: PAT_MRT3847_53159C.1.pep
ISWCRHLAQDGXILELVDERLARDYNKEQASLCINLALICLQKIPELRPDIGDIVKILKGEMELPPLPFEFSPSPPSKLYSRSRRKPKGTAE

SEQ ID NO: 233815 - protein, 156 aa, Glycine max
  Clone ID: PAT_MRT3847_5315C.1.pep
MATLAPGILLKLLNGLNTGVKPTNEHRSSLLQVTDIVPADLDEKNLIPKQGFFIKVSDSSHSIYASLPSDQDDIVLSNKMQLGQFIYVDRLEPGSPVPVLKGAKPLPGRHPLIGTPEPLMGLRDQNQKPNSVPIRRSGGTDRDGELNDKPVNLDFD

SEQ ID NO: 233816 - protein, 254 aa, Glycine max
  Clone ID: PAT_MRT3847_53160C.1.pep
MSGPLLRPQFVMFGSSIVQYGLYDEGWMADLSHLYARKVDIVLRGYAGWNSRRALQVLDKIFPKDAPVQPSLVIAYFGGNDSSTPHSSGLGPHVPLQEYIENLRKIVNHLKSLSENTRILLLSAPPINDATITPNSDGKPSRTNEACRIYSEACLDVCREMNIKAIDLWSAIKKRDNWQDVCFIDGIHLSSEGSKIVLKEILKVLKDAEWEPSLYWKSMPSEFDEDSPYDPIAPDGKSTINISNWAFPGNDKWE

SEQ ID NO: 233817 - protein, 196 aa, Glycine max
  Clone ID: PAT_MRT3847_53161C.1.pep
PHETDPTVLLLAESFAESMLLPQPYVKFLAFLVKQYLLDRRSLMPHTATLVAFYTQTTAAGADQEEEEACLAGMVELCFDKRGANASIPSPAPPRDKPYICNMAVQKSLRRRGIGWHLLKASEELISQMSSSREVYLHCRIIDEAPFNMYTKADYKIVKTDSIFVLLTLQRRKHLMCKKLPLLSTPPETDLSVSDE

SEQ ID NO: 233818 - protein, 129 aa, Glycine max
  Clone ID: PAT_MRT3847_53162C.1.pep
KLHKQASFFFLFLFFFLQTNLITFYCTMLLGLHVNYGRQKSFDLEQIHIHTDLTMYSPLSTFHTHLSSPFAKTVTEMALFCTRRRIRKTHVYNLSFVSLEVCVVFLVVFNYINFQFYGVFLRISVYASN

SEQ ID NO: 233819 - protein, 61 aa, Glycine max
  Clone ID: PAT_MRT3847_53163C.1.pep
VGMFPHPCLGVLVASLLCLSVRSCGLALLSVSTACGSGLMSVFLLVVTPRAILALVPLAVI

SEQ ID NO: 233820 - protein, 111 aa, Glycine max
  unsure (1)..(111): unsure at all Xaa locations
  Clone ID: PAT_MRT3847_53164C.1.pep
VDQTDEAFLNAPXLVLNSKKTGNGKRPGERGNRLCKTIALGFHTPMECIXXTYIDKKGPFTGNVSILGRILYGTCPRDQMNRTISVRRNYLQNSPIYQRNNERSSSISAPI

SEQ ID NO: 233821 - protein, 50 aa, Glycine max
  Clone ID: PAT_MRT3847_53165C.1.pep
PSRSSNPSSCGHLSIAHAQHCHFPRFKSSRPHLQQRVWVMLLRKQKLHRS

SEQ ID NO: 233822 - protein, 72 aa, Glycine max
  Clone ID: PAT_MRT3847_53166C.1.pep
FPFINPLDFFLPLTSKFPLVVIFLLNALFLVPCSSVILVLYFLVTIVFAIPSFLVLYFAYPTIQRLVREITS

SEQ ID NO: 233823 - protein, 59 aa, Glycine max
  Clone ID: PAT_MRT3847_53167C.1.pep
GRRKGHINATIRHIPLNTISPRAAGEPDDQAQEGQSLAQDHTTGRDYKQTHPPRQRSIL

SEQ ID NO: 233824 - protein, 199 aa, Glycine max
  Clone ID: PAT_MRT3847_53168C.1.pep
RNSTLYHFPIILCMRKLQTTKFLYGCAVGASILKVDWITDCVASRTILQPEKYMILPNRKDMKWTRIGTTIHHRNQKDIFERVGILLHGKPSFCTKLACIIKHGGGHVFKTLQGLEWSTDEERTLVGAIVVEDKATISRHLKHCAKERNIPIMPFSWIIKSLYSGKLLPFTEEKNTLSLPFVNVKVSEVPSSSDMSEEI

SEQ ID NO: 233825 - protein, 74 aa, Glycine max
  unsure (1)..(74): unsure at all Xaa locations
  Clone ID: PAT_MRT3847_53169C.1.pep
GGHRGXASSXKCGNGXAARHMYLDSSYXELPTTETLVIGVAPVKVQFEGADMGVPVENDGCKCGPXXSCHPCTC

SEQ ID NO: 233826 - protein, 65 aa, Glycine max
  unsure (1)..(65): unsure at all Xaa locations
  Clone ID: PAT_MRT3847_5316C.1.pep
MLIDIARGSVMNMKVLVIFVATILGAWECHAYDMFPLRMNTGYGARTPEVKCARXKLAEEAHNIF

SEQ ID NO: 233827 - protein, 70 aa, Glycine max
  Clone ID: PAT_MRT3847_53170C.1.pep
VHVIIVASYLARSLLRIVAKLTNFLQFMVRIELTVLNTLVSLKLLDCVCMCGYIPFTKKLKHLIGCANCF

SEQ ID NO: 233828 - protein, 79 aa, Glycine max
  Clone ID: PAT_MRT3847_53171C.1.pep
KYKNRGGEGIFFKDENPQSQNHPTILADHPTNSTQQIHSPSHFLTAGQPLYFLRWQPRLPTFYAYQPPYEENKSFTSRT

SEQ ID NO: 233829 - protein, 211 aa, Glycine max
  unsure (1)..(211): unsure at all Xaa locations
  Clone ID: PAT_MRT3847_53172C.1.pep
MITSIVVRKAAGKLEKRPAEAPKTLMDTVLTLAEAIRFGYAETLGKWHLLDLPRAILYSVMDKGKKTVAVECAERSDCVQLKDPELLKELYELKKCLTQTMLFSKKRFRAFLFAAGFAKEDVLLRKRRARILKPAFTVILNKESKCXLVFIRGTRSIKDTLTDAIGAPVSFSHFICSDGELKKRDXVSGHGHRVMGAAARWIKSTAPLYYL

SEQ ID NO: 233830 - protein, 96 aa, Glycine max
  unsure (1)..(96): unsure at all Xaa locations
  Clone ID: PAT_MRT3847_53173C.1.pep
PCVFGRVGFVACKWTKSEPHSWEWIFPIEVCGPNLGFEMWSSEWTIQTXWHLSFFIDCRXQTTFIGFLWGISSDYAHADCSLMATFYGSQVPGGSC

SEQ ID NO: 233831 - protein, 69 aa, Glycine max
  Clone ID: PAT_MRT3847_53174C.1.pep
MITSIVVRKAAGKLEKRPAEAPKTLMDTVLTLAEAIRFGYAETLGKWHLLDLPRAILYSVMDKVHFPTS

SEQ ID NO: 233832 - protein, 84 aa, Glycine max
  Clone ID: PAT_MRT3847_53175C.1.pep
FSNSPRCIISFYFQTFRLLPLGEGGVSLAIWNLLRGKDFWDLIWGIPCSPLFFWGRAQVCFQSSNFTSLFKKKVKARLYFWFGG

SEQ ID NO: 233833 - protein, 58 aa, Glycine max
  Clone ID: PAT_MRT3847_53176C.1.pep
PPNNSLWWIPQHPETTKGLLCDKMPLGLVPIRRSRESRFYVNPSSLLLSPLATQDTTW

SEQ ID NO: 233834 - protein, 104 aa, Glycine max
  unsure (1)..(104): unsure at all Xaa locations
  Clone ID: PAT_MRT3847_53177C.1.pep
TCLKKATLRPSGGQRDTLPSSPSSSSSSDSPSLIQDRPGYADPALIITPTDAEDMAKEYEQAIGXLQNLLCGKSEHLATTARKGEQMTSSLGTSSSDGIPSLEA

SEQ ID NO: 233835 - protein, 84 aa, Glycine max
  Clone ID: PAT_MRT3847_53178C.1.pep
KQASKRPPTNVGGFLHLAPPLFFFFIQRPFFFGLLMGIIFFQRNPIFPILGQRFLSLLKGKRGSPLAPGQIFRGKSRGFPSVSV

SEQ ID NO: 233836 - protein, 77 aa, Glycine max
  Clone ID: PAT_MRT3847_53179C.1.pep
MGLWTLLEGFLLLANALAILNEDRFLTPRGWGLSDFSAGQTKSFKGQLIGLIYATQYLRFPLILLNSVFIIVKLVSG

SEQ ID NO: 233837 - protein, 68 aa, Glycine max
  Clone ID: PAT_MRT3847_5317C.1.pep
SCAAGLCFGVVLFNILYNNSLVRRNLTLLAVPNLLLVTYDYCGHVDVFSMTAAVITYYDALRKALTRR

SEQ ID NO: 233838 - protein, 117 aa, Glycine max
  unsure (1)..(117): unsure at all Xaa locations
  Clone ID: PAT_MRT3847_53180C.1.pep
VDIPTPLCSQLTYELLLHEFLRINSCPVESDASIMALHHXGRKLMCPLNSSDTRFKEIRDLNFEGVSHILRQKTTSMMQDYTEMTTSTHTTSKLQDFLKNLNSLSEMTRHINLSHFF

SEQ ID NO: 233839 - protein, 78 aa, Glycine max
  Clone ID: PAT_MRT3847_53181C.1.pep
HGLVQRGHIGTSHVIVLNGPVPLYNGSPYHRTCNQYRVLCEHQLWDSLAYVLYTRDSPDCVLHPVGCDLTLQLSPRPC

SEQ ID NO: 233840 - protein, 46 aa, Glycine max
  Clone ID: PAT_MRT3847_53182C.1.pep
LKLEGLIWKEPFHTILSGMYVYYVQHYMYELIKAFKDREIIWRRAL

SEQ ID NO: 233841 - protein, 85 aa, Glycine max
  Clone ID: PAT_MRT3847_53183C.1.pep
MPISNIAVRRPEKATHPDTFNAALADFISTFIFVFAGSCSSIAYNKLTYNCPATPSLLISSFIAHSFPLFVSISVGANIFGCHIN

SEQ ID NO: 233842 - protein, 83 aa, Glycine max
  Clone ID: PAT_MRT3847_53184C.1.pep
RNPVWSFYPPPLLPHFPIKVPKPAFFGVPPPLRRNWPPLLVGSVICAFSPRSASSPKDLGHAGLTLHTPLSSSSYKKIKKTKP

SEQ ID NO: 233843 - protein, 52 aa, Glycine max
  Clone ID: PAT_MRT3847_53185C.1.pep
FKLHPFPFFSGVFLCKTPTSFLPKFSPHLFLIFQAFMKFFQANFHHQTVSLC

SEQ ID NO: 233844 - protein, 42 aa, Glycine max
  Clone ID: PAT_MRT3847_53186C.1.pep
WVQKGGGTPYLEKLVTLNSAPIICQLKFPYMEEGPSRKKKPL

SEQ ID NO: 233845 - protein, 107 aa, Glycine max
  Clone ID: PAT_MRT3847_53187C.1.pep
NQVQDIHCAGLPGLLSLNSNVLIQKRLRRQMNSATMNKDTVIHAACIAVQSSPVESADYRKQLTQDYLLRQVAKPLPVYGTLKDAIHCLPKEVFETDDVKAWQSVLI

SEQ ID NO: 233846 - protein, 353 aa, Glycine max
  unsure (1)..(353): unsure at all Xaa locations
  Clone ID: PAT_MRT3847_53188C.1.pep
RGHSQFLNMFFPEKATILAVDILNELVEVLKIRPCPIVFASFSGGAKACMQKVLQIISGNSEAHNMDDYQIVRDCISGYIYDSSPVDFTSDXGVRFLLQPSVLKVSHPPRFASWIANGIASGLDSLFLSRFESQRAEYWWTLYSTINMQVPYLILCSENDNLAPFQVISNFXPGLKDLGGDVKLLKWSASPHVGHFRHHPIDYKAAITEILGKAVAIYHSKNSRIEDEKQGIEGTKDEITDPFSELRKAAMFSTSFQGFALAPSDNLSSSSTEYYVGKGVGTIADERKGGFIHLPSRPSINANGVLGQILFDVCVPKNVEDWCIRSNSKNALVAGTRKHVPFNPIKCIRRSRL

SEQ ID NO: 233847 - protein, 120 aa, Glycine max
  Clone ID: PAT_MRT3847_53189C.1.pep
WDGSLAARGGCSARVGGKFGSFGASKRRHPQRFHHPLRYESDDDYITPHDWYSILRLLPDDTDNCDLTRQHPVFTVAAGVMRSGVVSENPDFVIGFEGWSDLGLRFGFLICVVNAHSSRI

SEQ ID NO: 233848 - protein, 41 aa, Glycine max
  Clone ID: PAT_MRT3847_5318C.1.pep
TPEFVVDAVVWYPIYLCTLPISLKLLLNQSMQLHLGHHNCF

SEQ ID NO: 233849 - protein, 45 aa, Glycine max
  Clone ID: PAT_MRT3847_53190C.1.pep
TLPEIFITWGKGSWMMTDPACRGIWLHTLLATGLYYRTLNRIQTI

SEQ ID NO: 233850 - protein, 57 aa, Glycine max
  Clone ID: PAT_MRT3847_53191C.1.pep
QPKENTRGYTSGCYNSNLPVRIAQLSRHLTPASVHRLARLPFTKPDESACYNQRKTK

SEQ ID NO: 233851 - protein, 307 aa, Glycine max
  Clone ID: PAT_MRT3847_53192C.1.pep
MALPLFLLCFMLCISLTHQTIMLPLTHSISKTHFNSTHQLLKSTSTRSASRFHRQTHHNSVVSLPLSSGSDYTLSFNLGSHPSQSITLYMDTGSDLVWFPCAPFECILCEGKFNATKPLNITRSHRVSCQSPACSTAHSSVSSHDLCAIARCPLDNIETSDCSSATCPPFYYAYGDGSFIAHLHRDTLSMSQLFLKNFTFGCAHTALAEPTGVAGFGRGLLSLPAQLATLSPNLGNRFSYCLVSHSFDKERVRKPSPLILGHYDDYSSERVEFVYTSMLRNPKHSYFYCVGLTGISVGKRTILAPEC

SEQ ID NO: 233852 - protein, 488 aa, Glycine max
  Clone ID: PAT_MRT3847_53193C.1.pep
MAIQMSSFVFVSLTILFCFSSLEKSFAFQTTKEDTESNNLHQYTHLVHLSSLLPSSSCSSSAKGPKRKASLEVVHKHGPCSQLNNHDGKAKSTTPHSEILNQDKERVKYINSRISKNLGQDSSVSELDSVTLPAKSGSLIGSGNYFVVVGLGTPKRDLSLIFDTGSDLTWTQCEPCARSCYKQQDAIFDPSKSTSYSNITCTSTLCTQLSTATGNEPGCSASTKACIYGIQYGDSSFSVGYFSRERLSVTATDIVDNFLFGCGQNNQGLFGGSAGLIGLGRHPISFVQQTAAVYRKIFSYCLPATSSSTGRLSFGTTTTSYVKYTPFSTISRGSSFYGLDITGISVGGAKLPVSSSTFSTGGAIIDSGTVITRLPPTAYTALRSAFRQGMSKYPSAGELSILDTCYDLSGYEVFSIPKIDFSFAGGVTVQLPPQGILYVASAKQVCLAFAANGDDSDVTIYGNVQQKTIEVVYDVGGGRIGFGAGGCK

SEQ ID NO: 233853 - protein, 58 aa, Glycine max
  Clone ID: PAT_MRT3847_53194C.1.pep
CLLNWGRFFIPQKGYCRPPVLLNPKPGRMGHPCWPRMYPPVRFVMGGSKEILFLGVDV

SEQ ID NO: 233854 - protein, 30 aa, Glycine max
  unsure (1)..(30): unsure at all Xaa locations
  Clone ID: PAT_MRT3847_53195C.1.pep
LINHILIIDMHFTLXFRLIXESETSANTEX

SEQ ID NO: 233855 - protein, 91 aa, Glycine max
  Clone ID: PAT_MRT3847_53196C.1.pep
MTELQRSVTSFRRQGSSGLVWDDKFIAGIENENKQESGDGSRATLQRPYRTVNVAPQAMDPPSPKLATCGFCALFRKPVSAKPTKSKRRTR

SEQ ID NO: 233856 - protein, 104 aa, Glycine max
  unsure (1)..(104): unsure at all Xaa locations
  Clone ID: PAT_MRT3847_53197C.1.pep
FPVGVGALGVVCXXRAXVCXLXXXVCFXLVRPRGVCLVCWRGFSLVGFFAXLCAGFSXLLFSXLXWSLXXXXLXFWXSAGXRSFFSPXXXVGRPPIGCSSARVX

SEQ ID NO: 233857 - protein, 53 aa, Glycine max
  Clone ID: PAT_MRT3847_53198C.1.pep
VDHNPRCFRVVIFNQSIGALNVLKILFYLWCTDLLLFPFGAKIENLFLLLVSK

SEQ ID NO: 233858 - protein, 70 aa, Glycine max
  Clone ID: PAT_MRT3847_53199C.1.pep
MWGTIANLKENLNKIALDVHDDDDDDEIFRVYGAGSPSNGGSSAVSDRRSSHGSVRSRSGIRSPLANGID

SEQ ID NO: 233859 - protein, 360 aa, Glycine max
  Clone ID: PAT_MRT3847_5319C.1.pep
MVNPRCFLDVSIGGELEGRIVVELFHDVVPKTAENFRALCTGEKGIGPNTGVPLHYKGVCFHRVIKGFMIQGGDISAGDGTGGESIYGAKFEDENLEVKHERKGMLSMANAGPNTNGSQFFITTTRTPHLDGKHVVFGKVLKGMGIVRSAEHVVTGENDRPTQDVVIVNCGEIAEGEDDGVVNFFKDGDTYPDWPADLDVKPDELSWWMSAVDAIKTLGNEQYKKQDYKMALRKYRKALRYLDVCWEKEDIDQENSAALRKTKSQIFTNSSACKLKLGDLQGALLDSDFAMHDGDNAKALFRKGQAYMLLNDLDAAVESFKKALELEPNDGGIKKEYATARRKVADRRDLEKKAYSRMFK

SEQ ID NO: 233860 - protein, 67 aa, Glycine max
  Clone ID: PAT_MRT3847_531C.1.pep
DAIASAAVKAITKAEQAFHQSLVDSYQVMGGTTFKALRRALPITQQRIDWTSLSKFKAGRLGNEMQK

SEQ ID NO: 233861 - protein, 86 aa, Glycine max
  Clone ID: PAT_MRT3847_53200C.1.pep
KALSRKSGKAKEKVYWNRQASKGRTSPTEYGHMSQMCNGEGPSQTKIMTMEHKSYRRDKKALKGFGDWINVLAIKSAAPESHLCLL

SEQ ID NO: 233862 - protein, 106 aa, Glycine max
  Clone ID: PAT_MRT3847_53201C.1.pep
WLVIVVCCSLGCICSSQNTKVLQFGKYLAVGLNINFTNLNCFYNVLTNEIETTNYSIFTHTYITPHHIKFYLSFLPLPITPSRGICRICIPLHFFFETVTSGDPRH

SEQ ID NO: 233863 - protein, 101 aa, Glycine max
  unsure (1)..(101): unsure at all Xaa locations
  Clone ID: PAT_MRT3847_53202C.1.pep
RRDALQGLSTRSXTWLXRRLRXAVTSLTNSGXQSSSLSEFRRGGSREXRRLDPDGNDPLRWISSARMCRQVTADSHSLFSSGIFLFFLSLFGCFAFSGGPN

SEQ ID NO: 233864 - protein, 61 aa, Glycine max
  Clone ID: PAT_MRT3847_53203C.1.pep
CSVPSTPSQGMVASCSMHTLDQRTLLRSSLMKCPVAMVSHVKMVPMSLCNSGILWGFLISL

SEQ ID NO: 233865 - protein, 83 aa, Glycine max
  Clone ID: PAT_MRT3847_53204C.1.pep
KNFREGKTGGKKTPKKKLGTGGPLGPLGMGPGGKLGLRGRTFKEIRKWGWKQTQNSFKGKSFVYGHFNPGPGKKANNKKKGGE

SEQ ID NO: 233866 - protein, 61 aa, Glycine max
  Clone ID: PAT_MRT3847_53205C.1.pep
KLRKKKTKINSLLPRIYIAKFLYSRKKEAENHLYFLSTITANCKDKISNGQGMKDGEIKRD

SEQ ID NO: 233867 - protein, 136 aa, Glycine max
  Clone ID: PAT_MRT3847_53206C.1.pep
MAHLVYGETPSFGASHHGQAQQIVPFQTTSSSLRILLLHGNLEIWVNEARNLPNMDMFHKKTGEMVSMLSRKLGGKIEGHMSKAGTSDPYVTVSVAGAVIARTFVIRNSENPVWTQHFNVPVAHLASEVHFVVKDS

SEQ ID NO: 233868 - protein, 47 aa, Glycine max
  Clone ID: PAT_MRT3847_53207C.1.pep
FCYSELWQTYATMSVAVGPLMRLHFHLAVSSYLSILVPPSVVFSQPY

SEQ ID NO: 233869 - protein, 148 aa, Glycine max
  Clone ID: PAT_MRT3847_53208C.1.pep
MSFLRSTMSNDHSKLTFDELRWVINIRKTLEEEVEEDGEFAVSIFSVPKLLMASDPDSYVPQQVAIGPYHYWRPELYEMQRYKIAAAKRFQKHQQSCKLENLVDQLNKLEQRVRACYHKFLDFNGETLVWMMTVDAAFLLEFLQVFAM

SEQ ID NO: 233870 - protein, 151 aa, Glycine max
  Clone ID: PAT_MRT3847_53209C.1.pep
MEEPTSVASINPSSAVSTAPNETSISSGDSTSTAVPASVEKPNNTPSAGCDLYRGNWIHDPLGPLYTNNSCPVLTQMQNCQGNGRPDKDYENWRWKPFQCDLPRFDPKKFLELMRGKTLAFIGDSVARNQMESMLCILWQVETPKNRGNRN

SEQ ID NO: 233871 - protein, 42 aa, Glycine max
  Clone ID: PAT_MRT3847_5320C.1.pep
KERTSMYGRSTLTLTFMQRQFYSMECPNLNKVRDEKNITTPK

SEQ ID NO: 233872 - protein, 255 aa, Glycine max
  Clone ID: PAT_MRT3847_53210C.1.pep
MSMNSLLASTRASSSPLYQHSSTLTLRQPHFLFISSNSKSSAFPLVAYCSSAPSPNESDQTILLNETFHSQVTTPKIPPFVSPVPKLSFSDQAFFLLAFIASTTSVAFTSLVFAAVPTLFAMRNAALSLSKLADTAREELPSTMAAIRLSGMEISDLTLELSDLSQEIADGVNKSAQALQAAEAGIRQIGSVAQQQTVSMIQERASLPVISLQPAVAGAARKTSRAVGRATKSLLNIISGRQDATAEYDDDVTYM

SEQ ID NO: 233873 - protein, 63 aa, Glycine max
  Clone ID: PAT_MRT3847_53211C.1.pep
KILFRGRIRASPIQCIMADPKRVCLQYHGAAPLDFHAHRFSFSALTTTPMMIAIFYDSDDEDF

SEQ ID NO: 233874 - protein, 53 aa, Glycine max
  Clone ID: PAT_MRT3847_53212C.1.pep
RRRSGVCPTCLRDRIGTLCPDCANVRPCYLLRNQLLLTVVVFLLLIACVWRQR

SEQ ID NO: 233875 - protein, 38 aa, Glycine max
  Clone ID: PAT_MRT3847_53213C.1.pep
TIIHIIQYIMVIGEDIMHQGKIKYCLLRILQFVFLLNV

SEQ ID NO: 233876 - protein, 113 aa, Glycine max
  Clone ID: PAT_MRT3847_53214C.1.pep
PCKQSERPPSKGILKFGSGQGFHKASPDPMKTWEITISLYPPSLSSKFNSLYSPSRRIILNVNSKGGNCYTSHVYLCSAGFVASNSDRVQRTSWSDRDSEGPCKSSAKPRAVM

SEQ ID NO: 233877 - protein, 82 aa, Glycine max
  unsure (1)..(82): unsure at all Xaa locations
  Clone ID: PAT_MRT3847_53215C.1.pep
EKFLFFPSHIRIFAMPFGKARYGIMPKGFFKPFVIPQRPDVGYFXXXFFFFLDTPPXXEGIFKGVGALALDLFSCWGWSSVN

SEQ ID NO: 233878 - protein, 60 aa, Glycine max
  Clone ID: PAT_MRT3847_53216C.1.pep
NMTMSNYVYIKMRYLHSNTYYKLNYFSPLTFLYQALPHTTNTIVGFFRSRNPSLIREKSV

SEQ ID NO: 233879 - protein, 70 aa, Glycine max
  Clone ID: PAT_MRT3847_53217C.1.pep
FCWKIKREVFFPLKSIYMAISFRCGEGVMGRYCLEFFTFPEPEVGRRILNFEKNCRKMEGGGILIGLRFC

SEQ ID NO: 233880 - protein, 81 aa, Glycine max
  Clone ID: PAT_MRT3847_53218C.1.pep
NHETEKGAIFSKVIKTQKGDSQMAKEKCKIRMQKTKIEENESEIREINCSMALSHAGCALAKPFTSFLVRERKSPRINDIV

SEQ ID NO: 233881 - protein, 215 aa, Glycine max
  Clone ID: PAT_MRT3847_53219C.1.pep
LVELNTRQVPAKLHKMALSLWLIARYSKHDILEAYLTLAPMVGNIEGAEAASRIYFGKSPAQLSLSEALALAVIPQQPGRRARFGPSLQHARLRLMTEWRETYPQDPRNASLLDLPLEARNRQQIPFLAPHLSEQLLASQAGNELNTTLNLPLQQLLERLITGFIAERRSTGVENATAILIDSRDQSVKALVGSADYLSTSIHGQVNGVLSRRSP

SEQ ID NO: 233882 - protein, 212 aa, Glycine max
  unsure (1)..(212): unsure at all Xaa locations
  Clone ID: PAT_MRT3847_5321C.1.pep
MSTWSLKIGVVGFGSFGQFLAKTMIKQGHTLRATSRTDYSLLCLPMGIQFFRDVAAFLEADNDVILVCTSILSLSEVLSSMPLTCLXRSTLFVDVLSVKEHPRNLLIKVLPEESDILCTHPMFGPDSGKDGWQDLAFVYDKVRIRDEAICSSFLHIFASEGCRMLQMSCEEHDKIAAKSQFITHTIXRTLAEMDIKSTPIDTKLSFTCSIEG

SEQ ID NO: 233883 - protein, 150 aa, Glycine max
  Clone ID: PAT_MRT3847_53220C.1.pep
MDETAVTTKPDWLNNRARVAGERTEEFFCGGDDEEECDDEAWDMLTRSFWQAQTVLDENRALIDEVNSNHESKIPDNMAKNVGLITQIHGNISKVRSIYSDLSVNFPNIIRQRGVAAVNHRNRDGDVEEDEDEAENSEENSAEHVLDKSE

SEQ ID NO: 233884 - protein, 35 aa, Glycine max
  Clone ID: PAT_MRT3847_53221C.1.pep
RYCRGVMSYQGGVRMGSSCGAAVFFFFFFFFLKSI

SEQ ID NO: 233885 - protein, 53 aa, Glycine max
  Clone ID: PAT_MRT3847_53222C.1.pep
RRVGKLMRKFVLPENANTDAIFAVCQDGVLSVTVQKLPPPEPKKPRTIQVKVA

SEQ ID NO: 233886 - protein, 40 aa, Glycine max
  unsure (1)..(40): unsure at all Xaa locations
  Clone ID: PAT_MRT3847_53223C.1.pep
TAKGSLTNSSIPSLXXLFLXXXSRSSPSSINISNSQRHLS

SEQ ID NO: 233887 - protein, 43 aa, Glycine max
  Clone ID: PAT_MRT3847_53224C.1.pep
MHAKFGLGSSHPDSRKGKTTMSQNITHGFHFVIGKSYHDMEDY

SEQ ID NO: 233888 - protein, 99 aa, Glycine max
  Clone ID: PAT_MRT3847_53225C.1.pep
GKPSLRKTQRVKRSRGDRGPQGSLNSENEKQKGGQPTWNFGVIYPKKKKAPLKAQLFLGLGQLFLGLAGQVYPGFFRGNLRGLPGPHRRGIGKTFHLLT

SEQ ID NO: 233889 - protein, 61 aa, Glycine max
  Clone ID: PAT_MRT3847_53226C.1.pep
PIHFGHYTFHLVKCRFIHGLFMHSCSIVLLSLTLHFSFVPNAVLTDINLPLLWGLITDSLF

SEQ ID NO: 233890 - protein, 70 aa, Glycine max
  unsure (1)..(70): unsure at all Xaa locations
  Clone ID: PAT_MRT3847_53227C.1.pep
YQRFPLPMKTGYGERASKVKCAGIMLAVEAHNIQAYKTIPEECVEPTTGLHSMEEQLKSYSKTXNQQAIF

SEQ ID NO: 233891 - protein, 43 aa, Glycine max
  Clone ID: PAT_MRT3847_53228C.1.pep
AGRTFVSSRKTRALLTSWWDYDRTTDASILGIGKSDYYSSAPP

SEQ ID NO: 233892 - protein, 113 aa, Glycine max
  Clone ID: PAT_MRT3847_53229C.1.pep
MDELKLHPNLRNQPERVITKQSLRTENPLYAKFRNKRLPFTHKLTKVFKNVIANGEFQRSPSSRILPVGVEVDMNNVYRPSLDGIGINVEESLGDSEDASVSATNGMHWSLQM

SEQ ID NO: 233893 - protein, 140 aa, Glycine max
  Clone ID: PAT_MRT3847_5322C.1.pep
RERTSCTILDAVNPTNVIYRQNGSIMSPELDWEQDIYLTSIVPDPYGCPSNVGDIIGPNFVGNAECFIGVYGIYEIGAVRVVASWIDDISSTTTSSDTCVDIDSTCGSYISNCLLFSYQPLMCKYCQKTCNLCNNPKCNN

SEQ ID NO: 233894 - protein, 384 aa, Glycine max
  Clone ID: PAT_MRT3847_53230C.1.pep
MSGAPRLRSMNVADSEARPVLGPAGNKTGSLSSRKTASKPLRKKVDKLLDEIASVKEKKPHQVLLSSVATSSPQSHSASVSLLLPRHEQLLHSNLSLNASCSSDASTDSFHSRASTGRLTRSYSLGSRRKPYVSKPRSVASDGVLESPTDGSQSNKRCAWVTPNTEPCYATFHDEEWGVPVHDDKKLFELLVLSSVLAEHTWPAILSKRHIFREVFVDFEPVAVSKLNEKKIMTPGTIASSLLSEVLVRAIIENARQISKVVIDEFGSFDKYIWSFVNHKPIVSRFRYPRQVPVKTPKADVISKDLVRRGFRGVGPTVVYSFMQVAGLTIDHLISCFRFEECIAAAEGKEENGIMDNHADQKESENIMESDLSIAMEDLSFASE

SEQ ID NO: 233895 - protein, 225 aa, Glycine max
  unsure (1)..(225): unsure at all Xaa locations
  Clone ID: PAT_MRT3847_53231C.1.pep
MSPGPVVDASPEVEAEQQLPSVDDATQLKKSQPQEDDAPVVEDVRDDDKDDDDEDDDDDDEDDKEDDALGGAEGSKQSRSEKKSRKAMLKLGLKPVXTGVSRVTIKRTKNILFFXSKPDVFKXPNSETYVIFGEAKIEDLSXSQLQTQAAQQFRMPDMGSVTAKQEDAAAAAVQPEEEEEVDETGVEPHDIXLVMTQAGVSRSKAVKALKTHNGDIVGAIMELTT

SEQ ID NO: 233896 - protein, 84 aa, Glycine max
  unsure (1)..(84): unsure at all Xaa locations
  Clone ID: PAT_MRT3847_53232C.1.pep
PFSSSLYHCHGSLTSINNNAFNXPFWTTNSXVPIWXNNSSLTVGGRGPILLEXDYHLVEXLXXFXIRERIPKRVVPXXXRLVQV

SEQ ID NO: 233897 - protein, 193 aa, Glycine max
  Clone ID: PAT_MRT3847_53233C.1.pep
MASSSLSLSLSLTLCLVSTLCYAHTSSLTLPVTKDHSTHQYLTILSYGTPVESAKFVLDLGGSLLWADCASRTTPSSTLAPIFHRSIRCLTAKGPEIETHRWLSSLANPIDQDQPCQITAENSITGKRVTEGELVEDLVIHRSHELLFTCSPTFLLNGLATDAKGIIGLDKSRISFSSQSFHSLKIQRKITLC

SEQ ID NO: 233898 - protein, 48 aa, Glycine max
  Clone ID: PAT_MRT3847_53234C.1.pep
EANSFVLPFMRNYFAFHSLSFSSLITCLLVLDFLYSLPPSGYEEFAVR

SEQ ID NO: 233899 - protein, 88 aa, Glycine max
  unsure (1)..(88): unsure at all Xaa locations
  Clone ID: PAT_MRT3847_53235C.1.pep
NXCSTNCTSVECLLSSNKTSCRRDGSNRCNIVQQRHITCMENSSYISRGSGYLLNYIVDHLRIMIGLSQWCMGDQFFSSLLAKRRGTS

SEQ ID NO: 233900 - protein, 80 aa, Glycine max
  Clone ID: PAT_MRT3847_53236C.1.pep
RNCNNLYKIKMFSPIKMLNSGVVTMLYVYMYIIYICFTGKISSYTIRAYDLSPIFLFFFIPCRVCEILKKLNTFFHALNN

SEQ ID NO: 233901 - protein, 132 aa, Glycine max
  Clone ID: PAT_MRT3847_53237C.1.pep
IRRNTQGNKRTGLRQQNIIQSLINSIKTNVTETKGVATSHNNHHTQHRFMFFYFLDSSWNGSETWTRGPRRRRSTKHWAATTLQETAATQTIQKGYIYSCRYRRKALPVDPKVAPYLSLFSNFFLHFFILFA

SEQ ID NO: 233902 - protein, 107 aa, Glycine max
  Clone ID: PAT_MRT3847_53238C.1.pep
LGLEIGKTPGLGDPVFATPLFPKKGNLGIIAPPPLGFIGGGNIFLGGAFFGGALNPPVTFGPPVVRGTWTPPGVFWGGPFIGGGNPGPVLKGVFLTPPPGGVPPPVF

SEQ ID NO: 233903 - protein, 73 aa, Glycine max
  Clone ID: PAT_MRT3847_53239C.1.pep
MACPLDQAIGLLVAIFHKYSGREGDKHTLSKKELKELIQKELTIGSKLQDAEIARLMEDLDRNKDQEVNFQEY

SEQ ID NO: 233904 - protein, 53 aa, Glycine max
  Clone ID: PAT_MRT3847_5323C.1.pep
NRTERGSPYVYALTSHIPSVLASLENSIWDSTELITHDSPWMHWISTVCHSEF

SEQ ID NO: 233905 - protein, 80 aa, Glycine max
  Clone ID: PAT_MRT3847_53240C.1.pep
QTILTSTKSRALFSIITPLKVTNTENKAALIFTFKPIGHPPEHALRANDDALSATDIGNQPLSFLRQRPCYTGPLITTAS

SEQ ID NO: 233906 - protein, 45 aa, Glycine max
  Clone ID: PAT_MRT3847_53241C.1.pep
PKCAVTKARRSIVLGGLARLAGLCALRRMRGRRASHSCALLRRYS

SEQ ID NO: 233907 - protein, 89 aa, Glycine max
  Clone ID: PAT_MRT3847_53242C.1.pep
LRHDIAGPDGSASIVQAVVNLAAARRMTTTAEGVETEEQQRLLRTLGCSEMQGYLFSAAKPADKVLELFALHRSRLAQRGGNARRREAG

SEQ ID NO: 233908 - protein, 75 aa, Glycine max
  Clone ID: PAT_MRT3847_53243C.1.pep
ELYQLRFLIQVVQSDWNFSGVSIISLCYCYILIIICNLTVMSVGACCGNNWSRGFWENNSCFACDCRSTKARRLS

SEQ ID NO: 233909 - protein, 92 aa, Glycine max
  Clone ID: PAT_MRT3847_53244C.1.pep
VKKNWSSCKFPTLVYHGRSSVPAPVSSPRLLIAASLSALFSVLFISAQDYADFGSSRICPLQYIVCITFFPSSSSPLFPMPFFFPPFLLSLF

SEQ ID NO: 233910 - protein, 437 aa, Glycine max
  Clone ID: PAT_MRT3847_53245C.1.pep
MAQKQKLRPSPLDEPPTASSSDSEEEEEQQQQQPSSQQHEEEEEEVSSGEEEEASSEEEEDENLPPPPISKNPPPPPPSNPQPQPTSSESETESGSETESEPHPTPVKVKPLASKPMDQAQKPKAQPSPAPPPPKSASKRPAENNNNNARVADPKRAKKKATESSSAAAISDDEMEEDGKKSGDNSKKFQRLWSEEDELAILKGVVEFTSKTGLDPLKFPNANAFHDFMKKSLHVEFSSNQLKEKLRRLKKKFETQAGKGKNGDAPKFSKPHDQKFFELSKKAWGSEDGGVANGSVEKPKSNGNAAKSPNPKKKESGSRNVASAKKPKPETNPEPAPVPSLEFKESERMEIDQKPDGGDACLFLRELVRYKEGANVSRLDEDDVKRGLELIEESKRAELRGKWKKLHHAEMELFANRSELIGEQTKLILEALRSSNH

SEQ ID NO: 233911 - protein, 302 aa, Glycine max
  unsure (1)..(302): unsure at all Xaa locations
  Clone ID: PAT_MRT3847_53246C.1.pep
MGVVTVGELKPSISGKRTFRPSSSIRHATEWPISDVSSDLTIEVGASTFALHKFPLVSRSGRIRKLLLDAKDSKVLRISLPNVPGGAEAFELASKXCYGINVEFTLSIVALLRCTAHFLEMTEEGSRKNLEARAEAYLRDTVLPNISSTVHVLHCCEALRPISEQINLVNKLINAIANNACKEQLTTGLLKLDHTFPSKTTPTMEPETPSDWWGKSFNVLSLEFFQRVVSVVKSKGLKQDMISKILMNYAHGSLQGIGVRDPQVVKGSLHDLEFQKKQRVVDETIVGLLPTYSRKKPGSNGI

SEQ ID NO: 233912 - protein, 127 aa, Glycine max
  Clone ID: PAT_MRT3847_53247C.1.pep
MESPHSVNSPRRTLSLSKKQRATVSFFDPDDITSGFGLSGDHGPKPSEVYGFVGSITTVDATVIFLVWAYAPESWLQSVGISYYPSRYCALAVPTYVMVTIVLVLGFYIGLNFISTPSPASLNTCFD

SEQ ID NO: 233913 - protein, 63 aa, Glycine max
  unsure (1)..(63): unsure at all Xaa locations
  Clone ID: PAT_MRT3847_53248C.1.pep
GPLEAFERFGKKXLEEIKKKLIEKTKDQTLKYRYGPAKMHYTKLYPYREEGFTFREIPNSISI

SEQ ID NO: 233914 - protein, 57 aa, Glycine max
  Clone ID: PAT_MRT3847_53249C.1.pep
TNPRSLSDDYITAKRRTKCGFIRTGGPPTTGTYNTILASTSHPSTFTKHSNAYMHRL

SEQ ID NO: 233915 - protein, 300 aa, Glycine max
  Clone ID: PAT_MRT3847_5324C.1.pep
MEEREELQSILAYLPVVMRCSSPFWPSQAVETLRELGGGRVNSGHHFFQAISDLRNALSLSSEPLAPSAPHGYALFFDEVMSGEESSKWFQEVLPALGNLLLRLPSLLESHYQNTDNMAIDGEAGAMLTTALRLLDSQQPGIVFLTQELIAALLSCSLFCLFPVSDRPVIHLPMINFDVLFGSLYDDYSQKQENKIWCIVHYFQRISSEMPKGIAYNERIEIVGVERFSGYTDHASSFRFSRAKAEGREEDPVGRRKTSDLSEKYFPPKMSLIIYLTQMLIFGALLRYLYADLRFTVQGS

SEQ ID NO: 233916 - protein, 45 aa, Glycine max
  Clone ID: PAT_MRT3847_53250C.1.pep
GLNYLHFKLNTYKLTKTFRIKHFKIPPTKTTPHPYFTHPFFFLPK

SEQ ID NO: 233917 - protein, 112 aa, Glycine max
  Clone ID: PAT_MRT3847_53251C.1.pep
TDPPNLTPKRPNFCTRYSYPIAFCNLGRTHFVLCSLGRTHFVLCSLGSYGGESMEEIEGVNCCSESESRSSSVTRPPNPNPPSCRQCKLGRHASLKMNTKLSDVSADPEHVT

SEQ ID NO: 233918 - protein, 85 aa, Glycine max
  unsure (1)..(85): unsure at all Xaa locations
  Clone ID: PAT_MRT3847_53252C.1.pep
XXNYFGFLGKNYKNRFKSRKIYTLGAQKKTLQFPIVNPPKSKNMHTGLPQERIMKNPPQTSCRVSPKGETQKKTIPFKPCAFPEP

SEQ ID NO: 233919 - protein, 54 aa, Glycine max
  Clone ID: PAT_MRT3847_53253C.1.pep
MGSETFLEVILAILLPPVGVFLRYGCGVELWIDLVLTILGYIPGIIYAIYVLIG

SEQ ID NO: 233920 - protein, 165 aa, Glycine max
  Clone ID: PAT_MRT3847_53254C.1.pep
FFFFFFFFFFFFFFFFFFFFFFFFFFFLFFWVDGEEGVEKKKKKKKRKKKKKKKKKLGSLKKKKKKKKKKKGGGKKTPHKKKKKKRKTVAPRAETKKKNRKKKTKGTLRKGEQTRKKRNITLNGNQPKGGRAGNQAPPTKGNTKTGGGLGKERVGENGKKFLGKQ

SEQ ID NO: 233921 - protein, 116 aa, Glycine max
  Clone ID: PAT_MRT3847_53255C.1.pep
MATRRVRYSPLATDEDDYIGDRNRPFDPRFDYTPKALDKVPWKSIALALFLLFLGTGLLFLSYFIFTGHMGGEKSQAYGLLALGFLSFLPGFYETRIAYYAWRGAKGYRFSAIPDY

SEQ ID NO: 233922 - protein, 53 aa, Glycine max
  unsure (1)..(53): unsure at all Xaa locations
  Clone ID: PAT_MRT3847_53256C.1.pep
LSGXCXNFSXCAXXAPVXXXXRXSKTXXHQXLXPXHXSSSPNSVALRTRALQX

SEQ ID NO: 233923 - protein, 61 aa, Glycine max
  Clone ID: PAT_MRT3847_53257C.1.pep
LPLKQPAQRKLSIYSANRKQPYCSLGGKRTRGETRPSQNSLYLLGQPYHWGSAKNTTNITP

SEQ ID NO: 233924 - protein, 89 aa, Glycine max
  unsure (1)..(89): unsure at all Xaa locations
  Clone ID: PAT_MRT3847_53258C.1.pep
FRLVAVFALXGVFGLVVLGPGLALLVLVCGCFGPXCLVPCPGXVXRCAFLCLLLCVLALVALVVAGRLRLLLRLLXFCARSASGSRVRG

SEQ ID NO: 233925 - protein, 122 aa, Glycine max
  Clone ID: PAT_MRT3847_53259C.1.pep
MLRVAARRLSSLSSSSPWRPNHAASAYVSRNAVVDDRRSDPSSHPLFPFRGFATESLIHPIENSIIPEIPATVTAVKNPTSKIVYDEHNHERFPPGDPSKRAFAYFVLTGGRFAYASLVRLL

SEQ ID NO: 233926 - protein, 65 aa, Glycine max
  Clone ID: PAT_MRT3847_5325C.1.pep
MAIDGEAGAMLTTALRLLDSQQPGIVFLTQELIAALLSCSLFCLFPVSDRPVIHLPMINFDVLFG

SEQ ID NO: 233927 - protein, 82 aa, Glycine max
  Clone ID: PAT_MRT3847_53260C.1.pep
KKKKKKKKKKKKKKKKKKKKKKKKKKKKKKKKKKKKKKKKKNKKKKKKKKKKKKKKGGAPLWSFFPPEFFLYPDFLWAPFFF

SEQ ID NO: 233928 - protein, 268 aa, Glycine max
  Clone ID: PAT_MRT3847_53261C.1.pep
MLRVAARRLSSSLSSSSPLRPNHAASAFLSRNDVVVDDRRSAPSSHPLLPFRGYATESLIHTKENSITPEIPPTVTAVKNPTSKIVYDDHNHERFPPGDPSKRAFAYFVLTGGRFAYASVVRLLVLKFVLSMSASKDATVPFLASLEVELSSIEPGTTVTVKWRGKPVFIRRRTEDDIKLANSVDVGSLRDPQPDADRVKDPEWLIVIGVCTHLGCIPLPNAGDFGGWFCPCHGSHYDISGRIRKGPAPYNLEVPTYTFLEENKLMIG

SEQ ID NO: 233929 - protein, 109 aa, Glycine max
  Clone ID: PAT_MRT3847_53262C.1.pep
DFYGKFSDRDRSNPRGSRDQRGFRSSRGREGGQDSNDEFGRGGRSFRSGNNRSRTTGKSSGNDWLIGGSSRSSRFSSSNRDGGHGGACFNCGKPGHRASDCITQKRVFF

SEQ ID NO: 233930 - protein, 55 aa, Glycine max
  unsure (1)..(55): unsure at all Xaa locations
  Clone ID: PAT_MRT3847_53263C.1.pep
HLDIFILSRLLCFLSCELEPKSSNVLHARIQXSLSLVHWLKYGYALRDSVLQEMY

SEQ ID NO: 233931 - protein, 105 aa, Glycine max
  Clone ID: PAT_MRT3847_53264C.1.pep
MESTHVIAITNGEENMIRSSKENKTFQFQLPPIISHLGKNEVHCVSITSSNPRHKQVQSGGHDTRKIIHCIKMGISLVLVSLLYLLNPLFKQVGENAMWAIMTVV

SEQ ID NO: 233932 - protein, 81 aa, Glycine max
  Clone ID: PAT_MRT3847_53265C.1.pep
YYFFFSHEKIYIYLCTINELYKIKFYLVHNKNPYFKLPSNVIVTNVRLESTRYFELYGIQILRVCLDEGKKKRNGWKIKKL

SEQ ID NO: 233933 - protein, 208 aa, Glycine max
  unsure (1)..(208): unsure at all Xaa locations
  Clone ID: PAT_MRT3847_53266C.1.pep
PPPGPPPRPLFPTPSFFKGXPPKKVPPPPRGPPSPGPPPPGAPPGPPQGTAPLKGPPPSPPISPPLXKEPGPQPEPPPPVNLAVKPPPKFPPLYSPPPLTPPEGFPFAPAIPGPPQPQEIVTPFPPPPKLFFKKFPPPFVKVPPPHVTPPPFGKREIPQKAFVPKKKKSPMPPLGKKTPELPPPKKLYGAPFPRGFFFVSPKGLGKTP

SEQ ID NO: 233934 - protein, 142 aa, Glycine max
  unsure (1)..(142): unsure at all Xaa locations
  Clone ID: PAT_MRT3847_53267C.1.pep
KLTLLTDPDTGIDGPTTNVSCPNKRVEEDLNKLMMSDYKASMFNDAXKEFYVHCHGPSESPYHGSDRNVRAALTDANPYKSAAICFIKKIYHPDVNNTLRAVXPDAINPTRSPMLALANVLEVSLPELLLCLYPSDPMNRET

SEQ ID NO: 233935 - protein, 73 aa, Glycine max
  unsure (1)..(73): unsure at all Xaa locations
  Clone ID: PAT_MRT3847_53268C.1.pep
MGQQKQLIKMSLNNNMVALKVCLLHRFLVGVTAAGMELSFLKSDYSSRYDYDXYSQPYGDLRHYRRTLTPQCS

SEQ ID NO: 233936 - protein, 105 aa, Glycine max
  unsure (1)..(105): unsure at all Xaa locations
  Clone ID: PAT_MRT3847_53269C.1.pep
MKMKVLVFFVATILVAWECHAYDMFPLRMNTGYGARTPEVRCACWKLAVEAHNIFGFETIPEXCVVAAYEYIHGDANRSDSSTVDVQSYVYARDLEVYPRGTFVF

SEQ ID NO: 233937 - protein, 68 aa, Glycine max
  Clone ID: PAT_MRT3847_5326C.1.pep
PASMYICLHRLPIWSTVWIPLRLDKCGMPHSINCVWSSLSGRRLASSPVMPTIQFALLIPPQLICRLR

SEQ ID NO: 233938 - protein, 55 aa, Glycine max
  Clone ID: PAT_MRT3847_53270C.1.pep
SRSDSSCVPIISILLCAFIVFRVLVTICSIYRFTSRPVCLCPPPCLYSHLSPSFC

SEQ ID NO: 233939 - protein, 74 aa, Glycine max
  Clone ID: PAT_MRT3847_53271C.1.pep
KASSCFRQLHPPPFFLYFLLVFPLVRFNLHLLPKDPSNFTKKKKRRKKTKTNTKGLRHQGLPFYSSLFRSPQLA

SEQ ID NO: 233940 - protein, 76 aa, Glycine max
  unsure (1)..(76): unsure at all Xaa locations
  Clone ID: PAT_MRT3847_53272C.1.pep
RDYGILNKGXLNITDTHVAHHLFSTMPHYHAMGATKAIKPILREFYHFAETPIYTAMWREAKECMYAEPDNGSYGK

SEQ ID NO: 233941 - protein, 166 aa, Glycine max
  unsure (1)..(166): unsure at all Xaa locations
  Clone ID: PAT_MRT3847_53273C.1.pep
RIRFACPLSSLLLLAIVIIVLIFTIFRVKGPMITMNTINNTKFQLDNTTMIPQPGTNMSLVASFRYANTTTSLYYHGVLVEEARGPPXRAKARTILRMNVTIDVIMDRVVSSPVLATDLGSGLLTMCSFSRNPGQVKFLNLIRQNIXVKMNCTTTFNISTQAIKLI

SEQ ID NO: 233942 - protein, 50 aa, Glycine max
  Clone ID: PAT_MRT3847_53274C.1.pep
RDSPGFSASVCRSCHRLAWPVLSRVRCCGESAGMLLQLPPLLSSSRSRTT

SEQ ID NO: 233943 - protein, 46 aa, Glycine max
  Clone ID: PAT_MRT3847_53275C.1.pep
VHAQQWVMYHRAVKSKIISTITVLPSLFIFSSSFNYYEPSLAKVCI

SEQ ID NO: 233944 - protein, 100 aa, Glycine max
  Clone ID: PAT_MRT3847_53276C.1.pep
PVRIPGRPSVRPNEHRDIHCACLDLTYVCMLRHDERSHHLPTAGYVVISRHATGNVDHLVMSTKHDDSIVPQTSNCIRTRLLCNPHTMLMSLPVTCLPLA

SEQ ID NO: 233945 - protein, 151 aa, Glycine max
  Clone ID: PAT_MRT3847_53277C.1.pep
MNDLFSGSFSRNNDQVLPDHHHHVIEMAAASSPTAEGSANLEKFFQEVEQVKEDLKELERLHENLRGNHEKSKTLHSAKAVKELRSRMDADVALALKKAKLVKVRLETLDRSNQVSRNLPGLEPGSSSDRTRTSVVSGLRKKLKDSMDSFN

SEQ ID NO: 233946 - protein, 61 aa, Glycine max
  Clone ID: PAT_MRT3847_53278C.1.pep
HASEHLQTAFRDSVTNGSQRRSVYCIHLHCSHLRLRTVYPLISIKHSVNFRRRHSLPNTFH

SEQ ID NO: 233947 - protein, 97 aa, Glycine max
  Clone ID: PAT_MRT3847_53279C.1.pep
CTRASFSLLEKWLFGFVVFMLQGASATTRAKVLPWHKVGGRALLFMAVCAAETGLMEKSSFLTNLKLLHERESNLINFTGLAILLFGVFVNFSVGFS

SEQ ID NO: 233948 - protein, 89 aa, Glycine max
  Clone ID: PAT_MRT3847_5327C.1.pep
KLGPGPRAGPSATPPALPFSDRPPPLPPSLSPPYPTYHPSPPPPPPPLPTSSPPPPRPHPPRPSPPTLPPTPPPSPPPPPSTPPLPPPP

SEQ ID NO: 233949 - protein, 135 aa, Glycine max
  Clone ID: PAT_MRT3847_53280C.1.pep
MGLTHHREKQKLDHTKGRKGNGNCMTEKKLKELEMLDMSDVDYALDIEEVLHYYSRLTCPVNLEIVDKFFMEIYSEFFGAPLGVRACCYTSVLLVLKSGLSLRLASFCSAMFLHGCLGSKFNFLWFKLILCHSRS

SEQ ID NO: 233950 - protein, 213 aa, Glycine max
  Clone ID: PAT_MRT3847_53281C.1.pep
MSPLGISGLAHLFGILAFILLLVWLLHYREGIDYDSDNGFRVFNAHPLLMYSCFIFLAGEAMMVFQTIPSERKVKKFVHMTLHLIAIVLGIVGLNAVFKFHDMQNIPNVYSLHSWIGIGTFCLFALQWLFGFVVFMLQGASATTRAKVLPWHKVGGRALLFMAVCAAETGLMEKSSFLTNLKLLHERESNLINFTGLAILLFGVFVNFSVGFS

SEQ ID NO: 233951 - protein, 51 aa, Glycine max
  Clone ID: PAT_MRT3847_53282C.1.pep
PSTNLLTRIILHIYIYKNIYIAHIKSTVTLIRKPTFLIIGIIPHLLCYIYI

SEQ ID NO: 233952 - protein, 44 aa, Glycine max
  Clone ID: PAT_MRT3847_53283C.1.pep
PVYSSLSTKCVHIYLNSRSFISKVIYARTYISQLLLRLTKVLEL

SEQ ID NO: 233953 - protein, 67 aa, Glycine max
  Clone ID: PAT_MRT3847_53284C.1.pep
LPQFSLSSSFSFASSSLFLLFVRDLHSCMRFQLHARKLLKTNFYRNIFISSNSFLFFFHDSFVTNFF

SEQ ID NO: 233954 - protein, 427 aa, Glycine max
  Clone ID: PAT_MRT3847_53285C.1.pep
MEAPLLLSEKRTGSIEEESGKWSSYQYVGGTGSVRPTSSLAGTEVSVDEIRSAAAASGYYPPSLHGALVGSPEPDPTEQALVYQGGYGGDYGGPTPQFQRKILDEVEIRELLIDHVGHRCCWGSRPARTWRIHAVEDCNVYVGTLDTFIEEREIIRETEPYLGGSIDGKDNGPELGIWELDLRSQFPVLFEPYKEVREKIPHSEVIEKCTVCAGRGSTVCATCNADQEPGFYKENQMTQCATCYGRGLIAHKDGSDTVCVKCNGKGKIPCVTCGSRVLIDCRRCNGSGSLLARNLAIIRWKTLSTRKVNATSGAASVPDEVFHRSKGVQLCNTQAYQCTPAFFADSYFLNKFSSDVIAERAQVPATARVICERHAISVVPVTRVTMAHRRQSFSFYIIEYGREVYLKDYYPARYCWGLCPCLEWLKL

SEQ ID NO: 233955 - protein, 104 aa, Glycine max
  Clone ID: PAT_MRT3847_53286C.1.pep
FSVCAGRGSTVCATCNADQEPGFYKENQMTQCATCYGRGLIAHKDGSDTVCVKCNGKGKIPCVTCGSRGLIQCATCNGSGSLLARNLAIIRWYVNLAVSNDSNH

SEQ ID NO: 233956 - protein, 82 aa, Glycine max
  Clone ID: PAT_MRT3847_53287C.1.pep
PPQIFKPQKKKIFLIPNLFSQREPKNPPGKNFILKNSPRAKQKTNFFFSKSQANLFNTLSPKTPTTFFGGPFLTFAFNITPF

SEQ ID NO: 233957 - protein, 148 aa, Glycine max
  unsure (1)..(148): unsure at all Xaa locations
  Clone ID: PAT_MRT3847_53288C.1.pep
ARAAAIKDRSIDFGDLFKGPLXGKSIKLLGFVALARLGEYIPLRGFNSEAFVGKHDHNSLLSTLHSMTGGGTAXLGVCYIGIALFITAQIAFQLLAQXVYTILRELQKXEREAARMKVLPDTPYAGYGLVIAQAIGLGLLLRTYDNDS

SEQ ID NO: 233958 - protein, 60 aa, Glycine max
  Clone ID: PAT_MRT3847_53289C.1.pep
GDVIFLGHSYIIFSNNYTTNQHAEVCSIALILISVPMEIFSIHLLLFSSYVTNIKIKLIN

SEQ ID NO: 233959 - protein, 42 aa, Glycine max
  Clone ID: PAT_MRT3847_5328C.1.pep
LLWPRRSSTHTGVWPSRGRGFYYPCWPDTPCVAKAAFQLTVR

SEQ ID NO: 233960 - protein, 113 aa, Glycine max
  Clone ID: PAT_MRT3847_53290C.1.pep
HLDTILTPSLSSALIFRWRNSKAARSASKNSGVAILHAFTLKQECDNASLLSYIRRDLLHLHQKTQCRVFLDRFDFRRITMTMATNVRPPSRITNEMHVKSGKMQTCNVEANI

SEQ ID NO: 233961 - protein, 125 aa, Glycine max
  unsure (1)..(125): unsure at all Xaa locations
  Clone ID: PAT_MRT3847_53291C.1.pep
YPAHQGLARVCYIKALKIQHTRAHQGLARVHFLKNDKAAAYKEMTNLIEKARNNASFYEKRSEYGDREITXADLEMVTRLDPLRVYPYRYRVXVLMDSHKEEEAISIDTSHELKTWNCTLKTWLH

SEQ ID NO: 233962 - protein, 108 aa, Glycine max
  unsure (1)..(108): unsure at all Xaa locations
  Clone ID: PAT_MRT3847_53292C.1.pep
GPLGRIIRGTLYPXGLMLTDIDIHSTTLLYXRLCVHIHEVCVLTVPFFGYNTTLEDDFFPKDGWDSLPCTRIAALIQTCPGYICRYVAGTYDNEGVMNVGLLLTFYLI

SEQ ID NO: 233963 - protein, 53 aa, Glycine max
  Clone ID: PAT_MRT3847_53293C.1.pep
PTTYTTFSYNNNHSSSVWTQKHAFLTPPFYLPYTNSLKCFEIKTKHKKNSLNY

SEQ ID NO: 233964 - protein, 86 aa, Glycine max
  unsure (1)..(86): unsure at all Xaa locations
  Clone ID: PAT_MRT3847_53294C.1.pep
MASLVSSPFTLPNSKVDQLSSLAQRHLFLHSFLPKKANGYASSSKASLRVKCAAMGNGLFTQTTPEVRRIVPEKKQGXPNVKIVYV

SEQ ID NO: 233965 - protein, 134 aa, Glycine max
  unsure (1)..(134): unsure at all Xaa locations
  Clone ID: PAT_MRT3847_53295C.1.pep
DWKIVYSGDTRPCPVLIEASGGATVLIHEATFQDAMVEEAIAXNHSTSYEAIEMGQSANAYRTILTHFSQRYPKIPVFDETHMHKTCIAFDMMSVNVADLSVLAKALPYLKLLFRNEMMVDESDDVVEAVTSAS

SEQ ID NO: 233966 - protein, 65 aa, Glycine max
  Clone ID: PAT_MRT3847_53296C.1.pep
MTMPISSTKNSFLILFVFMICGGVIATPPEDPIQCSSKNTDCTITNTYGVFPDRSICHAAEVIYP

SEQ ID NO: 233967 - protein, 68 aa, Glycine max
  Clone ID: PAT_MRT3847_53297C.1.pep
AALNLFFLPFTFLSYQPPPQTLSQPFPSPCSSSPNPIHAFPNPHQGAVLRLPRQSLPKTQTYVSQFFN

SEQ ID NO: 233968 - protein, 36 aa, Glycine max
  Clone ID: PAT_MRT3847_53298C.1.pep
AVMALMILRTTHYGSVTLDLICYTGPSPGRLLVTVG

SEQ ID NO: 233969 - protein, 120 aa, Glycine max
  unsure (1)..(120): unsure at all Xaa locations
  Clone ID: PAT_MRT3847_53299C.1.pep
TEGDSKNKEERRGGRTKEELFVCLLLLFLVGVTAARMRTXIXRCXQXXREEEEEKAQPGGERGKHTRSKPPQSSGEERRRKAGHAERKSGRGTRAQPGQXXGRDTNDGGDKPGKAREDEK

SEQ ID NO: 233970 - protein, 144 aa, Glycine max
  Clone ID: PAT_MRT3847_5329C.1.pep
MAAPASNAVLLGDVHFDDVSTKPCGVHFRERTRRVALRANVNLRKPKPLNGGILNFGCSTSDASWRSWNPSSLYKNSSFFARCSAETTPHVQHLATSTFSIDQTNFGGERLKLFSGSCYLPHPDKEDTGGEDAHFICTDEQAIW

SEQ ID NO: 233971 - protein, 35 aa, Glycine max
  Clone ID: PAT_MRT3847_532C.1.pep
YHPWSCQVVRWCLYPSPAPLPITISVLHRALFRAY

SEQ ID NO: 233972 - protein, 136 aa, Glycine max
  unsure (1)..(136): unsure at all Xaa locations
  Clone ID: PAT_MRT3847_53300C.1.pep
GIWPSRPRIQARIGVCTGIFRTDGIPEQDIVKLVDTFPGQSIDFFGALRARVYDDEVRKWISGVGVXXIXKXLXNSKNKPPTFKHPKITLKXLFLYFNILIQKQKNIKKIQFPNNYLNKTTLKNTNKXSIHKKTFF

SEQ ID NO: 233973 - protein, 583 aa, Glycine max
  unsure (1)..(583): unsure at all Xaa locations
  Clone ID: PAT_MRT3847_53301C.1.pep
MVVLLSEEDEFDEEPGEVVDSAPPQKVGEEREFSGFKKKLFKPGQGLEFPNFDDVVTFAVXGIGTLLDGTTFDSTRERDQPRTFALGKDDIGAGLDRAIITMKKGEVALFTLPGDGGDGDVSLDSDDSSAVRFEVELVSWITVVDVCKDGGVVKKILEKGSGIERPGDLDEVLVKYRVVLGDGTVVVETLEGGVEFHMKDGHLFPILPKVIMTMTRGEKAELILQPQYAFGEKGREAGSGLCSIPPNSVLHVNIELVSFKPVINVTGDSKVIKKILKEGEGAFTANEGANVTVSFTAMLEDGTVFEKRGIGETLPLEFITDEEQVITGLDRAVATMKKGERAIISIHPDYAFGDVEVRRDIAIVPPGSNVVYDIEMMDFIKEKAPWELNSKEKIEVGWEKTTEGNVLFKVGNYQRAGKKYEKAADFVDEDGSFGFDEQKQAQTLKVSCWLNSAACSLKLDDFPGAIKLCSQVLDVEFYNVKAFYRRAQAYIETGDYLLADVDIKKALVVDPQNRDVKVIQKKLKQLQADSDKKDAKLYENMLARKTKDPSMAIKRLKVEKDQGENEEVARMEIDEVADSAVIQ

SEQ ID NO: 233974 - protein, 187 aa, Glycine max
  Clone ID: PAT_MRT3847_53302C.1.pep
VIPVEKHPLRSNSSGLNSSIDFDFCVHESLELESSSADELFSHGVLLPTQIKNNNINSNAILKPICQLAPPPPQPQPQLPPPPKAICDNASSTTRKSSKKERHKVGKELKDEGDEKQSSKSFWRFKRSSSCGSGYGSSLCPLPLLSRSNSTGSSPSVKRIPLSKEVKQNSQKRSSSSTRFSQSHPLA

SEQ ID NO: 233975 - protein, 78 aa, Glycine max
  Clone ID: PAT_MRT3847_53303C.1.pep
KVILPPLTCELIKRVYISRTQPGLAEWFNSLLFYIKTYERRNFFLLSYYLHLSFFYAYLRKSNDSNNRTRESTRDFRT

SEQ ID NO: 233976 - protein, 53 aa, Glycine max
  Clone ID: PAT_MRT3847_53304C.1.pep
LVRGILVIYPPAPETNLLSRVGAFLRGRASAIPSDVAIFNIFTNSMSLASAST

SEQ ID NO: 233977 - protein, 54 aa, Glycine max
  Clone ID: PAT_MRT3847_53305C.1.pep
YNPSQILNFLIKGANILPYTGFPCVFFSSYVFFFKGPFFTNVGIINRCKSVLNC

SEQ ID NO: 233978 - protein, 46 aa, Glycine max
  Clone ID: PAT_MRT3847_53306C.1.pep
EKTPFVCLKLINKDFWNHLLKPLSHLKGELFDYAKEFVVYQQHLHC

SEQ ID NO: 233979 - protein, 311 aa, Glycine max
  unsure (1)..(311): unsure at all Xaa locations
  Clone ID: PAT_MRT3847_53307C.1.pep
MAEIQPPEGQINGAVGTLILHSSEPSIGSKRQRRPSVRLGDIGGDQPYVPHAXATRSRGNSPSTVTTTTTTTTAARXKDPGKPSKTRPLTNLSEFNETLEPCNDREPGNIDTVAIGSWKVKESKKRGSVATKRVRSNWVLRIDDGGGDNGGDEGEGEKYNNGEEDGDDDDGYREFEVENSESPLKDQSPIHSMENLGVDGHRRVFKGREREQHHDGVELSAPSDTDVRDWKCGDRNNENGGGRVRGVEDGVRVWLNGLGLGRYAPVFEVHEVDDEVLPMLTLEDLKDMGISAVGSRRKMYTAIQKLGKGFS

SEQ ID NO: 233980 - protein, 60 aa, Glycine max
  unsure (1)..(60): unsure at all Xaa locations
  Clone ID: PAT_MRT3847_53308C.1.pep
PEQIPGIRDFLRRAGRKDAGSVKIKRSREVVKFKVRRSKYXAPLCVFDPEKAGKYNAIFS

SEQ ID NO: 233981 - protein, 113 aa, Glycine max
  Clone ID: PAT_MRT3847_53309C.1.pep
ISNNRREPRCLWQPWHDLHCRIEGPAAYDILTNFEQRWRKATKWSELGRKLKRVSHWNDDSLIKVERIFCILSPSESTPVDDPELWVSKEDDPENWHVQVFRSINSGSLKGFP

SEQ ID NO: 233982 - protein, 99 aa, Glycine max
  unsure (1)..(99): unsure at all Xaa locations
  Clone ID: PAT_MRT3847_5330C.1.pep
SKKLCGLGIYFSLFKXNKTKSRFFFAPPPPTRGAHGVSLRKIVASFPPPPQWGGRESPIFGLAHTKKLFFVGPLPFFVSGSLPSKMFFSPRTKKENYSS

SEQ ID NO: 233983 - protein, 134 aa, Glycine max
  unsure (1)..(134): unsure at all Xaa locations
  Clone ID: PAT_MRT3847_53310C.1.pep
PLVLLFXGXLGPPGXSCWGSPXPSLWPPGSXFACSRLVXXSLLPVXXXXFCSAGVVXPPSFFCPPFSXXWSKRRKTPAPPSKSNQYFSFKKKYVSVLFSITRVENCGQLNVLYASDFFLMCLKKKKKKKKKAPP

SEQ ID NO: 233984 - protein, 57 aa, Glycine max
  Clone ID: PAT_MRT3847_53311C.1.pep
KHYLLLVQRCSWPDSRKIQNIGLLSRSSYVESSHLFLLCSHSDLIYFCSSSLCLYFL

SEQ ID NO: 233985 - protein, 73 aa, Glycine max
  unsure (1)..(73): unsure at all Xaa locations
  Clone ID: PAT_MRT3847_53312C.1.pep
NTTAPNWIKISTEVVEGNIXQFAKKGLTPSQIGVILRDSHGNAHVYSVTGIEILRILKGHGLAPDVPEDLYQL

SEQ ID NO: 233986 - protein, 106 aa, Glycine max
  Clone ID: PAT_MRT3847_53313C.1.pep
RHLLRRPSPGSIRKRDVHPARAILVALIMSSLSPLSMGTRNSPQDHEWAPQKVCFWSSLSLDLSRTFRSFLERFSSLLSNRSNCLGFKKKCVFLFETNPDDSVGGL

SEQ ID NO: 233987 - protein, 124 aa, Glycine max
  Clone ID: PAT_MRT3847_53314C.1.pep
YRIIIPFKMKPYLRPIFLLFLILLDQSISASAAININGLRNKIREVLNKHPSINLPADKLKKVKRPLKALDYLLGECNDRPALQVDHVRTISDIDYQQNCPNAAYEAVCPLLKQAIQICCQKHA

SEQ ID NO: 233988 - protein, 91 aa, Glycine max
  Clone ID: PAT_MRT3847_53315C.1.pep
RIIIPFKMKPFLRPIFLLFGMLLYQSISASAAININGLRNKIREVLNKHPSINLPADKLKKVKRPLKALDYLLGECKDRPPQEFQEFLPEI

SEQ ID NO: 233989 - protein, 64 aa, Glycine max
  Clone ID: PAT_MRT3847_53316C.1.pep
DSNKIMCALLFCFLLGIIKPTPIVFGPFGWGLMQQLVISSLTYLSYNIKLSLIMTNKELKILFS

SEQ ID NO: 233990 - protein, 52 aa, Glycine max
  unsure (1)..(52): unsure at all Xaa locations
  Clone ID: PAT_MRT3847_53317C.1.pep
XXXSRXXMLSTPYXHSXXYXXIYXYXYXYIXXSXFXKDTXSLLHXAXVRXHA

SEQ ID NO: 233991 - protein, 68 aa, Glycine max
  unsure (1)..(68): unsure at all Xaa locations
  Clone ID: PAT_MRT3847_53318C.1.pep
MHAYXSSEFGSRSPQRIPIYTWLRTQETSREASLGERTMFWAVHEIGSVDTVFPSLTCNVTQLELMXP

SEQ ID NO: 233992 - protein, 64 aa, Glycine max
  unsure (1)..(64): unsure at all Xaa locations
  Clone ID: PAT_MRT3847_53319C.1.pep
REENMKLTVFPVAALTLVAWSCHGSCYQRSPLRMKTGYGERSSEEKCSRFXLAAEAHNIRAFKT

SEQ ID NO: 233993 - protein, 476 aa, Glycine max
  unsure (1)..(476): unsure at all Xaa locations
  Clone ID: PAT_MRT3847_5331C.1.pep
MATRVIPPRILKKLRYNTTTKPLNAAHPSISPVIAPPSLFERSPSPVADAVSTTSTTMETANLNLDDAERLFASVSTEKLLRSSAVLHATAVGPMVDLGMWLMKSPVFQTGLPKDLIMAATKETFFSHFCAGEDAAAAGRSISALKEAGLRGMLVYGVEDAHENDGCDSTAICLXNCLERMSDXLLRWQQKDPSFVLLWKQXSLPIFAESSPLYHTQKRPEPLTPEEESDLQLANQRLLELCQKCEEANMPLLAPLGGDAEHTTVQPAIDYFTYSSSIRHNKDDNPIVFGTIQTYLKDAKERLLLTTKAAEKMGVPLGFKLVRGAYMSTESKLAESFGYASPIHNTIQETHNCFNGCSSFLLEKIANGPGSISVVLATHNIESGKLAAAKAYELGVGKVNHKLEFAQLYGMSEALSFGLSNAGFQVSKYMPFGPVDMVMPYLLRRAEENRGLLAASGFDRQLMRKELGRRLKAAMF

SEQ ID NO: 233994 - protein, 146 aa, Glycine max
  unsure (1)..(146): unsure at all Xaa locations
  Clone ID: PAT_MRT3847_53320C.1.pep
TYLQSNEEQAQMETNLXKLSLDDPATPKGFMXDLKTAQSNRALPKNTGLGSILRIDLLAHFLTDDNFIARRVICCSTHSIKGKTKMVXATVRIPYNTDLAFAYAIHSSLRDHASSDIDSICSQDCELCNSACTKAMTMXFHPHPCA

SEQ ID NO: 233995 - protein, 38 aa, Glycine max
  Clone ID: PAT_MRT3847_53321C.1.pep
QPTKFQFLLFSFKGRGPKSVLNFCHQNLDFYARCFRIS

SEQ ID NO: 233996 - protein, 82 aa, Glycine max
  Clone ID: PAT_MRT3847_53322C.1.pep
NEKEDPLYKPFEYFANDKTGHLPMEELESPLEKYNMGDENPIKEITAEVDSPNDGRITYDEFVPMMRKGTPDITHITHRRRK

SEQ ID NO: 233997 - protein, 79 aa, Glycine max
  Clone ID: PAT_MRT3847_53323C.1.pep
LPSLTTKFTFLTITILFFILLIFFSISFINISYIISLQFFTSTINYLLLPNILTFPIFKYILFIYPLTLLFPHYFIINY

SEQ ID NO: 233998 - protein, 112 aa, Glycine max
  Clone ID: PAT_MRT3847_53324C.1.pep
VGLTALTMAEYFRDVNEQDVLLFIDNIFRFVQAGSDVSALLGRMPSAVGYQPTLSTETGSLQERITSTKEGSITSIQAVYVPADDLTDPAPATTFAHLDATTVLSRGLAAKG

SEQ ID NO: 233999 - protein, 112 aa, Glycine max
  unsure (1)..(112): unsure at all Xaa locations
  Clone ID: PAT_MRT3847_53325C.1.pep
TGPDCLGCPSRPFGFDKTTEGGIWPIYHKNTASAGKVLFKVTLTSHPNLPFKEFIVPXAAPFTAVLKLRRLXFKVPPQTSAIITNYGFGIFSHFTVFSISPMHGSDLDLIPY

SEQ ID NO: 234000 - protein, 49 aa, Glycine max
  Clone ID: PAT_MRT3847_53326C.1.pep
QNNPPVKTRMELLLGHCSRKEATIPSLVFNEQFPTFTHHNSVYNQCLLI

SEQ ID NO: 234001 - protein, 53 aa, Glycine max
  Clone ID: PAT_MRT3847_53327C.1.pep
NSQDLFLSSVVKYIVLVSDPFLLSTKYTFFKKNSQLSAISFSFQSSTLCWFFF

SEQ ID NO: 234002 - protein, 75 aa, Glycine max
  Clone ID: PAT_MRT3847_53328C.1.pep
IFIYCSLGFSCFFWTGTCRRPTFWGVSLLRAGRITDKTPPPEGGDPLATPHKQRNRKQTADRGARLLRELTKINR

SEQ ID NO: 234003 - protein, 46 aa, Glycine max
  Clone ID: PAT_MRT3847_53329C.1.pep
VAPAIIIYKYSALFTGFLHYTWVLFDLMCTTFLTCKSTYTFLYPYF

SEQ ID NO: 234004 - protein, 53 aa, Glycine max
  unsure (1)..(53): unsure at all Xaa locations
  Clone ID: PAT_MRT3847_5332C.1.pep
AKTLTQSEVKNGRLSXQFLGKLAERFFARMVYSAVPPGHTMRVMLGLGVAWKS

SEQ ID NO: 234005 - protein, 127 aa, Glycine max
  unsure (1)..(127): unsure at all Xaa locations
  Clone ID: PAT_MRT3847_53330C.1.pep
MKLEVPWFDGQDPLGWIFKITQFSNYQGIPNVEHLIVGSFNMEGPALCWYRWMSWNGFLTTWSAMXSCLGVVFHPILLRXPHDALFKLQQRGFVNDYLTEFKRFANRIVSLAPPFLLNCFIFSLNLD

SEQ ID NO: 234006 - protein, 50 aa, Glycine max
  Clone ID: PAT_MRT3847_53331C.1.pep
WPFRVGKWPRMNGVFCYEISPKGYFSFIEKFCVCVINRVRASFQNIMSYG

SEQ ID NO: 234007 - protein, 256 aa, Glycine max
  Clone ID: PAT_MRT3847_53332C.1.pep
GPCRRPPVPQEPAFAGACGNPGRRPTIKHSVSFGDVFPGASNGQFHFSIYKWASKGVPMVMPLSPLPLPPAKDKAKLERCSSAKEWIVSEITTQNPIEYNRTQDSNQSVEQVVSAKTQLDTSTSPQTVSKDVPASSISRDTREVESSIRSTSDKKLEPKPLQFLFKESDKKQDNDEMITREREENRMMKSTKKSSAVFDVTVNPMKQEEKAVPLRDVGRSKATSQGSVSLGENFGERPSERKGQRICSNFQPRSCK

SEQ ID NO: 234008 - protein, 102 aa, Glycine max
  Clone ID: PAT_MRT3847_53333C.1.pep
KSNFFVGRTDRSNPCATFTCLFFQFHIQQGFREQSTTMTAMSRFCCPRLQLWLHQPHLSTISCNIKEHDKTGTMAAILTPPYNNHIFQIICFNFHVALAESG

SEQ ID NO: 234009 - protein, 57 aa, Glycine max
  Clone ID: PAT_MRT3847_53334C.1.pep
NPFLIKAMEISKNKLYWSTFPQPSVCIPVRKSFFQGMSGNNSTGICWVKNFLVGQTP

SEQ ID NO: 234010 - protein, 221 aa, Glycine max
  Clone ID: PAT_MRT3847_53335C.1.pep
MKLRTQTQKSNAISPHRERSTWLLHVVVATVAILYGICVAESNEGVEHVRGGPDSVVWVVQLSDLHFSVHHPNRALDFAKLVGPALSVINPSLVLITGDLTDGKSKDLLTMKQNEDEWVEYRTVLDTVIKRSRLHKSLFFDLRGNHDSFGVPVVGGSFDFFSKYSINGQLGRNGSINSVTLENCRTLLKAYEMNPVLHLLGYGISIPLLLAYAISKTRSAE

SEQ ID NO: 234011 - protein, 69 aa, Glycine max
  Clone ID: PAT_MRT3847_53336C.1.pep
GLVNRLEEGVQVIPVPGGQQVDPGLGLERQRYGFVRCFRKGIRRALLKATQRFWGSTKLGKRPALKKRT

SEQ ID NO: 234012 - protein, 54 aa, Glycine max
  Clone ID: PAT_MRT3847_53337C.1.pep
FRVYNYELFFFLPVVFDTMTCCFLAILSSTLQLFYCWHKKKKKKKKKKGAAALE

SEQ ID NO: 234013 - protein, 262 aa, Glycine max
  Clone ID: PAT_MRT3847_53338C.1.pep
PTRPPTRPVTLLEANHCPGAALIHFNLPNGQRYLHTGDFRACKLMQAYHLLVNQRVNVLYLDTTYCNPKYRFPSKEEVLNYVVKITKNHLKIHPRTLVVVGAYSIGKECVYLAISKALGVKIYANASRRRILQAFGWPDLSDKLCTNGNNTLLHVLPMSSLRVETLKDYLKTYKEQFTAILAFRPTGWTFSEKISNDLELIKPVSKGNITIYGVPYSEHSSFSELQDFVQVLRPDKIIPTVNVGNAANREKMQSYFRDWLKG

SEQ ID NO: 234014 - protein, 55 aa, Glycine max
  Clone ID: PAT_MRT3847_53339C.1.pep
TWAGPDPSTQRGASRRKRRKNLRKKTVETTQFHNIMYHTAIASKLASDVSKGYKK

SEQ ID NO: 234015 - protein, 133 aa, Glycine max
  Clone ID: PAT_MRT3847_5333C.1.pep
NRNGGGRGGGGVPRRAAGERRFDKGMGGRRGNTDIPAGNFKKEAVEEKKEIEQTQETDKDRWKGLGYGISDDQQDITRGKGLVDSLFQAPQAAGTHYADMSAYEDLRTGPRQYWDDHRDGSYIDPSRYGTKLV

SEQ ID NO: 234016 - protein, 100 aa, Glycine max
  unsure (1)..(100): unsure at all Xaa locations
  Clone ID: PAT_MRT3847_53340C.1.pep
RYERLLAFQQFRECKIEYALKAAISLVKETVXTKFVATVGAHFSLIVDLTYVAHLLIATVDLPKVTGIPVYVAVLSRGEKFDGVNNAGVDLVGGEDLIEQ

SEQ ID NO: 234017 - protein, 89 aa, Glycine max
  unsure (1)..(89): unsure at all Xaa locations
  Clone ID: PAT_MRT3847_53341C.1.pep
MKAPSNGYLPNSGEGERKTINSELWHACAGPLVSLPPVGSLVVYFPQGHSEQVAASMQKEADFIPSYPYLXIQXICMLHNXAVHADPXT

SEQ ID NO: 234018 - protein, 324 aa, Glycine max
  Clone ID: PAT_MRT3847_53342C.1.pep
GRPQLGTSGYESNYVTPNPVIRPPLEHGWNWQSRPGAIQSNVRDEISPEDLQKNYGVDDDGEEEESDDLEDTDDDLMSDDDDSDASQKSHETRKKSKWYKKFFEILDGLTVEQINEPERQWHCPACQGGPGAIDWYRGLQPLVTHAKTKGSKRVKIHRELAILLDEELRRRGSAVIPPAEVFGKWNGLKVQQKENKEEMSMQEEFFKEQIRIIHDSRAAKEEEFERMQQEKREKVKPSSTSPLNEEEGRVKVDEYLKFVEFQDKEMENFVAEEEKLRQAHKDNVDAMTRRHWEEKVQLEERFNEELAKLMEKYSLSHPEKSNGI

SEQ ID NO: 234019 - protein, 223 aa, Glycine max
  unsure (1)..(223): unsure at all Xaa locations
  Clone ID: PAT_MRT3847_53343C.1.pep
GRPQLGTSGYESNYVTPNPVIRPPLEHGWNWQSRPGAIQSNVRDEISPEDLQKNYGVDDDGEEEESDDLEDTDDDLMSDDDDSDASQKSHETRKKSKWYKKFFEILDGLTVEQINEPERQWHCPACQGGPGAIDWYRGLQPLVTHAKTKGSKRVKIHRELAILLDEELRKRGTSVIPAGEVFGKWKGLKEEEXDHEIVWPPMVVIQNTKLEQDENDKRIIHVH

SEQ ID NO: 234020 - protein, 45 aa, Glycine max
  Clone ID: PAT_MRT3847_53344C.1.pep
VSLSTIETKVHMHTNSKLYNYVTKFKFTWASFYPFLKVRSLEYHN

SEQ ID NO: 234021 - protein, 79 aa, Glycine max
  Clone ID: PAT_MRT3847_53345C.1.pep
PRPQGLSSNIGQNGFFSIRRRQGTFARPNSMERLRLAFIPVLLRENDFFVGVPPPNFPVWLGEGDTRVLLRFFYIRVRL

SEQ ID NO: 234022 - protein, 86 aa, Glycine max
  unsure (1)..(86): unsure at all Xaa locations
  Clone ID: PAT_MRT3847_53346C.1.pep
GSFSCXFAFYFEPCPFRWXPVTFFFFCGSLLCFFVLTFXLSWFSLPLVYCLLDFSPPPPGFCLIPPYSSVVGMAWNLFQVNNGRAW

SEQ ID NO: 234023 - protein, 137 aa, Glycine max
  Clone ID: PAT_MRT3847_53347C.1.pep
HAAARAIGGCPIYVSDKPGNHNFDLLKKLVLPDGSVLRAQLPGRPTRDSLFVDPARDRTSLLKIWNLNKCSGVVGVFNCQGAGWCKIEKKTRIHDTSPGTLTASVCASDVDLITQVAGAEWLGDTIVYAYGVVDPNS

SEQ ID NO: 234024 - protein, 85 aa, Glycine max
  Clone ID: PAT_MRT3847_53348C.1.pep
FSFIFFFIFSYLLSLSSSYFFIFFNPTLFLFNSFLKLLNLVISIFLCTCESCLLLPSLIILFIIEPFFLTYFLTSLVISQDRFFF

SEQ ID NO: 234025 - protein, 61 aa, Glycine max
  Clone ID: PAT_MRT3847_53349C.1.pep
RHRMQSLTDFFIYIVSLITGRLSLIHRQMLLVNHYTIPELILLYNYITATTYVLSDIFYYD

SEQ ID NO: 234026 - protein, 66 aa, Glycine max
  Clone ID: PAT_MRT3847_5334C.1.pep
LITTRNACSTIAVQYIDLEVAALEHQGLNINSQRVQLKKNKMEHHLHLLIHYKVYHMNTAHHETKG

SEQ ID NO: 234027 - protein, 66 aa, Glycine max
  Clone ID: PAT_MRT3847_53350C.1.pep
IRQLASLVQLLWKKKKRWRLRAPSKMTRCSFKKNLFSSYKISRRIHSSHAEQDILNQSSYPINVFA

SEQ ID NO: 234028 - protein, 751 aa, Glycine max
  unsure (1)..(751): unsure at all Xaa locations
  Clone ID: PAT_MRT3847_53351C.1.pep
MTVTPKISVNDGKLVVHGKTILTGVPDNVVLTPGSGRGLVTGAFVGATASHSKSLHVFPMGVLEGLRFMCCFRFKLWWMTQRMGTCGRDVPLETQFMLIESKESETDGENSPIIYTVLLPLLEGQFRAVLQGNDKNEIEICLESGDNAVETDQGLHMVYMHAGTNPFEVINQAVKAVEKHMQTFLHREKKRLPSCLDWFGWCTWDAFYTDVTAEGVEEGLKSLSQGGTPPRFLIIDDGWQQIENIAKDATECLVQEGAQFATRLTGIKENTKFQKKLQNNEQMSGLKHLVHGAKQHHNVKNVYVWHALAGYWGGVKPAATGMEHYDTALAYPVQSPGVLGNQPDIVMDSLAVHGLGLVHPKKVFNFYNELHAYLASCGVDGVKVDVQNIIETLGAGHGGRVSLTRSYHHALEASIASNFTDNGCIACMCHNTDGLYSAKQTAIVRASDDFYPRDPASHTIHISSVAYNSLFLGEFMQPDWDMFHSLHPAADYHAAARAIGGCPIYVSDKPGNHNFDLLKKLVLPDGSVLRAQLPGRPTRDSLFVDPARDXGLSLLKIWNLNKCSGVVGVFNCQGAGWCKIEKKTRIHDTSPGTLTASVCASDVDLITQVAGAEWLGDTIVYAYRSGEVIRLPKGVSIPVTLKVLEFELFHFCPIQEIAPSISFAAIGLLDMFNTGGAVEQVEIHNRAATKTIALSVRGRGRFGVYSSQRPLKCVVGGAETDFNYDSETGLTTFSIPVSPEEMYRWSIEIQV

SEQ ID NO: 234029 - protein, 51 aa, Glycine max
  Clone ID: PAT_MRT3847_53352C.1.pep
VQLHHNHHCPDQGLTCLRGKGTALGAWGPHPLGLDHRNLWLDTEMILCGCY

SEQ ID NO: 234030 - protein, 153 aa, Glycine max
  Clone ID: PAT_MRT3847_53353C.1.pep
MSLRRGVPLSLLVLFLLLVSPAATLAFRKKHKIPGPIKTIVVIVMENRSFDHVLGWLKSSRPDIDGLTGSESNPLSVSSPSSATIPVTDDALFIDADPGHSFQAIREQIFGSNDTSAVPPPMNGFAQQAESILLGMSKTVMSGVKPHTLPVYT

SEQ ID NO: 234031 - protein, 86 aa, Glycine max
  Clone ID: PAT_MRT3847_53354C.1.pep
SPPLCRRFLLGLLEACLAWSWVPLLLVFFCFCLRRLVCRLAGLWSGLPFLCVLWTLVWRVPVFLGSSCSVGFRLLFLPLAVVCSFG

SEQ ID NO: 234032 - protein, 58 aa, Glycine max
  Clone ID: PAT_MRT3847_53355C.1.pep
NFSRLTPFLNPCGLNKQGPKTGTLNSNKRLFFFGRGPPFKFLILKKGWPYLKFHHLKG

SEQ ID NO: 234033 - protein, 71 aa, Glycine max
  Clone ID: PAT_MRT3847_53356C.1.pep
LPAALSQLMETMHALHVKQTHAVPDAVMIHDNRRDRTGFEPATHDHLACPIHFVQQVRGLHHLGPEHVEPR

SEQ ID NO: 234034 - protein, 103 aa, Glycine max
  unsure (1)..(103): unsure at all Xaa locations
  Clone ID: PAT_MRT3847_53357C.1.pep
AYGFNPGVQGAXILGTIAQAIXQQTVRNQMATVRTPLNFDSNQHSFCQLSIDLLGGGILMDKTGDWITLIQNTAIHXLDESCCLKERXLMVKIEMSGNATLKR

SEQ ID NO: 234035 - protein, 157 aa, Glycine max
  Clone ID: PAT_MRT3847_53358C.1.pep
MASKVELVVEVKSPADKLWTALRDSTELFPKIFPEQYKSIETVEGDGKSAGTVRLLKYTEGVPMVTFAKEKVEVADDEKKVVSYSVVDGELVSFYKNFRVTLQVTPKGGAAAPAADGAVVSWTMDFDKASEEVPDPDVIKETAAKTFHDLDDYLLKN

SEQ ID NO: 234036 - protein, 60 aa, Glycine max
  Clone ID: PAT_MRT3847_53359C.1.pep
RTLYYRKMNAEKNSVITIIFEFIGGLKKQSQIVFLTISILEFICITLQVTLFILYLKSYL

SEQ ID NO: 234037 - protein, 39 aa, Glycine max
  unsure (1)..(39): unsure at all Xaa locations
  Clone ID: PAT_MRT3847_5335C.1.pep
LVSAPXAAKMAYNLCYLPLTXXXFPWSXLXXLXASXLXV

SEQ ID NO: 234038 - protein, 81 aa, Glycine max
  Clone ID: PAT_MRT3847_53360C.1.pep
PCVLGRVGGNAALIGRVTEIIFWQWRNYPWSNANGHCKLNLFMWLNMLAANHRTPLAAKHICIAMAPPKLSVFALSVTLIF

SEQ ID NO: 234039 - protein, 159 aa, Glycine max
  Clone ID: PAT_MRT3847_53361C.1.pep
APGGGVQSLSVQGGGIGGMVGLAPGSVHVATGSPAANQLSSGDRIGKSNGDTSSVSPVPYVFNGGLRGRKSGGAVEKVIERRQRRMIKNRESAARSRARKQAYTMELEAEVAKLKEENEELQKKQAEIMEIQKNQVKEMMNLQREVKRRRLRRTQTGPW

SEQ ID NO: 234040 - protein, 214 aa, Glycine max
  unsure (1)..(214): unsure at all Xaa locations
  Clone ID: PAT_MRT3847_53362C.1.pep
SWWCVSNALIAALKRAQAHQRRGCIEQQQQQPLLTIKVELEHLIISILDDPSVSRVMREAGFSSTAVFYHIEDSNSPQYSVFQCYNSSGGVFSSPCSPSASENNNHRETATNNNPTNFRHPHHFLTSYAFXEFHPSLVFSPPKNAPVKDDVRLVLDILLRKKKKNTVIVGDSLSLTEGLVGEIMGRLERAEVPDELKSXSFIKFQISHVSLSCM

SEQ ID NO: 234041 - protein, 60 aa, Glycine max
  Clone ID: PAT_MRT3847_53363C.1.pep
PIPRGRVTQSPQKKRVYPEKAKGVQTPLGRKKESNLPQAPGGQLRAPNKNHTVVPVFSRI

SEQ ID NO: 234042 - protein, 51 aa, Glycine max
  Clone ID: PAT_MRT3847_53364C.1.pep
SLLVWGDSLLVLDLGLIVVNGVRALDFYAYGLSSQMSIQRYVFQPVLQRLE

SEQ ID NO: 234043 - protein, 102 aa, Glycine max
  Clone ID: PAT_MRT3847_53365C.1.pep
VFGNQKFSPHLNQTLTLILGNKRERDPVGELVAAIKVLGDGFVRTEQMKMEMAREIETMRMEMEMKRTEMILESQQRIVEAFAKAISEKKKKAKTVSSPQQP

SEQ ID NO: 234044 - protein, 58 aa, Glycine max
  Clone ID: PAT_MRT3847_53366C.1.pep
KGCSEQVYLTCKHNLALSGFLYETNITKKFSEKRITSFTLFLKFTNTKWLSVPPDTSS

SEQ ID NO: 234045 - protein, 217 aa, Glycine max
  unsure (1)..(217): unsure at all Xaa locations
  Clone ID: PAT_MRT3847_53367C.1.pep
MSPKKWFKAIIRLRKPKEDKSKLAKVQSTPEKTNASSEEKQEDTLEEALSIPSEGLAVERTVPTRLIEDIAATRIQNAFRAFLARRTLHHLRGAVKFEALIQDHMAREQTVTALNYIHTWSRMQDQIKARRLYMITEARIKQKRLENQLKLEAKIHELQVEWSGGSETMEEILSRLHQREEAAVKRERAMAYAYSHQWRPNCSQYLCHATYXLRKES

SEQ ID NO: 234046 - protein, 92 aa, Glycine max
  Clone ID: PAT_MRT3847_53368C.1.pep
VVSYPGGGSPKFCVLASVVEFAIPLQWCFEMRFLIPFGAEDSSRIIWFMGTFFFVGVFVPIRWLVSPWRPPPVFPFSSLFLFLKREHFFSPA

SEQ ID NO: 234047 - protein, 104 aa, Glycine max
  Clone ID: PAT_MRT3847_53369C.1.pep
CYAQFVASIGWTVYARRVMYLVVRVCLCGLVVFITSLCLERVGPRGLCLLVALLFSNPLGCLVDPSVFSVVCGAPWLPCCEKKKNRGKYTENKKKKKKKKKKVV

SEQ ID NO: 234048 - protein, 64 aa, Glycine max
  Clone ID: PAT_MRT3847_5336C.1.pep
TVPCGLTTFPIGKPNKTWPKYGHNLFPGENCIPLTFPNKLQPEALRGKPWGPYGWTNPKLLAWA

SEQ ID NO: 234049 - protein, 562 aa, Glycine max
  Clone ID: PAT_MRT3847_53370C.1.pep
MLAEPDDTHEPGAPGSLPSGSVATQPGTMTLDILELNRLRRSLHIGSHVWDHRLYSLDSLIKRSFSSKVKQEDELCADVKELRVVSQPERVHSFEARVRVQERIRKILPSSLHLSTLRSFHASGDYGNMVRDPLSNILRSYFQMLPWETQKLNLILSSTPSFISSVSGIAEGARLLLSQTYHGDRVIAVYDNDYSSIISYALSSKEYEDWVSGKSDMQESNWIARERSKKDLATSGFSAWGSLDLDYINYGSYGSEDVPSSVGSLLRDSKKSLHLQISFGDDSVGAGGKVNFSVTCYFAQQFESLRKKCCPNEVDFVRSMSRCRRWSAQGGKSNVYFAKSLDERFIIKQVTKTELESFEKFAPQYFKYLMDALNSGGPTCLAKILGIYQVTVKYPKGGKETKIDLMVMENLFYKRNISRVYDLKGSERSRYNPDTTGTNKVMLDMNLLETLRTKPIFLGSRAKRRLERAVWNDTSFLASVYVMDYSLLVGVDDDSKELVLGIIDFMRQYTWDKHLETWVKASGILGGPKNAAPTIVSPKQYKKRFRKAMTTYFLTLPDQWSS

SEQ ID NO: 234050 - protein, 312 aa, Glycine max
  unsure (1)..(312): unsure at all Xaa locations
  Clone ID: PAT_MRT3847_53371C.1.pep
ILELNRLRRSLHIGSHVWDHRLYSLDSLIKRSFSSKVKQEDELCADVKELRVDSLHKEQNFDCGLEQNNTRLSKLHESHESHMLAEPDDTLEPCASGSFTCYLEGEKVHSDGELNRTLSECFPSNESNLSERIDSAWTGTDQPQANAVPAGSIQRPNQHDSPPFRRVSQPVRVHSFDSAVRVQERIRKILPSSLHLSTLRSFHASGDYGNMVRDPLSNILRSYFQMLPWETQKLNLILSSTPSFISSVSGIAEGARLLLSQTYHGDRVIAVYDNDYSSIISYALSXKEYEDXVSGKSDMQESRIARERSKKI

SEQ ID NO: 234051 - protein, 56 aa, Glycine max
  Clone ID: PAT_MRT3847_53372C.1.pep
QELIYPKINLQIPYLSGASLFIPTIVLQKNRLKNIMAIVQNTIYLFATIKKLYIKC

SEQ ID NO: 234052 - protein, 170 aa, Glycine max
  unsure (1)..(170): unsure at all Xaa locations
  Clone ID: PAT_MRT3847_53373C.1.pep
MVLGLRSKSRKRVSIQVHYIIHVLEIKPWPPSQSLRSVQSVFLQWENGDKNSGSLPSTAGNGKIEFNESFRLSVLMCREASKKGKHPESFQKNCLEFYLYDKTVKSQLLGSAIVNLADFGIIKEAKALSIVFNCKXSFRNSSXPFLYXTIQPFDIESSSSSPSSSLSKEL

SEQ ID NO: 234053 - protein, 191 aa, Glycine max
  unsure (1)..(191): unsure at all Xaa locations
  Clone ID: PAT_MRT3847_53374C.1.pep
IPAYLWEKLMNYPLLSGIAFSAIVAMGGSAWADVVVGVGAPLTGPNAAFGAQIQKGAEQAAADINAAGGINGEKIKIVLGDDVSDPKQGVSVANKFVADGVKFVVGHFNSSVSIPAAEVYAENGILQVTPSSTNPKYTERGLXTFRTCGRDDQQGEVAGKYIAEKFKSAKVAVVHDKTTYGQGLADEINKA

SEQ ID NO: 234054 - protein, 55 aa, Glycine max
  unsure (1)..(55): unsure at all Xaa locations
  Clone ID: PAT_MRT3847_53375C.1.pep
XEPPNKGVFYNETTYNTRNPINIWFQHTNHSKHNQKLQTKSLSHKQKITLPRSNY

SEQ ID NO: 234055 - protein, 170 aa, Glycine max
  Clone ID: PAT_MRT3847_53376C.1.pep
MDEILNKVGSYWFSKKASKEFNSVGDDINSLSTSIEGGTKWLVNKLKGKMQKALTELLKEYDLPIGIFPRDATNYEFNEETGKLVVYIPQVCEVGYRDSSVLRFSTSVSGYLEKGKLAEIEGIKTKVLIWVKVTAISSEGPKLHFTAGMKKTRKREAYEVTRDGVTVDKF

SEQ ID NO: 234056 - protein, 61 aa, Glycine max
  Clone ID: PAT_MRT3847_53377C.1.pep
LQAGPRICLWEDFAYRPMKIVAMALVGFFRFKLANGTPNVTYKVMFTLHMDKGLHLCAIPR

SEQ ID NO: 234057 - protein, 147 aa, Glycine max
  Clone ID: PAT_MRT3847_53378C.1.pep
VLLNSTFIYMSSNDLKGGLPQLSSNVAFLDISNNSLSGTISPLLCDHKMLNGKNNLEYLDISLNHLSGGLTNCWKNWKSLVHVNFGSNNLTGKIPTSMSLLSNLTSLHLHENKLYGDIPLALQNCHSLLIFNVRENNFSGNIPNWIW

SEQ ID NO: 234058 - protein, 92 aa, Glycine max
  unsure (1)..(92): unsure at all Xaa locations
  Clone ID: PAT_MRT3847_53379C.1.pep
EKLMRERTFLLSACXSRMALRKKDVWRVECGIPSGFALTAICDNIPNEMLIKYSYHTLLRQAXAPHLFLQSFKNCVSMSVYGDDNLIIVHKY

SEQ ID NO: 234059 - protein, 67 aa, Glycine max
  Clone ID: PAT_MRT3847_5337C.1.pep
CCHPTLLVFFSCYLICFLLVFYLFLFYGYFKSRFAFFRLFGCTGFFLTYYDYAAPPPPPPQRRRTSY

SEQ ID NO: 234060 - protein, 47 aa, Glycine max
  Clone ID: PAT_MRT3847_53380C.1.pep
TTITTSVSVLFDHTLATSIAKSVHDFTVKDAKANDINLFNHKRNALI

SEQ ID NO: 234061 - protein, 111 aa, Glycine max
  unsure (1)..(111): unsure at all Xaa locations
  Clone ID: PAT_MRT3847_53381C.1.pep
LVXXXXHXXXXLXIXLXGXXSCXXXXXXXPHXLXXXLSXXXXPXXXFXLLXXXXXIXVSXXXXXXLXLDXXXXLXXXSYXXLVXXLXXXIPXRXXXLRXEXXXXXTXXXYX

SEQ ID NO: 234062 - protein, 70 aa, Glycine max
  Clone ID: PAT_MRT3847_53382C.1.pep
KRQRSLISDAQDNDPRVRYFFSLVCAASARSSSPARGVRGADPTMARARIGPNRKSSSGGDFTKNFVSAA

SEQ ID NO: 234063 - protein, 66 aa, Glycine max
  Clone ID: PAT_MRT3847_53383C.1.pep
FVIGYQHKIVLYCQCMTIKLKDNPTFNYNYYLFTAPISCGYKQVINEIIANWADIGHWRFFYDVFG

SEQ ID NO: 234064 - protein, 342 aa, Glycine max
  Clone ID: PAT_MRT3847_53384C.1.pep
MASSVFFTHSHCYSSKPSSLVFRQVGVGPTSLRFSSSHVASVAAMAMDSSAKVIDGKSVAKQIRDEITAEVSRMRESIGVIPGLAVILVGDRKDSATYVRNKKKACESVGINSLEANLPEDSTEEEVLNYIAGYNDDPSVHGILVQLPLPSHMNEQNILNAVRIEKDVDGFHPLNIGRLAMRGREPLFVPCTPKGCIELLHRYNVSIKGKRAVVIGRSNIVGMPAALLLQREDATVSIVHSRTSNPEEIIRQADIIIAAVGQANMVRGSWIKPGAVIIDVGINPVEDPNSPRGYKLVGDVCYEEAIRIASAVTPVPGGVGPMTIAMLLQNTLISAKRVHHFE

SEQ ID NO: 234065 - protein, 64 aa, Glycine max
  Clone ID: PAT_MRT3847_53385C.1.pep
QQGRIIMRISAARGVRRTIILGESEFLMRALESMGGSSSLFWGLRNTIEVFVGTYYCYSGPDVT

SEQ ID NO: 234066 - protein, 63 aa, Glycine max
  Clone ID: PAT_MRT3847_53386C.1.pep
KKNGGFKRMVMKSCYYPKKDSTMQVGISFCQMIFMKTACGALIFQWASQVGLKITRVEKGFIL

SEQ ID NO: 234067 - protein, 127 aa, Glycine max
  Clone ID: PAT_MRT3847_53387C.1.pep
LAIKSADRPDIVLAIPEGGNPKGLWFTLKEGSRYRLMFTFQVENNIVSGLKYTNTVWKTGIKVDSSKEMIGTFSPQAEPYTHEMPEETTPSGMFARGQYSARSKFVDDDNKCYLEINYTFDIRKEWQ

SEQ ID NO: 234068 - protein, 50 aa, Glycine max
  Clone ID: PAT_MRT3847_53388C.1.pep
CLERHFIGLVLNPFVGLIISLEFRLFIDPISSSKYGRGPPCEHFPLIIAN

SEQ ID NO: 234069 - protein, 45 aa, Glycine max
  Clone ID: PAT_MRT3847_53389C.1.pep
RIHTYWQKKILIFLIKQKIMTFSKLLTFLNNLNCVLDRTPIVGVF

SEQ ID NO: 234070 - protein, 96 aa, Glycine max
  Clone ID: PAT_MRT3847_5338C.1.pep
RKCSINNNSMPVSVLVDPALRRSCPSKSSSIIPWPKCTVDPRTIWSDLSYPPCGLEVRALELNETYPDTSHRPSILSAPLRFTICFFDQDLDRCHE

SEQ ID NO: 234071 - protein, 69 aa, Glycine max
  Clone ID: PAT_MRT3847_53390C.1.pep
GSSKKTHFWMLVNMPHWPSIYIWLALNAQNIMEPMEEMGKNLFMFMRTFWISMLHDRTRITTVVFTHPR

SEQ ID NO: 234072 - protein, 31 aa, Glycine max
  Clone ID: PAT_MRT3847_53391C.1.pep
PWTAKLYHLEFLESVIGSLNEKFLKPLPCSV

SEQ ID NO: 234073 - protein, 71 aa, Glycine max
  unsure (1)..(71): unsure at all Xaa locations
  Clone ID: PAT_MRT3847_53392C.1.pep
MSYVVDPELKHFRYEDLKAICEVITXCINPDHSVRPSMRELCTMLESKIDTTINLELKASSLAWAELALSS

SEQ ID NO: 234074 - protein, 63 aa, Glycine max
  Clone ID: PAT_MRT3847_53393C.1.pep
HQQESFSRCDSPSSPLPCRIVAIFQIAPCIEFKSGFPALGRGHGDSGVQKGIGFHVLLIGRVG

SEQ ID NO: 234075 - protein, 95 aa, Glycine max
  Clone ID: PAT_MRT3847_53394C.1.pep
HCLLRLRPLETEAFFFLFGECRVGGLVSPSSCFSPWVFVGFAVCWCWGPVPLAGFPSLLLPFVPALGWLSVPWGGCGLFPKRCPSAFASSAGQNK

SEQ ID NO: 234076 - protein, 93 aa, Glycine max
  unsure (1)..(93): unsure at all Xaa locations
  Clone ID: PAT_MRT3847_53395C.1.pep
FIQEGHRVVQVEQNLDVEGQSLYLSDVXEEDPLGKKPFLNGHGNIYKSLRLTSPHEIMGXTDSSFLGKKDXLMRRFPTHTKLLMCLTNFREHF

SEQ ID NO: 234077 - protein, 59 aa, Glycine max
  Clone ID: PAT_MRT3847_53396C.1.pep
FRFATNPFWFIKNLWGEKWGKNGFSKLSKGHGMFEITPMVFSPMVPHPQTTPKKNYVFY

SEQ ID NO: 234078 - protein, 57 aa, Glycine max
  Clone ID: PAT_MRT3847_53397C.1.pep
RFHSSGLEAINSLEATLFLMPEKNGPFLAFTFEEFQALACLKTQLQAGNIKNRGVLH

SEQ ID NO: 234079 - protein, 94 aa, Glycine max
  Clone ID: PAT_MRT3847_53398C.1.pep
WGIVFQIELEILLVTKEKNYNKGEDKKFPKMRVVGQNRVSHVVYIPLHVENEIEQRNIQKYNFVFQLGQKAFPFLLLFHEMVVEEKVWCCFKIL

SEQ ID NO: 234080 - protein, 66 aa, Glycine max
  Clone ID: PAT_MRT3847_53399C.1.pep
FLVYEKSVAVLIFQALYAHLGTLQLMVQSRVLFSTILYSMQQVVTTPVIVWTARFEPFDARLEFNA

SEQ ID NO: 234081 - protein, 50 aa, Glycine max
  Clone ID: PAT_MRT3847_5339C.1.pep
MIELKQSSFYWPTLWKGAYEYVQTCDNCQRTGGISRRNEMPSNSIIPIVM

SEQ ID NO: 234082 - protein, 70 aa, Glycine max
  Clone ID: PAT_MRT3847_533C.1.pep
GNQNSSIQLLHFDDPMNESIVLNLHGTRSQGCQTTTKLVIIFHTIPCGNYGGNKHRRKKRDADGISDSKK

SEQ ID NO: 234083 - protein, 125 aa, Glycine max
  unsure (1)..(125): unsure at all Xaa locations
  Clone ID: PAT_MRT3847_53400C.1.pep
VAVHNITLTVGIDKTRATSQYRKKAQCDSIKRNSQQRSNAXRRHPEDXRQVLWXQRSSMLQSHNLETQEAHLANQGNVSREFILHKPQEARQLRRKALSRIQWMQKADPPTIAQIETFHSMHRMM

SEQ ID NO: 234084 - protein, 159 aa, Glycine max
  unsure (1)..(159): unsure at all Xaa locations
  Clone ID: PAT_MRT3847_53401C.1.pep
RSRGGESKFSKKFFLTTIQQRWRQAAIGSILILVGIFLISVSLYFLLGSIIEIYIRKTSVLTEGTIILSKWSDPTYFIRTQMYTFTVRNPDXITHGAIPSVKRQGPYSFDQIQXRKIHQIVNGTVQFETLQSYHLNEEASCAECFLYIRIWIPNLVYQK

SEQ ID NO: 234085 - protein, 142 aa, Glycine max
  unsure (1)..(142): unsure at all Xaa locations
  Clone ID: PAT_MRT3847_53402C.1.pep
DIVHCTEFELVPAAVNAALQTIANVSISSELQDALLKAGVLWYLLPLLLQYDLTAEESDATESHGVGASVQIAKNMHAIKASHPLSKLKGLCXDESATPYNQAAACADRRLLTPKLSYMLKNQMYKELLCIVNAHLESPEII

SEQ ID NO: 234086 - protein, 60 aa, Glycine max
  Clone ID: PAT_MRT3847_53403C.1.pep
LSDTGSSLVRRINKSDSSRGGLRRKRRLTNEIGGAPDHPDGAARDLPWSHPQADRLQQLP

SEQ ID NO: 234087 - protein, 67 aa, Glycine max
  Clone ID: PAT_MRT3847_53404C.1.pep
LSGMTGTAKTEEKEFLKMFQMPVIEVPTNLPNIRKDLPIQAFATARGKWEQVRPEVEYMFRQGRPAF

SEQ ID NO: 234088 - protein, 62 aa, Glycine max
  unsure (1)..(62): unsure at all Xaa locations
  Clone ID: PAT_MRT3847_53405C.1.pep
SXXLXKVLXXKKVWIXXXEXCXMQRLIGMSLLQILSCWLCEDERFQXLKIXPILSCXXTGCS

SEQ ID NO: 234089 - protein, 230 aa, Glycine max
  Clone ID: PAT_MRT3847_53406C.1.pep
DIIAVLIDFLVAPHATTTVLLAGKDKSSKGKKRKHVVKQGSSRSATTSRRSVKSQKKNEDSSVVRRKSACDTDESEEDEKDEENEEENENGVPDKSEDETPEKSESEDKSDSGSESEDTKEKKKPSKTSSTKKESAKKSKIEKITVANKSRSPPKRAPKKPSSNLSKSDDDSDESPKVFSRKKKNEKGGKQKTATPTKSASKEKTEKVIEGRYLELSFVIAIISFENVLI

SEQ ID NO: 234090 - protein, 41 aa, Glycine max
  Clone ID: PAT_MRT3847_53407C.1.pep
ECAIIYKLIDHTYLFTSILREYFLEEIISFYSKLSHELSET

SEQ ID NO: 234091 - protein, 542 aa, Glycine max
  Clone ID: PAT_MRT3847_53408C.1.pep
CEKTTEGEVKETIEGKQENEKVEAEKPEVDAMEVESGIPQKEGSDKKEKKDVAMEEEDEDEGKDNIDKSKEEEKAEDSKGEKRSKKRGRGNINGEKVKEKRKEPKKTEPRTPTIDRPVRERKSVERLVASIDKDATKEFHIEKGRGTPLKDIPNVAFKLSRRKTDDTFKLLHTILFGRRGKAVEIKSNISRFSGFVWRDNEEKQMIKVKEKLDKCNKEKLLEFCDVLDITINKATSRKEDIIAKLIDFLVAPHATTTVLLAEKEKPSKGTKRKRVVKRGSSRSATTSRRSVKSQKKNEDSSVVRRKSTSDAEDESEEEERDEENEEENENGVPDKSEDETPEKSESEDKSDSGSESEDTKEKKKPKTSSTKKESAKKSKIEKIKVATKSRSPQKRTPKKSSSNLSKSDDDSDESPNPKVFSRKKKNEKGGKQKIDDSDESPNPKVFSRKKKNEKGGKKKIDDDSDESPNPKVFSRKKKEKGGKQKRSTPTKSTSKERTEKVTKGKGKKKEKSSLSDNQLRDAICEILKEVDFNTATCTDLQI

SEQ ID NO: 234092 - protein, 50 aa, Glycine max
  unsure (1)..(50): unsure at all Xaa locations
  Clone ID: PAT_MRT3847_53409C.1.pep
NLHATFKLPLVIQSPSIVGNLSFFLTCSEPEWVPNPSRNSTIIHQMRXLV

SEQ ID NO: 234093 - protein, 127 aa, Glycine max
  unsure (1)..(127): unsure at all Xaa locations
  Clone ID: PAT_MRT3847_5340C.1.pep
MGRLDHLWDDTAAAPXTENALAKLRKHXTFTFRPNCGKEEKGASAXSEHTTNRLQEATRATRTIMTATPTAYQSGSPPVSPAGSTPPMSRVLRMKRFLSRISKKDEXSDAYEKRGQNRSGPSAPFDV

SEQ ID NO: 234094 - protein, 67 aa, Glycine max
  Clone ID: PAT_MRT3847_53410C.1.pep
IAVSHFDSLQLLMKSNAEEIIKPRQYLALTDEGMPQHNLPFMNVTLYIQYNVVKPYSGFVFPDQCQL

SEQ ID NO: 234095 - protein, 129 aa, Glycine max
  unsure (1)..(129): unsure at all Xaa locations
  Clone ID: PAT_MRT3847_53411C.1.pep
VPRSRFLPVKSXSDVLLIKSGLHTMXHGQLTMNKARQFSGTPVIKLGDQFKKVSGFERRVKGGLNSVEPDHLXTVSGDVHIGKNCTFAGTVIIIATGGNKITIPDGSRLENKLVTGSLAIIDHYRVRSL

SEQ ID NO: 234096 - protein, 50 aa, Glycine max
  unsure (1)..(50): unsure at all Xaa locations
  Clone ID: PAT_MRT3847_53412C.1.pep
LKIFLTTNHXQQRVDLPHIIHHGYSEKSITKSNCSHFTVQNTDCLILYNI

SEQ ID NO: 234097 - protein, 124 aa, Glycine max
  Clone ID: PAT_MRT3847_53413C.1.pep
AAITHTRRTLSKPGDELQLSWSAPGETVSYDGLYNTSIGGLINGTTPAFAAFISQLNVTYSPVTVTGENTGTTVHPEGFLFEDINNIVNGTDFVALVDTDLYVTPYNLSLLNDHIFAFGLYQAN

SEQ ID NO: 234098 - protein, 53 aa, Glycine max
  Clone ID: PAT_MRT3847_53414C.1.pep
RSSRTLLRALTLLPSPTLHPHARHSTESLPSRAHTLMTPLIHSHGTLFENESY

SEQ ID NO: 234099 - protein, 46 aa, Glycine max
  Clone ID: PAT_MRT3847_53415C.1.pep
RAYVCIFSTLIIRELLFKVETSFETQNSRLFLSLYLRSSSFNFKVL

SEQ ID NO: 234100 - protein, 113 aa, Glycine max
  Clone ID: PAT_MRT3847_53416C.1.pep
MRQAGAYSGLLCGGVSGRTGPHSLPLARIKKIMKNSGEDVKMISGEAPIIFSKACELFIEELTRRSWIMAIQGKRRTLHKEDLASAVIATDIFDFLITLVSSSESHAVGGATN

SEQ ID NO: 234101 - protein, 46 aa, Glycine max
  Clone ID: PAT_MRT3847_53417C.1.pep
GYVDDGGLCYCDCLILYMVIVRPFNVHLLAFMPVLFFQLSQSLNIC

SEQ ID NO: 234102 - protein, 72 aa, Glycine max
  Clone ID: PAT_MRT3847_53418C.1.pep
ESLKCFREMKLKGVFPSIYISRSLVPNFTKTGKVWLAPKLFKGLDFSSPCLAGPKDFHPKKRQRNPFKSLSF

SEQ ID NO: 234103 - protein, 96 aa, Glycine max
  Clone ID: PAT_MRT3847_53419C.1.pep
MASPGFFSFGRFWPPFQGQGGMRQQLDPSAHTMKSHVSALARKHVRDWLILLLLIVIEIVLFVIHPFKRFVGRDMMEDIRYPMKENTVPGWAGPLY

SEQ ID NO: 234104 - protein, 395 aa, Glycine max
  unsure (1)..(395): unsure at all Xaa locations
  Clone ID: PAT_MRT3847_5341C.1.pep
MQEKWESYNTINNRQQQQQXPSRAAMRGVGGGEIVEVQGGHIVRSTGRKDRHSKVCTAKGPRDRRVRLAAHTAIQFYDVQDRLGYDRPSKAVDWLIKKAKAAIDQLAELPPWNPTATSMQPRQLPQEIVHCENKSLAMDDSMTAAFSSRGESNAFASHQQVEDNENANNISSSSGNKYNTGSGFLPASLDTDNIAETIKTFFPVEATSTSFQSYPPAPPDLGHQDLRLSLQSFQDPIMLHHQPHSHHQPVLFAGTAAAALDFDGGSGWSEHLHQHQQQNHHSEEQRLLYAGGNSGHGGGFVFNTPAPVQVPAFGQFFSQRGPLQSSNTPSIRAWIDPSVDHHHHHHHYLSQLIHQGSVAGGGGFSGFRIPARIQGEEEHDGVSDKPSSASSDSRH

SEQ ID NO: 234105 - protein, 75 aa, Glycine max
  unsure (1)..(75): unsure at all Xaa locations
  Clone ID: PAT_MRT3847_53420C.1.pep
GLWDVIHNXKHCEVAKKRILFWRKRXCVNGPTGRNERTDPSAQSSAEYLTXPAIHKGNPENIFGNVINLKGPRKI

SEQ ID NO: 234106 - protein, 67 aa, Glycine max
  Clone ID: PAT_MRT3847_53421C.1.pep
SLPAFHTVRSTSVIRPSYVVFSVVHTSLAFSCCSSLILCYGAFPMSMTKWYPVNIALAPSKGSPNHS

SEQ ID NO: 234107 - protein, 66 aa, Glycine max
  Clone ID: PAT_MRT3847_53422C.1.pep
RGLFCMTTTSDVFKPTSTKAPSNHFKFLEKMNSPIELVHPNTLLKLFPIPTIYFFKSDGCNKSLIS

SEQ ID NO: 234108 - protein, 77 aa, Glycine max
  Clone ID: PAT_MRT3847_53423C.1.pep
FFVLNNNLSPKLLVKKAHLYQLSPTCTPRTEQIGSFFGLQYQVTSSLFPIILCLLDLCTLSSKVHSTHFRVNQILDL

SEQ ID NO: 234109 - protein, 85 aa, Glycine max
  Clone ID: PAT_MRT3847_53424C.1.pep
SVFRKLFFREIHARASVMDVHDYRSVLDTVGVYVWMFIYAALARVYVDSAGELNLRRDGIVRALLRRHGGCSSGSDLHDGGNDLN

SEQ ID NO: 234110 - protein, 185 aa, Glycine max
  Clone ID: PAT_MRT3847_53425C.1.pep
PRTTDVAVKQNALQGKGISSPLSLASSKATPTIANPLMPLSSPLWSLPTPSCDSLQSSAFARGSVVDYSQALTSSHPYQTPPLRNFLGHNTSWLSQATLCGAWTPTSAPDNNSSHLSASPLTDTIRLSSVKGYPVPPSSGIKNAPPGLPASSAGLQNVFIATAPPLDTSNVTVLNAQHSSDSKPK

SEQ ID NO: 234111 - protein, 49 aa, Glycine max
  Clone ID: PAT_MRT3847_53426C.1.pep
FITILHLFNLKPFLHNFSNITQKLKLLKPITGTLHHISIISLPLFLPKH

SEQ ID NO: 234112 - protein, 124 aa, Glycine max
  Clone ID: PAT_MRT3847_53427C.1.pep
KKRKKKHLFTLTGSRRKLYYICIYNSCPTNAAERLVNNTSSHGEKQKTCHHSLPQNKVIIVEDLKYLHGLLQKHFLEVPIMSSHGRQGTLTKLQGWLATLVMGMLQPSPRGSSCHHCYPLMQMP

SEQ ID NO: 234113 - protein, 51 aa, Glycine max
  Clone ID: PAT_MRT3847_53428C.1.pep
EDWVIAHHSCCCYARWICGVHQKLCPFMVEKPRVSCSVRTGAKGLERVLEP

SEQ ID NO: 234114 - protein, 612 aa, Glycine max
  Clone ID: PAT_MRT3847_53429C.1.pep
GNPLCCARWYRAQVFSFFSYPERLKLDEKEINTSDFWKRQIIIASMHKRPASFGIYVPAKDEAVIEGGNIRRKKVSRLVSIKNEETTSICSDEDSASCANDIQNRQDPDLSDNEAEIVDLINRVEHMKKERSIHWLREFKDWMDTASDKSVETRKEGGASLHHQKENYIRKKTNQEQSGDISRYASDSVLASGDDSSMNILESDSSFVDMSASYHRQQHFDYRGLLGNVSGASHFDSRGVDMERLKSSLEGISSSLSQPRSSHSDTVTTQGAQRMTENVNISPLITIHDISGSQSSSACPTSPPHFQEDLLHRRQHLVEEILQLSADSFSVASSDSNTSCSEVDCSEFESSVPKVDNFPCKYYMNGSVDGHLSQNLLKEKFYNPRQGILHARENGNSLSSSTCDPTSKQHSIDFAAGADNAESAFCASQDTGLLEKRKIRKKAKKRIISILEENLDGDASDHTQEQISQGQISPNLKQELDIDDSTEFSGRNYSTQENDDLIVTYFNTSIADSEASEVCSHCMRCNCVLQRETNYKESEVAVLLSSHKKLYLLLINVDSNGSGTLLSVLSCHKIEEVCEVLVGMGLQVLRVNFENGETYLFVTRSIEKSREL

SEQ ID NO: 234115 - protein, 44 aa, Glycine max
  Clone ID: PAT_MRT3847_5342C.1.pep
YGCEKTTEGHEHKAFRNQIISTINSIQKVYTLNTIVQKSNKQAN

SEQ ID NO: 234116 - protein, 208 aa, Glycine max
  Clone ID: PAT_MRT3847_53430C.1.pep
MACQMGTMTLNWRLSITENESSEKSCVNLATSRIHSCCCEPNFNGLTLKACMKSSPFAQSCFLGRRAGWKIAFALNTGGVSGNGDQQSFNEASSNLGGTRLGRILTAGGRQLLEKLNSARKNIPLKVFLLLLGFYTANALATILGQTGDWDVLVAGVVVAAIEGIGMLIYRKLPTARTGRLQSFLVLVNYWKAGICLGLFVDAFKLGS

SEQ ID NO: 234117 - protein, 75 aa, Glycine max
  Clone ID: PAT_MRT3847_53431C.1.pep
MPTRCEICCEIMIAILIPPLGVCFRHGCCSVEFIICLLLTILGYIPGIIYALYAIIFVDRDQYFDEYRRPLYAQY

SEQ ID NO: 234118 - protein, 107 aa, Glycine max
  Clone ID: PAT_MRT3847_53432C.1.pep
MKLTVKWAPDVYDPVPTLLSHTVKNKKQQKPRIKKSEKKNGKKGQKVSYSKRGSSKDKQYRNRWFYSHDEVFEASSDNAANHDSYCGTSYYLETSLTKVHWSIGEAL

SEQ ID NO: 234119 - protein, 111 aa, Glycine max
  unsure (1)..(111): unsure at all Xaa locations
  Clone ID: PAT_MRT3847_53433C.1.pep
IMGLMSVPFGGTKASVFIEQWVRPRTRAKSKVIAGGSDLSLSEPCTVWEKPPVWVSLGPLLTXPFVIDGGVSKTLALKGAHPDLGNGTFELWDFCFELFSCCSRLFFSPST

SEQ ID NO: 234120 - protein, 83 aa, Glycine max
  Clone ID: PAT_MRT3847_53434C.1.pep
PLNPIVNPSIFHRLIPKLACHKNPRDQLRALSYISKHSWLYLEVVGHQYIGSQALVLPPLIDQSLRPPMSFKSLAGAFNYSHP

SEQ ID NO: 234121 - protein, 233 aa, Glycine max
  Clone ID: PAT_MRT3847_53435C.1.pep
MALEALQSPRTATPSFSPFEETNLSYLETPWTKGKRSKRSRMEQQLQHSSCTEEEYLALCLIMLAHGGAGGVPAAKPAVSDNNSAPLPAAKLSYKCSVCNKAFSSYQALGGHKASHRKLGGEHHSTSSAVTTSSASNGGARTHECSICQKTFPTGQALGGHKRCHYEGGNSAVTASEGVGSTHTGSHRDFDLNLPAFPDFSTRFFVDDEVTSPHPSKKSRLNLTIPKIEIPQY

SEQ ID NO: 234122 - protein, 58 aa, Glycine max
  Clone ID: PAT_MRT3847_53436C.1.pep
SVVLIKRLFNKVYFIIKKLELIFIYLIKMCKSSYRTVLRCIMRRKILATRMVVCGGPR

SEQ ID NO: 234123 - protein, 84 aa, Glycine max
  Clone ID: PAT_MRT3847_53437C.1.pep
STTRGTQRAFVDLDSEGSTLFMEATQLPSSLFIIHIAQMNFHGTCCQWWLTKILTMRILSTISSFFGSGMVTSIGLVIVYYLII

SEQ ID NO: 234124 - protein, 64 aa, Glycine max
  unsure (1)..(64): unsure at all Xaa locations
  Clone ID: PAT_MRT3847_53438C.1.pep
MASLVASTAAXTLGMTEMLGNPINFNGDTKPAPSASNPDTYKTVAHFSEKMATATSPRKAAAAA

SEQ ID NO: 234125 - protein, 97 aa, Glycine max
  Clone ID: PAT_MRT3847_53439C.1.pep
PTRPICPKLDYVSTQLGCTSIQSLLCATCSLLPSLSGSDIRLLHSHDTLIADLFLLLSFGRSQPPRSPTSIHSIPILRLHRHCITFSSLIQSYCSRR

SEQ ID NO: 234126 - protein, 45 aa, Glycine max
  Clone ID: PAT_MRT3847_5343C.1.pep
RDRKCRLAGSFLRPQLPLIQGRLVNLQDALLQFPALGKALRYRSS

SEQ ID NO: 234127 - protein, 75 aa, Glycine max
  Clone ID: PAT_MRT3847_53440C.1.pep
RIRNTHYCYLTAEDMIGKASTLQSHLNKKNLHGEIQLQHMHVTDYLNGDMLERTKPSMFFSQINLSLSLRGPRNA

SEQ ID NO: 234128 - protein, 133 aa, Glycine max
  unsure (1)..(133): unsure at all Xaa locations
  Clone ID: PAT_MRT3847_53441C.1.pep
GGVNLPWPRPRFYPPGTGKPPGFPPLNPLPPPPPSPPGVKTKRPPPXPPPPQLPPPKGKRAPPLNRPLNPGGGGGPPPGTLSLSHPLSPPPLGFFPFFFPPLPGFPPKTLKRGPPLRVPNNSLRPPPPQNLIG

SEQ ID NO: 234129 - protein, 286 aa, Glycine max
  unsure (1)..(286): unsure at all Xaa locations
  Clone ID: PAT_MRT3847_53442C.1.pep
MACRGCWECLLKLFNFILTLTGLAIVGYGIYLFVEFSKASDDDNTPAISPVSDDSALIQLGRPVLMAVSLSNDFFDNLPRAWFIYLFIGIGVVLFLISCFGCIGAATRNGCCLSCYSILVALLILVELGCAAFIFFDKNWKEEIPTDKTGDFDAIYGFLIETXKFGRILIIYLRNXMKLQALLFLLALIVRAANRPADYDSDEEFINPRQQVQQPLLNRLPAGPATGIPVAGTIDQRPSRNDAWSTRMREKYGLDTSEFTYNPSESNRFQQVNSQPTEEKSRCAIM

SEQ ID NO: 234130 - protein, 228 aa, Glycine max
  Clone ID: PAT_MRT3847_53443C.1.pep
MAQQLGVPFKLSCKPSHIHALKPFHSLPPLRTFTTKPSLNAKSHHHHHPLLTLLRSHRTLAPCCNSNKSDIMSQLELGKPEQKGKPEKRVNGIFWIILLNIAIFVADHFFRVNGIKALYLYHNWPSWYQFVTATFCHANWKHLSSNLFFLYIFGKLVEEEEGNFALWLSYILTGVGANLVSWLVLPRNTVSVGASGAVFGLFSISVLVKMSWDWRKILEVLILGQFVI

SEQ ID NO: 234131 - protein, 62 aa, Glycine max
  Clone ID: PAT_MRT3847_53444C.1.pep
SGQEIHGCSSPGRTKIFMRTRSTTRYLRTRSNRRPSVSYTMPMTRSAIADNEKDHDMVSRLR

SEQ ID NO: 234132 - protein, 92 aa, Glycine max
  unsure (1)..(92): unsure at all Xaa locations
  Clone ID: PAT_MRT3847_53445C.1.pep
ESALISTLAIDSVHIGNPRWDLYWLVHSIKPDGQMPIDXTVGCGYDASGTLLRETGARMHVPRTGFLDLETAELDGFRTGAFRVMVPAELLI

SEQ ID NO: 234133 - protein, 36 aa, Glycine max
  Clone ID: PAT_MRT3847_53446C.1.pep
LACFCFFFCFVFFTIIKNNIKFDLKSKFYVFFFFKS

SEQ ID NO: 234134 - protein, 249 aa, Glycine max
  Clone ID: PAT_MRT3847_53447C.1.pep
LGLMARGPWRSGGTRRPPYLAAPTSLFSLAGDSVGAVRGPSMRPLVGPILFCATGPAPFLAVSGALPLRLPTNETLPKELHPVFFMFVAPPVVASMAWASIQDSFDYGSRISYFIGLFLYFSLAVRVNFFRGFTFSLAWWAYTFPMASTASATVRYANEVTNVVTKTLSVILSLMSTLIIAAVLVSTILHALVFKDLFPNDHAIAISHGKRRPEKKCLALGYTSHDSVEIDLEASTPLPNGREINLHSI

SEQ ID NO: 234135 - protein, 75 aa, Glycine max
  unsure (1)..(75): unsure at all Xaa locations
  Clone ID: PAT_MRT3847_53448C.1.pep
SLPWSKEFDLFEEKIEQVPLTKCEWFSDFHPNXQSXXXXXXLXXXXXXSPPWXXWLXCPSXXGXKXXFQXXXGVS

SEQ ID NO: 234136 - protein, 111 aa, Glycine max
  Clone ID: PAT_MRT3847_53449C.1.pep
MVVYQDLLTGDELVSDSFRYNEMENGMLRQVEGKWVVKGAGAVDIGADPYAEGGEDEGVDDAADKAVDIVDTFRLYELPDFDKKQFDTFMNRIIKNMTTKLDAQNPELFKK

SEQ ID NO: 234137 - protein, 84 aa, Glycine max
  Clone ID: PAT_MRT3847_5344C.1.pep
GGEKQLFSHFWKNTANNFSSKINCISKMISKTSALKTKRQKQLRDVFLSPVFFRCSRDNFFRKQQSTHETNIQMWVQETEILEN

SEQ ID NO: 234138 - protein, 156 aa, Glycine max
  unsure (1)..(156): unsure at all Xaa locations
  Clone ID: PAT_MRT3847_53450C.1.pep
GNVGDHMALLRVYNSWKETNYSTQWCYENYIQVRSMRQARDIRDQLAGLLERVEIELTSNSSDFDAIKKSITSGFFPHSARLQKYGIYKTVKQSQNVRIHPGSGLAQVXPRWVVYHELVLTTKEYMRQVTEINPGWLAEIAPHYYQLKDVEDSYSN

SEQ ID NO: 234139 - protein, 276 aa, Glycine max
  Clone ID: PAT_MRT3847_53451C.1.pep
MDMVLHSALYPPSLSCSSSTTGTRWPNSRVGVSLSWRSLSLVPCALKAYYDSELENKKHLLLTSVQDTQRGLLTTPDQRSCIEEALVSLEGCNIGSHPINLSNLDGTWRLQYTSASDVLILLQAAATLPFFQVGQIFQKFECRDQSNGGVIRNVVRWSIPNLLEEQEGATLLVSAKFNVVSVRNIYLQFQEITIQDINISEELQALIAPAILPRSFISLQILQFLRTFKAQIPVRDPGRQSVGGLYYLSYLDDNMLLGRAVGGGGVFVFTRAQSLY

SEQ ID NO: 234140 - protein, 81 aa, Glycine max
  Clone ID: PAT_MRT3847_53452C.1.pep
LFFFFFFLFFCSFFFSFFTGPKLHRLKPKRNRSLTRQVYGTGTGPKKQPHLANAGLSPIIKIYCPMGQPRRPPSQVQHLVG

SEQ ID NO: 234141 - protein, 611 aa, Glycine max
  Clone ID: PAT_MRT3847_53453C.1.pep
EFRVGPSLPVAMKKGVDIVLDPCNGSVLRYSRTKGHRGKLKQVLCNLLSNAVKFTEEGHIAVRAWAQKPSLQSSMIATHQYGSSRLLSRLCCRQNEARDDVEDLNIQQDPNCMDFTIEVDDTGKGIPKEKHKSVFENYVQVKETTLGQEGTGLGLGIVQSLVRLMHGDIEIMDKDIGEKGTCFRFNVLLTAHETQMNDDTRDDQVGSGNKNQSHGLTMSPKLSIWTRSPRSEASRVVLLIQNEERRGTTQRFMERLGIKVKVVKEWRQLHYTLKKIIKQKGLHPNSSSSPESSDSPSASSCTNGVPLSAQDGTNYISSIFKRTDIEASSGFVLIVIDANAGPFSELCKVVAEFKRGLCYPCRVVWLENPLIPSVDNKILNKDVSNSNDIVLSKPLHGHRLFQVIRILPEYGGVWPCNSSETKKEKGQVSLTNEGAIRRVELQECGSSSVTQQSYDRSRARKSHIHQGEIQECEESSNEKPLWGMKCLVVEDIVLLRRITKSTLDRLGASVMECENGEQAVQTVEEGLTRNSSNRPCDFILMDCQMPVMDGYEATRRIREIEKSHGVHIPIFALTANTGKEAILSIEAGMDDHLIKPINKEALLKAIKRIYT

SEQ ID NO: 234142 - protein, 74 aa, Glycine max
  Clone ID: PAT_MRT3847_53454C.1.pep
LKAPFRFQGIFLSFLLYKRKWRVVKKTRGKTKKRGNWEGFIHWEPVKKEGRKPLGGKWPSQMTSKFFLWGRPFI

SEQ ID NO: 234143 - protein, 312 aa, Glycine max
  Clone ID: PAT_MRT3847_53455C.1.pep
TKSARMKAASSMPASWTTEHMRTAIREAGTIKYLVKLLKCDDNAVQLAATQALERLSVSNIVCRVIEAEGVLGPLVSILKCSEIAGTILEKSLNILARILDPSKEMQLKSYDGPANESEKAFGGAKGDCVSTGFSSTEQAVSKTYTRNDILDSVFIAHLVEILKSSPPSLQEKAATVLEFVALTDPTLAPIIFLDIESGLNSAFQQKILKISADMESDAQQQFSEAYAIEFEEAGLAIAAASRLLTRLLDCEQFCHKINSLQFIDLLRGILRSSIPLHNKEWVAACLVKLSSLSGSIAILYPINVEITLYET

SEQ ID NO: 234144 - protein, 198 aa, Glycine max
  Clone ID: PAT_MRT3847_53456C.1.pep
MWSTKLFGLFLLSAFTLYPPSTMAQPVFDLDGHPVINGGSYYIMEYMGSGVELAKTGNETCPLSVVQSSSFGSTGLPVKISSMLRTPFVTIGRVDLSFTGVPDCATTPSGWTVVEGLPEGSVVKITGYENTENGHFLIEKASFRNIYKLSFCIVGKLGCGTIGLIKDDKQNDLLGVTWDYAFEFVLVKTDDQPTSSSA

SEQ ID NO: 234145 - protein, 110 aa, Glycine max
  unsure (1)..(110): unsure at all Xaa locations
  Clone ID: PAT_MRT3847_53457C.1.pep
TTMRADGGPYXYAMEHDSXLSTIPGDFVIGGKMTTINNMRAYGLNAGIXRSWLLGTICQHISQHTVWNQMASVRTPLDINSSKQNFCQFSIHRLFPGRXLDKTGDWITLI

SEQ ID NO: 234146 - protein, 44 aa, Glycine max
  unsure (1)..(44): unsure at all Xaa locations
  Clone ID: PAT_MRT3847_53458C.1.pep
VLWXLKCSGXTDTPACKDXXXXEQRXAXASPMEVAMXYEXSTLA

SEQ ID NO: 234147 - protein, 48 aa, Glycine max
  Clone ID: PAT_MRT3847_53459C.1.pep
ACSVYINIVVPLQSLFSCLCLASLASAKSAIVLPPSKTMRMLAALCPS

SEQ ID NO: 234148 - protein, 172 aa, Glycine max
  Clone ID: PAT_MRT3847_5345C.1.pep
MVIYGPSLSVYCGSWVRDGESNWQDRCSPQKLSGSGRRSITCKFESVRLSRACSVALTTLLTTAAVIASVAAADEPETLSNIPQTLSGECTLPKDCKKARIQKPKSRKAESCTIKCVTTCIRGGDGSPGEGPFNVIRPLVVFKQGFRTRQYCLVECSDICNLISDAVVTKTR

SEQ ID NO: 234149 - protein, 121 aa, Glycine max
  unsure (1)..(121): unsure at all Xaa locations
  Clone ID: PAT_MRT3847_53460C.1.pep
GGTVADAPAAFEEKTDFDVVSAEAPINARIVTITAMISPTNTALPNAKDLNDSIPKNIIDGITKDXAHYANNQLEKSGANATIAYTLTNCKIYVLLPLLLVANEFTISLEYHFHFVWISTF

SEQ ID NO: 234150 - protein, 51 aa, Glycine max
  Clone ID: PAT_MRT3847_53461C.1.pep
VVKLYNFHMKISLTKKVLSHHSPEFKNSISSQKKSKKTTTTTTTTPYPTRW

SEQ ID NO: 234151 - protein, 410 aa, Glycine max
  Clone ID: PAT_MRT3847_53462C.1.pep
MGACWSNRIKAVSPSNTGITSRSVSRSGHDISSNSRSSSASIPVTSRSEGEILQSSNLKSFSYHELRAATRNFRPDSVLGEGGFGSVFKGWIDEHSLAATKPGIGKIVAVKKLNQDGLQGHREWLAEINYLGQLQHPNLVKLIGYCFEDEHRLLVYEFMPKGSMENHLFRRGSYFQPFSWSLRMKIALGAAKGLAFLHSTEHKVIYRDFKTSNILLDTNYNAKLSDFGLARDGPTGDKSHVSTRVMGTRGYAAPEYLATGHLTTKSDVYSFGVVLLEMISGRRAIDKNQPTGEHNLVEWAKPYLSNKRRVFRVMDPRLEGQYSQNRAQAAAALAMQCFSVEPKCRPNMDEVVKALEELQESKNMQRKGADHKQHHVRNSGPGRTNGGDGGSDAPRKASAYPRPSASLLRG

SEQ ID NO: 234152 - protein, 153 aa, Glycine max
  unsure (1)..(153): unsure at all Xaa locations
  Clone ID: PAT_MRT3847_53463C.1.pep
PRVRFCAMNSCFRGRASSDIHTICSQDCELWNPACTIAMTMSFNANPCADAWSLEFLKRTGFHRDIIXVTGWTATPMQDVQAPIDWFIFSQEGVARTXWVLNAQNSYVSNRWMGKLTFPQGTSRIGKRMPLCIGGGAWAIKAILMNEPKAGLS

SEQ ID NO: 234153 - protein, 72 aa, Glycine max
  Clone ID: PAT_MRT3847_53464C.1.pep
SAFFPCNIKQEEVPFFRVYKKHKRVGFFFLLKDKNWVEDNPLWGFPKLGRKNLDGFWSNLCFIFVNSTKGFL

SEQ ID NO: 234154 - protein, 154 aa, Glycine max
  Clone ID: PAT_MRT3847_53465C.1.pep
MDPHRRHRHRRRTWCCSFAVPPSSPDNLTNSSKPLPRNSEPHSKPAFSLPNSPKSRIPVKIDPRRILSPGRVSPIDSDPVAGEPLPFPPPSPEPPRPPSPAAATGERDVRMSLRGKNGGCMVLEVNSGVLCANSEVFAGLIEDYKKGSSSGSTK

SEQ ID NO: 234155 - protein, 38 aa, Glycine max
  Clone ID: PAT_MRT3847_53466C.1.pep
HGCEKTTDEGLEARTNHTLDMLTLSLIAFQCSESEIGD

SEQ ID NO: 234156 - protein, 98 aa, Glycine max
  unsure (1)..(98): unsure at all Xaa locations
  Clone ID: PAT_MRT3847_53467C.1.pep
RDAAEESTDIIPLDVALLTLGIETVGGVMTKFIRRNPVIASMESHVFSTXYHDHXTTVAIHVFESDTSLTQDXCRLRGNFDMSRHPRSPSGTPHIELT

SEQ ID NO: 234157 - protein, 60 aa, Glycine max
  unsure (1)..(60): unsure at all Xaa locations
  Clone ID: PAT_MRT3847_53468C.1.pep
SHXXGXSSDCVXLLVDKSWXXTQCTRTAXXLXEXXNLKQGSYXXKXLKFXPFIFXLXXVY

SEQ ID NO: 234158 - protein, 167 aa, Glycine max
  Clone ID: PAT_MRT3847_53469C.1.pep
STPFFFFFFFFKNKNALYYIKSQYCKGKRLNSRRLRSSMPLCVSLNQTLSSSPNKIQLNSKASSINGTALESVEHLVAQGQQIGSKMELDNLQSKGTGVAVNGKAAVYTTVVDGVEKGQFVQEDNHENHFFLKSSGRVTDLNEPLVGNLSPPIEKETKGLEHSGSMM

SEQ ID NO: 234159 - protein, 76 aa, Glycine max
  Clone ID: PAT_MRT3847_5346C.1.pep
ILGMLLTCVFSFSLSIYLSETLFRLTLLLGPPRSGKTTLLQALAGKLDRDLRVGHPLAPFLRNDAMISSYMYFFIK

SEQ ID NO: 234160 - protein, 153 aa, Glycine max
  Clone ID: PAT_MRT3847_53470C.1.pep
MSSVLQGKRKRQDLASRLSASMNNEEGRVYNIIRGRKEMGIWQGDIKREANIPDSLLKKSIKMLITKKLVKDVVNVQNRSKKLLMASDFEPSNEISGGEWYTECKLDTEFIDKLSEACFSSIRRLKVATCEGILEWIKKAGGGVSKGQMEQIL

SEQ ID NO: 234161 - protein, 108 aa, Glycine max
  unsure (1)..(108): unsure at all Xaa locations
  Clone ID: PAT_MRT3847_53471C.1.pep
VXRYRRXPGXGXEXXLXVGEIXKGIXXRLRLRPXPXPLGXEXXXPISXSLRXPXXIXXXSLLXXXXXXIXLXXSXFHSFLSFFLRRRSVCXFRYFLEPNSELTXACXR

SEQ ID NO: 234162 - protein, 40 aa, Glycine max
  unsure (1)..(40): unsure at all Xaa locations
  Clone ID: PAT_MRT3847_53472C.1.pep
GHIAXYKXLSTTMLXNGXNPHXIXXVHLXXMSXNTXLQIQ

SEQ ID NO: 234163 - protein, 60 aa, Glycine max
  Clone ID: PAT_MRT3847_53473C.1.pep
GALALPGGAYMFQDQVGPSSKLDRTFIDIKPDEMQTRLTHEIISPHVRAGYKPVGIKGGI

SEQ ID NO: 234164 - protein, 66 aa, Glycine max
  Clone ID: PAT_MRT3847_53474C.1.pep
IHNRRYSDFTDLVINSEQDISPNSQGSKNNKFCEYCKISYILFFPILEAQLIRQSTELFFLYREKI

SEQ ID NO: 234165 - protein, 111 aa, Glycine max
  unsure (1)..(111): unsure at all Xaa locations
  Clone ID: PAT_MRT3847_53475C.1.pep
QKGRASYSNLKNAVIASXVPLPFILYHLSFQWDITTTYFWASLGTWCDDHPMLLANVRCLLNVKLLLWLISLNQIXRWVIDPFWPAAPALRRLFFSTRPVAAAPGGGPRRV

SEQ ID NO: 234166 - protein, 269 aa, Glycine max
  unsure (1)..(269): unsure at all Xaa locations
  Clone ID: PAT_MRT3847_53476C.1.pep
MEFVACANPDNNDEISDSETQPNKWMRKKSMVWDYFTVETVGAGCTRAYCKQCKKSFSYITDSKLTGTSHLKRHISLGICRVLREKNQQRSYPKTGGSLDTANPLKKGPRATPGFAGNGISFYQEHCNHDVAKMIILHDYPLHIVKQQGFIDFVWMLQPQFNPFCLNSVEADCVAMHLRKKXNLLNVINGIHGQVSLXDLWTSNQAMGYVFVQGHFIDSDQKLHHPILNVXTVPFXXSDNSLNQTLVTCLSDCHLEGWLFTLALDNFFQ

SEQ ID NO: 234167 - protein, 53 aa, Glycine max
  Clone ID: PAT_MRT3847_53477C.1.pep
IIFIFIFTFYVQALFEISFQNFNQGFPSLLINIIVKIGFVILILTSFYYKGPN

SEQ ID NO: 234168 - protein, 164 aa, Glycine max
  Clone ID: PAT_MRT3847_53478C.1.pep
MEEWQNFNFDISITQSPAVLSHADELFSNGLIKPLFAGPSTLESCDTTTNSTQSKPISSFSSRIVSPRTVQIHHGFLTKWKTSTCRTLRNLSRYVNQLCQKVGSSRKSTKVDDIDKEEWLVNSSWSSSQQPSPKSSTVNPVGALLDHENSIYEAVLHCKRSIER

SEQ ID NO: 234169 - protein, 34 aa, Glycine max
  Clone ID: PAT_MRT3847_53479C.1.pep
AKGTTRTESAGVTPHHTTSRLLPCVDSTAATCSS

SEQ ID NO: 234170 - protein, 75 aa, Glycine max
  Clone ID: PAT_MRT3847_5347C.1.pep
FKLGGRPEIAGTCPTSAQILLKQSLVKGGEESDFNCLPEENGLPIQLPTIHQPGRIKGSAGGPEGGGHGTLMGTR

SEQ ID NO: 234171 - protein, 80 aa, Glycine max
  Clone ID: PAT_MRT3847_53480C.1.pep
IKNILSFYNSPKKPGPSSPPPLKAQPGKRAKKASPIMGERKRRQQLPQRFIALSAPTPGLNKILLSSPAPGLEMKKRNPM

SEQ ID NO: 234172 - protein, 174 aa, Glycine max
  Clone ID: PAT_MRT3847_53481C.1.pep
KFIDHIHEIRLNNNFNDTWVWRAESTGIISTKSAYQVIKSELDDEGQHLGFKKLWEIKVPPKALSFVWRLLWDRLPTKDNLIKRQIQVEDDLCPFCHSQSETASHLFFTCGKIMPLWWEFLSWVKEDKVFHCRPMDNFLQHYSSAASKVSNTRRTMWWIAVTNSIWRLRNDIIF

SEQ ID NO: 234173 - protein, 145 aa, Glycine max
  Clone ID: PAT_MRT3847_53482C.1.pep
KINKKNYKKKKKKKKKKKKKKKKRGGKEKKKKKNKKFKKRKEKKMEEKKKKKKKERKKKKKKKKKKKLKKTRKSFPSAAFGLQNSVMTWEGGGWGGPLWLFRFLPALVRGGAPGGGRVPAPSLRWCLLGCNLVALSWPGRPFVGP

SEQ ID NO: 234174 - protein, 31 aa, Glycine max
  Clone ID: PAT_MRT3847_53483C.1.pep
SLQPVLASEHVHVILHYPISFSGSLLGNYIR

SEQ ID NO: 234175 - protein, 52 aa, Glycine max
  Clone ID: PAT_MRT3847_53484C.1.pep
PTKNGHNSKLMMELMVLLKHESLNKSHMDSICPYPIICVGCHMSCTISSVAA

SEQ ID NO: 234176 - protein, 58 aa, Glycine max
  Clone ID: PAT_MRT3847_53485C.1.pep
YLLPLQCLLLLLLFLIFLNQNALPFLLIKVIYLNFLIKSNHIKLVTDSLEWQYALLFF

SEQ ID NO: 234177 - protein, 82 aa, Glycine max
  Clone ID: PAT_MRT3847_53486C.1.pep
CIISVVVFLHCGVLCSTNLLRKRWSCPAHQEEQVFSTYEGGEKIMAASFFFLMNGRWSVAYEERPVNLNNPSLLKILQFLAP

SEQ ID NO: 234178 - protein, 55 aa, Glycine max
  Clone ID: PAT_MRT3847_53487C.1.pep
PSHLTHIHTIPIQLSNRLTCLLTPLTHINSLSITIPCPSMPPVVQSSLMNQATHL

SEQ ID NO: 234179 - protein, 561 aa, Glycine max
  Clone ID: PAT_MRT3847_53488C.1.pep
MNNNWLSFPLSPTHSSLPAHDLQATQYHQFSLGLVNENMDNPFQNHDWNLINTHSSNEIPKVADFLGVSKSENQSDLAALNEIHSNDSDYLFTNNSLVPMQNPVLDTPSNEYQENANSNLQSLTLSMGSGKDSTCETSGENSTNTTTTTTVEVAPRRTLDTFGQRTSIYRGVTRHRWTGRYEAHLWDNSCRREGQSRKGRQVYLGGYDKEEKAARSYDLAALKYWGTSTTTNFPISNYEKELDEMKHMTRQEFVAAIRRKSSGFSRGASMYRGVTRHHQHGRWQARIGRVAGNKDLYLGTFSTEEEAAEAYDIAAIKFRGLNAVTNFDMSRYDVKAILESNTLPIGGGAAKRLKEAQALESSRKREEMIALGSSTFQYGTTSSNSRLHAYPLMQHHHQFEQPQPLLTLQNHDISSHFSHQQDPLHQGYIQTQLQLHQQQSGGSSSYSFQNNNINNAQFYNGYNLQNHPALLQGMINMGSSSSSSVLENNNSTNNNVGGFVGSGFGMASNATSGNTVGTAEELGLVKVDYDMPTGGYGGWSAAAAAESMQTSNSGVFTMWND

SEQ ID NO: 234180 - protein, 83 aa, Glycine max
  unsure (1)..(83): unsure at all Xaa locations
  Clone ID: PAT_MRT3847_53489C.1.pep
TIIQVLCMDLCIHKSGLDIRSNSTLKCVCLLLISCLTYPFTSSVXXXLXXSXXLLMCEXLHLIYTPIMWXXDXPSHXLPLCGD

SEQ ID NO: 234181 - protein, 56 aa, Glycine max
  Clone ID: PAT_MRT3847_5348C.1.pep
PCHGSNGLRYIDRNTIPRPNLNASTLANPFDMNSFAKKALLDCASWHPTIGGDKII

SEQ ID NO: 234182 - protein, 59 aa, Glycine max
  Clone ID: PAT_MRT3847_53490C.1.pep
FYGCEKTTEGPTAGDSKTKTLILIGRAELFFVPTLSFLRYFQIFYFQRVIITFFSISFK

SEQ ID NO: 234183 - protein, 180 aa, Glycine max
  unsure (1)..(180): unsure at all Xaa locations
  Clone ID: PAT_MRT3847_53491C.1.pep
FIILVAGTEEEAAEAYDIAAIKFRGLNAVTNFDMSRYDVKAILESNTLPIGGGAAKRLKEAQALESSRKREEMIALGSSTFQYGTTSSNSRLHAYPLMQHHHQFEQPQPLLTLQNHDISSHFSHQQDPLHQGYIQTQLQLHQQQSGGSSSYSXQNNNINNAQFYNXYNLQNHPALLQGMI

SEQ ID NO: 234184 - protein, 290 aa, Glycine max
  unsure (1)..(290): unsure at all Xaa locations
  Clone ID: PAT_MRT3847_53492C.1.pep
HASVKFRGLNAVTNFDMSRYDVKAILESNTLPIGGGAAKRLKEAQALESSRKREEMIALGSSSTFQYGTSASSSRLHAYPLMQHHHQFEQPQPLLTLQNHDISSSHFSHQQDPLHHQGYIQTQLQLHQQSGASSYSFQNNAQFYNGYLQNHPALLQGMMNMGSSSSSSSVLENNNSNNNNNNVGGFVGSGFGMASNATAXNTVGTAEELGLVKVDYDMPAGGGGCWSAADSMLSSNGRVGTIWDVLGWEARPSMGQVPRPIFVNPIFIFFVVWGVFLIFLRKLEKRKNRC

SEQ ID NO: 234185 - protein, 210 aa, Glycine max
  unsure (1)..(210): unsure at all Xaa locations
  Clone ID: PAT_MRT3847_53493C.1.pep
MNNNWLSFPLSPTHSSLPAHDLQATQYHQFSLGLVNENMENPFQNHDWSLINTHSSSEVPKVADFLGVSKSENESDLAASLNEIQSNDSDYLFTNNSLVPMQNPAVDTPSNEYQENANSSLQSLTLSMGSGKDSTCETSGDNSTNTTTTTTVEAAPRRTLDTFGQRTSIYRGVTRHRWTGRYEAHLWDNSCRXREGQSRKGRLRNLSKLF

SEQ ID NO: 234186 - protein, 80 aa, Glycine max
  Clone ID: PAT_MRT3847_53494C.1.pep
PRNSLWIPGIINIYGGTLNIKQKLFCLPSPISRYKFFTSASNPTKGKCFNFNQKPKKKRLLQYACNRGGAQKRLFFLKGG

SEQ ID NO: 234187 - protein, 107 aa, Glycine max
  unsure (1)..(107): unsure at all Xaa locations
  Clone ID: PAT_MRT3847_53495C.1.pep
DCHIVAAMLXVDTYHTNPENAXKECLRCASQGGWPIXMVTIPTAIXQIEPDMNPRLXLQSTTTNGDYDQILDAQMHXVYDSCATRGLTHSDSTSPLVQSGMQKDRGL

SEQ ID NO: 234188 - protein, 77 aa, Glycine max
  Clone ID: PAT_MRT3847_53496C.1.pep
TKKHRRHVKLKWRRLYYINFDTILPHKASQIANSFSFQTYLFLFLIPLCLTYLNSTSLTSYFPLSILSHSLLNHLNY

SEQ ID NO: 234189 - protein, 99 aa, Glycine max
  unsure (1)..(99): unsure at all Xaa locations
  Clone ID: PAT_MRT3847_53497C.1.pep
GLQKIEESNNLVEEDYVPAISIVGRPNVGKSSILNALVGEDRTIVSPISGTTRDAIDTEFTGPDGQEKNSXASAGSTTEALSVNRAFRAIRXSDVVALV

SEQ ID NO: 234190 - protein, 59 aa, Glycine max
  Clone ID: PAT_MRT3847_53498C.1.pep
TLVTGCTVIVGPEDTTLGLALRLAVFTRLDSIASGLHGASKVYVSETTTKWRSQRICTI

SEQ ID NO: 234191 - protein, 424 aa, Glycine max
  unsure (1)..(424): unsure at all Xaa locations
  Clone ID: PAT_MRT3847_53499C.1.pep
PLTAVVLGTFAKIFHPSSISLVGDIPQGLPKFSVPKSFEYAQSLIPTALLITGVAILESVGIAKALAAKNGYELDSNQELFGLGVSNVLGSFFSAYPTTGSFSRSAVNHESGAKSGVSGIVSGIIMTCALLFLTPLFEYIPQCTLAAIVISAVIGLVDYDEAIFLWRVDKKDFLLWTITSTTTLFLGIEIGVLVGVGVSLAFVIHESANPHIAVLGRLPGTTVYRNVKQYPEAYTYIGIVIFRVDAPIYFANTSYIKXDRLREYEVDVDRSKRRGPEXVERIYFVILEMAPVTYIDSSAVQALKDLYQEYKLRDIQIAISNTSPEGLLTLSRSALVELIGKEWYFVRVHDAVQVCLQHVQSLKGASNSPQAPFSSVENKPSLFARLSKERVEKLSITDLESGNGRPPLPEERDSKLEPLLSKDH

SEQ ID NO: 234192 - protein, 97 aa, Glycine max
  Clone ID: PAT_MRT3847_5349C.1.pep
KYCGFFFFFCCNFFMRTKKKTGPNFHLGAALILKKGGSYKKKIGWLRAKDKQKRGGTRKKKKGGEKSKRGEKKIKTGGKKSPRALKRGKGKKKQPGL

SEQ ID NO: 234193 - protein, 55 aa, Glycine max
  Clone ID: PAT_MRT3847_534C.1.pep
VRVKLKTHQDDAVCQVANSHQSLRPRRNNCHWIGFGRVIILSSGSVIILMFLLSL

SEQ ID NO: 234194 - protein, 182 aa, Glycine max
  Clone ID: PAT_MRT3847_53500C.1.pep
KSRSIDSKGENIGVINGHVLNSGSSGDNAAQQVENNENSVIPSCETSFYKLEMIKIQVFSAQGQPTALELEDYMNAQPDIIAHSASKIISRLKADGEKTLEALKSLCWRCKGIQVEEAQLICLDSLGFDVRVCSGTQIQTLRFTFKKRATSEYSAERQLNDILFPRIHPKQQKMKQTHQNEC

SEQ ID NO: 234195 - protein, 59 aa, Glycine max
  Clone ID: PAT_MRT3847_53501C.1.pep
NYWKQPPPGFFLNGEKPPKPGPLAHLLIDRIFHWILIRVEKNSVETLVPGTPLPFIGNP

SEQ ID NO: 234196 - protein, 56 aa, Glycine max
  Clone ID: PAT_MRT3847_53502C.1.pep
YTLASSFYSWCMWYLPPFVSTFFVSNTFRFLQAWPPNMILRHLEALQARTDSVSNP

SEQ ID NO: 234197 - protein, 156 aa, Glycine max
  unsure (1)..(156): unsure at all Xaa locations
  Clone ID: PAT_MRT3847_53503C.1.pep
AYAHAWGFNHTEPLAKAGPMVIARDNLIDNTGKPFVVLNRDGNTEYTLKEMTALHQRHGREASIPLTQSDRXPQRYCVGVMEQSTSHHDKSDAKPKLLGANIASAGDNLRNPYVSYRIEPRPTYTDKEGLTKTAAQKEIVCLVLPRFXMDIVHPMD

SEQ ID NO: 234198 - protein, 72 aa, Glycine max
  Clone ID: PAT_MRT3847_53504C.1.pep
TSVTKARFNDAFQINTRLLAYKQYLYTISLFWHQNIFFWAETVRSIFNSIFYPTRGVNRKSVGRNNNSLYRT

SEQ ID NO: 234199 - protein, 76 aa, Glycine max
  Clone ID: PAT_MRT3847_53505C.1.pep
FYLTVHLMHPMTHAVLERTLSDDMHPLEPNLKGLYSVVCLRLLSALAQPSHDHFGPPSCVCMHQGITQKHTLALAI

SEQ ID NO: 234200 - protein, 116 aa, Glycine max
  unsure (1)..(116): unsure at all Xaa locations
  Clone ID: PAT_MRT3847_53507C.1.pep
GHAEKCAKRLMKNQYRAIRRPPWGKGAANIRXPMXGVRVWLATFSSAEEAARPYHAXSRRIHGQKPYVNLPDEPSCAVSLKPMTAIPYAQPMNKYLYSLKPKINHMLHFADILECF

SEQ ID NO: 234201 - protein, 71 aa, Glycine max
  Clone ID: PAT_MRT3847_53508C.1.pep
VHPMYSSESLKASIFAFCSCLLFFKIRRSIVQCNSLFHTSFSLPFTSSIIHNMPFNLWGTCQLVICALYDI

SEQ ID NO: 234202 - protein, 57 aa, Glycine max
  Clone ID: PAT_MRT3847_53509C.1.pep
WDLFLGTTCMRRNLLHSPNLELCHILKKTSLERQHKHDASRLWPDLYNKDTTQYMEV

SEQ ID NO: 234203 - protein, 61 aa, Glycine max
  Clone ID: PAT_MRT3847_5350C.1.pep
KWKKNMLYQGFKNFVEMNEKSRNEWGDPYWEPPIQGAPASKKKKGDIFPARFFLQKKKMVQ

SEQ ID NO: 234204 - protein, 78 aa, Glycine max
  Clone ID: PAT_MRT3847_53510C.1.pep
KKGSNGTKGNKGAQKKKLILPAGSTREVGYNKCWVPFRTPVSSFLSNLFFGQNLKSPTSSLNCCSQNWVLDITWQTCF

SEQ ID NO: 234205 - protein, 32 aa, Glycine max
  Clone ID: PAT_MRT3847_53511C.1.pep
VQRKTLMYKVRTSEMINLYSILRCFPHVESVL

SEQ ID NO: 234206 - protein, 88 aa, Glycine max
  unsure (1)..(88): unsure at all Xaa locations
  Clone ID: PAT_MRT3847_53512C.1.pep
KGGGPFFXATRPVKEPCSFPSIRGFVFLVHMMMPNNPWSLGSGGIGVVSGRIPVALGTFSCGFFLGLRPLVLFLCSGLAFLAGGVFAF

SEQ ID NO: 234207 - protein, 77 aa, Glycine max
  unsure (1)..(77): unsure at all Xaa locations
  Clone ID: PAT_MRT3847_53513C.1.pep
MVTPIIDPSQDSSNPLHLHHSDGSGLVLTSQPLDHKNYITXSRAMKVVLFVKDKIAFIDDTLLKPDEDAPTYAAWTG

SEQ ID NO: 234208 - protein, 64 aa, Glycine max
  Clone ID: PAT_MRT3847_53514C.1.pep
PGGASFPAFINPPRSFGPPLVPGKWPDHWVYWVGPPLGGGPAGNINEPFFIDRSHVPLPRDEET

SEQ ID NO: 234209 - protein, 123 aa, Glycine max
  unsure (1)..(123): unsure at all Xaa locations
  Clone ID: PAT_MRT3847_53515C.1.pep
LVLIFQSMVGVPGKSKACINCRKRRSQCDMKRPSCGQCQRSGITCSGYQKEFIFLNSTTQEAXDGSLSLEKESYSAGTRTRNPTTAGSAASRAAATRTTXVVLHATLERSAYENNVIDEFGHH

SEQ ID NO: 234210 - protein, 91 aa, Glycine max
  Clone ID: PAT_MRT3847_53516C.1.pep
FPTAPFRTQIFVKTRTGKTITLEVESPDTIDNVNAKIHDNEGIAPGHHRLNFAGKHPEDGSTLADDIIQKDSTLHLVVGHRGGMQIIDKTL

SEQ ID NO: 234211 - protein, 77 aa, Glycine max
  Clone ID: PAT_MRT3847_53517C.1.pep
LKNLKGKGWRASGGNFPFFKRNGVGFAPFFLGGKIRLFFKALSYPNNGGFLGREPLLPFWFRPPICMGDPGNWGSRV

SEQ ID NO: 234212 - protein, 35 aa, Glycine max
  Clone ID: PAT_MRT3847_53518C.1.pep
VSPVLGRFLVSPFGFLGYVHCLYPNLCKALTNSMV

SEQ ID NO: 234213 - protein, 53 aa, Glycine max
  Clone ID: PAT_MRT3847_53519C.1.pep
IHILKIPKVSNNSNGKQTLRTIGRCGDYTGKTQFTIQRTLAAELLASMLRTKE

SEQ ID NO: 234214 - protein, 86 aa, Glycine max
  Clone ID: PAT_MRT3847_5351C.1.pep
VFERDPSSQIALALAPWSISGCSTRPGTSVGSRHRLPTSSLARRCAGARLAVYSLCPRRLRPSGRVWGTTTSPHNPPDQSSYRPSG

SEQ ID NO: 234215 - protein, 112 aa, Glycine max
  unsure (1)..(112): unsure at all Xaa locations
  Clone ID: PAT_MRT3847_53520C.1.pep
LPPFLLXXWXWVLPXXSVLFSFGFGXGXXXXXXXPXXXCPFLPPXFLXVWXWXSPGXSGLFSFGFWXGXXXXXXXPXLXCPFLPPFSXXXWXWXSPXXSSXVXLLACXLVSP

SEQ ID NO: 234216 - protein, 58 aa, Glycine max
  Clone ID: PAT_MRT3847_53521C.1.pep
INKVLGLNLVNRKNVVVREDSTKGDRLNFTANINHRQTRWILCINNMVTKNSAFTNGS

SEQ ID NO: 234217 - protein, 64 aa, Glycine max
  Clone ID: PAT_MRT3847_53522C.1.pep
LYLCHVRSLFSPIDKLSWYPVLMSMTTVLHDCGQDLVSFVLGPPIKIQVVDCLAIGFIQVLSRS

SEQ ID NO: 234218 - protein, 558 aa, Glycine max
  unsure (1)..(558): unsure at all Xaa locations
  Clone ID: PAT_MRT3847_53523C.1.pep
MKDFNSDLFDPGTVMDSSSSDYSRSASSSDADFGFAFNDSNFSDRILRIEIMGDPVEARPDSDGCTTIADWARHRKRRREDIKKDNVVDLTLLPDEQILNGNQPDMDDFVPSENQDEDAVAMVEEPPSGDEAANSNDSNWNMDCSAVVRVKTLHISSPILAAKSPFFYKLFSNGMKESEQRHVTLRINASEEVSLMELLNFMYSNTLSITSPPALLDVLMAADKFEVASCMRYCSRLLRNIPMTPESALLYLELPSSVLMADAVQPLTDAAKQYLASRYKDITNFTYXRFQEEVMGLPLAGIEAILSSDELQVASEDAVYDFVLKWVRTQYPKLEERREVLGTRLARLIRFPYMTCRKLKKVLTCNDFDHDVASKLVLEALFFKAEAPHRQRILAAESASFNRLFVERAYKYRPVKVVEFELPRQQCVVYLDLKREECANLFPSGRVYSQAFHLGGQGFFLSAHCNMDQQSSFHCFGLFLGMQEKGSVSFAVDYEFAARSRPTEEFVSKYKGNYVFTGGKAVGYRNLFAIPWTTFMAEDSLYFINGVLHLRAELTIRH

SEQ ID NO: 234219 - protein, 60 aa, Glycine max
  unsure (1)..(60): unsure at all Xaa locations
  Clone ID: PAT_MRT3847_53524C.1.pep
KPTIFKPPMFKPTMFKPTVXKPKPTVXKPKPTVXKPTYXKPTFKKPTXGKYPPIEDNNQA

SEQ ID NO: 234220 - protein, 142 aa, Glycine max
  Clone ID: PAT_MRT3847_53525C.1.pep
QQQCFTQISCPFVSSPYFTQSLKFVVNCFESFRISWYASIDSEGIKPKLYQSLYVILALVILRLLICLSRTLLMCTHDCCIFTKHGYYTVSLASSTVLQSLHNRLQKILLLNIFKKLTHNILTDIETFCNGPLPKIMNILFL

SEQ ID NO: 234221 - protein, 111 aa, Glycine max
  unsure (1)..(111): unsure at all Xaa locations
  Clone ID: PAT_MRT3847_53526C.1.pep
MDLPLQAAATFMQPTXFCSSSLSQAISKACGSNXAGVNNVTCSLQADLTDLAHXXADATKIASYALATSALIVSGSSAEXAPKRLTFDEMHSKTYLXRKGXGTAYQCATID

SEQ ID NO: 234222 - protein, 37 aa, Glycine max
  Clone ID: PAT_MRT3847_53527C.1.pep
QVANHLDRMVSTLGRNPLKVLVQVNSSGEECKFSLKL

SEQ ID NO: 234223 - protein, 75 aa, Glycine max
  unsure (1)..(75): unsure at all Xaa locations
  Clone ID: PAT_MRT3847_53528C.1.pep
APTFEEDDRRGGWELISRXGGDFSAPNTNKSKKLDRNNSYIRRLNRTKHHNAYSKHLYRANSVLALMLPCRHTQH

SEQ ID NO: 234224 - protein, 161 aa, Glycine max
  Clone ID: PAT_MRT3847_53529C.1.pep
MGKDLFSNLPDEILGRIVSFLPNESSLETSLLSTRWRDLWNEALVKHGTQEDIIGVVAGFITRFEEFDPLKHPRKLQFHFAEDSVVSATVANNNKLMLHFSPWKEEIQMGYELEFKQTKQHIATYQSFPSTFSVKTLYLKSVSCFTSNIAASIVSNLEHLQ

SEQ ID NO: 234225 - protein, 53 aa, Glycine max
  Clone ID: PAT_MRT3847_5352C.1.pep
RVSPISNGRVFRISHECGCAGVSRCLWPAQRVFFFPLRCRSPRCRVILEGSWF

SEQ ID NO: 234226 - protein, 64 aa, Glycine max
  Clone ID: PAT_MRT3847_53530C.1.pep
NEKSRRGLKKILSLYMITWHYPICQCFYNYVHIFPYPLSIFEFKRESRSLAPIFFLPLFLISLA

SEQ ID NO: 234227 - protein, 103 aa, Glycine max
  unsure (1)..(103): unsure at all Xaa locations
  Clone ID: PAT_MRT3847_53531C.1.pep
XXFXXXXFXFMFXFSXYVIXFXLXXLXSXXXXXXXXXLXHXXXXXXYTXXXXXXXSXXSXXNXXXXXXNXXXXXXXPIXXXXPXXXPXXXXXXNXXXXXFXXX

SEQ ID NO: 234228 - protein, 69 aa, Glycine max
  Clone ID: PAT_MRT3847_53532C.1.pep
LEEHGGDQKLRKVISFLLEQELQPRFSILQNNVRFLSSTMHIHSGFTTFELALDFDFISVDLPGLSNLT

SEQ ID NO: 234229 - protein, 76 aa, Glycine max
  Clone ID: PAT_MRT3847_53533C.1.pep
ESDTLTEVRKQDTYTLCIMVGTGARTEAASRAETKWYLYSTMSGSPTCDLSSDVDDPTQRRGAFGKTPAKWPCDTS

SEQ ID NO: 234230 - protein, 383 aa, Glycine max
  Clone ID: PAT_MRT3847_53534C.1.pep
DTHEAQVQFALERGVPALIGVLASKRLPFPSRAFDMAHCSRCLIPWAEYDGLYLNEIDRILRPGGYWILSGPPIRWKKHWKGWERTKEDLNKEQTKIENAAKSLCWNKLVEKDDIAIWQKAKNHLDCKSNRKLTQNRPFCKAQNNPDKAWYTDMQTCLSPMPEVSSKEETAGGALKKWPERLKATPPRISRGTIKGVNPETFSKDNELWKKRVAYYKKANNQLGKAGRYRNLLDMNAYLGGFAAALVDLPVWVMNVVPVQAKVDTLGAIYERGLIGTYHNWCEAMSTYPRTYDLIHADSLFSLYNDRCELEDILLEMDRILRPEGSVIIRDDVDILVKVKSIVNGMDWDSQIVDHEDGPLEREKLLFAVKNYWTAPAASDKNS

SEQ ID NO: 234231 - protein, 158 aa, Glycine max
  Clone ID: PAT_MRT3847_53535C.1.pep
MLVSGVGMSGSGTWCEGGNGLNERREEEESLFHTLFWCKPALEIWHTYYKWCGLQSVFPGTIKEHYLQRVLIKEKKNVCEKWNCVWVGVVWSLWKARNNTIFRGGFFDNNKIMQKAIFHMWTWLKNLDSSFGYSHDQCSIWVQGRACTIDFMMTLIFI

SEQ ID NO: 234232 - protein, 49 aa, Glycine max
  unsure (1)..(49): unsure at all Xaa locations
  Clone ID: PAT_MRT3847_53536C.1.pep
HVIFRILKKKKKKKKKKKKKKKKKKKKKKKKKKKKKKXXGGGPGPNFPF

SEQ ID NO: 234233 - protein, 91 aa, Glycine max
  Clone ID: PAT_MRT3847_53537C.1.pep
PHPILYFIFVNLVMDTNTSTLFTNVNSTWNLEKMETNEQQQQHDDHSIILQVQDPMGSGIWPINNYQNLFQMHQTPNTTSSFTVIVPPYSS

SEQ ID NO: 234234 - protein, 67 aa, Glycine max
  unsure (1)..(67): unsure at all Xaa locations
  Clone ID: PAT_MRT3847_53538C.1.pep
KPRMFKKKWDKWVNEWKGAPQEKSLQRQKPRDGEATHXKGENEAKAIKVEEVIDFTKKGPPLGDGQK

SEQ ID NO: 234235 - protein, 79 aa, Glycine max
  unsure (1)..(79): unsure at all Xaa locations
  Clone ID: PAT_MRT3847_53539C.1.pep
KLYALEIDSYVSDSRDGVGEVLHPDSEFRDXXXVNWDTDASEVHPPTEASSNGIGSLSSVQNGMAEKRSRFSMDDSSST

SEQ ID NO: 234236 - protein, 296 aa, Glycine max
  Clone ID: PAT_MRT3847_5353C.1.pep
MAASSLNHKFHNHARSNSLPSKPHPLILQCNERLSRLGAYDTISSSLLRQNLTNLLDLHGCIEKLVQLPLTQQALVQECQEKWVDDLLDGSLRLLDACTATKDALLHTKECTRELQSTIRRRRGGEVELTLEVKKFLTSRKVVRKAIFKALENLKGNANKGNLAITNYKDYQTMALVNLLKEAEVITFSTFESLLNFFSGSTQAKRISSWALVSKLMHNKRVGYAQGADENEFAKVDAAFQLFAFNMSTKSNDDISDLLKKLENLGTCIPDLEEGLESLFRRLIKIRVALLNILNH

SEQ ID NO: 234237 - protein, 42 aa, Glycine max
  Clone ID: PAT_MRT3847_53540C.1.pep
HSYDLNTFLILTLIHYHGKGLLPYDLALSMLLSITQYIILLD

SEQ ID NO: 234238 - protein, 50 aa, Glycine max
  Clone ID: PAT_MRT3847_53541C.1.pep
KYGPRYTSCGVLPHWTKVKICPAVLPQLYETWRDSIPFTSYSGSNELCKL

SEQ ID NO: 234239 - protein, 89 aa, Glycine max
  Clone ID: PAT_MRT3847_53542C.1.pep
NLSPKMGAPLPSCQFGARMSSFCRCALFLYIFHFFLWFFLTLLWFFLLFSKCKYLISFFQNKTSIRQIYKEYYFLWIRIKDKRFIILTH

SEQ ID NO: 234240 - protein, 91 aa, Glycine max
  Clone ID: PAT_MRT3847_53543C.1.pep
MLESEGVETPSYSEALRQGCFVGHVCVWFLEIMNSAKAMFLKVEKAPCNGYGYGFNFAFFPDISYLESSGTIFFENVYIFFLKLLGSKHDD

SEQ ID NO: 234241 - protein, 73 aa, Glycine max
  Clone ID: PAT_MRT3847_53544C.1.pep
RARQADNSRGLRGFGRSWTCSGCLCSTLCRHLVFNGAVTMHQLPVGTSLSQEASDTQYARRIREISGRLVGFA

SEQ ID NO: 234242 - protein, 105 aa, Glycine max
  Clone ID: PAT_MRT3847_53545C.1.pep
RRQREERRELRRPWRMIEACAAEGPRRPWEGSATHEVSVSAIWFPWKKWFFMEERTREREREAAHDNTYWSWQVSYGANMRQQCPCLFWIRVAEEQMTGYLGESG

SEQ ID NO: 234243 - protein, 59 aa, Glycine max
  Clone ID: PAT_MRT3847_53546C.1.pep
QRQVCCTELGREAKVTLLVSVPLEWESCIRRDREQRLFINPILHGFYDLSQVMHGRVHW

SEQ ID NO: 234244 - protein, 93 aa, Glycine max
  Clone ID: PAT_MRT3847_53547C.1.pep
FESQFLLSQIEINPTNSIKVNPRAEVRGRKHTLFGAFNDRRSSFGKLSTRSDQNAKLRKWELRIKRKGKDPERVVGKSQSFGGSMTNSKSAYG

SEQ ID NO: 234245 - protein, 312 aa, Glycine max
  Clone ID: PAT_MRT3847_53548C.1.pep
MYSFKDKVTQKLSHLFPNSSSSSPQDSPYSQEDKPLSSYLSYIIPSISFDGSKSNKNQHELKPIQSASSGYNYENFEYQDVPSDNYVDCTNMDLLKDDNDNINEDPTSRRSSSSSEVFEEANEQQTPNTSKKSRLNLTDDSTFISPELYEFLEICLPNIVKGRQWVLLYSTLKHGVSLRTLIRKSAELSCPGLLIAGDMQGAVFGGLLDCPLKPTAKRKYQGTNQTFVFTTVYGQPRLFLPTGVNRYYYMCLNDLLALGGGGNYALCLEEDLLSGTSGPSDTFGNKCLAHSPEFELKNVELWGFAHPSPFHG

SEQ ID NO: 234246 - protein, 322 aa, Glycine max
  Clone ID: PAT_MRT3847_53549C.1.pep
MGEEKEQPKNETEKKPEEAAAAPKKDDGPIPVVYKLDLHCEGCVKKIKRTCRHFQGVETVKADLSSNKVTVTGKLDAEKLRDKIAERTKKKVDIISAPPKKEAAATENPPEKKVEEKKPEEKKPEEKPKESMVVLKIKLHCDGCIAKIRRIIMRFKGVQSVSLDGSKDLVTVKGTMDVKEMVSYLNEKLKRNVEVVPPPKKDDDKKEKEGDGGEKKEKEKDGAGEKKEKDVAAAAEVINKMEYMHQMAPPSFWYDGGHFPGQTNYAMEVHPGYGASANNHYVEPGYVNQGYPLQPPLPYYMHPHAPPPQMFSDENPNACSIM

SEQ ID NO: 234247 - protein, 44 aa, Glycine max
  Clone ID: PAT_MRT3847_5354C.1.pep
NTLSYNYYCTTPDKKSPSTLHVIIFLNKPETINLREPPIGKHTI

SEQ ID NO: 234248 - protein, 87 aa, Glycine max
  Clone ID: PAT_MRT3847_53550C.1.pep
SQPCFIHGICGPNSICSHEQVIGRKCSCLEGYSWIDSQDWTLGCKPNFQPTCDHKTEYRFVPYYEVDFYGYDYGSSFSNYTYKQCEK

SEQ ID NO: 234249 - protein, 234 aa, Glycine max
  Clone ID: PAT_MRT3847_53551C.1.pep
MGEEKEQPKNDTEKKPEEVAPKKDDGPIPVVYKLDLHCEGCVKKIKRTCRHFEGVETVKADLSSNKVTVTGKMDAEKLRDKIAERTKKKIYRRTKVVPPPKKDDDKKEKEGGGGGGGGEKKEGGGEKKEKEGDGEKKEKDGAAAAAAEVINKMEYMHRMAPPSFWYDGGHFPGQTSYAMEVHPGYGASANNHYVEPGYVNQGYPLQPPLPYYMHPHAPPPQMFSDENPNACSIM

SEQ ID NO: 234250 - protein, 259 aa, Glycine max
  Clone ID: PAT_MRT3847_53552C.1.pep
MDAEKLRDKIAERTKKKVDIISAPPKKEAAVAEKPPEKKAEDKKPEEKKPEEKPKESTVVLKIKLHCDGCIAKIRRIILRFKGVQLVSLDGSKDLVTVKGTMDVKEMLPYLNEKLKRNVEVVPPPKKDDDKKEKEGGGGGGGGEKKEGGGEKKEKEGDGEKKEKDGAAAAAAEVINKMEYMHRMAPPSFWYDGGHFPGQTSYAMEVHPGYGASANNHYVEPGYVNQGYPLQPPLPYYMHPHAPPPQMFSDENPNACSIM

SEQ ID NO: 234251 - protein, 212 aa, Glycine max
  unsure (1)..(212): unsure at all Xaa locations
  Clone ID: PAT_MRT3847_53553C.1.pep
MRQKDDVGVETVKADLSSNKVTVTGKLDAEKLRDKIAERTKKKVDIISAPPKKEAAATENPPEKKVEEKKPEEKKPEEKPKESMVVLKIKLHCDGCIAKIRRIIMRFKGVQSVSLDGSKDLVTVKGTMDVKEMVSYLNEKLKRNVEVVPPPKKDDDKKEKEGDGGEKKEKEKXGGGEKKEKDVAAAAEVINKMEYMHQMAPPSFWYERGPLP

SEQ ID NO: 234252 - protein, 53 aa, Glycine max
  unsure (1)..(53): unsure at all Xaa locations
  Clone ID: PAT_MRT3847_53554C.1.pep
DGVAYXSNXAXXXSLYNMXXEYXYLXCXQLQXADRAXSVIXYCXWXFXXLTIP

SEQ ID NO: 234253 - protein, 48 aa, Glycine max
  Clone ID: PAT_MRT3847_53555C.1.pep
LDESNILIENSLFLLQKVALATHPATLPSAILTFSNYLLGMFSNSSRF

SEQ ID NO: 234254 - protein, 86 aa, Glycine max
  Clone ID: PAT_MRT3847_53556C.1.pep
RQSAGVTLLSFSTTDDATKRSPMRCKKISFLNETNCQYQTDFPDIAKFLVVTYITDAKTYLHSAPIMAKSESGSNVGLHDSETVSM

SEQ ID NO: 234255 - protein, 38 aa, Glycine max
  Clone ID: PAT_MRT3847_53557C.1.pep
YKIGRGKTLRGRKNPHPIIGAPQRWAFIEQNFLTGKHF

SEQ ID NO: 234256 - protein, 73 aa, Glycine max
  Clone ID: PAT_MRT3847_53558C.1.pep
SSRIGSSRSRSLAGCMANPSPVPHASASAGPMGLAASNTAAILKRTRTPPTNNPAMDYRTADSDHVLKRTRPL

SEQ ID NO: 234257 - protein, 82 aa, Glycine max
  unsure (1)..(82): unsure at all Xaa locations
  Clone ID: PAT_MRT3847_53559C.1.pep
VSAESNPAFKGTSLTVKSLSPPGRRRASSLMFAGKLTSECMLMLRYEQEHDVQVEARRLLGITIGWIXRVKVTSGFSREGXF

SEQ ID NO: 234258 - protein, 315 aa, Glycine max
  unsure (1)..(315): unsure at all Xaa locations
  Clone ID: PAT_MRT3847_5355C.1.pep
SANADSDSFEMELDKDDEMTTLSETGCDTEEQESTSSEELDELAISRDMPHLYPRPHISCNEAVSKWKLKGKRNNRNLVKRSVGAADGKGVVLYEADVEGLRSRLNHKRLVPSMHYYGNGISDVFADTDQMFGFEDEYSPTSKALAKGQNKIGHGVDWDEWAWEDQTAFKGYWENKGFARLYSDSYHFDGRMRSMLVDVDLKVQASYRKAPVPIVSITSKLDGKSIIGHPIQIESLKDGSSDKLFSAIDDXSNDGNGFEGSSVLPPAWRTAXETXTTNVFLVPVSSHLLVLKVMHSSAHISNENLTTSTEHNYQN

SEQ ID NO: 234259 - protein, 100 aa, Glycine max
  unsure (1)..(100): unsure at all Xaa locations
  Clone ID: PAT_MRT3847_53560C.1.pep
KVFLESKPKSKAXKAKKKTLSAQFEAKGAKNKASRERKNARKEKGLVQGPGKKPSTAPSGPFAIGSLPGQALKKLKKRPFGKLKGRGINFFFGWEPELHG

SEQ ID NO: 234260 - protein, 45 aa, Glycine max
  Clone ID: PAT_MRT3847_53561C.1.pep
TNTPTHTYSTDPVTLKFMHTNKLTYNHTQRRALLSVPTFPRTCDL

SEQ ID NO: 234261 - protein, 133 aa, Glycine max
  unsure (1)..(133): unsure at all Xaa locations
  Clone ID: PAT_MRT3847_53562C.1.pep
TTPEPVPASEALATEQAAAGASAQDEQHATEAPAPESTIVAPKEETTVAPTTESVQTTATEEAEPEEPIEVAVETEEVVTKETDEEMPAAVETSXEITEEVKEDSEEPIETTVTKTESAPAVCTEEENTPAET

SEQ ID NO: 234262 - protein, 97 aa, Glycine max
  Clone ID: PAT_MRT3847_53563C.1.pep
THPHISIFFFSSLLSHLLSFFLSRNFINNWGPNKTHLTTFSSQNTFHNTFHQPFHHTLISTFLTSSSPILSSLLTLQPHNFNISYLIKFSITHPTFF

SEQ ID NO: 234263 - protein, 73 aa, Glycine max
  Clone ID: PAT_MRT3847_53564C.1.pep
RMPNIGDPRVDASLVARTQCACTATVNLISAPGVTQNPFSGNTCAAAHATTPPCSRNPAAVDTTAITPRCSRA

SEQ ID NO: 234264 - protein, 63 aa, Glycine max
  Clone ID: PAT_MRT3847_53565C.1.pep
RQPWCFLRQMARQVPRFWKKVRCGDRTSRPIRAGTAQRARCPTVEMNGSNGQNVGGDQGSLEP

SEQ ID NO: 234265 - protein, 198 aa, Glycine max
  Clone ID: PAT_MRT3847_53566C.1.pep
MDLDQWISKVKDGQHLLEEELQLLCEYVKEILIEESNVQPVNSPVTVCGDIHGQFHDLMKLFQTGGHVPETNYIFMGDFVDRGYNSLEVFTILLLLKARYPANITLLRGNHESRQLTQVYGFYDECQRKYGNANAWRYCTDVFDYLTLSAIIDGTVLCVHGGLSPTFDNRSGSLSSFLLSCWSSSILSKFQTVHLNSQ

SEQ ID NO: 234266 - protein, 111 aa, Glycine max
  unsure (1)..(111): unsure at all Xaa locations
  Clone ID: PAT_MRT3847_53567C.1.pep
XXXPXXXXRXXSRXRPIFVXTXXPXXXXXQXXXPXXTSXXXXXAXGXXXTXGXXNLXGSXXRDRASAIGLXXFVXSCWXIIXXXGGXXCWXSRXGXXXQSSXMXTXXXVGX

SEQ ID NO: 234267 - protein, 66 aa, Glycine max
  unsure (1)..(66): unsure at all Xaa locations
  Clone ID: PAT_MRT3847_53568C.1.pep
XFGVGFFFFFFFLSQGKYLYSNIYLPYRYKTGGKLLLTIKSQIRLIDKKRNLLMQRVFSKPHNFSH

SEQ ID NO: 234268 - protein, 226 aa, Glycine max
  unsure (1)..(226): unsure at all Xaa locations
  Clone ID: PAT_MRT3847_53569C.1.pep
MKNAIFRPFFSSRGFCTSLISHHQPFPQNHDFIPPSTSFSNALQLYINSETPSHGQKIHSSILKSGFVPNTNISIKLLILYLKCNCLRYARQVFDDLRDRTLSAYNYMISGYLKQDQVEESLGLVHRLLVSGEKPDGFTFSMILKASTSGCNVALLGDLGRMVHTQILKSDIERDEVLCTALIDSYXKXGRVAYARTVFDVMSEKNVVCSTSLIXXYMNQGSIEDX

SEQ ID NO: 234269 - protein, 49 aa, Glycine max
  Clone ID: PAT_MRT3847_53570C.1.pep
DYMAIMDCLTAGCIIGNDYSGLGTNPMLITTAILADCNGHRYFIVTISS

SEQ ID NO: 234270 - protein, 117 aa, Glycine max
  unsure (1)..(117): unsure at all Xaa locations
  Clone ID: PAT_MRT3847_53571C.1.pep
MADSERLSAPGCWAACTSFSRTRKGILLFAEIILCLVILICFSASTPGXSSLSVIEMILAANFIVVYMCDLHTNIAFINWPWSDFFRTLRAAILYLIISIVVLVERGXHSKIVSWVL

SEQ ID NO: 234271 - protein, 179 aa, Glycine max
  Clone ID: PAT_MRT3847_53572C.1.pep
WCGSNPLNASEEDTAKYWYGTGIVKDNRGRIIYEKNMISKKKDMLKDPKDIKLLDPRSSDRARKSDVGFMKRPCLFVVSDNLEVKAMTTSSSIPCPFMENDRLLDDLEEHLVKIRKSQALNILMASLTSNKAAFTRSLSHLLWNWKCHRCIPCWGLLGRMKISHRKKKEMEDIESEEEI

SEQ ID NO: 234272 - protein, 139 aa, Glycine max
  unsure (1)..(139): unsure at all Xaa locations
  Clone ID: PAT_MRT3847_53573C.1.pep
LGREFLTAWPTHVRPATTLMADGRPYMNAMVHDSSVSTIPGEYGIGVKLTTINNMSAYGLNPGIIGCRLLGTIPESMSQQTVWNQMATARTPLNSDXSSKQSFSESTIDLVGGGILEDKTGEWITLIQNSPISNLAREA

SEQ ID NO: 234273 - protein, 39 aa, Glycine max
  Clone ID: PAT_MRT3847_53574C.1.pep
HARNETTLLSRIKRSTIMIGVVAHEAKNMIVLMYCPPRL

SEQ ID NO: 234274 - protein, 34 aa, Glycine max
  Clone ID: PAT_MRT3847_53575C.1.pep
QLTSPMPLGNNRIRARSARAEEDAWARLARAELD

SEQ ID NO: 234275 - protein, 39 aa, Glycine max
  Clone ID: PAT_MRT3847_53576C.1.pep
TGKAEELRLSVSISDLNLSQYSFHFFFPRHQSDKYPPVC

SEQ ID NO: 234276 - protein, 81 aa, Glycine max
  unsure (1)..(81): unsure at all Xaa locations
  Clone ID: PAT_MRT3847_53577C.1.pep
LEPIRLEQLLGYGTVLIAGLXALLELEKTLQVIGALGLGXTXYXRETGYENSEDLKQDVREMLAAGRLGAQAGAWAAAKRE

SEQ ID NO: 234277 - protein, 72 aa, Glycine max
  Clone ID: PAT_MRT3847_53578C.1.pep
CTQEIASSSVVHFLFIGYLLATPNIHNFMHPTTLQVLFNAHRRSCGCIVINQHSPLYQQGNLGKFHFDGHSP

SEQ ID NO: 234278 - protein, 133 aa, Glycine max
  Clone ID: PAT_MRT3847_53579C.1.pep
MLDGLLGRGFAAKCKSLMKLTKNRIDLIRRKRKATEKFLKKDIADLLANGLDDRAYGRAEGLFVELTLSSCYDFVDQSCDFVLKHLPVLQKLSGCPEEVREAISSLMFAAALSSDLPLRRDLRQIFQDSGSSF

SEQ ID NO: 234279 - protein, 66 aa, Glycine max
  Clone ID: PAT_MRT3847_53580C.1.pep
GPVQAALVPFLTGGGGDYNRIVGPAWVKMNGPVVKQKPPGRLLIHPISPNCQFNTFLCPTTTNNEY

SEQ ID NO: 234280 - protein, 61 aa, Glycine max
  Clone ID: PAT_MRT3847_53581C.1.pep
FMPWITLSYPIHQSLINPNIIKSNSFITAHSLNIRPMLAVISESTPEDDPYPSPNTANTTS

SEQ ID NO: 234281 - protein, 63 aa, Glycine max
  Clone ID: PAT_MRT3847_53582C.1.pep
NQRHLEKHMELTQKAFHVPYFFKKEFIVFIGICDVSTKGNVRKKKKKKKKKNNKKTSKKKKDY

SEQ ID NO: 234282 - protein, 44 aa, Glycine max
  unsure (1)..(44): unsure at all Xaa locations
  Clone ID: PAT_MRT3847_53583C.1.pep
KCISCRGVKPNQFGXYWFLTGPSHFLLTINKPASFIPQSTYLLS

SEQ ID NO: 234283 - protein, 63 aa, Glycine max
  Clone ID: PAT_MRT3847_53584C.1.pep
MSNFRANAEVMSALSQVVVALIRLIRHGFHSLFKPFMFLPMVLGRASVCVTGVYNKGHWDQWL

SEQ ID NO: 234284 - protein, 128 aa, Glycine max
  unsure (1)..(128): unsure at all Xaa locations
  Clone ID: PAT_MRT3847_53585C.1.pep
MGSSKALCSVSLLHLFIVVCLVFQCFATKNHADLTTTLTVNASDASGKPIPETLFGIFFEEINHAGAGGLWAELVSNRXFEAGGPNTPSNIDPWSIIGNESLINVETDRTSCFDRIXVALRLEVLCDS

SEQ ID NO: 234285 - protein, 199 aa, Glycine max
  unsure (1)..(199): unsure at all Xaa locations
  Clone ID: PAT_MRT3847_53586C.1.pep
MVLFPSFVNGLVRTVSIKKEKNCQKEDGRKAVEELAKEARKNELLLSSSGVVKSTKANNFVSVFTNRGQKGVNQDRLLVWEEFGCQQDMMFCGVFDGHGPWGHFVAKRVRKLVPAVLLCHWQENLAATSLDLDFKMEADKNIHGLDIWXQSYIXTCAACDHDLKQHTGIDSFXSGSTAFDIIIHGEYLTIANIGDCMAV

SEQ ID NO: 234286 - protein, 66 aa, Glycine max
  Clone ID: PAT_MRT3847_53587C.1.pep
SRSKHLCDWVLHPYRFFRAQTEEGAGKSVVCYLLDAVLTKSTPLGGGTQRLIDLCMDGYGGPWSGL

SEQ ID NO: 234287 - protein, 137 aa, Glycine max
  unsure (1)..(137): unsure at all Xaa locations
  Clone ID: PAT_MRT3847_53588C.1.pep
KQGLSFPKVDLDWRMGTKSLLMLKSHIDSINIRVVNDFVCVNMLWAFASLRVFVCNYVFYEFGLVIRYIFRFLHLGDAEDEIIVQKLKHVERNQVSDSEIDGFQEELASFLFWSEDFHEETXAETESSVSFMEVAPE

SEQ ID NO: 234288 - protein, 79 aa, Glycine max
  Clone ID: PAT_MRT3847_53589C.1.pep
DINAIISCANNVNEVYWCQSSANVHCCYIQRIEVLSVVDKSLDVLAHLANKARGNLQQLVSLTLACNTPGLSSSCSVSS

SEQ ID NO: 234289 - protein, 126 aa, Glycine max
  unsure (1)..(126): unsure at all Xaa locations
  Clone ID: PAT_MRT3847_53590C.1.pep
QVPVRSSRGDPACAQLGQLPDMAGGVGEMCWGIAAXKFFFFCDPHRRGEACVKKVVRTDCVQELMGLHQEXEXERGGTXQXENWVSLTSAQRVWDMGLGLDKXTNGALSKRGLGEYADATLGGIFI

SEQ ID NO: 234290 - protein, 61 aa, Glycine max
  Clone ID: PAT_MRT3847_53591C.1.pep
SSKLIIFIYINFYKFNLVYSTINSIFISKVLTRAESMCKSLTFDIYIYIYIYIYIYIYIYI

SEQ ID NO: 234291 - protein, 394 aa, Glycine max
  Clone ID: PAT_MRT3847_53592C.1.pep
MPPKSAKSKEAPAERPILGRFSSHLKIGIVGLPNVGKSTLFNTLTKLAIPAENFPFCTIEPNEARVNVPDERFEWLCQLFKPKSEVSAFLEIHDIAGLVRGAHQGQGLGNSFLSHIRAVDGIFHVLRAFEDPDIIHVDDTVDPVRDLEVITEELRLKDIEFMERKIEDIEKSMKRSNDKQLKIELECCQRVKALLEEGKDIRLGDWKAADIEILNSFQLLTAKPVVYLVNMTEKDYQRKKNKFLPKIHAWVQEHGGETIIPFSCALERNLADMPPDEAAKYCEENKTQSALTKIIKTGFSAINLIYFFTAGPDEVKCWQIRRQTKAPQAAGAIHTDFERGFICAEVMKFEDLKELGSESAVKAAGKYKQEGKTYVVQDGDIIFFKFNVSGGGKK

SEQ ID NO: 234292 - protein, 148 aa, Glycine max
  unsure (1)..(148): unsure at all Xaa locations
  Clone ID: PAT_MRT3847_53593C.1.pep
QPFRYGCEKTTEGDIRLGDWKAADIEILNSFQLLTAKPVVYLVNMTEKDYQRKKNKFLPKIHAWVQEHGGETIIPFSCALERNLADMPPDEAAKYXENKTQSALTKIIKTGFSAISLLFLECNCKLMKASSYRYNAGGASHEHLCNLF

SEQ ID NO: 234293 - protein, 49 aa, Glycine max
  Clone ID: PAT_MRT3847_53594C.1.pep
QSSSNPLEIFHSLCKTPFTKSEPHRDNPSLVFRNPLQQETHGLLIPFQK

SEQ ID NO: 234294 - protein, 68 aa, Glycine max
  Clone ID: PAT_MRT3847_53595C.1.pep
NLQIKDPSEITAQESTNCQQLTDQEIQKSETESVYENYALQTLPNTASVRIETYKSIQEIHTETKFAV

SEQ ID NO: 234295 - protein, 262 aa, Glycine max
  Clone ID: PAT_MRT3847_53596C.1.pep
MARTGSPLEVRACSPLKARTCSPLKVRTCSPLKVRTCSPRKVRACSPTKARTCSPLMVRACNPLMVRACNPLKARACGPLKARACNPLKARMACSPMKVRTCSPLKVRVCSPMKVRTCSPLKMRVCNPLKVRACSPTKAKARTCSPLKARTCSPLKARASSPLKARKSSPLKVRVCSPMKVRTCSPLKVRACSPMKVRTCSPLKVRTCSPLKARTCSPLKKIGTSTQGVHPYEKARDQLIERAGHPKFKRLDIRCRKSMQLT

SEQ ID NO: 234296 - protein, 98 aa, Glycine max
  Clone ID: PAT_MRT3847_53597C.1.pep
NLIKESFLNISRVNRRRIFFQFPLQRMNWGSFPSKRKKEFGVTYEGCGGFCHQFLGGRKILAFNFEQWFLQRFLHTSTLTNRAFFFFFFKQKGFCITP

SEQ ID NO: 234297 - protein, 73 aa, Glycine max
  Clone ID: PAT_MRT3847_53598C.1.pep
WIKSNDSYVEARCFDDAKGSSASKFYSRKESKNPRKSRYMIKLISRILGRSFQIKKTKGLTKEFYHFKLRFAL

SEQ ID NO: 234298 - protein, 38 aa, Glycine max
  Clone ID: PAT_MRT3847_53599C.1.pep
KHMCHYLLEVYVCVGCPRHPYKTPIFIVGGVRKGVISN

SEQ ID NO: 234299 - protein, 116 aa, Glycine max
  Clone ID: PAT_MRT3847_5359C.1.pep
FYFDFICTLPIVFGNNLFTQNLVLTFAYLLSSAGFCCWGAVPTTREVAISFAPTCGCWLPIVACRRSVFFYLEHSYCIAVFSARSHLCSLDLKSPVPDPVELGHPLLCSCRLPLGP

SEQ ID NO: 234300 - protein, 105 aa, Glycine max
  Clone ID: PAT_MRT3847_535C.1.pep
MFPIPPLKKNPKKAGDPKHGQGVVFFNPPPPPPPKKKSAPPPIPFPLVTKKTPLPPFLPLIFRAQIFFPFPQKKIFYFFPPLKGGNLSPFFFSFPKKKPPPPPKF

SEQ ID NO: 234301 - protein, 94 aa, Glycine max
  unsure (1)..(94): unsure at all Xaa locations
  Clone ID: PAT_MRT3847_53600C.1.pep
XVFSRDLLSGNRLPEDVIDYQXXXMXXXAIKNLNSNFRLCNRLHHIDNRLPAVNKRXXSNFKTCNRLHKSCNRLLEEIFRKIFLRVTSSQMVFT

SEQ ID NO: 234302 - protein, 71 aa, Glycine max
  Clone ID: PAT_MRT3847_53601C.1.pep
TSLKLKINSNKRSLKEERNANLIYTGSATSRAYVQSSRNPLEIFHSLCKTPFTKSEPHRDNPSLVLKNPLQ

SEQ ID NO: 234303 - protein, 91 aa, Glycine max
  Clone ID: PAT_MRT3847_53602C.1.pep
RWWRCACCLQSAIPRLPWCLALRLPGGAILLDQSPVNGGPNDLAGGNERFVELTKACNPSWKPQGPVGLLRVHWVSCGRPSVVFSGRTRAE

SEQ ID NO: 234304 - protein, 75 aa, Glycine max
  Clone ID: PAT_MRT3847_53603C.1.pep
LGLPFDSQVANSGLFSVPYMSFRKVAVGHKGSPFSRQQQQYYYRHAQVACYLARLPKYVSGQHQIVSDVSGELLY

SEQ ID NO: 234305 - protein, 73 aa, Glycine max
  Clone ID: PAT_MRT3847_53604C.1.pep
GGGGVLTNISTSMAATTTYSNISCSGGSFLSLRSPNFDESRVSSTQASYYVCGKVDGAAMLVINGVTTAFFAF

SEQ ID NO: 234306 - protein, 33 aa, Glycine max
  Clone ID: PAT_MRT3847_53605C.1.pep
RFYPLFALFANIGLMLSGRTVKYFYNLRQNLCS

SEQ ID NO: 234307 - protein, 46 aa, Glycine max
  Clone ID: PAT_MRT3847_53606C.1.pep
LTLGNCSFYFLKQKNSEEHTIFISTIIYVSILIKTVISNFSLLIIM

SEQ ID NO: 234308 - protein, 96 aa, Glycine max
  unsure (1)..(96): unsure at all Xaa locations
  Clone ID: PAT_MRT3847_53607C.1.pep
SVAILTLAAAGVILSVTSYDKLLVPVLRKLTGNDRGISILQGIGFGMVHKLXTMIGAATVAKKRHEAARQEWTIKGYXTMSALWLAPRSMISGCGE

SEQ ID NO: 234309 - protein, 85 aa, Glycine max
  Clone ID: PAT_MRT3847_53608C.1.pep
YFIIVNGNEITIISFKLCGFRKDSVYIGLDSRNENSADLDKLNALVNVSLFLLSIITGFLLTVVNFPAPSFFMRQSDGSISARKL

SEQ ID NO: 234310 - protein, 83 aa, Glycine max
  Clone ID: PAT_MRT3847_53609C.1.pep
IVHSNSNLLCNHRGLHNLSKAMGNCILLQHYVIRVINTNRNILEYSAHNHIDQVLINFPGHTSTLTLPVIPLAMPFSYHISAS

SEQ ID NO: 234311 - protein, 110 aa, Glycine max
  Clone ID: PAT_MRT3847_5360C.1.pep
FPEELQGILVPRRGPLPRVFVAGVYIGGAAKVRKLYENGELPELIRRLPKSQRNMCDLCGGLKFVVCAECDGSPKVFGKKSGGFRSCLSCNSNGLIRGPACFVGKPRPPK

SEQ ID NO: 234312 - protein, 133 aa, Glycine max
  Clone ID: PAT_MRT3847_53610C.1.pep
APPDNRVCRSFQLKSSTRPTSKGLSELLQQTDMSPSFPIIFLHRYSMLRSVLSVTLGAVLLGILQEFLDEVLLAPAGGLDGRRLLDGLGAAAGKEEDTAEHGAEDTDRKVVRADLADGGERVVDDHVCGGGLM

SEQ ID NO: 234313 - protein, 87 aa, Glycine max
  Clone ID: PAT_MRT3847_53611C.1.pep
HRTTYFGSRDHGEEKRYNYKDRSLNAAAYKDLINSYLKNINTRPTNEEPAIADQWKQTETPSSIGQKTETEVLRKEEAEEESEMDML

SEQ ID NO: 234314 - protein, 70 aa, Glycine max
  Clone ID: PAT_MRT3847_53612C.1.pep
LFNPTPSLCTMIVNLYKLRSNVYSYNLGGMSCSPDLIYIDPDKHLFQSFSILIDMISFEFHLHTFALSSA

SEQ ID NO: 234315 - protein, 48 aa, Glycine max
  Clone ID: PAT_MRT3847_53613C.1.pep
HTCANGWSILRPILRVTALWTWHPPGHEVPSLQQAYQLGFLGMIIISP

SEQ ID NO: 234316 - protein, 40 aa, Glycine max
  unsure (1)..(40): unsure at all Xaa locations
  Clone ID: PAT_MRT3847_53614C.1.pep
FKPHAGMACCHDXGAYLHLVDGFLASNCPFRSNVKKSLAR

SEQ ID NO: 234317 - protein, 80 aa, Glycine max
  unsure (1)..(80): unsure at all Xaa locations
  Clone ID: PAT_MRT3847_53615C.1.pep
GLISSGILTLPNIWRLDLSYNNFSGLLPVEISQMTGLKFLXLSYNQFNGSIPTEFGNMTQLQALDLAFNNLSGSIPSSLG

SEQ ID NO: 234318 - protein, 564 aa, Glycine max
  Clone ID: PAT_MRT3847_53616C.1.pep
LAHNLLSGVLSPLFGNLTNLQVLRLQMNELNGTIPIEIGQLHKLSILNLSRNSLGGSIPSEITNLSNLNFLNMQSNNLSGSIPTSIENLKLLIELQLGENQLSGVIPIMPRSLQASLNLSSNHLSGNIPSSFDILDGLEVLDLSNNKLSGPIPKELTGMSSLTQLLLANNALLSGEIPKFSQHVEVVYSGTGLINNTSPDNPIANRPNTVSKKGISVAVAVLIAIVAAIVLVGLVTLLVVSVSRHYYRVNDEHLPSREDHQHPQVIESKLLTPNGIHRSSIDFSKAMEVVAEASNITLKTRFSTYYKAIMPSGSMYFVKKLDWSDKILPVGSHDKFGKELEVLAKLNNSNVMTPLGYVLSTDTAYILYEFMSNGSLFDVLHGSMENSLDWASRYSIAVGVAQGLSFLHGFTSSPILLLDLSSKSIMLKSLKEPLVGDIEHYKVIDPSKSTGNFSAVAGSVGYIPPEYAYTMTVTMAGNVYSFGVILLELLTGKPAVTEGTELVKWVVRNSTNQDYILDFNVSRTSQAVRNQMLAILEIARVCVSTSPESRPKMKSVLRMLLNAR

SEQ ID NO: 234319 - protein, 73 aa, Glycine max
  Clone ID: PAT_MRT3847_53617C.1.pep
CCPFVGFEVWGSDGEYLTSWHLSFLIDNSKQSTVFDILLGISEDYAIADNTLMPAFYVPQATARSSENAESSA

SEQ ID NO: 234320 - protein, 132 aa, Glycine max
  Clone ID: PAT_MRT3847_53618C.1.pep
ANGILNVSAEDKTTGQKNKITITNDKGRLSKEDIEKMVQEAEKYKSEDEEHKKKIEDAIEQAIQWLDSNQLAEADEFEDKMKELESICNPIIAKMYQGGAGPDVGGAGAAEDEYAAPPSGGSGAGPKIEEVD

SEQ ID NO: 234321 - protein, 54 aa, Glycine max
  Clone ID: PAT_MRT3847_53619C.1.pep
QLEGMHRSERAIQGLEVPRAPHWLIAEVTGCRLCEPGTLTPQLGFCSLTIWITS

SEQ ID NO: 234322 - protein, 166 aa, Glycine max
  Clone ID: PAT_MRT3847_5361C.1.pep
NLYLMKPQEFSGADNEQPSPSRHSIIGVKRKFSSIDYASSNSPVKVLPSFTSTFLPDLSNAQVLKPKPTNVDRLPLSNEEFITPTQPKKQQSRPNSPANGVSKLILPRSRVASIRRESDCNSEKGFGEAEAAHEKMVKSAQQVAMGFEDFVSKQGYRGAQKGQVVV

SEQ ID NO: 234323 - protein, 655 aa, Glycine max
  Clone ID: PAT_MRT3847_53620C.1.pep
MAGKGEGPAIGIDLGTTYSCVGVWQHDRVEIIANDQGNRTTPSYVGFTDTERLIGDAAKNQVAMNPINTVFDAKRLIGRRFSDSSVQSDIKLWPFKVIPGAADKPMIVVNYKGEEKQFAAEEISSMVLIKMREIAEAYLGSTVKNAVVTVPAYFNDSQRQATKDAGVIAGLNVMRIINEPTAAAIAYGLDKKATSVGEKNVLIFDLGGGTFDVSLLTIEEGIFEVKATAGDTHLGGEDFDNRMVNHFVQEFKRKNKKDISGNPRALRRLRTACERAKRTLSSTAQTTIEIDSLYEGIDFYSTVTRARFEELNMDLFRKCMEPVEKCLRDAKMDKRSVDDVVLVGGSTRIPKVQQLLQDFFNGKELCKSINPDEAVAYGAAVQAAILSGEGNEKVQDLLLLDVTPLSLGLETAGGVMTVLIPRNTTIPTKKEQVFSTYSDNQPGVLIQVFEGERARTKDNNLLGKFELSGIPPAPRGVPQITVCFDIDANGILNVSAEDKTTGQKNKITITNDKGRLSKEDIEKMVQEAEKYKSEDEEHKKKVEAKNALENYAYNMRNTVKDDKIGEKLDPADKKKIEDAIEQAIQWLDSNQLAEADEFEDKMKELESICNPIIAKMYQGGAGPDVGGAGAGAAEDDYAPPPSGGSGAGPKIEEVD

SEQ ID NO: 234324 - protein, 71 aa, Glycine max
  Clone ID: PAT_MRT3847_53621C.1.pep
WIVCILMENHSCIEQPRMVCKCNWISQIDDSKETWKMAIKIKKIWNVFRTPRSNIEMIFMDQTVRISLFRR

SEQ ID NO: 234325 - protein, 36 aa, Glycine max
  Clone ID: PAT_MRT3847_53622C.1.pep
FVFFKCPPPPPPPPPPPPPPPPQRRRTSYSDDGQPS

SEQ ID NO: 234326 - protein, 75 aa, Glycine max
  unsure (1)..(75): unsure at all Xaa locations
  Clone ID: PAT_MRT3847_53623C.1.pep
YRVREFPGRTQPSGKVLTKAPVKPKFYLSCSLXRKISSIKLVSFGTPVGSWGNLHEXSCHAHMSYDACDRNCVGH

SEQ ID NO: 234327 - protein, 32 aa, Glycine max
  Clone ID: PAT_MRT3847_53624C.1.pep
QYHCRPPVRLCSTRSTMTTHYGARLTACRRRS

SEQ ID NO: 234328 - protein, 40 aa, Glycine max
  Clone ID: PAT_MRT3847_53625C.1.pep
NPTRSLRGNYTSRIQHIDHEPKRVEPGELDYDKDNFMRQL

SEQ ID NO: 234329 - protein, 97 aa, Glycine max
  Clone ID: PAT_MRT3847_53626C.1.pep
MIGAYSDPTDRTKQKAWLNSHSVNSKLSPQKTFDCSLVVYDENEITINDCSMWIRNCTVVGLLPLFLLSKEIAVALAKDCTEGHESISSDNLVRVII

SEQ ID NO: 234330 - protein, 201 aa, Glycine max
  Clone ID: PAT_MRT3847_53627C.1.pep
MEFSQDDFDRLLLFEHTRKTAEANYAENPQDADNLTRWGGALIELSSFQAPRDAKAMIDDALSKLEESLLINPTKHDTLWCLGNANTSYAFLIPDITEAKGYFDKALEYFQKAAEEDPENDLYRKSLQVAVKAPELHMEIHKNGLGLMSNAGSSATSKEKESKKQKSNDFKYDIFGWIILAVGIVAWVGMAKSNIPPPPPR

SEQ ID NO: 234331 - protein, 87 aa, Glycine max
  unsure (1)..(87): unsure at all Xaa locations
  Clone ID: PAT_MRT3847_53628C.1.pep
MGSENTIYINLFLLVHKGCHGTCGGCKLNPLLXSSSHKVTLLYLATSESIMKKIEDVDTFSQYTDPLLVLLDTIPSNEKVLLVCHIF

SEQ ID NO: 234332 - protein, 69 aa, Glycine max
  Clone ID: PAT_MRT3847_53629C.1.pep
GRFSDGHVGPREQRVRGVQPHIVFLARSNDTLWARLTSSVAAAPLCMASGSSWSFLWASESIIMFSGVV

SEQ ID NO: 234333 - protein, 61 aa, Glycine max
  Clone ID: PAT_MRT3847_5362C.1.pep
QILQKQIYGIMPSYKDLLDETGRPLSGRQLTRVRASECRRQTFPPCFGPPLYFVMILIVVT

SEQ ID NO: 234334 - protein, 67 aa, Glycine max
  Clone ID: PAT_MRT3847_53630C.1.pep
IRCFPLCYLNEVSPLSLSLYMFLPCLLFLPRYFTLSTLITLNFTTGAALNPFLLLHILQPRHIAFIT

SEQ ID NO: 234335 - protein, 74 aa, Glycine max
  Clone ID: PAT_MRT3847_53631C.1.pep
DIENGTSIFLVALEKSGFGIFLPMVPLIDRVKQMIYWKGQRGFSKMNQREKLTTVPPSENIRTRSKQTVHTIFT

SEQ ID NO: 234336 - protein, 94 aa, Glycine max
  Clone ID: PAT_MRT3847_53632C.1.pep
RSILCAEGLELCVIFIVRGLQLGVGALEGGICRRHSSLGVLGVCGCRGPLAGASTRIGNSLWAFLHLLPWCSRWRSPQRWILPLSQREYTFPFA

SEQ ID NO: 234337 - protein, 142 aa, Glycine max
  unsure (1)..(142): unsure at all Xaa locations
  Clone ID: PAT_MRT3847_53633C.1.pep
THAXXHASAHASXKKKKKKKIKKKKKKKKKKKKKKKKKKKKKKKRGGPFKGTKVNYPGLATKKFFKGAPKIKSTGRGLKTREREKPGRTQIKWLGKKSPFAKWAKNQKGPNQWPFQKVANPKGQREPPLNRPINPAGWGVNP

SEQ ID NO: 234338 - protein, 56 aa, Glycine max
  Clone ID: PAT_MRT3847_53634C.1.pep
FNSCHSIFLYNYFCAWHSLLIIIIILYLGSFIFRNRGWCLLASCFNPCWQMPCESF

SEQ ID NO: 234339 - protein, 141 aa, Glycine max
  Clone ID: PAT_MRT3847_53635C.1.pep
CVRFCVRPRVRSILILTPRPQPLFSPALYPKMRFSSFALGLAGVSAAAAAAVPTILEMDDVVLYGEGKTQIVKRHEWQAMEEERLAHLNEKVRRRQVEFLPAHGPPTNYEGPAAPLTKRQCSDCEVDEVKVTNEEHSLQWD

SEQ ID NO: 234340 - protein, 54 aa, Glycine max
  unsure (1)..(54): unsure at all Xaa locations
  Clone ID: PAT_MRT3847_53636C.1.pep
XSWHISGGLREQISLSSSQFLKLSINCCIYTIPTKVLLLLSYFFYPSYFILINF

SEQ ID NO: 234341 - protein, 84 aa, Glycine max
  unsure (1)..(84): unsure at all Xaa locations
  Clone ID: PAT_MRT3847_53637C.1.pep
LCDRLAIPSHPIRGVPTAMKCLARLLEESVARTSTVRADGVSLLVPLISPASTRQSMQILYEPCLCIWLXSYYAPAVAYSATSR

SEQ ID NO: 234342 - protein, 305 aa, Glycine max
  unsure (1)..(305): unsure at all Xaa locations
  Clone ID: PAT_MRT3847_53638C.1.pep
EARIRSEQEELDDIIRYGSKELFADENDEAGKSRQIHYDAAAIDRLLDRDQVGDEEATLDDEDEDGFLKAFKVANFEYVDEAEAAAEEAAQKRAMETLNSSERTHYWEELLRDKYQEHKVEEFNALGKGKRNRKLMVSVEEDDLAGLEDVSSDGEDDNYEAELTDGDSNSTGTTTARRPYKNKALTXRDSTEPLPLMEGEGKAFRVLGFNQNQRAAFVQILMRFGVGDFDWKEFTSRMKQKTYEEIKDYGTLFLSHIAEDITDSATFTDGVPKEGLRIQDVLVRIAVLLLIRDKVKFVSQHPQTP

SEQ ID NO: 234343 - protein, 45 aa, Glycine max
  Clone ID: PAT_MRT3847_53639C.1.pep
EHSAPFVKWTYIRSSHAALVTAVSSSCLVFIMNQSPVSSSYLGKR

SEQ ID NO: 234344 - protein, 112 aa, Glycine max
  unsure (1)..(112): unsure at all Xaa locations
  Clone ID: PAT_MRT3847_5363C.1.pep
FNYRNWGLWLSDGISRHPHKSFGPTGRLILNPGLSHLKLIAPPQECILRIKPRSSSPTRLVCVANRITPKSLHRPYDCKFGRLVRINKFIKFTVIYLIFLILKSKYVVVVXN

SEQ ID NO: 234345 - protein, 101 aa, Glycine max
  Clone ID: PAT_MRT3847_53640C.1.pep
SSDVLVGPILVLFSPFVLSCAGLCVLGSLLVGAFLPLGGGFSLSACLFVCALVVLGAWGALASFWAFAGGLLASVLWCGFPLRGERPGGARLGLPGGSGRV

SEQ ID NO: 234346 - protein, 86 aa, Glycine max
  unsure (1)..(86): unsure at all Xaa locations
  Clone ID: PAT_MRT3847_53641C.1.pep
YDHLSFRTLGVNGNGMDSMTIFSLNYGYSHREKLRFPAXKSRAVRFSPTADSLPNYGSGINGPLPPICISYLLVYQMSPQTQEIIK

SEQ ID NO: 234347 - protein, 96 aa, Glycine max
  Clone ID: PAT_MRT3847_53642C.1.pep
QCDTGSVPNASCLRSLTVPPSSERQRCLPQLSPYAPLSRRNGPTCAMSVGGKMTTTATKTMMAIKMTMINNRIMLMTTTMITTLGSRGKAVYTAKE

SEQ ID NO: 234348 - protein, 96 aa, Glycine max
  Clone ID: PAT_MRT3847_53643C.1.pep
MYSRDDLMNMKNFGGEDGDEEDEDDDDDEASFPSKLGNVLRAKESGKRDWKQMVKKGIEDASTRVRKHANKVSNHIRQWWRGKRRTNSKKGGKTEL

SEQ ID NO: 234349 - protein, 58 aa, Glycine max
  Clone ID: PAT_MRT3847_53644C.1.pep
VGTHKLKGSYANQLDRILKMKGRDINPGHTATLLKGTLKIQYKAELLEWGRDDDNRYS

SEQ ID NO: 234350 - protein, 292 aa, Glycine max
  Clone ID: PAT_MRT3847_53645C.1.pep
MKGVLWVVVVSVVVAAWIPFSHCSKKPVGVARKEDIPYIKCQVCEKLAKELYQQVQNKQAEIAPKKISEYQIIEIAENVCNLKKAEADWILRIDIVEKEDRLELVEQDSEGQCNSECKTIERACQEVIGYSDTDVAEYLYSSKPDIDSLRNYLCKDLTNACSTKPPPVPKDRAPGEPFVAKSSKEAEMEKLLKSMEGMPGAPGMKMYSRDDLMNMKNFGDEDGDDEDEDDNEEASFPSKLGKVLRAKESVKRDWKQVIKKGIEDTSMTLKKHANKVSNHIRQWWRGKKITNS

SEQ ID NO: 234351 - protein, 48 aa, Glycine max
  Clone ID: PAT_MRT3847_53646C.1.pep
NTSNLGCPKTSERLLASGTLTHKGTETEHRPWVGDSFTGLNPENYQPT

SEQ ID NO: 234352 - protein, 178 aa, Glycine max
  Clone ID: PAT_MRT3847_53647C.1.pep
GFTTDQNAQVMVLAATNRPSELDEAILRRLPQAFEIGVPDQRERAEILKVVLKGERVEDNIDFGHIAGLCEGYTGSDLFDLCKKAAYFPIRELLDEEKKGKRSPAPRPLSQLDFEKALATSKKTNVAASEYGGFSLQSPSRWTVPGESGDSQFQAAIHEISKLVVSHMINLQSDSQDP

SEQ ID NO: 234353 - protein, 65 aa, Glycine max
  Clone ID: PAT_MRT3847_53648C.1.pep
LDPTSLDATLPTKANSVKSAPNKAGAELAYRGKPLTFYPHHWNEQLYEPTMELIATLTCILDGKK

SEQ ID NO: 234354 - protein, 35 aa, Glycine max
  Clone ID: PAT_MRT3847_5364C.1.pep
FDLSLSSHFFLSTNVNLLEMSLGRIQARITGPTLY

SEQ ID NO: 234355 - protein, 98 aa, Glycine max
  unsure (1)..(98): unsure at all Xaa locations
  Clone ID: PAT_MRT3847_53650C.1.pep
KNTHPGPPLASFRNHICASSFILSPLDTSTFCNLTYKWITSVVTPHQCSSCQTDPVSCSRLGLHCSLIISIHIPSFKKMCGCNTLVRYSLFGFFIXYS

SEQ ID NO: 234356 - protein, 45 aa, Glycine max
  Clone ID: PAT_MRT3847_53651C.1.pep
AGSAMNGNVKALIKDRIVHVAQVTSNALALVNRFASRHPSATQTP

SEQ ID NO: 234357 - protein, 51 aa, Glycine max
  Clone ID: PAT_MRT3847_53652C.1.pep
WLSSMRAVTRTNETAGMSIVGKAMTNPLGNKVAHMSKLMTGVMKKTHRLRT

SEQ ID NO: 234358 - protein, 203 aa, Glycine max
  Clone ID: PAT_MRT3847_53653C.1.pep
MATTTLMKLAFMLLMNLVICSAESSIGRKSNPNPEEFVKSSCRATRYPVLCVKSLLAYASVIRRSDRQLATTALSVSISRSRSSAWLVKKMLKARGMKPREYRAVQDCVENIGDSVDRLRQSVTELGRTGEDFVWHMSNVQTWVSAALTDDSTCLDGFAGSAMNGNVKALIKDRIVHVAQVTSNALALVNRFASRHPSATQTP

SEQ ID NO: 234359 - protein, 206 aa, Glycine max
  unsure (1)..(206): unsure at all Xaa locations
  Clone ID: PAT_MRT3847_53654C.1.pep
MPSSSSFLFLFLCFFFLPSAPSDPRAQRAALLCTNRTVLSLSRRQVFVANFLAAMDALTPLTTSHGHGAVFNGSQNATVFAFGECMRDLSQNDCNLCLAQCKTQLLACLPFQRGTRGGRLFFDGCYLSLLXRYDDYNFFGETRSDQDTTVCGNNSSNNNSNSAANSATNSSSGVYKANAMALVRNLSGLAPKNDGFFVGSVERKNV

SEQ ID NO: 234360 - protein, 52 aa, Glycine max
  Clone ID: PAT_MRT3847_53655C.1.pep
CHNGFQTFEVATGALDRIEASLAMQVELVNDRDTSARRSWGLPRRDFSRCHY

SEQ ID NO: 234361 - protein, 132 aa, Glycine max
  unsure (1)..(132): unsure at all Xaa locations
  Clone ID: PAT_MRT3847_53656C.1.pep
SFLTTTDERLVGTHLVAFAPFIRGTHIYGTPMMNLQEXVLSKATHDMDEEWAERVREINFSNIPRIRKALYGRLGYSSITTTSRCYRYRFSHVTEPNMGEEHQCQAPEGHRLWFNNCCFFSSPDTMNLCFKC

SEQ ID NO: 234362 - protein, 68 aa, Glycine max
  Clone ID: PAT_MRT3847_53657C.1.pep
MLMRHPPARFISSHILSIPCTSGSALYVMQRIHIECSLTSGIRYTQQDQSQLIWHGQARAKERSVASH

SEQ ID NO: 234363 - protein, 93 aa, Glycine max
  Clone ID: PAT_MRT3847_53658C.1.pep
ANIQWIIIYQPPKWLTTSININGTLKFNTNQTYFQRLLQTHYTSHFFLKCWGKSNIEHHTKIISSLKPPTKTQHQFAQFPPSGCLKQRGAFHP

SEQ ID NO: 234364 - protein, 72 aa, Glycine max
  Clone ID: PAT_MRT3847_53659C.1.pep
THCLGRQRDIVSLCDPTDSIELHKPYRWFLFFFSPIHITLETKLSYIVKLSLCINLRETPTHRLTYTPFVYL

SEQ ID NO: 234365 - protein, 165 aa, Glycine max
  Clone ID: PAT_MRT3847_5365C.1.pep
MAGNSPCASCKLLRRRCTKDCIFAPYFPSNDPQKFALVHKVFGASNVSKMLQELPAHQRGDAVSSLVYEAHARVRDPVYGCVGAISHLQNQVSELQMQLAVAQAEILCIQMQQEPLMPNPEMEDPDQKSYLLQNELPQYLNYASSSNVIYDSFSRESIFGHDMVS

SEQ ID NO: 234366 - protein, 58 aa, Glycine max
  Clone ID: PAT_MRT3847_53660C.1.pep
FFTSTSYRCHPLQSVYRQLNVVLLWSYPTGHYVGVSMEVSSEGGGKLAIVSHIGKIQG

SEQ ID NO: 234367 - protein, 135 aa, Glycine max
  unsure (1)..(135): unsure at all Xaa locations
  Clone ID: PAT_MRT3847_53661C.1.pep
QTSTRPNPVGALFWLFHNANNLSVKRMFRSIGGGAGAKNAILMNMPNAVLSMRRYLVGDLVIEVPKTTSPLLXETDSILIEWVRWVKRTITWEIKPNSTGAVRHXSKKVGLKFSQEEFLTARTTRCRXATTLLAD

SEQ ID NO: 234368 - protein, 122 aa, Glycine max
  Clone ID: PAT_MRT3847_53662C.1.pep
MMNSHKQLFPLFSFFLVLYLLGQRVVLQAEAHPRHRPTKLFVFGDSYADTGNIQKTFSNSWKDPYGITFPGKPAGRFSDGRVLTDYIAKYLRVKSPIPYRLRKLMPQHLKYGMNFAFGGTGV

SEQ ID NO: 234369 - protein, 121 aa, Glycine max
  unsure (1)..(121): unsure at all Xaa locations
  Clone ID: PAT_MRT3847_53663C.1.pep
QSESLISDASSRLQSXQRDLVLFYGKLIDSHSKRNSHTAFDAAFGYLHNLVRTSSSLHVKRRAYQYMVSGLCLMDRPREAEDLVLGLQPSGFEYKSIVYGYGRLGLFNDMNRVVDEMESRR

SEQ ID NO: 234370 - protein, 42 aa, Glycine max
  Clone ID: PAT_MRT3847_53664C.1.pep
NANTIVKGVCYYMNLRTDLVIRRIEMFIDRDGVIFQKLPNIQ

SEQ ID NO: 234371 - protein, 98 aa, Glycine max
  unsure (1)..(98): unsure at all Xaa locations
  Clone ID: PAT_MRT3847_53665C.1.pep
MHAYVSSEFGSRFKEAFSLFDKDGDGTITTKELGTVMRSLGXQNPTEAELQDMINEVDADGNGTIDSPGFLTMMARKXXXPXAKRNPXGIPXFDKDGM

SEQ ID NO: 234372 - protein, 52 aa, Glycine max
  Clone ID: PAT_MRT3847_53666C.1.pep
KVINYLPLLKNIQFTSKFSLSPSPHSKEKKKKRRNLKKTHQSIKQTVKLHIF

SEQ ID NO: 234373 - protein, 72 aa, Glycine max
  Clone ID: PAT_MRT3847_53667C.1.pep
DVKAAVLFGGFASGFLGMLYKLMGSWVIGGLGGPFWIGGIGGLQTFLGALLAQGVKASREAYLKRPFLRAIL

SEQ ID NO: 234374 - protein, 133 aa, Glycine max
  unsure (1)..(133): unsure at all Xaa locations
  Clone ID: PAT_MRT3847_53668C.1.pep
HQKNFRQFCLPPTQPPRAPPPYPPPKPLSPPAPPPXPPPKPPPPPPAPPMPPMPPTPPMDPPSKHDSGFFTSSFDFFSKFLASTYWDIPSTKHTPKTTTEMNFLSITDLILIFKTLTTTVCIYVAIVIVYTPH

SEQ ID NO: 234375 - protein, 89 aa, Glycine max
  Clone ID: PAT_MRT3847_53669C.1.pep
HGALGSVFGLFHRNPPRYSTPAGSGWVQRARKTNFRCGPLFFPPFSSGFHQGEPGLSLFAPWAFWVFPGLRRSFQIGLDGKGLPLKSIT

SEQ ID NO: 234376 - protein, 65 aa, Glycine max
  unsure (1)..(65): unsure at all Xaa locations
  Clone ID: PAT_MRT3847_5366C.1.pep
LYNRVTNVGLIGHQSTCVCIRAWVRSSYLTFFGTVIVYGYNCGISPPMPTTAIVIVRXVVQGRDN

SEQ ID NO: 234377 - protein, 207 aa, Glycine max
  Clone ID: PAT_MRT3847_53670C.1.pep
LGAFFLKDLKGRFRVFAVFGEEEKKNAWAALFDVEDPRSKFPQNKGKVLDIYQALEVARHDIQYLDWRARQDVLTIMHLHEKVVEVLNPLAREYKSIGTLKKELAGLQDELAQAHRQVHISEARVTTALDKLAYMEELVNDRLLQDRSTAEVAQTSSSPSTSANSLVIEKRRQPRKSLNVSGPVQSYHPHLKNFWYPVAFSNDLKDD

SEQ ID NO: 234378 - protein, 531 aa, Glycine max
  unsure (1)..(531): unsure at all Xaa locations
  Clone ID: PAT_MRT3847_53671C.1.pep
MNAIATASALSLPIFLRAGKLDTKRDLKGRFRVFAVFGEEEKKNAWGALFDVEDPRSKFPQNKGKVLDISQALEVARHDIQYLDWRARQDVLTIMXHEKVVEVLNPLAREYKSIGTLKKELAELQDELAQAHTQVHISEARVTTALDKLAYMEELVNDRLLQDRSTTDVAQTSSSPSTSANSLVTEKRRQPRKSLNVSGPVQSYHTHLKNFWYPVAFSTDLKDDTMIPIECFEEPWVIFRGKDGKPGCVQNTCAHRACPLHLGSVNEGRIQCPYHGWEYTTDGKCEKMPSTRQLNVKIKSVPCFEKEGMIWIWPGNDPPAATLPSLLPPSGFEIHAEIVMELPIEHGLLLDNLLDLAHAPFTHTSTFAKGWSVPSLVNFLTPASGLQGYWDPYPIDMEFRPPCMVLSTIGISKPGKLEGQSTRECSTHLHQLHVCLPSSKQKTRLLYRMSLDFAPLLKHIPLMKYLWRHFAEQVLNEDLRLVVGQQERMNNGANVWNFPVAYDKLGVRYRMWRDALERGAKQLPFSPQHID

SEQ ID NO: 234379 - protein, 414 aa, Glycine max
  Clone ID: PAT_MRT3847_53672C.1.pep
SALAQKLWLAGFSKGIQEMHRKASLVLEDAVRNIYTVVAFCAGNKVMELYQLQLNKIFKQSFFHGVAIGFAFGFSQFLLFACNALLLWYTAICVNKSYVDLPTALKEYIVFSFATFALVEPFGLAPYILKRRKSLMSVFEIIDRVPKIDPDDTSALKPPNVYGSIELKNVDFCYPSRPEVLVLSNFSLKVTGGQTIAVVGVSGSGKSTIISLIERFYDPVAGQVFLDGRDLKEYNLRWLRSHLGLVQQEPIIFSTTIRENIIYARHNATEAEMKEAARIANAHHFISSLPHGYDTHVGMRGVDLTPGQKQRIAIARVVLKNAPILLLDEASSSIESESSRVVQEALDTLIMGNKTTILIAHRAAMMRHVDNIVVLNGGRIVEEGTQDSLVAKNGLYVRLMQPHFGKALRQHRLV

SEQ ID NO: 234380 - protein, 76 aa, Glycine max
  Clone ID: PAT_MRT3847_53673C.1.pep
MTGDCCTWWNFPMSGGGLHVARMGVLDQHSALVGIRRGYCGRGSVGIKDRNLEFGCFETLVLKLRMHILLEASSLD

SEQ ID NO: 234381 - protein, 106 aa, Glycine max
  Clone ID: PAT_MRT3847_53674C.1.pep
RQEVLPGRAITATATTNKASALPLKEHAVASTADTPSKSRGNTHAERATRRTDTEETAMYKERPMKHDKACNAHGENENRMQNYRRNRRRERERRGENRTEQMGLN

SEQ ID NO: 234382 - protein, 88 aa, Glycine max
  unsure (1)..(88): unsure at all Xaa locations
  Clone ID: PAT_MRT3847_53675C.1.pep
XLXXPXSXFRVXPXXLXLSAXXXXXXXLXXXXXXXDXPTHXXXCLAXXSXXXXXXLXXXXFXXXFXXLXVCXWXXXTSXRXXSXLXXS

SEQ ID NO: 234383 - protein, 185 aa, Glycine max
  Clone ID: PAT_MRT3847_53676C.1.pep
MSMEMMATERVCYVHCNFCNTILAVSVPYSSLLTIVTVRCGHCANLLSVNMGASLQAFPPQDPQSQKQHLSFQEPSSKELGSSSKCSKIAPFEAVEHELPRIPPIRPTEKRHRVPSAYNRFIKEEIQRIKASNPDISHREAFSSAAKNWAHFPHIHFGLKNLKLDGNKQEKLDQGEGAEKSNGFY

SEQ ID NO: 234384 - protein, 84 aa, Glycine max
  Clone ID: PAT_MRT3847_53677C.1.pep
NTGAHRHGHGGCTTKGTCAATISDDAGNPQLRLDYDKDANSLSILKDAAEPEQVWRTLKRKRIHEHRILNRDGTQLSAANSAEV

SEQ ID NO: 234385 - protein, 133 aa, Glycine max
  Clone ID: PAT_MRT3847_53678C.1.pep
MGSFGRRSMSTVAKAVEEITGTGNTKIRKSSSELCTFLGIPRQSRSEIALILSKFIKLYNFKSPGIKKDKIWEQNLQTLLRGRNNVGFPEIAKILSPEFGHGAINVKDSSIGDSSGDATKGKGPKKKGKSSKK

SEQ ID NO: 234386 - protein, 81 aa, Glycine max
  unsure (1)..(81): unsure at all Xaa locations
  Clone ID: PAT_MRT3847_53679C.1.pep
MDEKGKLDQIEERLRAVERGKDYALADVEDLCLVPDVVIPPKFKVSDFDKYKGTTYPKNHLKVXCKKMGTYAKDDKLLMHF

SEQ ID NO: 234387 - protein, 138 aa, Glycine max
  Clone ID: PAT_MRT3847_5367C.1.pep
MVMKMPHSPICDGLSSIEDFGNVFKKGHELNVFDYTLVMMATNGFSSENKLGQGGFGPVYKGILPTGQEVAVKRLSKTSTQGIMEFKNELTLICELQHMNLVQLLGCCIHEEEKILIYEYMPNKSLDFYLFGEECVTV

SEQ ID NO: 234388 - protein, 48 aa, Glycine max
  Clone ID: PAT_MRT3847_53680C.1.pep
ESSRQYDPKTIVAKTSIKSEANFGHATIIPDEGIGQSGCVPNTRQLAS

SEQ ID NO: 234389 - protein, 42 aa, Glycine max
  Clone ID: PAT_MRT3847_53681C.1.pep
ATRTAVAADLAYGSGAEWAEWCKYRVPSTVVIYDLISRHAQA

SEQ ID NO: 234390 - protein, 76 aa, Glycine max
  Clone ID: PAT_MRT3847_53682C.1.pep
VNVKRQIQNFSFVGVDSIIFVEYCGSKYCLDHVASVWIFSRGEEIKCINTAHEMPLLMVCWLCYFSQKKKKRGERE

SEQ ID NO: 234391 - protein, 142 aa, Glycine max
  Clone ID: PAT_MRT3847_53683C.1.pep
YYPPCPQPEKVIGLTPHSDGVGLTILLQATEVEGLQITKDGMWVPIKPLPNAFIINIGDMLEIISNGIYRSVEHRAMVNSAKERISIATFHTSKHDGVIGPAISLITEKTPARFKRIELKEFLKNLFARKLDGKSYLDTLRI

SEQ ID NO: 234392 - protein, 65 aa, Glycine max
  Clone ID: PAT_MRT3847_53684C.1.pep
RARIVKVVGEVITFDRLALRAPKGSNSVLVHGSVAAREAEKPFGAAGIKGDHAKPYVVSKVRPRA

SEQ ID NO: 234393 - protein, 48 aa, Glycine max
  Clone ID: PAT_MRT3847_53685C.1.pep
IQPTSPEYACHLYFIRVHYKLVTSCSLSRWNFSKPMTYVEFVSEFVMN

SEQ ID NO: 234394 - protein, 155 aa, Glycine max
  unsure (1)..(155): unsure at all Xaa locations
  Clone ID: PAT_MRT3847_53686C.1.pep
PLFLSIHVDDTITLEVEGQLEHSXQEFHLRQLMRAIKDELGYTDDDEDDLAALDSKMHRAXMPQNIWXHAHTDVVRLKXMHAWRPWHNSLWVYLELLADLTWRKATYIXDLDLRTARNRLDRDTYGSYAGKQPIIEYTAGHTLTTDARGAVSSFA

SEQ ID NO: 234395 - protein, 43 aa, Glycine max
  Clone ID: PAT_MRT3847_53687C.1.pep
HKQYNTQLRAGEHLSYDSIRDQNQVNIKMARVTLNEYLTSKMN

SEQ ID NO: 234396 - protein, 53 aa, Glycine max
  Clone ID: PAT_MRT3847_53688C.1.pep
IHISICMRSQLSVSPPHNFRSICFTLSKKSYVSCNHTLNNSISFRKLWTTVFE

SEQ ID NO: 234397 - protein, 37 aa, Glycine max
  Clone ID: PAT_MRT3847_53689C.1.pep
TINLVDIGAFSLEHRYNYLKLKHKSVILWLSNNSYFT

SEQ ID NO: 234398 - protein, 203 aa, Glycine max
  unsure (1)..(203): unsure at all Xaa locations
  Clone ID: PAT_MRT3847_5368C.1.pep
MGFFFKWVNLFVFFHFLAATPIFSDSSSSSNAFVTTKFLDLAKDPLVFDWMIGIRRKIHENPELGYEEFETSKLIRTELDKLGISYKYPVAVTXGVVGFIGTGLPPFVALRADMDALPLQGTVVLVFQPAEEGGGGAKKILDAGVLENISAIFGLHIVXPILLXEVASRSGPIFAGSGFFEATIXGRGGHAAIPQHSIDPILA

SEQ ID NO: 234399 - protein, 120 aa, Glycine max
  Clone ID: PAT_MRT3847_53690C.1.pep
MASNSCFILGFFIAISFSSMDIGLAARYLMQTTVPNLPKPTLPPLPSLPTLPTIPTLPQGNVPPLPTIPSLPQPSLPNIPTVPQVTLPPLAATSLPNFPTIPTTIPSFPFFSPPPSSTSP

SEQ ID NO: 234400 - protein, 172 aa, Glycine max
  Clone ID: PAT_MRT3847_53691C.1.pep
MPMSLSLSTVPAFNSLTMAESCLLSLPSLFYAKNKTLSLSIPTNPLNLQFPCSNSSLFPLTTKTTRHSSLLTFVAQTSGWAKEGEEEEAAWENQGDTAWGTEEGGDDIEDGGEGGFAEEEAEEVKIFVGNLPFDFDSEKLASLFEQAGTVEVAEVIYNRATDRSRGFGFVTM

SEQ ID NO: 234401 - protein, 53 aa, Glycine max
  unsure (1)..(53): unsure at all Xaa locations
  Clone ID: PAT_MRT3847_53692C.1.pep
LVDXRFINFXVXNKLDLEKGMMEWLYGKWXXCIGECVMGEIERVGKKYWVGFK

SEQ ID NO: 234402 - protein, 60 aa, Glycine max
  Clone ID: PAT_MRT3847_53693C.1.pep
ARDRKSFSLTLSPISNSRVFSKLSNSGTKNDSQSLWPAQRLIYSPLSNRTQNSTQKLRDS

SEQ ID NO: 234403 - protein, 52 aa, Glycine max
  Clone ID: PAT_MRT3847_53694C.1.pep
QMSHRIDHLHVMLERFIRGMLSFVCPGAFSVVNNIPPENRSHLRYFHWVSEN

SEQ ID NO: 234404 - protein, 100 aa, Glycine max
  unsure (1)..(100): unsure at all Xaa locations
  Clone ID: PAT_MRT3847_53695C.1.pep
RLQSVRNFGRSCVRKXXKKETIGKLKTXDARXRQRXXPQNKEGQAQTETNPPKPAHEEAETPKGPTTEQKTPQTKXAXPKNTAGGTXXRRDPQANTQTEG

SEQ ID NO: 234405 - protein, 514 aa, Glycine max
  Clone ID: PAT_MRT3847_53696C.1.pep
AAAAGFDRSVERSMFLELALAAMDELVKIAQTGEPLWMRNVEGGREILNNEEYVRTFTPCIGLRPNGFVSEASRENGMVIINSLALVETLMDSNRWAEMFPCIIARTSTTEVISSGINGTRNGALQLMHAELQVLSPLVPVREVNFLRFCKQHAEGVWAVVDVSIDSIRESSGAPTFVNCRRLPSGCVVQDMPNGYSKVTWVEHAEYDESQVHQLYRPLLSSGMGFGAQRWVATLQRQCECLAILMSSAAPSRDHSAITAGGRRSMMKLAQRMTNNFCAGVCASTVHKWNKLNAGNVDEDVRVMTRKSVDDPGEPPGIVLSAATSVWLPVSPHRLFDFLRDERLRSEWDILSNGGPMQEMAHIAKGQDHGNAVSLLRASAINSNQSSMLILQETCIDAAGSLVVYAPVDIPAMHVVMNGGDSAYVALLPSGFAIVPDGPGSRGPPNGPTSSTTTTTNGGDNGVTRVSGSLLTVAFQILVNSLPTAKLTVESVETVNNLISCTVQKIKAALHCES

SEQ ID NO: 234406 - protein, 118 aa, Glycine max
  unsure (1)..(118): unsure at all Xaa locations
  Clone ID: PAT_MRT3847_53697C.1.pep
DMALYPADLYFLNLRVLGVGGITGWRTLILLNHVNTKNVTILDQSAHHLVKASQNXHHWHARMLNGMLXDLPFSTDYADIYVSAXSIEYWPDPERGITXAYRALRIGGIPRVIESVHP

SEQ ID NO: 234407 - protein, 108 aa, Glycine max
  unsure (1)..(108): unsure at all Xaa locations
  Clone ID: PAT_MRT3847_53698C.1.pep
IYLFPLLAFLKILAEAPFFPHYLCFESGGLSEFFHFLLFSLGVWKRGPEPHILVFFKAKAECAHFPHPNLAFSPQMGFLSLNPPGCVPPYPXPPLGQNFYGFFXLKKL

SEQ ID NO: 234408 - protein, 464 aa, Glycine max
  unsure (1)..(464): unsure at all Xaa locations
  Clone ID: PAT_MRT3847_53699C.1.pep
MHQRSMNAAVDQSRMGSSAGQTMESNARKSQELDVKIESQGLQPSQLTSSSSNKIAQETERTSVHIQGLNKQQQQHLHFPSAYGNSGGNYNPFSGTTSSSTSSIKSQSHDSHMSQISYQSIGSNHHLGGSTHGLNVIGMSKLEQQNSFNDPKRLPGGSVSPAVNNTVSQQTKNAWQPSPNKEQNLGLMSSVSYVKKEPSDLSTEQQNRHSLSKLHGYSPVNSAQLEQGGASQGTVKDEFSRGQAPPSMPPTSTGLLPQSSASPSVMTQLDPSVSKXQIPSNASGIGARTSLKKPAAAQKKPHEALGSSPPPANKKQKTSGGSVEQSIEQLNDVTAVSGVDLREEEEQLFSGPKEDSRVSEASRKAVQEEEERLILQKAPLQKKLIDIMAKCGLKGMSNDVEKCLSLCVEERMRGLISNLIRISKQRVDFEKTRHRTVVTSDVRQQIMTINRKGRKASEKYECCR

SEQ ID NO: 234409 - protein, 57 aa, Glycine max
  Clone ID: PAT_MRT3847_5369C.1.pep
MFCSSCMSWWSGWRGKRLSCGCCCCCCCCNCCCCCSCSALGLGLGLVDAIFFLGSDN

SEQ ID NO: 234410 - protein, 68 aa, Glycine max
  Clone ID: PAT_MRT3847_536C.1.pep
RQTLSSNVQPWTKKTKLWDHSEAWATFTRLSQQAQHQYQCVTDPHAKDHASFPARLADRTLSLSPPRA

SEQ ID NO: 234411 - protein, 111 aa, Glycine max
  Clone ID: PAT_MRT3847_53700C.1.pep
FASYARAHQYLSLPTIFHPFMSSTSIFSPRSLYDVSPFFYFPWLPTPILFSFLFFFRFFIFFRIVSRIFFSFTFVACVRQGFFMRRTPSVILFPPLSILLPMNKSFFFLFF

SEQ ID NO: 234412 - protein, 114 aa, Glycine max
  Clone ID: PAT_MRT3847_53701C.1.pep
IKMLEAKANNAREVAAQAISSLMVLSQNRREVKKDDKSVPNLVQLLDPSPQNTAKKYAVSCLGSLSPSKKCKKLMISYGAIGYLKKLTEMDIPGAKKLLERLERGKLRSLFSRK

SEQ ID NO: 234413 - protein, 79 aa, Glycine max
  Clone ID: PAT_MRT3847_53702C.1.pep
LQTNNLYSFSFHVKLIPPCAFIKVSLAHHTYALTLKVKAPPTTPPPLLNNSVPYHHAPIDLMTMLDVCRNMTGGKLHML

SEQ ID NO: 234414 - protein, 191 aa, Glycine max
  unsure (1)..(191): unsure at all Xaa locations
  Clone ID: PAT_MRT3847_53703C.1.pep
LASPDGDSMXRXXXCFIEXLAYXXXXKXXRGVPKVLHLVXXLSTPXXQLVKKLFFDFYPFIKIAHTITNQTIIEAXQGETAINVLDLSPSNNALQWTNLIKCLKPSTPTCPKITITAIHEKKEVLEKMGLHLGVEAQRLLFPFQFNPVVSSLENLDPETLPIKKGEPLAISSVLQLHSLLASDDDDEMAKM

SEQ ID NO: 234415 - protein, 100 aa, Glycine max
  Clone ID: PAT_MRT3847_53704C.1.pep
FPLGPPPNFSRSRKSCLFSQGFPIRNFPQSHPVLRAFFAPPWSLKFSGVFFPLKCPCLSAFFDSPKNFGLTRFQPTWGGSQKKKKKKKKKKKKKKKKKKK

SEQ ID NO: 234416 - protein, 44 aa, Glycine max
  unsure (1)..(44): unsure at all Xaa locations
  Clone ID: PAT_MRT3847_53705C.1.pep
NQINDKIAYSFVYLEQQLXRNCSNSNQFGSKSILRYYEYLPMIT

SEQ ID NO: 234417 - protein, 48 aa, Glycine max
  unsure (1)..(48): unsure at all Xaa locations
  Clone ID: PAT_MRT3847_53706C.1.pep
RHHLTHAAIILHHGIVRYHSTIXHDLKPLEITAIMNDFNETESLATTG

SEQ ID NO: 234418 - protein, 445 aa, Glycine max
  Clone ID: PAT_MRT3847_53707C.1.pep
RTRGNFSADQVNHKAHVPYGWIVGGLGVALVLIILTVILCVCLRSSNCFADTRTHEKDAEGKISHKFHILRNPSFFCGSGRYICGKHVDQKQTDGESSNHTIMVPKASTLWPDVFDMDKPVVFTYEEIFSTTDGFSDSSLLGHGTYGSVYYSLLRDQEVAIKRMTATKTKEFMFEMKVFCKVHHANLVELIGYAASHEELFLVYEYAHKYPLDCVFNLAMLAKQCVDEDPILRPDMRQVVISLSQILLSSVEWEATLAGNSSNILLDASFRAKISDFGLAKLVGKANEGEISTTRVVGTYGYLAPEYLSDGLATTKNDVYAFGVVLFEIISGKEAIIRSEGTMSKNADRRSLASIMLGALRNSPDSMSMSSLREYIDPNMMDLYPHDCVFKLAMLAKQCVDEDPILRPDMRQVVISLSQILLSSVEWEATLAGNSQVFSGLVQGR

SEQ ID NO: 234419 - protein, 51 aa, Glycine max
  Clone ID: PAT_MRT3847_53708C.1.pep
FRSKIKSGSPNTLSHYGIYTFPMLAVAMFPFFYSSRQKLFSLIIKSHAYSS

SEQ ID NO: 234420 - protein, 125 aa, Glycine max
  unsure (1)..(125): unsure at all Xaa locations
  Clone ID: PAT_MRT3847_53709C.1.pep
STLRIGGLAGVCHVTDQQFDELKELXLDASKYLQQGDQKPQFFGEYSHIICEDDRAIDIEVCPRCKKLRPVYDCPAESCQQKHQASQLCXGGCTICIARCIHXGRCIKDFDYEEHXCLDLLCLNC

SEQ ID NO: 234421 - protein, 159 aa, Glycine max
  Clone ID: PAT_MRT3847_5370C.1.pep
MQWPPPSSWINPRVRTAARRRQKGVGIRRKIHENPELGYEEFETSKLIRAELDKLGISYKHPVAVTGVVGFIGTGLPPFVALRADMDALPMQEMVEWEHKSKVPGKMHACGHDAHVAMLLGAAKILKEHENEIRGTVVLVFQPAEEGGGGAKKILDAGV

SEQ ID NO: 234422 - protein, 64 aa, Glycine max
  unsure (1)..(64): unsure at all Xaa locations
  Clone ID: PAT_MRT3847_53710C.1.pep
LIKALNVVLNADGATASLVXDLDAGIGMFTGQDLVEIADIASPTALSVLAHTVDLIMHTLATRL

SEQ ID NO: 234423 - protein, 39 aa, Glycine max
  Clone ID: PAT_MRT3847_53711C.1.pep
AELTPLNTMGHACGLRAGTRYAFSRDIIEEGDDPSLELP

SEQ ID NO: 234424 - protein, 230 aa, Glycine max
  Clone ID: PAT_MRT3847_53712C.1.pep
MQDFLGSLRRSLVFRPGGDDSPFAGIANKLGSAIRKSRIALEPPPPIRWRKGELIGSGGFGHVYMGMNLDSGELIAIKQVLIAPGSVFKENTQANIRELEEEIKLLKNLKHPNIVRYLGTAREEDSLNILLEFVPGGSISSLLGKFGSFPESVIKMYTKQLLLGLEYLHSNGIIHRDIKGANILVDNKGCIKLADFGASKKVVELATINGAKSMKGTPHWMPPEVFYRQE

SEQ ID NO: 234425 - protein, 65 aa, Glycine max
  Clone ID: PAT_MRT3847_53713C.1.pep
TYGCEKTTQGTPWISKIGHHFLGAPIYAIRASCSIISIYREHRSLTSPIFNSALSNITHKYTGPL

SEQ ID NO: 234426 - protein, 83 aa, Glycine max
  Clone ID: PAT_MRT3847_53714C.1.pep
LPMVGGMIFCGDITVICNTIFTGMVIDIWCEYYPSPAQATRLLPHYIRRHVSTRVIGVDHSISADENDKPHYRGYIQISGLSG

SEQ ID NO: 234427 - protein, 56 aa, Glycine max
  Clone ID: PAT_MRT3847_53715C.1.pep
EGGEDANSNTPNFILHNIYNHRCFLTFSHPPKIPTILISKTTIIFSHFYTQLKFSN

SEQ ID NO: 234428 - protein, 40 aa, Glycine max
  Clone ID: PAT_MRT3847_53716C.1.pep
ISSYITLFPLSRICAGTNENNLLNMENSKQSKCKIRFKIT

SEQ ID NO: 234429 - protein, 43 aa, Glycine max
  Clone ID: PAT_MRT3847_53717C.1.pep
TTRTNFNLEALNKGGENGPMIVYTHTTQVSTNSIFLKGYISYM

SEQ ID NO: 234430 - protein, 50 aa, Glycine max
  unsure (1)..(50): unsure at all Xaa locations
  Clone ID: PAT_MRT3847_53718C.1.pep
IXFERNKNISMFLEHQIKQQKYFNRLNWFSSTQKRTNNPPTKNYPDPRGE

SEQ ID NO: 234431 - protein, 58 aa, Glycine max
  Clone ID: PAT_MRT3847_53719C.1.pep
EPRKISQGVTGWLRISAGVGPRVSAIILLEFNVAAKPRSFRWPKEPIRLRAPCMAQPI

SEQ ID NO: 234432 - protein, 71 aa, Glycine max
  Clone ID: PAT_MRT3847_5371C.1.pep
GSFVRRKPRALTKRLSLFLLGGSECQEALLLTPHRLSVPLGTSIFSGREGFMGVNMSDNFYLFTYSESCLN

SEQ ID NO: 234433 - protein, 105 aa, Glycine max
  unsure (1)..(105): unsure at all Xaa locations
  Clone ID: PAT_MRT3847_53720C.1.pep
EVDPKAEPRMLXTAIKLTALKIQFTKAPLSQSSQQIKANIIVFFXASSIVFLVVMASAKANGNVVRLSCXGAHSITHMFHEPKDFASLYAAHTFFGYLWDDNDHS

SEQ ID NO: 234434 - protein, 139 aa, Glycine max
  Clone ID: PAT_MRT3847_53721C.1.pep
AAHLRSRSSRSGSRLGKASGLNESDAEDDDDHHDHADEDVGVPPVIATKQKDALKEEPIDNSPSKPTATGPARGTPSSKSSKGKRKLNEETKPSNTATPKKEPKLSAKDVNGSASKSSAPPKGTPPLSSKGGSSTTTTA

SEQ ID NO: 234435 - protein, 222 aa, Glycine max
  Clone ID: PAT_MRT3847_53722C.1.pep
LEPRSHKKTDEDDEGHVSDKGEEDEEEESERKSRLGLNKRAGEDDEEGPRGGDHDLDDDDVEKGDDWEHEEIFTDDDEAVGNDPEEREDLAPEVPAPPEIKQDEEEEDEDNEEGEGLSKSGKELKKLLGKASGLNESDAQDDDDDDDDVDDAVGVPPVIATKQKDALKEEPIDNSPSKPTATGPARGTPSSKSSKGKRKLNEETKPSNTATPKKVKAENLSH

SEQ ID NO: 234436 - protein, 128 aa, Glycine max
  unsure (1)..(128): unsure at all Xaa locations
  Clone ID: PAT_MRT3847_53723C.1.pep
LSSVSLRSYQTGPTCFFFPAMPDHHTRQTTTDKLEEAVLRLSQTQAALTEGQTSLSQGHQSLNSKIDTIHNSLTSQIESLFDCLAAISLQHTNSPTPNSSPLIPXAPVARHHHLKLDVPRFDGHDPLG

SEQ ID NO: 234437 - protein, 210 aa, Glycine max
  Clone ID: PAT_MRT3847_53724C.1.pep
MSGSHQEQPLLENSFIEEDEPQETAYDSSEKIVVVGVDESDDEENWGRVPRFSWKKLWLFTGPGFLMSIAFLDPGNLEGDLQAGAIAGYSLLWLLMWATAMGLLIQLLSARLGVATGKHLAELCREEYPPWARIVLWIMAELALIGSDIQEVIGSAIAIRILSHGVVPLWAGVVITALDWFIFLFLENYGVRTLEAFFAILIGVMAISFA

SEQ ID NO: 234438 - protein, 274 aa, Glycine max
  Clone ID: PAT_MRT3847_53725C.1.pep
MALALLLPVLLLLPTSLSVSAQTQPNYHYASQISQINLKIAHLESVLEESNTRLKERDAHLEECERRMNELSEKIHHLHSTLSAMKADSLHAERQYTALEEEVQLLWHTLRRNNFDLHILESKAQDAEERLEELTSRVEKMGDIVNEQWIQVQHLEQALHITKMRTLKAQRLTSVTRCTFMKFINVLLDDLRALHSYVFGERTIVSSLISQTLDQLKRCSSLTKKYHHQLQGFIKDLMERNELTASIANDELVFFLASALITFPLMSAWMLLSS

SEQ ID NO: 234439 - protein, 86 aa, Glycine max
  Clone ID: PAT_MRT3847_53726C.1.pep
WPLGQRSFYCSHLKAQMNCSVVFVALLKEATRLQQKLPVAHIGCHNFPPDEGQKIHLDAQSSRLQHAKYRCVPHFRLSKTCIFRLL

SEQ ID NO: 234440 - protein, 47 aa, Glycine max
  unsure (1)..(47): unsure at all Xaa locations
  Clone ID: PAT_MRT3847_53727C.1.pep
KNFPCLASFPXXFFLHDHXLALLXFYDYSLVILPLQFFXYRIXQPYX

SEQ ID NO: 234441 - protein, 142 aa, Glycine max
  Clone ID: PAT_MRT3847_53728C.1.pep
MEAIPYSIPSTKLHSSLHIYTGVTRIRSLPLRPPPISIKPLYSPNFLILHRHRLRCVAESSNNHHHHDHDHHHGHHHHHHHHHHSHGANLTGPQKAVIAFAKATRWMDLADILREHLHLCCFCTALFVAAAICPHTLPKPLV

SEQ ID NO: 234442 - protein, 160 aa, Glycine max
  Clone ID: PAT_MRT3847_53729C.1.pep
MFCLSNLSTIKPIVANATLPQNNDSDQTKPSIPVPATKSLPRRNRLRNGAPKPSVMQMERIVGAGSFRVTEPPPLRDSDMRKTVMDLFFGQAMEGEVQKKMRETGEWHSTNAEPRITSVRKGILIYMFQWILSIWAILLLKAFGAIKLPFNSPFLDDLLM

SEQ ID NO: 234443 - protein, 409 aa, Glycine max
  unsure (1)..(409): unsure at all Xaa locations
  Clone ID: PAT_MRT3847_5372C.1.pep
PRILWYFDWMIGIRRKIHENPELGYEEFETSKLIRAELDKLGISYKHPVAVTGVVGFIGTGLPPFVALRADMDALPMQEMVEWEHKSKVXPGKMHACGHDAHVAMLLGAAKILKEHENEIRGTVVLVFQPAEEGGGGAKKILDAGVLENISAIFGXHIVPTYPIGEVASRSGPIFAGSGFFEATINGRGGHAAIPQHSIDPILAASNVIVXSLQHMCFSAMRLILDSQVVTVGKFQGGGAFNVIPDSVAIGGTFRAFSKESFMQLXQRIEQVITGQAAVQRCNATVNFLDXTRKPFFPPTVNNGDLHEYFKSVAGSLLGXNNVKDMQPLMGSEXDFAFYQEVFPGYYLPPWNVRMSLLNILKSPPSPYFKINEDALPYGAALHVSLASSYLLKLNQDIPVVEGKHHDEL

SEQ ID NO: 234444 - protein, 65 aa, Glycine max
  Clone ID: PAT_MRT3847_53730C.1.pep
SYYISYIYIYIYIYIYIYIYIYIYSVIFRLSHHFFVFSEQYICQIIISRSTLLGHCVNTNCRFTV

SEQ ID NO: 234445 - protein, 25 aa, Glycine max
  Clone ID: PAT_MRT3847_53731C.1.pep
LRCILYVLASCIRRRPSTWTKKFNN

SEQ ID NO: 234446 - protein, 93 aa, Glycine max
  unsure (1)..(93): unsure at all Xaa locations
  Clone ID: PAT_MRT3847_53732C.1.pep
ATLQFKKLANCDFSKENLKXQMSNVLGGAPGDRASFWSHLLYVACNNLKTQKAYLANLENVXRDLFLHIPEKAPHLKGKALSRIEWLQKADVP

SEQ ID NO: 234447 - protein, 318 aa, Glycine max
  Clone ID: PAT_MRT3847_53733C.1.pep
MILIPMEKPTHIVIVPSPGFSHLLSLIEFSKRLIHHSNGLQVTCMIPTLDSPSEPSKAILQTLPSTIHSIFLPSIHFNKETQTPIAVQVQLAVTHSLPIIREALKTISLSSRLVAMFADMFASDALICAKELNLLSFVYFPSSAMTLSFCFYLPKLDQTFPSEFKDLTEPIEIPGCVPIYGKDLPKPVQDRTGQMYEFFLKRCKQLHETDGVLVNSFKGIEEGPIRALVEEGNGYPNVYPIGPIMQTGLGNLRNGSESLRWLENQVPNSVLYVSFGSGGTLSKDQLNELAFGLELSGEKFLWVVRAPSESANSSYLNS

SEQ ID NO: 234448 - protein, 55 aa, Glycine max
  Clone ID: PAT_MRT3847_53734C.1.pep
RDVKTKAKSSYTMALAFNENEQKRFNPAKGLSISGAMYKPELWYIVNFCILLIIS

SEQ ID NO: 234449 - protein, 88 aa, Glycine max
  Clone ID: PAT_MRT3847_53735C.1.pep
FHQLPVSVSSSDVVDMASSLWRVFIQVVEQIRIVSIKSAFKQILLVIIINTLNDKTVFLKRVIHLPSKDPYLISVSPSQSELALCNEE

SEQ ID NO: 234450 - protein, 233 aa, Glycine max
  unsure (1)..(233): unsure at all Xaa locations
  Clone ID: PAT_MRT3847_53736C.1.pep
MQKLGILGARRWLCRSISSSPLRVCVVGSGPAGFYTAEKMLKAHQQAQVDIIDRLPTPFGLVRSGVAPDHPETKKTCNXIVINQFSRVAQHERCSFLGNVTLGSSISLSELRELYTPWEFWGLEVGSVGAFLQVHCGCVLLEVVCVVLAYGAEMXRSLGIPGENLKGIHSAREFALCYCAHPHGQNLEPQLNVTDPAVIWHNMNVAHXLGNVTLRXPTTESATTDIASHALAT

SEQ ID NO: 234451 - protein, 203 aa, Glycine max
  Clone ID: PAT_MRT3847_53737C.1.pep
MKHHPMLSKWLLFIFLTYYSTYLTVSHSLKIPRLSPIAEWETTLHNRATVVATDTDTENLITFYYKQVLDHFNYRPESYKTFQQRYLINFKYWGGANSSAPIFAYLGAEEPIDGSPELIGFLTDNAASFNALIVYIEHRYYGKSVPFGSREEALKNASTIGYFNSAQAIADYASVLIHIKKTLHAQKSPVIVIGGSYGGMLAS

SEQ ID NO: 234452 - protein, 394 aa, Glycine max
  Clone ID: PAT_MRT3847_53738C.1.pep
ADKWLECLSKICAFHNLPLPTDDERLPVGTGSNPLEFHSLLHEANSPLSKHIPEVLASGIIYLENGSYTNLSWDGKGVPDVIVKNNLIREKCSVDGFSFGVWGKKQLEYRNAGMPVDGSVSLAGNSSIWPYMIIKRCEGNMFADLRDRLTWEDTTNLASFLGEQLRHLHLLSYPRLNISSFSDIEHELGLAEWRLFTRTLTKMRKDVSSRLTKWGDPIPSKLIEKIDEYIPPDFAELLNITENFGNGACKPCSWIHTDIMDDNIYMKPSLVCSTTIKSWCPSNILDFSDLSIGDPLVDLIPIYLDVFRGDSYLLKKFLESYKLPFASNISRYESTEGDQKFGRLSYVAMCYCILHDDNVLGALFSIWEELRSAKSWEEVELTVWGELNNYKGFP

SEQ ID NO: 234453 - protein, 120 aa, Glycine max
  Clone ID: PAT_MRT3847_53739C.1.pep
IYRQGNTAHFPKRIHLSTCKTLPLPTFNAQQLTHLSPTDTIANTTTPITLPTLFTSLTAKLTLTLPALTAPNVSISRSTYPLHITSNNLPTLPLTTLTSRLTNPLSTNTSKPTTLLIIQL

SEQ ID NO: 234454 - protein, 41 aa, Glycine max
  Clone ID: PAT_MRT3847_5373C.1.pep
PAIMGTLGHSRNISHYSGSCKYVAELYTFIYASMRFTLSVS

SEQ ID NO: 234455 - protein, 41 aa, Glycine max
  Clone ID: PAT_MRT3847_53740C.1.pep
WSKKSSGVDINDAEKRRIIDSYCGRQIEMSPLLPFLWCFSD

SEQ ID NO: 234456 - protein, 55 aa, Glycine max
  Clone ID: PAT_MRT3847_53741C.1.pep
AYHTLTPVTGFTIPRHSFTMTSSKVTFCACRDLSGINYCLVDLSIHLHISRNLDR

SEQ ID NO: 234457 - protein, 46 aa, Glycine max
  Clone ID: PAT_MRT3847_53742C.1.pep
SFPTRIKLSFMDNTCGLLIKMFLHINQIKNILNKILKYFNYMTMHN

SEQ ID NO: 234458 - protein, 73 aa, Glycine max
  unsure (1)..(73): unsure at all Xaa locations
  Clone ID: PAT_MRT3847_53743C.1.pep
RPKFFLXRFFKPLFSAQKXTKIPALFKKPYGNYKISQEFQLLKVYIAIPYTTNLTCIEIKHPPILLPLPVTPA

SEQ ID NO: 234459 - protein, 45 aa, Glycine max
  Clone ID: PAT_MRT3847_53744C.1.pep
DTATSFLSHNISIQLISTTQTNNSRNGKVEKEVYVEKHLPTLPTL

SEQ ID NO: 234460 - protein, 65 aa, Glycine max
  Clone ID: PAT_MRT3847_53745C.1.pep
IQFIHREQTYAVQSCSIAYMSLTASSNWWREIKQSSFRQDPIFDLLTIIYGILCTVSHAHSLWIW

SEQ ID NO: 234461 - protein, 269 aa, Glycine max
  Clone ID: PAT_MRT3847_53746C.1.pep
EFVLPSESTTASLLGNAEGEPSTQSSGIISPSSSTVLSSDVGNASHGRPLLPKISEEIVKLADASSEIQKSIQQYSPSYISSSMKPNFERSLQPQVTQEDSMTQEDGTRDQRFNKDSLEKVSNVSKTGVLDDKEKMKEGRKGQEQFTMRNELLENELVKNSSDDDSTKKGKFNSTTHLLNKKLHDHSTSILMNDKTEDVTNVKSPPQSSENYGMFISNQNFERSLQSQVTQEDSMTQEDGTRDRRFNNDSLEKVSSVSKTGVMDDKEKM

SEQ ID NO: 234462 - protein, 107 aa, Glycine max
  unsure (1)..(107): unsure at all Xaa locations
  Clone ID: PAT_MRT3847_53747C.1.pep
ASSALHFSTNLEEKDCDTCSYPGCYTRHSYASSPKGCGLELLFPWRMKHKLCSIESPVLPCSTNLHKHKRNSKQKKHRSSTTYIPCTNMKDXXWVRNARNILSVTPF

SEQ ID NO: 234463 - protein, 94 aa, Glycine max
  Clone ID: PAT_MRT3847_53748C.1.pep
DAAAPAVPFEGDLVSLTEKGPMHGQKGSSTPALAEIKEEIQLPEKRVGSKRKHNGLFMKGRALAFLLLTRSERRLLSAQGIHFYLGLFQGISGH

SEQ ID NO: 234464 - protein, 64 aa, Glycine max
  Clone ID: PAT_MRT3847_53749C.1.pep
STVFRVPIKDFKIFFSRKIFPTYLTIVFHDFFINFLTSVVRTPNYRTLLLIIILKKMIFLACNI

SEQ ID NO: 234465 - protein, 213 aa, Glycine max
  Clone ID: PAT_MRT3847_5374C.1.pep
QYGLDLTSPQKLFEFLKGLVGGVIFIFSIHVVNALLGCASFSWPHIPTSLDAITWLKVYGHMGLVVVQGTVMASAIAVVEELLFRSWLPQEIEVDLGYHQGIIISGLAFSFLQRSLQAIPGLWLLSMSLSGARQRNGGSLFIPIGLRTGMMASTFMLQKGGFLTYHNKCNLPLWIIGNHPFQPFSGLVGLVFSLSLAILLYPRQTLQRKEAQE

SEQ ID NO: 234466 - protein, 40 aa, Glycine max
  Clone ID: PAT_MRT3847_53750C.1.pep
IILDVFIFNFLRFPGWCQLFFSLQFLLQPRFRRQKGIDNR

SEQ ID NO: 234467 - protein, 53 aa, Glycine max
  Clone ID: PAT_MRT3847_53751C.1.pep
FFNNKVDLNSASLICIAMICDGNNPARKLVILGLPNPGHINQSYSFFLVIFIL

SEQ ID NO: 234468 - protein, 43 aa, Glycine max
  Clone ID: PAT_MRT3847_53752C.1.pep
IPSHLLYIMCKKTWYVYVAHCELLTVLHCSYSFRLRYIDTSNV

SEQ ID NO: 234469 - protein, 100 aa, Glycine max
  Clone ID: PAT_MRT3847_53753C.1.pep
FTTDFFDQGSQNLRGAGIFFYIFLVRISVQDNMFFSFSVIEILVTSHTRSILEQIIIYFDCVVIFLWKKQTKNPPTKQKISIRDLQNYPTNNFIKHAPPP

SEQ ID NO: 234470 - protein, 59 aa, Glycine max
  Clone ID: PAT_MRT3847_53754C.1.pep
VGTRGSWKRLLWTWPPGRLIKDPDSNLSYNCTTGKLFHNIRLQLLVIALKLQRLFRSQL

SEQ ID NO: 234471 - protein, 73 aa, Glycine max
  Clone ID: PAT_MRT3847_53755C.1.pep
SKIACCGQGPFNGVGLCTPLSNLCPNRELYAFWDPFHPSEKANRIIVQQMMTGSDQYMHPMNLSTIMALDSRV

SEQ ID NO: 234472 - protein, 51 aa, Glycine max
  Clone ID: PAT_MRT3847_53756C.1.pep
ISISLVTLSFIIVPHHEIITVFISDIVLYVLLSWTHSVSLNALGRDGPQET

SEQ ID NO: 234473 - protein, 151 aa, Glycine max
  Clone ID: PAT_MRT3847_53757C.1.pep
AFPRDSPLAVDMSTAILQLSETGDLQRIHDKWMTRSSCSLENAEIDSDRLQLKSFWGLFLICGIACFIALVLHFMQLMFQLRQSPPSEPASSASSISGRFHRFLTLIDEKEDPSKRKGRKRNGDERSLEDQLGRQPKRVQIQTEITANSNN

SEQ ID NO: 234474 - protein, 68 aa, Glycine max
  Clone ID: PAT_MRT3847_53758C.1.pep
IMHDELTIFKLETSNHSRIKTYDRFAEEYLKISFSVQRYIKIMNHQQPLLSSSRSRRTRGRTRGRTRG

SEQ ID NO: 234475 - protein, 61 aa, Glycine max
  Clone ID: PAT_MRT3847_53759C.1.pep
MSQTMKLTPNLDQHSTNVLNLMVLQPIDPFIQQILLTAAHVSFYYFDIYSNHYSRNDVEGS

SEQ ID NO: 234476 - protein, 119 aa, Glycine max
  unsure (1)..(119): unsure at all Xaa locations
  Clone ID: PAT_MRT3847_5375C.1.pep
MGENAGIASACAVNRASRGRANSDMDTICSQDWELXTPACSKAKTMAWKPNPCADAWSLEXMKRTXFHWDIICDTGWTATPMQDVHVTMEWFICFHECVARTYCVSYPQNPFFLNRWMG

SEQ ID NO: 234477 - protein, 169 aa, Glycine max
  unsure (1)..(169): unsure at all Xaa locations
  Clone ID: PAT_MRT3847_53760C.1.pep
LDNEAPFDLLTALITEERGRVHDDKFLRDAAFNFFVAGRETMTSALTWFFWLVTKHPLVEAKILEEIKDNFEANYEGVXELRRLKKLVYLHGALCEALRLFPPVPIERKQAIKDDTLPSGHRVNGNTMILXSLYAMGRCEEIWGKDCLEFKPERWISERGEVVYAPAYK

SEQ ID NO: 234478 - protein, 31 aa, Glycine max
  Clone ID: PAT_MRT3847_53761C.1.pep
SRRPWVSGYLNFFLLFLCLRPKNFRLLTTRN

SEQ ID NO: 234479 - protein, 114 aa, Glycine max
  unsure (1)..(114): unsure at all Xaa locations
  Clone ID: PAT_MRT3847_53762C.1.pep
NSFQRVQLPPFQINTPVSVXVTVVTVATVTAIYFHITKPAICGGENFRLVNSVMVQSIHRLTLIWFGDCYCLWQILNFVHFFYHLFLSYHSRRVEFAGKNTRFRGREKKRSSHV

SEQ ID NO: 234480 - protein, 34 aa, Glycine max
  Clone ID: PAT_MRT3847_53763C.1.pep
IIQAAGINVLINNLPYVFLFHIHGLDTIIKGGRK

SEQ ID NO: 234481 - protein, 74 aa, Glycine max
  Clone ID: PAT_MRT3847_53764C.1.pep
QGEQTFSLISTYAFLSSTSFLLHRLKNMVVYFLIKKGYNGWAMTFNTIFFFSLNDGRFQELSSDYFNLFLGRKI

SEQ ID NO: 234482 - protein, 285 aa, Glycine max
  unsure (1)..(285): unsure at all Xaa locations
  Clone ID: PAT_MRT3847_53765C.1.pep
EHWWTPNAITYGAVMHGLRREGKLSEACDLTREMVEKGFFPTPVEINLLIQSLCQNQKVVEAKKXLEECLNKGCAINVVNFTTVIHGFCQIGDMEAALSVLDDMYLSGKHPDAVTYTALFDALGKKGRLDEAAELIVKMLSKGLDPTPVTYRSVIHRYSQWGRVDDMLNLLEKMLKRQPFRTVYNQVIEKLCDFGNLEEAEKLLGKVLRTASKVDANTCHVLMESYLKKGVAISAYKVACRMFRRNLTPDLKLCEKVSKKLVLDGKLVEADNLMLRFVERGIQQK

SEQ ID NO: 234483 - protein, 86 aa, Glycine max
  Clone ID: PAT_MRT3847_53766C.1.pep
KVGTSWKALVGLVAICTPFMFLLNTSLLCFFADSFPKLYKFRNDTHFLFRMLRNLTDYLTTGVKYLEVVKRRLHATKQWSPDEIRV

SEQ ID NO: 234484 - protein, 341 aa, Glycine max
  Clone ID: PAT_MRT3847_53767C.1.pep
MEESWENWHLHMETGCENDFLGKCHGTDDDEFFRDILQQPPPAAFSSESESDHSFLAVQNTSSIPNDGAVLSPRNYLVKSSSSNSLVSQNASKRPRRLSSPRTYILSFDNSTMVPATPETRPRSSNNSPLPAKRALESPGPVARRPNQGAKKIRTSSQTIDHIMAERRRRQELTERFIALSATIPGLNKTDKASVLRAAIDYVKQLQERVQELEKQDKKRSTESVIFIKKPDPNGNDEDTTSTETNCSILPEMEARVMGKEVLIEIHCEKENGVELKILDHLENLHLSVTGSSVLPFGNSALCITITTQMGDGYQMTVNDLVKNLRQLFSKSHVLSDSDPY

SEQ ID NO: 234485 - protein, 65 aa, Glycine max
  Clone ID: PAT_MRT3847_53768C.1.pep
RSQFKYLNWCLKQPTHTSIGSLDNNVQLPSNSSIAYILANAFVAVHHRLRGSNIGRKLTQLGSLI

SEQ ID NO: 234486 - protein, 94 aa, Glycine max
  unsure (1)..(94): unsure at all Xaa locations
  Clone ID: PAT_MRT3847_53769C.1.pep
SIHDWLSLAQTTSPEVRAASHPSRSTEGGEIQSIYIIQDEPVPSLHSHCCEGSQTLVSTSSXGPMRFGVDKRDGWVWPEMPNRVPAGAPASPIL

SEQ ID NO: 234487 - protein, 62 aa, Glycine max
  unsure (1)..(62): unsure at all Xaa locations
  Clone ID: PAT_MRT3847_5376C.1.pep
PMPLDDGKIEPRDDPKIRSKIXSEEFGXHNDLDKKIYCSGPETLEPNMVGDIFQGIQYLNQI

SEQ ID NO: 234488 - protein, 196 aa, Glycine max
  unsure (1)..(196): unsure at all Xaa locations
  Clone ID: PAT_MRT3847_53770C.1.pep
MSESEKQRVTGKVKWFDDQKGFGFITTDDSGEEFFVHQSSIRSDGFRSLALGESVEFLIDSDPEGRTKAVDVTGPDESPVQGTRGGGGGGRGSYGGGGGRGGYGGGGRGGRGGYGGGGGGYGGGGYGGGGGYGGGGGGGGGGGCYKCGETGHIARDCSXQGGGGGGRYGGGGGGGGSCYNCGESGHFARDCPSSAR

SEQ ID NO: 234489 - protein, 227 aa, Glycine max
  Clone ID: PAT_MRT3847_53771C.1.pep
MSCNGCRVLRKGCSESCMLRPCLQWIETAQAQGHATVFVAKFFGRAGLMSFISNVPENQRPALFQSLLFEACGRTVNPVNGAVGLLWTGNWHVCQAAVETVLRGGTLRPMPELMGLDAPAAAATDEASEAEVACTDTWRIRNPNPNCRFTSSRSSGCGGGGKRKRSEELAKLQAQPNLDLRLTPVFSQKEESRRPESPSMTSEESGTTTENRFGDQWGHRKVLNLFI

SEQ ID NO: 234490 - protein, 68 aa, Glycine max
  unsure (1)..(68): unsure at all Xaa locations
  Clone ID: PAT_MRT3847_53772C.1.pep
MATSAIQQSAFTGETALKQINVFVRKTGGADXGRTIMRRTVMSAPQSIWYGPDGPKYMGPFCGADSII

SEQ ID NO: 234491 - protein, 266 aa, Glycine max
  Clone ID: PAT_MRT3847_53773C.1.pep
PRVPSQKINMAWSTSSSSTPHQKHEVFLSFRGEDTRYTFTGHLHASLTRLQVNTYIDYNLQRGEEISSSLLRAIEEAKLSVVVFSKNYGNSKWCLDELLKILECKNMRGQIVLPIFYDIDPSHVRNQTGTYAEAFAKHEKHLQGQMDKVQKWRVALREAANLSGWDCSVNRMESELIEKIAKDVLEKLNRVYVGDLDQQIAKLEQLAQLQHQFLQNIPSLENVRNHRATVQRITELKMERSVRMLRLPPDMLSHLENSNNNNYFPL

SEQ ID NO: 234492 - protein, 85 aa, Glycine max
  Clone ID: PAT_MRT3847_53774C.1.pep
SQVSTSPIHHTSLTHHKMYSPLIYLLIFHFTVYKIFKQDNGNFILFYIDPLHFAYSIPFTQHLDIQSKPYSLHIKLLMLHAIPRK

SEQ ID NO: 234493 - protein, 60 aa, Glycine max
  Clone ID: PAT_MRT3847_53775C.1.pep
MHSSLSSSALLHDPICDAANIKVGRFVFRSAIHLLFRSFNFISVRTYAFKKAGQTNKRKC

SEQ ID NO: 234494 - protein, 59 aa, Glycine max
  unsure (1)..(59): unsure at all Xaa locations
  Clone ID: PAT_MRT3847_53776C.1.pep
PPITIITPTTQLTLTKSNKTLTSIPPFFFFFFFTPSXPKQTFCNPFHNPTLSTFNFNYK

SEQ ID NO: 234495 - protein, 176 aa, Glycine max
  unsure (1)..(176): unsure at all Xaa locations
  Clone ID: PAT_MRT3847_53777C.1.pep
MPVRVLENTAAPSSQVSGANSGRSSCQSCSLLGVGQAFSGTQNVSSVQKDEAWRVNVRLQGCDLEHGYLCGTMEALNVPMADTPVVTXWEGEIVDTKNYTFFTXKWEASPEDDIRHWSKFPSFSPLLGQVEADGGKSLDLSNYPYIFMRWKEQYFVNVGTDCGLTIAGFYYICFSC

SEQ ID NO: 234496 - protein, 61 aa, Glycine max
  Clone ID: PAT_MRT3847_53778C.1.pep
SAIWIICRINLFYKKKKKKKKKKKKKKKKKKKKKKKKKKKKKITKKKKNKSKKKKKWGGPF

SEQ ID NO: 234497 - protein, 52 aa, Glycine max
  Clone ID: PAT_MRT3847_53779C.1.pep
SFCTDLFLFLSIIISKHPVLSLCYGNLTHMKVCTRVNSPKCSKKMRGSMKLV

SEQ ID NO: 234498 - protein, 57 aa, Glycine max
  Clone ID: PAT_MRT3847_5377C.1.pep
AYEVRKNYVNDHSEQPHYLHGYDCSVSQPAQPRISPDSELAENRHKGSHLRIRAIDR

SEQ ID NO: 234499 - protein, 99 aa, Glycine max
  Clone ID: PAT_MRT3847_53780C.1.pep
MTELQRSVTSFRRQGSSGLVWDDKFIAGIENQNKQESGDDGSSPSLQRSRSAGAPPYRTVNVAPQAMDPPSPKLATCGFCALFRKPVSAKPNKSKRRTR

SEQ ID NO: 234500 - protein, 274 aa, Glycine max
  unsure (1)..(274): unsure at all Xaa locations
  Clone ID: PAT_MRT3847_53781C.1.pep
MASGGKETSFVKARRMKGFISLLTSAACEWLLIFLLLLNALLSYMLTKFASYCQLQMPCLLCSRLDQILCRERPEFYVNLFCSSHKSEISSLILCHIHGKLADGHRMCDDCLLSVTAKTKCNAETHKLLVGKFGLVLGGSGFKSPSLSRDLFAGSKGARLCTRQCTCCGKLWKSDHNSPRSIQLKSPGRAFLKPNIPFPCAPRQNRLNHRDNLKKMRDKFPGSEWXSSFQPLFHIGDTELKLNSDSESEFLFSDDDDGSRVGHENVEFSNDLKA

SEQ ID NO: 234501 - protein, 123 aa, Glycine max
  unsure (1)..(123): unsure at all Xaa locations
  Clone ID: PAT_MRT3847_53782C.1.pep
MDILPCMLTAAVKYERALKNIHVCGLCYDCRNKGWTKHEKNYXLTEEEKMEVIRNKGITADVLAKRAHEFEKHVAHERLKDQRPDVDKSHTTKDNKLAKIMNLRQSDVGELKLLTDGKYTEGK

SEQ ID NO: 234502 - protein, 128 aa, Glycine max
  Clone ID: PAT_MRT3847_53783C.1.pep
PYFHLSLLLHSRHHTLSNLLAFGQAPWLLTIPAIAIIGREITMSAVREWAASQDSKLLEAVAVNNLGKWKTATQMTALTILLATRDWSHGGGAAIVVGSGVALLYTSAGLALWSLVVYMKKIWRVLLR

SEQ ID NO: 234503 - protein, 50 aa, Glycine max
  Clone ID: PAT_MRT3847_53784C.1.pep
IRHQRPPVWRCWTIFRNTLHALSTEALSLQDGGLFTLRRLLMPMICEYLD

SEQ ID NO: 234504 - protein, 37 aa, Glycine max
  Clone ID: PAT_MRT3847_53785C.1.pep
ASEHDSTVTSLQQQKKGILVRLLYNHRRDTDEVINTA

SEQ ID NO: 234505 - protein, 48 aa, Glycine max
  Clone ID: PAT_MRT3847_53786C.1.pep
RLLHPNFCSNPQQESSLRLVRSVYCQCLAISYVNSCRDKKANEGSTSE

SEQ ID NO: 234506 - protein, 61 aa, Glycine max
  Clone ID: PAT_MRT3847_53787C.1.pep
VRLEPREIHRSSLFKHLRAASPNFTFHIQVCRRTVPLLIDVFPPHALWFNVPPYGQGKQSA

SEQ ID NO: 234507 - protein, 33 aa, Glycine max
  Clone ID: PAT_MRT3847_53788C.1.pep
VVSQHNPWTNIFRCTGSPSAAFRIISSSIAVFA

SEQ ID NO: 234508 - protein, 185 aa, Glycine max
  Clone ID: PAT_MRT3847_53789C.1.pep
VSQALIFVTRARSWSYVERPGLLLVAAFVIAQLIATLIAVYANWSFAAIEGIGWGWAGVVWLYNLIFYIPLDFIKFIIRYALSGRAWDLVIEQRIAFTRKKDFGKEERELKWAHAQRTLHGLHPPETKMFNERTSYTELNQMAEEARRRAEIARLRELHTLKGRVESVVRLKGLNIDTIQQAYTV

SEQ ID NO: 234509 - protein, 147 aa, Glycine max
  unsure (1)..(147): unsure at all Xaa locations
  Clone ID: PAT_MRT3847_5378C.1.pep
PCVRRSDLLADFLTEGIFRASVDLLRTDRIKGMIKMVATVGITESTGIAVACVMNRYFRGRACSVIHTICSQDCEYWNTACTKAMTMSFNANPCSDAWRLEFLMRTGFHXDVIRVTGWTVTPMQDVQVTIDWVILSXECVPMTYRVL

SEQ ID NO: 234510 - protein, 92 aa, Glycine max
  unsure (1)..(92): unsure at all Xaa locations
  Clone ID: PAT_MRT3847_53790C.1.pep
YIDIHTLPASYLRDEXHHTRCNSCNYXHGDPSYYRPLLIVPALPSCRVYVDDVKTDTWASSLHKAVYPDNIIHNTELSYPRTSHCLASADIR

SEQ ID NO: 234511 - protein, 77 aa, Glycine max
  Clone ID: PAT_MRT3847_53791C.1.pep
RKLHLFSFSHFTILFEPTNPLTNSPSGCQQSTTAPTCKKNPRGEKKRRNPPPDNQNIALTHGKTRITPPGDGDATNP

SEQ ID NO: 234512 - protein, 63 aa, Glycine max
  Clone ID: PAT_MRT3847_53792C.1.pep
TPIFFWGFVNSSPRAWLSKPKKIDGFFVGGGSLKGPGFGPLFHSGPSQKGGGLIPFLFFLGGL

SEQ ID NO: 234513 - protein, 250 aa, Glycine max
  Clone ID: PAT_MRT3847_53793C.1.pep
MSQSLKLIKEHASNPKLWLVIGIGVAGIVVLVETRRRTRRGKTHKQDFGAFVERFELLPFPQPPPPAAKQSLSALTFAINDTFDVKDYVTGFGNSTWKSTHKAAEKTAVVVTALLMSGATCVGKTVVDEFSFGISGENKYYGTPTHPQMPSCKLGGSSCGSAVAVAAGLVDFAVGTDTTGCVRIPASFCGICGFRPSHGAVSTIGVLPNAQSLDTIGWFARDPSILHRVGHVLLQLNSVETKRSRHFIFA

SEQ ID NO: 234514 - protein, 76 aa, Glycine max
  unsure (1)..(76): unsure at all Xaa locations
  Clone ID: PAT_MRT3847_53794C.1.pep
FKHSMKFHKFHIYAYRIYVPPTTLNVLSSPCPLSMWYINMIAIIXPKILNLHCYILLAIYYSTNWFETIFLANVTK

SEQ ID NO: 234515 - protein, 49 aa, Glycine max
  Clone ID: PAT_MRT3847_53795C.1.pep
KSRVGLDGDHVKSHGWTRLLQIIHGLLASLLILPLATILECTDQACSNT

SEQ ID NO: 234516 - protein, 197 aa, Glycine max
  Clone ID: PAT_MRT3847_53796C.1.pep
MTEILSYTASRQLSQMFLAIAFFHGSEYFLAVVIHGRSNVTLKSLLISKHYIVAMIFSLLEYIIEIVLVPELKEHWVISDLGLALVLIGEIIRKIGILTAGKAFTHLIKIYHEEQHQLITHGIYSYIRHPGYCGFLIWSVGTQIMLCNPISTIAFAAVVWRFFAKRIPYEEYFLRQFFGTRYEEYARRVGSGVPFVK

SEQ ID NO: 234517 - protein, 71 aa, Glycine max
  Clone ID: PAT_MRT3847_53797C.1.pep
GVVDKKKLLFLFFWIRYISACLICLLKHHFPTLKKGFYLRRPIKWAMQSFLQCMKYKGGGNHNFFKLKIRS

SEQ ID NO: 234518 - protein, 40 aa, Glycine max
  Clone ID: PAT_MRT3847_53798C.1.pep
WRSLWSNQSQETFLRLLAVVWPLAHMFVLCVIADLCRSAY

SEQ ID NO: 234519 - protein, 59 aa, Glycine max
  unsure (1)..(59): unsure at all Xaa locations
  Clone ID: PAT_MRT3847_53799C.1.pep
ILIXXTYXVYFLPTCRSXPRAIFTIKHTSQKYPLPIFIHNDNTKLSPFIQHLNKIKLFT

SEQ ID NO: 234520 - protein, 59 aa, Glycine max
  unsure (1)..(59): unsure at all Xaa locations
  Clone ID: PAT_MRT3847_5379C.1.pep
QRGSITRNEPFAGPLLPGLPGFKNGILCSNATHSMLTRILDNCKXIKALIREGPSSFDN

SEQ ID NO: 234521 - protein, 103 aa, Glycine max
  Clone ID: PAT_MRT3847_537C.1.pep
MASKQGVMKSRRFGLSGSKGANSPSSSTTSSSKQFQETSADGLSSPASSSARSKPQHFTPETAGALPLDGKRVKENVTVTGRFRPLNPREIRQGEGVAWYADG

SEQ ID NO: 234522 - protein, 71 aa, Glycine max
  unsure (1)..(71): unsure at all Xaa locations
  Clone ID: PAT_MRT3847_53800C.1.pep
MVYVKAHKSKAYVKRYQVEFKRRXRWXTDYRARMRLINQDKFKYNTPKYRFVVRFSNKDIVALILSASIAG

SEQ ID NO: 234523 - protein, 171 aa, Glycine max
  unsure (1)..(171): unsure at all Xaa locations
  Clone ID: PAT_MRT3847_53801C.1.pep
MVLRQALAGLLTLSMFIMLGNMIKKDHFDSMYDVNIEAAPASQNASEVVTEQSLATVSHVSKKSLMENGKGLKPCMNPLALEEAPQSXGCITFSLTNGPEYHISQIADAVVVARILGATLVLPDIRSSKSGYSMSLGDIYDVPPFLLRRHGLLRVSSPPPVPMALSIISHR

SEQ ID NO: 234524 - protein, 69 aa, Glycine max
  unsure (1)..(69): unsure at all Xaa locations
  Clone ID: PAT_MRT3847_53802C.1.pep
LVAASQLXFGHIDVDIYGNSIKCKVFQYKIKYYVISFVSPFLVTQWLICSSFSFHLNYKSLKVFCMASK

SEQ ID NO: 234525 - protein, 58 aa, Glycine max
  Clone ID: PAT_MRT3847_53803C.1.pep
QVRKFLVELGAYLTPNNLQFKEFIFFTKPFIGEAEVLLKEAIQEQMELFFLQEQVEKN

SEQ ID NO: 234526 - protein, 414 aa, Glycine max
  unsure (1)..(414): unsure at all Xaa locations
  Clone ID: PAT_MRT3847_53804C.1.pep
LLLSLSVAIFTSACQYGGRFLAKCTPCDPSLSDVCPTNGRSGNFKQFNCPKGYYNDLATLLLTTNDDAVRNIFWPDTPLEYQPSSLVIFFLLYCILGLITFGIAVPSGLFLPIILMGSGYGRLLGIYMGPHTNIDQGLFAVLGAASLMAGSMRMTVSLCVXIFLELTNNLLLLPITMIVLLIAKTVGDSFNPSIYEIILHLKGLPFIDANPEPWMRNLTVGELVDVKPPVVPLDRVARVAKIVDALKNSTRXFFPVLNNGGVRPVVGQANGGTXLKWTDSXVHLIHAIKKKWFLKERRSXKEWEVREKFTWVELAEREGSIEEVAVTSEEMEMFVDLHPLTNTTPFTVLESMSVAKAMTLFRQVGLRHLLVVPKYQASGISPVIGILTRQDLLAHNILTVFPHLAKSKGREKTN

SEQ ID NO: 234527 - protein, 109 aa, Glycine max
  Clone ID: PAT_MRT3847_53805C.1.pep
SSCSTGFSCFKGSVIATQLILVWLFVRGPRVLSLLFRFLFCVEWLQDCIFLLGIDLAFIFSSFYFDSLLGKLFPLQVPVFNFISLCAVSLLVAALVIICYINAFGVIKC

SEQ ID NO: 234528 - protein, 37 aa, Glycine max
  Clone ID: PAT_MRT3847_53806C.1.pep
KLVKKTLPLLLSVLFIIRNSHFSTTLNLNFYCVKKII

SEQ ID NO: 234529 - protein, 35 aa, Glycine max
  Clone ID: PAT_MRT3847_53807C.1.pep
YPTVVGCVSESYSCPPSISAQCYRSRSRQRRPDAW

SEQ ID NO: 234530 - protein, 50 aa, Glycine max
  unsure (1)..(50): unsure at all Xaa locations
  Clone ID: PAT_MRT3847_53808C.1.pep
LEMRTQWVPFYMLXFLPYLIRYPPSLSCILALTSYSIPGTSNASLDLEPW

SEQ ID NO: 234531 - protein, 117 aa, Glycine max
  unsure (1)..(117): unsure at all Xaa locations
  Clone ID: PAT_MRT3847_53809C.1.pep
SSRAAAFFFFFFFFXXIFEXRXXYYIGGFFINLGPLLTFIIFKKKKSHNHHLLNLLQFKTIRMXXLWAXVDNVRKNLLPFSRLRLFQFLFNYYQTQIPFIYTNQSPQRRPNPQPPKP

SEQ ID NO: 234532 - protein, 50 aa, Glycine max
  Clone ID: PAT_MRT3847_5380C.1.pep
KQGNAGEYQKLNNNLKLWALDIRNIRGRDYFVCKFWLKITWTLGLPKTLS

SEQ ID NO: 234533 - protein, 91 aa, Glycine max
  Clone ID: PAT_MRT3847_53810C.1.pep
MEANNIIDFNEWIADLEIEEILSVGRKFTWFKPNGAATSKLDRFFVSHEWINKWPGCTQFILERNFSDHCPILLRAKNIDWGPFCRLLAAV

SEQ ID NO: 234534 - protein, 410 aa, Glycine max
  unsure (1)..(410): unsure at all Xaa locations
  Clone ID: PAT_MRT3847_53811C.1.pep
MKDGAQVVLNDNGNYGKFSHLLASQDRDYLLSPTGAQVKVSDLEGRVVGLLFAANWYPPCRGFTQILVGIYEELKSRVPQLEIVYVSSDENLDAFNSFYGNMPWLAIPFSDLETKKSLTRKYDVEAVPCLILLQPDDRKEHVTVRDGVELIYRYGIQAYPFSNERLEQLQKEDKGVFQHWCLINCIDMIRVWLLLVMLERPSSAARGLASGLDNWTLLLSVAMKCTQNASELCNAILRDYKARASRKXEEDFEVVLISSDRYQASFDSYYSTMPWLALPFGDPEIKNLVRHYNVQGIPWLVIIGPDGKTITVHGRSLINLYQENAYPFTNAKVEELEKQLEEEAKGLPALVYHEGHRHDLNLVSDGNGGGPFICCVCDEQGSSWAYQCLQCGYEVHPKCVRTVERHDNNV

SEQ ID NO: 234535 - protein, 314 aa, Glycine max
  unsure (1)..(314): unsure at all Xaa locations
  Clone ID: PAT_MRT3847_53812C.1.pep
FSFSMAPXKALESIGKTLSSQYERWQPKARYKCQLDPTVDEVKKLCTTCRKYAKSERVLFYYNGHGVPKPTANGEIWVFNKSYTQYIPLPINELDSWLKTPSIYVFDCSAAGMIVNSFIELHEWSASNSSVSQRDCILLAACEAHETLPQSAEFPADVFTSCLTTPIKMALRWFCTRSLLRESLDYSLIDKIPGRPNDRKTLLGELNWIFTAVTDTIAWNVLPHDLFQRLFRQDLLVASLFRNFLLAERIMRSANCSPVSHPMLPPTHQHHMWDAWDMAAELCLSQLPSLVEDPNSEYQRSTCVTEQVTAFEVW

SEQ ID NO: 234536 - protein, 108 aa, Glycine max
  Clone ID: PAT_MRT3847_53813C.1.pep
TIRTGRSLINLYQENAYPFTKAKVEELEKQLEEEAKGLPALVYHQGHRHDLNLVSDGNGGGPFICCVCDEQGSSWAYQCLQCGYEVHPKCVRTVERDDNVLVDTTGCF

SEQ ID NO: 234537 - protein, 56 aa, Glycine max
  Clone ID: PAT_MRT3847_53814C.1.pep
HLTSRKESLLSGCDNWPFHLIYHLTNLKISKSNWKWRAEYTRLCMQEILETKWYEN

SEQ ID NO: 234538 - protein, 46 aa, Glycine max
  Clone ID: PAT_MRT3847_53815C.1.pep
ISNKVKSEDFYTCTSLTTIKKSQLIWCVYIYKYKVDISKFGLTLNV

SEQ ID NO: 234539 - protein, 55 aa, Glycine max
  Clone ID: PAT_MRT3847_53816C.1.pep
VAGLSLLGCVLLWSFYSVWTPCPLLYWCFQFGAPHGFPYDLICVLLSQVSFLMLY

SEQ ID NO: 234540 - protein, 105 aa, Glycine max
  Clone ID: PAT_MRT3847_53817C.1.pep
FNPSFLIIPRPLDPTWALERFRGNFLRRDTIPQVIVTDKDSALMNVVKTIFLESTNLLCRFHINKNVKTKCKTLVGKKKMYEIMSWKHRRVWRIVLLSKSLMTAL

SEQ ID NO: 234541 - protein, 85 aa, Glycine max
  Clone ID: PAT_MRT3847_53818C.1.pep
KGPSQHKKLPGILAGFPPPPGPLKIPGFFGAPNLQFSLEAPPPLFGGLKPHPPWGGRFPPPGSPDLFTPKGGGFSSPPLGGFFFF

SEQ ID NO: 234542 - protein, 225 aa, Glycine max
  Clone ID: PAT_MRT3847_53819C.1.pep
MTKSFQSYAELKKQAEKDDLEDSHDIEAGKLDKPTEDHNHLSQFFQEVEAIKARIIKSRLEVIDQSNITNRTLSESYIEVTQIRMSVTNGLRAKLRVMLMHGFQSLRDKFLMEKMISRSLKVEFMVAAAGKTDIDNADLGVRHEEVIMDIQRSLNMLDQIFVDIAILVETQGENLDSIEDRVASVVNNANQMKRKNTNTEWLCWVLVVMLLTVFLYWGRNLEGVV

SEQ ID NO: 234543 - protein, 64 aa, Glycine max
  Clone ID: PAT_MRT3847_5381C.1.pep
FFNYFNQAHSTYNLGEFYLFCPPHIFPLTFTRKFISSLPHFYLPYLNSFLNKQITSTCIFSLFN

SEQ ID NO: 234544 - protein, 48 aa, Glycine max
  Clone ID: PAT_MRT3847_53820C.1.pep
NGAYFTPSGAGASASYARASSLGAKSSSMVGSMTSNAGALGCKRGSQC

SEQ ID NO: 234545 - protein, 59 aa, Glycine max
  unsure (1)..(59): unsure at all Xaa locations
  Clone ID: PAT_MRT3847_53821C.1.pep
QVLKXFPNVGEALFGLKSGRGGRVTCMASYKVKLITXEGEWSFXCPDDXFXXXKXXGXX

SEQ ID NO: 234546 - protein, 87 aa, Glycine max
  unsure (1)..(87): unsure at all Xaa locations
  Clone ID: PAT_MRT3847_53822C.1.pep
VKFTFINKKGAGGVDPGIQGPRXTXTTILGMVHQHGWDELDTTSYQTSGIISMLGSREEPIGWMGYLIFEKNLYVEVPSVMAMTDAE

SEQ ID NO: 234547 - protein, 450 aa, Glycine max
  Clone ID: PAT_MRT3847_53823C.1.pep
MAVSSSATKWVLFLLLALLIREEAMAMATTPQISDLRNLEVERHRLPSLTNSSMVERAKEADKLNEQAAVANPEEVVSMVEMSIQNSTERRKLGYFSCGTGNPIDDCWRCDPNWQRNRKRLADCGIGFGRNAIGGRDGKFYVVTDPRDDDPVNPKPGTLRHAVIQDRPLWIVFKRDMVIQLKQELIMNSFKTIDGRGVNVHIANGACITIQFVTNVIIHGLHIHDCKPTGNAMVRSSPTHFGWRTMADGDAISIFGSSHIWVDHNSLSHCADGLVDAVMGSTAITISNNHFTHHNEVILLGHSDSYTRDKLMQVTIAYNHFGEGLIQRMPRCRHGYFHVVNNDYTHWEMYAIGGSANPTINSQGNRYNAPTNPFAKEVTKRVETAETQWKGWNWRSEGDLLLNGAYFTPSGAGASASYARASSLGAKSSSMVDSMTSNAGALGCKRGRQC

SEQ ID NO: 234548 - protein, 122 aa, Glycine max
  Clone ID: PAT_MRT3847_53824C.1.pep
FYALGMKGFQGENWAAGAFQFFVVGSLFWPPRFCTFCFPLVCCGDFWGETIFPQGWGGGVFSPGFFWALFWLTRGPAGPVDFLGSPRVRARLGKSSLTPLFLSPFFVPGFRFQEYNIFPPMS

SEQ ID NO: 234549 - protein, 106 aa, Glycine max
  Clone ID: PAT_MRT3847_53825C.1.pep
KSLWGEGPCCFKIPKESHLSPWWGVFGGGKKIFLKPLLGKTFSPKVESPPPIFIVKAKIQDKKGIPPDHQRFFFFAPQLKDGRPPPVSNIQKESPLPLVLGFCGGF

SEQ ID NO: 234550 - protein, 116 aa, Glycine max
  Clone ID: PAT_MRT3847_53826C.1.pep
RAQIGPCLWYQWRPTSPTLASPIGKLRCRSSTAPTPARAEGFSPRKRPCAEPYSAISCSPCRDRQDCRRGDRSAVTVVELLKDRGFGEWIRGRRRFANGLEGSGKETSFLSLLSSD

SEQ ID NO: 234551 - protein, 288 aa, Glycine max
  Clone ID: PAT_MRT3847_53827C.1.pep
TGYGAVGFGTRTFPGREAFCSCRSWSGGGATSKLPYWTRKCWRGWPPLIPQAWTDLGPSFIEHVAANPLEAQHQEREIEKCTAASEEVHPSTAAEEVHPSTAAEVQKVRRECDSVELQYLSKDSLLNSLEVNETPIEEQSRDADVPCPHVINNNDPDLMEKDLTSVPRNDYHRPSLMERNSTTPISEWNDSIDGLEGGTSDHAIRCHLPSPKGTKVSPLTKYKPTKITRSRKTKRWSQLEEETRKTAVDKFGRGKWKLMLDSNKDIFKERTEVDLNDKWRSMTRYGCK

SEQ ID NO: 234552 - protein, 51 aa, Glycine max
  Clone ID: PAT_MRT3847_53828C.1.pep
YIACHDSNSFSYQLILFTRLHHFVYKGPLYINFNEYFEGLNEYVDFLMSSE

SEQ ID NO: 234553 - protein, 107 aa, Glycine max
  unsure (1)..(107): unsure at all Xaa locations
  Clone ID: PAT_MRT3847_53829C.1.pep
MHNPPPPGGPGPHHHPGPPAPPPHAHPSPPPPGPPHHHHGPPGPPHAYPTPPPPGPPHHHPGPPEPGFHQHHGPPGPPYAHPTPPPPGPPGPPPPGPPXPPTPPLLM

SEQ ID NO: 234554 - protein, 83 aa, Glycine max
  unsure (1)..(83): unsure at all Xaa locations
  Clone ID: PAT_MRT3847_5382C.1.pep
VVSCXDILXXSAXXGIXSLGGPHIPLKTGRRDGRRSRADVVXQFLPDXNESISAVLDKFGAMGIDTPGVVALLGXHSVGRTHV

SEQ ID NO: 234555 - protein, 43 aa, Glycine max
  Clone ID: PAT_MRT3847_53830C.1.pep
ECILGASEYIGRQFSTYGERKPVEDFLMAGDYLTSWDISSISR

SEQ ID NO: 234556 - protein, 82 aa, Glycine max
  unsure (1)..(82): unsure at all Xaa locations
  Clone ID: PAT_MRT3847_53831C.1.pep
RXDRGERGGESATGTEQFSINKNNTILREDRVMDMALHSPLNPPSVPRSSSTTGTRCAHIPAWSYFDFDELVLDAFCTERIL

SEQ ID NO: 234557 - protein, 38 aa, Glycine max
  Clone ID: PAT_MRT3847_53832C.1.pep
CQIIEGKETFYTIVFLICFIPPIKLEFSSRILIICIIC

SEQ ID NO: 234558 - protein, 211 aa, Glycine max
  unsure (1)..(211): unsure at all Xaa locations
  Clone ID: PAT_MRT3847_53833C.1.pep
SRGLPGKSPLMKKAYGQHSKSMRLLLTHLEQELQRSRQQGIFIXSTGDKAQTMMSIXAPMSIVKLGVPLRWLXEHNXQTNELWAAINSKAVHIXTIQPLRDNFMTQCDDILRLERXVARMKRDCFSDIPGTECCGRLSARGGSSHAGFGGFXRTSAFLKLILSIVEPISDHSWWAYYQLGLXYPDTEHAISQGMDALYHCLSDTLDNGSAS

SEQ ID NO: 234559 - protein, 86 aa, Glycine max
  Clone ID: PAT_MRT3847_53834C.1.pep
GTGRTSCDIYTICCQDWESGNPARTKAMTLSMHPNPGAAAWCTASVYPTGFDRNIIRVTGWTVSPMQAVYVTMDWFIASEECDTRT

SEQ ID NO: 234560 - protein, 74 aa, Glycine max
  Clone ID: PAT_MRT3847_53835C.1.pep
CFLNPPISNFFFSTEGFIIFTRPCGNCCIHQRLFLSLKYSIFDPFSPFFSFFLICTVRNQFFSLVIFAPFHLVP

SEQ ID NO: 234561 - protein, 48 aa, Glycine max
  Clone ID: PAT_MRT3847_53836C.1.pep
MDTCLMMQSLPKIAWGKRSRVILDVGCGVASFGGYLFEKDVLTMSFAP

SEQ ID NO: 234562 - protein, 71 aa, Glycine max
  unsure (1)..(71): unsure at all Xaa locations
  Clone ID: PAT_MRT3847_53837C.1.pep
MMGKVMAHISLVVIXGHVIFGKFTITXHLFYKLGGIDKLLIVRFVKVSADMYIIGFMYVWVLFYLKADRLR

SEQ ID NO: 234563 - protein, 63 aa, Glycine max
  Clone ID: PAT_MRT3847_53838C.1.pep
STVGYHLGIPYIKLRFLFFNLHKSTTARISHYKDNMKNQNQTRTTGRNENLHSWTKLTIHTLR

SEQ ID NO: 234564 - protein, 81 aa, Glycine max
  Clone ID: PAT_MRT3847_53839C.1.pep
FSLTLTLSLFVAVLPLPLTLAVTLCGGAPPRSYSPRRCFLSFSLLLSLTTISATVTRMHGMGPWNWSHPKVSHTTRSKFKF

SEQ ID NO: 234565 - protein, 70 aa, Glycine max
  Clone ID: PAT_MRT3847_5383C.1.pep
SSRIGSSGSSGSSTAARRRQRGYRAYTLKWDVHFCLFSKTKRFAPLILYKFWVGRTIEECAYLFCRHCGM

SEQ ID NO: 234566 - protein, 225 aa, Glycine max
  unsure (1)..(225): unsure at all Xaa locations
  Clone ID: PAT_MRT3847_53840C.1.pep
MECKVSRMARGLVDGIELVHKFKGFRNANSHIXICCEAGRNGKYVVSASEDSHVYIWKNEADCRPSRSKGVTVTSTYEHFHCKDVSVAIPWSGMDDTWEMHDSYFAEEPELDDDGDEDEVSSANHPPTPVEENLGSEGSQFASGCNNSPLHGTIASATDSYFLDRISATWPEEKLLTTRDRSPRVSVDLSNGVNQNMSAWGMVIVTASLQGEIKIFQNFGLPLGI

SEQ ID NO: 234567 - protein, 56 aa, Glycine max
  Clone ID: PAT_MRT3847_53841C.1.pep
STIFKTHAPPRHAVCMNHSQGGRNHLLDRRQVRLLSDAPTRSTQWSPPTTMAGSRT

SEQ ID NO: 234568 - protein, 175 aa, Glycine max
  Clone ID: PAT_MRT3847_53842C.1.pep
HVLKAWYAMAKTQAERAAWEYCIENGINLVTVLPSFIIGPSLPPNLCSTASDVLGLLKGETKRFQLLGRMGYVHIDDVALCQILVYENEGSHGRYLCSSTVMDEDDLAALLANRYPTLPISKRFEKLDRPNYELNTGKLRSLGFNFKSVEEMFDDCIASLVKQGHVTLQQGHGPI

SEQ ID NO: 234569 - protein, 102 aa, Glycine max
  Clone ID: PAT_MRT3847_53843C.1.pep
PTRPKKKKKKKKKKKKKKGPGLLKIPICEGRAFQILPFFLGPPKLNYLPRVLQLTFFGKPLGYPTLRAFLPNPFSQGCKTSKSPSPLAFTKRAPPKLAFETP

SEQ ID NO: 234570 - protein, 88 aa, Glycine max
  Clone ID: PAT_MRT3847_53844C.1.pep
QFNHTNSEPYLHFLCLIKARISTKLLFLFPSFQFFRQNPDEKKSIFSLPFCCMLIFVKGFSCAFKKDNIFFLWQFHRLLFLRRRRMEL

SEQ ID NO: 234571 - protein, 98 aa, Glycine max
  Clone ID: PAT_MRT3847_53845C.1.pep
MTPSFTNVKIFSSLVLDGFFNALTRRGYAVASQSATKEGVGFMSGKMAPKSGEDNKGVSTYKVSWVPDPVTGYYKPENINEIDPAELRAMLLGKKIDN

SEQ ID NO: 234572 - protein, 63 aa, Glycine max
  unsure (1)..(63): unsure at all Xaa locations
  Clone ID: PAT_MRT3847_53846C.1.pep
ESAKASPECPRVYRHEXRSLRTVSISTLADFALRTGKGIIVSLQNCSNLLESPSLHCIMEVAK

SEQ ID NO: 234573 - protein, 98 aa, Glycine max; identical to SEQ ID NO: 234571
  Clone ID: PAT_MRT3847_53847C.1.pep

SEQ ID NO: 234574 - protein, 53 aa, Glycine max
  Clone ID: PAT_MRT3847_53848C.1.pep
KLPHESPNSSVNYSHNFLVATADFVIFLSVLFIFSLCYGMTYMKEFVLQKKKN

SEQ ID NO: 234575 - protein, 61 aa, Glycine max
  Clone ID: PAT_MRT3847_53849C.1.pep
QKYYASLIHLVQPTTDACIVKNSMEEKRRQGTAFKTYYLASTLKTTLPVPSLIKARDIKNA

SEQ ID NO: 234576 - protein, 80 aa, Glycine max
  Clone ID: PAT_MRT3847_5384C.1.pep
LYPLVLPQGYIKRIRYSLQTVVVQFFRCICLIRKGGFCLPPLPKSEACMFFQLGFTWGLFLCTTFVLNIFCIYRYLLVLL

SEQ ID NO: 234577 - protein, 45 aa, Glycine max
  Clone ID: PAT_MRT3847_53850C.1.pep
SCSNLTMMESPKPSLSHPYNLCFRSVLNPIHLPSQDPSSSTPSRS

SEQ ID NO: 234578 - protein, 513 aa, Glycine max
  Clone ID: PAT_MRT3847_53851C.1.pep
MLKFCTPLLYNRFILYSISKGVLRRNHTREILGGSWQFKFGPKIVRKKTIVYIVFMSLLTVAHQRGSGEFMRFTESHGGGGGGDGDGEYGYGHDDGRGGGGGGSLGLNFNQVMQQGEVTTQGGTLVSGYNRGDPDLREMVSALTHVVVSSGSGQRSTEWIQQSGFPMMSASSLSCLSSFSSPSSSGASWVGHKRGREEEESSSSHNMIQQQQQSAPRLFRNIGDFMVPSQGDSSSATEEAPTSTTTSVTAVATTVTETPPPPGGGERRRKYRGVRQRPWGKWAAEIRDPHKAARVWLGTFDTEEAAARAYDEAALRFRGNRAKLNFPENVRAVPPIQPFQATTRLTVSDSTTSQFRPLVTEAPPFIQQPQIQGSSDLIRDYLQYSQLLQSDFQQQQIQQQQQQQRQQQQRQRQQRQQQQQQQQQPSSLLQQLYYNAQFASLQSPSMLSSSPSFSSSVSPAPFPLFTTSASFPLFSSQQMGYFQPPESRNPAGGVPEFPTSTWSDTSSQPPPSG

SEQ ID NO: 234579 - protein, 62 aa, Glycine max
  Clone ID: PAT_MRT3847_53852C.1.pep
LLLKPDLPLSHKLNVLETTDLFFFRIDQGLRSTIISYLKVSTVPLRLTLKGGIFIPTAFFAF

SEQ ID NO: 234580 - protein, 87 aa, Glycine max
  Clone ID: PAT_MRT3847_53853C.1.pep
TIVFQGHHGQRPTVQSVPVSMSHSPSGQATWDASVPSSFSSPSSGLHIFQLFPSAVCIIMDQIKHAFGPCENNKLTRSLMLTASLIK

SEQ ID NO: 234581 - protein, 68 aa, Glycine max
  Clone ID: PAT_MRT3847_53854C.1.pep
FAKKWYTVNRNKGSKINNLEKFIVRYFVKAIKKFLTIVWGIGFMNRILLRGIIISKVKSNSILVIPQT

SEQ ID NO: 234582 - protein, 81 aa, Glycine max
  Clone ID: PAT_MRT3847_53855C.1.pep
REMFDGWRRSVESSMLPVAVLPYPSLPFPRNRKNSISFSSLYLSRNPNTVFNPPCVNEVSSFSHFLPFCLPNRNLRNAASQ

SEQ ID NO: 234583 - protein, 49 aa, Glycine max
  Clone ID: PAT_MRT3847_53856C.1.pep
GRAFFKAHTKLATLRQYLSHYHYNKLQVGINDARLVTLYIKSIGDLRIQ

SEQ ID NO: 234584 - protein, 45 aa, Glycine max
  Clone ID: PAT_MRT3847_53857C.1.pep
PGAKGSNSRFCIVSCCFFYHVGWILSCDKLIGGEVLHKLTIITPV

SEQ ID NO: 234585 - protein, 49 aa, Glycine max
  Clone ID: PAT_MRT3847_53858C.1.pep
CGAYITLRNNFFSLSFPFSYVPILYNFNMFEFLSHSYANCMKIIALCSI

SEQ ID NO: 234586 - protein, 58 aa, Glycine max
  Clone ID: PAT_MRT3847_53859C.1.pep
NFHSHFNGLARTGGFARKNLNRTDGFGDITLFCSLRLKKATVTSTFLSGAIQGAQPTK

SEQ ID NO: 234587 - protein, 375 aa, Glycine max
  Clone ID: PAT_MRT3847_5385C.1.pep
DFVMEYAKGGELFKKVAKGKLKEEVAHKYFRQLVSAVDFCHSRGVYHRDIKPENILLDENENLKVSDFGLSALAESKRQDGLLHTTCGTPAYVAPEVIKRKGYDGAKADIWSCGVVLFVLLAGYFPFHDPNMMEMYRKISKAEFKFPSWFPQGVQRLLRKMLDPNPETRISIDKVKQCSWFRKGPNGRQKTQEGENLCVSPSVTNHSEQCGDESDDLAAEAREEQVVPVSINAFDIISLSPGFNLCGFFEDSIQKREARFTSRQPASVIISRLEEIAKQMRMKIKKRAAGLLKLEGLHEGRKGILSIDTEIFEVTPLLHLVEVKKSNGDTLEYEKILKEDIRPALKDVVWVWQGDQQEQSQQLEQQKQQQQLPQS

SEQ ID NO: 234588 - protein, 94 aa, Glycine max
  unsure (1)..(94): unsure at all Xaa locations
  Clone ID: PAT_MRT3847_53860C.1.pep
MNGLVQVACYIMRSIAVPFVRYSLISTRSMSKAPGLQPADAQLTCSLQTDITEFAQEMIDAYKIAGFXLTSMLINVYEACAQGAPKGITLHEIQ

SEQ ID NO: 234589 - protein, 62 aa, Glycine max
  unsure (1)..(62): unsure at all Xaa locations
  Clone ID: PAT_MRT3847_53861C.1.pep
VDPRVRPGVRSPLRMTRGPKKSXCKGALCWIFLAYHRKQMIYLPVSNNLQFWQSPLGDIKTL

SEQ ID NO: 234590 - protein, 63 aa, Glycine max
  Clone ID: PAT_MRT3847_53862C.1.pep
KRNPPIILLFGNPVSWESIGLGPNAAKRLEPLINDLGNKGFAAIINGLCRCRSRKSTLESDGK

SEQ ID NO: 234591 - protein, 72 aa, Glycine max
  Clone ID: PAT_MRT3847_53863C.1.pep
VARACLLFKGAISVVGYSWVVASVESRRGHAQSALFIIISPSGALWALAPKAKKSVCSGRVGHSGIAGPVLA

SEQ ID NO: 234592 - protein, 149 aa, Glycine max
  Clone ID: PAT_MRT3847_53864C.1.pep
TQRSLQNFTMSGYPNQPPSYGYGYGAPPPPHPYGAPQPPQSYGAPPPAQPYSAAPYAQPSAPYNKPPKNESHSHSGGSGGGYSAPPATAYASPFASLVPSAFPPGTDPNVVACFQMADQDGSGFIDDKEMQRALSSYNQSFSLRNRHFL

SEQ ID NO: 234593 - protein, 84 aa, Glycine max
  Clone ID: PAT_MRT3847_53865C.1.pep
DLLQGASKVSIGFRFYNVNESNQASSWSFYTRVFLTMALVLELGRCNFMLEQQSIRRVGEALQCLFFVMSPSEACILNFMCSHI

SEQ ID NO: 234594 - protein, 60 aa, Glycine max
  unsure (1)..(60): unsure at all Xaa locations
  Clone ID: PAT_MRT3847_53866C.1.pep
TPAKVVELLKSQVPVSGDVXTSSXGHTWCIANGNSWDNKLHNALNYSCGKNEADGTRLHP

SEQ ID NO: 234595 - protein, 587 aa, Glycine max
  unsure (1)..(587): unsure at all Xaa locations
  Clone ID: PAT_MRT3847_53867C.1.pep
MQRMAYTFSFPEEGLEYVFSFMWNERDRNAISLVCKSWYEIERWCRSKVFVGNCYAVSPLMVVKRFPEVTSIALKGKPHFADFDLVPGGWGCYICPWIDAVVRSFPCFEQFRLKTMVITDESLELIAKSFKNFKVLVLTSCEGXTPLGLAAIAANCRNLRELDLQESEVEEDLCGHWLSHFPDSYTSLVSLNISCLNNEVSLSALERLLGRCPNLRTLRLNRAVPLDRLPNLLLRAPQLVELGTGVYSTEMRPEVFSNLEAAFSGCKQLKSLSGFWDVLPSYLPAVYPICSRLTSLNLSYAIIQSSDLIKLISQCPNLLRLWVLDYIEDAGLYALAASCKDLRELRVFPSDPFGLEPNVALTEQGLVSVSEGCPKLQSVLYFCRQMSNAALHTIARNRTNLTRFRLCIIEPRTPDYLTHEPLDSGFGAIVEQCKDLQRLSLSGLLTDRVFEYIGTCGKKLEMLSVAFAGDSDLGLHHVLSGCDNLRKLEIRDCPFGDKALLANAEKLETMRSLWMSSCSVSYGACKLLGQKMPRLNVEVIDERGPPDSRPDDCPVEKLYIYRTIAGPRLDMPGFVWTMEDDSSLRLE

SEQ ID NO: 234596 - protein, 79 aa, Glycine max
  Clone ID: PAT_MRT3847_53868C.1.pep
LRILSGTLLRNGKRISSWLNLAFGLAALVKGSANARPFTGSLIFMLPFDTALGGGKELNGLPFEVPRSQWPRGRRVVIC

SEQ ID NO: 234597 - protein, 177 aa, Glycine max
  unsure (1)..(177): unsure at all Xaa locations
  Clone ID: PAT_MRT3847_53869C.1.pep
EGEKKPLVFNPHPKNNSTKGKNGTRTRGGPPGKRGRGPGGEKKFPKGGGKKGGGKHGQKGTPGEKGNREKIRRKNEGEAQREKTGGPNRGPNPKKRGGAKGPVWKRXNRGGQGEKGRGPTPGGKGGRQMGPKGGFLSPPEKGKRGXPSPAGPEKSAKSGPGGVAPPAKKRVGGGETG

SEQ ID NO: 234598 - protein, 67 aa, Glycine max
  Clone ID: PAT_MRT3847_5386C.1.pep
SFQLAVQGFLLGEGMSRLGISRSMVQYCRPAPPVGSIPSSNPHLYSEARTIPRRYPAAVSVLGACTF

SEQ ID NO: 234599 - protein, 552 aa, Glycine max
  Clone ID: PAT_MRT3847_53870C.1.pep
MAFHFDSLELLTRLLCLKRWHIMSAPEQILNLAHNKSDIERRVHAVIDKFAERGLRSLAVAFQDVPDGRKESAGGPWQFIGLLSLFDPPRHDSAETIRRALNLGVNVKMITGDQLAIGKETGRRLGMGTNMYPSSALLGQDKDESIVALPIDELIEKADGFAGVFPEHKYEIVKRLQARKHICGMTGDGVNDAPALKKADIGIAVADATDAARSASDIVLTEPGLSVIISAVLTSRAIFQRMKNYTIYAVSITIRIVLGFMLLALIWKFDFPPFMVLIIAILNDGTIMTISKDRVKPSPLPDSWKLAEIFTTGVVLGSYLAMMTVIFFWAAYKTNFFPRVFGVPTLEKTAHDDYRKLASAIYLQVSTISQALIFVTRSRGWSYVERPGILLVTAFVIAQLIATLIAVYANWSFAAIEGIGWGWAGVIWLYNIIFYIPLDPIKFLIRYALSGRAWELVIEQRIAFTRQKDFGKEQRELQWAHAQRTLHGLQPADTKMFNERTHVSELNQMAEEAKRRAEIARLRELHTLKGHVESVVRLKGLDIDTIQQAYTL

SEQ ID NO: 234600 - protein, 58 aa, Glycine max
  Clone ID: PAT_MRT3847_53871C.1.pep
PRQRYKSRTGYHNMNKEHRPTTLNGTRDARHSERAIGHRGRYPCIQSVKTGPIPSNPC

SEQ ID NO: 234601 - protein, 388 aa, Glycine max
  Clone ID: PAT_MRT3847_53872C.1.pep
MKRFASDQLEAEGKKPVNGSRKVSNPAFIAAQSKFEELSSIANSVRTSSLSYQDSAVESQGDTSSVGNDTAYRSKEFAFENPAAYLSRFAGSECGTELSISSTLDSPDISEPGATENERDAKDLVEGIGILENTVNRDDEANGNVSHVIPASNLANSVLDKSEIVDDISANLGHSVVAVDSEEPAIKTEKNAPDLQRELPESVLQDLRSSPEASPRSHLTVPESQGTPSSEVSVKPKDSTISKTRSGNKRRSLSLSNKSPTNPNHDSGSKGSREQLPKDQQNGKRRNSFGLVKPDHIDQEPRDNSTNNNSLPHFMLATESARAKVNANNSPRSSPDVHERDIEVKKRHSLPGATGRQVSPRIQRSTSKAQQSAKGNNVHPPQERKWLR

SEQ ID NO: 234602 - protein, 42 aa, Glycine max
  Clone ID: PAT_MRT3847_53873C.1.pep
MDMIKRRIKKYIFIGFPGAINYANCKRSRTWSGHLKFSLFCP

SEQ ID NO: 234603 - protein, 60 aa, Glycine max
  Clone ID: PAT_MRT3847_53874C.1.pep
PNHFAASFYLPLLSLITLNSENEVLHNGGTVARNLNFTFSIIAKFAIFYAFTITISAYTF

SEQ ID NO: 234604 - protein, 157 aa, Glycine max
  unsure (1)..(157): unsure at all Xaa locations
  Clone ID: PAT_MRT3847_53875C.1.pep
MALTLKEEDAADWVYRGEGAVNLVLAYAGSSPSFIGKVVRIRKAPRNGSQSKSVSVRNSIALTPHERVLWKDVHQLICSSDKEIVGQLYVHHVMKPLLGSNSVDAGMHVLVTREFLELDEKNVSGQRAAWRVEAGXVDAHCDCGLLMSDHSLFAYGR

SEQ ID NO: 234605 - protein, 56 aa, Glycine max
  Clone ID: PAT_MRT3847_53876C.1.pep
MALTLKEEDAADWVYRGEGAVNLVLAYAGSSPSFIGKVVLIRKAPRNGSQSKSVSV

SEQ ID NO: 234606 - protein, 67 aa, Glycine max
  Clone ID: PAT_MRT3847_53877C.1.pep
LLNSIVMHVLYIACTIQLHVKTYYSPFCLSCLFNCLWPSFKLSPTPNKQYYLINHFFFNFYLLKICV

SEQ ID NO: 234607 - protein, 76 aa, Glycine max
  unsure (1)..(76): unsure at all Xaa locations
  Clone ID: PAT_MRT3847_53878C.1.pep
PPVLASPLPSALFGPCAPLAFARLFFSLFCLPXPLFPGFGCCVVAPPFFYRPPLXRVGGPLFIWFLLXWLEPXSAL

SEQ ID NO: 234608 - protein, 92 aa, Glycine max
  unsure (1)..(92): unsure at all Xaa locations
  Clone ID: PAT_MRT3847_53879C.1.pep
MGGEFDVSGVTARVNNGSIRGGEESLRETSPEKIKGTHFFAIGDFRIPQYGGSMGGNVIYPXDNKKGCKKFYEFGISFKLNPGAIFTICFTL

SEQ ID NO: 234609 - protein, 49 aa, Glycine max
  unsure (1)..(49): unsure at all Xaa locations
  Clone ID: PAT_MRT3847_53880C.1.pep
LMARKMKDTDSEEKLKEVCQVYEKDXSWFISTVRFGMXIXNLGEKLTDE

SEQ ID NO: 234610 - protein, 69 aa, Glycine max
  Clone ID: PAT_MRT3847_53881C.1.pep
NDKRERVKYIRQIDTFVRYTIYFTVWIRPHKLSDINILHKRLDPENNRRIHVRQHNKRLGMPEDYEWYG

SEQ ID NO: 234611 - protein, 152 aa, Glycine max
  unsure (1)..(152): unsure at all Xaa locations
  Clone ID: PAT_MRT3847_53882C.1.pep
MNDLFSSSFKKYSDLKEQAHIDDVEAGKESVNLDKFFDEVENVKEDMRLVEKLYRKLQESNEESKIVHNAKTMKDLRARMDQDVQQVLKRVKLIKGKLESLERSNAANRNIPGCGPGSSADRTRTSVVSGLRKKLKDLMDDFXGLRARMQNE

SEQ ID NO: 234612 - protein, 287 aa, Glycine max
  Clone ID: PAT_MRT3847_53883C.1.pep
HAPYHASATSQLKSGSDRVQHSVSSFSSHVKGRKRERVDQGQESVKRDRSTKNDDGDSGNSKADSILKTEIAKVTEKGGLTDPEGVEKLVQLMAPDGNEKKIDLASRSMLAAVIAATEKFDCLSRLVQLKGLPVSDEWLQEAHKGKLGEGIGSRDGDKSVDDFLFVLLRALDKLPVNLQALQACNIGKSVNHLRTHKNLEIQKKARGLVDTWKKRVEAEMIINDARSCSVQTVPWPARQRLSEVAQGGNKHSSGSADVAMKSSVTQLSASKTASPKNAPGENTTRST

SEQ ID NO: 234613 - protein, 46 aa, Glycine max
  unsure (1)..(46): unsure at all Xaa locations
  Clone ID: PAT_MRT3847_53884C.1.pep
FRSSELPLKDSAQTDKLGSCQLKSQSQSTTFETDISRYTFLVYFXG

SEQ ID NO: 234614 - protein, 51 aa, Glycine max
  Clone ID: PAT_MRT3847_53885C.1.pep
SPFFFFLCYTIFGFFEKEVIFPPMLALRCHIATHKTQQRVTPAITQNLHFT

SEQ ID NO: 234615 - protein, 93 aa, Glycine max
  Clone ID: PAT_MRT3847_53886C.1.pep
ASTRPSTRSKKTRFFRYRKQSWVRGFFIPQLLYSLLSDDVLIYSMAGVRRTSNLFWAVFTFGRFFVGYVLYHIFRYFWYGLCSLYFVNIFCFF

SEQ ID NO: 234616 - protein, 72 aa, Glycine max
  Clone ID: PAT_MRT3847_53887C.1.pep
KDIDIEKHTLTSRSGKLLKYGSLVIATGCTASKFPEKIGGNPPGGHYIPDVGDSHAPILSVEKAKKGVVGGG

SEQ ID NO: 234617 - protein, 51 aa, Glycine max
  Clone ID: PAT_MRT3847_53888C.1.pep
VTHDIITTLKTLSFHLFHLIPFPHHQFFASLNSFVFLHHIISSIKTLKSHP

SEQ ID NO: 234618 - protein, 51 aa, Glycine max
  Clone ID: PAT_MRT3847_53889C.1.pep
SQLQCPYTPLLLIAVTSAPSIPSAASSTVQNNDKSTNLGLFPSSQTSHTID

SEQ ID NO: 234619 - protein, 79 aa, Glycine max
  Clone ID: PAT_MRT3847_5388C.1.pep
ENQGLQPGEWKEKVFLRGNQNQMNWPCFKNVGMGKTLGYTKINGVEENPLLASWGNRKRARTNGLSKKWRTLKGKGNPP

SEQ ID NO: 234620 - protein, 115 aa, Glycine max
  unsure (1)..(115): unsure at all Xaa locations
  Clone ID: PAT_MRT3847_53890C.1.pep
GYPTYEGHIGTCLWGADSRLQLDGRRTAGARCDCSPDCDLEANSHNPWHGSFAPLAKKPCAKTNCANQRALSHXGELLLQHCHQWGXTNLYNDGLNPGHVGYRRANNPTLEECCY

SEQ ID NO: 234621 - protein, 46 aa, Glycine max
  Clone ID: PAT_MRT3847_53891C.1.pep
IPLIICLINITPAFTQLCNILLYYVTNFHTQCSNTCTHIIIIISIF

SEQ ID NO: 234622 - protein, 287 aa, Glycine max
  Clone ID: PAT_MRT3847_53892C.1.pep
MQACSSSDAPLSKRLDGKVALITGGASGIGEATAKLFLRHGAKVVIADIQDNLGHSLCQSLNSSDKNNNDDISYVHCDVTNDKDVETAVNAAVSRHGKLDILFSNAGITGRSDCSNSITAIDSGDLKRVFEVNVFGAFYAAKHAAKVMIPRKKGSIVFTASIASVSNAGWAHPYAASKNAVVGLMKNLCVELGKHGIRVNCVSPYAVGTPMLTRAMRMEKEKAEEIYLEAANLKGVVLKEKDVAEATLFLASDESKYVSGVNLVVDGGYTTTNSSSKQAFTKFSFNV

SEQ ID NO: 234623 - protein, 313 aa, Glycine max
  Clone ID: PAT_MRT3847_53893C.1.pep
MGVNEDFNKDIDDHHHEYVDDDDVPLPGFRFHPTDEELVSFYLRRKLHKKPISIELIKQIDIYKYDPWDLPKTSATAEEKEGYFFCRRGRKYRNSIRPNRVTGSGFWKATGIDKPVYSHGGEGNDCIGLKKTLVYYRGSAGKGIKTDWMMHEFRLPSNKDNTTNLPSSKNYVDVPQEAEIWTLCRIFKRNVSQRKHTPDLKQLSAKRHSIHDKNSRMSNVEFNNTNQESYINFGGHYQNEQKPVINYTNSDQRNQYHVMTHQLFAAPVAQHHQQPQQLTSPSSNFWLNSPPGNDFFTFDNWDELGSVVKFVVD

SEQ ID NO: 234624 - protein, 106 aa, Glycine max
  unsure (1)..(106): unsure at all Xaa locations
  Clone ID: PAT_MRT3847_53894C.1.pep
LLVIPTAWSIVSDLPPGPAVNIXRTKHAMDGRFXIERVPDDEFNSYNLVIGSHPAEDDKWGDIDISIDNDHGTERXEVSXSTPVAVQVQLLDKESLVKKNHDLDRE

SEQ ID NO: 234625 - protein, 495 aa, Glycine max
  unsure (1)..(495): unsure at all Xaa locations
  Clone ID: PAT_MRT3847_53895C.1.pep
MATTNPIPNLNSPPSHPPNFDSDSDSDIDALIDSFFEQPSPSLPHYGSNANTTLKRGIDVPSVDYFDTAISIKRGRISNAATHGSDDQHHATFEIQNPSPPPPLSQDPGGPIADHNHGGGGGEDQQGKRPVFEIDFISKALREAELGLALNSHDNADDFDDDDMEPKNENHDLHYVPMSFYRRNRNMERFRVIAKRNATHYARFDDSEVGDEGTSLYLNPQGNIDDSETPFSIAMKAIKDRAMKKKVCDAWVPKRNPQGGEKRFFLVPSLQELCLEMLAGNADAMVSLEGVPDELRRKLSNLLCDSRKMNTRFLELLLSGSPTEIRLKDCSWLTEEQFAKYFQTCDTTRLEXVLQLDQCGRCIPDYALLGTLRQSPRWLPKLITLSLSGACRLSDKGLHVLASSAPALRSINLSQCSLLSSASINILADSLGSLLKELYLDDCLMIDAAQIVPGLKKLKHLEVLSLAGIQTVSDEFIKDYIIECGHNMKELILKD

SEQ ID NO: 234626 - protein, 373 aa, Glycine max
  Clone ID: PAT_MRT3847_53896C.1.pep
FPNLHSSLPLSLSFFLSLCSLNGAATREHGNTKRPRCHTRPKNHHHNNKASAGTRRKVPAMRLIQHKVLLLQQLQPHPAQALLQDLQKVLDQRRSLAQRPDRRRLQEEQKGRRQALFLFVIFITKTFNLGALPFPSRLNTNHHIPTIINTGLFNNNQLSPFLDVKSALFQLDAPPAALSNSLMGIAPPSAQNNNFWALGRSQSSTLSDPLNSTMQSMQQSLNVHSSLASSIESLSCVNRDLHLKMQQQRYATMMSGGDTHHKGDENSGVSFPQTVNGFENQKLVMNPVMFQKPVESLPAGSAVTEGPSGASVTTVAPPTEWFFGNSSFPSTGNGGGNGNNNINININDANNNWSDALAWGNFQQQQQQYSALP

SEQ ID NO: 234627 - protein, 220 aa, Glycine max
  Clone ID: PAT_MRT3847_53897C.1.pep
MVKVTIVGRVSDGLPLAQGLRYMNEEYGYLSCYRQQAEFILREFSRGALTAPKMTIHIDNFCFNYLVENGVVFIVLCESTYPRKLAFHYLQDIQKEFEKFDKTLIGKITRPYSFVKFDGIIANISRQYIDTRTQANLSKLNANRKQDLDIATEDIYKILERKRNSETMRRLPVTPQPESTIWCSPQLEVIALKWTPIMIIVITSMALLWASLALTDDFIV

SEQ ID NO: 234628 - protein, 141 aa, Glycine max
  Clone ID: PAT_MRT3847_53898C.1.pep
RFIHPLYLNGGNPPGFAKGFPKTKKTLFLQKAQPKKGGASFTFWPPFLAPPYGPLKDLGGGPPPPLTLFGKGGAPPALHGLKNPPPYGPFGPQETKLGPQGSPPRGEGWPLNIRPFFGPGTIGKFFFNPGPNLNPFFLGEG

SEQ ID NO: 234629 - protein, 269 aa, Glycine max
  unsure (1)..(269): unsure at all Xaa locations
  Clone ID: PAT_MRT3847_53899C.1.pep
PTRPGASFGVILSYTIKLVPVPETVTVFRVEKTLETNVTATDLVVQWQKVAPNTDDRLFMRLLLQPVSSKVVKGTITVRASVVALFLGGANEVVSILAKEFPLLGLKKENCTEVFXKRKSDYVQNAISRDGLEWLFKRMIELGKTGLVFNPYGGKMAEIPSDATPFPHRKGNLYKIQYSVNWDDPSPGAALNFTNQAKRLFSYMTPFVSKNPRSAFLNYRDLDIGVNSFGENSFQEGLVYGTKYFXDNFXRLVKXKTTXDPXNFFRNDR

SEQ ID NO: 234630 - protein, 34 aa, Glycine max
  Clone ID: PAT_MRT3847_5389C.1.pep
DSFVHLHVEHHFITNGFGKVYLASTVRSISLTFK

SEQ ID NO: 234631 - protein, 77 aa, Glycine max
  Clone ID: PAT_MRT3847_538C.1.pep
NHKSHINNPPQSCLPTPHISLLQPSCHLWFLCCLPHITSFCYYTTKLLPSKSHPSINFFTNGPSISVWTSLHFCNIL

SEQ ID NO: 234632 - protein, 43 aa, Glycine max
  Clone ID: PAT_MRT3847_53900C.1.pep
RIIIATITAQANTQLLINPCDNHLRKEPFPFSIALATYTISKM

SEQ ID NO: 234633 - protein, 544 aa, Glycine max
  Clone ID: PAT_MRT3847_53901C.1.pep
MATKPRLAYLSSTFLLLLVVTVFTSVSAQAPESPSLYNTFLQCLTKYTNNPSNIVFANTNPKFPTILQNYIRNARFNTSSTRKPLLIVTPQQESHVQGTVICAKSVEIQLKIRSGGHDYEGISYISEEPFVILDMFNYRRITVDVKNEVAVVEAGATLGEVYYRIWEKSKVLGFPAGVCPTVGVGGHFSGGGYGNMLRKYGLSVDNVIDAQIVDVKGNLLNRKTMGEDLFWAIRGGGGASFGVILSFTIKLVPVPETVTVFRVEKTLETNVTATDLVVQWQQVAPNTDDRLFMRLLLQPVSSKVVKGTRTVRASVVALFLGGANEVVSILAKEFPLLGLKKENCTEVSWIDSVLWWNDDNSLKNGDKPETLLDRNLNNAGFLKRKSDYVQNAISRDGLEWLFKRMIELGKTGLVFNPYGGKMAEIPSDATPFPHRKGNLYKIQYSVNWDDPSPGAALNFTNQAKRLFSYMTPFVSKNPRSAFLNYRDLDIGVNSFGENSFQEGLVYGTKYFNDNFQRLVKIKTTVDPENFFRNEQSIPVLHGEA

SEQ ID NO: 234634 - protein, 227 aa, Glycine max
  unsure (1)..(227): unsure at all Xaa locations
  Clone ID: PAT_MRT3847_53902C.1.pep
MNCNHAAATFLSLSLPPPSSVLFPKSPSAILGPNQILLPRNARLGLRLRLRASNGDSNVQAANWSKWIPEGSFAADKVFRLIAGATASPIGQFVASPTTFLHSIDPRVKLVWLLALVVLPARSHIIMRFALVVYLTLLSIWALPRNAWTDQLGRVYLLSGLLFITSGLGSDGAPALVQLRTPPPAMMGLPNLPVSLTGYAYTIXKLGPLTFTRKGLSVASLXACLTF

SEQ ID NO: 234635 - protein, 46 aa, Glycine max
  Clone ID: PAT_MRT3847_53903C.1.pep
ARTMEEHLLLSTPKVYSLSGFPMRLICAFCLTHCSWPCVLLPCLSR

SEQ ID NO: 234636 - protein, 58 aa, Glycine max
  Clone ID: PAT_MRT3847_53904C.1.pep
TCNPNLRNCLKVPLNTRICLSCLKLGHWCRHAQLGYLDAGPVRAPNEVVTAPMDSSID

SEQ ID NO: 234637 - protein, 40 aa, Glycine max
  Clone ID: PAT_MRT3847_53905C.1.pep
KSYCHTRYGKGIYQVQSAWEILYHTIYICTDGIAVCSFMY

SEQ ID NO: 234638 - protein, 73 aa, Glycine max
  unsure (1)..(73): unsure at all Xaa locations
  Clone ID: PAT_MRT3847_53906C.1.pep
MTKQTASTDEVQTLWIXRSPNWMDENYXYTCFAHTGEVLGTKVILNMPTTSSEGYXLSELIQRARAQRILQTY

SEQ ID NO: 234639 - protein, 95 aa, Glycine max
  Clone ID: PAT_MRT3847_53907C.1.pep
TTTFSKGPLYESSLRIQNQVHYCLRKTTRVRSTVMQRTANLDTNTENTYAELQTEDRHQEQRLQEASHFTSAQAFVLVFCSGCSELLFWMHEGDM

SEQ ID NO: 234640 - protein, 50 aa, Glycine max
  Clone ID: PAT_MRT3847_53908C.1.pep
TQTMDPTSTTTSATSSNAHIADFIYHSSLHLNFLQQHHNLHKATTHHREF

SEQ ID NO: 234641 - protein, 91 aa, Glycine max
  Clone ID: PAT_MRT3847_53909C.1.pep
RLNNVKTYCPSIYMVSRATYSPTIKKIVQVPFFQKTLFAPISPRFHYVVLHLTRGYSECSQMAHSLGLLLFLWMIPRVDGNTYCCCCFVFC

SEQ ID NO: 234642 - protein, 52 aa, Glycine max
  unsure (1)..(52): unsure at all Xaa locations
  Clone ID: PAT_MRT3847_5390C.1.pep
XLLXXSXPXSXTSRXXXLSXLXXXXFLXTRXHLXXPXXXXLXFXXXVRCTNX

SEQ ID NO: 234643 - protein, 272 aa, Glycine max
  Clone ID: PAT_MRT3847_53910C.1.pep
MAATLTLLKLPILPNKPLLPRPSTSKLFPLPSIYSKLNIPKDYIVSPNNIDALKPAFLSLSAITFPLLLETKDALAVGGEFGILEGRSFALIHPIVMGSFFLYTLWAGYLGWQWRRVRTIQNDINDLKKQVKPTPVTPDGKPVEEASPSPVELQIQQLTEERKELIKGSYKDRHFNAGSILLGFGVLESIGGGVNTWFRTGKLFPGPHLFAGAAITVLWALAAALVPSMQKGNETARNLHIALNAVNVLLFVWQIPTGIDIVFKVFEFTTWP

SEQ ID NO: 234644 - protein, 182 aa, Glycine max
  Clone ID: PAT_MRT3847_53911C.1.pep
MVMMGVVLLAQDALAVGGEFGILEGRSFALIHPIVMGSFFLYTLWAGYLGWQWRRVRTIQNDINDLKKQVKPTPVTPDGKPVEEASPSPVELQIQQLTEERKELIKGSYKDRHFNAGSILLGFGVLESIGGGVNTWFRTGKLFPGPHLFAGAAITVLWALAAALVPSMQKGNETARKSHIAL

SEQ ID NO: 234645 - protein, 68 aa, Glycine max
  Clone ID: PAT_MRT3847_53912C.1.pep
NGFLASPLWQVFNHCITSHLQIKLKIHTPPWLYIIIFIRSITTNCTATFTFHDDSILVQRSGLYPYPR

SEQ ID NO: 234646 - protein, 469 aa, Glycine max
  Clone ID: PAT_MRT3847_53913C.1.pep
MDEKLIQRLESAVLRLESLSSGLHPSASQSGGAHAPDAALDPSVVAFADLIDQYVGRVSGAAEVIGGQVLGVTKLVQEAFNVQKELLIKLRQTQKPNLAGLSEFLKPLNEVITKATKLTEGRRSDFFNHLKAAADSLSALAWIAYTGKDCGMSMPIAHVEESWQMAEFYSNKVLVEYRNKDPNHVEWAKALKELYLPGLRDYVKSFHPLGPVWSSTGKIIAPSKASAPAAPPPPPASLFSSESSQASSSKPKEGMSAVFQQISSGNVTSGLKKVTNDMKTKNRTDRTGVVGAIEKETPASSRVFSKAGPPKFELQMGRKWVVENQIEKKDLVIEDCDSKQSVYIYGCKNSVLQILGKVNNITIDKCTKIGVVFKDVVAACEIVNSNGVEVQCQGAAPTISVDNTSGCQLYLSKDSLEASISTAKSSEINVLVPGADPDGDWVEHSLPQQYIHLFKNEHFETTPAAHSGG

SEQ ID NO: 234647 - protein, 329 aa, Glycine max
  Clone ID: PAT_MRT3847_53914C.1.pep
MSPSFCTSLFLFTLSLLFFLFFSLSVSVHSGHHDDGDADSDATPDLRARPLILAKVWCLIVIFIATFVSGVSPYILKWNEGFLVLGTQFAGGVFLGTAMMHFLSDANETFGDLTQKEYPFAFMLACAGYLMTLLADAVISSLFKIWGVMPRMSKVKGLINSVTSQSQHRSHDANHHLANPALGSVHSLGDTILLIVALCAHSVFEGLAIGVAETKANAWKALWTICLHKIFAAIAMGIALLRMIPNRPLVSCATYAFAFAISSPIGVAIGIILDATTQGHVADWIFAISMGLACGVFIYVSVNHLLAKGYMPHIPTKDDSAYFKILAVL

SEQ ID NO: 234648 - protein, 62 aa, Glycine max
  Clone ID: PAT_MRT3847_53915C.1.pep
ISSLITVSAVIAVMAMIMARLLFISFLLSFSCAHVGAALSMVLVLVFFSTPTFEWSVILLIQ

SEQ ID NO: 234649 - protein, 44 aa, Glycine max
  Clone ID: PAT_MRT3847_53916C.1.pep
ESFSLSSHGLREFLWYSHGERSLFFLPVSVNLSCFILLLLQVNV

SEQ ID NO: 234650 - protein, 151 aa, Glycine max
  Clone ID: PAT_MRT3847_53917C.1.pep
MVLKGKVITELEIRSPAAKFFNAYARQLHNLPNIVDNVHEGQLHEGDWHGIGSVKSWTFTTEGKVTTYKESIEAIDDEKKSVSFNIFDGDVGEDYKNFKLHLHLIDKEEGGAITVWTIEYEKLNEDTKPPYRFLDIINLATKDIDAHALKA

SEQ ID NO: 234651 - protein, 118 aa, Glycine max
  unsure (1)..(118): unsure at all Xaa locations
  Clone ID: PAT_MRT3847_53918C.1.pep
SNLSDGIPNYEVPSKCGKGDISRNDALIIDLSQSQYKSTLVCPVCGKISITFDPFISXKHGICRDLCQTLCTACCLKSDEMLLLAEVYEHKIYLYLENPMEPLNSIKDDEHIGAYRIK

SEQ ID NO: 234652 - protein, 137 aa, Glycine max
  unsure (1)..(137): unsure at all Xaa locations
  Clone ID: PAT_MRT3847_53919C.1.pep
ILVSLLTFGLAPWGVFQLLLIRSSAPSMRSSCLCKLAMPPVLGAWSQCIYTLAGLFVCPLCPPCRPCPGFHSCRLPPCLSSFSAPFHLPSVLDEISVYIRLYVLSLVYGFFYALFAHIFAFLREYTPFCFRSKKRKX

SEQ ID NO: 234653 - protein, 43 aa, Glycine max
  unsure (1)..(43): unsure at all Xaa locations
  Clone ID: PAT_MRT3847_5391C.1.pep
IEPLPFTKGEDRSVTXRFWFLGFVLFXXXXXXFXXXLSSXXPP

SEQ ID NO: 234654 - protein, 89 aa, Glycine max
  Clone ID: PAT_MRT3847_53920C.1.pep
MSAPNANNPNDGIVGQAVNSVKNAANYVSESIQGNSAEASKEANKQQAKGNVPGNESMTDRASGALGAAGDKIDQTKHEGSAEANKRSI

SEQ ID NO: 234655 - protein, 65 aa, Glycine max
  Clone ID: PAT_MRT3847_53921C.1.pep
QDTECKEKKRITTEPHLLPKEESVKHQLSSSNPLIDSHMLMLIHSNSTYATFNYVCPPNKWVRGG

SEQ ID NO: 234656 - protein, 93 aa, Glycine max
  Clone ID: PAT_MRT3847_53922C.1.pep
LIYTHTHIYIKIWRLLVYGYFKIYQHHVVQKEMQFLEIGINFRCPYTWHHWLKTGWVSYRISAILKLKLLLAHIFVNTVLLITLANEGLHNHG

SEQ ID NO: 234657 - protein, 44 aa, Glycine max
  Clone ID: PAT_MRT3847_53923C.1.pep
TTVDGSRKVSNPACKEAGPSRMGELHQRHSISYLSPRGITSQGG

SEQ ID NO: 234658 - protein, 157 aa, Glycine max
  unsure (1)..(157): unsure at all Xaa locations
  Clone ID: PAT_MRT3847_53924C.1.pep
PLPYFSFSSFLHRDTTIPPHPLFFSSSRHHHRATPSLLFFIXATMAAPPSRHTPCSFLHRDTTQWXXXPXXXNXAKIFRAMHHHRGLYFNLSTPFRFQPCLFLERNRRLVKLSLTLNFFEILFKPWLYFFRSVRWLYFWVCILSFFPMFFLFFDMGG

SEQ ID NO: 234659 - protein, 101 aa, Glycine max
  unsure (1)..(101): unsure at all Xaa locations
  Clone ID: PAT_MRT3847_53925C.1.pep
SYSSYRRTQGAGFGPFFHLPEREHSGGANMPNNVSDKADKGPRIXRRSIRATVLIETLTALFQLNEILYELNDHSLRLNCXAXDYSRSHVNTFQAHPERLL

SEQ ID NO: 234660 - protein, 218 aa, Glycine max
  unsure (1)..(218): unsure at all Xaa locations
  Clone ID: PAT_MRT3847_53926C.1.pep
MGLNVPQRQLTLLLLIALAAAEKTLHGCRSTCGSVSSIPYPFGIGNSSVTGENCFLEKALMLTCINSTLYHGNGNVQILDITLDSKMVVLAFISKVCKNESVGRVVTKGHEAGLRTPAFTVSSEDNKFVTVGCDTYGYLNSFNNDIRSQMGCFTRCDTIESVQSMQEDGKCTGIGCCQMDIPPGMKNISIQAFSYYNFNYSSDFNXCGYSFVAKNGNY

SEQ ID NO: 234661 - protein, 50 aa, Glycine max
  Clone ID: PAT_MRT3847_53927C.1.pep
RGGEIQDPKFFPPPKEFYFTKGPPLLKRHNLRRGILFIEKNHPGWGNETW

SEQ ID NO: 234662 - protein, 77 aa, Glycine max
  unsure (1)..(77): unsure at all Xaa locations
  Clone ID: PAT_MRT3847_53928C.1.pep
KCXIVPXLPCXLNRXMATNCXGYGYXQQXGVXYLEXQMYGLSVSDXXAPKILTXXLLHXMCHRGXLPCQKICYLGXC

SEQ ID NO: 234663 - protein, 82 aa, Glycine max
  Clone ID: PAT_MRT3847_53929C.1.pep
FKNPPCHRNHHLYPYLFQLDLQLLNQILHQNLKRPHHPIDLLQNRALTHFLLFSSLLFSYDQFKTHIQYLYITGRFSHFCAK

SEQ ID NO: 234664 - protein, 76 aa, Glycine max
  Clone ID: PAT_MRT3847_5392C.1.pep
ANEKIQWTQCEDCLKWLILPASALLSSKWTCTDNSWDPETSCCSAAQELTAEQLEKMLPSCNSDVLQQNEGCQTGS

SEQ ID NO: 234665 - protein, 129 aa, Glycine max
  Clone ID: PAT_MRT3847_53930C.1.pep
MGVFYHEEPPNHPKRCKYLVATFIKEVFSSCQSFAARLSTSSFEDEYPVSDFDEEQELFISAVISRTMEKQKHKPNVLRHNFSWVYSPATKELYFTTQAVAPQEKVESDQESDEGEEFLSVKSYFSRCS

SEQ ID NO: 234666 - protein, 114 aa, Glycine max
  Clone ID: PAT_MRT3847_53931C.1.pep
MIMLQVITDHLGLGVKTGLPYIYHSKASNPFVNLRKEYKGIFWQEDIIPFFQNVVLPKECTTVQKCYIELSKQVKEKLSKIDPYFDKLADAMVTWIEAWDELNPEGASKANDKA

SEQ ID NO: 234667 - protein, 368 aa, Glycine max
  Clone ID: PAT_MRT3847_53932C.1.pep
NSVRNLNFVIAMADASVAPPPPLKDELDIVIPTIRNLDFLEMWRPFFQPYHLIIVQDGDPTKTIKVPPGFDYELYNRNDINKLLGPRASCISFKDSACRCFGYMVSKKKYIFTIDDDCFVANDPSGKAINALEQHIKNLLCPSTPLFFNTLYDPFREGADFVRGYPFSLREGVPTAISHGLWLNIPDYDAPTQLVKPLERNTRYVDAVLTIPKGTLFPMCGMNLAFDRDLIGPAMYFGLMGDGQPIGRYDDMWAGWCCKVITDHLGLGVKTGLPYIYHSKASNPFVNLRKEYKGIFWQEDIIPFFQNVVLPKECTTVQKCYIELSKQVKEKLSKIDPYFDKLADAMVTWIEAWDELNPEGASQANGKA

SEQ ID NO: 234668 - protein, 79 aa, Glycine max
  Clone ID: PAT_MRT3847_53933C.1.pep
LKAYYFLDSNPSWTGNLNLGDYQSAKAEPLPYPRHLLLNLLRISFSYPTRVLILKAGPLMLGIFRFGKATLPPPPVIQP

SEQ ID NO: 234669 - protein, 49 aa, Glycine max
  Clone ID: PAT_MRT3847_53934C.1.pep
FWLFMYKAVFPSKFYGNKPMGAPACHQKQFNMPQNPPGLEEIKKAKDID

SEQ ID NO: 234670 - protein, 190 aa, Glycine max
  Clone ID: PAT_MRT3847_53935C.1.pep
MFTPFISMDDPIEVLPITASHVVAMPYPGRGHVNPMMSLCKLLLSKNSDILVTFVVTEEWLGFIGSDPKPDNIRFATIPNVIPSEHGRANDFVTFVEAVMTKMEAPFEDLLNRLLPPTVIIYDTYLFWVVRVANNRSIPVASFWPMSASFFAVLKHYHLLEQNGHYPVNVSGQLLSIHHKTISNWNFYIN

SEQ ID NO: 234671 - protein, 80 aa, Glycine max
  Clone ID: PAT_MRT3847_53936C.1.pep
PDTCIPLYTSSNTYESIMSSSTSFVDSLLDRKTGRYNPYMDPVIPVYNRRIRSQWAVLTRKHTKVVVQYETVVPMFQRYC

SEQ ID NO: 234672 - protein, 42 aa, Glycine max
  unsure (1)..(42): unsure at all Xaa locations
  Clone ID: PAT_MRT3847_53937C.1.pep
QHTIVSKTILLWHNLYHPSITSXPSYQHPREYIRNVIHNLQT

SEQ ID NO: 234673 - protein, 67 aa, Glycine max
  unsure (1)..(67): unsure at all Xaa locations
  Clone ID: PAT_MRT3847_53938C.1.pep
HSEDFYILLWDATARTXIQTGRLQHDMFWILAHHPEMNLLAXSHDSDMIVFNLARERPAFDVSGDSL

SEQ ID NO: 234674 - protein, 132 aa, Glycine max
  Clone ID: PAT_MRT3847_53939C.1.pep
MASARVFGAIAGRAFMAAASKSSAKKKPVPSGGAAAKAAVKKPDAPRTTNCGIQKVVPVSSELGDFLGAPQVSRTDAVKKVWAYIKLQNLQNPANKKEIFCDEKLKTIFEGKDKVGFTEIAKLLSSHFVKSG

SEQ ID NO: 234675 - protein, 323 aa, Glycine max
  unsure (1)..(323): unsure at all Xaa locations
  Clone ID: PAT_MRT3847_5393C.1.pep
MIEINKLLNFALPPLSLIVIFIFTPPLLLVKLLMCVKKFLYTENVAGKVVLITGAASGIGEQVAYEYARRGAKLSLVDIRKDKLVAVADKARSLGSPDVTIIGADVSKVQDCNRFVDETVNHFGRLDHLVNNAGISRKSVGVEDWLDVSEFTPIMDINFWGAVYGTLYAIPHLKXNKGRIIVIASGCGWFPLPRISIYNASKAAVINFFETLRMELGWDIGITIATPGFVKTDLTLRAMEFEPTVGRIPMGSACECAIAIVDSACRGDMYVTNPSWVKVLLPWKLLCPELVDWACCLVFGVSQNSSSMKGNLHVSRIPELKLE

SEQ ID NO: 234676 - protein, 132 aa, Glycine max
  Clone ID: PAT_MRT3847_53940C.1.pep
MAPARVFGAIAGRAFMAAAAKSAAKKKPAPSSGAAAKAAVKKTAAPRTTNSGIQKVVPVSSELGDFLGAPQVSRTEAVKKVWAYIKLQNLQNPANKKEIFCDEKLKTIFEGKDKVGFTKIAKLLSNHFVKSV

SEQ ID NO: 234677 - protein, 57 aa, Glycine max
  Clone ID: PAT_MRT3847_53941C.1.pep
SHSAFLIYKIQHILKRSNIIITHYQMIFSNLKLYIHVHYRLLKITEHQSPFEKLKKI

SEQ ID NO: 234678 - protein, 71 aa, Glycine max
  Clone ID: PAT_MRT3847_53942C.1.pep
VIVYFYTDILYSLFKCTDCILSVFVFFALIIIELNWTSNIMYVCRGSTSSREKLINFARFWRPFCRLLAAV

SEQ ID NO: 234679 - protein, 34 aa, Glycine max
  Clone ID: PAT_MRT3847_53943C.1.pep
LKCLNCSELGSTTADTDTLHECDIVYMINSRLFF

SEQ ID NO: 234680 - protein, 244 aa, Glycine max
  Clone ID: PAT_MRT3847_53944C.1.pep
MIDGANSNLGSGNSCSQPGVPNLSFFSTRPQRRCGAVQFSLSSFSNGTDSIISDDNLDLQEVISKGSLDFDEWTLLISEIEKLYPDDAEKICEVYNHFLCKFPLCHGYWRKYAAHMTCLCTTDKVVEVFEKAVLAATYSVGMWVDYCSFGMSAFEDPSDIRSFKKLLTFLEEGIASLELQSESCFDGEIPMTTCYKDDEIYCIINDIMDSSVGLTSSIALKRYRVIGELLYHKACEVDSKINPF

SEQ ID NO: 234681 - protein, 88 aa, Glycine max
  unsure (1)..(88): unsure at all Xaa locations
  Clone ID: PAT_MRT3847_53945C.1.pep
GEAGDAYRFLHEXDMERGFSWSGNPVGRYRGKRMRIDYFLVSEKLKERIAACEMRGHGIELEGFYGSDHCPVTLELSPSSNSQNEDPI

SEQ ID NO: 234682 - protein, 69 aa, Glycine max
  unsure (1)..(69): unsure at all Xaa locations
  Clone ID: PAT_MRT3847_53946C.1.pep
WTEPNGGQNRIEGVKLNVPPLKGRSXPDAYLDRERKIEHVFSCNDYTEEQKVKLATVEFSHYALVWWKR

SEQ ID NO: 234683 - protein, 162 aa, Glycine max
  Clone ID: PAT_MRT3847_53947C.1.pep
MQTMLRAKQITALSSSARTFLIGGSRCNAADGSSCSCTEDEICVSRRQHIKNHVLPAQKPSSLASKATSEVDETLVSENSVNGPACCKAKGVDQSSCIQHIRSASSPACKSDSVTYACDIDGVQEHVEHLSALNSDQLYRASIAAINCLSDLAKYKFSLSNG

SEQ ID NO: 234684 - protein, 86 aa, Glycine max
  Clone ID: PAT_MRT3847_53948C.1.pep
QVEKACFGKKSFRAAQIRAGPPGLGGEPKNFVNKKIWDPNGTGSSPGGSLSKLCKGYVFLNKSFNEKGPFKVLLSLKVKAGFFFLV

SEQ ID NO: 234685 - protein, 64 aa, Glycine max
  Clone ID: PAT_MRT3847_53949C.1.pep
PVGRYRGKRMRIDYFLVSEKLKERIAACEMRGHGIELEGFYGSDHCPVTLELSPSSNSQNEDPI

SEQ ID NO: 234686 - protein, 63 aa, Glycine max
  unsure (1)..(63): unsure at all Xaa locations
  Clone ID: PAT_MRT3847_5394C.1.pep
VERLEWSXGWLNPEYISXSKXRGXCCPSNXPIYIXYSXNDSXIXFYXSXLXXXSLXLCCAHQK

SEQ ID NO: 234687 - protein, 77 aa, Glycine max
  Clone ID: PAT_MRT3847_53950C.1.pep
RKVVGPRKSAAINLMGGAVRGAHGKNIGVKGSEGLVQGGLLCGGKDFRLSYVGKISSSVRLGSCRGRALRPYLFLCR

SEQ ID NO: 234688 - protein, 91 aa, Glycine max
  unsure (1)..(91): unsure at all Xaa locations
  Clone ID: PAT_MRT3847_53951C.1.pep
CSLLDPLFLQHLTNNSPHEVFHSQSTMLLLTFLVQIPYYIYXKGGPMARWPRARSVNLMPSITLTISNTLYILITLYHSTLIFLVMHCVMV

SEQ ID NO: 234689 - protein, 77 aa, Glycine max
  Clone ID: PAT_MRT3847_53952C.1.pep
IMKYTTSSHAMSNMISMLSHFQLLFHSFSESTSSTTSSSCTKKKKTSSSDLFIEKHDQILRCENQRCFPSTWDFLFT

SEQ ID NO: 234690 - protein, 86 aa, Glycine max
  Clone ID: PAT_MRT3847_53953C.1.pep
LIIKKPLSPPKADLNSPGTNRNWLDFWFGSFPTKQGPFSFYQREALGYLQRVNGSRWVGLLPGKTSSEKMILLVAPNMLVRFKITL

SEQ ID NO: 234691 - protein, 49 aa, Glycine max
  unsure (1)..(49): unsure at all Xaa locations
  Clone ID: PAT_MRT3847_53954C.1.pep
XXQKPPXAHXPRSDRXQTEIPXAIGIXCRRSQANSRISXLXXXLXIXXV

SEQ ID NO: 234692 - protein, 370 aa, Glycine max
  Clone ID: PAT_MRT3847_53955C.1.pep
MAKKSQLRTQKNNVTTNDDNNLNVTNTVTTKVKRTRRSVPRDSPPQRSSIYRGVTRHRWTGRYEAHLWDKHCWNESQNKKGRQVYLGAYDNEEAAAHAYDLAALKYWGQDTILNFPLSNYLNELKEMEGQSREEYIGSLRRKSSGFSRGISKYRGVARHHHNGRWEARIGKVFGNKYLYLGTYATQEEAATAYDLAAIEYRGLNAVTNFDLSRYIKWLKPNNNTNNVIDDQISINLTNINNNNNCTNSFTPSPDQEQEASFFHNKDSLNNTIVEEVTLVPHQPRPASATSALELLLQSSKFKEMMEMTSVANLSSTQMESELPQCTFPDHIQTYFEYEDSNRYEEGDDLMFKFNEFSSIVPFYQCDEFES

SEQ ID NO: 234693 - protein, 82 aa, Glycine max
  Clone ID: PAT_MRT3847_53956C.1.pep
KKKIEAPIEPAFQWFATTPLPKADDFWAKMKELESFCIPFFAKMFQGGAGPPMGGAGAGAPQDDYAAPFGGRGAGPQIEEVG

SEQ ID NO: 234694 - protein, 51 aa, Glycine max
  unsure (1)..(51): unsure at all Xaa locations
  Clone ID: PAT_MRT3847_53957C.1.pep
LNHSLCFRDSLLNVQHLNIQHLRSPLIXLWKNKFVPITFPETLAYTHRSSC

SEQ ID NO: 234695 - protein, 41 aa, Glycine max
  Clone ID: PAT_MRT3847_53958C.1.pep
DQHKGFLEHLPLEFPESVFPLEISISILADSWASPDCSPPA

SEQ ID NO: 234696 - protein, 78 aa, Glycine max
  Clone ID: PAT_MRT3847_53959C.1.pep
YSVPSRSVVSELQELNASIKGSVSFNPFPTATTTVATGSTAHRIHHPLISSTFKVMNCNIKLCRRQSNLVAWRERVML

SEQ ID NO: 234697 - protein, 74 aa, Glycine max
  unsure (1)..(74): unsure at all Xaa locations
  Clone ID: PAT_MRT3847_5395C.1.pep
LGSMYLSAGGMLLFELSFAFSAGPVTCLIMSEILPSNIRSKAMAICLAVHXVINFFWGLSYMLLLELIGAHTLY

SEQ ID NO: 234698 - protein, 48 aa, Glycine max
  unsure (1)..(48): unsure at all Xaa locations
  Clone ID: PAT_MRT3847_53960C.1.pep
PFDLNIKTLEEFFLHTHIYSTLTSFTFFSILSLXLLSSSRILLDPNSY

SEQ ID NO: 234699 - protein, 40 aa, Glycine max
  unsure (1)..(40): unsure at all Xaa locations
  Clone ID: PAT_MRT3847_53961C.1.pep
VGIXGGVVLSVFLGEDEHEVAGADVDRETEDQSQREKQPL

SEQ ID NO: 234700 - protein, 109 aa, Glycine max
  Clone ID: PAT_MRT3847_53962C.1.pep
GYYSTASLDHMLTSHIAFSGRCSQLTRFASSNSSKMMLSTNYRLFTCAIPLTSHTHKGRSACNQHQQQLYKSNIHYHFIFQAVNNKDPCTYVTSQKKYKENLMVPELEP

SEQ ID NO: 234701 - protein, 95 aa, Glycine max
  unsure (1)..(95): unsure at all Xaa locations
  Clone ID: PAT_MRT3847_53963C.1.pep
GSFDFSPDWAYTGVXNKVLIVGTFLGSKKPSSETKWGCMFGEIEVSAEVLADNVIRCQTPLHSPGRVPFYITCINIVACIEVREFEFDEKSKPNF

SEQ ID NO: 234702 - protein, 76 aa, Glycine max
  Clone ID: PAT_MRT3847_53964C.1.pep
MLRFKLKGELILYDYKSPTDEERKKPLTQEQLYITRQKGTDRALTGENKTTKTPQIYQWICKNTAILEPSTTYNRG

SEQ ID NO: 234703 - protein, 41 aa, Glycine max
  Clone ID: PAT_MRT3847_53965C.1.pep
YADDGQFGDGYVEDFNIIKAFYPTRGKGEINGNSKKKKTLE

SEQ ID NO: 234704 - protein, 63 aa, Glycine max
  Clone ID: PAT_MRT3847_53966C.1.pep
LPRGLSMRALPERGLTDKLVGDQKKVSGWFNNVKVVDDATYSSEGYKLDVLSMDRIRGGDSLM

SEQ ID NO: 234705 - protein, 59 aa, Glycine max
  Clone ID: PAT_MRT3847_53967C.1.pep
PRVRLCVRKKKKKKKKKKKKKKKKKKKKKKKKKKKKKKKKKKKKKKGGGRFKEPKFTYG

SEQ ID NO: 234706 - protein, 129 aa, Glycine max
  Clone ID: PAT_MRT3847_53968C.1.pep
FFSEASGSNKVLQMESQLENTWPSMSTRVASFSTSKSSNDSLLHSDYPRHSFLSGEYVSGEHVKEEGQPLRPFFNEWPKSRESWSGLEDERSNQTAFSTTQLSISIPMSSNFSATSSQSPHGEDEIQFR

SEQ ID NO: 234707 - protein, 191 aa, Glycine max
  Clone ID: PAT_MRT3847_53969C.1.pep
NLFLLTMHSHIERILWSEDQISRRVFELAAEISDDFGGHSPAPVVVGVATGAFLFLADLVRKIDLSIAVDFVRVESYGSGTVSNGAPTISFDLKVDVNSRHVIVVEDIVDTGHTLSKVIEHLKSKGASSVSVCTFLDKPARRKVHFQLVGEGKYYRGFECPNYFVVGYGLDFAELYRNLPYIGVLKPELYK

SEQ ID NO: 234708 - protein, 108 aa, Glycine max
  Clone ID: PAT_MRT3847_5396C.1.pep
TTSYFTSRATAAIHHICQKCMAAKRLPILSLLFITLTLHTSCINVHASVNNPNLTLRPTTYVIKSSCTAMRYPATCVHTLSRHSITMRQIEQQLAFKVHFVIHVNTLL

SEQ ID NO: 234709 - protein, 109 aa, Glycine max
  Clone ID: PAT_MRT3847_53970C.1.pep
PTHTTTDDLQSKPTHKLGGVAIAKKPAMDAFTYAHDQNSFTIFNPPYSWYPKKNINYHIVRLMTLFHLTNNPSINTAASEKETPPVTHAHTCMLFIVLLKPDILVYECL

SEQ ID NO: 234710 - protein, 94 aa, Glycine max
  Clone ID: PAT_MRT3847_53971C.1.pep
RGGVPLAGRKLRVYKDVAKRIIGGKHRLVTGHKMVSTGHFFFAPSLCGTRSAQASHTKGAGVILFWLPRYFFVLKAFFFQQIKVKSPFDNILTC

SEQ ID NO: 234711 - protein, 61 aa, Glycine max
  unsure (1)..(61): unsure at all Xaa locations
  Clone ID: PAT_MRT3847_53972C.1.pep
KKKNKKNKNXKKKNKKKKKRERKIKKNNEKTKNKKKKKIKRGTLLKNPNYRTLAYNKKLFY

SEQ ID NO: 234712 - protein, 72 aa, Glycine max
  Clone ID: PAT_MRT3847_53973C.1.pep
YAKCSCHQPKGASPAPRVSGFGSSGLGFDRWLLVARACPDGQDVHLPVELGACCVIYGLVTGQYARVHATHI

SEQ ID NO: 234713 - protein, 122 aa, Glycine max
  Clone ID: PAT_MRT3847_53974C.1.pep
VGGVFFSAPLSAELRFKSTVRSFPVRKEDKVPVIRGTSKGSQGKVTPVPPRKWVFPFGGITPEKVNGSPVPVGFPPPKVVLPKLKLAKARKALFVSKAKGCPPPHKEKGPKFPPQNFMQPVV

SEQ ID NO: 234714 - protein, 402 aa, Glycine max
  unsure (1)..(402): unsure at all Xaa locations
  Clone ID: PAT_MRT3847_53975C.1.pep
MVRDDLCITVPSFFRCPISLDVMKSPVSLCTGVTYDRSSIQRWLDNGNNTCPATMQVLQTTDFVPNRTLQRLIQIWSDSVTHRVDSPDSPTSTESQSLLSKDHILVAISDLHTRSDNRFNSLSKIARFAQDSEENRDFLVRTECFVPVLVGFLDNVNGGVEFLEQVVTALDLVVSKMEDREGMKNLILKRQGEGEKQSVDSLLLVLQQGSHASKIASARVLKSVAVDAESKLLLAEKEGLVSELLNLITPEQHPDLXKMKLVRLGAVKVFSNLLSAPGLSVSVKEKVLKLVETVSSTKEGRSEICEDSACVSAIVDKVLKVSSVATEHAVTTLWSVCYLFRDQKAQEAVTKANGLTKILLLMQSNCSPQVRQMSSDLLKIFRVNSKSCLSSYDTKTTHIMPF

SEQ ID NO: 234715 - protein, 261 aa, Glycine max
  unsure (1)..(261): unsure at all Xaa locations
  Clone ID: PAT_MRT3847_53976C.1.pep
MSGSRRCNGDCEGDQNPATRRVIRSQFLQLKNFINEKRDDLMNTESDKFDTILDEFDKLHVQVEKPREQVADAEALLDLTRTLVGSVKSLTNEGVTPSQFVSSLLIRYAHAQHSIDWHQLGLAASPIFLSFHGSSTMLGPMDNQFKQRKTGVPRNRNPRQIATTRPQQVDEAVTEEKTDTDKNMATMFHILRRTKRVPLENLILNRESFAQSVENLFALSFLVKDGRAEIXFDENRLHYVSPKNAPAANLXIIKGSFLYSF

SEQ ID NO: 234716 - protein, 199 aa, Glycine max
  Clone ID: PAT_MRT3847_53977C.1.pep
VLKSLAVDAESKLLLAEKDGLLSELLNLITPEKDPDLMENCLSCLVSLSTPRRSKMKLVRLGAVKVFSNLLSTPSLSVSVTEKVLKLVETVSSTKEGRSEICEDSACVSAIVNKVLKVSSVATEHAVTTLWSVCYLFRDQKAQEAVTKANGLTKILLLMQSNCSPQVRQMSSDLLKIFRVNSKSCLSSYDTKTTHIMPF

SEQ ID NO: 234717 - protein, 105 aa, Glycine max
  unsure (1)..(105): unsure at all Xaa locations
  Clone ID: PAT_MRT3847_53978C.1.pep
NPHAQPHPKRHRTRTREEKKRKEERPTTRTTKEPTRNPGEKTRETPHTQGGQSGNQNGAKHREATSEEHGTDHXTGKHSGDPEHQXERNXANHNEASGGRHAPRA

SEQ ID NO: 234718 - protein, 108 aa, Glycine max
  unsure (1)..(108): unsure at all Xaa locations
  Clone ID: PAT_MRT3847_53979C.1.pep
LTRNVGRASVTPLFFSEPERXQPLRWLINPQPATPRMQDPFGSGPLGYGVRACLGRGIAEVEMQLLLARLLHKYXLVLAPETGEKKSAARIALVPNHKEGLPYLQRQC

SEQ ID NO: 234719 - protein, 99 aa, Glycine max
  Clone ID: PAT_MRT3847_5397C.1.pep
WLFSEEQKKNPRPKVKNDRVSIYAFRTSSVFREHVWCSKRSLTQINRGKIGAKLQHERRRFGTCIGAFTSWGFQRGPGGIARRRICKIEGKENLTLNLN

SEQ ID NO: 234720 - protein, 69 aa, Glycine max
  Clone ID: PAT_MRT3847_53980C.1.pep
PTRPCLSALSCFHSSWGVFKSSQVFSLHWLLQKLTPQHAKWCRAESSALTALTTMTYLVCANSNALYIY

SEQ ID NO: 234721 - protein, 68 aa, Glycine max
  unsure (1)..(68): unsure at all Xaa locations
  Clone ID: PAT_MRT3847_53981C.1.pep
SYLLIVVDKKKKKKKKKKKKKKKKXXQKAGDLLDPVFNPGLSPAPVPACPQVSPIRARLTPGHSLCPM

SEQ ID NO: 234722 - protein, 147 aa, Glycine max
  Clone ID: PAT_MRT3847_53982C.1.pep
VRRFAQYKWLATRGVNEEAILLSLPLDLRREIQHHLCLSLVRRVPFFSQMDDQLLDAICERLASSLSTEGTYLFREGDPVDEMLFIIRGQLESSTTNGGRSGFFNSISLRPGDFCGEELLTWALMPNSNLNLPSSTRTVKALTEVEA

SEQ ID NO: 234723 - protein, 202 aa, Glycine max
  unsure (1)..(202): unsure at all Xaa locations
  Clone ID: PAT_MRT3847_53983C.1.pep
MEESSYTGLPTSHLLGSVPAVITEENNATKHVATGANMQTFPPNNGGDRGPGHQTLGSPTEAFEQQPANNWRGIFSMSSYSEYFNVDTDVVLIRLISSLNPVAADFFSKIDANPDLYGLIWISTTLVFVLASLGNLATFLMQKHADNSTSWSFDVSYVNVAACSIYGYAIVVPLAYYFFLQYMGSNASLIRXWGLWGYSLTI

SEQ ID NO: 234724 - protein, 77 aa, Glycine max
  Clone ID: PAT_MRT3847_53984C.1.pep
TVDQLGTSSQSCHGLYVYRPAYHVIDTSTDGRASTGTTPCYSETHPTLATNMHLWLGLKTASIHGKPATVDRIYSMR

SEQ ID NO: 234725 - protein, 66 aa, Glycine max
  Clone ID: PAT_MRT3847_53985C.1.pep
LKGKNLKILVILVRSFLFPGTFPQTLARLFFTFSLDPHIHYYFHNSVALWFGNFLSLVFFPSLIYD

SEQ ID NO: 234726 - protein, 90 aa, Glycine max
  Clone ID: PAT_MRT3847_53986C.1.pep
RTHGCYLHHYLQLALLLLRWLKAEVELLVQSSLHSTLLLTYEEPIDPPLTVEHTQLLIDGQFGDADTGITFPQLDPKTGDVITHVADDDH

SEQ ID NO: 234727 - protein, 85 aa, Glycine max
  Clone ID: PAT_MRT3847_53987C.1.pep
VFAPTKYEGHLCKCVSAPQRLASVRPAGPQNGHCCALARPFYAGDFVRRERTRMFSFVGEKTENLLKLPPPLCRLRAGVTTRGKT

SEQ ID NO: 234728 - protein, 72 aa, Glycine max
  Clone ID: PAT_MRT3847_53988C.1.pep
LIYFLSAADDQLLHEETNRIFRLLCGKVTGREDARIDVPLFRGTPSGKQCNLLCTLFHQVLSYEKQNISCGI

SEQ ID NO: 234729 - protein, 140 aa, Glycine max
  Clone ID: PAT_MRT3847_53989C.1.pep
HPNLIKCQRERTRRFRQWAFTSLGHVLHFLKTKRVKDINEEDIKYLHGLWKELVKSSGFDLAWLEPYVQLALGSRAYMERANQLKKLKDKVVALEIKMKRLRGELAAAEGEFEVARRGLSEVRRGFNEMDLNAAIGYAMF

SEQ ID NO: 234730 - protein, 116 aa, Glycine max
  Clone ID: PAT_MRT3847_5398C.1.pep
KTTAFRFTPLGLAPFSENTCGVRKEAEGIARRIQQASIQHQIETKREKLKKRNFAVTLTQINRGKIGAKLQHERRRFGTCIGAFTSWGFQRGPGGIVRRRISCKIEGKENLTLNLN

SEQ ID NO: 234731 - protein, 119 aa, Glycine max
  Clone ID: PAT_MRT3847_53990C.1.pep
FPPKGFPLFNFPPPPNPPSPEPSPFFSHPLAGPGLPDPGINPPPPRSTPNPRLKPRIRGRGFPPPRRNRGPAFFSAPGGPHGFGMGFSPTSKNPIRVSTGWFPAPTLFCFFHPRWGWLF

SEQ ID NO: 234732 - protein, 40 aa, Glycine max
  Clone ID: PAT_MRT3847_53991C.1.pep
GSSLLYSPPEPLFKKSRTQGQQMNLSPLKRFIIGIVGTSP

SEQ ID NO: 234733 - protein, 55 aa, Glycine max
  Clone ID: PAT_MRT3847_53992C.1.pep
SFDGQSKPPLCIKRGFHVEHDHSVLQSTFISLLYFYKKKNATKITIKSLTLASSR

SEQ ID NO: 234734 - protein, 207 aa, Glycine max
  Clone ID: PAT_MRT3847_53993C.1.pep
EKTKLARALLQSQQLSCSALFCYSNPLIKPTYVVAMKRGREESKLDMANCLMLLTKVGESETNYPISKGSDIGDFKCKTCNRRFSSFQALGGHRASHKKPKLMVTDLSCHQELPNPTMKQQPRMHPCPICGLEFAIGQALGGHMRKHRTAINDGLLCGKPSSSLSILKESSKDGDQKLNLRLDLNLTPLEEDDLKLNLRTPVLNCFI

SEQ ID NO: 234735 - protein, 226 aa, Glycine max
  unsure (1)..(226): unsure at all Xaa locations
  Clone ID: PAT_MRT3847_53994C.1.pep
MPKRDRTKKTAKATESVPEPQPQLQPPQFIDLEIQAMERQIGAIRAVRDVEIEHLLTELRFLRSRFSSEELRKPVLQVFEETLPNLAVVNDERSKKLEVKWRETEGCNDGVDLDASLLQRVSMASIXASLGLNFPPLEGRIELLLGLMDHALQGTFAWGGXSDTQTLAVQEGLQTPGVTSQRLSVGMTPKTLRLPKPGEMLLSVHGSPLGVYKDNNMEAIHESEEG

SEQ ID NO: 234736 - protein, 277 aa, Glycine max
  Clone ID: PAT_MRT3847_53995C.1.pep
VPFVCAQVEMALGRFENAVAAAEKASMLDYGNVEVGRIVNVVKMVARARSRGNELFSSGMFSEACSAYGEGLKYDNSNHVLYCNRAICWSKLGLWEQSVQDCSQALNIQPNYTKALFRRAASNTKLHGRLERWSEVVKDYQALKRELPNDNEVAESLRQAQLALEKSRQMVYGTTFGVEVQHICSFPNFKAALASAGISVVYFKEASNELCEELSPFINTLCVRYPSVKFIKVDVEECLAIAKAESIRSVPTFKIYKNGEKVKDMIRPTHQLLEDSV

SEQ ID NO: 234737 - protein, 121 aa, Glycine max
  Clone ID: PAT_MRT3847_53996C.1.pep
MGLKTKITLLIIPLAMLLFVSSEVSARDFQEGNVVQEANNGGDAKLFGGGSFFPGGGIGGGAGYFPGGGIGGGGGGGFFPGGGIGGGGFLPGRGFFNPRFCFRGCCFGNPFRGCLRCCPIF

SEQ ID NO: 234738 - protein, 83 aa, Glycine max
  Clone ID: PAT_MRT3847_53997C.1.pep
IFSPAKVITGSGNKESWPCRIAATHRIPTLRFLERLVSHPSCKHHLPSLFFLLARTTTTHWYTTYNVKSSITNLTVGLQCRVR

SEQ ID NO: 234739 - protein, 60 aa, Glycine max
  unsure (1)..(60): unsure at all Xaa locations
  Clone ID: PAT_MRT3847_53998C.1.pep
NGPTSHTLMRALEGGTILINCFDGFDASIPFGRYKMSGIGREKGIYXANNYLEVKLGFHQ

SEQ ID NO: 234740 - protein, 63 aa, Glycine max
  Clone ID: PAT_MRT3847_53999C.1.pep
QVKLISDNLKDVKKGELLVACRKPVYIVYTVLDGGSISILRQGLPEALALSDGIPDRTYVMDD

SEQ ID NO: 234741 - protein, 60 aa, Glycine max
  Clone ID: PAT_MRT3847_5399C.1.pep
ANPAMASRQSTRPSPGKKPALASNAPSNKVAPAKKAPFKSVNPNSVKSPTKKRTANRGGS

SEQ ID NO: 234742 - protein, 130 aa, Glycine max
  Clone ID: PAT_MRT3847_539C.1.pep
SGWVSVLPHVDSILVTFGDIAQVWSNGKLKKVRGRPMATVGDENGSRCITMSLLITLPTDSRVAPLLPKVTCNKDQKEEEIEGEEEENNDGGDEELEKRVFNSFDFEDYAWRVYHERILFKDPLDRYRVV

SEQ ID NO: 234743 - protein, 88 aa, Glycine max
  Clone ID: PAT_MRT3847_53C.1.pep
PYLCYAFNLHRAGIWLAIAAIFLSFFHITSIWVVSNGYSQSFYPIFSVLSPASRVSCLLSPPPPPPPPPPPPPKDGGRHTVMTGNLHW

SEQ ID NO: 234744 - protein, 125 aa, Glycine max
  unsure (1)..(125): unsure at all Xaa locations
  Clone ID: PAT_MRT3847_54000C.1.pep
QVIAEMTNGGGDRAVXCTGSIQXMVSAFECVHDGWGLAVLVGVPSKDDAFKTAPINFLNERTLKGTFYGNYKPRTDLPSVVEKYMSGELEVDKFITHTVPFSEINKAFDLMLKGQSIRCIIRMQE

SEQ ID NO: 234745 - protein, 90 aa, Glycine max
  unsure (1)..(90): unsure at all Xaa locations
  Clone ID: PAT_MRT3847_54001C.1.pep
HSXXKQXKGNGGYYKKDRNHDHGGDRAQGHGPGRELRPRQDEKQGRQRPGGQGRHVAHRGGADDHGRGEAREAREGEQRARGEGEALPDL

SEQ ID NO: 234746 - protein, 221 aa, Glycine max
  Clone ID: PAT_MRT3847_54002C.1.pep
PKEMEKGGVCTPNVVTYTSVIQSFCKRGQWKEALDILDRMKAFGCHANHVTVFTLVESLCADGHVEQGYGLFDKFVVEHCVSYGDFYSSLVISLIRIKKLEEAEKLFKEMLAGDVRLGTLASSLLLKELCMKDRILDGFYLLEAIENKGCLSFIDSDIYSILLIGLCQRSRLKEATKLAKIMLKKSVLLQPPHKDAAIDILIKSGEKDLVNQLTGIHKKGL

SEQ ID NO: 234747 - protein, 149 aa, Glycine max
  Clone ID: PAT_MRT3847_54003C.1.pep
IYNLLKHPSKLNNYSLLIFLLIDNCTLPLAFFPLFFLLLLLAPTPFYSGFSFTHTRNLCCGQLHRSEKIIVVNLDYYGIVSNKSKNTILFLLPSPCPSSWISWTVPPSPFSLSLMPTLQPTTTSPRLLLPTCFATNPPSSSPFSPMTRR

SEQ ID NO: 234748 - protein, 65 aa, Glycine max
  Clone ID: PAT_MRT3847_54004C.1.pep
MASSFYFEIALMQPTKVFMATRILKYTQSILKANGLEPAAGKLICSVKSDLKDYAQKCVNATKIA

SEQ ID NO: 234749 - protein, 53 aa, Glycine max
  Clone ID: PAT_MRT3847_54005C.1.pep
LFSFSNHCGGRCYLLNLHAGKVILYYWGLIFTNPQQDSWIIYVLEKSHSNCVL

SEQ ID NO: 234750 - protein, 88 aa, Glycine max
  Clone ID: PAT_MRT3847_54006C.1.pep
LRFPPFAFSSLAFCRSPFLVPGSLSLGFAARPFVLLFLFVLFVRCCVPLGSSQRLARLPPSPPFSLLLSLASVPPLLPPLRRFKGRFF

SEQ ID NO: 234751 - protein, 78 aa, Glycine max
  Clone ID: PAT_MRT3847_54007C.1.pep
GAKNAILMNMPNAFLSMWRYFGGDPRFGGSKMTSPYLKMSGFFFIAFGNLACYPLKFGGFSHKLVPIGEDQGKSVFEI

SEQ ID NO: 234752 - protein, 59 aa, Glycine max
  unsure (1)..(59): unsure at all Xaa locations
  Clone ID: PAT_MRT3847_54008C.1.pep
SILYLHTTIVTDASXAYQSRPLHPMFTPHTSLIQLNLTSPFKKNTSNATNTPQDTSLPN

SEQ ID NO: 234753 - protein, 161 aa, Glycine max
  Clone ID: PAT_MRT3847_54009C.1.pep
FFFWFAYYPVSKGKNDNNECVSHASGVMKFRLDWTNTWTSSIPGFSATSSKRCCSSEGKQPHYDLYTRLLCAYLRAFVPSYDLIAHQPYRTSILHYGSGYDGSVAARAEFVVNALIHFWLVDNDFSPLPASVCRSLGVSFAVGETPPPPGLGEVVRLFVRY

SEQ ID NO: 234754 - protein, 491 aa, Glycine max
  Clone ID: PAT_MRT3847_5400C.1.pep
MGIQCSRLIPCCVDSQVKASVIETPDAEIEDSSEVSNWPTFREYTLEQLKNATSGFAVENIVSEHGEKAPNVVYKGKLENQMRIAVKRFNRNAWPDARQFLEEARSVGQLRNQRLANLLGCCCEGEERLLVAEYMPNETLAKHLFHWETQPMKWAMRLRVVLHLAQALEYCTSKGRALYHDLNAYRVLFDEDGNPRLSSFGLMKNSRDGKSYSTNLAFTPPEYLRTGRVTPESVIYSFGTLLLDLLSGKHIPPSHALDVIRGRNLQMLTDSCLEGQFSDDDGTELVRLASRCLQYEPRERPNPKSLVVALAPLQKETEVPSHVLMGIQHSTTFASLSPLGEACSRKDLTAIQEVLESIGYKDDEGVANELSFHMWTDQMQDTLNCKKKGDVAFRQKDFRLAIECYSQFIDAGTMVSPTVYARRSLCYLISDMPQESLNDAIQAQIVSPVWHIASYLQSVALTGLGMENEAQAALKEGTTMESKRNATPKQK

SEQ ID NO: 234755 - protein, 75 aa, Glycine max
  Clone ID: PAT_MRT3847_54010C.1.pep
FFFFFFFFFFFISFLGPLYLKDKKNTCPHQENPKAKRTHAHPTKSCSHVQRCKGGQIKAHLENQYGGTEGTTCTT

SEQ ID NO: 234756 - protein, 68 aa, Glycine max
  Clone ID: PAT_MRT3847_54012C.1.pep
FSPHHFQNYYTKNRNRSMTATESDSPLYTRSATWRLKTTTRLRRPNTEPNHPSNALYTIKSLMAQHSC

SEQ ID NO: 234757 - protein, 74 aa, Glycine max
  Clone ID: PAT_MRT3847_54013C.1.pep
MSHRKFEHPRHGSLGFLPRKRAARHRGKVKAFPKDDPSKAPKLTAFLGYKAGMTHIVREVEKPGSSENHYSFAN

SEQ ID NO: 234758 - protein, 123 aa, Glycine max
  unsure (1)..(123): unsure at all Xaa locations
  Clone ID: PAT_MRT3847_54014C.1.pep
RALGAAAVVALITQEPLFYGKNGYGNGSASSSSSSSWISXALALPAAAYMCQDQEAHAPQLERTLIAIKPDTEQKGLISEIISRLEQKGCTLVGDKVVIPKKEFAQTHYHDLKERPSYHGLCD

SEQ ID NO: 234759 - protein, 123 aa, Glycine max
  Clone ID: PAT_MRT3847_54015C.1.pep
FYSVRRPYYNGGSKEMRGGGNRLPLNANGFDGKHGTGADRGTTYAYLPEAALLALKDAIGKEREGLKEIRGPDPNYNGIWGSGAGIDGSQLSKRWPVGDMGFENGEEYTLAPENYMVRDSKVR

SEQ ID NO: 234760 - protein, 75 aa, Glycine max
  Clone ID: PAT_MRT3847_54016C.1.pep
CNKLPAMPGNRGFINNCHNEGFLARIMGFPSISLFPSYIERKDSWNLIVFLHQFKILYQPSGKKNINLFYRGPTQ

SEQ ID NO: 234761 - protein, 48 aa, Glycine max
  Clone ID: PAT_MRT3847_54017C.1.pep
FSILFNFIPFFVITCEIYTCTNIYIYDMIYLTICSSRNLFIAAKSKQN

SEQ ID NO: 234762 - protein, 96 aa, Glycine max
  unsure (1)..(96): unsure at all Xaa locations
  Clone ID: PAT_MRT3847_54018C.1.pep
RELSSLTWYHESVRLSKVSALSASLMVGQLAIRHSSGKMPFMNNLASYHTTPSLMIXPVMVMPKLIFLRRLGRHSHSEKEMPRYAAAPFCRLLAAV

SEQ ID NO: 234763 - protein, 68 aa, Glycine max
  Clone ID: PAT_MRT3847_54019C.1.pep
VNSINSRIYCQVNKLKKLDKNTNHFGFFFIWLVFNIFPFSVLFSNCIIISILCSLTTSSLDENVLPLR

SEQ ID NO: 234764 - protein, 294 aa, Glycine max
  Clone ID: PAT_MRT3847_5401C.1.pep
ICSDRFLDKAAILDENCSKEENRENPWIVSTVTQVEEVKMVIKLLPIWSTCILFWTIYSQMNTFTIEQATFMNRKVGSLVVPAGSLSAFLIITILLFTSLNEKLTVPLARKLTHNAQGLTSLQRVGIGLVFSSVAMAVAAIVEKERRANAVKNNTISAFWLVPQFFLVGAGEAFAYVGQLEFFIREAPERMKSMSTGLFLSTLSMGYFVSSLLVAIVDKASKKRWLRSNLNKGRLDYFYWLLAVLGLLNFILFLVLAMRHQYKVQHNIKPNDDAEKELVSANDVKVGVDGKEEA

SEQ ID NO: 234765 - protein, 52 aa, Glycine max
  Clone ID: PAT_MRT3847_54020C.1.pep
KNYQMKYKIYQNNFNVVNYKKKLITIIISPTLKSQVIKKLIIIIFNFKIIKQ

SEQ ID NO: 234766 - protein, 88 aa, Glycine max
  Clone ID: PAT_MRT3847_54021C.1.pep
CTHSQHTAMAPYRRNTNGCSPLGNQQNEITLFLTKCDCPAASATLYTTNPNPNPNPNPSSTPATTYSINPKRSKPLLCIGAFTFSPCA

SEQ ID NO: 234767 - protein, 44 aa, Glycine max
  Clone ID: PAT_MRT3847_54022C.1.pep
CIWYIWSVQPFKLLCRSDLIISRAYSLYPCLSLACNATGCQLAI

SEQ ID NO: 234768 - protein, 89 aa, Glycine max
  unsure (1)..(89): unsure at all Xaa locations
  Clone ID: PAT_MRT3847_54024C.1.pep
YLALEIYSRDHWSQSVRSLTLNVRKIFSDRDSAFFXGXDQRFSDEELKQEESDSKREALWMRLEEMAASKPRENSPLGAPNGKPSQAAG

SEQ ID NO: 234769 - protein, 81 aa, Glycine max
  unsure (1)..(81): unsure at all Xaa locations
  Clone ID: PAT_MRT3847_54025C.1.pep
MGHIKQSIVGVNGIRMHVAEKRQGPVVLFLHGFPEXLWYAWRDQYLSXLSSLGYRAVAPDLHGYCDTEAPTSIISYNCFHI

SEQ ID NO: 234770 - protein, 62 aa, Glycine max
  Clone ID: PAT_MRT3847_54026C.1.pep
CTLIQYALSIKIMDRPRKCYTNFQFEFNGVFSFASARYLFCLSLFFFLLCFGSYIHVAFVEG

SEQ ID NO: 234771 - protein, 64 aa, Glycine max
  unsure (1)..(64): unsure at all Xaa locations
  Clone ID: PAT_MRT3847_54027C.1.pep
MCVIGRWSEMRHAVTTTDSSCWQSVKPKFLDXVLEEEIGGVKCHFGPINALAFDPDGKSFSSGG

SEQ ID NO: 234772 - protein, 102 aa, Glycine max
  Clone ID: PAT_MRT3847_54028C.1.pep
MGTQPQQTFREEEEEEMQGHGTTMSGQSMSTSRSVGSPSSRSEQTMATPASDSTFLRLNHLDIHGDDAGSQGTVAKKKKRGQRAVGSDKSGRGLRQFSMKVC

SEQ ID NO: 234773 - protein, 165 aa, Glycine max
  Clone ID: PAT_MRT3847_54029C.1.pep
MGTQPQQTFWEEEDEEMQGHGTTISGQSMSTSRSLGSPSSRSEQTMATPASDSTFLRLNHLDIHGDDAGSQGTVAKKKKRGQRAVGGDKSGRGLRQFSMKVCEKVESKGRTTYNEVADELVAEFADPINGVSTPDQQQYDEKNIRRRVYDALNVLMAMDIISKDK

SEQ ID NO: 234774 - protein, 81 aa, Glycine max
  Clone ID: PAT_MRT3847_5402C.1.pep
RSMITRVLSMLKPLSIAVSIIALAPSRMHPQSLVVLQTLQMQRLDGFGFAFRFMCDICPVFRNALSKLSFTLYIRVDSQCN

SEQ ID NO: 234775 - protein, 71 aa, Glycine max
  unsure (1)..(71): unsure at all Xaa locations
  Clone ID: PAT_MRT3847_54030C.1.pep
PNQTLACPXXSNPRNQWFKSPKNHSPXFHPHSDAEIITPCSATNPHFIKIIXYVPNYDFYEIITPCPQLTH

SEQ ID NO: 234776 - protein, 88 aa, Glycine max
  Clone ID: PAT_MRT3847_54031C.1.pep
ARSQHTHAGTTEASLTDVTSLNFTDSRILTISLSYPPPTTVSRPSVFTALATFTTSFTVVWPLCPSLFSIWFYRMFILSYNPLYSYAM

SEQ ID NO: 234777 - protein, 313 aa, Glycine max
  unsure (1)..(313): unsure at all Xaa locations
  Clone ID: PAT_MRT3847_54032C.1.pep
MEESGSGGVWWCCSPLKMIVESLRIMSCNKVVFASIMLLTTLPLSTLVISQSISTHSLTSQIQHLEALAHFTSTRFEARHVCQESRHEALSLLRIKALFSLPSYLLSLAAALSSVHSTLLALHATATTTAAAALRHHSARLLATTIFVYAILFAFSPLPRVLAFLATSATARLLLLASASALEVYLMAVMSVALVVSVAEERVGWEAIRVPSPRVRGXSGFVLMEGGRFCGWVLSGLFVLGSSLIGSKLEHLMDGQDSIAVKDKASLIVSYGLLVLWSYVVITVFYCDCRKRHPIREHQADDDDLPQQQLSLM

SEQ ID NO: 234778 - protein, 61 aa, Glycine max
  Clone ID: PAT_MRT3847_54033C.1.pep
KCPDAENHPLLLVHRISDCGFQCTEPSNPTTAMTMMMSVLLEKESFISIKYDENGVASGEK

SEQ ID NO: 234779 - protein, 85 aa, Glycine max
  Clone ID: PAT_MRT3847_54034C.1.pep
KRIRRSLNLTRSPISDRRVFSKWTKNGIANDSRSLWPAQRVLFFPLRNRTQKSRKILRASWNQVTIAFVSGFKVRQPMIAVNHEN

SEQ ID NO: 234780 - protein, 77 aa, Glycine max
  Clone ID: PAT_MRT3847_54035C.1.pep
KWYPIIKNHYPQELGPMWKFKKLVSVHAAFVCNQSKCVRCFLLPHCGENAPPPGVIFCERGPPISQEREAYVVFEAR

SEQ ID NO: 234781 - protein, 147 aa, Glycine max
  Clone ID: PAT_MRT3847_54036C.1.pep
MPVEMDFIFVLLLLGCLCSFVLPDTQGDALFALKISLNASAHQLTDWNQNQVNPCTWSRVYCDSNNNVMQVSLAYMGFTGYLTPIIGVLKYLTALSLQGNGITGNIPKELGNLTSLSRLDLESNKLTGEIPSSLGILKASILTSSQN

SEQ ID NO: 234782 - protein, 124 aa, Glycine max
  Clone ID: PAT_MRT3847_54037C.1.pep
TRPEEEASHLFFDWPKTQPLWWESLSWIQTMGFFSINPRQHFMQQAIGTNGGKQYSRWKCWWVALTCSIWQHRNRNVFLNEPFNGSKLLEDAIFLIWSWLRGFEKDFVDSYTYWSSNLPVALRT

SEQ ID NO: 234783 - protein, 62 aa, Glycine max
  Clone ID: PAT_MRT3847_54038C.1.pep
SSCNFEVHFITNLCNFASQHEILSSSLYYLTQYSTEGNTFCFTLAKKLEVFASYYAIAKSHH

SEQ ID NO: 234784 - protein, 63 aa, Glycine max
  Clone ID: PAT_MRT3847_54039C.1.pep
MINTRVLLSINLYKFVELLKKKKKKKKKKKKKKKKKKKKKKKKKKKKKKKKKKKKKKGGAPHF

SEQ ID NO: 234785 - protein, 73 aa, Glycine max
  Clone ID: PAT_MRT3847_5403C.1.pep
SLNIIITKTFIGLNLIDYSKPTPEKFGLTQIKVIKLRWKLGPAFGNEIRSELIPHACFGRENNMLCQIKFFPC

SEQ ID NO: 234786 - protein, 48 aa, Glycine max
  Clone ID: PAT_MRT3847_54040C.1.pep
MCNKEFPSSPSGTRYRVPFPELPDKCIDRVSEEYVRHHVNHHPVYDNQ

SEQ ID NO: 234787 - protein, 175 aa, Glycine max
  Clone ID: PAT_MRT3847_54041C.1.pep
LNQLVPFKYDWAWQKYLDGCANHWMPQEVNMTADIALWKDPEGLTDDERRIVMRNLGFFSTADSLVANNLVLAVYRLITNPECRQYILRQAFEEAIHTHAYQYCIESLAMDEGEIFNMYHEIPSVAKKATWGLKYTRSISDPEFKTGTVETDKELLRNLIAYYCVLEGIFFYCGF

SEQ ID NO: 234788 - protein, 65 aa, Glycine max
  Clone ID: PAT_MRT3847_54042C.1.pep
TNACYSLLCSFKPWKLEELKLYYDGQGFMSMQITKSKADIIFYDAFGKVLHTWSISKDRNVAAWI

SEQ ID NO: 234789 - protein, 109 aa, Glycine max
  Clone ID: PAT_MRT3847_54043C.1.pep
PSKFGFLEATKGCWGPGTVKPPPLVGNSKSPGTCFNPPQYVFWARVPPSRGANQVLGEAFFFQGIFFVPKKLGVILGVKFFWAPPPSGKGFKSWGFFFRLKKKTGPYFF

SEQ ID NO: 234790 - protein, 335 aa, Glycine max
  Clone ID: PAT_MRT3847_54044C.1.pep
MASSLNQRMLFPLMFVIGMFCLMVTPSIAELPIFKHPPKKQQSLNILVLGDWGRKGTYNQSLVANQMGIVGEKLDIDFVISTGDNFYEDGLKGVDDPAFYQSFVDMYTVPSLQKTWYTVLGNHDYRGDVGAQLSSILKQKDSRWLCMRSFILDGEIVEFFFVDTTPFVEEYFTDPGEHTYDWEGVLPRLAYLSELLKDVDLALAQSKAKWKMVVGHHTINSAGHHGSTEELKQLLVPILEANDVDAYINGHDHCLQHIIDNNSGIHFITSGGGSKAWSGDVKPWKLEELKLYYDGQGFMSMQITKSTAHIIFYDAFGKVLHTWSISKDRNVAAWI

SEQ ID NO: 234791 - protein, 37 aa, Glycine max
  Clone ID: PAT_MRT3847_54045C.1.pep
AIRQRLWPLVQQGRQRTANLGAGAAQPLRDRAQALSD

SEQ ID NO: 234792 - protein, 64 aa, Glycine max
  unsure (1)..(64): unsure at all Xaa locations
  Clone ID: PAT_MRT3847_54046C.1.pep
FAMATVXRTPTFRPPLRRXPQSRETIGSRRVLTRHCGKLCPSASFLQVSVCCXRPXRRXVDXVX

SEQ ID NO: 234793 - protein, 134 aa, Glycine max
  unsure (1)..(134): unsure at all Xaa locations
  Clone ID: PAT_MRT3847_54047C.1.pep
MTSLQFHRFNPATDTSTAIANGVNCPKPPSTLRLLAKVGLSVPETVARHHAHPVGPNQCCSVVIQAIDAPVSAVWPVVRRFDNPQAYKHFVKSCHVVAAAGGGEDGIRVGALREVRVVSGIPAVSSTERXEILD

SEQ ID NO: 234794 - protein, 35 aa, Glycine max
  Clone ID: PAT_MRT3847_54048C.1.pep
PTRPRGTATDQIHCLFERDNSTYMRGHHDHHTRAE

SEQ ID NO: 234795 - protein, 71 aa, Glycine max
  unsure (1)..(71): unsure at all Xaa locations
  Clone ID: PAT_MRT3847_54049C.1.pep
SEVESAYHGPWHALGTMDDVLTIRRGILNSDHGLTKAVTXLTDALSHASVRDLAKPENAYTNKRMNLTALN

SEQ ID NO: 234796 - protein, 491 aa, Glycine max
  Clone ID: PAT_MRT3847_5404C.1.pep
MGIQCSRLIPCCVDSQVKASVIETPDAEIEDSSEASNWPTFREFTLEQLKNATSGFAVENIVSEHGEKAPNVVYKGKLENQMRIAVKRFNRNAWPDARQFLEESRSVGQLRNQRLANLLGCCCEGEERLLVAEYMPNETLAKHLFHWETQPMKWAMRLRVVLHLAQALEYCTSKGRALYHDLNAYRVLFDEDGNPRLSSFGLMKNSRDGKSYSTNLAFTPPEYLRTGRVTPESVIYSFGTLLLDLLSGKHIPPSHALDVIRGRNLQMLTDSCLEGQFSDDDGTELVRLASRCLQYEPRERPNPKSLVAALAPLQKETEVLSHILMGIQHSTTFASLSPLGEACSRKDLTAIHEVLESLGYKDDEGVANELSFQMWTDQMQDTLNCKKKGDVAFRQKDFRLAIECYSQFIDTGTMVSPTVYARRSLCYLISDMPQEALNDAMQAEVISPVWHIASYLQSVALTGLGMENEAQAALKEGTTLESKRNATPKLK

SEQ ID NO: 234797 - protein, 217 aa, Glycine max
  unsure (1)..(217): unsure at all Xaa locations
  Clone ID: PAT_MRT3847_54050C.1.pep
EIRPRGDYQKSIDLDKDFIFSHIQLGVTQYKMGSIASSMATFRRCMKNFATVPDVYNYYGELLLDQXKYQEAIEKFDPAVDMEKSSKPLGMNVLPLINKGRSRSFQWKNEXSQEAEKLCEEGRSIIDPECDIAVATMAQLLLQQGKVTXALKYFERAAELSRTKGEIVNALSYAEANKTQLEVQEKYPKLASRLGAMGAAAGGGFGGMVVCFRHSAS

SEQ ID NO: 234798 - protein, 124 aa, Glycine max
  Clone ID: PAT_MRT3847_54051C.1.pep
HDTVLTPYQFVECMINIGIRVARTRHMIKNKDNNDKTIELLHEFARTHFPSATYMAYAVQVDTYTLTQAHNLIPNVDCAIGSRLLDLHAGSSLFTRHNIDETLDIGYLNGLFVLELSIGLIGHT

SEQ ID NO: 234799 - protein, 34 aa, Glycine max
  Clone ID: PAT_MRT3847_54052C.1.pep
RALSDSDQSSSIRNHSAQLGHDGAGYDDEEATAI

SEQ ID NO: 234800 - protein, 65 aa, Glycine max
  Clone ID: PAT_MRT3847_54053C.1.pep
KQKFLLSIIQSRFLIQKSLYHKVHQATNELKVHQTQTYIFRLTMRTKIKSPLNHNKLRLTKPIGS

SEQ ID NO: 234801 - protein, 47 aa, Glycine max
  Clone ID: PAT_MRT3847_54054C.1.pep
NNCLYTVWAGASTGGCRGLDQDQPWNLCVNPNTTMILIWLPTGCNSD

SEQ ID NO: 234802 - protein, 91 aa, Glycine max
  unsure (1)..(91): unsure at all Xaa locations
  Clone ID: PAT_MRT3847_54055C.1.pep
MEGKEQDVSLGANKXPERQPIGXAAQXQDDGKDYQEPAPAPLVDPTEFTSWSXYRAXIAEXVAXXLXLYITVXXSXEFAGAKSXXSXVXIX

SEQ ID NO: 234803 - protein, 79 aa, Glycine max
  Clone ID: PAT_MRT3847_54056C.1.pep
EMSPTMLGFLPTQQILNNQCLGRLSQRQALLSDGCVNISETSPFLSQIRQILLHVNELVHGGLGVKKDKQKDPFFVEVK

SEQ ID NO: 234804 - protein, 52 aa, Glycine max
  Clone ID: PAT_MRT3847_54057C.1.pep
LFLCRFLPFDGDHGALEMTQYNIEPIAHVHSVKFYENWSSYLQACTYRLACY

SEQ ID NO: 234805 - protein, 49 aa, Glycine max
  Clone ID: PAT_MRT3847_54058C.1.pep
DPPDFFFKLKVKYFLCSCIGLLFYVRYLCSAHCPRNGSILNIGKSRCPP

SEQ ID NO: 234806 - protein, 54 aa, Glycine max
  unsure (1)..(54): unsure at all Xaa locations
  Clone ID: PAT_MRT3847_54059C.1.pep
WLYLSIDLSSPYEPLWYYGVGVMPIPXYGFFVLVIKLKLLLLSKMFQSSCQFIR

SEQ ID NO: 234807 - protein, 151 aa, Glycine max
  unsure (1)..(151): unsure at all Xaa locations
  Clone ID: PAT_MRT3847_5405C.1.pep
TYTNPFSHPPKPENREGHLRKNTPGHTPTRKTPHAPDRTTATTQITEKPDATTTGKETDPPTRPPTERPHGANKRNTHHPTHPTTDQSPXPSTSRPPPTPKPPPPPNPHAKPTRPPDHKPSRQQTPGWPTPGPSQYPKPEPPKTGPPAAEP

SEQ ID NO: 234808 - protein, 151 aa, Glycine max
  Clone ID: PAT_MRT3847_54060C.1.pep
MVERRRKPLILCSTKHLINSTVPTNNLFPHESLPTFRLPVGILRFSNPANPSLDHSALLALSTSLLKTLSITSGSPVLVKNVDTNTQKIAVAIALDPPGTATNMDSPSSSNSRIMLVFPSCDFPSSGSVLDDQVAYISPLLAFNLNLHVTC

SEQ ID NO: 234809 - protein, 70 aa, Glycine max
  unsure (1)..(70): unsure at all Xaa locations
  Clone ID: PAT_MRT3847_54061C.1.pep
NVLGLNRNGALPKIEIDGEPPMSISNAQVSTTEHKYLYWXGDGEKILMVGLKGLNIPVGKSFAVTWKMES

SEQ ID NO: 234810 - protein, 90 aa, Glycine max
  Clone ID: PAT_MRT3847_54062C.1.pep
MVRHVNLLKRVDNRTVAQLLESILFIIDAVLPMLGKLPPSIVGELEQDLKQMIVRHSFLTVVHACIKCLCSVSKMSGKGAAVVEQLIQFF

SEQ ID NO: 234811 - protein, 100 aa, Glycine max
  unsure (1)..(100): unsure at all Xaa locations
  Clone ID: PAT_MRT3847_54063C.1.pep
MRLREDLPCKNDDVCEKEEVMIENDVTVAQNHWCPVVNAGFSSPKRVVVVGYALTTKKIKSFLQPKLEGLARNKGILFVAVDHNRPLSDQGXFDIVLHKL

SEQ ID NO: 234812 - protein, 79 aa, Glycine max
  unsure (1)..(79): unsure at all Xaa locations
  Clone ID: PAT_MRT3847_54064C.1.pep
MVRISNNVIGLLNLLTFLLCIPILADGVWLSKQGANECKRRLEKPLIALRVFLMLVXLAXLDGACCRVSRLLWLYLIAM

SEQ ID NO: 234813 - protein, 215 aa, Glycine max
  Clone ID: PAT_MRT3847_54065C.1.pep
MRLREEVACKNDDVCEKEEVVIENDVTVAQNHWCPVVNAGFSSPKRVVVVGYALTTKKIKSFLQPKLEGLARNKGILFVAIDHNRPLSDQGPFDIVLHKLSGKEWRQDLEDYRLSHPEVTVLDPPDAIQHLRNRQYMLQAVADMNLSDSYGTVGVPRQLVIKRDALAIPELVNKAGLTLPLGMYMLVFQLLLDAAVMRFLRAWTHGHLLLRGLYF

SEQ ID NO: 234814 - protein, 51 aa, Glycine max
  Clone ID: PAT_MRT3847_54066C.1.pep
LHPYFYLLGLVGNNLDTFDMKGVVLGWKTFTPKLAYTSLAHPSFIYHSLYM

SEQ ID NO: 234815 - protein, 97 aa, Glycine max
  Clone ID: PAT_MRT3847_54067C.1.pep
FFHPLKMLHSLYSVSPSFTKKPMHCSTPMQHTINFSWSSIFHTLLHPSSLIQIHINFLITHILDVAQIMRLSHDHIHSQHTAHEHSPDFLLPYSLML

SEQ ID NO: 234816 - protein, 115 aa, Glycine max
  Clone ID: PAT_MRT3847_54068C.1.pep
FFFFFFFFFFLFFFFFFFFFLFFGFFFFFFYRPPKKKENTLGPATRSQGQGGEKPRGETPKSKRDLPPRTGPPKQGRARGGQTGAPGRKGTRPDMSFSNGARFPQLKGAPTLGPP

SEQ ID NO: 234817 - protein, 363 aa, Glycine max
  Clone ID: PAT_MRT3847_54069C.1.pep
QSQVWDEVKGAFPDDSNGSRILITTRHAEVASHAGPMPPYFLPFLTEEESWELLSKKVFRGEDCPSDLEPMGKLIAESCNGLPLAIIVMAGILANKKSLRDWSRIKDHVNWHLGRDTTLKDILKLSYDTLPARLKPCFLYFGMYPEDYKIPVKQLIQLWISEGLLTQETCGSSTNIPEPEYIAEEYLDELVDRSLIQVVSRTSDGGVKTCRIHDLLRDLCISESKEDKFFEVCGEVDFQIRDSCPRKLSLHGTLFHFSSSSAVSDYSITGTRSLLCFGQEVYKVKPNHWRWLLKSFRLARVLDLGRMNVNSIPNDLEKLIHLRYLRIHSYNIETIPASICRLWNLETLDLRGSPIKSFSGDLW

SEQ ID NO: 234818 - protein, 76 aa, Glycine max
  Clone ID: PAT_MRT3847_5406C.1.pep
SGYVNTLSSSLETCVSIEVRYYARDLVDACLLDGERLIHAALHTIVGCATLTICRLHTISNILILLPRDACHTNES

SEQ ID NO: 234819 - protein, 51 aa, Glycine max
  Clone ID: PAT_MRT3847_54070C.1.pep
WGKTKTTILSLEKLLLKGGIRVTYYPTHERVHFLCEEHFIKDPYLDKRVQK

SEQ ID NO: 234820 - protein, 67 aa, Glycine max
  unsure (1)..(67): unsure at all Xaa locations
  Clone ID: PAT_MRT3847_54071C.1.pep
MPPXCLTRVLNLKACRGAIMFGDSLLPSECSFIVEELKHTSLCFQCAHGRPATDVLVNYEALHNQIV

SEQ ID NO: 234821 - protein, 177 aa, Glycine max
  Clone ID: PAT_MRT3847_54072C.1.pep
MGAKYLEVVKQSCMPPNNGPRTKLGYDTKPHYKPEKLKHLCLSETVAMRLWFKLLPLISVLFLTSSICSASAKRNTPRLSARKNLEEDELYSLDWDSKLCMSRVSRQRKVQVPESFERFCCVKICRDQSLKQEPASWYGKLNHMLDLPCSGNWSDSKVLDSAGLSCRAFTRNRGAIS

SEQ ID NO: 234822 - protein, 209 aa, Glycine max
  Clone ID: PAT_MRT3847_54073C.1.pep
RLEELRQKVLSGEEKAITYLDAEQELVLPEIGYQLLHSYSEQIKDWGWICNIHAQNSESFRRSLDILNRPQMAVTLIAVPCILGVKLNDVDLLEFLQQVADTDGSSTMPPSVLRVLNLKACRGAIMFGDSLLPSECSFIVEELKHTSLCFQCAHGRPATVPLVNLEALHNQIAKLRLMNECSSDECHGLRRHTVRVERAAQRLNSARGI

SEQ ID NO: 234823 - protein, 65 aa, Glycine max
  Clone ID: PAT_MRT3847_54074C.1.pep
GLRTKRLLNQSPFFQFSNPNFCPELESFREVYHQIFDLKSSSCHHPKSCPHFFFFFGVLPWLFFF

SEQ ID NO: 234824 - protein, 188 aa, Glycine max
  Clone ID: PAT_MRT3847_54075C.1.pep
AEQELVLPEIGYQLLHSYSEQIKDWGWICNIHAQNSESWRRSLDILNRPQMAVTLIAVPCILGVKLNDVDLLEFLQQLADTDGSSTMPPSVLRVLNLKACRGAIMFGDSLLPSECSLIVEELKHTSLCFQCAHGRPTTVPLVNLEALHNQIAKLRLMNERSSDEWHGLHRHKVCIERAAQRLNFARGI

SEQ ID NO: 234825 - protein, 116 aa, Glycine max
  unsure (1)..(116): unsure at all Xaa locations
  Clone ID: PAT_MRT3847_54076C.1.pep
SLGNGAPAKRINKAGECFSSMLIDLALDGVSKTVGPMLGNAFCWNCSAYVRIPAFGFGGQGKNXLEGSEPKSPXSFPFGGKRFLQETNGYKIXSFVPRFVVSGKTSFPPSPGKLPP

SEQ ID NO: 234826 - protein, 84 aa, Glycine max
  unsure (1)..(84): unsure at all Xaa locations
  Clone ID: PAT_MRT3847_54077C.1.pep
RFYSEVEVQXANAGVSLCETAGXSSSMKRFAXTPYKKNKITMIGAPLERGLAEDIKNGDDSTCCSKKKLGEFFQTKYDWHLLAA

SEQ ID NO: 234827 - protein, 302 aa, Glycine max
  Clone ID: PAT_MRT3847_54078C.1.pep
MAGAHSHRQSQLHHQQPSSRLLLLLTVLPLTLATLAFVLQWRGGVTDPVTRWSPDHDQFPGMATAVPSLRHHSDCGKNPLSQSYNPSFPYFRDWTFDFSSNLSPKICITTSTSAGLEQTLPWIFYHKVIGVSSFLLFVEGKAASPNVTRVLETIPGVKIVYRTRELEEQQAKSRIWNETWLATFFYKPCNYELFVKQSLNMEMAIVMARDSGMDWIIHLDTDELMHPAGTQEYSLRQLLADVPGNVDMVIFPNYESSVERDDIKEPFSEVSMFKKNYDHLPKDVYFGNYKEATPGNPNYFLT

SEQ ID NO: 234828 - protein, 50 aa, Glycine max
  Clone ID: PAT_MRT3847_54079C.1.pep
FPHEGNISITLCKKMRFSLKWRRWIEEFFCTYHINPSKWPWKSNKIVLSW

SEQ ID NO: 234829 - protein, 49 aa, Glycine max
  unsure (1)..(49): unsure at all Xaa locations
  Clone ID: PAT_MRT3847_5407C.1.pep
VGXNRLVEEXDLSEXXYLNMVXXETLRLDPAXPVLVPRESXDYXTINSY

SEQ ID NO: 234830 - protein, 71 aa, Glycine max
  unsure (1)..(71): unsure at all Xaa locations
  Clone ID: PAT_MRT3847_54080C.1.pep
NLXNTYXHPHPXYXPNIXXSYLXXFHFHLSIINXLLHFLLNXIIFYSFPIXFLITTSIXLITIQNSFSYHN

SEQ ID NO: 234831 - protein, 61 aa, Glycine max
  Clone ID: PAT_MRT3847_54081C.1.pep
KSFLKTAFALSIMKTTKSVNELLQAVHFRHCPSLGGGVGVHIGVAQNIRHEPSYTTFVFFP

SEQ ID NO: 234832 - protein, 45 aa, Glycine max
  Clone ID: PAT_MRT3847_54082C.1.pep
WRVGCGAAVWNKITQTNVSARAWKTRTEGYDCRTQSCCSWQGHYG

SEQ ID NO: 234833 - protein, 141 aa, Glycine max
  Clone ID: PAT_MRT3847_54083C.1.pep
MVVTLQLQPQMLLKFLILSSAILMLRVEGGNRTLLIPSSELFRFSHRVPSFKMTGQERAGVPVGSYELDPVSLPMNLEEIAVPEHLEVKDGHCPSSGVGTRSSDMWKFTMNSEGDASTAKVKLQRNNSAKENKDPVNHIGW

SEQ ID NO: 234834 - protein, 73 aa, Glycine max
  unsure (1)..(73): unsure at all Xaa locations
  Clone ID: PAT_MRT3847_54084C.1.pep
GPGLLSMANSGXNPNGCQFFITCAKCDWLDNKHVVFGRVLADGLLVVRKIEYVATGPNNRPKLACVIAECGEM

SEQ ID NO: 234835 - protein, 128 aa, Glycine max
  Clone ID: PAT_MRT3847_54085C.1.pep
KPRGPQGQDYRGGGSTKKNPRRAPFFLLLKNYYYGGQKTPTQKQKGPSHRGGPKNPPPGSGGGFWLGPINPTFPLPPNTQKKGKNYFFTKGGTPKAFKGKPKIKGINFNPLIFFSYGVIIKGAKLSHS

SEQ ID NO: 234836 - protein, 109 aa, Glycine max
  Clone ID: PAT_MRT3847_54086C.1.pep
PKHASSNAFLLSSLTIADALAYYANDAALDTGLKSATMMCTLMVMTLAMTFGMDICAIRLTHILTHISTGFLNIKVDHKACPEPNIEPCEIPFEHYPEHHTYKQAESAL

SEQ ID NO: 234837 - protein, 53 aa, Glycine max
  Clone ID: PAT_MRT3847_54087C.1.pep
HTALPSFILHPFVLQFCAVRASRGAEPLCTYSSQVSWLRRKRPYLHLGNMQAS

SEQ ID NO: 234838 - protein, 29 aa, Glycine max
  Clone ID: PAT_MRT3847_54088C.1.pep
SPFFWVFKAVLGLCYKGGVKCGKVFFGMI

SEQ ID NO: 234839 - protein, 54 aa, Glycine max
  Clone ID: PAT_MRT3847_54089C.1.pep
AIVIKISSLLLLLVSLYFYFRPWHSSQFDAIALTVIWIFPLFSPGGYAQVYIKS

SEQ ID NO: 234840 - protein, 68 aa, Glycine max
  Clone ID: PAT_MRT3847_5408C.1.pep
YRLPCRSFFSLTYHIRSIPLHNYDISGRHTRTLDRMNAWDRKLYGIPTHLIASPMTPIDFAFPLGKLQ

SEQ ID NO: 234841 - protein, 104 aa, Glycine max
  unsure (1)..(104): unsure at all Xaa locations
  Clone ID: PAT_MRT3847_54090C.1.pep
PSRAPSFXFFFFFFFCPKNNNTLSPRALFIKSPLSLYSTNHPPLKKKKKKAPPIFLHPPKVPKTTFSFKTGQHHPFLSMFFLHKKTQSTTKNPPKIKNFFSSQQ

SEQ ID NO: 234842 - protein, 102 aa, Glycine max
  unsure (1)..(102): unsure at all Xaa locations
  Clone ID: PAT_MRT3847_54091C.1.pep
PGPYPPRGFGGALRGGGGPTKISFTXGEGQTPIFIKLGTRGVIFPPKTKYLTNAYPPQVFGVPGGPKGNPQGRLXXFFQDPPPPKNSIYRAPGAPPSRKTPL

SEQ ID NO: 234843 - protein, 131 aa, Glycine max
  unsure (1)..(131): unsure at all Xaa locations
  Clone ID: PAT_MRT3847_54092C.1.pep
TPTNIADVKYWGKRDETLILPDYDSISVTLDPRHLCTTTTGAVCMALHQYRMWLSGKEIYLSGGRFHSCLREIRARACDVDDETEGLKITHDDCGKLHVHIAYYKTFLLRXGLGSSTAGVACLAYALGKLM

SEQ ID NO: 234844 - protein, 66 aa, Glycine max
  Clone ID: PAT_MRT3847_54093C.1.pep
VRNSRSTPRPVYIVKKKKKKKKKKKKKKKKKEKKNKKKKKVTQAKPKTKKTLISGDTIFFLLGPYF

SEQ ID NO: 234845 - protein, 231 aa, Glycine max
  unsure (1)..(231): unsure at all Xaa locations
  Clone ID: PAT_MRT3847_54094C.1.pep
MYVASMRKSFKDSLKVLEADIQHANTLASDFPREYDGACLQMRMSYSPAAHLFLFLVQWTDCHLAGALGLLRILIYKVYVDGTTTMSTHERKASIREFYAVIYPSLLQLEKGVTDTEDKKQKVVCMERYRRRDDEEHRQSSDIDIEREDECGICMDMNSKIVLPNSNHAKCLKCYRDGQSXWKVNSRWSRTISTSCPLCHVSFTRVNTGDLWDFTERRIYVDKVTVTVQDL

SEQ ID NO: 234846 - protein, 34 aa, Glycine max
  Clone ID: PAT_MRT3847_54095C.1.pep
LLRHILMESVLFSHLLKLYRYYFYLYKSYFIYYL

SEQ ID NO: 234847 - protein, 436 aa, Glycine max
  Clone ID: PAT_MRT3847_54096C.1.pep
MSDSDTRQNDITKPLDLENLRVVSAVGRGAKGVVFLARTGDRSSEECVALKVIPKALILQKAKLINDVEYTRVSFEEQVLRRFDHLLLPRLRGVFETEKVVGFGIDYCHGGTLHSLRKKQTEKMFSDDTIRFYAVELVLALEYLHNLGIVYRDLKPENVMIQDNGHIMLVDFDLSKKLNPKSPHSLSQNSSPSPNSKTKQTRKQRLMRFYSFCNSGILPCDSDSEPPLSSVNSVRHTESDLVEKSNSFVGTEEYVAPEIVSGKGHGFSVDWWSYGVVLYEMLYGTTPFKGSNRKETFYRILMKEPELTGEKTALRDLIGKLLEKNPDRRIQVNEIKGHNFFKGVKWDTVLHIARPPYIPENEVENKVGFSKSDVEVFVDNVFFPTGDDGGEKTKTLLDNNNNNNNNNNNNNNNNKVWIDELSHVPIGKKNDDFLIF

SEQ ID NO: 234848 - protein, 144 aa, Glycine max
  unsure (1)..(144): unsure at all Xaa locations
  Clone ID: PAT_MRT3847_54097C.1.pep
RHVSSVGNSVHALPKNFPVLALLRSPSSSNAVRSVLDFDFDYTDDEDEDPDQDQDYRSYFKVVVGSXLTDDEVLWRNGGGGLRLVRRIGEGGRAGVETWTAVMGGGGRKVAVKKVEAVEEMELVMEKLELLQRGSMWCRNVCTF

SEQ ID NO: 234849 - protein, 62 aa, Glycine max
  Clone ID: PAT_MRT3847_54098C.1.pep
TLQACRRRYSSSPSSASMPLLINHPLTTHISRTLIPKLYISPYCHNCPWSAYSGAVIPMSQQ

SEQ ID NO: 234850 - protein, 70 aa, Glycine max
  unsure (1)..(70): unsure at all Xaa locations
  Clone ID: PAT_MRT3847_54099C.1.pep
MSGNVLFPDEILVEILHRLPSKSILRCSAVCKSWRSLISNESFIXLHXXHSPXFLLLGFSNKLLPHHHHD

SEQ ID NO: 234851 - protein, 45 aa, Glycine max
  unsure (1)..(45): unsure at all Xaa locations
  Clone ID: PAT_MRT3847_5409C.1.pep
TXPRTRXXARXFGSRXNLXIXXXHRXSNXXXTXQXLXTPNVQXXV

SEQ ID NO: 234852 - protein, 110 aa, Glycine max
  unsure (1)..(110): unsure at all Xaa locations
  Clone ID: PAT_MRT3847_540C.1.pep
YGYISFQGYRLLTFAFIVPCISFLFLLSFLSFHYRFVLLFFFXYFFLFFHFLFLIITFYLLFFFLILNFFIFLFFLFNYIIFFSFFYLYLFFFLCIIYSNFYFIFVFIFF

SEQ ID NO: 234853 - protein, 240 aa, Glycine max
  Clone ID: PAT_MRT3847_54100C.1.pep
MSLTKGSKNSSRAQSSITITPKKNVITSDIPEMESVNSHNQKRRNPMVTPFINLVEEDNFVAPCASPLTWYTKSSVDVREIAHGSEYGFKRILKSNSPPLLTSTIPGSCSPTAPPLDKRLQIFCSLCKSPLGRPENHLYLTCSLISSSKNHLRSLLKQRLKTYNTDTLKSVPVIITDSLFVDQRICNGIPKSAMEQGIWCPEDGCVFSTIFCPFCSNINNLLGVQIMATDSSNVQLLDKI

SEQ ID NO: 234854 - protein, 61 aa, Glycine max
  Clone ID: PAT_MRT3847_54101C.1.pep
NLQVQATGCIRHGEWMNIKGPKYRLLKSHDLIGCYGQFSGTMEPKVCPVVELMFLVSLYSW

SEQ ID NO: 234855 - protein, 83 aa, Glycine max
  unsure (1)..(83): unsure at all Xaa locations
  Clone ID: PAT_MRT3847_54102C.1.pep
GDPVSRPPALIXMARPGRSLVVTKKLAKKYPSFRGRPKPPVLFGEILLQPWNALRPVGLLFFWRIFKQLLGFEVDFAIKKVRG

SEQ ID NO: 234856 - protein, 126 aa, Glycine max
  Clone ID: PAT_MRT3847_54103C.1.pep
VTENGVAHGGCGEVPLACCQTQCRPCGGLDRLSYSLQALIESEDVPRRSTLLNEVLLLSIGADCLQQEWYKVGASFPTDAANIYFHHHCSNNTARRTAQPGHLQYSFNSHTIVAYFLLLFPLVLLD

SEQ ID NO: 234857 - protein, 54 aa, Glycine max
  Clone ID: PAT_MRT3847_54104C.1.pep
STHNSFQSSITHRPRKYNDPSLQPSPSFLIPKLGSFSEDSQVNLALPSLRNVFH

SEQ ID NO: 234858 - protein, 103 aa, Glycine max
  Clone ID: PAT_MRT3847_54105C.1.pep
NMGRHQRSVYHLKASTAKEKFRGIPLRMVSRSKAIIAGKQCMGSGLFNRGAPKHPGILLRQYAQEYSPKRVPRLPSLEAWKRIVKSDPHWAKLRETIDIKLDV

SEQ ID NO: 234859 - protein, 98 aa, Glycine max
  Clone ID: PAT_MRT3847_54106C.1.pep
GPKITWGLKFGGKNFFSGKAERVHPIPGFWTKKTTLAKKGAAWVTIFRISPAGKLALLVKKGNLFEKTIPWKGLLNNFTFMPNNTKLFGGKGGYLNKF

SEQ ID NO: 234860 - protein, 171 aa, Glycine max
  Clone ID: PAT_MRT3847_54107C.1.pep
MEVEARRIRRFVPQRPSHRTILPLHASSSSHNVSNTISCWYCDYKICSFNRPLFHFGRRYARFLKVWFSIGVGFALSAVLGVTLVLLWELARTLHLCAGSNKLGSFARSLLFGIPPSVPGLSLSLADTGYACVSTIISVFMHELGHAVACHKCARPRCRDSGLRCFLTFLP

SEQ ID NO: 234861 - protein, 67 aa, Glycine max
  unsure (1)..(67): unsure at all Xaa locations
  Clone ID: PAT_MRT3847_54108C.1.pep
SSFEAPEVQTKLVKKKEVLKLPVMVRPANDLAPKPVEASDGKPFYCRDWYYRAFPGGQXCKLEDLLE

SEQ ID NO: 234862 - protein, 55 aa, Glycine max
  Clone ID: PAT_MRT3847_54109C.1.pep
EESSSACSSLLSYSSDIFICCCSIRITSNFNSLLMCTNYKWHFMSFPLKYTNHSR

SEQ ID NO: 234863 - protein, 104 aa, Glycine max
  unsure (1)..(104): unsure at all Xaa locations
  Clone ID: PAT_MRT3847_5410C.1.pep
ARRRQKGDMYRSSFLGNPGLCGDLKGLCDGRGEENSVGYVSLLHTIFVDATLVFLCGIFSFYFRHXNFPDSIRAIHKTKWTLMSFHKLAFSEHAILNCLDKDNV

SEQ ID NO: 234864 - protein, 133 aa, Glycine max
  unsure (1)..(133): unsure at all Xaa locations
  Clone ID: PAT_MRT3847_54110C.1.pep
PRVREAEDDDDMDGFQTDDEDEDGSGFDKEMGVDADDGEDTDTITLRKLAEQAKSFRPHDDDDDDSDDDFSDDEELQSPIDDVDPFVLFVDTIKVMQSCGCMEVXNLTQTLELNYEAVSNGVGQDAEQSRWEV

SEQ ID NO: 234865 - protein, 444 aa, Glycine max
  Clone ID: PAT_MRT3847_54111C.1.pep
ARVVVKLPGQPKVGFKQFAGYVDVDAKHGRSLFYYFVEAEQDPHKKPLTLWLNGGPGCSSIGGGAFTELGPFYPKGDGRGLRRNSMSWNKASNLLFVESPAGVGWSYSNTTSDYNSGDASTANDMYLFMLKWYEKFPSYITRELFLTGESYAGHYIPQLTNVLLDHNARSTGSKFNIKGVAIGNPLLRLDRDAPAIYEYFWSHGMISDEIGLAIMNDCDFDDYVYASPHNVSQLCNNAIYEANLIVGDYINNYDVILDVCYTSIMEQELRLKRMATKISVSVDVCMTLERRFYFNLPEVQKALHANRTNLPYSWSMCSHVLNYRDTDGNINILPILKRIVQNHIPVWVFSGDQDSVVPLLGSRTLIRELAHELQFKITVPYGAWFHKGQVGGWVTEYGNLLTFATVRGAAHMVPYAQPSRALHLFSSFVRGRRLPNTTRPSIDE

SEQ ID NO: 234866 - protein, 114 aa, Glycine max
  Clone ID: PAT_MRT3847_54112C.1.pep
ETWGEPPVNLSSQGGCQNASIFGVIPDIIFPRVARKLRVNIHEGDNWKIRVNLALGTTGGLLEVRKPDVVQLAWSSGTGILRYHMGFLSQCWKKKKVISPIVRDGKYLEKHFSP

SEQ ID NO: 234867 - protein, 93 aa, Glycine max
  unsure (1)..(93): unsure at all Xaa locations
  Clone ID: PAT_MRT3847_54113C.1.pep
PGRPTHHTHSXRFPLIPTMFIPRPSTXSRLLFIKQRRQTHIPYFLLLPTQYHSPXPSHKPIPPSPSLSFLPSSPQIPSQTKYSTYFTYTQPFI

SEQ ID NO: 234868 - protein, 176 aa, Glycine max
  unsure (1)..(176): unsure at all Xaa locations
  Clone ID: PAT_MRT3847_54114C.1.pep
MTIFYVLLFLGLLWAEIHVISSFTDTRDVVALRSLKDVWQHTPPSWDKADDPCGAPWEGVTCNKSRVTSLGLSTMGLKGKLTGDIGQLTELRSLDLSFNRGLTGPLSPQLGDLSNLNILILAGCSFGGNIPDELGNLSELSFLALNSNNFTGKIPXSLGKLSRLYXVDLADNQLTG

SEQ ID NO: 234869 - protein, 79 aa, Glycine max
  unsure (1)..(79): unsure at all Xaa locations
  Clone ID: PAT_MRT3847_54115C.1.pep
AITGYTGPPPTLEGKNLTKPNNKVIXPNKKRVVPKKESPLPKIPPKKGTLGKNLTTRFPLGSLISQKQGSGNFFTKPKL

SEQ ID NO: 234870 - protein, 121 aa, Glycine max
  Clone ID: PAT_MRT3847_54116C.1.pep
MRYLTCNAESAIATCDPHSLKKKKKPKSPAQAQPVRHFAYSDILDATNNFSADTFLGKGSHGTVYKAAFHGGALVAAVKITKPKTSNEIEILSHLKKNPRLVNLIGFCNDQTQTNNIYTHK

SEQ ID NO: 234871 - protein, 81 aa, Glycine max
  Clone ID: PAT_MRT3847_54117C.1.pep
GWSLFDFSRLSYYSHNHSPYEPRYQCSPLFELTHTEHKKGSCPFALTLQTYEPQNPQNLSTEHRTLKPLNPHLIQTKHITK

SEQ ID NO: 234872 - protein, 174 aa, Glycine max
  Clone ID: PAT_MRT3847_54118C.1.pep
MSATLTCKLGDNNLSLNDKNDQPPSPPQPLQKCPANMVSMVVSELRIQRGIALPMVAMNLAWFAKTAITTAFLGRLGELSLAGGALGFTFANVTGFSVLNGLCGAMEPICGQAHGAKNFRLLHKTLLMAISLLLLVSLPITFLWLNVDKILILFGQQQDISTVARTYVSCLIPD

SEQ ID NO: 234873 - protein, 87 aa, Glycine max
  unsure (1)..(87): unsure at all Xaa locations
  Clone ID: PAT_MRT3847_54119C.1.pep
SLQDSIESALQWRDRSWAXRSIQQHIGQVSALLKAFADYVASLCGTPYPVDYDIWLKRLNKAVEVSADKGKMIEEVPITLGLEDAAE

SEQ ID NO: 234874 - protein, 76 aa, Glycine max
  Clone ID: PAT_MRT3847_5411C.1.pep
LARMKPHVSGESSNLAKESSRSVGEKLHQVCKAAMVAITTDGSNQRSSRLLPNQRLSLQSEDPIRTLMFLGSWSHT

SEQ ID NO: 234875 - protein, 472 aa, Glycine max
  Clone ID: PAT_MRT3847_54120C.1.pep
MGSAAKYELPFKLNNPDLLHNESFVHGKWVKSKSGKTFEVADPGTGKTWIDCPTNDASDVDEAVKSSHECFLEYKKISPRQRAQMLYKWDALIKENREDIATILVYETGKPRAEAYGEIDYSTGFTWWFAGEAERIQGSVFTPALPNRRIFTIKQPLGVAAALVPWNFPIAMILRKAGAALAAGCTMIVKPSPETPITVLALAYLADKAGFPKGALNVLTTDLDKTPELSEALCRHPLVNKVTFTGSTRVGKLVAKICSDNLKKVTLELGGNCPVLIFDDANIEQAMSQVFALKFRHAGQACITANRIYVQSGIFDKFLERWNAEAQKIVVGHGSDEKTTMGPVTTPRAVDKALSLVEDARKKGAKIHTGGNKVEKNGGYFFEPTVITGVTPDMDIAKEEVFSPISTFIKFETEDEVVKAANDTSMGLASYLFTKNVDRMWRLFENLEAGMIGLNTGKSVPKARYSLVVTNG

SEQ ID NO: 234876 - protein, 91 aa, Glycine max
  Clone ID: PAT_MRT3847_54121C.1.pep
PSLRSPHPPQKVTLFQRRNQCPLMWPLGKFPLLIMIGRTNPLIKLKGNPPFALWPLVILDSSPILFFFFSFFKKKLECQGIWEKKPGGFVN

SEQ ID NO: 234877 - protein, 337 aa, Glycine max
  Clone ID: PAT_MRT3847_54122C.1.pep
TKPFVLFLSSSSVTRKKKNMTELSFSNTSNKKNELSSNLFSIFFHFCFSIFSHPLYFSYFIFFSPYLLRILSFLSPLFITTTLLLVALLTFTPNNLDQEKGGSELSESKWGILLSVLQSFLAWLHSKADEIDEEMGLLGEVEAYLVMFQASIFEVVDPKSLQDCSEGFEAVDAECSVEGREDSCAVEEPKPSVNLDKNLPSQRGEPTFEYPSKVSTFNAQQCLEQDCLEKRIIVDESLHSQPKFESPLEEVPIFSARQSFEKDCPQRKIPVESQINMDENPVEKVDEVEATMPIVEVKSLKSLFQENQELEDLSSQKEHKEVKPLIAEFNKVEESNE

SEQ ID NO: 234878 - protein, 52 aa, Glycine max
  Clone ID: PAT_MRT3847_54123C.1.pep
LKCNYNNTAKYNSNATITNQNSVFARLCHFIPVATICQRKELDFLETPFISK

SEQ ID NO: 234879 - protein, 65 aa, Glycine max
  Clone ID: PAT_MRT3847_54124C.1.pep
QWANSLCQGANLPLPVPLKVDKIPGGARLGFITIGDGKTEVLVYIDCLVFPPTENSAPIFRAIRN

SEQ ID NO: 234880 - protein, 184 aa, Glycine max
  unsure (1)..(184): unsure at all Xaa locations
  Clone ID: PAT_MRT3847_54125C.1.pep
PRVRSLSQARQAHALILKLNMFSDTHLTTSLLSFYANALSLSLTLSSHLPNPTLFSFALSQHFPHVLTAFSHLXPDAFLLPSPIVSCASLRALNSGQQLHAFAAASGFITDSIVXSSLIHMCLKCDRIRDARKLFDIMPERDVVVWSAMVASYSRLGLVDEAKEFFGEMPSGGMAPNLVSWNDM

SEQ ID NO: 234881 - protein, 172 aa, Glycine max
  Clone ID: PAT_MRT3847_54126C.1.pep
AYSYPYLPATASQYLDAIASAHSSATLRSTYCAYPTAPRAVATLAQWGCAAPAVIRYFSQPAAHQPPCPPCPLPCSALRPGMHSWLYLCSLGPPLLLLHTHFFVVGFRQVCSRFFPNPPPTNPPCPFMRPALLSSSLRYAFLSVPLFVGPAPISKLSPPTLTCFLPVYGTLA

SEQ ID NO: 234882 - protein, 73 aa, Glycine max
  Clone ID: PAT_MRT3847_54127C.1.pep
KALYLYLYTSKLCQDKSTLQANFSYPFNISHSPPIILWHSFILSLDCHPQRSHLHWDKLLNFYPLGGGLGSIS

SEQ ID NO: 234883 - protein, 55 aa, Glycine max
  Clone ID: PAT_MRT3847_54128C.1.pep
SAKSYWSQRIKSIANSWCVSRWCSGFQHGERMQCSDASDSGLLVWRASSVGWLVV

SEQ ID NO: 234884 - protein, 38 aa, Glycine max
  Clone ID: PAT_MRT3847_54129C.1.pep
YITSELWNYEEGKRATLQEGVKLLLMQWKLTKQKRGTM

SEQ ID NO: 234885 - protein, 182 aa, Glycine max
  Clone ID: PAT_MRT3847_5412C.1.pep
SNLKVEKMNIINSVAKTLRILELCIALFFLSWFLTRLPFALQISADYLRSPLFVFAVSNAIIAAVLAQSRRFDQSNSASPVIEAEHHQISDTCTDNDSGAAIDSNFGKFYRRSQSEKLTEKSEERNDTARRELRRSETEKAREKSYPQDKLSNEEFRRTIEAFIENQMRLLREDSLAISLCN

SEQ ID NO: 234886 - protein, 56 aa, Glycine max
  Clone ID: PAT_MRT3847_54130C.1.pep
PPISFQNLQPLTFFRINMFIFFNIYFRLLHKVYLRRYYLVILTHCNGYFHQISLPT

SEQ ID NO: 234887 - protein, 86 aa, Glycine max
  Clone ID: PAT_MRT3847_54131C.1.pep
SVNPKNGVIFSQGVLFHLLAFSSYAASASTGFWPVLSQFYLVIALWSLLEKEGYSCWSPHARLYFLPRSVLHLLRCNFLQPHPNLI

SEQ ID NO: 234888 - protein, 46 aa, Glycine max
  Clone ID: PAT_MRT3847_54132C.1.pep
LYKSCKHNLIQDKNRNFYSLLASHAVKETKIDNLSRARTYGFINFL

SEQ ID NO: 234889 - protein, 343 aa, Glycine max
  Clone ID: PAT_MRT3847_54133C.1.pep
TSHFFFPALSMGIIWVEVCLISAHGLQLSTSLWKRQWFAVGWIDHNSKYCTKVVDSGRANPVWRTKFVIPVDDSASNIQDLALNVEVYSIDPVFFTEKLHGSATVFLREFLVMKVKNSEGSKPRQEEIGSYQLRKKKSSKPRGCIDILIRISDKKKEPNSQSGNKEGILLLDDGDGTRLTIEEGIRQAYPQKPQVSIHQPEKDHVQTNVPDYHSLPSTTTNYYDPYEGETSYHEVDEPSYREVAGPSYLLPRTITPPPPPPPSNVGYIPTFLPRNDGLSPSYREMSTSRAALGQRVPAGVAMGLGAGALAAGAVIFGDDFMSGFDVPPDLGDSGFNLEMDPPF

SEQ ID NO: 234890 - protein, 162 aa, Glycine max
  Clone ID: PAT_MRT3847_54134C.1.pep
RLRELEDQRLIEDICKDNDAVIHFLVRKSDAKVRTKPVDKDFELSIEASYVHNLVPNLHADQLGSVSVTNEVLERSQLTRDFVLEPIIMNSNIKIPLVIQELIKSTSEGLEKGCKPIQSSEGSGGAYLMQDSSGLKYVSVFKPIDEEPMAINNPRGLPVSED

SEQ ID NO: 234891 - protein, 54 aa, Glycine max
  Clone ID: PAT_MRT3847_54135C.1.pep
EKDRVVKHLILVDYNSQHLQYDPNLSTHYIASWVTDRARDNRACWTYHVRPMSA

SEQ ID NO: 234892 - protein, 68 aa, Glycine max
  Clone ID: PAT_MRT3847_54136C.1.pep
FSGPLCVVKNGTEPKPIVWVPRGSQLGQKSFFCPFFSRPLIRLILKKCPKQKILFPLFGQKNFFLFPG

SEQ ID NO: 234893 - protein, 58 aa, Glycine max
  Clone ID: PAT_MRT3847_54137C.1.pep
HNHIFLQRGGMPNCPIRARGCLNALHTKRGNGAGLGPPQSFNLLLLLKGAKGSSGSMF

SEQ ID NO: 234894 - protein, 54 aa, Glycine max
  Clone ID: PAT_MRT3847_54138C.1.pep
PGYELPNYNRTLLFHMTRYNSITAIQQYYNKPLYGLRLADTLIYYIHLSGLNTC

SEQ ID NO: 234895 - protein, 88 aa, Glycine max
  unsure (1)..(88): unsure at all Xaa locations
  Clone ID: PAT_MRT3847_54139C.1.pep
HWQCHAYRYVPLXRMNTDYGARTTDEKCASWTLAVEAHNIFCYKTIPEECLAATKDYIHGEQYRSDSKTPNQQAYSYARHLEVHPKDT

SEQ ID NO: 234896 - protein, 137 aa, Glycine max
  Clone ID: PAT_MRT3847_5413C.1.pep
GGQFDISLLIWNDPKHGNWWLEFGSGILVGYWPSFLFTHLRDHASMVQFGGEIVNSRQSGSHTSTQMGSGHFASEGFGKASYFRNMQVVDWDNNLVPLSNLRVLADHPNCYDIQGGINNVWGNYFYYGGPGRNVRCP

SEQ ID NO: 234897 - protein, 136 aa, Glycine max
  unsure (1)..(136): unsure at all Xaa locations
  Clone ID: PAT_MRT3847_54140C.1.pep
THASAHASDYLLFXSLSNTPTNSFCAKLLYQYNFSIYNQHLTDHCFIQEYHITFSLHPSLTSDINHFSQNTVFSSSLSFIHFFCTKSIQFLEYSQQVTSKFQTFQHNRVKHPCQRKISAPTTKKNKRTAPFSISQG

SEQ ID NO: 234898 - protein, 64 aa, Glycine max
  Clone ID: PAT_MRT3847_54141C.1.pep
LHTLHSKLLKPNHLSTLHHQLHLQRSFNIPCAHRLLHLLLHKSSATTTSHPMPLHYRKLIQTTT

SEQ ID NO: 234899 - protein, 64 aa, Glycine max
  Clone ID: PAT_MRT3847_54142C.1.pep
GSLALNHHRTQSTGIDGRYNPWRRVIIRFTCLPSGKTSHKVVLLATVHSLHQHSDASLTSPSST

SEQ ID NO: 234900 - protein, 44 aa, Glycine max
  Clone ID: PAT_MRT3847_54143C.1.pep
TLECMFKFIAYSVMFYANYEIYILLIDEISKNNDNDTWKRQTSI

SEQ ID NO: 234901 - protein, 137 aa, Glycine max
  Clone ID: PAT_MRT3847_54144C.1.pep
LNPDSSSLLACYAKDVFDILERDFPIHFTHPSSGDTHVQRDDLSTSLMSAFSSTPLFEPFVIPLLLEKLSSSLHSAKIDSLKYLRACSSKYGAERIAKYAGAIWSSLKDTLSTYLGEPDISFTITPVDGIGFPENDL

SEQ ID NO: 234902 - protein, 105 aa, Glycine max
  Clone ID: PAT_MRT3847_54145C.1.pep
QGPKLSTGDSLDMTQQDGSLIIANDATVIDMEGAAIAYVSDLLKVPAIFIKAVTNNVDDDKAIVEEFLQNLAALTVELGLAVEQVINFINGKCISELWQPNFTLS

SEQ ID NO: 234903 - protein, 61 aa, Glycine max
  unsure (1)..(61): unsure at all Xaa locations
  Clone ID: PAT_MRT3847_54146C.1.pep
TXPEFPDRPTRTTASKKPPKGISSSYKALHSKAEVHSLGVPFFLKTKHVKHMLQLQLHLLD

SEQ ID NO: 234904 - protein, 171 aa, Glycine max
  unsure (1)..(171): unsure at all Xaa locations
  Clone ID: PAT_MRT3847_54147C.1.pep
MEAVKLVSSDPSERPDTYRVAYIIHFLLGAGNLLPWNALITAVDYFAYLYPTKHIEKVFSVAYMISSVMVLLGMISWGGXSKTTLRLRMNLGVSMFVMSLMVAPVIDWTSSSTKLNERPSGAYSLTVAAVVICGLADGLVGGSLIGSAGKLPKQYMQAVFAGTASSRYYNF

SEQ ID NO: 234905 - protein, 71 aa, Glycine max
  Clone ID: PAT_MRT3847_54148C.1.pep
KKIDLEIQVHTPFYPFAEARESYAPGTKEYVHIPIQQRNGKKSQTTEQGLKKEFSYNKNLKDHKKEISFNG

SEQ ID NO: 234906 - protein, 176 aa, Glycine max
  Clone ID: PAT_MRT3847_54149C.1.pep
MFDFTQQECRVINRTTAKSSGSDREEKRMNKSGGGEMSKWPFTMSQWQELEHQALIYKYMVAGLPVPPDLVLPIQNSFHSISQTFLHHPSTTMSYCSFYGKKVDPEPGRCRRTDGKKWRCSKEAYPDSKYCERHMHRGRNRSRKPVESQTMTQSSSNVSSLTVTAGSSSSATGKFP

SEQ ID NO: 234907 - protein, 78 aa, Glycine max
  Clone ID: PAT_MRT3847_5414C.1.pep
SGCGVGFLSWWAFVHANMFSHAWLDFCWCCPLGGSILPPFICTLLSYVVMCLSPCVRAVRVFAYVCVCGFVKYRVFVY

SEQ ID NO: 234908 - protein, 47 aa, Glycine max
  unsure (1)..(47): unsure at all Xaa locations
  Clone ID: PAT_MRT3847_54150C.1.pep
RKTSSTYIRIMLKKXIXFIFLIINGDSRTXQTRINNSNNIFLRKNNF

SEQ ID NO: 234909 - protein, 115 aa, Glycine max
  unsure (1)..(115): unsure at all Xaa locations
  Clone ID: PAT_MRT3847_54151C.1.pep
CLYEPHRVAEGLLSCVRRQWRDQKPLSILDASINENXAEIEVIKCIQIGLLCVQQNPDDRPTMVAIVSYLSSHLIELPSPQEPALFLHSRKDPKAFAQESSSSHNINAFTLLVYK

SEQ ID NO: 234910 - protein, 61 aa, Glycine max
  unsure (1)..(61): unsure at all Xaa locations
  Clone ID: PAT_MRT3847_54152C.1.pep
PXHLSRTAHXXHXXEXIXXRXSPXAXXHDHTXNMCNHHSRXXPILSLRASLQMQLXLXXFL

SEQ ID NO: 234911 - protein, 102 aa, Glycine max
  unsure (1)..(102): unsure at all Xaa locations
  Clone ID: PAT_MRT3847_54153C.1.pep
MRIILHKDPSSSNQIPLAINGVTHKVIIXTDNKTVTAPEVAQQGIETVALDQINLDVILDYCNRQGLCSVLLDIRGSFGEFEDLVKEGIKKNYINKFVTEIL

SEQ ID NO: 234912 - protein, 52 aa, Glycine max
  Clone ID: PAT_MRT3847_54154C.1.pep
LDYGYHLVLICTPLLQIMMQLPPWLMTHWAHHPELLDEAQGPSFNRVGMIVD

SEQ ID NO: 234913 - protein, 52 aa, Glycine max
  Clone ID: PAT_MRT3847_54155C.1.pep
TKIINSPAACYKNEHKTSLDISLATSQRNCTPKCYCCFKRESMASATFFLRA

SEQ ID NO: 234914 - protein, 112 aa, Glycine max
  unsure (1)..(112): unsure at all Xaa locations
  Clone ID: PAT_MRT3847_54156C.1.pep
LLVLGLVFQASLSVSFGIAXYWENDIPYNXNMCLQSCNSERDSFRNRTCHSRCTLFDVEKEECEYGXEIPLSRPXSLHPEMXPQLPGEKDEYYYEHLTSQSLFPLPHPRLEE

SEQ ID NO: 234915 - protein, 63 aa, Glycine max
  Clone ID: PAT_MRT3847_54157C.1.pep
DPNTLEGHAFYAFHSFYQKMGRASGTCFFGGPAYVVPQPPKYGNCEFSPGYLKDGKGVFLVKP

SEQ ID NO: 234916 - protein, 141 aa, Glycine max
  Clone ID: PAT_MRT3847_54158C.1.pep
MNNEEVPSLPSTSATPGTPGAPLFGGLRFEKPNGSVVRKSSFLKSCKCFSVAEWTLEDGAMPRVSCSLPSPHIPLAKKIGAEFIGTFILMFAAIGTAIVNQKTHGSETLIGCAAANGLAVMIIIFSTGHIFGAHLNPAVTI

SEQ ID NO: 234917 - protein, 135 aa, Glycine max
  Clone ID: PAT_MRT3847_54159C.1.pep
PFLLPRECSERCEINGYEIPAKSKGIINGWAIGRDPNHWTDAKKFCPERFLDSSVDYKGADFQFIPFGAGRRMCPGSAFGIANVELLLANLLFHFDWNMPNGKKPEELDMSESFGLSVRKHDLYLIPSICLSFGN

SEQ ID NO: 234918 - protein, 103 aa, Glycine max
  unsure (1)..(103): unsure at all Xaa locations
  Clone ID: PAT_MRT3847_5415C.1.pep
RQFLGCLHFYRRLDTSTILSCTLRARSPFPAPFRTRLRSAPSLAISGDDTFFFFDSSSLSSSPXFTLPPYLQLPVTPRKEKVKEKNDTDEEAIDAENHRDSRR

SEQ ID NO: 234919 - protein, 47 aa, Glycine max
  Clone ID: PAT_MRT3847_54160C.1.pep
FEEVVESSLFTFSKKQGECFQVGHVPWQSFIGSVRRLVILTNGSETI

SEQ ID NO: 234920 - protein, 40 aa, Glycine max
  Clone ID: PAT_MRT3847_54161C.1.pep
EWLVSYPNSPHVLKLTIEDNPFAIVCFLIYVMPIKNVYLC

SEQ ID NO: 234921 - protein, 344 aa, Glycine max
  unsure (1)..(344): unsure at all Xaa locations
  Clone ID: PAT_MRT3847_54162C.1.pep
NQSCVKLEAEITLSPTWNLLRKGTPNGVRRRWGNPNNNNLFDGCQGESDHWSELDTDLYHWTKALRPVQWFPGHIAKAEKELKEQLKLMDVVIEVRDGRIPMSTSHPQMDLWLGNRKRILVLNREDMISTADRNAWADYFTRNGTKVVFSGSRLGMGTMKLGRLAKELAADVNVRRRSKGLLPRAVQAGIVGYPNVGKSSLVNRLLKRRMCPAAPRPGVTRELRWVRFGKDLELLDSPGILPMRISDQSAAIKLAICDDIGERSYDVADVAAILVQMLSKLPTVGRDALCKRYKIDVDCRDGRIFIEKLAVXVFNGDVHQAAFRVLADFRKGKFGWTALERPPK

SEQ ID NO: 234922 - protein, 79 aa, Glycine max
  Clone ID: PAT_MRT3847_54163C.1.pep
FYRQMHETKLHGNNKKHPWLQILFRVPRGSKGCLVGAFTFPFYNDNIHIHLTPCGVVFCSKFQEVSSVISNSSFTEFCF

SEQ ID NO: 234923 - protein, 84 aa, Glycine max
  Clone ID: PAT_MRT3847_54164C.1.pep
PCPLRKIEQHAAVRNTWPSRSQRITSTHYRNMELDLMRMKRTLKRKVPEADCNTLITIRMQGKKDMHPRTMKVLYSLGLKRRFI

SEQ ID NO: 234924 - protein, 74 aa, Glycine max
  Clone ID: PAT_MRT3847_54165C.1.pep
AHMILCNIVGSGMKNTLAIMGWIRMRRRSTSLMNFWAGTNNGLRRRTWEETQFSHLHICTINWSNLCKESKGDY

SEQ ID NO: 234925 - protein, 79 aa, Glycine max
  Clone ID: PAT_MRT3847_54166C.1.pep
IGSSTQENFTITRISNLGSLQEKAEILAESEKRAQRVGPANGDAYGVPGATQLAEGEGAEPGARSGGEAPEGRPRAAHN

SEQ ID NO: 234926 - protein, 158 aa, Glycine max
  Clone ID: PAT_MRT3847_54167C.1.pep
FFFFFFFFFFFFFFFFFFFFFFFFFTPKEQNSFSLKKNKKINRVSPKSGGPKRPWKKQTGPQNFLLSTPLALKWPLNPRDTPFGFPKTGKNPPSPYKTNGKQGRDPQFIHKPTSLNQILKRAFKGPPSYQGIFGPWNIQGRETRVAKNRGRPYSKRLP

SEQ ID NO: 234927 - protein, 128 aa, Glycine max
  Clone ID: PAT_MRT3847_54168C.1.pep
MDNKTDFSTPLLPTSYGPVDSQGKGHTGPSSSSSSFSSIPTTLILTTLVAVFGSYVFGSAIGYSSPTQARIMRDLNLGVAQYSIFGSILTIGAMIGAVVSGRIADYAGRRVAMGFSQVFCILGWLAIT

SEQ ID NO: 234928 - protein, 67 aa, Glycine max
  Clone ID: PAT_MRT3847_54169C.1.pep
QTNSTQKILIQQNCRSIENSAKPIYRQYIGCHQKFTCILRHLLTRHSTICPWYLLQDQALNCLSIFF

SEQ ID NO: 234929 - protein, 43 aa, Glycine max
  unsure (1)..(43): unsure at all Xaa locations
  Clone ID: PAT_MRT3847_5416C.1.pep
PGVRSVLNLKLLYDPFLFLLYRRVKTXNICRFLMFSSFQQNLA

SEQ ID NO: 234930 - protein, 65 aa, Glycine max
  unsure (1)..(65): unsure at all Xaa locations
  Clone ID: PAT_MRT3847_54170C.1.pep
VHKPEKHQGQESEEEQEDPHEDDEPDKESQESEGSXSQREPRRHTNKNPFYCGCYRIQTPLLKPK

SEQ ID NO: 234931 - protein, 59 aa, Glycine max
  Clone ID: PAT_MRT3847_54171C.1.pep
KRGFELDQSVGHFVQQSFRSHQCHRPMVGISHQGCSSSCLFITGSYHTPEWRAIQSWSS

SEQ ID NO: 234932 - protein, 73 aa, Glycine max
  unsure (1)..(73): unsure at all Xaa locations
  Clone ID: PAT_MRT3847_54172C.1.pep
GDYSTLFSTAFTRGLLELSHINMSFSPCGNSSPILIASQQFPLHLVSKRNLPPTSSCNVGXVSQLHQMNSSPP

SEQ ID NO: 234933 - protein, 72 aa, Glycine max
  unsure (1)..(72): unsure at all Xaa locations
  Clone ID: PAT_MRT3847_54173C.1.pep
EKTKPASFLKENKRTTPTKYFRHYFAFQPIVLRNYPQFQKMITNLWFDPYCRRGTSCSSSSFXHLFVGKTKQ

SEQ ID NO: 234934 - protein, 90 aa, Glycine max
  Clone ID: PAT_MRT3847_54174C.1.pep
LSGVSVCWGEFTHYYIHNTVLTHSLYLSTITITWVMLVCLMGQLLLYYYSLVLPFFLHSTICNGKVLFGVGGVARERAAFFLILLSSPII

SEQ ID NO: 234935 - protein, 52 aa, Glycine max
  Clone ID: PAT_MRT3847_54175C.1.pep
SCSQPYPVIASRIRGFRNLDSSYFTMRHMQCFGHRLQHFVVTRCDLVCPDVR

SEQ ID NO: 234936 - protein, 65 aa, Glycine max
  unsure (1)..(65): unsure at all Xaa locations
  Clone ID: PAT_MRT3847_54176C.1.pep
GXRKQKNVPSCIIQTNRACPLMYPPRQGISLYICWLLPSSFEVSSFHIIWSSFFRGSLWLKRLGE

SEQ ID NO: 234937 - protein, 206 aa, Glycine max
  unsure (1)..(206): unsure at all Xaa locations
  Clone ID: PAT_MRT3847_54177C.1.pep
SYPGLCNLYRPWMXPLARLLSFLISFATALIGCYNLYKNVTALQATASCICGPFLDWXETWEMVPRTKSSGTMLFLHILQNAARWXLAFTHTMPSFSSFLGQPLVQSLXQIFGFLLPNFKFSFKLPENIISVIRLVQDPSFDIKLNALELLFSPLXIVLTAVRSIATSMLYAVHWVLWECLYAPVTLGPAIFGYVACISHTFVICL

SEQ ID NO: 234938 - protein, 39 aa, Glycine max
  Clone ID: PAT_MRT3847_54178C.1.pep
LGVPDPNNRMYYVEMKKKGVDNFSFCAHLVSRMECTFFI

SEQ ID NO: 234939 - protein, 181 aa, Glycine max
  unsure (1)..(181): unsure at all Xaa locations
  Clone ID: PAT_MRT3847_54179C.1.pep
WKSQSTIIWVANKNQPLNDSYGIAPIHENGXFVVLNGHKQVIWSTNLSNTSFNTSSQFSDSGKLVLAETTTGNILWDSFQQPSNTLLPGMKLSINKSTGKKVELTSWESPYNPSVGSFSSSLVQRKNIVELFIFNGTQLYWRSGPWNGGIFTGIAYMSTYLNGFKGGDDGEGNINIYYTVS

SEQ ID NO: 234940 - protein, 92 aa, Glycine max
  Clone ID: PAT_MRT3847_5417C.1.pep
HASAHAFADAWVNTGDEERETSLQKRTAKEKNLGGPEPTTNTTNVAAVKTPAKHSSKTVTSATLSIVQAVWAKDKKLAQTKHLNRENGLKAH

SEQ ID NO: 234941 - protein, 254 aa, Glycine max
  Clone ID: PAT_MRT3847_54180C.1.pep
LTLGYMIPLVLNFEALIAQNPNNKNFVFGNVVWLEVNEIAVRLITMVAFLLQFRLLQLTWSSRKSDESNKGLWIAERKATCVTLALYAAGLLIALLLKLKKDGDAVPVITPLNQHHSSWENIKSYGGLVLDGFLLPQIILNLFSNMRGNVLSCSFYFGTTFVRLLPHAYDLYRTHNYARVDSGSYFYADPSADFYSTAWDIVIPLGGVLLAIIIYLQQRFGAHCILPQRFKGSKVYEKVPVVAESEAEVETANL

SEQ ID NO: 234942 - protein, 225 aa, Glycine max
  unsure (1)..(225): unsure at all Xaa locations
  Clone ID: PAT_MRT3847_54181C.1.pep
MSLTMIDLGISFLRLVTSPDASSASIFGWLITGSFGLMAVIYAVLKWQRRSSLNWIKAAAREKKKVWKKFKVPLSEHLWVEDFTYREQPSTCCFCLTSLWPSQNLGTTASPRTPLHRCSVCGVAAHFLCSQFAAKDCKCVAQAGFGHIRHHWSERWVDVDENHEMSAFCFYCDEPCGVPFVKASPTWDCRWCQRLIHVKCHNKLTRDSGDXCDXGPLRRIMLSPL

SEQ ID NO: 234943 - protein, 68 aa, Glycine max
  unsure (1)..(68): unsure at all Xaa locations
  Clone ID: PAT_MRT3847_54182C.1.pep
AKFVVKSFRTRSSXIHFNIFSMKPLFITLLTIPRHLIVTAAPTFSVPKHLSPXSYLVLYISNHSPKYP

SEQ ID NO: 234944 - protein, 54 aa, Glycine max
  Clone ID: PAT_MRT3847_54183C.1.pep
TDGRSEQTRFSQSGARNPTDAALSLGPNKRHPLLSHDKSPHALHPVHSASTYLF

SEQ ID NO: 234945 - protein, 105 aa, Glycine max
  Clone ID: PAT_MRT3847_54184C.1.pep
PNTEARTTTCCAYNAFILKRRGQKHLACLDSRAIFRVENKAPNQLTRFHFEPKLRLLRPNSWDPPISLIREVGAYPMHYWPDSERPCHPPYHLSVMPCGQRLAMT

SEQ ID NO: 234946 - protein, 237 aa, Glycine max
  Clone ID: PAT_MRT3847_54185C.1.pep
KSRWWRPRHALHRWHTPRHRHARHCRPRVSGRGSARHCRPGSLPAPGARSCNHSRRRGCTGSDESVRSSVHLNPFQIPSSLTEPSTPGPDQTWPNRELARPDWRSCTGICGSTSSCPTGEPLPASPAPVSTSNKNGNPPTMNKAKLSLAWQIVIGLLLGIAVGALLNHSSADKAWWIGTVLQPAGDLFIRLIKMIVIPIVISSLIVGIAGVGDGKKLGRIGFKTFAVLSRSSPTVAI

SEQ ID NO: 234947 - protein, 72 aa, Glycine max
  unsure (1)..(72): unsure at all Xaa locations
  Clone ID: PAT_MRT3847_54186C.1.pep
IHYADITTLLLVTHAMKHTIDXLVEKYKDQHIMLVTXTLSIRFIYCPHIALSVVAKLVLLMKPSILTADVIL

SEQ ID NO: 234948 - protein, 84 aa, Glycine max
  Clone ID: PAT_MRT3847_54187C.1.pep
FLAARRGLDIAGVPLRKYSTGAGSVLDMVSPLTRQPFSPISLTLSSKANVANAANDTQNEKLQKTLVVRQFSIYHYLKDNHSGQ

SEQ ID NO: 234949 - protein, 63 aa, Glycine max
  Clone ID: PAT_MRT3847_54188C.1.pep
QEITFYLNECFIERKNGVWGAFLKREKIPPPVPKPNDSKKNLKMMGQGNTIFKWSYQSYYQKL

SEQ ID NO: 234950 - protein, 122 aa, Glycine max
  unsure (1)..(122): unsure at all Xaa locations
  Clone ID: PAT_MRT3847_54189C.1.pep
VGSNPYLISQFCRVELGPKPHQLISLPTGKKPIGCKWIYXNPDGFMAHXKARLIAKGYAQTYGVDYTDTFSLVAKLSSFRILISLAATHHWPLFQLDVKTTFSHGDLHEEVYMEQPTCSSRI

SEQ ID NO: 234951 - protein, 75 aa, Glycine max
  Clone ID: PAT_MRT3847_5418C.1.pep
LNTRDNSILCIIATTYKMRHSHIIFATSLLQSAFLYPFNSQKIIFLISNTIVTRIPILTTKHPLYQTLNPIPTND

SEQ ID NO: 234952 - protein, 76 aa, Glycine max
  Clone ID: PAT_MRT3847_54190C.1.pep
VSLSSPLRQVGKTVHIDDLPENSALGESNSWTTEIEQSGADTNTTLDSVLYNDLVEIDPHGQSLIDRKASRPFTRR

SEQ ID NO: 234953 - protein, 38 aa, Glycine max
  Clone ID: PAT_MRT3847_54191C.1.pep
VVSRSRTATWQVQREETSDDLMNAAMTDELSSVHSSSD

SEQ ID NO: 234954 - protein, 91 aa, Glycine max
  Clone ID: PAT_MRT3847_54192C.1.pep
CPAPKILFEQPKTERRYIFSACDVSIPDIVKLINEKYPEFKVPTQFQNIPGPLEAVRFSFKKIPDLGFPFKYRLKDKAPGANYTCIKKGLL

SEQ ID NO: 234955 - protein, 151 aa, Glycine max
  unsure (1)..(151): unsure at all Xaa locations
  Clone ID: PAT_MRT3847_54193C.1.pep
MASLCRRLSAAAPAGHFRFHRPAGICAVRYGYSVRRPMRLVAAGTTVGGGAWVTSDDVGGREEKVGPCSYAVEDRRVAEDGGSDAVVGSXNRVVEVXAAAVATVVLGVGNRVLYKLALVSVKHYPFFLXQLATFGYVIVYFAILYIRHHAG

SEQ ID NO: 234956 - protein, 44 aa, Glycine max
  Clone ID: PAT_MRT3847_54194C.1.pep
NNVSNKLKSRLEFPPKKFVKPIKPGGYVGVATFKRWFLFPKIFF

SEQ ID NO: 234957 - protein, 35 aa, Glycine max
  Clone ID: PAT_MRT3847_54195C.1.pep
RNSALSNLRLMGWSSRFITSVADLYIGVIFASVTL

SEQ ID NO: 234958 - protein, 65 aa, Glycine max
  Clone ID: PAT_MRT3847_54196C.1.pep
LFYQSSGSKLSQNGATGTSRISYIQDIADPTLPANPRKAVLYRPSLTHFIAVSMEKYKLVFVIFQ

SEQ ID NO: 234959 - protein, 68 aa, Glycine max
  Clone ID: PAT_MRT3847_54197C.1.pep
QTTPSLTFSHSSSYTPTLFHIGVCTWGVILTKMVGDPCGTCYSLASTSYRCRTCHRKGTRPPYACRQH

SEQ ID NO: 234960 - protein, 65 aa, Glycine max
  Clone ID: PAT_MRT3847_54198C.1.pep
SYFLWPRMEWNIRSSTNSCYSRKTSFVQNNGVEDFYKGYLSPQHLGKPKSYINDVLRIQNGHVKG

SEQ ID NO: 234961 - protein, 60 aa, Glycine max
  Clone ID: PAT_MRT3847_54199C.1.pep
LILHIIAISQVFSFLAIWNIADKLNYIFGGKKYKSNVKTCSLNKTNNDREVFLSFLLKYF

SEQ ID NO: 234962 - protein, 42 aa, Glycine max
  Clone ID: PAT_MRT3847_5419C.1.pep
LLSLPSRLLWLYRCRLVPWHDLPGFSSSPMRTASLLVYASSR

SEQ ID NO: 234963 - protein, 44 aa, Glycine max
  Clone ID: PAT_MRT3847_541C.1.pep
IYQRSPPRKKFFKHLLSFKTKREGFLTLRPLSFKTLPLSRLESL

SEQ ID NO: 234964 - protein, 94 aa, Glycine max
  Clone ID: PAT_MRT3847_54200C.1.pep
MLGFHGLSISYLTQELNMPSLAGSNTLTNCGGSSSFTPLIVAIIAYSCAGRSWTITDASLIHELRWISITVSAILPQCRPPRCPAQADCRDGSS

SEQ ID NO: 234965 - protein, 144 aa, Glycine max
  Clone ID: PAT_MRT3847_54201C.1.pep
KKFFFFPPLVVRKVFKIKINPPPPDFKWAFGHFCIHPEGRPVLVKLEKNFGLFVWPRGPPRRPLKGLGNPFTSSLGDEWAPPEPKGGVKKGARPWQIAFGAGFKGPSAVWGAFGPPPPVKGKNPGGGGIHGFPVQGPKGAPIAS

SEQ ID NO: 234966 - protein, 48 aa, Glycine max
  Clone ID: PAT_MRT3847_54202C.1.pep
TPRSHPRQQCLAQPPSQCLGQLPSLPRQTQMNPIPLAHPNPNLIQTLI

SEQ ID NO: 234967 - protein, 92 aa, Glycine max
  unsure (1)..(92): unsure at all Xaa locations
  Clone ID: PAT_MRT3847_54203C.1.pep
IVTTQCEQACAAAPAKLYKAMAFDFNNDIPKAIPNFVKSAEIIGDQGPGSINKLDLANGYVNQKVDVVDXENNMYHYTAHERRVLSHLLQKV

SEQ ID NO: 234968 - protein, 48 aa, Glycine max
  Clone ID: PAT_MRT3847_54204C.1.pep
LIDTYQNAHMLDTWHNITTTYITFLCFSILGHLMLINHPTCSALDICL

SEQ ID NO: 234969 - protein, 80 aa, Glycine max
  Clone ID: PAT_MRT3847_54205C.1.pep
HCLFSFLGLQPAGKAPFFGSNLCCVISSHNLFHSLAGAIPAGAGAFNRVCFLKRLVPAGSLSHLLYYWQTPGCPMDVSPG

SEQ ID NO: 234970 - protein, 89 aa, Glycine max
  Clone ID: PAT_MRT3847_54206C.1.pep
AFCRWVPSAWWVALPFPLGLGPCLLVASGALCCVLVAPASLGLLGWGRLLCLAPVWRVLAFLFCPLRVLVSWGPKRQRARGSSRGFRPG

SEQ ID NO: 234971 - protein, 137 aa, Glycine max
  Clone ID: PAT_MRT3847_54207C.1.pep
MQIRVRCNCGEGSCEEWGVIELQGVVEPQPGFHDSLQNLHIGTLCRPSSQEVYTFTVGYHELTGSKVPLKKPMVVLKKVKHPDGESGCKVELQVVGVIRHKILFKNRPKALISKPQITSRERQKPIMLGSSPSNQTA

SEQ ID NO: 234972 - protein, 119 aa, Glycine max
  unsure (1)..(119): unsure at all Xaa locations
  Clone ID: PAT_MRT3847_54208C.1.pep
LHPSGSPTKPSLHAEEPILAETLFRSAQSPYQHELVQTAKYXQSPGRGILAIDEPKATSGKRIASIGKDKTEGNRPANRQLXITKPDHGEHIYGATLHEETLYQKTTEGKAICRMPPAN

SEQ ID NO: 234973 - protein, 103 aa, Glycine max
  Clone ID: PAT_MRT3847_54209C.1.pep
GCNCGEGSCEEWGVIELQGVVEPQPGFHDSLQNLHIGTLCRPSSQALLYTFTVGYHELTGSKVPLKKPMVVLKKVKHPDGESGCKVELQVVGVIRHKILFKNR

SEQ ID NO: 234974 - protein, 99 aa, Glycine max
  unsure (1)..(99): unsure at all Xaa locations
  Clone ID: PAT_MRT3847_5420C.1.pep
MAPSTISNPGAGFVDRAVPSMIATITGLRIMAGFPTRKTNKDXTFIDCNGGRVHCMHVWPPVGKKKCENLSYLTDLEDAQWAKEAEYLVREGMDINARN

SEQ ID NO: 234975 - protein, 255 aa, Glycine max
  Clone ID: PAT_MRT3847_54210C.1.pep
GIRLRAFNTFAPNKAAGDHRTPIKLKEISPDQSNQTAADTWNPWQQPDQTGGGGASQTIHETQLKASRDVAMATAAKAKLLLRELKTVKADLAFSKARSAQLEEENKMLRDREGTDKGQNVTRADDDLIRLQLETLLAEKGRLASENEVYARENRFLREIVEYHQLTMQDLVYLDEGMEEVTEIYPLDTTGTVVPRVLPKSPRSPLSRGGSHTKSFFSVPQILEQEQENNVTSELDEAPPSIDISVSVSKDQHAK

SEQ ID NO: 234976 - protein, 158 aa, Glycine max
  Clone ID: PAT_MRT3847_54211C.1.pep
DNVRNQRENVVLMISYKQSRLGIPAETDPKIDEKTINEVFLKVLDNYIRWCRYLRIRLAWNSLEAINRDRKLFLVSLYFLIWGEAANVRFLPECICYIFHNMAKELDAILDHGEAAPAVSCVTDDGSAKFLEKIIYPIYQTLFEEADRNNNGKAAHST

SEQ ID NO: 234977 - protein, 94 aa, Glycine max
  Clone ID: PAT_MRT3847_54212C.1.pep
IDLLASWRACSTACRFVRVLSKEEELWPVRVAAFVIEKRVFGGIPDQYGSCAWLDDALRSSLIGALGLRGFWLLDRSPPMILLWLSFLAPCFFH

SEQ ID NO: 234978 - protein, 55 aa, Glycine max
  Clone ID: PAT_MRT3847_54213C.1.pep
ILSFIPNSMAPILINHLFVILYGLRAINTLSTTVSISDTSNSTRHLSVFWNILSN

SEQ ID NO: 234979 - protein, 56 aa, Glycine max
  Clone ID: PAT_MRT3847_54214C.1.pep
FLPPVGRVFFKYALLRFFSFNKGFGISTTNNCVRVSYMSPPPFSFISPPCFFFFIF

SEQ ID NO: 234980 - protein, 68 aa, Glycine max
  unsure (1)..(68): unsure at all Xaa locations
  Clone ID: PAT_MRT3847_54215C.1.pep
SSFADVIFCSPGKTPAIMEAETWDFEEISKKVLCNPLISKFQNHVYXSTFFYIMAAVMILWSMIKPTN

SEQ ID NO: 234981 - protein, 125 aa, Glycine max
  Clone ID: PAT_MRT3847_54216C.1.pep
MAALTVGHCCCSKRVPSSHHEFTNRSRSPRIFILSSCHGRTPDPKEKKDDHKMGEGKLSLLKWKMLNDIEKVGKRVKQNLSPQQKQKGDWKDLLLMSISFAVYVYISQMLVCAYFAWTSMPKPIW

SEQ ID NO: 234982 - protein, 57 aa, Glycine max
  Clone ID: PAT_MRT3847_54217C.1.pep
MLYLRASARDRVIYIFSSLSLEPLQSTDDSIHLANRFNCLPRRLNTICACIYYCIYF

SEQ ID NO: 234983 - protein, 74 aa, Glycine max
  unsure (1)..(74): unsure at all Xaa locations
  Clone ID: PAT_MRT3847_54218C.1.pep
GELATKYGQPPGYDRAKGVEIGNKDIKLXFLEKAFPPQKWIVCIYKIKPPKNRWELQKNKNCFFFGKRKPFNEL

SEQ ID NO: 234984 - protein, 100 aa, Glycine max
  unsure (1)..(100): unsure at all Xaa locations
  Clone ID: PAT_MRT3847_54219C.1.pep
RRLAAFRRLGFRFRGFNCIFIGATGGPAAPMQDVQVTKDWLFSFKECLPRTYCVXNQKNPFVXNRWLGKLTFPQGTFRSVKRMPISIGXGAGAKNAIVMN

SEQ ID NO: 234985 - protein, 72 aa, Glycine max
  Clone ID: PAT_MRT3847_5421C.1.pep
SNIIYLNTIYVIPHHLSYNITSQHNTSHIFSHHSRIQKSKHNISQPVNNDQYTSINIIDILRFNPRCDVISC

SEQ ID NO: 234986 - protein, 85 aa, Glycine max
  unsure (1)..(85): unsure at all Xaa locations
  Clone ID: PAT_MRT3847_54220C.1.pep
XXXXXXAXFLXLXWXPXXGPLXCXGXNLXHSSTHYLPXEGSVHNPFENNQQKIKSXTIHTTPLGSSELSCYFCNXSTTTPTQQCT

SEQ ID NO: 234987 - protein, 143 aa, Glycine max
  Clone ID: PAT_MRT3847_54221C.1.pep
MENSNSNSRKPPKNGNRMILERGVVGLGIVAAVNSTDVGVSSAVAAAGFRGTSTYDYGIFYASPLNNTGTRFPHFLNSCNLCDKHLHGVDIFIYRGEKAFCSAECRETHISISNDDHQDVVKCRSRVVEHNPVTLTSSILAAA

SEQ ID NO: 234988 - protein, 207 aa, Glycine max
  Clone ID: PAT_MRT3847_54222C.1.pep
MADPKAYWCHECDMSVSLTLPPSPLLCPHCHTHFLELMDSPTLSQNDTESSLFDVVFQDALLLLNPPSSKPRPLPSLHVTPSLLSSLDPNGVVRCAVCKDQITPHAEAKQLPCKHLYHSDCITPWLELHASCPLCRFRLEEEEEEGGDGVMTKIRREIIARLTVLTEEDFYGLRTTLNHIASRHALIQENENRGAQIGETQGGDSAC

SEQ ID NO: 234989 - protein, 111 aa, Glycine max
  Clone ID: PAT_MRT3847_54223C.1.pep
VIQSISYLIFQSSPKTHKHLRKHTKHQQLWVTVADLVSLNGSYPPILPNMQGTSDDPELTKVATKIQANYRGHQVRKNISAGPDALDIAGQQVDHEGNSQHGPTSEISSSG

SEQ ID NO: 234990 - protein, 62 aa, Glycine max
  unsure (1)..(62): unsure at all Xaa locations
  Clone ID: PAT_MRT3847_54224C.1.pep
SVFNSYQKGQIKLAHKSGLGPVTXQRFYNTVQKPIAILYYSKRTSNGGLLITEATGVFETVK

SEQ ID NO: 234991 - protein, 86 aa, Glycine max
  Clone ID: PAT_MRT3847_54225C.1.pep
GRPTRPGEESTKKSKHRHSKREQGGEGKGRKRDTGGTGNQGHGRARDQREQGHAEKTTTRADPGRKRDESKHTNQPGATEKQKSHN

SEQ ID NO: 234992 - protein, 53 aa, Glycine max
  Clone ID: PAT_MRT3847_54226C.1.pep
RVTPAVIWGMSRTFSSRSAGMPQSCLMYFIVCGKQLISESEIRILLSVLRMDY

SEQ ID NO: 234993 - protein, 50 aa, Glycine max
  Clone ID: PAT_MRT3847_54227C.1.pep
SPSTLLPARGGISRDSMHKRRATAGIKNARRKKSKYELGRQPVYTKLPSN

SEQ ID NO: 234994 - protein, 68 aa, Glycine max
  Clone ID: PAT_MRT3847_54228C.1.pep
LAQLASTYGINEAYPSLPCFQQHENQQFVCYYHKPWTYNTIDTTIQFEIGTIQSYSMLTSCIYHISFR

SEQ ID NO: 234995 - protein, 30 aa, Glycine max
  Clone ID: PAT_MRT3847_54229C.1.pep
DRDPSVHGLYIVAEVYFIIRTYGIICTPRV

SEQ ID NO: 234996 - protein, 44 aa, Glycine max
  Clone ID: PAT_MRT3847_5422C.1.pep
TRICCASLTLLSLFSGPKIYISTFDLVGFFFSFVEILNVHILTL

SEQ ID NO: 234997 - protein, 34 aa, Glycine max
  Clone ID: PAT_MRT3847_54230C.1.pep
PNNKIMGGNYLWLGLHMYSLVPIMTKNVLGLVEK

SEQ ID NO: 234998 - protein, 200 aa, Glycine max
  unsure (1)..(200): unsure at all Xaa locations
  Clone ID: PAT_MRT3847_54231C.1.pep
EQAKLSWYHALGCNVDLLTWPSTEVLHLYNNAEENMEKGMQIWEESEKQNLSKTSSSNDVRLHLQNMGLDGLFKNISLDEFAAQEAHMRSQINLLWGTMLYERSXVEFKLGLPIWHESLEVAVEKFELAGASPTDIAVVLKNHCSNNTAVDGLAFKIDEIVQAWNEMYKAKMWQSGVPSFRLEPLFRRRVSKTYHAFELA

SEQ ID NO: 234999 - protein, 136 aa, Glycine max
  Clone ID: PAT_MRT3847_54232C.1.pep
MSNSSAGTSSKPRAASSQPSETSSKRKRGVFQKELHHMMYGFGDDPNPLPESVALMEDIVVEYVTELVHKAQDIGSQRGKLSVEDFLYLIRKDSPKLNRCTELLSMNEELKQARKVFESDEEKLRKVFEVDDSVEG

SEQ ID NO: 235000 - protein, 108 aa, Glycine max
  unsure (1)..(108): unsure at all Xaa locations
  Clone ID: PAT_MRT3847_54233C.1.pep
AADKTIKTHETINNRIALVMKRGKFTLPNKTDLKSLXNSKGXMIIIANNSPPLEKGXTQYYAHDGTRLEFVHTIENNVDLRTACGKYHTQRCLTIIDPGDTDIIKTLP

SEQ ID NO: 235001 - protein, 138 aa, Glycine max
  unsure (1)..(138): unsure at all Xaa locations
  Clone ID: PAT_MRT3847_54234C.1.pep
MGRLAESKLVQELVLYAASAALSCLVLFVGLRQLDPNREASKKAFQHKKEIAKRLGRPLVQTNPYEDVIACDVINPDNIDVEFNSIGGLETIKLALFELGILPLKRPDLFSHGRLLGRQKGXPLYGPPGTRRAMLAKA

SEQ ID NO: 235002 - protein, 46 aa, Glycine max
  Clone ID: PAT_MRT3847_54235C.1.pep
RILIQKQALSSQAHKHITPLMHHTVLYLKNSESLVGMQYNMYNYQE

SEQ ID NO: 235003 - protein, 66 aa, Glycine max
  Clone ID: PAT_MRT3847_54236C.1.pep
FHIINIDTLLSAVMPSLYNKHLTTYRKIGFNIIIHGGISHGCGAQQSLITVLTKVICVCEYYTGEE

SEQ ID NO: 235004 - protein, 121 aa, Glycine max
  Clone ID: PAT_MRT3847_54237C.1.pep
LTILMERSALSLSLSSHLHSNVVLESALAHMLEGRHVSDTNADTFGTSYPELHAKYWSQLQMLLKKMLATILSSSANKSPCQPSSTSSRFGDGGKIRELYKMSLKGTNMIQLYNMYNLWIS

SEQ ID NO: 235005 - protein, 51 aa, Glycine max
  Clone ID: PAT_MRT3847_54238C.1.pep
PVTFGPPFVNWTWTNPWIFWAGPLIGGGNPGPVYKVVFFSPTPEQLPPPGF

SEQ ID NO: 235006 - protein, 67 aa, Glycine max
  Clone ID: PAT_MRT3847_54239C.1.pep
FILLNKTKCMQLFYEYMMQWKRKAKEGRKKIRSKGLAKDEKKKRKKAETASNTSTTKMKILYKKNKN

SEQ ID NO: 235007 - protein, 139 aa, Glycine max
  unsure (1)..(139): unsure at all Xaa locations
  Clone ID: PAT_MRT3847_5423C.1.pep
RPEPETEEQDKPKKIDAILRQRIDPQYNEAQAQTETNVLKLSLADAETANGSMLDLKIPQSKIAXTKNTVGGTXLRPDLLANFMTEGHSRASVDLQRTHRINSMIKMVATVGIPETTRMTCACAMNSAFRGRAMSDINT

SEQ ID NO: 235008 - protein, 71 aa, Glycine max
  unsure (1)..(71): unsure at all Xaa locations
  Clone ID: PAT_MRT3847_54240C.1.pep
ESGRSSEMFDLHNVVISIPLPGIREAPSVRQIDGEWKLDSRNSVLEWSILLIDQSDRSGSMXFPVPPADPS

SEQ ID NO: 235009 - protein, 170 aa, Glycine max
  Clone ID: PAT_MRT3847_54241C.1.pep
EPFLCLLFLSFLLFCSSGTTASSSSAATTFFQKSKISKSEIRFSVSDYKFLSTLTNTNLSDDFFLNESLVENFVSSKSKSSLVSWLETRLLNIFPQVDIRSIVVRCGRECLRPDEMPLLIPVLKSIHSFLSNLQLSRETKVCVAFPLSFLENLNASYESDLLRNVMFSIQ

SEQ ID NO: 235010 - protein, 49 aa, Glycine max
  Clone ID: PAT_MRT3847_54242C.1.pep
TIRRNWISFLFRNNLGWVDKYILDDISFSLFNKSPPIKSEHLFSVFKNR

SEQ ID NO: 235011 - protein, 71 aa, Glycine max
  Clone ID: PAT_MRT3847_54243C.1.pep
IYNLNPLIPNYHVARLSLYLLPTSASMHHIGIFQSQLLLPSIIVTYNTCFQCRVQAYHVIANKAFKYKSNI

SEQ ID NO: 235012 - protein, 73 aa, Glycine max
  Clone ID: PAT_MRT3847_54244C.1.pep
TFFMSWFLCFVLFFLNPSIFYRESMINLLRYGDPRNLSLPKYIPCLQGIMFSVNYVPPCSFFILYIDVFQTRS

SEQ ID NO: 235013 - protein, 334 aa, Glycine max
  Clone ID: PAT_MRT3847_54245C.1.pep
MGEIALPNGISNGNINGVNGQSHSLNGYRKSCWYEEEIEEDLRWCFALNSILHTGASQYQDIALLDTKPFGKALVIDGKLQSAETDEFIYHECLVHPALLHNPSPKNVFIMGGGEGSTARELLRHKTIDKVVMCDIDEEVVNFCKSYFVVNKEAFRDTRLEVVINDARVELEARDESYDVIIGDLADPIDGGPCYKLYTKSFYELIVKPRLKQGGIFVTQAGPAGIFSHTEVFSCIYNTLRQVFKYVVPYSAHIPSYADIWGWVMASDSPLDLSAEELDLRMRHRIKGENGYLDGKTFTSASTLSKTVRNSLDNETHVYTEESARFIYGHGKHA

SEQ ID NO: 235014 - protein, 63 aa, Glycine max
  unsure (1)..(63): unsure at all Xaa locations
  Clone ID: PAT_MRT3847_54246C.1.pep
LALIFPISFCNXWDNPLGFFIPFVMYNSVVSTKXSITSQSLKFPRITPLXLTKEPVGYKNKCS

SEQ ID NO: 235015 - protein, 79 aa, Glycine max
  Clone ID: PAT_MRT3847_54247C.1.pep
HKLLVSPSTCKGNDGLFLQCIGFYKVPSCTRFFDIQNRTLFLFGIKVDFLGSVVLTYTVVSPSTTAFACNDSGSDTITC

SEQ ID NO: 235016 - protein, 68 aa, Glycine max
  Clone ID: PAT_MRT3847_54248C.1.pep
EPSRPFPINFFLPGRKFSKVTTGWACFLRKLIAVEEPLFSSRSQGPFHHPFWSKEGAKSSILQRIFCA

SEQ ID NO: 235017 - protein, 153 aa, Glycine max
  unsure (1)..(153): unsure at all Xaa locations
  Clone ID: PAT_MRT3847_54249C.1.pep
CKKNIVXRWEQXKQXLXSGKHKXXGXGRCXEEIVFCFTYPRLDXXVSKHMXHLXXAPFXVHLKTGRVCVPIDPKRCEEFDPTTVPTXLSQLIEELNYEGSRADADGESNRTSLGNAITLFRSSFLQPLLKACKEEIENSYNLKLQQSKNSLGW

SEQ ID NO: 235018 - protein, 64 aa, Glycine max
  unsure (1)..(64): unsure at all Xaa locations
  Clone ID: PAT_MRT3847_5424C.1.pep
XXXKXDXPXPTXSTHLRSARTNVLASVPXDTGERDXSLRAARNLLTMGCGDXSTKPPWQRGQTT

SEQ ID NO: 235019 - protein, 68 aa, Glycine max
  unsure (1)..(68): unsure at all Xaa locations
  Clone ID: PAT_MRT3847_54250C.1.pep
ENLIIDREAKIWNNVFEKAEKVAGIERGSIRATVLIETLPAVFQMNEILYELKDHSVGLNCGRXDYIF

SEQ ID NO: 235020 - protein, 83 aa, Glycine max
  Clone ID: PAT_MRT3847_54251C.1.pep
PKTANSHYLQQRNFTSSHQGKRSLGATLTKDSKFSLFAATKFHFVAPGEAITRSNSDQRQQILTICSNEISLRRTAKKWRSEW

SEQ ID NO: 235021 - protein, 82 aa, Glycine max
  Clone ID: PAT_MRT3847_54252C.1.pep
IMVNSTPHKCFYEASQFTHRCGNFGAGIQRSILSKPFSKGKLHSFSIRPAQSLPDRGATYHYFFRPLQIRTCICVTWWSSFL

SEQ ID NO: 235022 - protein, 174 aa, Glycine max
  Clone ID: PAT_MRT3847_54253C.1.pep
HASAFGLEKKVDPSYHDILNRAVTYASGLPLALKVIGSNLFGKSIEEWESALNGYERSPDKSIYMTLKVSYDALNEDEKSIFLDIACCFKDYELAKVQDILYAHYGRSMKYDIGVLVEKSLINIHRSWDDKEVMRLHDLIEDVGKEIVRRESPKEPGKRSRLWSHEDIKEVLQE

SEQ ID NO: 235023 - protein, 71 aa, Glycine max
  Clone ID: PAT_MRT3847_54254C.1.pep
SSVDLLIRFLQSMFKKVSKRAKKASRSVLPTVISPQLVSFAVDGTLLLASLSVVKALLEVLLLITEWLKGE

SEQ ID NO: 235024 - protein, 171 aa, Glycine max
  Clone ID: PAT_MRT3847_54255C.1.pep
MLHRSFKPAKCKTTLKLAVSRIKLLKNKREAQIKQLKRELAQLLESGQDRTARIRVEHVVREEKTMAAYDLVEIYCELIAARLPMIESQKNCPIDLKEAVSSVIFASPRCSDLPELMDVKKQITSKYGKEFVSAAIELRPDCGVNRMMSVISSGNPPDFGENDVKPFSILF

SEQ ID NO: 235025 - protein, 59 aa, Glycine max
  Clone ID: PAT_MRT3847_54256C.1.pep
VTLEGRSDPDFSPPPPAIDNRRRRNNRASAGSGTAIHGITSFFPRFPANFPRPLSTKGK

SEQ ID NO: 235026 - protein, 136 aa, Glycine max
  unsure (1)..(136): unsure at all Xaa locations
  Clone ID: PAT_MRT3847_54257C.1.pep
KALFKVCFSTTLFSAPPPFQIXDPNFGFPAAGSKNAFSKSIERFFLLPALPWEKWPNGSLKGLKARGGPPVNISWKKGDFQEVGIWSEAQTRPSLRKRIPYRGPMVPADLVSGLFYKFNGQLKCLNTCFLSEMPCS

SEQ ID NO: 235027 - protein, 258 aa, Glycine max
  Clone ID: PAT_MRT3847_54258C.1.pep
RNAREKRKLGSDITEEQSPSKRFRDVGNPKKAPEENKYHVQNISQVTKVEGVNWKNTKIDDNPSEQQFSHEKNRGYSDQCTAFLSNLHPTANYEHIRNFFSDVGGIVAIRILHDKFTGKSRGLAYVDFLDEEHLAAAIAKNRLKFIGKKLSIARSDPKRGGRESSNPKTLTEHADATNHSSQKASGSKETDDTYKGDVKDVKFSSRKPGNDNIQLKGKNTFAVPRNVRPLGFTTNKPKAEEGDEKPKSNEEFRKIFIR

SEQ ID NO: 235028 - protein, 50 aa, Glycine max
  Clone ID: PAT_MRT3847_54259C.1.pep
YMDGGLGEMVIVARTCVNMVHLLHVWLLFKLAYVSRESLVMGCRKLWDVL

SEQ ID NO: 235029 - protein, 107 aa, Glycine max
  Clone ID: PAT_MRT3847_5425C.1.pep
DQKHQTHNILYITTRLCYNVSAKHGFHGFVETLIKSFSSPSLTHVCLLSLLGNQEKHPLDVFALAPILFILALPFSVSFIFSLCCFHDTYASASSTPAAIVSARQYC

SEQ ID NO: 235030 - protein, 386 aa, Glycine max
  Clone ID: PAT_MRT3847_54260C.1.pep
EREFFGLRSKNGAWTTMKDDAVNNSRDLVRSSAMQWSFPNKVSALPQLPSLHNQFGKTTLRMTILEPLASSGYMAMSTQYAFDSNQKSFLGLTNRNLSISKHAAGNKQGMTVYPLQCCDAQSEEARIFSVSNQSNQVSPVLQSNLASTGLNMVNSVIKPQPFGSKSSGTPLSILPSIGSIVGSTDLRNYSKSSTMPTQLTIFYAGSVCVYDDISPEKAKAIMLMAGNGYTPTEKMELPTVKLQPAISIPSKDDGFMISQSYPPSTFPTPLPLTSHVNSQPGGGSSSNKEISIIRQVGPSTAPTNHLGSPIIGSIGSASKEKAQPVCLPQARKASLARFLEKRKGRMMRTSPYLYMSKKSPECSSSGSDSVSFSLNFSGSCSLPATN

SEQ ID NO: 235031 - protein, 98 aa, Glycine max
  unsure (1)..(98): unsure at all Xaa locations
  Clone ID: PAT_MRT3847_54261C.1.pep
RSLFLPFPNNLVAMQFHAYEMXPLRMNTGYCPLPGSKCXSWTLSVEAHNILGFETIPEEFLETTXEYIHGEQYKLDSKTVNQQAYFYARDLEVHPKDT

SEQ ID NO: 235032 - protein, 47 aa, Glycine max
  unsure (1)..(47): unsure at all Xaa locations
  Clone ID: PAT_MRT3847_54262C.1.pep
MSCCGGNCGCGSACXCRNTCARCKMYPYLIYTVSTTTKTLFMRVAPF

SEQ ID NO: 235033 - protein, 101 aa, Glycine max
  Clone ID: PAT_MRT3847_54263C.1.pep
LSNVLFPLLLQHGPSAHSSLPVPPTLTYLPCPLPHTPPFSYPPISNHLSHLPPSSPLPIHTTLHPSLRPLPPFYPKLPISPPRRPFARPPHLAPTVPTSTL

SEQ ID NO: 235034 - protein, 48 aa, Glycine max
  Clone ID: PAT_MRT3847_54264C.1.pep
IIIFIHLHILQFIYILIYSTYLSLSNINCILPILHYKSSDVLIYSLLI

SEQ ID NO: 235035 - protein, 37 aa, Glycine max
  Clone ID: PAT_MRT3847_54265C.1.pep
CLISKEKERRTFIQFQHFIELPQLILYSISKKNKTYK

SEQ ID NO: 235036 - protein, 68 aa, Glycine max
  unsure (1)..(68): unsure at all Xaa locations
  Clone ID: PAT_MRT3847_54266C.1.pep
SSRFXDALDNWMLFCPXXNIXVLLATNYDHYVISCVSVYSLDSSYLLLDYYYFTYHLLCXNQKSSITI

SEQ ID NO: 235037 - protein, 61 aa, Glycine max
  Clone ID: PAT_MRT3847_54267C.1.pep
SIFEHTLLSIDNALYFKAFDPTWLFHKCSGALLAPHIWTVAVFLNTGGTKDDWRLNWKNHS

SEQ ID NO: 235038 - protein, 105 aa, Glycine max
  Clone ID: PAT_MRT3847_54268C.1.pep
MPMAGGGAPMMAHPMTCIDVTVNMAQGLSYLMQGGTPSTLCCSVEKNIWASAAPTLDKQTVCRCLRVDAARYNFNDQWAQALRGYCKGKVPYKIIRSTNCAGMRF

SEQ ID NO: 235039 - protein, 56 aa, Glycine max
  Clone ID: PAT_MRT3847_54269C.1.pep
RERKIQTQRKSIRKRGLRKKKETPDQASVFHLWSPLLPLPRNPPLNHHPIFTNHNH

SEQ ID NO: 235040 - protein, 46 aa, Glycine max
  unsure (1)..(46): unsure at all Xaa locations
  Clone ID: PAT_MRT3847_5426C.1.pep
VDLITXRRAIRDIHPLRHHLNTIHTISKFIINERYIIYMGLITASF

SEQ ID NO: 235041 - protein, 152 aa, Glycine max
  unsure (1)..(152): unsure at all Xaa locations
  Clone ID: PAT_MRT3847_54270C.1.pep
MMKQVSLVSYQCKFFLLIKLLLLSKTVIAEPRAKTVLTTCGHELEHNTTIFVPNFVATMEKISDEMRKTGFGTAIVGTGPDTNYGLAQCYGDLSLLDCVLCYAEARTVLPQCFPYNSGRIFLDGCFMRAENYSFFNEYXGPGDRAVCGNTTR

SEQ ID NO: 235042 - protein, 94 aa, Glycine max
  Clone ID: PAT_MRT3847_54271C.1.pep
VWCYLPGGTLPQPILSPSTSSTHSNLTLSPNIMLALYTRRLIQHHTKGAPTSYPPLNLSNKPFTIPQSIFVTSIYPMELPSLHSLKATPRKTSK

SEQ ID NO: 235043 - protein, 66 aa, Glycine max
  Clone ID: PAT_MRT3847_54272C.1.pep
NQIHKYILLIITQPTIVIYNTQFPVSQQIDTYNKRQNVCNNLNVASILKFVATPYYIILKIPKIDS

SEQ ID NO: 235044 - protein, 99 aa, Glycine max
  Clone ID: PAT_MRT3847_54273C.1.pep
VSGGILQGGILGLVNQLCFGFLGMKLNLYFGHKLSNIDDLLCVFYHIILLSTFYAVHLVSNIPLCMIRTIFITLQMYAHSNRFHFPNFYSTYDLSLFIF

SEQ ID NO: 235045 - protein, 75 aa, Glycine max
  Clone ID: PAT_MRT3847_54274C.1.pep
SSYLPIKPKALHLFCIDHSFSLSFLINPSMQTNALSHTHSDTHSLVSLYCMCPFSILIIYLFKYHYLSMLSVGIF

SEQ ID NO: 235046 - protein, 59 aa, Glycine max
  Clone ID: PAT_MRT3847_54275C.1.pep
LGPCHMSEIHLSKVNLVLLHSRLNTEDSSVLATPYFTYIRCFFLAFLIRLAITLIYVIL

SEQ ID NO: 235047 - protein, 95 aa, Glycine max
  Clone ID: PAT_MRT3847_54276C.1.pep
KDVVDESVWSDVDMLRSVKPFGWSYAVSKVLTEKAVLEFGEHNGLEVATVIAPFIVGPFVCPKLPDSIEKALLMVLGMKAAPYSTMFLLPVYFSC

SEQ ID NO: 235048 - protein, 62 aa, Glycine max
  Clone ID: PAT_MRT3847_54277C.1.pep
PSRPPSQPISRGMNLGSLVRPTLKILRHISSTINVLNMLVRWRIRVPSQTSNIMFTRAESAR

SEQ ID NO: 235049 - protein, 119 aa, Glycine max
  Clone ID: PAT_MRT3847_54278C.1.pep
RTGIPGSTHASAASPIPPPAPLTHIHTRLVLLGPWEAWLELVQLFCSVVPVPGFRLLPSACLKEAKAYPVQKAAFKGPYWLGSCRDGLSCPAALCCVGSTLKHANGSWDPSQKPALTRP

SEQ ID NO: 235050 - protein, 124 aa, Glycine max
  unsure (1)..(124): unsure at all Xaa locations
  Clone ID: PAT_MRT3847_54279C.1.pep
FVFFFFFFXFFFFFFFFFFFFFFFFFFFFFFFFFFFFGGGKILKFKKKAGFGRGGGNFLGPKTQPGSKKGMGNKGGLLKKHPGGKKPPPIFKKDLAPLTKNPCQKHGGNSFAKKNKKILLEPPS

SEQ ID NO: 235051 - protein, 372 aa, Glycine max
  unsure (1)..(372): unsure at all Xaa locations
  Clone ID: PAT_MRT3847_5427C.1.pep
MEITNVSEYEAIAKQKLPKMVFDYYASGAEDQWTLQENRNAFSRILFRPRILIDVSKIDITTTVLGFKISMPIMLAPTAMQKMAHPEGEYATARAASAAGTIMTLSSWATSSVEEVASTGPGIRFFQLYVYKDRNVVAQLVRRAERAGFKAIALTVDTPRLGRREADIKNRFTLPPFLTLKNFEGLDLGKMDKADDSGLASYVAGQIDRTFSWKDVKWLQTITKLPILVKGVLTAEDTRIAVQSGAAGIIVSNHGARQLDYVPAYYISLRXVVKAAEGRVPVFLDXGAFRWDTDVFKALALGASGIFIGRPLVFLLAAFEVAGVLNVLRMLREEFELTMALSGCTSLKDITRDHIVTDWDQPRTIPRALPRL

SEQ ID NO: 235052 - protein, 35 aa, Glycine max
  Clone ID: PAT_MRT3847_54280C.1.pep
GILVTFRSLRYAQFYVKRSRFDSYIVTQAIEHLDS

SEQ ID NO: 235053 - protein, 79 aa, Glycine max
  Clone ID: PAT_MRT3847_54281C.1.pep
ERGSRSFDLSLSPISHRSVFSNCAQSGRACDSGIVSPGPRVVFGSLRNRTHRSRWFLRGSSNQVPLAFVSGPCVRLPVN

SEQ ID NO: 235054 - protein, 160 aa, Glycine max
  unsure (1)..(160): unsure at all Xaa locations
  Clone ID: PAT_MRT3847_54282C.1.pep
VNKILLFNVIVVNCISKILPFFGFLSISQIPSLQLEYLTNFIAELSFLEYSLLSYPPSLIAASVIFLARFILFPSKKPWNSTLQQYRLYRPFDQCAXLKRLHRLCCFTDDGNKVLQDESNKGDAHAKFGQSFSLSMMQGPFPGRSIVGTRKRRGHMCWWS

SEQ ID NO: 235055 - protein, 195 aa, Glycine max
  unsure (1)..(195): unsure at all Xaa locations
  Clone ID: PAT_MRT3847_54283C.1.pep
METEKKRSKGSFLSFFDWNTKSRKKLVWNDPEVSKQGKENVENLPKSRLTRKKVDEIGASPSNIQSCDFDSTLSICSDEGCGSKAPGLVARLMGLDSLPAAAATELSCTSLYGSKSHGASHCNEGALHSADDFCPADYINTLXSQRSLLWMPWKSRARKVESLPIKRFQTEMLPPKSAKTIPVTHNKLLSPIKKS

SEQ ID NO: 235056 - protein, 82 aa, Glycine max
  Clone ID: PAT_MRT3847_54284C.1.pep
HSASLSPGRPQLRQCQRLLRQRRAPAQAQLLPMPGRTRSGTASLDLRLCEGSKCLSCSAWSARTVNCESSAAIPLAGLKEQS

SEQ ID NO: 235057 - protein, 95 aa, Glycine max
  Clone ID: PAT_MRT3847_54285C.1.pep
PSGALRLSAFPSSPSRRMVQRTYTLFPHVPDVQFFVPATVAGCAKLDSGPKYILRTKPFVPCMCQYESPVCNELEYPKCPSWAICFISMFSLSLA

SEQ ID NO: 235058 - protein, 209 aa, Glycine max
  Clone ID: PAT_MRT3847_54286C.1.pep
YPEFGVGEKTSHRTVVTSDVRQQILTMNKMAREEWEKKQSETEKLRKLNDVDGNAGIDGDKEKDEGRTKATKVNKEVDDKMRTNAANVAARAAVGGDDMLSKWQLMAEQARQKKRGGGMDASSGSQPAKDVSQKSSSTSGRSTKDNQAREKKGAGRKFGRSHATTPQNSIARSISVKDVIAVLEREPQMSKSSLLYRLYERIHSDTSTE

SEQ ID NO: 235059 - protein, 62 aa, Glycine max
  Clone ID: PAT_MRT3847_54287C.1.pep
MRARYPLLLLGLVLLASFCLSLGIAYWEKDNPLPRTCLRSCCIERDSYLNQSCHSRCHLLKV

SEQ ID NO: 235060 - protein, 94 aa, Glycine max
  unsure (1)..(94): unsure at all Xaa locations
  Clone ID: PAT_MRT3847_54288C.1.pep
ISVPHXIXCXGRGXGSLILYQFFLRGGGGXXXXFKTXXXXXXKVYIXXQXIXHSPVXXXXXXXLXLXXLSXPPHKQPYQQKTLTLFFSSFSNSF

SEQ ID NO: 235061 - protein, 64 aa, Glycine max
  unsure (1)..(64): unsure at all Xaa locations
  Clone ID: PAT_MRT3847_54289C.1.pep
GSGFGAPFRRLEMGPMXWIEFLHTXQAWPXTLFGXTYPIYVSYTKIRLFFIINDDIHFYSCXKH

SEQ ID NO: 235062 - protein, 191 aa, Glycine max
  Clone ID: PAT_MRT3847_5428C.1.pep
EDFEGLDLGKMDKADDSGLASYVSGQIDRTLSWKDVKWLQTITKLPILVKGVLTAEDTRIAIQSGAAGIIVSNHGARQLDYVPATISALEEVVKAAEGRLPVFLDGGVRRGTDVFKALALGASGIFIGRPVVFSLAAEGEAGVRNVLRMLREEFELTMALSGCTSLKDITRDHIVTDWDQPRILPRALPRL

SEQ ID NO: 235063 - protein, 82 aa, Glycine max
  Clone ID: PAT_MRT3847_54290C.1.pep
TNKRWGSWYDFIHILMIIDRHSLLLSLTYNVLRAFLHIEILYNKRHKTLLLLSISSAIVLIHNKQKVFLYHPPPCKTFFFHH

SEQ ID NO: 235064 - protein, 61 aa, Glycine max
  Clone ID: PAT_MRT3847_54291C.1.pep
CKVDQVIRLLRKSQKLEYKVTEDTFQGLKTSLKNLYQPLVCDKYVLAGQNSSPPNVSSSCV

SEQ ID NO: 235065 - protein, 71 aa, Glycine max
  Clone ID: PAT_MRT3847_54292C.1.pep
HICSRHLADKWSVSLPPSLPIYFPARYAFPEASSPPQTRMSPRTAPVLTRPPLLAPLSECSKSITTSRHQT

SEQ ID NO: 235066 - protein, 83 aa, Glycine max
  Clone ID: PAT_MRT3847_54293C.1.pep
ENLTPETAMAMSSPRGNSTQFGGSCYAPKYPSGNNFRVGGVSWSRTPLFKYFDVTTNVFLFRGNTYNTNHRRSYSNSFFPWET

SEQ ID NO: 235067 - protein, 85 aa, Glycine max
  Clone ID: PAT_MRT3847_54294C.1.pep
PIDVFTHRDEPYSMTGMAYLPDNLAVRSPRHLLSHVNQQEPVMLMRTTVLPLMMMVHIPKIIKVITLLPFMAWLTLVDSVVMMQS

SEQ ID NO: 235068 - protein, 83 aa, Glycine max
  Clone ID: PAT_MRT3847_54295C.1.pep
SKGFKAGATPLFLQVFLLMGGCSPTLVIPTPLFLMGRIFYLSLSSPVWGSIMPHVRGLRTKVVAFLFSARRPSLGEKCPCPNT

SEQ ID NO: 235069 - protein, 145 aa, Glycine max
  Clone ID: PAT_MRT3847_54296C.1.pep
MGQTESAEAVTETQTTTNDTSNPISLESVLAEAAEYGSQHTESVEEMAQKALECPCIADLRTGSCGSQFSEAFLCFLKSTSEEKGSDCVHPFVALQSCIKANPDAFSKDILGGAEDESKELEPVQEYKILPPKWSRKPQSPKSRL

SEQ ID NO: 235070 - protein, 39 aa, Glycine max
  Clone ID: PAT_MRT3847_54297C.1.pep
MRTYLIILSRVIIRGLYRTWKVTPINFSPPKIIKMSQIH

SEQ ID NO: 235071 - protein, 51 aa, Glycine max
  Clone ID: PAT_MRT3847_54298C.1.pep
KGVIGSCVCLLSTKYICNVLNYGHGCGFVEIFDVLGNSEQMRLMWQRLRLE

SEQ ID NO: 235072 - protein, 178 aa, Glycine max
  Clone ID: PAT_MRT3847_54299C.1.pep
TRPPTRTPTRPPTRANWCKSKKKAFTKYALKYDSDAGKKEIQMQLEKMNKYASIVRVIAHTHIREMKGLKQKKAHLMEIQINGGTIADKVDYGYKFFEKEIPVDAVFQKDEMIDIIGVTKGKGYEGVVTRWGVTRLPRKTHRGLRKVACIGAWHPARVSYTVARAGQNGYHHRTEMNK

SEQ ID NO: 235073 - protein, 354 aa, Glycine max
  unsure (1)..(354): unsure at all Xaa locations
  Clone ID: PAT_MRT3847_5429C.1.pep
MMFDFARIWTRNTLIGLGLGQFLSLLITSTGFTSSELAKKGINAPTSQSFLNYVFLTLVYGTVLLYRRKALKAKWYYYIILGLVDVEANFLVVKAYQYTSLTSVMLLDCWSIPSVMLLTWLFLKTKYRFKKITGVVVCVAGLVLVVFSDVHSGDRAGGSNPRKGDLLVIAGATLYAISNVSEEFLVKNADRVELMAMLGLSGGIISAIQISILERNELKSIHWSAXGSALPFVGLRLIXYEHAVAMFMFYSLVPVLLKINGSTMLNLSLLTSDMWAVLIRIFAYHEKVDWMYFVSFGAVTIGLIIYSGGDRDDDQHPPNAAIDDHRPAVKQDEEANSGNHSKGAAAGSSKTWVA

SEQ ID NO: 235074 - protein, 177 aa, Glycine max
  Clone ID: PAT_MRT3847_542C.1.pep
VWNVKIPSKASFFAWRLIMDRLPTRSNLRRRNIEINDSFCPFCRNNEEDAAHLFFNCSKILPVWWESVSWSNISGVFPQTPRHHFLQHGFGRPSGVRSQRWQIWWIALSWSIWQHRNGIIFSNDSFNGSKLMEDAIFLCWSWFKNLEKGFEIPFNHWSSNLREGFCNQGRDTYIGFG

SEQ ID NO: 235075 - protein, 55 aa, Glycine max
  Clone ID: PAT_MRT3847_54300C.1.pep
HSSPYHLSFYIWYNILHKLQQRYHFKETNINLLDSSRINQGRNGLCEGYSSFCFL

SEQ ID NO: 235076 - protein, 150 aa, Glycine max
  unsure (1)..(150): unsure at all Xaa locations
  Clone ID: PAT_MRT3847_54301C.1.pep
RLEGKSLVMVAATSRWFRCAIMDDGIWKLAXLRDLQVPPPERVAFRWCKLYTSSFDGSHSYMFPQQQKHIDWMRIGAFSFDSSVAVLAERLTLTGKMQNGDTMKKMFRSQGCCVLDNVKTGIWIAGTMQTLDTRHIELFPCEGXXNGNWD

SEQ ID NO: 235077 - protein, 36 aa, Glycine max
  Clone ID: PAT_MRT3847_54302C.1.pep
HLTLILGNPKGNRGGDHCYGLRFMLKDFAPRIGLYV

SEQ ID NO: 235078 - protein, 812 aa, Glycine max
  Clone ID: PAT_MRT3847_54303C.1.pep
MKFILSLMSIILYTLFISSLVVSIAADKSSNSQFQSLSHEETIVSPNGVFELGFFPLGNSNKSYLAIRYKNYSDETFVWVANGSYPINDSSAKLTLHSSGSFVLTHNSNQVWSTSSLKVAKNPVAELLDSGNLVIREKSEANSEDKEEYLWQSFDYPSNTMLARMKIGWDLKRKINRRLIAWKSDDDPTPGDLSWVIVLHPYPEIYMMRGKEKHHRLGPWNGLRFSGMPEMKPNPVFHYKFVSNEEEVTYMWTLQTSLITKVVLNQTSLERPRFVWSEATASWNFYSTMPGEYCDYYGVCGGNSFCSSTASPMCECLKGFTPKSPEKWNSMVRTQGCGLKSPLTCKSDGFAQVDGLKVPDTTNTSVYESIDLEKCRTKCLKDCSCMAYTNSNISGAGSGCVMWFGDLLDIKLYPAPESGQRLYIRLPPSELDSIRPQVSKIMYAISVAATIGVILAIYFLYRRKIYEKSMTENNNESYVNDLDLPLLDLSIIIVATNKFSEGNKIGEGGFGSVYWGKLASGLEIAVKRLSKNSDQGMSEFVNEVKLIARVQHRNLVKLLGCCIQKKEKMLVYEYMVNGSLDYFIFDSTKGKLLDWPKRFHIICGIARGLMYLHQDSRLRIVHRDLKASNVLLDDTLNPKISDFGVAKTFGEENIEGNTNRIVGTYGYMAPEYAIDGQFSIKSDVFSFGVLLLEIICGKKSRCSSGKQIVHLVDHVWTLWKKDMALQIVDPNMEDSCIASEVLRCIHIGLLCVQQYPEDRPTMTSVVLLLGSDEVQLDEPKEPGHFVKKESIEANSSSCSSTNAMSITLLTAR

SEQ ID NO: 235079 - protein, 86 aa, Glycine max
  Clone ID: PAT_MRT3847_54304C.1.pep
PIRWLREHGIHGHVFAGSGNAAKLTQNEYKHFSPRKFLESFRMSVGCGVVIPTRLFRLEGNYFYILRKDEHDRGKTGFRFSFSAPS

SEQ ID NO: 235080 - protein, 95 aa, Glycine max
  Clone ID: PAT_MRT3847_54305C.1.pep
RSMHSTRVCRSVFARVIDRYSITHSVSISRTSVSMIVFVITALFVWQLGDAPGPAPGGAGAGALGITAATNVKAAGVNCVLLIGVTPRWTQCSWS

SEQ ID NO: 235081 - protein, 75 aa, Glycine max
  Clone ID: PAT_MRT3847_54306C.1.pep
SSSSDSIPMPFLESSRFRQVMGLMITSFNAISLLFFSPRTPRFLLTFRHQYLTVIYTSCSTHHESNEFEKFAKVT

SEQ ID NO: 235082 - protein, 77 aa, Glycine max
  Clone ID: PAT_MRT3847_54307C.1.pep
HFRSRKYHIVAHVGVGVGVRERKYKDENHHQTNHYYEVNKRGYKISGNRLGVLVFKAFSFFSNNGTLLSSSRSRTRA

SEQ ID NO: 235083 - protein, 345 aa, Glycine max
  Clone ID: PAT_MRT3847_54308C.1.pep
MGGRGAMRSAAKIAGIGVSKAALRPSALPTEQTVRNASRPTAVTGVSSQSAKSAEVLPTEQTVRNASRPTAVSGVSSQSAKSAEVAPLHTAAAWDDWDFAEDGELVVPRMVFGSVPTLDEATEATAELKDAIDQVYLCHESSQYSSPGGQVSALSPTLYGPVNRSCVIDAISDPTAPKHAIQAFHLLSTSREAQAVVASLACDPNVWNAVMENSAVSSFFQSQQSVAGFGAAENTEEVDKLSSCASETVESPEKLEGSAESHPGNMFDDFMGLLQNVKLTVIELVSRLSGFLQNIFPTPDAMREKMSFDADGNTKASFMDSKISMGGTFIGLAVLVIMVIVTKRA

SEQ ID NO: 235084 - protein, 112 aa, Glycine max
  Clone ID: PAT_MRT3847_54309C.1.pep
RSKASVSRTTLAITGTAIKLDKTQVTISSKSWSKSELQSVTSQPFSERNLRTVSVIIRPEEAPAATVATLIVTPVSSFALSASGLLSLLRSPPFYHLLTTMQAHKSAQRFQA

SEQ ID NO: 235085 - protein, 121 aa, Glycine max
  Clone ID: PAT_MRT3847_5430C.1.pep
MDRCKKMQCWAMLKRLMVGRDAWALKKDILDPKVLCVLHKSEAIRKPKGLEDIESKLKNWDYSETDEFVDDVKLVLSYALQYPQRSEVHRTARRISEGFEISWKTMKAKWMRDEQDLQEKR

SEQ ID NO: 235086 - protein, 134 aa, Glycine max
  unsure (1)..(134): unsure at all Xaa locations
  Clone ID: PAT_MRT3847_54310C.1.pep
DALDPINDPXMPSNKPLMLPLWDVYIIHGIGTEPXGRVDTGVGKPVMVVTLGPTALTSEVNYVVMLHAALTYALPRDHVALTVRNDSLDDLNRRFVALNSTDDPADEPADFTYHVLIINHPGHIAFVYAPVLDC

SEQ ID NO: 235087 - protein, 122 aa, Glycine max
  Clone ID: PAT_MRT3847_54311C.1.pep
RLIPQGTIYQLANMKENGKKKLENCNIYSKHLITDLLFLIATFAPILYCLYHSLFHNMCINCLHLFFILQKLHHIYFSVIIINEYTLEKKCKKMYNINSLLTDIVPGRQLMNTLLLLGLRFN

SEQ ID NO: 235088 - protein, 24 aa, Glycine max
  Clone ID: PAT_MRT3847_54312C.1.pep
DSFEGIQLRSKQADVTEVHTLCTS

SEQ ID NO: 235089 - protein, 46 aa, Glycine max
  Clone ID: PAT_MRT3847_54313C.1.pep
KQELENVMLLNINKWTAQMSRSSRLRGLVFVLSCHEQIIKKRAVKW

SEQ ID NO: 235090 - protein, 481 aa, Glycine max
  Clone ID: PAT_MRT3847_54314C.1.pep
TDLSFSYSVSLEDIFGAVLLQSPFLRDFDEREIFCLYLYPGNSPDRKVFKKDVVFVVDISASMKGTPLDNTKNALLTSLSQLSAQDTFNIIAFNGTVYLFSSSMERATEEAILNATTWVDTNFIANGDTNIMLPLTQAMKLLEKSTDSVPLIFLVTDGAVEDERDICNFVKSYVSSGQSFRTPRIYTFGIGLYCNHYFLQMLAQIGRGHYDSAHDLDSIDFRMQRLFSSASSVMVADITIKSLEGLDSLELFPTHIQDISFESPLILSGRYSGTFPELVKVTGTLADMTNFVVDLKVKREKDMQLSNVLSKRHIDQVTAQAWLLKSKELEEKVTKMSIQNKVPSEYTCMNIVLVQSDEGKKAPEQFLLQKAYNKLSFQKLELNNQNLFLGGLNLGFGDLKATAENLPPAIKEAKPPEGLLGKAASNCCGRLADTCCGMCLLQTCTFVNDQCTIVCTQICAALACFELIKCCVELCDCDCLQ

SEQ ID NO: 235091 - protein, 193 aa, Glycine max
  Clone ID: PAT_MRT3847_54315C.1.pep
HDCHPPVIHRDIKSNNILLDANLEARIADFGLAKMMIRKNETVSMVAGSYGYIAPEYGYALKVDEKIDVYSYGVVLLELLTGKRPLDSDFGESIDIVEWLRMKIRDNKSLEEVLDPSVGNSRHVVEEMLLVLRIAILCTAKLPKERPTMRDVIMMLGEAKPRRKSSSNSKDAANNKETPVFSTSPVNNNNSLV

SEQ ID NO: 235092 - protein, 131 aa, Glycine max
  Clone ID: PAT_MRT3847_54316C.1.pep
WRKEQYVQRRYLLWFYLFLYYYNYSYNYNEATSLDECAEAAMEFSISLLQTLVVEEPKVISELHNLVDALAKLATKPGCPESLPQLLEMIKNPGAISSSNAGKEDKARQSRDIKVPGLLPANREEFNSIDS

SEQ ID NO: 235093 - protein, 100 aa, Glycine max
  unsure (1)..(100): unsure at all Xaa locations
  Clone ID: PAT_MRT3847_54317C.1.pep
RTLYFFNGTSFLAWQCHAYDMANFIMNTCYXTLTPDEKCSSCKLAVESHNITGFETIPEXCIEATKEYIHGEQYISDSKTVYQQAYFYARDLKVHSKDTF

SEQ ID NO: 235094 - protein, 59 aa, Glycine max
  Clone ID: PAT_MRT3847_54318C.1.pep
TPLKHKDILYMVQMHSLKNQLKTHQYTTQTTKQIGFVIYIHSVHDIQSSLYRIESHLFS

SEQ ID NO: 235095 - protein, 59 aa, Glycine max
  Clone ID: PAT_MRT3847_54319C.1.pep
IFINCRRQRPMLDQIVYFSNSVTLFGFVQFSPSSDAKRGFRIQYTPFFFWKNKIKLFNL

SEQ ID NO: 235096 - protein, 87 aa, Glycine max
  Clone ID: PAT_MRT3847_5431C.1.pep
IGFFILFDCRAMIIDSSVWRVLIIISVPSAISKKKHHSEKKKKKTQSIRNIKGYSSLRFLNQAREENKCETTAFESTRLYLQQLTDH

SEQ ID NO: 235097 - protein, 64 aa, Glycine max
  Clone ID: PAT_MRT3847_54320C.1.pep
LKHYKTLLENFPNPFSPGVTGEFPTGAPQGTNFAYNERYLKSWAKHGHKWFLCENGIPSQILTT

SEQ ID NO: 235098 - protein, 227 aa, Glycine max
  Clone ID: PAT_MRT3847_54321C.1.pep
MRIIHSLACLVLTFISFNPCKAEQAQTILNSLSIDQILQKIYEWGNGAQGFQEGQIQISGPIVVAGVLCFIASSISSAGGIGGGGLFLPILTIVAGLDLKTASSLSAFMVTGGSIANVLCNLCATNPKLGGKSLIDYDIALLSEPCMLLGVSVGVICNLVFPEWLITMLFAVFLTWSTSKTCNSGVVFSWKQIWTEYHSNGAMWCGILDYFISSCPSCFIFHCLDCI

SEQ ID NO: 235099 - protein, 79 aa, Glycine max
  unsure (1)..(79): unsure at all Xaa locations
  Clone ID: PAT_MRT3847_54322C.1.pep
WXQXPRNXSSKTRILGXVICHVXVGNLTALSSAASNASLTIFSFSPATCFFCHFFMFGTQNKKDVEKPIMAKTILPKSM

SEQ ID NO: 235100 - protein, 61 aa, Glycine max
  Clone ID: PAT_MRT3847_54323C.1.pep
IRGGSAIPDLKNGWCSSICHNQRHTIHVGHILSFPNSWMLYSLYLGAESFTLRHAFTNTGM

SEQ ID NO: 235101 - protein, 86 aa, Glycine max
  unsure (1)..(86): unsure at all Xaa locations
  Clone ID: PAT_MRT3847_54324C.1.pep
LHSMVTPNXDGSRKKIKTISVLQRVFHSIIEPRDHHVFLFFTQIPLHLKGQSLLISFNSTPKFPHFPHPCIGRNSIISISYWSVRW

SEQ ID NO: 235102 - protein, 69 aa, Glycine max
  Clone ID: PAT_MRT3847_54325C.1.pep
LRSPTGLTHSVPSDGSGCKNPRFARRYLLITNSMMNVLNGQAQESMANCCRERVYEGELPQGSVLHVTL

SEQ ID NO: 235103 - protein, 47 aa, Glycine max
  Clone ID: PAT_MRT3847_54326C.1.pep
NACWIMSYHPLIINRLFLGSHISYSRLSSQYMNQAHIEFHQSHYNDA

SEQ ID NO: 235104 - protein, 155 aa, Glycine max
  Clone ID: PAT_MRT3847_54327C.1.pep
TWHLWANGSGSYFKAKGKLWVRLLNSKYGGWRGLSEHPRPVKESIWWRDLKKLCQHTQQGQLLNNSIIWQVGCGNQAKFWEDSWTGGGNQLSEKYPRLYTISEQQNQLIQNMGNHKDSGWEWEFKWRRSFFDNEMEMAVAFIQELEGIRIRCSNH

SEQ ID NO: 235105 - protein, 63 aa, Glycine max
  Clone ID: PAT_MRT3847_54328C.1.pep
DVISSAGNFCWCNISSKVEAGGRLQQVEGCLGSQAVMMIKTVATEGGKKSGSSEEECNPKTDF

SEQ ID NO: 235106 - protein, 95 aa, Glycine max
  Clone ID: PAT_MRT3847_54329C.1.pep
PFFFIWSFLNGPRGTPINASPIQAKPPTFPKKIQAENIKNKTKSAYLREKTKLIKMENKKKNPGKKTERRPPKKSATNLKKVACKTPARGGKLFT

SEQ ID NO: 235107 - protein, 41 aa, Glycine max
  Clone ID: PAT_MRT3847_5432C.1.pep
TAARRRQKGIDQLNVQKQEILEKCELEQISLPIIPGSYGYL

SEQ ID NO: 235108 - protein, 73 aa, Glycine max
  unsure (1)..(73): unsure at all Xaa locations
  Clone ID: PAT_MRT3847_54330C.1.pep
PQSFQIKKWNTVLMWDHHIVVDXCGIRQNHIIDFCXSVRELKLVLLVSNXIVACRVCKHDFDFYCISRWLKKC

SEQ ID NO: 235109 - protein, 115 aa, Glycine max
  unsure (1)..(115): unsure at all Xaa locations
  Clone ID: PAT_MRT3847_54331C.1.pep
LAAWLLCISGIGVYNIFYWNRQIYRAPSPLYMLKFLRATGIEGWMSLGGVVLSITGVEAMYAALGHFSALSIKVAFTCLVYPCLILAYMGEAAFLSKHYHDIQXSLYIAIPETVF

SEQ ID NO: 235110 - protein, 92 aa, Glycine max
  Clone ID: PAT_MRT3847_54332C.1.pep
MASSSMSSTGSWSAKDNKAFERALAVYDKDTPDRWYNVAKAVGGGKTPEEVKRHYELLLRDVRHIESGQVPFPYKQNGGSQEEKRLRNMKLQ

SEQ ID NO: 235111 - protein, 189 aa, Glycine max
  unsure (1)..(189): unsure at all Xaa locations
  Clone ID: PAT_MRT3847_54333C.1.pep
MAVSTSFSGVKLEALLLKCGSSNAATTTTHISCFGKNRKTLVQSQRGAIRCEASSASDVVADATKKAAXVSALEQLKTSAADRYTKERSSIMVIGLSVHSTPVEMREKLAIPEAEWPRAIAEFSSLNHIEEAAVLSTCNRMEIYVVALSXHRGVKEVTEWMSKTSGIPXADLCQHQFLLYNXDATQHLX

SEQ ID NO: 235112 - protein, 542 aa, Glycine max
  unsure (1)..(542): unsure at all Xaa locations
  Clone ID: PAT_MRT3847_54334C.1.pep
MAVSTSFPGAKLEALLLKCGSSNAATATATTTTHLSCFCKTRKTLVQSQRGPIRCEASSASDVVADATKKAASVSALEQLKTSAADRYTKERSSVMVIGLSVHSTPVEMREKLAIPEAEWPRAIAELCSLNHIEEAAVLSTCNRMEIYVVALSQHRGVKEVIEWMSKTSGVPVADLCQHQFLLYNKDATQHLFEVSAGLDSLVLGEGQILSQVKQVVKVGQGVNGFGRNISGLFKHAITVGKRVRTETNIASGAVSVSSAAVELAYMKLPEASHANARMLVIGAGKMGKLVIKHLVAKGCTKMVVVNRSEERVAAIREEIKDVEIIYKPLSEMLTCTGEADVVFTSTASENPLFLKDDVKELPAASDVIDISVPRSVGSCDSYLVSVRVYNVDDLKEVVAANKEDRLRQAVEAQAIIAEETKQLEAWRDSLETVPTIKKLMAYAERITLAELEKXCLSKMGDDVRWXCYHKKTQRAVDDLSRGIVNKLXHGPMQHXRCDGSDGRHWRTCMENMRSLXNRMFNLETEISVLEQKIRAKVEQKP

SEQ ID NO: 235113 - protein, 198 aa, Glycine max
  Clone ID: PAT_MRT3847_54335C.1.pep
MPFGLVSAWNKRRRSMSHDHSDPWIYKPAEFWQLEDQTPQPTKRRHRSSVYTLKEMEEATCSFSDDNLLGKGGFGRVYRGTLRSGEVVAIKKMELPAIKAAEGEREFRVEVDILSRLDHPNLVSLIGYCADGKHRFLVYEYMRRGNLQDHLNGIGERNMDWPRRLQVALGAAKGLAYLHSSSDVGIPIVHRDFKSTNI

SEQ ID NO: 235114 - protein, 90 aa, Glycine max
  Clone ID: PAT_MRT3847_54336C.1.pep
ILEYPQYRGVHHLHLQVTEVFMTARGLTADHGPCITTERSQSTDLIARRKRPINRPCALSFQFSSLDGWCRLENLCWSVSRIQVGPFSFL

SEQ ID NO: 235115 - protein, 66 aa, Glycine max
  Clone ID: PAT_MRT3847_54337C.1.pep
NLNLIFTKISGLILSPWARNLPKAHKNPRAFSCISGPIYLEFSIQCPCGVGLHHLGSSSSMDSFAS

SEQ ID NO: 235116 - protein, 85 aa, Glycine max
  Clone ID: PAT_MRT3847_54338C.1.pep
KRGGNFKMGGDFSGGGACIISFFEWKKAPWERKQNFHIRAGFAVFKKNWPYPWEQKKAALEFSQYFQKFERFPEEYQKLGSGGDC

SEQ ID NO: 235117 - protein, 94 aa, Glycine max
  unsure (1)..(94): unsure at all Xaa locations
  Clone ID: PAT_MRT3847_54339C.1.pep
FFVKHNNGILWGHFRKHWGNYMKTLFNQPARKTRRRLVCQKKAVKTFPRPTVGXIKPIVHGQTLXYNMKVRGGRGLYLRELMARXIAKKLAPTI

SEQ ID NO: 235118 - protein, 84 aa, Glycine max
  unsure (1)..(84): unsure at all Xaa locations
  Clone ID: PAT_MRT3847_5433C.1.pep
MSWCCAGPMGSGKKKFMVQEPSLSLQSVLLLIGKTAIISNIFAXILLIVDTTHVSCKVYWVARLPRPPWNAHHPVEFIQCDHCH

SEQ ID NO: 235119 - protein, 106 aa, Glycine max
  unsure (1)..(106): unsure at all Xaa locations
  Clone ID: PAT_MRT3847_54340C.1.pep
FPXFTFTTTXXTXXFXXXXXXXXTPXISHXTITFHPXXXXIXXLFFLNIKNSTXIXXTFLLSSXXTTPFXLFSFSXXSIIXFXFXXXYXKXIXYXKXQNFNXXXIY

SEQ ID NO: 235120 - protein, 71 aa, Glycine max
  unsure (1)..(71): unsure at all Xaa locations
  Clone ID: PAT_MRT3847_54341C.1.pep
GKFXXXGGRELXIIKIIYIFIGYVEFXXEEDGEILVNVVENYLNLXGKDKLGVGIFFFNFLLXFKKVKGLC

SEQ ID NO: 235121 - protein, 56 aa, Glycine max
  Clone ID: PAT_MRT3847_54342C.1.pep
ELVDSIYVIGNPLAPHSGALIHDALFNRLDICIKLHDYFRIIFSHGLPLLSSSRSR

SEQ ID NO: 235122 - protein, 42 aa, Glycine max
  Clone ID: PAT_MRT3847_54343C.1.pep
HGSQLLHAWTKSEAKHWQCKKVPWKHSCTANSWHHFGPNVPK

SEQ ID NO: 235123 - protein, 58 aa, Glycine max
  unsure (1)..(58): unsure at all Xaa locations
  Clone ID: PAT_MRT3847_54344C.1.pep
DGAPRMXGHTFGALMISWQIADHLSLRSLQLPKASDLKGNVYPELVLTAAESAEIADA

SEQ ID NO: 235124 - protein, 115 aa, Glycine max
  Clone ID: PAT_MRT3847_54345C.1.pep
MADTVPMNRAASIKEAFSLFNKDGNGCITTKELGTDMRLLGQNPTEAELQDMTNEVDADGNGTIDFPEPLNVMARKMKDTDSEEELKEAFPRFDKDQNGVICVAELPHVMTNPRE

SEQ ID NO: 235125 - protein, 122 aa, Glycine max
  Clone ID: PAT_MRT3847_54346C.1.pep
MKVLITGGSGLLGRALMKAFEGCETLGLAFSRADPSKNLVKCDLRDPADLRAKILEFKPDVIIHSAAERRPDWCVQHREATHYLNVSVTEQIALLSKEVDCWLLYISTDYVFDGEKPPYTPN

SEQ ID NO: 235126 - protein, 59 aa, Glycine max
  Clone ID: PAT_MRT3847_54347C.1.pep
QVIDLVSSIKAGVDCNDHELSTTRKFQEKTQTRTWSNVMFLNYEILARRWNGYSNSQDT

SEQ ID NO: 235127 - protein, 79 aa, Glycine max
  Clone ID: PAT_MRT3847_54348C.1.pep
TGSMYHLTTYIHWPFRIFLGTREKDRTGSGLDMLCLAYGAHTLTLTDAHSLFHNLYLSAFWPKNTSNHVSLGFNPVKKD

SEQ ID NO: 235128 - protein, 122 aa, Glycine max
  unsure (1)..(122): unsure at all Xaa locations
  Clone ID: PAT_MRT3847_54349C.1.pep
MHIHYLFSKSLIVLKAPVMEEKKPAENKPASENVTVEKNPNADNKISTEGRSXKYTMRTMKSVETYKMYILKVLKQVQPDIGISISAMGSMNSFINDLLYNLALEALRLARFDMNPKITSRE

SEQ ID NO: 235129 - protein, 32 aa, Glycine max
  Clone ID: PAT_MRT3847_5434C.1.pep
MQSFPLGPNMLRLGTIFKLTKNIIYCFVLNIW

SEQ ID NO: 235130 - protein, 70 aa, Glycine max
  Clone ID: PAT_MRT3847_54350C.1.pep
YVPVTAHVKFQRTPSSHFMLVIFYFLFFVQLSTDSFSAAGVIVHNSFSFKHSWIKLTAQPFSCCFAKTEE

SEQ ID NO: 235131 - protein, 98 aa, Glycine max
  Clone ID: PAT_MRT3847_54351C.1.pep
DHIDLIREHWMTPIGSGFGAGSLGRHNVSERLRCFLEAVQLSGMFGAVTGCGLVAGVHNWLSYSHLHPSVVMTLLLLLLSSTRSRILSFCASVSRSES

SEQ ID NO: 235132 - protein, 170 aa, Glycine max
  Clone ID: PAT_MRT3847_54352C.1.pep
MGASQSISEKSFHEFTVKDARGKDVNLNAYRGKVLLVINVASKCGFADANYTQLTQLYSTYKSRGLEILAFPCNQFLKKEPGTSQEAQDFACTRYKAEYPIFGKIRVNGSDTAPVFKFLKTQKSGVMGSRIKWNFTKFLVDEEGRVIQRYSPTTKPLAIENDIKKALRVA

SEQ ID NO: 235133 - protein, 77 aa, Glycine max
  Clone ID: PAT_MRT3847_54353C.1.pep
KSGFHGPPLSWGGVLPAHGTPPPFVQAPGAPPLPQALWVRGGSFFGQEKGERMKKKKNQKKNKTKREKKKKKKKTDH

SEQ ID NO: 235134 - protein, 48 aa, Glycine max
  Clone ID: PAT_MRT3847_54354C.1.pep
NTSIPTMMEEVLTSHFDDLTNISVHDYEGERNRLRYNTLPGKFAAINS

SEQ ID NO: 235135 - protein, 130 aa, Glycine max
  unsure (1)..(130): unsure at all Xaa locations
  Clone ID: PAT_MRT3847_54355C.1.pep
LXAPPRGGWAASXXTSXXSXXGFAXVRFXXGVXXSSPXRRXKXXKMAXXAPKTXFRXSRKXSWXEERMRAXXRPLSPLLDXRMRGPXQHHSGTNXAKRPSLGPSHPKLGFLRVAWLWPSGSGLFQFKLVF

SEQ ID NO: 235136 - protein, 70 aa, Glycine max
  Clone ID: PAT_MRT3847_54356C.1.pep
FLGEGFTPAKPGIYYCEEHLGLHGLFLVGRHPIRISIKARDADHCSGALIEYIHRSYYCDQAKVVTSNHI

SEQ ID NO: 235137 - protein, 42 aa, Glycine max
  unsure (1)..(42): unsure at all Xaa locations
  Clone ID: PAT_MRT3847_54357C.1.pep
IMTNYYNLKKFVMIGTLVQCLFWIIFVVTDKLWLIINIIXII

SEQ ID NO: 235138 - protein, 44 aa, Glycine max
  Clone ID: PAT_MRT3847_54358C.1.pep
MGKDHGSLARADKDRGQTPKVAKQDKKNKPPGRAHKRMQYNRLF

SEQ ID NO: 235139 - protein, 89 aa, Glycine max
  unsure (1)..(89): unsure at all Xaa locations
  Clone ID: PAT_MRT3847_54359C.1.pep
KTTEGDVGGEDEGVDDAXAVKVVDIVDTFILXSNPDSIRXLFVTLMKRFIKNLSSKLSCISSVRLFKKHILGATNYLLFKIKDFHFFVV

SEQ ID NO: 235140 - protein, 69 aa, Glycine max
  Clone ID: PAT_MRT3847_5435C.1.pep
RKAMKHGEFSLESTERDTQRTKTTKAGKGNRLMMCYRPFVFQCLCYNAIWLGNVIKSDSKMHQKCFIQI

SEQ ID NO: 235141 - protein, 142 aa, Glycine max
  Clone ID: PAT_MRT3847_54360C.1.pep
GSQPEFSREPLEEKTKGLEESKVSFLWVIRKKKWGLPFGFEKKVKSQGIVIKEWVDQKKIFMHKSVEGFLNPCGWNSVMESVPPGVPIMGWPIMAEQFLNSKMLEKKVKVGLRVETCNGSVKGFFKKKGFKKPVMVIPKGPA

SEQ ID NO: 235142 - protein, 56 aa, Glycine max
  unsure (1)..(56): unsure at all Xaa locations
  Clone ID: PAT_MRT3847_54361C.1.pep
CPRCCRLFPGGLLRVGLGGFFRLGRLGCVXXXLCWLVGVLICLLWCXXVRCVRTPT

SEQ ID NO: 235143 - protein, 44 aa, Glycine max
  unsure (1)..(44): unsure at all Xaa locations
  Clone ID: PAT_MRT3847_54362C.1.pep
LFXDVFRRHSWVXVPSLSEKXFRFFRSNVSVPACHRERVVWRST

SEQ ID NO: 235144 - protein, 68 aa, Glycine max
  Clone ID: PAT_MRT3847_54363C.1.pep
SQFNLAVSTSVGPPAVASSNLSHSLPSESGSSSAASPPKPRVAVTVSSGNGLLVGSFFVSAIMFGFMG

SEQ ID NO: 235145 - protein, 80 aa, Glycine max
  Clone ID: PAT_MRT3847_54364C.1.pep
HLVRPQLSHSIFMSWSSPNTRHKLPTSNISNIQYQKFICIMFKINNPNLLPMDENNKIMSMANVHCNLLHNHYKQYQSNR

SEQ ID NO: 235146 - protein, 44 aa, Glycine max
  Clone ID: PAT_MRT3847_54365C.1.pep
RGYISQSVYTKLPMEDFCQRFVVCERLCLKHSPRLGVERLVLIP

SEQ ID NO: 235147 - protein, 59 aa, Glycine max
  Clone ID: PAT_MRT3847_54366C.1.pep
NQDVHNLYHHSLTLPITNSGLHIVASNLDQTQDQLTNKLSYYGTERDVHQSNIFTIGHT

SEQ ID NO: 235148 - protein, 56 aa, Glycine max
  Clone ID: PAT_MRT3847_54367C.1.pep
ASALETHLLAIINNVVIWSLWVKQVVLYLLSITPLLGNTISSADLFQSSDISRLIF

SEQ ID NO: 235149 - protein, 38 aa, Glycine max
  unsure (1)..(38): unsure at all Xaa locations
  Clone ID: PAT_MRT3847_54368C.1.pep
WNXLKXISYTVXQHIHHSSGKXINSNYEXNSHXXLASX

SEQ ID NO: 235150 - protein, 55 aa, Glycine max
  Clone ID: PAT_MRT3847_54369C.1.pep
GSWRSKTDLETPATAGSSKSTSEIGTLCLQGYNYTSSPALCAEVHNLLVMTKVFA

SEQ ID NO: 235151 - protein, 74 aa, Glycine max
  Clone ID: PAT_MRT3847_5436C.1.pep
MGKYFGNAYCGDPGVPHSDPDRFVNILGGSPSFAVLTYFKPHMWQLSYQVNWAVKTMVYLPYLREPAKEKNPPF

SEQ ID NO: 235152 - protein, 59 aa, Glycine max
  Clone ID: PAT_MRT3847_54370C.1.pep
TSCKLKLIQAFYFYKSLHLTSSQVKVKLILTCKRNPIHFIFSFSYKCLRRKVDLGMPMS

SEQ ID NO: 235153 - protein, 79 aa, Glycine max
  Clone ID: PAT_MRT3847_54371C.1.pep
FLPVAEGKGMGSLEKQQNDKILSSLLARNSDEPLDVSKAITMYKVKKEKQRRKEKNMPSKSDQLKPQKKPHKKSSKKRA

SEQ ID NO: 235154 - protein, 157 aa, Glycine max
  unsure (1)..(157): unsure at all Xaa locations
  Clone ID: PAT_MRT3847_54372C.1.pep
SSPVAALLVDPPGCRNARAHIDAXPYSGKYDGVVGVLGAXEAIIVLXRSGFXPXIXLEVXSFXSXEXXXFGICCXGSXLLAGXXDXAYXLXXXXDXQXXSFXHAAGSCXXXXSXXHDLXXVFSXXRXSSXFXFNWPTERPLRFFLFFRPPPPSFLPV

SEQ ID NO: 235155 - protein, 39 aa, Glycine max
  Clone ID: PAT_MRT3847_54373C.1.pep
KKSLPDHTLIQTIGNDFHYKLNQHKFHPELAWESALARA

SEQ ID NO: 235156 - protein, 118 aa, Glycine max
  Clone ID: PAT_MRT3847_54374C.1.pep
PSPPPPYVYKSPPPPSPSPPPPYIYKSPPPPSPSPPPPYVYKSPPPPSPSPPPPYVYKSPPPPSPSPPPPYVYKSPPPPSPSPPSPYYYKSPPPPSPSPPPPYYYKSPPPPSPSPPPP

SEQ ID NO: 235157 - protein, 104 aa, Glycine max
  Clone ID: PAT_MRT3847_54375C.1.pep
NSITKNKFGNKMIQGEGSILHLDNSNPAQKKAKFYPKFFCLIGRGNWGKEIQFQNLGSNLKRVENGGKMHITRALHKIYWFLGYSPTTSWLEIPKKGGKKTKAA

SEQ ID NO: 235158 - protein, 77 aa, Glycine max
  Clone ID: PAT_MRT3847_54376C.1.pep
ANSFKITVLAALSPTHNYLLIGLILFKATDIKAQFAKPIEFCLTRARSPKEVDDQCQTPKARRQRRWKMRTTTSCSE

SEQ ID NO: 235159 - protein, 63 aa, Glycine max
  Clone ID: PAT_MRT3847_54377C.1.pep
DVAWPKLGSWAIPFLVSSRLCLNMVGLIFHYQVYKNKALSLPRNADWGNLILRHADNPRGPRK

SEQ ID NO: 235160 - protein, 67 aa, Glycine max
  Clone ID: PAT_MRT3847_54378C.1.pep
QLMIQLTSHRCSRNMLLFPQLKVEFSSHYGPYFSKGIQEVVSALHIIVLPSCMANASTTHDLSVHKY

SEQ ID NO: 235161 - protein, 192 aa, Glycine max
  Clone ID: PAT_MRT3847_54379C.1.pep
MDPRLIHPHDGIVTQDELQGGAASNLSHAHKGDPCLVLTADPKPRLRWTQDLHERFVDAVTQLGGASKATPKAIMRTMNVKGLTLFHLKSHLQKYRLGKQSGKDVGEGCKDGSYLLESPGADNTSPKLPTPDTNEGYEIKEALRAQMEVQSKLHLQVEAEKHLQIRQDAERRYMAMLERAWQMLADQFISAT

SEQ ID NO: 235162 - protein, 155 aa, Glycine max
  Clone ID: PAT_MRT3847_5437C.1.pep
MMKRLLGGPGTISGFLLRFGQCAFGAASIAIMVTSFGFSSYTAFCYLIASMGLQVLWSFGLACLDIYALRRKRDLQNPILVSLFVVGDWVTATLSLAAACSSAGIVVLYARDLTVCATSKRLTCNRYQVSVAMAFLTWVLTAMSSHVMFWILASV

SEQ ID NO: 235163 - protein, 222 aa, Glycine max
  Clone ID: PAT_MRT3847_54380C.1.pep
MYSRLIHPHDGIVTQDDLQGAASNLSHAHKGDPCLVLTADPKPRLRWTQDLHERFVDAVTQLGGASKATPKAIMRTMNVKGLTLFHLKSHLQKYRLGKQSGKDVGEGCKDGSYLLESPGADNSSPKLPTSDTNEGYEIKEALRAQMEVQSKLHLQVEAEKHLQIRQDAERRYMAMLERACKMLADQFIGATVIDTDSQKFQGIGSKAPRGTLVDPSWVLLHA

SEQ ID NO: 235164 - protein, 257 aa, Glycine max
  Clone ID: PAT_MRT3847_54381C.1.pep
MYPRLIHPHDGIVTQDELQGGAASNLSHAHKGDPCLVLTADPKPRLRWTQDLHERFVDAVTQLGGASKATPKAIMRTMNVKGLTLFHLKRHLQKYRLGKQSGKDVGEGCKDGSYLLESPGADNTSPKLPTPDTNEGYEIKEALRAQMEVQSKLHLQVEAEKHLQIRQDAERRYMAMLERACKMLADQFISATVIDTDSQKFQGIGSKAPRGTLVDPLGFYSLPSTEVSGVNCPGRRNTAKSPTPKGRLFNRKLFNLT

SEQ ID NO: 235165 - protein, 130 aa, Glycine max
  unsure (1)..(130): unsure at all Xaa locations
  Clone ID: PAT_MRT3847_54382C.1.pep
KNMTLILNKIRDNVAMTAKDSKGQPVMEENPLMRETFLDGPENFEVELDITEIDGADIDTIISSFGKIVKGFQSRNKHIADKFHEFSDCMDEFISPLHEKLLETETMSTTIVENMEIMKIKANSMGKLXE

SEQ ID NO: 235166 - protein, 313 aa, Glycine max
  Clone ID: PAT_MRT3847_54383C.1.pep
MYSRLIHPHDGIVTQDDLQGAASNLSHAHKGDPCLVLTADPKPRLRWTQDLHERFVDAVTQLGGASKATPKAIMRTMNVKGLTLFHLKSHLQKYRLGKQSGKDVGEGCKDGSYLLESPGADNSSPKLPTSDTNEGYEIKEALRAQMEVQSKLHLQVEAEKHLQIRQDAERRYMAMLERACKMLADQFIGATVIDTDSQKFQGIGSKAPRGTLVDPLGFYSMPSTEVAGVNVPEEEIPLSLPPQRADCSTESCLTSHESSGGLALEGSPGEGKRRMLGMDSMAAPLIWSEAKMRTQAINVAQGNLPQGITRYGM

SEQ ID NO: 235167 - protein, 105 aa, Glycine max
  unsure (1)..(105): unsure at all Xaa locations
  Clone ID: PAT_MRT3847_54384C.1.pep
XXXXGXXFXXXXXCXPTCXXXEXXXTXVAIMXXXXXQFXXXGXXIXXTXXXPXXXLXPLXPXLXXXASRCIXQMXXXXCDTLVXXEYXPXAXTVTLXXXXVCING

SEQ ID NO: 235168 - protein, 46 aa, Glycine max
  Clone ID: PAT_MRT3847_54385C.1.pep
IYLSIQNNLTPRKDQDTKKLILKNFQEMDVTKHRIFPFPFSRIPYG

SEQ ID NO: 235169 - protein, 70 aa, Glycine max
  Clone ID: PAT_MRT3847_54386C.1.pep
EFGSGDNLDPRVRSSKSLLFSLVSNCNRYVIFFSLFALTLHSIPLGFSAFNWILRLTAACSNIHLLVTTN

SEQ ID NO: 235170 - protein, 197 aa, Glycine max
  unsure (1)..(197): unsure at all Xaa locations
  Clone ID: PAT_MRT3847_54387C.1.pep
MGLCTSKPRAKNANPTNSSSLNSHTHFTDPNADENLRKNHTPTPKKSPLFPFYTPSPAHHLFSGKSPAPANPRRFFRPPSPAKHIRAVLARRHGSVKPNEATIPEDEVVTLDKNFGFSKQFEHKFEVGDEVGRGHFGYTCAAKVLKGNLKGQHVAGKVIPKAKMTTAIAIEDVRRGXVXYXRAXTGHKNLIQFHDAY

SEQ ID NO: 235171 - protein, 93 aa, Glycine max
  Clone ID: PAT_MRT3847_54388C.1.pep
AKVEREGGHQQIPFYCLTSYDSVQREHTTNLKRLEQFTHNVHPRTSSTVPIRLPCFPLEPVFMNDRNPRKNAHSVQKTDSHSTPKRSLQEATV

SEQ ID NO: 235172 - protein, 54 aa, Glycine max
  Clone ID: PAT_MRT3847_54389C.1.pep
AFVVLFFFVEIGLFHIVFHVLFAFPLFYLVCFYWYFRSHNFWPIFPLGNLSWVV

SEQ ID NO: 235173 - protein, 155 aa, Glycine max
  Clone ID: PAT_MRT3847_5438C.1.pep
MMKRLLGGPGTISGFLLRFGQCAFGAASIAIMVTSFGFSSYTAFCYLIASMGLQVLWSFGLACLDIYALRRKRDLQNPILVSLFVVGDWVTATLSLAAACSSAGIVVLYTRDLTACATSKHLTCNRYQISVAMAFVTWVLTAMSSHVMFWILASV

SEQ ID NO: 235174 - protein, 150 aa, Glycine max
  Clone ID: PAT_MRT3847_54390C.1.pep
MSKMLKKVNACNPKLWLLIGIGLAGAVVVVAETRRRRHRNLPKEDFGAFVERIELLPIPQPNQTQTLSALTFAIKDIFDVKGYVTGFGNPQWKKTHGEAGKTAIVITALLSDGATCVGKTVMDEFSFGISGENKFYGTPTNPQMPSSIPG

SEQ ID NO: 235175 - protein, 84 aa, Glycine max
  Clone ID: PAT_MRT3847_54391C.1.pep
KPHHLRELDAAEYEEIVGAPALSFNKSFREVESPLVGSKEIGNAEILDELTTNRGELKVRTVSFGEERNCQVYPDENGSPLTDF

SEQ ID NO: 235176 - protein, 147 aa, Glycine max
  unsure (1)..(147): unsure at all Xaa locations
  Clone ID: PAT_MRT3847_54392C.1.pep
PIIFSYTXYFPSWVFSKKAFTTFFLTKNLHYISLFNISITKYPIISIYIHYSSNQLILNIPSPPPFLNNHRINIPPPKIKPISYFYHISIWAIKEQFIYFNSPFFHNCLHILNLHSIQFXXYNFHFPPFKPLIFSFPLIPFFFTGTF

SEQ ID NO: 235177 - protein, 58 aa, Glycine max
  Clone ID: PAT_MRT3847_54393C.1.pep
MMLFPLSSSLERLYCGIFALRLTVFKLLLGINYPWGYLNQNYYLPLYVVGILSIWTFK

SEQ ID NO: 235178 - protein, 58 aa, Glycine max
  unsure (1)..(58): unsure at all Xaa locations
  Clone ID: PAT_MRT3847_54394C.1.pep
SSLWLLXIYLLLHHNSYPLLFPWQHSKLLHKDHYSYGKLLNEKPAKTTPSKISLKIKI

SEQ ID NO: 235179 - protein, 52 aa, Glycine max
  Clone ID: PAT_MRT3847_54395C.1.pep
GCFPVCFSPFFHLILSLSFNDTSSIPSRVACSMDSLLLGFLPAKHHISSSPF

SEQ ID NO: 235180 - protein, 79 aa, Glycine max
  Clone ID: PAT_MRT3847_54396C.1.pep
LGSFPSQVSFGGGSTDGNISQWTIDEFIGLNEFSQHYDYMEGSSRVCSYLLKYSLLGKYPLIIGFVEFLSFNALFFLLG

SEQ ID NO: 235181 - protein, 51 aa, Glycine max
  Clone ID: PAT_MRT3847_54397C.1.pep
IICEGICEWYVTDWLFLTISSLRQFVKCLLFRLIETIGQRVCCDGLAIFHC

SEQ ID NO: 235182 - protein, 79 aa, Glycine max
  Clone ID: PAT_MRT3847_54398C.1.pep
KICKWKNISTLLQRPLSSPGSDPYFVSTPKSCGVDTGIVGNRRVQASELYPTLLPYFLDPLTNLDTSPKSKQQHSLHSE

SEQ ID NO: 235183 - protein, 55 aa, Glycine max
  Clone ID: PAT_MRT3847_54399C.1.pep
QSQHSASGDKIRISRCTSPLGGSRYTVNYTKYRHVDKWPIQILNGASSEERVEAK

SEQ ID NO: 235184 - protein, 39 aa, Glycine max
  Clone ID: PAT_MRT3847_5439C.1.pep
GHLPIQDLCQLYALNGLLPKLCLASVIFIQKKGTPERQN

SEQ ID NO: 235185 - protein, 432 aa, Glycine max
  unsure (1)..(432): unsure at all Xaa locations
  Clone ID: PAT_MRT3847_543C.1.pep
LKQPLDYTLVSNSASMEIDEDGPIYGWLPTAPQGYKAVCYVVTTTPTKPSLDKIRCARLDLTDQCEANSFIWGSDNFNYYDCRPSNRGTHAPGVRVGTFVAQNGSPNPPSIVCLRNTNAIPKYMPNLPQIKAILQVYSPVMSLQPDEEFFPSSVEWFFSNGALLYKKGQESKPVSISPNGANLPQDPNIDGAYWVDLPADSTNKERVKKGDLKSAISYVHVKPMLGGTFTDIAMWVFYPFNGPARAKVEFLTVNLGKIGEHVGDWEHVTLRVSNFNGELKHVYFSQHSKGAWVDSSQIEFQSGXNKPLYYSSLHGHASYPHAGLNLQGTDNIGIRNDTAKGDKMMDMGAFELVSAEYLGYAVIEPPWLNYFREWGPKIDYSIDVELKKIEKFLPKNLKDALEKIMRSLPSEVLGEEGPTGPKVKNNWIGDEV

SEQ ID NO: 235186 - protein, 50 aa, Glycine max
  Clone ID: PAT_MRT3847_54400C.1.pep
IHNSFTSKEAGKMVLSVDNSASRKKKVAAYRYFVRKSSTPTPSEVQLSPK

SEQ ID NO: 235187 - protein, 73 aa, Glycine max
  Clone ID: PAT_MRT3847_54401C.1.pep
FTDNNSTRNIREANDHSISQYWEPTTSSLDHRKNHVLNAANSIPPSPTHFFCGGNKTQVAQPKKITPKNNPKN

SEQ ID NO: 235188 - protein, 51 aa, Glycine max
  Clone ID: PAT_MRT3847_54402C.1.pep
WLKEAQLCFGNLNFSVYILTFNIAYDATNASSVFIIQCRSLKILLLDNLDV

SEQ ID NO: 235189 - protein, 68 aa, Glycine max
  Clone ID: PAT_MRT3847_54403C.1.pep
SMREVPRKAGVYYYNKKMGIRKAEGERRSTSFPWKMTDTYRDWHERVHSNFWGIGIRTYTGETPWVMG

SEQ ID NO: 235190 - protein, 42 aa, Glycine max
  Clone ID: PAT_MRT3847_54404C.1.pep
SFWETYCLPIDPRYPFLFQPTSPKKLRWILISFSIMLLGTPQ

SEQ ID NO: 235191 - protein, 77 aa, Glycine max
  Clone ID: PAT_MRT3847_54405C.1.pep
KIGVVVAPAPGYGVVIPVLLKCWFFCLASLSGEGYKNSWGSPASCVQCYAIHCACDFCILVPGPRFLFFPFPRNCSG

SEQ ID NO: 235192 - protein, 141 aa, Glycine max
  Clone ID: PAT_MRT3847_54406C.1.pep
VRKDDPELEVALYSVMSRELIREQAMVSMLGSLSAEARVARFLVNLSERFAEMGYSGKQFNLRMTRHEIGSYLGLTLETVSRTLSAFNEMGLISVEQRAIDIKDLNALKTLRRLPPSRAREKQKAVKQVAEPVGRGDLAAA

SEQ ID NO: 235193 - protein, 556 aa, Glycine max
  Clone ID: PAT_MRT3847_54407C.1.pep
MVNPRIPRSRIPTFTLFTSAISIVLCIFFVLSFLFTAHSYSSHQHHNAGSDGGVAHGFESIRRSVLALKTDPLKPRLDQIRKLTDDHRSLALVYSSYARKLKLESSKLVRIFAELSRNFSDLMNKPQYRTLFSNDASPADESALRQLEKEVKERIKTTRQVIGDAKESFDNQLKIQKLKDTIFAVNEQLTKAKKQGAFSSLIAAKSIPKSLHCLSMRLMEERIAHPEKYSTEGKPVPPEVEDPNLYHYALFSDNVVAASVVVNSATKNAKEPWKHVFHVVTDKMNLGAMQVMFKLKNYHGAHIEVKAVEDYKFLNSSYVPVLKQLESANLQRFYFENKLENATKDTNNMKFRNPKYLSILNHLRFYLPEMYPKLHKILFLDDDIVVQKDLTGLWKIDMDGKVNGAVETCFGSFHRYAQYMNFSHPLIKAKFNPKACAWAYGMNFFDLDAWRREKCTEEYHYWQNLNENRTLWKLGTLPPGLITYYATTKPLDKSWHVLGLGYNPSISMDEINNAAVVHFNGNMKPWLDIAMTQFKPLWTKYVDYELDFVQACNFGI

SEQ ID NO: 235194 - protein, 205 aa, Glycine max
  unsure (1)..(205): unsure at all Xaa locations
  Clone ID: PAT_MRT3847_54408C.1.pep
PPNFCSPKNGFPKKKGGGGTPPSPPFALPRPCFFKIPKNPRGFCPFPFPRGDFKKQGGISFPKKGFGFFNRVFFPNXGGEGIFGPPPFRGPPRGGAXIKKNWGKNWPLNPLFGGGVFSFKVPPTGFGFSPFWEIVPPKGQLGPPFPGKKFGVLPPPFFFLKKKKKGFFFFWWGPPKKKKKKKKKKKKKKKKKKKKKKKKKKKKKK

SEQ ID NO: 235195 - protein, 195 aa, Glycine max
  unsure (1)..(195): unsure at all Xaa locations
  Clone ID: PAT_MRT3847_54409C.1.pep
LSQGSDGGVARGFESIRRSVLALKTDPLKPRLDQIRXLTDDHRSLALVXSSYARKXQLESSKLVRIFAELSRNFSDLMNKPQYRTLFSNDASPVDESALRQLEKEVKERIKTTRQVIGDAKESFDNQLKIQKLKDTIFAVNEQLTKAKKQGXLMEERIAHPEKYSTEGKPVPPEVEDPNLYHYALFSDNVVAASV

SEQ ID NO: 235196 - protein, 165 aa, Glycine max
  Clone ID: PAT_MRT3847_5440C.1.pep
GRERVFNETLERTQFAWTAIISAYARHGGFESVMSLYTEMEREGINPDSITFLSVLAACCRKGMVDAGHRVFDSMVKKHSIEPTSEHYSIMVDMLGRVGRLDEAEELMHQIPGGPGLAVLQSLLGSCRLHGNMEMAEKVVGRLIEMDPASSGPYVLMANLYAEKG

SEQ ID NO: 235197 - protein, 97 aa, Glycine max
  Clone ID: PAT_MRT3847_54410C.1.pep
MLMLLQNENRTLWKLGTLPPGLITYYATTKPLDKSWHVLGLGYNPSISMDEINNAAVVHFNGNMKPWLDIAMAQFKPLWTKYVDYELDFVQACNFGI

SEQ ID NO: 235198 - protein, 343 aa, Glycine max
  Clone ID: PAT_MRT3847_54411C.1.pep
MAFKKVLFQYFTLALCLVFAFCAFEGNARTLEDAPMRERHEQWMAIHGKVYTHSYEKEQKYQTFKENVQRIEAFNHAGNKPYKLGINHFADLTNEEFKAINRFKGHVCSKITRTPTFRYENMTAVPATLDWRQEGAVTPIKDQGQCGCCWAFSAVAATEGITKLSTGKLISLSEQELVDCDTKGVDQGCEGGLMDDAFKFILQNKGLAAEAIYPYEGVDGTCNAKAEGNHATSIKGYEDVPANSESALLKAVANQPVSVAIEASGFEFQFYSGGVFTGSCGTNLDHGVTAVGYGVSDDGTKYWLVKNSWGVKWGDKGYIRMQRDVAAKEGLCGIAMLASYPNA

SEQ ID NO: 235199 - protein, 128 aa, Glycine max
  unsure (1)..(128): unsure at all Xaa locations
  Clone ID: PAT_MRT3847_54412C.1.pep
MPGFLFFLFCFFLASSQHIAISFSTDTLSSTQILLTNQTLVSPSHIFALGFFPGTNSTWYLGAWYNNITDDKTVVWVANRENPLENSXGSLTIGENGNIVLRNPSKKNPVWSFDATKANNPVLQLLDT

SEQ ID NO: 235200 - protein, 92 aa, Glycine max
  unsure (1)..(92): unsure at all Xaa locations
  Clone ID: PAT_MRT3847_54413C.1.pep
LVGRGETPGAGFFFYPLGPNGGKKKKPPGGAGPPQKRKFHGGSQNIPKKGDKSLFKGRGAKNPQRVSGAGVLSFXSKIPEVMFGKGYPGGSG

SEQ ID NO: 235201 - protein, 68 aa, Glycine max
  Clone ID: PAT_MRT3847_54414C.1.pep
GWPPPNSAGLLLGPLGLGVSPIPGSSCALPKKVVRSPVVQFPPRLSPGRLQGRLPKVRLQFPKVSGES

SEQ ID NO: 235202 - protein, 33 aa, Glycine max
  Clone ID: PAT_MRT3847_54415C.1.pep
CFFYIRSHSKYNCKIGTQTRQKVLNLMPAYGLT

SEQ ID NO: 235203 - protein, 66 aa, Glycine max
  unsure (1)..(66): unsure at all Xaa locations
  Clone ID: PAT_MRT3847_54416C.1.pep
MKTPCYHLYXYWVKLAKXSLRRSEARSTGLQSXXXXRVRCPCTPVLXPXPLSVRSXYTVLTIDXPX

SEQ ID NO: 235204 - protein, 485 aa, Glycine max
  Clone ID: PAT_MRT3847_54417C.1.pep
MLREKRESALKMGKFSSSYSTSDFVHFGVLLPFLLLSQLFFQLAWCGSIVKFLPGLEGPLPFVLETGYVGVGESEDVQAFYYFIESENNPKEDPLMLWLTGGPGCSAFSGLVIEIGPIAFKNEEYNGSLPNLVLRPHSWTKVSSIIFVDLPVSTGFTYATTEFATQRSDWIQVHQVHQFLRKWLIEHPNFLSTDVYIGGDSYSGITIPAIVQEISLGNEKGLQPWINLQGYLLGNPATTRRHENYRISFAHGMGLISDELYRSLQKNCKGEYINVDTKNVLCSRNIETFNEVTSGLSMVNILDPSCDWLDTETSWRRSLLKKYPRKNFLNTHLKLPSLNCRSYAYFLCGYWANDDSVRSALHIRKGTIGKWRRCTFNIPNKEDISSSYEYHVNLSRKGYRSLIYSGDHDMKIPFLETQAWISSLNYSIVDDWRQWHTDGQVAGYTRTYSNRMTFATVKGGGHTAPEYKPEECLAMFRRWISNKAL

SEQ ID NO: 235205 - protein, 83 aa, Glycine max
  unsure (1)..(83): unsure at all Xaa locations
  Clone ID: PAT_MRT3847_54418C.1.pep
LIIGLDGSFLKTPFSGILLGAMGRDPNDQYYPFXWLMLKARTKTLXKWFLQNLLNDIGHEQKWVFISDQQKGLVPALQKLLPV

SEQ ID NO: 235206 - protein, 31 aa, Glycine max
  Clone ID: PAT_MRT3847_54419C.1.pep
ELIWLMNYKIQLNSSTHLWYEIIYQEAFNCC

SEQ ID NO: 235207 - protein, 73 aa, Glycine max
  Clone ID: PAT_MRT3847_5441C.1.pep
PRKNLKTGLSGKFSWGGKKGFSGAPPLKIKPALGHFLGQIKLFRAPSEKKKKNYFGLTRRPLLIFETFLPRSP

SEQ ID NO: 235208 - protein, 67 aa, Glycine max
  Clone ID: PAT_MRT3847_54420C.1.pep
DDTRGVQMADMIIQITVYKPMIGTTYNALLLNEHLVKHLKRNRLCTFVKIHRQSHVISRMLCQLHAR

SEQ ID NO: 235209 - protein, 70 aa, Glycine max
  unsure (1)..(70): unsure at all Xaa locations
  Clone ID: PAT_MRT3847_54421C.1.pep
IIPLLCHQIRQEAMKLSREGVFASLKCYLHANPFLTTFVYACLPKSPHTSLEQHIVLQTLCYYFYLXNLG

SEQ ID NO: 235210 - protein, 83 aa, Glycine max
  unsure (1)..(83): unsure at all Xaa locations
  Clone ID: PAT_MRT3847_54422C.1.pep
YFIDNTWWSCYASAGKGLMKNIKQKRLKGNSLGEEVLTKLNEHLQMGKGRILYSIFKDVVRKAKRKLILPDFSKANIKLFHXX

SEQ ID NO: 235211 - protein, 89 aa, Glycine max
  Clone ID: PAT_MRT3847_54423C.1.pep
KATLSLPEVEARVSKKSVLIRILCEKEKAVLVNIFREIEKLHLSVVNSSALSFGSSVLDTTIVAEMEDEFNMGVKELARNLRVGLMQFM

SEQ ID NO: 235212 - protein, 50 aa, Glycine max
  Clone ID: PAT_MRT3847_54424C.1.pep
MSYPSQSNLGCKLQIIDEEIIAMCEGKRMNNSITLNRLEGGNSVTVTDEQ

SEQ ID NO: 235213 - protein, 178 aa, Glycine max
  unsure (1)..(178): unsure at all Xaa locations
  Clone ID: PAT_MRT3847_54425C.1.pep
LYLVSHQFSSFYLLVSFSVCQIKLFHRLTCIYAACKIEENHVSAEELGKGISQDHQMILNNEMIVYQSLEFDLIVYAPYRSVEGFINDMEEFFNAGDNQLEMLKTLQETARFEVDKMMLTDAPLLFPPGQLALAALRNSNAFHRVIDFDSYLRGIFSRENSMHTMSELSXSLDAIDSW

SEQ ID NO: 235214 - protein, 94 aa, Glycine max
  Clone ID: PAT_MRT3847_54426C.1.pep
ISGYWATRGSGLPQDTRFPSLSQSCLFNPAFYPITPPRFFTYYVRFYLGPILNSFWGVGVSLPLSGPVYFHRKLPYTYQAAVIGLPKLVLPRAF

SEQ ID NO: 235215 - protein, 90 aa, Glycine max
  Clone ID: PAT_MRT3847_54427C.1.pep
FKKDPILYCAVTFRDAIKRSNGSISRCSSHSLILREFPQIHRLLSDVPTDLCLLRVNDWSLLLFARSWTTCESDSAIDHGCRAILVRRAS

SEQ ID NO: 235216 - protein, 123 aa, Glycine max
  unsure (1)..(123): unsure at all Xaa locations
  Clone ID: PAT_MRT3847_54428C.1.pep
MPEHDSRWSDHHSRSARMSPKGWIFLPVLCFSSLSLSLCLPXDNGLAMNFYKESCPQAADIINEQVKLLYKRHKNTAFYWLIHIFHDCAAQSRDASLMLDSTRKSFTEKETHRIFWLTNITFI

SEQ ID NO: 235217 - protein, 136 aa, Glycine max
  Clone ID: PAT_MRT3847_54429C.1.pep
KSYEPNQQLRRSLNFSGEKPSTPVLDTINYPIHMKNLSIQELEELADELREEIVYTLSKTGGHLSSSLGVAELTVALHHVFNTPQDKIVWDVGHRTYAHKILTGRRSKMHTIRQTGGLAGFPKRDESLHDAFCVGH

SEQ ID NO: 235218 - protein, 226 aa, Glycine max
  unsure (1)..(226): unsure at all Xaa locations
  Clone ID: PAT_MRT3847_5442C.1.pep
MDTLRVQSLASQSKETIPAEFVRSETEQPGITTVHGTQLGVPIIDFSNPDEDKVLHEIMEASRDWGMFQIVNHEIPSQVIEKLQAVGKEFFELPQEEKEQYAKPADSTSIEGYGTKLQKEVDNKKGWVDHLFHRIWPPSDINYRFWPKNPPSYREANEEYDKYLHGVVDKLFESMSIGLGLEKHELKEFAXGDNLVHLLKVNYYPPCPCPDLXPRVPSHTDMSCIT

SEQ ID NO: 235219 - protein, 54 aa, Glycine max
  Clone ID: PAT_MRT3847_54430C.1.pep
STSQQGCNFTAAPELVFILYIHDYGIIKYDVKVAFELFFIVPLQTKHTFIQVSN

SEQ ID NO: 235220 - protein, 263 aa, Glycine max
  unsure (1)..(263): unsure at all Xaa locations
  Clone ID: PAT_MRT3847_54431C.1.pep
MRLDKLYNRFLLPSNSSLLPLAPPLRLTLRHRTAANFASMASSRVRNLAPLAAAPAQDAAAASISSSANAAASADYDDESTVGVRYHVPPSVISDIVDAPPVPALSFSPLRDKIIFLKRRALPPLAEIARPEEKLAGIRIDGKRNTRSRMSFYTAIGIHQILPDGTLGSETEVSGLPDGAKINFVSWPSDGXHLSFSIRVNDEDNDSTKLTVWIAYVKTGIARTMIQSPNVQLSAVFDNCIRGTNPSLKVCTISSSRGASPRN

SEQ ID NO: 235221 - protein, 51 aa, Glycine max
  Clone ID: PAT_MRT3847_54432C.1.pep
RINIVLVTISELSKKAKNPFRKKKKGRILYIYNQKFFPLIIIIIIIFPNLW

SEQ ID NO: 235222 - protein, 56 aa, Glycine max
  Clone ID: PAT_MRT3847_54433C.1.pep
VGWGAHGGDAGSFKDPGGVDRIGSYIVRQAAKSVMANGLTRKCLVQVSYAISVPKP

SEQ ID NO: 235223 - protein, 200 aa, Glycine max
  Clone ID: PAT_MRT3847_54434C.1.pep
QKSLADSDQFKDGCDLPTIPFPYSVIIIVFSHFLTISLVLSLMAVAAFKSSSRRATQSSAPSNAPPNTTSSSGRSSTRAPNPTRRSRSVSAFSRGSSDISTATEFLNKRDNPLFFDEKQSATVFLLETSTPANSARSTEPGRMETGRALFRVNSGRRTRSASQCPVSRRNLNFYTSESEAESKERNGLKLVGSNRQGGLV

SEQ ID NO: 235224 - protein, 128 aa, Glycine max
  Clone ID: PAT_MRT3847_54435C.1.pep
VHAGLSEKEKISICSTLNHEKLSAELLRHLTRSLVFPSDAKPRAYVTRQSRMKTLLQENDHLKNFFESMFRKSFKNMEANEDVEKRSYDAEELRGDWEGMQNGTQMASMKKSGTHIMSNAMYLPKLCS

SEQ ID NO: 235225 - protein, 66 aa, Glycine max
  unsure (1)..(66): unsure at all Xaa locations
  Clone ID: PAT_MRT3847_54436C.1.pep
EFPGSDPTPSRSRPSCSRPSALITHSIAFPLXFGSLVLCLLDKNVLXQIKKGVLTIISXXVLQPMA

SEQ ID NO: 235226 - protein, 55 aa, Glycine max
  unsure (1)..(55): unsure at all Xaa locations
  Clone ID: PAT_MRT3847_54437C.1.pep
LELELIRXKGCLRHLFAKGKVFSPLFNVVGIGVLMHLASSIFASLGGKLVAGRLL

SEQ ID NO: 235227 - protein, 120 aa, Glycine max
  Clone ID: PAT_MRT3847_54438C.1.pep
ILCSSTNLSGYSCITFHYKSQSWVQTLGVHSIIPRQHFMQHVNGRPGTKTYNTWKSWWIALTWSIWQQRNMVIFRNEPFNGAKLLEGALFLLWTWLRAREKDFSIHFNQWSSNLIDVFCN

SEQ ID NO: 235228 - protein, 80 aa, Glycine max
  Clone ID: PAT_MRT3847_54439C.1.pep
MRRVGGDVLNVDLAAAVNNLFNLPETMEKFMFPSSRAHDHHHETRGVSSIIPVDILDTPKEYTFFMDVPGLSKSEIHVHT

SEQ ID NO: 235229 - protein, 98 aa, Glycine max
  Clone ID: PAT_MRT3847_5443C.1.pep
MSAAASSSATPSAAQVLSLFRSLLRAAREFPDYNIREYTKRRTIDSFRHNATLSDPSQISTAFAHGKSQLAVVKRQAVVYSLYDSPLRSVMELQQVPF

SEQ ID NO: 235230 - protein, 55 aa, Glycine max
  Clone ID: PAT_MRT3847_54440C.1.pep
FPPVRVRAYFLVRKARPVFTLKKGGAPPVGIKSCPLECPPLPNVPMFLFLGQVKS

SEQ ID NO: 235231 - protein, 78 aa, Glycine max
  Clone ID: PAT_MRT3847_54441C.1.pep
PLPSFCGQGSKKKARAWCASKENIPFFETSPKKGFNVEKAFQCITKNPLKSGKKKKLSLPAPIFFGNTSHPRATGCEC

SEQ ID NO: 235232 - protein, 80 aa, Glycine max
  Clone ID: PAT_MRT3847_54442C.1.pep
VVIEPIVCQIFAQHLFYFFSESLFSLHAVCHSFSTASREGKAMNNAFFFQYITNQTLQIFLFFGYRLLVSFTVDNPNHAR

SEQ ID NO: 235233 - protein, 536 aa, Glycine max
  Clone ID: PAT_MRT3847_54443C.1.pep
MAVSSSHMRFTFECRSDPDFSPPPPSFDNLRRRNFRSSAGSGAAFHGISSLILRFPPNFQRQLSTKARRNCSNIGVAQIVAASWSNNSDNSPAAGAPAPPAATATDAATVPLPVVVAANEDVVVSAAADENGAVQLNSSSYSSFLKSDASKTIHAAERLGRGIETDGITTPVVNTSAYFFKKTADLIDFKENRQVSYEYGRYGNPTTVVLEEKISALEGAESTVIMASGMCASVVLFMALVPAGGHLVTTTDCYRKTRIFIETFLPKMGITTTVIDPADVGALESALEQHNVSLFFTESPTNPFLRCVDIKLVSELCHKKGTLLCIDGTFATPLNQKALALGADLILHSLTKYMGGHHDVLGGCISGSIKVVSQIRTLHHVLGGTLNPNAAYLFIRGMKTLHLRVQQQNSTGMRMAKLLEAHPKVKRVYYPGLPSHPEHELAKRQMTGFGGVVSFEIDGDLHTTIKFIDSLKIPYIAASFGGCESIVDQPAILSYWDLPQSERAKYKIYDNLVRFSFGVEDFEDLKADVLQALEAI

SEQ ID NO: 235234 - protein, 47 aa, Glycine max
  Clone ID: PAT_MRT3847_54444C.1.pep
MIQELIIKAGLYMGKHLLCKPPHAVVRILKILFYRNCGSTYKVTFGP

SEQ ID NO: 235235 - protein, 104 aa, Glycine max
  Clone ID: PAT_MRT3847_54445C.1.pep
ALFNYSEGSLERVVEALARSRAGLTEADRYAESGCSDVYREIERLIKSLYTTLYPSLDHLDDSIHYALHFELHRVLHRVLQRALQRALRTVLRSLNSWLHLQTD

SEQ ID NO: 235236 - protein, 52 aa, Glycine max
  Clone ID: PAT_MRT3847_54446C.1.pep
MFNLIFNILCNRDLPQSERAKYKIYDNLVRFSFGVEDFEDLKADVLQALEAI

SEQ ID NO: 235237 - protein, 288 aa, Glycine max
  Clone ID: PAT_MRT3847_54447C.1.pep
MRKRSIYAWLVALVCFLLLMIVTPAIPQSQEYHDFADHRTFLGIPNALNVISNFPFLVIGLVGLVLCHHGNYFRLSLQGELWGWTCFYVGVAAVAVGSSYYHLKPDDARLVWDRLPMTVAFTSIMAIFIIERIDERKGTVSIIPLVLAGIISIVYWRFFDDLRPYALVQFVPCIVIPLMAILLPPMYTHSTYWLWAAGSYLLAKVLEATDDVIYEWAQHIVSGHTLKHLVAAMVPVFLTFMLAKRSVEPERQSLLKTWRVSWTKFREGNSNIESYSYSYTNVQAVEPQ

SEQ ID NO: 235238 - protein, 282 aa, Glycine max
  unsure (1)..(282): unsure at all Xaa locations
  Clone ID: PAT_MRT3847_54448C.1.pep
MAVSSSHMRFTFECRSDPDFSPPAASFDNLRRRNFRSSAGSGAAFHGISSLILRFPPNFQRQLSTKARRNCSNIGVAQIVAASWSNNSDNSXLATAADAATVPTQVDLAXXEDVVVSAAAGENGTVQLNSSSYSFLKSDASKTIHAAERLGRGIETDGITTPVLNTSAYFFKKTADLIDFKENRQVSYEYGRYGNPTTVVLEEKISILEGAESTVIMASGMCASVVLFMALVPAGGHLVTTTDCYRKTRIFIETFLPKMGITTXVIDPAGSVDPKSGRTAGG

SEQ ID NO: 235239 - protein, 54 aa, Glycine max
  Clone ID: PAT_MRT3847_54449C.1.pep
LVVVPSKRNEHHDLFIDIEVSPNFAFLCYVNTQTETFPECGHYHKNKDLVFRSS

SEQ ID NO: 235240 - protein, 87 aa, Glycine max
  Clone ID: PAT_MRT3847_5444C.1.pep
TLTWFITALSDIISRSSNVYKSEERPWELEKLLEFATTLIMICAYSQHLLKWLPRRKTYHLILNNLNIFHLRFKIDTLMDLVIRMHY

SEQ ID NO: 235241 - protein, 112 aa, Glycine max
  Clone ID: PAT_MRT3847_54450C.1.pep
VKRVYYPGLPSHPEHELAKRQMTGFGGVVSFEIDGDLHTTIKFIDSLKIPYIAASFGGCESIVDQPAILSYWDLPQSERAKYKIYDNLVRFSFGVEDFEDLKADVLQALEAI

SEQ ID NO: 235242 - protein, 64 aa, Glycine max
  Clone ID: PAT_MRT3847_54451C.1.pep
EERGRPTRPPTRTFSYRNTRAQERNRVEKRPALAQPASNLSGSKSKPPSTKEKADGAGRSQRKP

SEQ ID NO: 235243 - protein, 182 aa, Glycine max
  Clone ID: PAT_MRT3847_54452C.1.pep
LSQAEHGPDSQVVLVISGEGVDLNVIEEELNKQCQSLPRGEFAAKALSHSFIVYAHDMLESIKFSNLYAPEHLIVNTNDAEKWEGFIENAGSVFLGPWTPESVGDYASGTNHVLPTYGYARMYGGVSLDSFLKFITVQSLTEEGLRKLGPYVVTMAEVEGLDAHKLAVTLRLEDIEVRQVST

SEQ ID NO: 235244 - protein, 39 aa, Glycine max
  Clone ID: PAT_MRT3847_54453C.1.pep
LKKESGGFLSLFISEACCIFYINHYLKRVYKPLSMGPSK

SEQ ID NO: 235245 - protein, 473 aa, Glycine max
  Clone ID: PAT_MRT3847_54454C.1.pep
MTMESALTASNWNRSLIRIHHTKPRFGAIRPTSIRCFMKSYKLSELSDAELRSLIARPRIDFSSVFALVNPIVDHVRERGDAAVKEYTLRFDKAELDNIVELVSDLPDPQLDAHVKEAFDVAYNNIYAFHAAQKTPERNVENMKGVQCKRVARSINSVGLYVPGGTAVLPSTALMLSVPAQIAGCKTIVLATPPAQDGTICKEVVYCAKKGGVTHILRAGGAQAISAMAWGTETCPKVEKIFGPGNQYVTAAKMILQNSEAMVSIDMPAGPSEVLVIADKHAIPRHVAADLLSQAEHGPDSQVVLVISGEGVDLNVIEEELNKQCQSLPRGEFAAKALSHSFIVYAHDMLESIKFSNLYAPEHLIVNTNDAEKWEGFIENAGSVFLGPWTPESVGDYASGTNHVLPTYGYARMYGGVSLDSFLKFITVQSLTEEGLRKLGPYVVTMAEVEGLDAHKLAVTLRLEDIEVRQVST

SEQ ID NO: 235246 - protein, 250 aa, Glycine max
  Clone ID: PAT_MRT3847_54455C.1.pep
MEWLQTLPPPSHISPSALSFLDHRLHTQLAVAEAPTFAAELQTQCSELDRSLDELTRRLGAGLSAYASFSGEIHGLFGAVTDRLIALSSTVVPDGGRGEEDGKGFREELATLAKEVARLETVRVYAETALKLDTLVGDIEDAVSFTMSKNIRKHSSQNSQEMHMLAIKTLKTTEGILTSITKAHPQWKHLVSAVDHRVDRALAILRPQAIAEHRALLASLGWPPPLFALNSLDSDARTANQVANPLLTMQ

SEQ ID NO: 235247 - protein, 100 aa, Glycine max
  Clone ID: PAT_MRT3847_54456C.1.pep
AALRSGSPPGCLRQKRRRVGDRQVADAQACGDHVITHPGIGRQPDLRPLERTAVACLRLRKALFDKKRGIYGKRILDNSRHEIEIRGPYKRNKEGQEKRS

SEQ ID NO: 235248 - protein, 152 aa, Glycine max
  Clone ID: PAT_MRT3847_54457C.1.pep
SISPSYTDEGMHDHQVYADPLPGITEMSQNSHLLDELSSEMYTEEDSCDLNGSQFPFVRGGYSTENESSEIQFIDDCPPYTTWEPETGILFGSPVGAEFSSYSTFINSDVDISSSGKTKAVWYKIRVALKWVISVKRDAAARRNGHLFYHNY

SEQ ID NO: 235249 - protein, 73 aa, Glycine max
  Clone ID: PAT_MRT3847_54458C.1.pep
PLIPRIHTIHHHTCSNPLPHSLLIRQLTHNSSESLYRHPIIKHLKPSCLLSTLYSTKDPHILKPHTISNPFLK

SEQ ID NO: 235250 - protein, 109 aa, Glycine max
  Clone ID: PAT_MRT3847_54459C.1.pep
LCGMVRLLVPPRRYWVVRPLRRLFTWRCTLGMWSRQGCRYTVPAPLQNMWLVFYMANTEDGRRIYEWRQIMADHMGIPLLERHLDIGRILRPSYFARRKILGWMTATCY

SEQ ID NO: 235251 - protein, 57 aa, Glycine max
  Clone ID: PAT_MRT3847_5445C.1.pep
FLPRQKDPISPHRPAPGDSFFTKPLLQLKEPRKNSALQMPSEFKKFFPLYSFPTIPW

SEQ ID NO: 235252 - protein, 104 aa, Glycine max
  Clone ID: PAT_MRT3847_54460C.1.pep
SSVKSKIWVAADDPIEVGRMDASVGCIPGRYGQVETGSGCALRSLVARATTGGFDLTVNGSAQSVSTDKCTFAKYSSQGLSSFCGGLWIGNNNTHRHVQASVIL

SEQ ID NO: 235253 - protein, 124 aa, Glycine max
  Clone ID: PAT_MRT3847_54461C.1.pep
IDRARLIKRVAKVKEEQAKIDEAADLMHEVAVETFGSMAKTEKIAFILEQVRLCLDRHDYVRAQILSRKIRTRVFDADPSKEKKKPKEGDNIVQDAPADIPYLLELKRIYYELMIRYYLHNNDY

SEQ ID NO: 235254 - protein, 139 aa, Glycine max
  Clone ID: PAT_MRT3847_54462C.1.pep
RTKNFGIIRPDGVVVRSRKDVGVCYAFVEFEDMTGVHNAVKAGSVQIAGRQVYIEERRPNSNIPSRGGRRGRGRGSYQSDAPRGRFNSRNFGRGNGQDGGDRDYNKSKGNGFYRPSPHQERGHSGHHQVPRNGQNLAES

SEQ ID NO: 235255 - protein, 47 aa, Glycine max
  Clone ID: PAT_MRT3847_54463C.1.pep
LTIGTLVILMVLVGGVVMFFSSMNIVKTFYFLLIRESRSFNFHSYYF

SEQ ID NO: 235256 - protein, 71 aa, Glycine max
  Clone ID: PAT_MRT3847_54464C.1.pep
SYDVRCARPFRLRLPYHCQCILTSEIHLIEEAATTLHRSYQSMGTYWHISVSGVSEYDIQLRPTSSCASSP

SEQ ID NO: 235257 - protein, 117 aa, Glycine max
  Clone ID: PAT_MRT3847_54465C.1.pep
DLTGTSSAGVVPQMFDMDPISNRIVHTNVDSSFKGQHLSKLSQLDSGNLLSREPGFEPQSWPQGLAGKSSWQGLEVPTKQNSFALANDLNGRIGTTNSPSSNVEAGSQLQPNLALQL

SEQ ID NO: 235258 - protein, 160 aa, Glycine max
  Clone ID: PAT_MRT3847_54466C.1.pep
HVYSFGVVALEIACGRIPINHRAQENEISIVQWWVWELFGGGRILDAADPRLEGDFEEEQIKCLMIVGLWCAHPDHNNRASIRQAIQVLNFEAPLPNLPSSLPVPTYLDGPLHSSIAPFSITASVEGHSQIRSSTANTNSSGFTTTSDDASPSVSLLYSR

SEQ ID NO: 235259 - protein, 65 aa, Glycine max
  Clone ID: PAT_MRT3847_54467C.1.pep
IGGIEGKTFRSVSSWELSIALQKKRESLCEGETLAQQRILSFYVIQYSRTEAFFYLSSIFSHLSL

SEQ ID NO: 235260 - protein, 96 aa, Glycine max
  Clone ID: PAT_MRT3847_54468C.1.pep
RRGNTLVITILPSSAACPAIPLSDESAQVEESRGQLPVKNRAICLEVAIHPRYRDSTTIQEQKRDNLLFVSVAAGIVSNRVNTYRESYDTSFRTLL

SEQ ID NO: 235261 - protein, 92 aa, Glycine max
  Clone ID: PAT_MRT3847_54469C.1.pep
HWLEKEHSWGANPLTAFHRVLLFFLLKLSHIFSAENFSLGRPHFILVSSLIRPPAFFTFCFRFLSWPEFFRVNLFPLFFFPPFLPPLFLQII

SEQ ID NO: 235262 - protein, 31 aa, Glycine max
  Clone ID: PAT_MRT3847_5446C.1.pep
VHFLALIIRNHFYKDQSREISFRIKNNSLKS

SEQ ID NO: 235263 - protein, 48 aa, Glycine max
  Clone ID: PAT_MRT3847_54470C.1.pep
KRARKQKKKRKRKKFKKKKKKKKRKKKKNKKKKKKKKKKKKKKRGGAF

SEQ ID NO: 235264 - protein, 58 aa, Glycine max
  Clone ID: PAT_MRT3847_54471C.1.pep
SYRAVLSQQGLDQVTSCQSPSSLVVLLLSAVLDRSSLSAVLETRRIWSIGEAGRNIGG

SEQ ID NO: 235265 - protein, 58 aa, Glycine max
  unsure (1)..(58): unsure at all Xaa locations
  Clone ID: PAT_MRT3847_54472C.1.pep
GXESXPLTSXSXSXQAXWSCXCFSXWNXHSEXRXAIXDXXXNXSXXCXXIYXSVXIVL

SEQ ID NO: 235266 - protein, 36 aa, Glycine max
  Clone ID: PAT_MRT3847_54473C.1.pep
GFHLSNWHKIDFDVICNFLISGKCLTHGISRITVMP

SEQ ID NO: 235267 - protein, 321 aa, Glycine max
  Clone ID: PAT_MRT3847_54474C.1.pep
MLASDSGSVLRPKPPVPTLDPTRSLLRPFCFDPGSRPARPTLSLKMELLRRMGRGCFKAEADSAGQDFFDAAAAAAPNPAPHHLVIMVNGIIGSAADWRYAAEQFVKKLPDKVIVHRSECNSSKLTFDGVDTMGERLAEEVLSVVKRWPEVQKISFVAHSLGGLVARYAIGRLYDYSSTLALVGTSRDYFNEEKTEFSKQFLEQSYEAKIAGLEPMNFITFATPHLGSRGNKQLPFLCGLPFLERRASETAHLVAGRSGKHLFLMDNDDGKRPLLLRMVNDSDILAFIASFKCHLRRHGAMANAIMDHMVRMAYLINSSST

SEQ ID NO: 235268 - protein, 587 aa, Glycine max
  Clone ID: PAT_MRT3847_54475C.1.pep
MKSLSKLKKTLHKTVSKDKKDFPPTVKFDELALAAKDMQAMRDCYDSLLSAAAATQNSAYEFAESLQEMGTCLLEKTALNDDEENGKVLGMLGSVQLELQKLVDSYRSHIVLTITNPSESLLNELRTVEDMKRQCDEKRDVYEYMIAQQKEKGKSKSAKGESFTLQQLQAAHAEYEDEAKLCAFRLKSLKQGQSRSLLTQAARHHAAQLNFFRKGLKSLEAVDPHVRMIAERQHIDYQFSGLEDDGGENDNNDDGNDFDVIEGGELSFDYRANKQGPYIVSTSPNSAEVEESGRSYIRASTPETAETSLEKNQGDFKVSNRVGGSYSAPILAEKKFDPAEKVRQLLAFSAAKSNAYVLPTPVNIKETKTSSAPRTSASGSLHNLWHSSPLDEKKNEKDVDSKLSEPTIPRAHSVLKESNSDTTYTQLPRPSADGLSPPQVDLFSATDTKKIKRQAFSGPLTNKPLSVKPVSGGFSRLPVPQPSSPKASPNASPPLVSSPRISELHELPRPPGNQSSKPRVGHSAPLVLKNPEAAMTNKFPSVVFSAASPLPTPPVSRSFSIPSSGQRVVALNVSNTKYLDTPPSFKG

SEQ ID NO: 235269 - protein, 241 aa, Glycine max
  unsure (1)..(241): unsure at all Xaa locations
  Clone ID: PAT_MRT3847_54476C.1.pep
GSAADWRYAAEQFVKKLPDKVIVHXECNSSKLTFDGVDTMGERLAEEXVQKISFVAHSLGGLVARYAIGRLYDYSSTLALVGTSRDYFNEEKTEFSKQFLEQSYEAKIAGLEPMNFITLLREDDRRGGNKQLPFLCGLPFLERRASETAHLVAGRSGKHLFLMDNDDGKRPLLVRMVNDSDDLKFMLVLKYQLSSSNASICFCIVDNLIVCDGVGQLYVHLSVEWHMQMQIMIVSSFTFRF

SEQ ID NO: 235270 - protein, 139 aa, Glycine max
  Clone ID: PAT_MRT3847_54477C.1.pep
MKSSLSKLKKIALHKTVSKDKKDFPPTVKFDELALAAKDMQDMRDCYDSLLAAAAATQNSAHEFAESLQDMGTCLLEKTALNDDEESGKVLGMLGSVQLELQKLGDSYRSHIVLTITNPSESLLNELRTVEDMKKHVMK

SEQ ID NO: 235271 - protein, 89 aa, Glycine max
  unsure (1)..(89): unsure at all Xaa locations
  Clone ID: PAT_MRT3847_54478C.1.pep
TPRAQLSPIINVSTPNSPNGNSLITMVVLQIMLLVVLVLVLKTSGCQSQVIEVXCISRRWRVNVTCVLTGGTCPGANSRVRLSQPLAPI

SEQ ID NO: 235272 - protein, 82 aa, Glycine max
  Clone ID: PAT_MRT3847_54479C.1.pep
IISFSCIRAASPLPTPRVSRSFSIPSSGQRVVALNVSNTKYLDTPQVSKVDKAVSPPLTPMSQRASNISDLASHSSEIQASS

SEQ ID NO: 235273 - protein, 57 aa, Glycine max
  Clone ID: PAT_MRT3847_5447C.1.pep
DPKLRKSIMQWSLMGRPNLVHMPLSMIASPACHYVLGPGRLFAFPWSGLVTRLNIVH

SEQ ID NO: 235274 - protein, 682 aa, Glycine max
  Clone ID: PAT_MRT3847_54480C.1.pep
MIGISFVLCHAAMASLSNILLMFCLFNLLAYPVSVHSAGEVPINVTKHFSFYNFSFSNNPRLVHDVKLLGSAKFSNEKGALQIPNESEDIRHQAGRGIYSFPIRLLDPSTKTPASFQTTFSFQMNNSTASEQAAYGGSGLTFIIVPDEFTVGRSGPWLGMLNDACENDYKAVAVEFDTRKTPEFGDPNDNHVGINLGTIVSTKVINVSDVGLSLKDGSVYRAWITYDGPQRRMDIRLGKANQEDYPSKPMFSESMDLSPYLNEYMFVGFSASTGNHTQIHNLLSWNFTSTSQAFLHLPSSESCQGKILLENSTAATEPTNSQKSSKNEPPRSFLIFVAAVALALALFLGFYFISKHRRNAAKLNTSVEAELHMPRPPNKPRRFAFSQLSSSTRSFSEIELLGSDNRGEYYRGKLSNGSQVAVKRFSAQFLSTHGSDKKRLLKEIKGISHVRHPNLLPVRGWCQDNHEIMVAYDFVPNGSLDKWLFGAGVLPWTRRFKVIKDVADGLSFLHTKQLAHKNLKCSSVFLDVNFRAVLGDFGFVLMGAESKHFESQVCQGADVFEFGVLVLEVIAGRVRDEKEEGNPEERNLLGYAWNLHQIDEKVKLVDKRMGSLINLEQAIRALEIGLLCTLNENKGRPSMEQVVDFLLNMDKPIPELPRTRPVALFPYNSANTGLCNAYSCTF

SEQ ID NO: 235275 - protein, 106 aa, Glycine max
  unsure (1)..(106): unsure at all Xaa locations
  Clone ID: PAT_MRT3847_54481C.1.pep
QPTISCCKQKKGILGLKGASGSGVRDNDKEIIFIWLITGIFEWWVWMGCVRSYLPDICTMNQGWKVNLMSRFVSVXYEFDVLRVTRVILEGITRSTYVTTVVEAAG

SEQ ID NO: 235276 - protein, 163 aa, Glycine max
  Clone ID: PAT_MRT3847_54482C.1.pep
MIGISFVLSHAAMASLSNILLMFCLLNLLAFPVSVHSAGEVPINVTKHFSFYNFSFSNNPRLVHDMKLLGSAKFSNEKGALQIPNESEEDIRHQAGRGIYFFPIRLLDPSTKTPASFQTTFSFQMNNSTASEQAAYGGSGLTFIIVPDEFTGGKARTVARHAQ

SEQ ID NO: 235277 - protein, 106 aa, Glycine max
  Clone ID: PAT_MRT3847_54483C.1.pep
LYLYLFPFSTKNLTFAISNLHSSNIQNPYPYLHHTQSKILILFLYTQHKTLIYSYATLLTDHISLYTPYNLNFNFIALQCLHNHPSTNNKLTYNSYSHTFNYPTDN

SEQ ID NO: 235278 - protein, 119 aa, Glycine max
  unsure (1)..(119): unsure at all Xaa locations
  Clone ID: PAT_MRT3847_54484C.1.pep
INTFQRXKPLSLGEEAQHHYHQILIFQVHAQILTTSXNCNHSLIPLSHSHYYKSCKPFSTFAQKTLEYPLXFTPYMTKTQIVEKYHPCVTSIETSFLFILHSNSSGALLPCKIIQLPNL

SEQ ID NO: 235279 - protein, 131 aa, Glycine max
  Clone ID: PAT_MRT3847_54485C.1.pep
FPFKGTIYTSSSSGSSVWGGDEDSRSMFSVQSERYRRHSIAGSSVRDDDSLASTPAIPSYMAATSSAKARSKIIRHSPEKKGGGGSVSARKRLSFSPSSAANSRRHSDPPKVEMVYNKDAAAATVSNGRGR

SEQ ID NO: 235280 - protein, 46 aa, Glycine max
  Clone ID: PAT_MRT3847_54486C.1.pep
DLHIETYYFTNTRNHVRDLAFRGRRKGGRGNSKIHHNHEIYSSSIH

SEQ ID NO: 235281 - protein, 63 aa, Glycine max
  Clone ID: PAT_MRT3847_54487C.1.pep
VQNCTAIYFLILLDKKGMKISISILVDRKVELFSLHRRGDSLPSVKSKIRFNALRYTCAYIPF

SEQ ID NO: 235282 - protein, 147 aa, Glycine max
  unsure (1)..(147): unsure at all Xaa locations
  Clone ID: PAT_MRT3847_54488C.1.pep
SIFLGFWLNELLMDQNTSEGRGEVLGPVYEGEDGNLSNLVEGVVVLIDAVDGNSLGGRVSISEEAGTSGEVGKDFGSDMELEEGIEEVKDQDNHDQENISDDKLLEVDQGTSYNSXHLVNQVVIETVVAIESCQTKYVTEDNRKLET

SEQ ID NO: 235283 - protein, 174 aa, Glycine max
  Clone ID: PAT_MRT3847_54489C.1.pep
MVYHSSFVNEDGVSRACGCSLLPLKSHIKGPAPVSDQDRTDIVDEAITFFRANVFFRNFDIKSPADKLLIYLTFYINVALKRLEGCRTLAEGTKAIINLGLEKVPVPGESGFPFPGLFPLPQSHKEAELFRNYLKQIREETSGRLLSVAYRPNGTPNKWWLAFAKRKFMNIIIP

SEQ ID NO: 235284 - protein, 48 aa, Glycine max
  Clone ID: PAT_MRT3847_5448C.1.pep
TASKKPPKGATLSLSLYLFLVDAYLSLLWHNFIKRSYSNPKLRFHFQS

SEQ ID NO: 235285 - protein, 54 aa, Glycine max
  Clone ID: PAT_MRT3847_54490C.1.pep
WKSKAGEKCFRNKQSASVTFNLYRHLIGYPLYGLCCNCSTEHSYLFELSRYNIN

SEQ ID NO: 235286 - protein, 41 aa, Glycine max
  Clone ID: PAT_MRT3847_54491C.1.pep
SLSPLHNLTCGESSHGLRENTHFLTDAFQATNDAYSGSLMP

SEQ ID NO: 235287 - protein, 105 aa, Glycine max
  unsure (1)..(105): unsure at all Xaa locations
  Clone ID: PAT_MRT3847_54492C.1.pep
LIRGHKQRTDGKVAEGKHNPVSNLRAGENHVDQTPPKAQEETLPSSARDSRTAMASKNSKPQXATATHVGAIEITIESHASPDCNKDWCNALGLKLIIPNPENAV

SEQ ID NO: 235288 - protein, 89 aa, Glycine max
  unsure (1)..(89): unsure at all Xaa locations
  Clone ID: PAT_MRT3847_54493C.1.pep
MDQDMNDVYDIGQIXLEMILGQPIMLHNEHETLNYLLHVSIXTDDIHRRSIEDLHDYREXEQMXLMTMMEISVRCLSGESTARTSEEDI

SEQ ID NO: 235289 - protein, 128 aa, Glycine max
  Clone ID: PAT_MRT3847_54494C.1.pep
DHANEADHYPCHVMILNHPRHIGHGSAPVLNCHTSHIADMFAELITKIDRRSRIELEKEPKFLKNRDAGFVMMISTKPMAVETFSVYPPLCRFAVKDMRQTVAEGVITNDEKNDSTGANVTKAAHKKK

SEQ ID NO: 235290 - protein, 79 aa, Glycine max
  unsure (1)..(79): unsure at all Xaa locations
  Clone ID: PAT_MRT3847_54495C.1.pep
MMILFGDQGSGQWSDDLFLLTYIANHGERAWHVWANGRVRYRAVERXPAAGLFYLGPDGRXGNNTPDEQVLFIGLHAWW

SEQ ID NO: 235291 - protein, 54 aa, Glycine max
  Clone ID: PAT_MRT3847_54496C.1.pep
APHSRKAHPWRGHFYPPHRAIGAAGENTKAKLIPPSIELGRLSYASYPFTSAAR

SEQ ID NO: 235292 - protein, 76 aa, Glycine max
  Clone ID: PAT_MRT3847_54497C.1.pep
EAPPGGVLLKIPGQNVPECLGGSRPVPFDDLSPRFPPPCGPRVNASQFFELAFILPERFKKSRVRFQPPLAPLGVL

SEQ ID NO: 235293 - protein, 45 aa, Glycine max
  unsure (1)..(45): unsure at all Xaa locations
  Clone ID: PAT_MRT3847_54498C.1.pep
PGXEQARRPPPPTLSKRLYKAYKETSLSSFFEHIYSTFYTTNHSF

SEQ ID NO: 235294 - protein, 107 aa, Glycine max
  unsure (1)..(107): unsure at all Xaa locations
  Clone ID: PAT_MRT3847_54499C.1.pep
DFSCTSSYFLWEMVFGMHDTNPIIXRALELIPLAIPIWFLALISLFFPPITSAVLSLLDSYTVYIIPSLAHMLTYITVSDRLNAAEKRMLFIPHWTALYALNASLAV

SEQ ID NO: 235295 - protein, 167 aa, Glycine max
  unsure (1)..(167): unsure at all Xaa locations
  Clone ID: PAT_MRT3847_5449C.1.pep
SHTSPPHKEERNVXWVFLGCPSIRKSTYTXHLYNLLSIPHITTSNLIHHKLTSNSPLSSQLSEIINQRKLISDKIIISLLSKKLTNKKTKRKSGFILNNFPRTIKATKILERITYINLVVNLKLQEEALLTKYLNRRMCNQYKENFNITSISVKNKNKRSRIIIAPL

SEQ ID NO: 235296 - protein, 92 aa, Glycine max
  unsure (1)..(92): unsure at all Xaa locations
  Clone ID: PAT_MRT3847_544C.1.pep
NFQXARXYSTRGSXLIPFMDLINRPTEETPIXXSXRXICLFXKXXAITRXTRKSLPXELLPAIXKSWRDPKRISXTVDCLGLSIRKLKXHXI

SEQ ID NO: 235297 - protein, 127 aa, Glycine max
  unsure (1)..(127): unsure at all Xaa locations
  Clone ID: PAT_MRT3847_54500C.1.pep
KQKHDVDYHCYITSSTDDKSKGWIRITRDSNYRDTHHIYVPHIQRPLSRKNVAGLATTVHKTSFDDSQLSLGEKSNYVYGPTCLHQALSEXLISRSHWPTHGAAFNYPHSLLQQGQNAIPEVVQNFE

SEQ ID NO: 235298 - protein, 148 aa, Glycine max
  Clone ID: PAT_MRT3847_54501C.1.pep
PPDGGRRRAPPAPAAPPSSRRFRTKFSQEQKEKMHKFAEKVGWKIQKRDEDLIHEICNEVGVDRSVLKVWMHNNKNTFAKKDNNNIVTSNDINITTKNNISTDNDANGSDVKVFENPNNDGGEDRAEDPSSNHYDGVNVVGANGSSSS

SEQ ID NO: 235299 - protein, 116 aa, Glycine max
  Clone ID: PAT_MRT3847_54502C.1.pep
YCFFLGVGATPKLVLQLMNIKSLSIAHVKSHLQMFRSKKVDDRNQVFADHNSLVETGDKNIYNLSQLSMLQGYNPSQSSSFSYTNNYPSYGFGDASFGVYEKLLQRPFDWSNAISS

SEQ ID NO: 235300 - protein, 69 aa, Glycine max
  Clone ID: PAT_MRT3847_54503C.1.pep
GCPLPCTGGCTSKCVKRMMPKSARLKQLLFFFFMGLSWIPNYDLRQQLLYTPLRSPPMCPCGFRNQNFI

SEQ ID NO: 235301 - protein, 69 aa, Glycine max
  Clone ID: PAT_MRT3847_54504C.1.pep
PSCRKQGYILGNIWQVFSFYLAILLFIAKRDKYNNAKECALGVDCKLRLQHILFRCVMRFEDYGLHHNQ

SEQ ID NO: 235302 - protein, 48 aa, Glycine max
  Clone ID: PAT_MRT3847_54505C.1.pep
GGKLDFRYQFRREKSYIFFILLGSFDIILRLFLFEPRCVILYCFRYLI

SEQ ID NO: 235303 - protein, 74 aa, Glycine max
  Clone ID: PAT_MRT3847_54506C.1.pep
PSCRKQGYILGNIWQVFSFYLAILLFIAKRDKYNNAEECALGVDCKLRLQHILFRCVMRYEDYGSHHNQCTITC

SEQ ID NO: 235304 - protein, 389 aa, Glycine max
  unsure (1)..(389): unsure at all Xaa locations
  Clone ID: PAT_MRT3847_54507C.1.pep
MDQNPSPGRHSDGSVNIGLEKKAVVTDDDLHTAVEPIIEYRGSGAHETNLASSSKNPLEKLEYSAENDLQTFNCEAACAGTSRVNVSDTEMMLPCDKILPVLHSPCHSRIHMAINKGKEKSLSDGDANVILSREENDSHSSVESCNSTGFFSTGKKRRNFQQQLIIGSKRVKKQIEESSGFKSYVKQDSSFMNWISNMVKGRAQSWESVSNTLALTLTNPDHHNLLPDEKLFTCNMNQDPEPKNTGFKSXFFQSIYCPSLKNGGTRMSHQEGKSSDDLEPGNMEHGIDATPITYCAENNSLSKLRLQSNKFEVSIGGNDAGPSSQPKVKPLNFFNCQESSKNNPVEPFTDMMVALKKKKLPGAALAARASLLWAQNFVDKDWEVWNSKI

SEQ ID NO: 235305 - protein, 115 aa, Glycine max
  Clone ID: PAT_MRT3847_54508C.1.pep
MAEVPAPEAQLNGGAPTTAANSSDPIGSKRQRRPSVRLGDIGDQPYDSHPRRAAAKTWRLAFDHPRNSDAVKPYKTRPLTNLTPAAAEFGETLESDGNVDSVVIGSWKVKDSKKR

SEQ ID NO: 235306 - protein, 132 aa, Glycine max
  Clone ID: PAT_MRT3847_54509C.1.pep
TSFWFHAVETNSTTADTHTFFFTIKVKAIVKVKVTVGGFFSSLRLDRGIDDITDLLGKSLLLELVSSELDPVTGLEKETLKAYAHKAGNGEESVKYEAKFEVPNDFGEIGAVLVGNEPHKEMFLGTIHLDGF

SEQ ID NO: 235307 - protein, 137 aa, Glycine max
  unsure (1)..(137): unsure at all Xaa locations
  Clone ID: PAT_MRT3847_5450C.1.pep
PPXXAHSNXPXPPXXXAPPATXSXKXXXKXXPPXXXXXXXXPPPPXXXXPHLPXPTXPSPXQXPHXXTPPPPPLPSTHNPPPPPXPPPPXPHXXXPPPSPHPXPXPPPPPPTPXXPPPPPPPPPPPPPPPPPPPPPP

SEQ ID NO: 235308 - protein, 48 aa, Glycine max
  Clone ID: PAT_MRT3847_54510C.1.pep
ILDQHLGAAFMKLNGWELYGNGNKNWRWQLILNYMSREGLWLKRDNTQ

SEQ ID NO: 235309 - protein, 84 aa, Glycine max
  Clone ID: PAT_MRT3847_54511C.1.pep
FTKLLLKMTFSDQKSVPEEIIKRAAAVLDAISNNNHVERLCNENVSAQDRQYKDAMEKLLEFDIDKGDLKLFFEDVFSLVLNAS

SEQ ID NO: 235310 - protein, 54 aa, Glycine max
  Clone ID: PAT_MRT3847_54512C.1.pep
KMPIILKSLKADQRGKDSVLYGNSYTFANQFNTKACLSLERILKIVPVGGVPDF

SEQ ID NO: 235311 - protein, 86 aa, Glycine max
  unsure (1)..(86): unsure at all Xaa locations
  Clone ID: PAT_MRT3847_54513C.1.pep
TGHDICKXTLXTWXVSCAHTSLLSILEMXSLXVXLGGTNVXFHLKXXFXPXQQCISXCNSPXPSXYCLXYPAITXHXAXRPSVQLX

SEQ ID NO: 235312 - protein, 31 aa, Glycine max
  Clone ID: PAT_MRT3847_54514C.1.pep
GGCMKLIRRTKEEALENKWSLNYKLLSLSLI

SEQ ID NO: 235313 - protein, 76 aa, Glycine max
  Clone ID: PAT_MRT3847_54515C.1.pep
LFKETKGFFLSLGRGFLGGFGFFSPGFPGGQVQFSNPGPGSQVFYNSERKKNFVRGTHPPLDEEKVIKSVGIENKK

SEQ ID NO: 235314 - protein, 122 aa, Glycine max
  Clone ID: PAT_MRT3847_54516C.1.pep
CIIFVTSKYKMGKMFANQLMECANDESSFRFVIRDLTTKSPVLQIILLNPDTWSCSGNCSSLEDKDPIAKLKLQPIIKVLFSDCHNATESQSRLIEEWATKNSAEDIFMLTRQTQELVGFFI

SEQ ID NO: 235315 - protein, 81 aa, Glycine max
  Clone ID: PAT_MRT3847_54517C.1.pep
ILDVQLASETLHSCPLLCWGLARGWNLELYCSTNLLIIIRAIHYIFCLFLPKYHKNGGILLFTHKKLVYFVFNFIKYFSLF

SEQ ID NO: 235316 - protein, 177 aa, Glycine max
  Clone ID: PAT_MRT3847_54518C.1.pep
MKRSGRWQRTLILALLFLSLVAPLVYVSHLLNTLTSDGRRDFLDDLSSFTHRSDPLNAIEQEGAEELEEPKEIVYKEEDFDSTNSYILQKTNDTAASKSEGYRNNTLERNVSEFDQDKKQGQEAQQKGLFSMDGDVNVFNTTVTLKQNMHTQSQRMTDVNVEVIDKKSSPKAIQHRQ

SEQ ID NO: 235317 - protein, 144 aa, Glycine max
  Clone ID: PAT_MRT3847_54519C.1.pep
MENLSPLIYKNPIRRTSRRSTMYLGVRKRPWGRYAAEIRNPYTKERHWLGTSDTAEEAAIAYDLSSIKICGINARTNFHYPFVSLPPLPMSSLPPPPPPPTPELDPSVEVCLEMMNAASYDGDDESLVIASILQSFSNSGNCSF

SEQ ID NO: 235318 - protein, 346 aa, Glycine max
  Clone ID: PAT_MRT3847_5451C.1.pep
MAAATTAIQRFPQHRYVDAVRWLPLQSAFDRFAVLALFDFDSDASSIEIHSLNQNPFSLEPHSSWSSPSRVSSLKPSHFLQKPLIVASTSSVSLHFLFFDSSGATLLPEVSLSEGALHSLPASCVDRLRRGVECVSVGEDGKVNLVGIGDSNLNYRRLFDSAGLVSYTAVRWASPMEFATGGFGFGLQWWDQRKPGGPVSQFKGNWDKKLTSGIVHSIDIHPSRKHTCLAGGSLGTVFAWDLRWQQQPIILSGAGAANTAVQSISESEVWEVQYDRCIKSNTSSTRILPSMICSEDGILGVIEQGEEPIELLAEPCAINSFDIDRHNPSDVICSLEWEAVAILTRQ

SEQ ID NO: 235319 - protein, 47 aa, Glycine max
  Clone ID: PAT_MRT3847_54520C.1.pep
PGNTEIGSGRNFSNSNPRWMIDVQSTTDECAISSRPLAHSRILYESS

SEQ ID NO: 235320 - protein, 60 aa, Glycine max
  Clone ID: PAT_MRT3847_54521C.1.pep
ITRAKTQALTTFTTYSWKYDCTVLHNILMLKFKKMRTLFERFVHGQNAHPLYNCAANMDL

SEQ ID NO: 235321 - protein, 75 aa, Glycine max
  Clone ID: PAT_MRT3847_54522C.1.pep
SLLGLFNFTLVSNFEIHDLLWSFSTAFSTNVKIRTNMKDVLVPDFKKASFTVIIFHEESLLHGNYFDLMTYKSDL

SEQ ID NO: 235322 - protein, 74 aa, Glycine max
  Clone ID: PAT_MRT3847_54523C.1.pep
HEVLYQIGECSANQLRVAKKMIHEVCAQHKQSFSFPHPLEHKAVSKHCGKRPGEKSVFPSPDLTHEDFVYLNGR

SEQ ID NO: 235323 - protein, 64 aa, Glycine max
  Clone ID: PAT_MRT3847_54524C.1.pep
SRFGVRFSSRNEDPLLKGRVKHARLLVEWRGSRKGFPIPGCQYIRRPRCSFREGNYRFSNHRQS

SEQ ID NO: 235324 - protein, 92 aa, Glycine max
  Clone ID: PAT_MRT3847_54525C.1.pep
RELGPPKNPPCLNPSQTPRGAGSFQRVSHTRVFQEKRAPLNTLGIHPLMFRPNFLLMMENIFFWLTPNRPSLFQNFVTPFGFLNEKPPEWFS

SEQ ID NO: 235325 - protein, 75 aa, Glycine max
  Clone ID: PAT_MRT3847_54526C.1.pep
SFSIELISNAGLRVLNQHMNLWCASNPCSYQRASGCLSIPSDNSLNETDSDISYMKYAIHCDCEQANSDHARPVV

SEQ ID NO: 235326 - protein, 51 aa, Glycine max
  Clone ID: PAT_MRT3847_54527C.1.pep
QRRQKLVNRLTSEPNHASSNKMVRSSVVSIETSFVLNSLCKLSSKQWNKMS

SEQ ID NO: 235327 - protein, 110 aa, Glycine max
  Clone ID: PAT_MRT3847_54528C.1.pep
RYHVSQNALFLTFFSKLFKPFQFLSFSLRIHALIICLSQVPRPKKHYHTQASFRFDSVAVVANFKFFLPLQKVIRYENGHRSVLEHGLGLIMKVMFTCSLHVCVKCGFQC

SEQ ID NO: 235328 - protein, 37 aa, Glycine max
  Clone ID: PAT_MRT3847_54529C.1.pep
LQLRERGLHHIVVYMIRRTNSHNSAYFHLLPISFNLT

SEQ ID NO: 235329 - protein, 169 aa, Glycine max
  Clone ID: PAT_MRT3847_5452C.1.pep
REREKKKMNQCGYQQKNALTSCEEMRMESVVCPKPRRLGLLNHSTFDDHIRPLRPPFINYQSEIEDSGVGAELLDIILPKRSGGQVASSPPFFCGSPPSRASNPVIQDEQFGSNGNENFGAFSLAPPSPSSSARGCVRMKFGHTPAAVRIEGFNCLSRDRRNCSISAVA

SEQ ID NO: 235330 - protein, 101 aa, Glycine max
  Clone ID: PAT_MRT3847_54530C.1.pep
PSKRQKTTFFFFREHVTSFGPPERGNPKRAKNGIPKKGNFFFLQQRGILKKIPPPRVVLGPFQKKQLGKKAKLFFVWGKKPRKGAITWGAPPRFIVRGYWQ

SEQ ID NO: 235331 - protein, 87 aa, Glycine max
  Clone ID: PAT_MRT3847_54531C.1.pep
LLILAVFSSGGVCLPTLYWLIKNSISLLTINNKLSCPSCLCYCPTPLSLFQLSSLLSNLSLSHCSINDLYLNDDIYNHFVDLLYYDF

SEQ ID NO: 235332 - protein, 99 aa, Glycine max
  unsure (1)..(99): unsure at all Xaa locations
  Clone ID: PAT_MRT3847_54532C.1.pep
MGTREEYEEKLKTGNLQHDPTINRGLRTARGPRCLYILNPNVKRGEWPITPAQHDYCARATPGKGGLLXSVHGCNTGLPLTQNGRIGPQRQAIAVRIPS

SEQ ID NO: 235333 - protein, 62 aa, Glycine max
  Clone ID: PAT_MRT3847_54533C.1.pep
RNLISNPTKMTGPSAQPYIHTRGPSICRTCHHRARPERYHGYHHHHDHRFLHPHRKRHRQQD

SEQ ID NO: 235334 - protein, 77 aa, Glycine max
  Clone ID: PAT_MRT3847_54534C.1.pep
MDGAIQSWGPIRSLCLASFACILDQLNSSQAIGSGMYAFFLSVIAMSSKSFHPWFDYLGQDGQRHKLSRDYNCMDPS

SEQ ID NO: 235335 - protein, 85 aa, Glycine max
  Clone ID: PAT_MRT3847_54535C.1.pep
TKFTSGRNNIKKPELNPIKPKELLKKMFRTTTSHKPKRKKDCNFPKDIGETKHTTNPRSKGTQNTIQQKERKKERNMNETNLRSQ

SEQ ID NO: 235336 - protein, 72 aa, Glycine max
  Clone ID: PAT_MRT3847_54536C.1.pep
NKNLILRGSERTIDHHGGFSFAIFFIRGIAKGAVIFCTQPIPMQGMHLQATGCPLLPNNSHIPILGNYGTCQ

SEQ ID NO: 235337 - protein, 383 aa, Glycine max
  Clone ID: PAT_MRT3847_54537C.1.pep
MDSNSRYQVQQQHQHNSGLPRFRSAPPANLKQQGEAANNNGSAWEGSEPLLRFLNSGDTHDTTSSPTLREFVDNKVSNNSKPAKESSSPLSRMNSQHSYSTSMLPSRSTVASAMMMFSSGKNQSAASFDASLLRQSSFPAGHFSNNISFQNGYDTMKGVGNYSGVNGNDGELSLSMNRMKNQISFSSISPSSSLGVLSPTSKIGTEGIRVTSTEDGRQGGSNGDARYFGPGFSYASWNEPSHHKRQRSSNDELLSDSQDGELGNQVQTLSHHLSLPRTSSDMFAMDSLLQFSDSVPCKIRAKRGFATHPRSIAERVRRSRISERIRKLQELVPNMDKQTSTAEMLDLAVDYIKDLQKEFKTLNDKRAKCKCINMQKSEADQVA

SEQ ID NO: 235338 - protein, 47 aa, Glycine max
  Clone ID: PAT_MRT3847_54538C.1.pep
KQTSTAEMLDLALDYIKDLQKQFKTLSDKRAKCKCINMQKSEADRVA

SEQ ID NO: 235339 - protein, 428 aa, Glycine max
  Clone ID: PAT_MRT3847_54539C.1.pep
MDGSASKPGHTTRGVGLVKASVNLYGNRIEDVNSPLLKKYFSTKQSSKAKELHRASKDMVRYKETKRVAESAKAQAEAKLSNAKQTVKDLFSMIGESSYKAKARMRDVAPLKEYGKPSKNDDDNEYSQVMRELEHAKREFFQLKLDVASVLEEKQRAEKEIEASRSSMLSFSRVAQKLRKEIEEASEEQVVVELARMDALNEMRDIEALENTRNRLKEAIEEINESKELEMKLATTLSDIDMLKNELNFVKKRVERGESMEHVEGESRDVGVLETATEEIEAAKKDLASIREQGFKFMASMDVTRNELKHVNTATVHLKNTESKMGAKVRNLSYKLLRAKSKLEAVSAAEEKAKSIVSNLSQTLDKLKSETEAAKKEKEIINGEVAATKEDIKKALLEIKVSEEGFEGARQELEAVKSSEAIALEKLK

SEQ ID NO: 235340 - protein, 74 aa, Glycine max
  unsure (1)..(74): unsure at all Xaa locations
  Clone ID: PAT_MRT3847_5453C.1.pep
GILHPPPLGIRCRPTARKKRGGVGSLILFCFLLRPRARWVXRASPERINFCQNTTKKKECDVIYVNFFSLISKT

SEQ ID NO: 235341 - protein, 52 aa, Glycine max
  Clone ID: PAT_MRT3847_54540C.1.pep
KVGNVLHPNINSLNLRFIDLMFSLPLFAHIYFSTLRFIGKTFEGVIFLDVNC

SEQ ID NO: 235342 - protein, 50 aa, Glycine max
  unsure (1)..(50): unsure at all Xaa locations
  Clone ID: PAT_MRT3847_54541C.1.pep
IFKLTKGVKGXAQNWLKITRERGENAFQYSYRDRRNQKRDMPSLWIQRIH

SEQ ID NO: 235343 - protein, 181 aa, Glycine max
  unsure (1)..(181): unsure at all Xaa locations
  Clone ID: PAT_MRT3847_54542C.1.pep
AVDPKTNLHFRRARVFAVVIKDLLSKGIKNAQNAIISRYSAKKLTSILNYDQFKSLLPTTTKVKYLTDTNFFINSKNISKAQHIKEFYSQVIQTHNSAKNLPTSYTSKLRPGLYFFPQNIISQISTPIFFINTAYNSXQIKNILTPNTTNPHNQXREYELDIKNYSPNQLSIXQIFITDFL

SEQ ID NO: 235344 - protein, 71 aa, Glycine max
  Clone ID: PAT_MRT3847_54543C.1.pep
KKIQHSVATYPLTGARKGLNNGPKRLSPREKTSGVATNVYLRKMLEKPKKRRWSMDFENEGSGVVYAWGRY

SEQ ID NO: 235345 - protein, 45 aa, Glycine max
  Clone ID: PAT_MRT3847_54544C.1.pep
LYVDVPSFSFSRLFYNKGVEESILPIRWVRAYQKVASTIDSEFFN

SEQ ID NO: 235346 - protein, 64 aa, Glycine max
  Clone ID: PAT_MRT3847_54545C.1.pep
DPQPKKSRWRLLCMAHILWVGQMLEHSVKATYCWVMKHVGGAGKARSTLNIIYRDVTLLFMNKI

SEQ ID NO: 235347 - protein, 918 aa, Glycine max
  unsure (1)..(918): unsure at all Xaa locations
  Clone ID: PAT_MRT3847_54546C.1.pep
MASFSAAVAQFSRVSPSHTSLHSHSHGTLFQSQCRPFFLSRTSHSLRKGLTLPRGREAPSTSVRASFTDVSPNVSLEEKQLPKGETWSVHKFGGTCVGTSQRIKNVADIILKDDSERKLVVVSAMSKVTDMMYDLIHKAQSRDESYTAALNAVLEKHSATAHDILDGDNLATFLSKLHHDISNLKAMLRAIYIAGHATESFTDFVVGHGELWSAQMLSLVIRKNGTDCKWMDTRDVLIVNPTGSNQVDPDYLESEQRLEKWYSLNPCKVIIATGFIASTPQNIPTTLKRDGSDFSAAIMGALFKARQVTIWTDVDGVYSADPRKVSEAVILKTLSYQEAWEMSYFGANVLHPRTIIPVMRYGIPIMIRNIFNLSAPGTKICHPSVNDHEDSQNLQNFVKGFATIDNLALVNVEGTGMAGVPGTASAIFGAVKDVGANVIMISQASSEHSVCFAVPEKEVKAVAEALQSRFRQALDNGRLSQVAVIPNCSILAAVGQKMASTPGVSASLFNALAKANINVRAIAQGCSEYNITVVVKREDCIKALRAVHSRFYLSRTTIAMGIIGPGLIGSTLLDQLRDQASTLKEEFNIDLRVMGILGSKSMLLSDVGIDLARWRELREERGEVANMEKFVQHVHGNHFIPNTALVDCTADSVIAGYYYDWLRKGIHVVTPNKKANSGPLDQYLKLRALQRQSYTHYFYEATVGAGLPIVSTLRGLLETGDKILQIEGIFSGTLSYIFNNFKDGRAFSEVVSEAKEAGYTEPDPRDDLSGTDVARKVIILARESGLKLELSNIPDESPVPEPLRACASAHGLMQEPPEFDQESTMKKENTESAGEGLSLEGGVDVTHNKGEVKLRTDKMDQAFSQFSVAGIXKHIPLEGIRYKHWPLIVRELVLKSPVVEYGIISYILRLASELDPPS

SEQ ID NO: 235348 - protein, 920 aa, Glycine max
  unsure (1)..(920): unsure at all Xaa locations
  Clone ID: PAT_MRT3847_54547C.1.pep
EQINKICKHRLFSTYLPNKLSSDWLFHTQKGLTLPPSTTVRASLTDVKPGVSLEEKKLXPKGETWSVHKFGGTCVGTSQRIKNVADIILKDDSGRKLVVVSAMSKVTDMMYDLIHKAQSRDESYIAALDAVSEKHSATAHDILDGDNLASFLSKLHHDISNLKAMLRAIYIAGHATESFTDFVVGHGELWSAQMLSLVITKNGADCKWMDTRDVLIVNPTGSNQVDPDYLESEQRLEKWYSLNPCKVIIATGFIASTPQNIPTTLKRDGSDFSAAIMGALFKARQVTIWTDVDGVYSADPRKVSEAVILKTLSYQEAWEMSYFGANVLHPRTIIPVMRYGIPIMIRNIFNLSAPGTKICHPSVNDHEDRQNLQNFVKGFATIDNLALVNVEGTGMAGVPGTASAIFGAVKDVGANVIMISQASSEHSVCFAVPEKEVKAVAEALQSRFRQALDNGRLSQVAVIPNCSILAAVGQKMASTPGVSASLFNALAKANINVRAIAQGCSEYNITVVVKREDCIKALRAVHSRFYLSRTTIAMGIIGPGLIGSTLLDQLRDQASTLKEEFNIDLRVMGILGSKSMLLSDVGIDLARWRELREERGEVANVEKFVQHVHGNHFIPNTALVDCTADSAIAGYYYDWLRKGIHVVTPNKKANSGPLDQLQQLLLPSTHATYFEELFHIYALFIQYLKLRALQRQSYTHYFYEATVGAGLPIVSTLRGLLETGDKILQIEGIFSGTLSYIFNNFKDGRAFSEVVSEAKEAGYTEPDPRDDLSGTDVARKVIILARESGLKLELSNIPVESLVPEPLRACASAQEFMQELPKFDQEFTKKQEDAENAGEVLRYVGVVDVTNKKGVVELRRYKKDHPFAQLSGSDNIIAFTTRRYKDQPLIVRGPGAGAQVTAGGIFSDILRLASYLGAPS

SEQ ID NO: 235349 - protein, 70 aa, Glycine max
  Clone ID: PAT_MRT3847_54548C.1.pep
ESVFFCVKPRPLVNKSNFSMSSICPLIVFIFLKPLLYLFMVLDDPPQFVCYPPIVYFPYFKTLVLCSSVS

SEQ ID NO: 235350 - protein, 938 aa, Glycine max
  Clone ID: PAT_MRT3847_54549C.1.pep
MASFSAAVAQFSRVSPSHTSLHSHSHGTLFQSQCRPFFLSRTSHSLRKGLTLPRGREAPSTSVRASFTDVSPNVSLEEKQLPKGETWSVHKFGGTCVGTSQRIKNVADIILKDDSERKLVVVSAMSKVTDMMYDLIHKAQSRDESYTAALNAVLEKHSATAHDILDGDNLATFLSKLHHDISNLKAMLRAIYIAGHATESFTDFVVGHGELWSAQMLSLVIRKNGTDCKWMDTRDVLIVNPTGSNQVDPDYLESEQRLEKWYSLNPCKVIIATGFIASTPQNIPTTLKRDGSDFSAAIMGALFKARQVTIWTDVDGVYSADPRKVSEAVILKTLSYQEAWEMSYFGANVLHPRTIIPVMRYGIPIMIRNIFNLSAPGTKICHPSVNDHEDSQNLQNFVKGFATIDNLALVNVEGTGMAGVPGTASAIFGAVKDVGANVIMISQASSEHSVCFAVPEKEVKAVAEALQSRFRQALDNGRLSQVAVIPNCSILAAVGQKMASTPGVSASLFNALAKANINVRAIAQGCSEYNITVVVKREDCIKALRAVHSRFYLSRTTIAMGIIGPGLIGSTLLEQLRDQAAEVSIVSLQDKASTLKEEFNIDLRVMGILGSKSMLLSDVGIDLARWRELREERGEVANMEKFVQHVHGNHFIPNTALVDCTADSVIAGYYYDWLRKGIHVVTPNKKANSGPLDQLFPIYALYIQYLKLRALQRQSYTHYFYEATVGAGLPIVSTLRGLLETGDKILQIEGIFSGTLSYIFNNFKDGRAFSEVVSEAKEAGYTEPDPRDDLSGTDVARKVIILARESGLKLELSNIPVESLVPEPLRACASAQEFMQELPKFDQEFTKKQEDAENAGEVLRYVGVVDVTNKKGVVELRRYKKDHPFAQLSGSDNIIAFTTRRYKDQPLIVRGPGAGAQVTAGGIFSDILRLASYLGAPS

SEQ ID NO: 235351 - protein, 101 aa, Glycine max
  Clone ID: PAT_MRT3847_5454C.1.pep
KPGVNHPPRNHFLKTPPQPGGRFFQRGKPKKSPPFNPWAFQFPPKRGLRGGPPDQGQGGLSFWTPPFFPLIGGPFFRKNPLAKTLGGPLFFFFRPPGRTLG

SEQ ID NO: 235352 - protein, 47 aa, Glycine max
  Clone ID: PAT_MRT3847_54550C.1.pep
AYCTHIYALCSKLICRITDTCIAKSITCHQCTYQTFHTYIHKLTPSK

SEQ ID NO: 235353 - protein, 64 aa, Glycine max
  Clone ID: PAT_MRT3847_54551C.1.pep
KGGIIFNRALLVSFSQNMILIISNQCEILPFTQSLIDVDPCSLSHSRITICCISFTIIMAISNN

SEQ ID NO: 235354 - protein, 89 aa, Glycine max
  unsure (1)..(89): unsure at all Xaa locations
  Clone ID: PAT_MRT3847_54552C.1.pep
IGILKKGLFKGQWLTLALMHGFAQLNXNKNPVLVNHPKKGIAIDPXNPEPPLEIPEAXFYQPGAKSHPVEANFAFCRARPQVKPINVFS

SEQ ID NO: 235355 - protein, 306 aa, Glycine max
  Clone ID: PAT_MRT3847_54553C.1.pep
MASLSHLNKLLCMPPLNSSPSISPPRSSVGIWTKPVGRPRLLVRVRAVTSDDEWGPEKEEAYGGGVAVEEKPTKSETETEKLKKALVDSFYGTDRGLKATSETRAEIVELITQLEAKNPNPVPTDALTLLNGKWILAYTSFAGLFPLLSSGTLPLVKVEEISQIIDSLNFTVQNSVQFAGPLATTSISTNAKFDVRSPKRVQIKFEEGIIGTPQLTDSLEIPENVEFLGQKIDLTLFKGILTSVQDTATSVVKTISSRPPLKIPISNSNAQSWLLTTYLDEELRISRGDGGSVFVLIKEGSSLLTR

SEQ ID NO: 235356 - protein, 63 aa, Glycine max
  unsure (1)..(63): unsure at all Xaa locations
  Clone ID: PAT_MRT3847_54554C.1.pep
SLDQIVVIETNCELSYXEPFCDVLTSXAEYLRPWSVLHREAGLLLGSGVTSEFNIIHNVDLVC

SEQ ID NO: 235357 - protein, 236 aa, Glycine max
  Clone ID: PAT_MRT3847_54555C.1.pep
MASLSHLNKLLCMPPLNSSPSTSPPRSSVGVSTKSVGRPRMVADFARPVGRVRAVTSDDEWGPEKEEEAYGGGVAVEEKPTETETEKLKKALVDSFYGTDLGLKATSETRAEIVELITQLEAKNPNPAPTDALTLLNGKWILAYTSFAGLFPLLSSGTLPLVKVEEISQTIDTLNFTVQNSVQFAGPLATTSISTNAKFDVRSPKRVQIKFEEGIIGTPQLTDSLEIPENVELLGQ

SEQ ID NO: 235358 - protein, 50 aa, Glycine max
  Clone ID: PAT_MRT3847_54556C.1.pep
FLSRVKGSGGGPGVIFISQRSKIPHSVSLPLWPGGSVPTAIQQLQGTLKQ

SEQ ID NO: 235359 - protein, 60 aa, Glycine max
  Clone ID: PAT_MRT3847_54557C.1.pep
SSLTKRKFGPLQSILNPQMLCQNQILRLAPQNATPPKFHIVNVRLHLSLHYLVLLLHRNL

SEQ ID NO: 235360 - protein, 87 aa, Glycine max
  unsure (1)..(87): unsure at all Xaa locations
  Clone ID: PAT_MRT3847_54558C.1.pep
RSPGFFHGRFWALWELPMFGCPDAFPGLKGLPKGXVGFPPGFFRFFGFGHVSPGPGLRFFAFQPPGFLVLKIFQAFVAPPPPCLFGL

SEQ ID NO: 235361 - protein, 73 aa, Glycine max
  Clone ID: PAT_MRT3847_54559C.1.pep
MEEATCSFRDENLLGKGGFGKVYRGTLRSGEGVAIKKMELPAIKAAEGEREFRVEVDILSRLDHPNLGFLIGY

SEQ ID NO: 235362 - protein, 84 aa, Glycine max
  Clone ID: PAT_MRT3847_5455C.1.pep
IAIMLGRLGPDLQTCKDVYARMTKRVFETGETIAGIAYPSNLFIGLELGGALRECVREHTLNEAEGNGDTSGFDLDLNSALSPK

SEQ ID NO: 235363 - protein, 107 aa, Glycine max
  Clone ID: PAT_MRT3847_54560C.1.pep
NVNAAFKKAAEGPLKGVLDGGDVPLGFIDFRGFEVSFTNGSPLTMVMGDKMVKGVAWYDKKRGYSQKGGDLGHLVASKWPGGLKRGGGDPLGDFWETNPFYEECKVF

SEQ ID NO: 235364 - protein, 107 aa, Glycine max
  unsure (1)..(107): unsure at all Xaa locations
  Clone ID: PAT_MRT3847_54561C.1.pep
FLYYTHTFSLMEFPSPNGLTRRTLGSTKPPKKFLKSIQYITLQLFFISKPNKLTIXTDDNNSPYYKQSITIHAAKTKAYIQNXIKNFXSVMHLSLNEQTLHKPCESY

SEQ ID NO: 235365 - protein, 61 aa, Glycine max
  Clone ID: PAT_MRT3847_54562C.1.pep
KLILSTWLVIPVITGAGHVCEHYVSPLFVNSQEVCMWYVLSQKASLGKTEAGFNSAHKCHR

SEQ ID NO: 235366 - protein, 69 aa, Glycine max
  Clone ID: PAT_MRT3847_54563C.1.pep
IIVSIRMRTHRETVRKKMLRSTTRAEQKHGCFITIRVNLPEESKTDDAMGTTAATTISGTLIDPRERTH

SEQ ID NO: 235367 - protein, 107 aa, Glycine max
  Clone ID: PAT_MRT3847_54564C.1.pep
PKKVCPENFFYGQFPNFPKYMASPQFFKAKLRFYSVPKQRPDPGPKKRLSLPQMMEFRSSLSGAKMQRFCSQIQKAFNFKKSFMSKLQKSPKLGRGPKFNFFHQRRW

SEQ ID NO: 235368 - protein, 74 aa, Glycine max
  Clone ID: PAT_MRT3847_54565C.1.pep
TPGPFQLGAKEIWCHTHGISTKEKQPVVEDVFCPQHPFESEYFKTRRAIVDDAPICRLLAAVLEPIRLELELNA

SEQ ID NO: 235369 - protein, 152 aa, Glycine max
  Clone ID: PAT_MRT3847_54566C.1.pep
LRSVQMKGMVLTPQAYNPVIQALCKRKRTKEAMRLFREMMEKGDPPDVITYKIVFRGLCNGGGPIQEAVDFTVEMLEKGILPEFPSFGFLAEGLCSLSMEDTLIQLINMVMEKGRFSQSETSIIRGFLKIQKFNDALANLGAILDRKKPRRF

SEQ ID NO: 235370 - protein, 212 aa, Glycine max
  unsure (1)..(212): unsure at all Xaa locations
  Clone ID: PAT_MRT3847_54567C.1.pep
MTQRKNRGKASCFPLLGFVLLCVLAPFFFFLSRRLYAAPDQDYISAVPSKQVRKWREWQALQDLKSLFSEEVLDVIVSSTNDLGPFSLDNFRKNLSASWRVGLGNSNAEHELNQQTTHVRQEKPEVKEGRSSDNPSQWTDSSAQQTRRHLIEKRREKRAAELVKKDNEVAVRVEXTAIERSKSAESAITPPKNTPPKRVENETKILPLGRPP

SEQ ID NO: 235371 - protein, 79 aa, Glycine max
  unsure (1)..(79): unsure at all Xaa locations
  Clone ID: PAT_MRT3847_54568C.1.pep
HIDLSFQRSXSMYQLTTXGFANANAQVIRRFKGLHIFFWLRSNTWRDQKYDLERKDGLWHIKFCANPKSHGFIIQKAHS

SEQ ID NO: 235372 - protein, 53 aa, Glycine max
  Clone ID: PAT_MRT3847_54569C.1.pep
SERAAATSFWIDQSIVSTKTPDVGFGMQIFHQCDSCAHEKFLDHLFSQPFSCF

SEQ ID NO: 235373 - protein, 66 aa, Glycine max
  Clone ID: PAT_MRT3847_5456C.1.pep
NHWIRWNNLKSADPLPSVKWSFAMHITNSIHYISSVSAIPHYHLLMQNVCMYIYRPYCTLCKDLSS

SEQ ID NO: 235374 - protein, 34 aa, Glycine max
  Clone ID: PAT_MRT3847_54570C.1.pep
FCSRTRSLKFNEEFSNFYTLCQCRKFYTQKSLLV

SEQ ID NO: 235375 - protein, 59 aa, Glycine max
  Clone ID: PAT_MRT3847_54571C.1.pep
GICFPSSNPEAKQETKESMFQDDLWGLETSSCESTADKPLKISCIEISSSPSTSWRWEN

SEQ ID NO: 235376 - protein, 43 aa, Glycine max
  Clone ID: PAT_MRT3847_54572C.1.pep
GHSMLKWLAFDNNASGLSMYSLNHRMVSYHLRPMGLTMLARVF

SEQ ID NO: 235377 - protein, 82 aa, Glycine max
  Clone ID: PAT_MRT3847_54573C.1.pep
HAPAPPVEAPTADYAVKSPSYPSGSVTTPTDKGPPPSQFPSCEATIFKHQPLSRYPLPQVPAVKPPTPTFSVVSLSPSFGPS

SEQ ID NO: 235378 - protein, 78 aa, Glycine max
  unsure (1)..(78): unsure at all Xaa locations
  Clone ID: PAT_MRT3847_54574C.1.pep
CHLFWLQTDAFFKTNXXDVYAVGDVATFPLKLYGELRRVEHVDHSRKSAEQAVKVSSLPKFVSSCTKYIFIIAPACPL

SEQ ID NO: 235379 - protein, 36 aa, Glycine max
  Clone ID: PAT_MRT3847_54575C.1.pep
LIALCSLLHNGISCTSLLYFYVMVLYQIPCYSESER

SEQ ID NO: 235380 - protein, 47 aa, Glycine max
  Clone ID: PAT_MRT3847_54576C.1.pep
ETRPHYWFLAFWVDHYWFIECLWSSFLLVLATSSFFYFIYLLFYYFF

SEQ ID NO: 235381 - protein, 449 aa, Glycine max
  Clone ID: PAT_MRT3847_54577C.1.pep
MVAPIAVSSPKSTLLQNPICFGDSSSSFVGGSLKGLCFNLKRRQQRRELTNLVVASSTSSVTNSNASGRFYFNITGFPFPLGPFLNRRTIRTEAVKDCIWLFEQEQALGFSSVSTNIRMTVIKLKSGGLWIHAPIAPTDECIQLIKELGAPVEYIVLPTFAYEHKVFVGPFSRKFPRAQVWVAPRQWSWPLNLPLEFFGIFRAKTLEDEDLSAPWAGEIEQKILSSPEVGIGPYVEVAFYHKPSKTLLVTDAVIFVPRQPPECISKESLLASAKNGLAVKLLSKGKEVPDEPVVDDKRNRQKGWERMVLQILFLGPSNLLEPNASFEQMSQKLIVSPIVKTLVFSKVPEKVREWVDSISRDWRFKRIIPAHFAAPISASRSDFRAAFAFLDEFLGESNAAWPSLSLLFSSIMGKAASYFPPDDMRTLSSLDQFLVSVGAVKKTVSGRKR

SEQ ID NO: 235382 - protein, 92 aa, Glycine max
  Clone ID: PAT_MRT3847_54578C.1.pep
MKKGHKGAISVFIGSVQKLMTAFDHARIPLPLTADTTIVFDTVSNGLDFYCNATLARFQALNVDVYTICIEPEKKWQELAQTAKQGWDDHVL

SEQ ID NO: 235383 - protein, 115 aa, Glycine max
  Clone ID: PAT_MRT3847_54579C.1.pep
NRKPKQPLFYKRRKRLENHPFLLPPVPPFHTHNTHSFFLFSFFYYSTYQETLIQIQFPSLFLKQSKVTTHTHCTGCADQRVLVHSIYLFSPISRNTLSNVSLFVPYPYLILQASP

SEQ ID NO: 235384 - protein, 86 aa, Glycine max
  unsure (1)..(86): unsure at all Xaa locations
  Clone ID: PAT_MRT3847_5457C.1.pep
IQENFANWQHDNENLKMQIAQMKXKHKTDIYTIKQYITDSKLPDSALQPLYTEEDSDVAHISSSSYTYDDHAWRADLDALYHEHDY

SEQ ID NO: 235385 - protein, 51 aa, Glycine max
  Clone ID: PAT_MRT3847_54580C.1.pep
HKVQGLFSGSHNPVRLVLTANWYDAYIRGSLIDKRIFAWDGLIAHGHMTFR

SEQ ID NO: 235386 - protein, 106 aa, Glycine max
  unsure (1)..(106): unsure at all Xaa locations
  Clone ID: PAT_MRT3847_54581C.1.pep
AWHGNYVPXKYXXCKXCPYNTGLFDHSDPSINTVLTAPTDKPGVALLDFVIFPPRWLVAEHTFLPPYYHRNCMSEFMGLIHGGYEVYHIKFCLLIAVCGKHEGFAS

SEQ ID NO: 235387 - protein, 69 aa, Glycine max
  unsure (1)..(69): unsure at all Xaa locations
  Clone ID: PAT_MRT3847_54582C.1.pep
NFIXXTIXXKDIKVSANIPIHLQEKKLLYACGHPFFFFCTVSKNSTTKPKKRKRNILIPKLKRPAETST

SEQ ID NO: 235388 - protein, 103 aa, Glycine max
  Clone ID: PAT_MRT3847_54583C.1.pep
NYLQRLGMAMSHEVVDDDELAPANTQEFFDGNFPEDSWIPIFENWLYAVRQLPLLAVILNDTCDWVTWWLPTHEIVYILTPLHSMLTRLLEDCHSLKYMVDEC

SEQ ID NO: 235389 - protein, 68 aa, Glycine max
  Clone ID: PAT_MRT3847_54584C.1.pep
VQKKNGILKVVPEIKTQKCLGTLSVAPKVFEISPSLYVVKLSKSCADASVYRQLCKKLSNDLGVHKKE

SEQ ID NO: 235390 - protein, 62 aa, Glycine max
  unsure (1)..(62): unsure at all Xaa locations
  Clone ID: PAT_MRT3847_54585C.1.pep
AFSHNFPHHGEIQEIVVLKFTHEEXFTTWSTQVRPATTLTADGCPYLFAMVHDMSESTIPGD

SEQ ID NO: 235391 - protein, 108 aa, Glycine max
  unsure (1)..(108): unsure at all Xaa locations
  Clone ID: PAT_MRT3847_54586C.1.pep
EGIGCTRDDKLTGDQIFDRPTTRWFSILPMECNLVDRQKVLTQERFIMKKRDRALLSSXMNPYSMEWTGSANRSLSKGNDILGCDYATPDGWITKQVMSKMAKMINSL

SEQ ID NO: 235392 - protein, 212 aa, Glycine max
  unsure (1)..(212): unsure at all Xaa locations
  Clone ID: PAT_MRT3847_54587C.1.pep
MKSFLLWRVAIVEKNRPYVAMLFIQFVYAGMALLSKAAISKGMSPYVFVVYRQAFASVALSPFAFFDSKQPAPLSCNLLCKLFLVSLVGLTASSNLYYVSINYTTATFAAAATNTVPAITFIMGFLIRMESISIKRVHGLAKILGSVLSLAGAITFALVKGPHLGFMKWYQENHNHTSHPLTIVHSKGDTIRGSLLMLXANTAWSLWVISIE

SEQ ID NO: 235393 - protein, 57 aa, Glycine max
  Clone ID: PAT_MRT3847_54588C.1.pep
RASCFIRGLPAILLIIVLKFRDKKLEILQPACPYIRQADNPVPSVVSSPSSVFSPED

SEQ ID NO: 235394 - protein, 122 aa, Glycine max
  Clone ID: PAT_MRT3847_54589C.1.pep
MEEEQRVAQVELAKQRCKCVIDAINSLPCSTNITVSCRRTLLKLARAELAFLSRRSSSSVPLRVVPDTPSERMMGLPSTRKLALKNKVVFGTGDHWHAPTLTANMAFVRACSQTGMSLLPSN

SEQ ID NO: 235395 - protein, 112 aa, Glycine max
  Clone ID: PAT_MRT3847_5458C.1.pep
SARVRKLGIRLEMDLNLDLDLDLGRESDLDPGSELGSEIQAKPELESELEIDVQTEPETEEESERERKSQPRTRTRAQSPWQSYLTAYRFGSTSSQSAGPPQTPQTRPAEKR

SEQ ID NO: 235396 - protein, 62 aa, Glycine max
  Clone ID: PAT_MRT3847_54590C.1.pep
KISFVAFQTQNTATLVYIWMSIYNNLRLLTLNLFSVMRSVLKLDNACLSPKYFNIFIAHSFI

SEQ ID NO: 235397 - protein, 136 aa, Glycine max
  Clone ID: PAT_MRT3847_54591C.1.pep
PTRPPTRPASVGNASRLVFDRSGEIYVETTGGTRNRILPQVDNTLDTEVNYYRATLDFSGVFTLYAHPRNTSGQPRWRIMNYVPDNICDAIFMIMVAVPVAIIVIAPWKMIGLLATALMAIHWLIQVMNLGDANPI

SEQ ID NO: 235398 - protein, 99 aa, Glycine max
  unsure (1)..(99): unsure at all Xaa locations
  Clone ID: PAT_MRT3847_54592C.1.pep
MFFTTRFVAMMFFLTVESNRGNGQLTACEVLLFHHEEMGIPCEXAEPRRRKGMGGTXHKIEPGLRAYQEARASGAALSHSDFMAQGNTKISPEYLPSIG

SEQ ID NO: 235399 - protein, 161 aa, Glycine max
  Clone ID: PAT_MRT3847_54593C.1.pep
LRLAVISACTNLSSLKHGCGLHGYIFKFGFCFSISVGNALINMYAKCGCLNGSRKMFLEMPNRDNVTWSSLISAYGLHGCGEQALQIFYEMNERGVKPDAITFLAVLSACNHAGLVAEGQRIFKQVRADCEIPLTIEHYACLVDLLGRSGKLEYALEIRRT

SEQ ID NO: 235400 - protein, 149 aa, Glycine max
  Clone ID: PAT_MRT3847_54594C.1.pep
ETHSKTSFRGRGGWAGNKPRGWLGLPVAATDNCADYSGAKNLYIISAKGIIGRLNRIHSACDSDMVIATINKVIPHLMKKVTAAVIVRQHKPWRRKDCVYMYFQYNAGVIVNPKGEKKGSAVTGPIEKECSDLRPQIACACNAMGRVGI

SEQ ID NO: 235401 - protein, 37 aa, Glycine max
  Clone ID: PAT_MRT3847_54595C.1.pep
HNGGRHVFESLKLIIFVMFDRRYNVRLVRYFSLNEIK

SEQ ID NO: 235402 - protein, 187 aa, Glycine max
  Clone ID: PAT_MRT3847_54596C.1.pep
ESVSPKTPLNLLPDSYWEEKWRVAHKAEELRQDSLEKQVPTREKGWTEKVKFSLRRAKSDPPLSRIQSGRHFRRSLLEDLRKALGSEEDAEKMQPDETLRQHDNPSEAVEVQQEDSGCSGDSNYLSDDRSPSGNSGSEEDLSIYSDPTSPPNEANDHEITSVKSSVASNSPLDECNETSGTSSSFPI

SEQ ID NO: 235403 - protein, 276 aa, Glycine max
  Clone ID: PAT_MRT3847_54597C.1.pep
IPYPLQWGFPIFHFRTCIIMTVVSLVASVDSVGTYHSASLQVNLRPPTPGVVSRGIALEGFCSILAGLWGSGTGSTTLTENVHTIDTTKVASRRVVELGAAFMILFAFMGKVGALIASIPQGLAASVLCFIWALIAALGLSNLQYGQCTSFRNMTIVGVSLFLGLSIPAYFQQYKPQTSLILPAYLVPYGAASSGPFHSGNKQLDFAINALMSLNMVITLLVAFILDNTVPGSKQERGVYIWSRAEDIATDPSLQSAYSLPKKIARCFRWAKCLGV

SEQ ID NO: 235404 - protein, 86 aa, Glycine max
  unsure (1)..(86): unsure at all Xaa locations
  Clone ID: PAT_MRT3847_54598C.1.pep
SNARGSLVPILAPLLFGFSVYWFTXATIPIHGTGISPASSVGVAIIFXRSLVWDDHWMLWVGPFIGVARPALCLQVVIRAIPFKSK

SEQ ID NO: 235405 - protein, 95 aa, Glycine max
  Clone ID: PAT_MRT3847_54599C.1.pep
KANKAMCGGRISFFPLGCNFDLNNQKKKTLQHVENKAIIKIYSLALMGLGEIISCHEKRSFIYVRTCTYFFLTQAMSTLLHRGNSFYVLFEPESD

SEQ ID NO: 235406 - protein, 118 aa, Glycine max
  unsure (1)..(118): unsure at all Xaa locations
  Clone ID: PAT_MRT3847_5459C.1.pep
VVVIYCAICFLYXRLNNHVPLPTRVKNKKANPNIGSMESLKLLESSKYIRNLATIEVVYRIMMNLGEVPCMSXLNAQFPSPNEHSCFMGDSHTASGIDTFTSDVDNQPRFYTDRCESC

SEQ ID NO: 235407 - protein, 40 aa, Glycine max
  Clone ID: PAT_MRT3847_545C.1.pep
YAGVNWRGIHTLRRLPSWHSHLRSTRPPLAATDLHPRASS

SEQ ID NO: 235408 - protein, 63 aa, Glycine max
  Clone ID: PAT_MRT3847_54600C.1.pep
SSHASGKNGKPGAPVVHAGALKQMLARLDCTDCSIAGSLFVDDTYKARTALSVLGTDFAPHIG

SEQ ID NO: 235409 - protein, 80 aa, Glycine max
  Clone ID: PAT_MRT3847_54601C.1.pep
VYFLFLEEGSKKKRSPLKKGFWFMKLYMVIRVEKFVACGILSPNWASFFGFIFKIYIYQRLFFFLIKVLVTSITILWCGV

SEQ ID NO: 235410 - protein, 245 aa, Glycine max
  Clone ID: PAT_MRT3847_54602C.1.pep
MAKEQQKHDPAAITNSFQNQNQTQELQGKGEVEKEEEAEAPLALSVTYKVLHMLGDITAGPASMFAQWLQLVRKRTSNCRTSGFPHRSSSMPSSPGESIEDTKNDQQTEISLWERLGKAEMLDIESSSFSWERLSSLHHTEHTSSNEHSEDEMNRVLEVTVNSGGVVFFAFFNGLGNDDASSKEAAAVIKISSSRMATQSERLGYEFAKWLGVQTPPARVIHNTSLEWTQIKEATEKARDAASST

SEQ ID NO: 235411 - protein, 154 aa, Glycine max
  Clone ID: PAT_MRT3847_54603C.1.pep
MGLSSLPAPSEGVLCVLLVNTVLSISIFKGIVRTILHIVGIHLPSSSTSPSSPDPSQAAPESFELHLSPSESYIEEFRSRTPTLRFDSVCCSKRLEHDCSVCLTQFEPESEINRLSCGHLFHKVCLEKWLDYWNITCPLCRTPLMPEDDTPCFQ

SEQ ID NO: 235412 - protein, 216 aa, Glycine max
  unsure (1)..(216): unsure at all Xaa locations
  Clone ID: PAT_MRT3847_54604C.1.pep
MQLQDGSAGKVINNLSQVLISSVAGMIMDKSRVVGDQSIVPRHKKDHFGRVVKLEKFSLYVGRQMGFLESEVPAELCRLADEYLIKPKECLESILEYLADQKDPTTLCQKFINEFDRCILSYFAFNWNQASYIISQVLSVESPPKIRLKKILLEATREQRFERVTKNLKVARVFSTLVEEMTAIXLDSQRTNDMVHNVHSERSPVLLVYGRGMGTG

SEQ ID NO: 235413 - protein, 246 aa, Glycine max
  Clone ID: PAT_MRT3847_54605C.1.pep
MHRKNPHYSLSPSCPSPPPSTPLSHIRFFASPLLCLSLPQPHSHPLLLQHLKKANRFRFLSMAAEPKESPSNNPGLHTTPDEATKGYIMQQTMFRIKDPKVSLDFYSRVLGMSLLKRLDFPEMKFSLYFMGYENTAEAPSNPIDKVVWTFSQKATIELTHNWGTESDPEFKGYHNGNSEPRGFGHIGVTVDDTYKACERFQNLGVEFVKKPEDGKMKGIAFIKDPDGYWIEIFDRKTIGNVTQTAA

SEQ ID NO: 235414 - protein, 41 aa, Glycine max
  Clone ID: PAT_MRT3847_54606C.1.pep
PRVREKKVLDLILVPSGLLVWLAYHFLLLHQVMKQLTKIFI

SEQ ID NO: 235415 - protein, 79 aa, Glycine max
  Clone ID: PAT_MRT3847_54607C.1.pep
GYQYQELPIYSVSLSLQKQRSCVLILQIRFHSKPPFLIKIYFLFYSLRITLLRLMLLVVCYFWRLKWMLSRGLGQFDLN

SEQ ID NO: 235416 - protein, 52 aa, Glycine max
  unsure (1)..(52): unsure at all Xaa locations
  Clone ID: PAT_MRT3847_54608C.1.pep
ISSTIPTLMCKFVHYKEKHHYSYRYKIRGPDLRKSPPNKVDLKYLVDLXYII

SEQ ID NO: 235417 - protein, 76 aa, Glycine max
  Clone ID: PAT_MRT3847_54609C.1.pep
TEKKEFLLNIKIFFDPLFFLKFQSKKKPSSKKKKLSKKKKAIVSSKSMTLSVFKKAPPFVFYSKEFISMFLFFISI

SEQ ID NO: 235418 - protein, 71 aa, Glycine max
  Clone ID: PAT_MRT3847_5460C.1.pep
RDYPGVPPRLLTERRPFWEKKKKGSNRGLWEERSLWSYSNSGGKRSLSPSAFYNIESAFTVTFFFSARVLK

SEQ ID NO: 235419 - protein, 66 aa, Glycine max
  Clone ID: PAT_MRT3847_54610C.1.pep
LFQGTPFVGLALPIMYLVVAPPESSSIECVGIIWGVHSNLLVRPAAWIYIIQVDMAVMAFRLVAFR

SEQ ID NO: 235420 - protein, 51 aa, Glycine max
  Clone ID: PAT_MRT3847_54611C.1.pep
TLDTWAGGLKSPNFRAHNWPRLEFYFIPPLTHIPVRLPKFLLLKYRRPSLI

SEQ ID NO: 235421 - protein, 46 aa, Glycine max
  unsure (1)..(46): unsure at all Xaa locations
  Clone ID: PAT_MRT3847_54612C.1.pep
FLATQTQTNRDWLLNKMAVXILKNLYPPIQIPNTKLYPSKNVGTTF

SEQ ID NO: 235422 - protein, 248 aa, Glycine max
  Clone ID: PAT_MRT3847_54613C.1.pep
KRGGGGGGGNNLCFLKCGAPLKKGGEGWGGGKKGKRGGKLGQKKRGGEKGGFGFKKGWEEKKEKKFVGKGKKKALGGKKGGARGGIQVLKGFKGFLGPKARPKKNFFGARNWVFPPLKNRGKPPLAPQNLGGLVLSGVKTIKKGGVFSPVKRGGKKKIFLKFGRGEKTLRGFPKTGVRAKKAKGKGGFKVLGAPYKPKKKFFPKFCFFSKKKKKKKKKKKKKKKKKKKKKKKKKKKPKKKKKKKNKKP

SEQ ID NO: 235423 - protein, 49 aa, Glycine max
  Clone ID: PAT_MRT3847_54614C.1.pep
FCALRFNKMGDKFWVVKPARVIFKDVPLSSLRQCFFSKICRQAKSYQLP

SEQ ID NO: 235424 - protein, 60 aa, Glycine max
  Clone ID: PAT_MRT3847_54615C.1.pep
YKIIIINNCIYWYYFIKNNYFKKLIYYINKHLKIILKIENKRQFFNIVKLIIHLNIKSMF

SEQ ID NO: 235425 - protein, 94 aa, Glycine max
  unsure (1)..(94): unsure at all Xaa locations
  Clone ID: PAT_MRT3847_54616C.1.pep
VGSLLRHGWIPCLEFELELGFVFREHNSSPEYSDVPFWTMCYLPMFGCTNSSQLLKQFQKAKSAYPSGFIXIMGLDNVRQVQCISFIAGKPSGF

SEQ ID NO: 235426 - protein, 188 aa, Glycine max
  Clone ID: PAT_MRT3847_54617C.1.pep
GVLVERSLVTVDYKNKLGMHDLLRDMGREIIRSKTPMELEERSRLWFHEDALDVLSKETGTKAIEGLALKLPRNNTKCLSTKAFKEMKKLRLLQLAGVQLVGDFKYLSKDLRWLCWHGFPLACIPTNLYQGSLVSIELENSNVNLLWKEAQVLLQFLATPQHCCSLVGCRKYRNYTLSIHATDHLRPH

SEQ ID NO: 235427 - protein, 81 aa, Glycine max
  Clone ID: PAT_MRT3847_54618C.1.pep
MLYPFIYFVLQIARIFLFMFFFIHMWTHFDEASIFSVKEIYPLGFYSLLVVPPVLAMMNLFWFWKIAKGLVKTISKAKHSI

SEQ ID NO: 235428 - protein, 57 aa, Glycine max
  Clone ID: PAT_MRT3847_54619C.1.pep
RVVKTKTLWLGCGGGLPSLTTVLKEVFSPPLVAAKGCPPPSKRGTPCFQGVFQSPPQ

SEQ ID NO: 235429 - protein, 110 aa, Glycine max
  Clone ID: PAT_MRT3847_5461C.1.pep
LPSLQLPFRTTDISPAAPSVCAAYDYYLRLPQLRKLWNSTDFPNWNNEPILKPILQALEITFRFLSIVLSDPRTFLKAAEDCYAVERIWKLLAEVEDHLMMDPDDFLRLK

SEQ ID NO: 235430 - protein, 118 aa, Glycine max
  unsure (1)..(118): unsure at all Xaa locations
  Clone ID: PAT_MRT3847_54620C.1.pep
GGEEKKGEQKGGPVKXRXQKAYRRRLGGVGGSWLGAWGWEKWMWDTMVRKQMRSALGGQLRFMLCGGAPLSGDTXHFINICMGASIGQGNGLTETFAGAAFEEGDDYSGGRXVGSPLP

SEQ ID NO: 235431 - protein, 89 aa, Glycine max
  Clone ID: PAT_MRT3847_54621C.1.pep
AAVIHLVLLSVLIVVALHEALLCVHMCQPCRLLVSLYELPISLTNPVNKSSNQSSGSSCVFSYIISNTKESTIRGILIGLDHGHYRLAR

SEQ ID NO: 235432 - protein, 181 aa, Glycine max
  unsure (1)..(181): unsure at all Xaa locations
  Clone ID: PAT_MRT3847_54622C.1.pep
MHLLASSSSLSPSLPSSFPRPSLHLHLHFPSQTTQLRLHTPPPLSCSLNSSSSSSYVEQSASSSQMQNGLLYSRAYWVAESLIAWDVDVGNGFSCYLLASKNASLTIANCQIQGEDLKIKLQEDRVGLPANVVEKFPHIRGHKVFSLPPTLDVKPLLKFRXAVVICDSDGECMNCTGLQLP

SEQ ID NO: 235433 - protein, 97 aa, Glycine max
  unsure (1)..(97): unsure at all Xaa locations
  Clone ID: PAT_MRT3847_54623C.1.pep
AQNSAXCFLLXWGVTVGAGLXASYXXDTVAXKNXMXXXGAAVXYXXSLHAXQTIVANXXXKSLFKSXGANILXTVAXAGVLAXXDKXQTHLFGTWLG

SEQ ID NO: 235434 - protein, 51 aa, Glycine max
  Clone ID: PAT_MRT3847_54624C.1.pep
LSTADKEDCDEGEISRPRPRPHHPQREPDLPGVKDEDEDDPPRSLPFPRPH

SEQ ID NO: 235435 - protein, 76 aa, Glycine max
  Clone ID: PAT_MRT3847_54625C.1.pep
RSQPTSGRHHCASEAFILQYPLADLPPINIEIDWLGITGFLELEGEDNEVFLVSAFLPHASLSLRTHCIVSPLACS

SEQ ID NO: 235436 - protein, 40 aa, Glycine max
  Clone ID: PAT_MRT3847_54626C.1.pep
SFTFYFFLKNPPRGRVNPCQFLKAIFSPQVVVVSPECPKQ

SEQ ID NO: 235437 - protein, 63 aa, Glycine max
  Clone ID: PAT_MRT3847_54627C.1.pep
ISVTHEMNLQDLKEKKHGLLMLLLSSQIVIKWSESEKYTKHNIFLSLLLKLPLSLKWSNGASL

SEQ ID NO: 235438 - protein, 89 aa, Glycine max
  Clone ID: PAT_MRT3847_54628C.1.pep
GPLKNPQVSPHNGFSSKNPGVAKGLVLKKTGKNQGFYLGPNFTPPQKNLKMVLFGEMSPQGKPFSLWTIGFFFFPFPWPQLKTILPIFY

SEQ ID NO: 235439 - protein, 67 aa, Glycine max
  unsure (1)..(67): unsure at all Xaa locations
  Clone ID: PAT_MRT3847_54629C.1.pep
WNADVAIEEEKERGNKLEXKGGEGRKEEGNNWIRIKKEYEQTLKRLLSIYSLFLYYDSTYAIGIIST

SEQ ID NO: 235440 - protein, 63 aa, Glycine max
  Clone ID: PAT_MRT3847_5462C.1.pep
RVVGGFVLRAAAVIDKGTDGRIRDSHWAPRVIMFRLYVVFHFWTVNPLYKLPIINRYLESKIN

SEQ ID NO: 235441 - protein, 85 aa, Glycine max
  unsure (1)..(85): unsure at all Xaa locations
  Clone ID: PAT_MRT3847_54630C.1.pep
NPGFSGSRLLGTIPQSISQQTVWNQMATGRTPLNFDPSKASFWPISIDLXLGGGFLLDKTGNWIXLIPNSSINNLVEVAGWKKGC

SEQ ID NO: 235442 - protein, 34 aa, Glycine max
  Clone ID: PAT_MRT3847_54631C.1.pep
TGMTYNLEVSTVSALMLSMYHTFILHEVALTGGS

SEQ ID NO: 235443 - protein, 443 aa, Glycine max
  Clone ID: PAT_MRT3847_54632C.1.pep
MKNMNMKLNTIALIIAIAFSVWSSSCTAARVSHWRKLKAAASATSFNVLDYGAKGDGHADDTKAFEDAWAAACKVEGSTMVVPSGSVFLVKPISFSGPNCEPNIVFQLDGKIIAPTSSEAWGSGTLQWLEFSKLNTITIRGKGVIDGQGSVWWNNDSPTYNPTEVMLESNGRLPSTKPTALRFYGSDGVTVTGITIQNSQQTHLKFDSCTNVQVSGISVSSPGDSPNTDGIHLQNSQNVVIYSSTLACGDDCVSIQTGCSDIYVHNVNCGPGHGISIGSLGRENTKACVRNVTVRDVTIQNTLTGVRIKTWQGGSGSVQNIMFSNVQVSGVQTPISIDQYYCDGGRCRNESSAVAVSGIHYVNVKGTYTKEPIYFACSDNLPCSGITLDTIQLESAQETKNSNVPFCWEAYGELKTTTVPPVECLQRGNPSKEGGINSNIDSC

SEQ ID NO: 235444 - protein, 94 aa, Glycine max
  Clone ID: PAT_MRT3847_54633C.1.pep
IFSQLHAINALYRSFYFYLRRTTKQQHGTPKGPNGYAQITNAPSCKGLCMISGLQCNIFCTPWQISTSVLHLDPVLLYLLKRVPLGNFKTCSLF

SEQ ID NO: 235445 - protein, 194 aa, Glycine max
  Clone ID: PAT_MRT3847_54634C.1.pep
GVKQLKMNDAAIQLTDNISEANALLALQSKLKKNPGIQAAAKSHDIPIYVTKTSSLEHVAKAIRALVSDHEDGIKDSELTDKIKSSEMIDALEEARMAIEHTVILKGEPVDLLPRSSHIISLQLELVRKYQLETRRISGDSGVHLRILPSHYETDEVKTSETSEFDSELLDDFASNGSVNGSFNSLDRLPLLPE

SEQ ID NO: 235446 - protein, 216 aa, Glycine max
  Clone ID: PAT_MRT3847_54635C.1.pep
YLCSTFRGCSFIHALALFKSIFFLCSIYLLLFFPLTPITMPSPSDHHRPQPKPNPNLLSLFLKPIIMLLLTSLFFLFLGFAAFLLLNLFLLGGAFHRLRFRPSVTTAPTSSNGLPPREINKLPRFRVANGSETRPDSNCVVCLDAFHNAQWCRKLAACGHVFHRTCVDTWLLKVAACPTCRTPVRFNAGTTVHDPPQRFDQFHTCGTDCTALTTLL

SEQ ID NO: 235447 - protein, 66 aa, Glycine max
  Clone ID: PAT_MRT3847_54636C.1.pep
SKNQINQSVTIWKSPNTIHAVETYTYMYVEEKPPDNNNTACKILSTFLTKEHTDSSNQGHKELYYL

SEQ ID NO: 235448 - protein, 327 aa, Glycine max
  unsure (1)..(327): unsure at all Xaa locations
  Clone ID: PAT_MRT3847_54637C.1.pep
MGSQDNNVELSSNSFLAYKSAKVFVAGHRGLVGSAIGRKLTQLGFTNLVLRSHAELDLTRQSDVEAFFAYEKPEFVIVAAAKVGGIHANNTYPADFIAINLQIQTNVIDSAYRNGAKKLLFLGSSCIYPKFAPQPXIPEDALLTGPLEPTNEWYAIAKIAGIEMCQAYRIQHKWDAISGMPTNLYGPYDNFHPENSHVLPALMRRFHEAKVNGAKEVVVWGTGSPLREFLHVDDLADAVVFMMEKYSGLEHLNVGSGKEVTIKELAELMKEVVGFEGDLVWDSTKPDGTPRKLMDSSKLASLGWTPKVSLKDGLADTYKWYLENVNL

SEQ ID NO: 235449 - protein, 37 aa, Glycine max
  Clone ID: PAT_MRT3847_54638C.1.pep
MRLSLKYFSFNKIKDLFYTQYQISMKNKNSLGNIFTF

SEQ ID NO: 235450 - protein, 160 aa, Glycine max
  Clone ID: PAT_MRT3847_54639C.1.pep
MEEDGKRDNTDSPTNSQQTVSDDDEIDYTTKPEFYDPDLDDNDEKWIDKKRHGHDSDAVLSCPACFTTLCLECQRHEKYLTQYRAVFVVNCKIGNDKVLKQNTSRSRKRNRGKEGFDGDDAHSTNIETFKQVCCSVCSTEVGVIDQDEIYHFFNVLPSES

SEQ ID NO: 235451 - protein, 426 aa, Glycine max
  Clone ID: PAT_MRT3847_5463C.1.pep
MVDLHWKSKMPSSKTPKLSLSDNKSLPSLQLPFRTTDISPAAPSVCAAYDYYLRLPQLRKLWNSTDFPNWNNEPILKPILQALEITFRFLSIVLSDPRPYSNHREWTRRIESLIMHQIEIIAILCEEEEQNSDTRGTAPTADLSSSNSSVSRSYSEASLLPRLATWDKSRDVAQRILLSVECQMRRCSYTLGLGEPNLAGKPSLLYDLVCKPNEIHALKTTPYDERVENHENHAVHATHQIAESWIHRAGKRIWKLLAEVEDLHLMMDPDDFLRLKNQLSVKSSSGETASFCFRSNELVELTKMCRDLRHKVPEILEVEVDPKGGPRIQEAAMKLYVSKSEFEKVHLLQAMQAIEAAMKRFFYAYKQVLAVVMGSSEANGNRVGLSCDSADSLTQIFLEPTYFPSLDAAKTFLGYLWDNNDNNKWI

SEQ ID NO: 235452 - protein, 94 aa, Glycine max
  Clone ID: PAT_MRT3847_54640C.1.pep
SHRTLGNLGNHLTRLAHQNPTRPHILRGTPLLLRRIVNHSYLHRIVNLAPTPTIIPHLRIRPIMRGGRQPTHTCTRAQERQQVPEPSTPSKTHT

SEQ ID NO: 235453 - protein, 47 aa, Glycine max
  Clone ID: PAT_MRT3847_54641C.1.pep
NISSRWNKLFRNSFGLNFVLSDLNIGVYLWIAITSIAPIGLLMSGYG

SEQ ID NO: 235454 - protein, 122 aa, Glycine max
  unsure (1)..(122): unsure at all Xaa locations
  Clone ID: PAT_MRT3847_54642C.1.pep
YSRLVFYACPYKQLISGNVAVFGYLAYTPXIGRPKRHRKKANFYSGEEPPKKAQXETARNMDREIHADAPDARIKTTCYXGPHEAPLAPTPYKAFGKRTNTLGAEEPIYRKKRKGFGESAGA

SEQ ID NO: 235455 - protein, 123 aa, Glycine max
  Clone ID: PAT_MRT3847_54643C.1.pep
ELRCLTGTKPQQWPKRLSWAEFWFNTNYNNSLKLTPFKVLYGCDPPHLLKGAIISSTAEEVNVMTNDRDQMLHDLKGNLAKAQNQMKYADRSRRSIPLNVGDWVYLKLQPYRQRSLARKTNEK

SEQ ID NO: 235456 - protein, 290 aa, Glycine max
  Clone ID: PAT_MRT3847_54644C.1.pep
HFVGLVLENCNLPYANHGHVILGDPSPILFYPISSTEIRCLVDVPGHKLPSLGNGDMARYLKTVVAPQVPPELRDSFIAAVEKGNIRSMPNRSMPASPYPTPGALLMGDAFNMRHPLTGGGMTVALSDIVLLRNLLRPLHDLHDANALCKYLESFYTLRKPVASTINTLAGALYKVFCASPDPASKEMRQACFDYLSLGGVFSDGPIALLSGLNPRPLSLVLHFFAVAIYGVGRLLIPFPSPKRMWIGARLISGASAIIFPIIKAEGIRQMFFPVTVPAYYRTPPTNLED

SEQ ID NO: 235457 - protein, 123 aa, Glycine max
  Clone ID: PAT_MRT3847_54645C.1.pep
MGLMAANQTQLLSKMAIGDGHGEASPYFDGWKAYDENPFHPKENPNGVIQMGLAENQLTSDLVEDWILNNPEASICTPEGINDFRAIANFQDYHGLPEFRNAVAKFMGRTRGNRVTLDIDRIS

SEQ ID NO: 235458 - protein, 112 aa, Glycine max
  Clone ID: PAT_MRT3847_54646C.1.pep
PQSASKARQDGPEATHFEELINPAKQDDPEATLFEELSNPAKYGLCQPRNTESGSVIINGRNLSGTGYAEQIIKEKQSIPVVSVNDKQDMGILAISIGETGNLPFQRQMSLC

SEQ ID NO: 235459 - protein, 87 aa, Glycine max
  Clone ID: PAT_MRT3847_54647C.1.pep
RTNRKKKDHGDGKLGSTEGLRRSCVDEVVNLFCHGGGRFLKGKKITLCAGHRLCESFSFPLLVYLLNTLLFDIGLRARFKLSSAFFL

SEQ ID NO: 235460 - protein, 58 aa, Glycine max
  Clone ID: PAT_MRT3847_54648C.1.pep
FPGPTTRVRHIFRWKLNYCLRKEWSRAWRVQFLFCHNLSSAMERLAFLLNFLNLLINF

SEQ ID NO: 235461 - protein, 41 aa, Glycine max
  unsure (1)..(41): unsure at all Xaa locations
  Clone ID: PAT_MRT3847_54649C.1.pep
FPXXPGKPHLIVLQNSQPLDYNDVLWPKCILCLTVFPVVSL

SEQ ID NO: 235462 - protein, 455 aa, Glycine max
  Clone ID: PAT_MRT3847_5464C.1.pep
MVDLHWKSKMPSSDMPSKTLKLSLSDNKSLPSLQLPFRTTDISHAAPSVCATYDYYLRLPQLRKLWNSSDFPNWNNEPILKPILQALEITFRFLSIVLSDPRPYSNHREWTRRIESLITHQIEIIAILCEDEEQNSDTRGTAPTADLSRNNSSESRSYSEASLLPRLATWYKSKDVAQRILLSVECQMRRCSYTLGLGEPNLAGKPSLLYDLVCKPNEIHALKTTPYDERVENHENHALHATHQIAESWIHASRKVLERIADAVLSRTFEKAAEDCYAVERIWKLLAEVEDLHLMMDPDDFLRLKNQLSVKSSGGETASFCFRSNELVELTKMCRDLRHKVPEILEVEVDPKGGPRIQEAAMKLYVSKSEFEKVHLLQAMQAIEAAMKRFFYAYKQVLAVVMGSSEANGNRVGLSCDSADSLTQIFLEPTYFPSLDAAKTFLGYLWDNNDNNKWI

SEQ ID NO: 235463 - protein, 77 aa, Glycine max
  Clone ID: PAT_MRT3847_54650C.1.pep
DEISVCFLSQCGKCIVILFISESIILPQFFRRSSYTSLNKTKPIQRINQFHTLNESGNWKKIWKINAPERIRVFTFY

SEQ ID NO: 235464 - protein, 61 aa, Glycine max
  Clone ID: PAT_MRT3847_54651C.1.pep
RKELDLKLDHLEPVIMTQVGFAARKCMRIYHALTYTLSHVQRFVRSWRLYLKKKWQVTKVV

SEQ ID NO: 235465 - protein, 50 aa, Glycine max
  unsure (1)..(50): unsure at all Xaa locations
  Clone ID: PAT_MRT3847_54652C.1.pep
SWANRTAKTGYLEEAEGVNPVDTPKPDGIKKATVLYAXKALNGEKTNWIM

SEQ ID NO: 235466 - protein, 91 aa, Glycine max
  Clone ID: PAT_MRT3847_54653C.1.pep
YFILALCFFLPTQIIQTSIFLILERPRTPYGYVYVGGLHPLTYPYFLTLYIDVCSYFYFSKLYSTRLTASSLSSLFVIVYGIGLKHCLGHY

SEQ ID NO: 235467 - protein, 72 aa, Glycine max
  Clone ID: PAT_MRT3847_54654C.1.pep
GYGLGPFVVFFSGIGPPFFWGGFCSSLVKGLVGGPLVFRLPSGGVCLTIRGGGSFIMQPSRRSGGLVNLLMC

SEQ ID NO: 235468 - protein, 85 aa, Glycine max
  Clone ID: PAT_MRT3847_54655C.1.pep
TIKNIFKKKKKKGLRKIWRAGPAVGGSSLRLRCLSAFLGPRRSRCQGWVFDTWAGCTLVALGFHPLVCRWPFPGWVPSVGPSRHL

SEQ ID NO: 235469 - protein, 48 aa, Glycine max
  Clone ID: PAT_MRT3847_54656C.1.pep
DVSGFGGNLILRFCSGVQKELHYCGQQSTYRKILMLLLLMMLKHRNKY

SEQ ID NO: 235470 - protein, 69 aa, Glycine max
  Clone ID: PAT_MRT3847_54657C.1.pep
SRPQQWRVYPKINASILLRVRLHLIYPSLIMCCILEPNSEVYVMITLPSPWIDQCKGLYLIWLFLNRTL

SEQ ID NO: 235471 - protein, 43 aa, Glycine max
  Clone ID: PAT_MRT3847_54658C.1.pep
KFKKYFLPSHVRKKLLHGLGSSHVQCFSQFPRNMQLSLLRFFV

SEQ ID NO: 235472 - protein, 135 aa, Glycine max
  unsure (1)..(135): unsure at all Xaa locations
  Clone ID: PAT_MRT3847_54659C.1.pep
GKCVRFFVAXRGMXXXWPMSLXXXXRPSANKNGPFIMWAXXXXXXLPLLLGPPSCVGSLASSFKGSVKPSDSVDAPVKLWNVNPTPRFFRVKKKVGSVTSFSSLKLFPPNFTPVSPFGFSQRIFFFAVGVLSKSG

SEQ ID NO: 235473 - protein, 45 aa, Glycine max
  Clone ID: PAT_MRT3847_5465C.1.pep
VPAGWQGAGWGAGLILSDCRVLYKYHLILSKPICETFTEDKALQR

SEQ ID NO: 235474 - protein, 59 aa, Glycine max
  Clone ID: PAT_MRT3847_54660C.1.pep
LIDVYNNQLLTYERRMRRLWHSTTYHPQSGDFDSLTNLALKEANELIEGLPKKFKGGSS

SEQ ID NO: 235475 - protein, 61 aa, Glycine max
  Clone ID: PAT_MRT3847_54661C.1.pep
PLFYVASTTTCMTNAQIKTKYEKTEMNFMKRLKLFLKLINMQNSKGGCQFYVRNKNQSQSA

SEQ ID NO: 235476 - protein, 37 aa, Glycine max
  Clone ID: PAT_MRT3847_54662C.1.pep
YTNTCFLTNVGPTRVPVKIKYYALFNFSKKMLYIFYG

SEQ ID NO: 235477 - protein, 46 aa, Glycine max
  unsure (1)..(46): unsure at all Xaa locations
  Clone ID: PAT_MRT3847_54663C.1.pep
YXIXXXXDTRXLWLXCXSAXPIVSCRXHXXXDTFXCHGXDFTWPFL

SEQ ID NO: 235478 - protein, 453 aa, Glycine max
  unsure (1)..(453): unsure at all Xaa locations
  Clone ID: PAT_MRT3847_54664C.1.pep
MISQFFVLSQRGDNIVFRDYRGEVQKGSAEIFFRKVKFWEDGGLQEAPPVFNVDGVNYFHVKVVGLLFVATTRVNTSPSFVLELLQRIARVIKDYLGILNEDSLRKNFVLVYELLDEVIDFGYVQTTSTELLKSYVFNEPLVIDAARLPPLGPAAIFTQGTKRMPGIAVTKSVVATEPGGRKREEIFVDIIEKISITFSSSGYILTSEIDGTIQMKSYLSGNPEIRLALNDDXLSFGRSQGSAFECYRSSSGSMTVILDDFFFHESLRLDSLDIGEFPVMNYRXTQYPVMNYRXTQEFSPPFRINALIEEAGSLKAEVILKVSAEFPSSVTANTIKVQMPLPKCTSRVSFELEPGAVGQTTDFKEANKRLEWSLRKIVGGSEHTLHAKLTFSQESHVNITKESGPVSMTFTIPMHNVSRLQVKYLQIAKKSATHEPYRWVRYVTQANSYVARI

SEQ ID NO: 235479 - protein, 79 aa, Glycine max
  Clone ID: PAT_MRT3847_54665C.1.pep
NWLEHWEGRVKRTILNRCTFTTTEALFSMVDNEEILYGAATKRRYCELEAGITSLPIILQSTMPNIAMNAKKKLAQILP

SEQ ID NO: 235480 - protein, 219 aa, Glycine max
  Clone ID: PAT_MRT3847_54666C.1.pep
WTRVRSQGPPYGYRSSSDSGTVILDDCNFHESVRLDSFDIDRTLSLVPPDGEFPVMNYRLTQEFRPPFRINALIEEAGSLKAEVILKVSAEFASSVTANTIKVQMPLPKCTSRVSFELEPGAVGQTTDFKEANKRLEWSLRKIVGGSEHTLRAKLTFSQESPVNVTKESGPVSMTFTIPMHNVSRLQVKYLQIAKKSATHEPYRWVRYVTQANSYVARI

SEQ ID NO: 235481 - protein, 219 aa, Glycine max
  Clone ID: PAT_MRT3847_54667C.1.pep
MHVVVVLNTQSYCRGLEPPSSSPSVVSNKGTRTLSFRRLLLRPSLGIHLSRSFALKCVVTPNPAVELPLTAENVESVLDEIRPYLIADGGNVALHQIDGNVVRLKLQGACGSCPSSVTTMKMGIERRLMEKIPEIVAVEPIADEETGLELNEDNIEKVLEEMRPYLVGAADGTLELVAIDEPIVKVRITGPAASVLTVRVAVTQKLREKIPAIAAVQLL

SEQ ID NO: 235482 - protein, 126 aa, Glycine max
  Clone ID: PAT_MRT3847_54668C.1.pep
LLSRPPLVAFRGNRYLSCWRVLALRLLLHSSSLLYTALARCLAVAAWLVVSDVAYVHYARPCFDHTLGTLGGPCVIVPIAPVRFGYGIIYPYSFINGIYFGWHTKRACVKPTQTKYKTKHQHTKYK

SEQ ID NO: 235483 - protein, 59 aa, Glycine max
  Clone ID: PAT_MRT3847_54669C.1.pep
RTTGKMLIYLPVSRTRESLRRALPHAMMSCILPDNQGPHCALACSLYISKTRSSKSFKL

SEQ ID NO: 235484 - protein, 47 aa, Glycine max
  Clone ID: PAT_MRT3847_5466C.1.pep
KTRADKSKKTTEGDSSVLLFVNITEAFGFVILRLFYIFLSPKNAFLQ

SEQ ID NO: 235485 - protein, 57 aa, Glycine max
  Clone ID: PAT_MRT3847_54670C.1.pep
PYQEAIYRHNGIEYILCMWDPPFANQSNLNAKILASPPLEALEISFEYLNSKHWCWT

SEQ ID NO: 235486 - protein, 33 aa, Glycine max
  Clone ID: PAT_MRT3847_54671C.1.pep
QHAATSSDDGQCTVLLIISCHAPASHLAGDLPH

SEQ ID NO: 235487 - protein, 92 aa, Glycine max
  Clone ID: PAT_MRT3847_54672C.1.pep
LIPWNLNLLTTKATACIKTTLLLLRLLLTTTLTLATRTAPAKEETVALLPLRPVCLTEELRTPPFTGAVHKALSYLWVSRMLIKLVLFDMHA

SEQ ID NO: 235488 - protein, 88 aa, Glycine max
  unsure (1)..(88): unsure at all Xaa locations
  Clone ID: PAT_MRT3847_54673C.1.pep
LSSTYIICTHLSLSDPDLTNFTTQQQSYSLLQPXHSHHLHVYHYHKEEASTLANFTHNLNYLMYKNSYXKSPHSSSLLSNNITDMTPQ

SEQ ID NO: 235489 - protein, 291 aa, Glycine max
  Clone ID: PAT_MRT3847_54674C.1.pep
STTSSGIFENPKTPSAETETSIPKSSTNGEKSEKSASEEKTLKKPDKVLPCPRCNSMETKFCYYNNYNVNQPRHFCKNCQRYWTAGGTMRNVPAGAGRRKNKNSSATVSHYRHIMFSEGLQGATLNAPNGLHNAVMTFGPDSPLCDTMASMLNIAERAQSCVPNGFHVTEPNSFVSYRKEEEEDGTSGHSTGVNSVATTSTLSHSGSHESLDKKVVEGFTPQFPYFPSAPWPYPIPPSTFFPQGYPLSLYTTPAYWSYMPPSWNNNISAISPESSINNSVSNPTLGKHSKD

SEQ ID NO: 235490 - protein, 153 aa, Glycine max
  Clone ID: PAT_MRT3847_54675C.1.pep
VLQATELKCGSLVVACTFDHRIADAYSANMFLVSWAEIAQSNKPIISIQPSFARSLFIPRNPPSFHSSLHDLYVSISASPRPSDPKPEFQSEPLINRIYYVTGENLNLMQKLASSNGVKRTKLESFSAFLWKMVAEAAAAKVKGKKNLVAKMG

SEQ ID NO: 235491 - protein, 146 aa, Glycine max
  Clone ID: PAT_MRT3847_54676C.1.pep
GEKHQAPTLFWHSKNKKRVFINKGHPPPTGYSLFWGGATKFYLSPRGVGARLRTAVAHFFRPKKVGPKFFPLSGVLTNNIGPPAAQVSAPRMTPSWKTKPTVSGDSIKKRKDIKAKIKKQRDSSAKKKKGGSSSSRIGSSSSDPEL

SEQ ID NO: 235492 - protein, 67 aa, Glycine max
  Clone ID: PAT_MRT3847_54677C.1.pep
KTQKKIPRSQPLDHTTKTLLRLCGSVPLGNILTLSAKVGIFSSQARLVPLCLIHLGSTNGGSNVWGF

SEQ ID NO: 235493 - protein, 83 aa, Glycine max
  unsure (1)..(83): unsure at all Xaa locations
  Clone ID: PAT_MRT3847_54678C.1.pep
MKFMVRVFLDATNLVTWQCHAYNIFLPRLNTGYGARTPEVKCVKFEACCXAHNIFGFETIPENFVEATNEYIYGEQYISDSKT

SEQ ID NO: 235494 - protein, 58 aa, Glycine max
  Clone ID: PAT_MRT3847_54679C.1.pep
AQKFPQLFKKVTQSVLPTRVDPPTRTELGELSCDKNQNVSSSTTTLRLVRITSDQEEC

SEQ ID NO: 235495 - protein, 98 aa, Glycine max
  Clone ID: PAT_MRT3847_5467C.1.pep
NDFGFHIMPYLGTPNIVSTNTSKYRPSTVRYFAPSCFSRCSSRFYSFRETWFSINSARVDTLAQWASGSFHCKETRFYHWPNRGCYALFRDDGFEFVP

SEQ ID NO: 235496 - protein, 78 aa, Glycine max
  Clone ID: PAT_MRT3847_54680C.1.pep
NRKDKQHSIYKLNKKVYTTKKKRNRRERIISNRNSLNSLEINRECNLTIKDGVLIKINFFFLLQLTSTLLKVKQRKIT

SEQ ID NO: 235497 - protein, 61 aa, Glycine max
  Clone ID: PAT_MRT3847_54681C.1.pep
LSVVGVGEARFHVLAGHGGRGSTAVAHGRGDRGGGEVLYKEALGVLGFHIIMRKPNPNPKK

SEQ ID NO: 235498 - protein, 145 aa, Glycine max
  Clone ID: PAT_MRT3847_54682C.1.pep
MTTRLLRTIFIAHKLHLRNPKCIFPPLLSRHSSTATNSSEAREPAKETTTTTTTTSWSMYGNVYDRPIAQRELNDHSDGDENPSSGRAAKSVAVVTKIKGKGKVKAQWVCCSCGHSTGKWWGQCPECEMVGTMNEFHESKLTDSK

SEQ ID NO: 235499 - protein, 53 aa, Glycine max
  Clone ID: PAT_MRT3847_54683C.1.pep
EVILFYLYQAIIMALNFPSHKLNIFFFLYIFFFLYIVSVLFTLKHVIYLGEVV

SEQ ID NO: 235500 - protein, 91 aa, Glycine max
  unsure (1)..(91): unsure at all Xaa locations
  Clone ID: PAT_MRT3847_54684C.1.pep
AILLGMIQRLRDDFKSNQEQLITVLXLLLYCCKIRENRRALLKLRSLGLLLEAARRAFTVDAMEPAEAXILIVESLTLEANEHDNISITHS

SEQ ID NO: 235501 - protein, 179 aa, Glycine max
  unsure (1)..(179): unsure at all Xaa locations
  Clone ID: PAT_MRT3847_54685C.1.pep
MVKRVRSDSGPLSLQKHNHWCVKLGVSIFLVGLAFRLLLWDSFSFSSVVVETPPPLEDAKALSPVFSSSVLQDSDEFPENDQKIQTQISKNEKCDLFVGDWVQDLSGPVYTNESCRVIEPHQNCMKNGRPDSEYLYWRWTPRDCKLPKFNPRKFLKLMRNKSLSFIGDSXSRNQVQSLL

SEQ ID NO: 235502 - protein, 84 aa, Glycine max
  Clone ID: PAT_MRT3847_54686C.1.pep
GRASNHLLLHTHFNLVPNKYWPVASTSFLAGRYIVCFCFSWQYLIRQNWGQRVQVHKKMAYKVSHLRNLAKMLKQNTAKIEKVY

SEQ ID NO: 235503 - protein, 114 aa, Glycine max
  Clone ID: PAT_MRT3847_54687C.1.pep
ELLLAGSQYGLNWIITRAPEASLSSILITLSSSLNESTLLDCFLPNPDEGSGILLLLPLDGTGDMPEPSVLSMEFLDPSETGDLMHSLGSCLVNEALTDCGTHFGFPEDDDSSV

SEQ ID NO: 235504 - protein, 64 aa, Glycine max
  Clone ID: PAT_MRT3847_54688C.1.pep
LSSLFIIIHFLFFKYVFFYQLTQNGLLIINIHYIIIRYAATLPPHFLTYNLPATTQPDAWTDAW

SEQ ID NO: 235505 - protein, 137 aa, Glycine max
  unsure (1)..(137): unsure at all Xaa locations
  Clone ID: PAT_MRT3847_54689C.1.pep
IPPREYGFGGLFCPAMGTVGRATLLMGPLPNDAPFGFLAVSLGFFXPPLSCFGCPPTRGVAGGEPKLSGFSPGLVRMSIGSLGPLGREWGPMAIAPDRFPEKPPQGCKFFFFLLLFCWASSRFPPLPSHRINFSCLV

SEQ ID NO: 235506 - protein, 69 aa, Glycine max
  Clone ID: PAT_MRT3847_5468C.1.pep
QTKQLLLLLHTLSLSLSQCMGANSSYRRINAFGKPIPNQIWTSNPPSAPLTSRKGAIAACIQYQPAVNV

SEQ ID NO: 235507 - protein, 365 aa, Glycine max
  Clone ID: PAT_MRT3847_54690C.1.pep
MEQRKLVVLGIPWDIDTEGLREYMSKFGELEDCIVMKERSTGRSRGFGYVTFASVDDAKEVLSSEHIIGNRTLEVKVATPKEEMRAPVKKVTRIFVARIPQSVTEATFRSHFEKYGEITDLYMPKDQGSKMHRGIGFITFASADSVENLMSETHELGGSAVVVDRATPKDDDFKPIGRMPPPPLPTPQGGGYGAYNAYISAATRYAALGAPTLYDQPGPIYGRGDPSRRTSKKIFVGRLPPEATSDDLRQYFGRFGRILDVYVPRDPKRTGHRGFGFVTFAEDGVADRVSRRSHEICGHQVAIDSATPVDDAGPSGNFMMNSMESFGGYGGPVRSYGRMYGSLDFDDWGYGIGRPSRADWRYRPY

SEQ ID NO: 235508 - protein, 48 aa, Glycine max
  unsure (1)..(48): unsure at all Xaa locations
  Clone ID: PAT_MRT3847_54691C.1.pep
RADPRVAGXXHFQEDIFWPTGPTFTRVYILTCHFQSILMIKYLMHIYD

SEQ ID NO: 235509 - protein, 81 aa, Glycine max
  Clone ID: PAT_MRT3847_54692C.1.pep
LINSLHLQVAIDSATPVDDAGPSGNFMMNSMESFGGYGGPVRSYGRMYGSLDFDDVSLYILVILWPIIYKGNGIWSFGQFV

SEQ ID NO: 235510 - protein, 53 aa, Glycine max
  Clone ID: PAT_MRT3847_54693C.1.pep
GKKPNWNQWFRFYRASPKNFKGDVKLRGETQLFQFKKTGGRANNYKILLGPPI

SEQ ID NO: 235511 - protein, 257 aa, Glycine max
  Clone ID: PAT_MRT3847_54694C.1.pep
VKVERERERGESKRRHSQRRHTRCSSSRQARTRHVALSLYLDLPSSTIHASALFSLQTPHSGPCSLATRSLPIDLLASTPNPHDLYPLLSPPGPAPHQRLPRITFTLSNHSSFLISYSTSPSSSALQWLLPPQSSHPFVYTQCQSIHARSVFPCQDTPALRIQYSALLNVPSQLSAVMAARHVERRSPKHDDAVHVVLPDGESWCAQGRIVEEFVMEQSVPPYLFAFAVGELGNREVGPRTRVYAEDGGAEWKGRRR

SEQ ID NO: 235512 - protein, 146 aa, Glycine max
  Clone ID: PAT_MRT3847_54695C.1.pep
MAAVDPHSFTDSRQARTRHVALSLYLDLPSSTIHASALFSLQTPHSGPFYLDTRSLTIHSVIHPKTQTPIPFSLSDPDPIKGSLLSFTLSDHSSFLISYSTSPSSSALQWLLPPQSSHPFVYTQCQSIHARSVFPCQDTPALRIQY

SEQ ID NO: 235513 - protein, 444 aa, Glycine max
  unsure (1)..(444): unsure at all Xaa locations
  Clone ID: PAT_MRT3847_54696C.1.pep
MNLSKKGPLRDAKLLSPNKATTLNPNAAEFVPFALRSSSLSGTTSSVDATAKLSAAGALGKAVFDRSESSISNNSDDEVHQYWRCQLPDDITPDFKVMGEDESRVLDDLSLAGLSIHDDNEASRFPSSKGSKYIINEQEEISQQHVNGNSLADKLGFSNSSYREDPSSGSFLNVLAKPWEGPIGSADQCISSGQEGLTYDDNSIHGYLNDVLVENAIVDDTDLNPLEFLASLFPGFAAESLAEAYFANGCDLHLTTEMLNQLELQVDGGFNQNLNSKTLSAPNLSAMDYPALTSPDGQTASVKYVVDNVQQSGNPYRSFDSDGLXSFKSGSSIPSRGAVDFASAVRKLASQDSGIWKYDKNGSGDASTGSSRSLNALASAYNGGQGRVNNGDRLQNRGSARAAPVWLETGDAVANMYSELREEARDHARLRNAYFEQVGLCFMQ

SEQ ID NO: 235514 - protein, 415 aa, Glycine max
  Clone ID: PAT_MRT3847_54697C.1.pep
RVHFGDVLCLDLEKMDWSKLATTGEKPGPRDSHSAVLVGHKMIVFGGTNGLKKVNDTHILDLVTKEWFRPKCEGTPPSPRESHTATLVGDERLVIFGGSATRPANYLNDLHVLDLRTMRWTSPTVKGDFPVPRDSHSTLAIGNKLIMYGGDCGDQYQGDVNVLDMDTMSWSRLRIQGSSPGVRAGHAAVNIGTKIYIIGGVGDKRYYNDIWVFDICTCSWTQLDIRGQQPQGRFSHTAVVADMDIAIYGGCGEDERPLNELLVLQLGAEHPNGRYNISMCKVFGTCWNHEKRTIPGGADTNSTTPRNGNNNMEVLGKWAYEVVSDKVNPCHFDSGTSQQKRRRIAIAKVWDVESEQEEHSLSLSQHSSPSQSDQEQTPGQKSMFLSWMLRVIIGSRSIKVQAIASLTISQVITQL

SEQ ID NO: 235515 - protein, 195 aa, Glycine max
  unsure (1)..(195): unsure at all Xaa locations
  Clone ID: PAT_MRT3847_54698C.1.pep
LHSQRTTSYLFGYPYCSKNLSHEQDSKALNTAHDGWGTDENTAIRIWXHKTAYQRQHIRRAYYEILQEDLVNHLDPEITGNFVHSILLLHTQNSAKRVTCFRTMLPSKNGXNYNVHWRKFGTITLTHQDLLMRDTHLIINRYNLSLQEDTTAHTSGLLRQLXQWWVTSYRYVGDEINPNLPQTEADPLHDAVTDY

SEQ ID NO: 235516 - protein, 76 aa, Glycine max
  Clone ID: PAT_MRT3847_54699C.1.pep
IDFPGDQCLGIFPFQDLLGIIKVNFPGGSPGINNPIKICQVPIQVWVPTRVLKPMNQVQVRFKPMPHLNGRLWCLV

SEQ ID NO: 235517 - protein, 65 aa, Glycine max
  Clone ID: PAT_MRT3847_5469C.1.pep
TVPYKERRRFLNGVAGKILLGRAWLKKWWFKSFFELGRFFGSFTKQVATPLCRFFGTGPHPESGV

SEQ ID NO: 235518 - protein, 109 aa, Glycine max
  unsure (1)..(109): unsure at all Xaa locations
  Clone ID: PAT_MRT3847_546C.1.pep
VCENIPIVFFGNKVDVKNRQVKANRFTXFHRKKNLQNYKICAKSNSNFKKPFLXLARKLAGNVNLHFVKFPALGPPKVKIDLVGQQQQEVEVLAGVSKTLPDEDDDQFE

SEQ ID NO: 235519 - protein, 75 aa, Glycine max
  unsure (1)..(75): unsure at all Xaa locations
  Clone ID: PAT_MRT3847_54700C.1.pep
VINVPLRILVMRVELTLQGIEHGYVDVDRVDWXLDTLCDLYXTMALTDIVILVTTGRTVDCLANGMRSTDHTICA

SEQ ID NO: 235520 - protein, 43 aa, Glycine max
  Clone ID: PAT_MRT3847_54701C.1.pep
IIIFSFYVGIVPQTGCCGNYISSTNPIQACPFIASLLSSSRSR

SEQ ID NO: 235521 - protein, 48 aa, Glycine max
  Clone ID: PAT_MRT3847_54702C.1.pep
KLLFNKINRNWAPSGWLFNLNEGWIIYPPLFFGPILRFYPSWFHKKPC

SEQ ID NO: 235522 - protein, 79 aa, Glycine max
  Clone ID: PAT_MRT3847_54703C.1.pep
YCIDPVLLENHPQGGCQSGKVVDHNYKVIGVEALRVIDGSTFHGSPGTNPQATVMMLGRYMGEKIIKEDSSIGGSEGIN

SEQ ID NO: 235523 - protein, 98 aa, Glycine max
  Clone ID: PAT_MRT3847_54704C.1.pep
FRLLNCFGRGVGLEFSVVVSAFSICAAIGITESSKDLGHTSTWGCSFDSSIFFFVFLILFLFSLSCARETSVSGLSSSLRFFASENSLCIMQWPQATT

SEQ ID NO: 235524 - protein, 67 aa, Glycine max
  Clone ID: PAT_MRT3847_54705C.1.pep
YSRCRKKKKKKKKKKKKKKKKKKKTPKKKKKKKKKGAPFKGPKLTTPALQRKSFFIGPPKSNPRPAV

SEQ ID NO: 235525 - protein, 132 aa, Glycine max
  unsure (1)..(132): unsure at all Xaa locations
  Clone ID: PAT_MRT3847_54706C.1.pep
RESRTPAGRTGTPRPTPVSKSNAPNGGGPGPXQRTGKGAGXKPDKXDTEATEKSPEASSEEARNTARGPAQKEGPTAGTTPGANTGAAPRRAQQPENKGKLQGTGHPRYGERNPTTGPDQEPPQEAENTQPG

SEQ ID NO: 235526 - protein, 83 aa, Glycine max
  Clone ID: PAT_MRT3847_54707C.1.pep
ERKGRQTPPLDRDDVQGRRCRIALQGSVAVSIVTPPTCGSFEACMVVVVGNVMVESNHRSDPISQNNRTNQSRSIVVVRYEQI

SEQ ID NO: 235527 - protein, 62 aa, Glycine max
  Clone ID: PAT_MRT3847_54708C.1.pep
KLKKDLFRGPRKENFSKPKIYLSIFRQNFLVSTKNFRLPNPPVAPELQRWRGAFPERGGFFL

SEQ ID NO: 235528 - protein, 58 aa, Glycine max
  Clone ID: PAT_MRT3847_54709C.1.pep
SSFFFVMKMKQSLPKVASDLLGELAMPSQFSLPQSHNHTFFSSYESLSLSLSKTRQIQ

SEQ ID NO: 235529 - protein, 125 aa, Glycine max
  Clone ID: PAT_MRT3847_5470C.1.pep
VLLCGTGEVTLLSVHEYVTPTLAGAKLKSFLASHNIPITDGIDRTSATLQSIKLAERDDLKRNSKHMSNVLRLAPEDNARLWSQLNYVICNNLQMQEAYLAYLTNALRELYSHTPEEALQLTKKA

SEQ ID NO: 235530 - protein, 182 aa, Glycine max
  Clone ID: PAT_MRT3847_54710C.1.pep
YSSGIEMEDEVKVAKVGESQREDSSRIFPCLFCSRKFYSSQALGGHQNAHKKERTAARKAIRLEEHSCVSFPSPLPTPMVFAPTHLDIINPAMFITAHAAKLPHLPSHQISEQFGSNGAPRFGNALFYGGSSINRFHDDGKSSNFSWGNTSQHIQLISNNQNLGIWNNGTEKDQKLDLSLHL

SEQ ID NO: 235531 - protein, 134 aa, Glycine max
  Clone ID: PAT_MRT3847_54711C.1.pep
YCLLLCLLSFYSDQFGCIEMLGDIIPRPRLETILKNHELHHRELKPRQRHGPRGGGQNPAIKKRLLPEWNKGPDINKNVYFGESIKTQTGPWALRKGCPKPGPLLGRTAQEQSLEPKGEKGVRACTITKQQMFA

SEQ ID NO: 235532 - protein, 135 aa, Glycine max
  unsure (1)..(135): unsure at all Xaa locations
  Clone ID: PAT_MRT3847_54712C.1.pep
VVFHVAGSKGRLVYASLIPYAEPVVQAQRAELNCDFFPGEGDSXEGVAHIGELRFGVYAPLPTKTDLVETPKEWQLDXLPCDKIPSELTTTDERLVGTEHDGYDPFLGGIXKYASCMMPLDEEILSKVAHDMVDE

SEQ ID NO: 235533 - protein, 122 aa, Glycine max
  unsure (1)..(122): unsure at all Xaa locations
  Clone ID: PAT_MRT3847_54713C.1.pep
MEGQISDSLSKQQCLKTKLTNELQNVQPPEMYAFDMQCIYRVPPVIRETNPKAYTPQIVSIGPLHKARDAGKEDIIFESMEELKVKCLKAFLNRTQIPXEPFVSHFKRWRQNSKWYAVRINI

SEQ ID NO: 235534 - protein, 693 aa, Glycine max
  unsure (1)..(693): unsure at all Xaa locations
  Clone ID: PAT_MRT3847_54714C.1.pep
MASLLSSNSAAPSHYEVNPNSRFEATLIEETCSAQKPKGTKGGETSGWNNNEREEKGTCLSWKDVRVTASVGKNGSKSILHGLTGYAKPGQLLAIMGPSGCGKSTLLDSLAGRLGSNTRQTGEILINGHKQALCYGTSAYVTQDDTLLTTLTVREAVHYSAQLQLPDTMSKEEKKERADFTIREMGLQDAINTRIGGWGCKGISGGQKRRVSICIEILTRHVYTASCLLAMXWDPSSPLFLLKRSHYHVKNEHKIRTDFASRNQSCSKVLRLYKKSCFLSSYXSDYFEPASAAIEXFKSDGFPCAPMMNHSVLLLKIGYNNFDQVTEIIVGGTVTISTEQAIRILVDPYKSSEMSHEVQKEVAVLTEKNTSSTNKKRRHAGFLNQCFALTKRSSINMYRDLGYYWLRLAIYIALAISLATIFYDLGTSYRSIQDRGSFLMFVSSFMTFMTIGGFPSFVEDMKXFERERLNGHYSVTAFVIGNTFSAIPYLLLVSIIPGAIAYYLPGLQKDFEHFVYFICVLFACLMLVESLMMIVASIVPNFLMGIITGAGIQGIMIIGGGFFRLPNDLPRPFWKYPMFYVAFHRYAYQGLFKNEFEGLRFATNNVGGGYISGEEILRDMWQVNMSYSKWFDLGILLGMIILYRVLFLINIKTTEKLKPIIVSFMSSSRSSPKPTIQIMQNPNATPLQEVQVI

SEQ ID NO: 235535 - protein, 64 aa, Glycine max
  Clone ID: PAT_MRT3847_54715C.1.pep
RIRLESQQYRSCRIPMQLLYKKFKSYKIEESVGSSVEEKNHFHLHIDFLISLDLSQIYMKMKRY

SEQ ID NO: 235536 - protein, 311 aa, Glycine max
  Clone ID: PAT_MRT3847_54716C.1.pep
MKFGKEFKTHLEDTIPEWRDKFLCYKPLKKLLKQNLPSITTAITDIPINLPLHLLQQPSSPQLLQAWFVRILNEELEKFNDFYVDKEEEFVIRFQELKERIECLKEKSSQGEVYTSDCEFSEEMMDIRKDVVTIHGEMVLLKNYSSLNFAGLVKILKKYDKRTGGLLRLPFTQLALRQPFFTTEPLTRLVHECEENLELLFPLQAEVIQSTPPPENQSRPPVDSATNALPEASSTLGDETVYIYRSTLAAMRAIKGLQKASSTSNPFSFSSLFSNQDGDGTGAVTAENSAANSPATLQNEESVGKEETDSV

SEQ ID NO: 235537 - protein, 61 aa, Glycine max
  Clone ID: PAT_MRT3847_54717C.1.pep
RPPSLGGGGGLLDDGTTSCKCFGCCCNCSGTIGLAGQLRWFGSHHYNELRIITVNNFRNGW

SEQ ID NO: 235538 - protein, 63 aa, Glycine max
  unsure (1)..(63): unsure at all Xaa locations
  Clone ID: PAT_MRT3847_54718C.1.pep
CFSLGFWXLAVAFFLLSAFACASLFGSFALVSFGWSSSCGSGCPFSFVXLAXAALRGCGGSRV

SEQ ID NO: 235539 - protein, 104 aa, Glycine max
  Clone ID: PAT_MRT3847_54719C.1.pep
YDMISSGLVIHHHDASERRRQKGILFHGHLPKQNIKKKVKFQCSAWHHLLKLRTGHAFVVAEKKDNNGGGGFWVVSDQLWGPRKNCMTGIGCRFCWCCWVGPPS

SEQ ID NO: 235540 - protein, 56 aa, Glycine max
  Clone ID: PAT_MRT3847_5471C.1.pep
EMDGGTNGDHVKVKEQISNGVADKKSTNHLMMPDDAELAIDEQKKIEGSVDGYQSG

SEQ ID NO: 235541 - protein, 69 aa, Glycine max
  Clone ID: PAT_MRT3847_54720C.1.pep
EGSFDHLFLLPKMNELNEMVIHSDGAINSVHSTQSMQIYTLMREPTDFIYKSYNSHLSCYSWASSFISH

SEQ ID NO: 235542 - protein, 80 aa, Glycine max
  unsure (1)..(80): unsure at all Xaa locations
  Clone ID: PAT_MRT3847_54721C.1.pep
XXXXXXGXIXGYFVIKQXXTIHHVTVSSRSSKYPXIXPXHPNQYVXIXXNXDHRLXXLXTGDMSNRDLVXRNSQFLXYVL

SEQ ID NO: 235543 - protein, 311 aa, Glycine max
  Clone ID: PAT_MRT3847_54722C.1.pep
MIRLNVYCSLIPSARQARPGSSYGSLIIHNHKASKFSHRISIKAKAIKDEMDGETSGSSGRSWDPGLEIEVPFEQRPVNEYSSLKDGILYSWGELGPGSFFLRLGGLWLAVFTVLGGPIAAASFNPSKEPLRFILAGGTGTLFRVSLIVVRIYLGWSYVGDRLLSAVIPYEESGWYDGQMWVKPPEILARDRLLGSYKVKPVVKLLKQTLVGTGALLVTGVMLFIFATPLENFFRTTFTKEEIKSTVQAPKVNTKLLRKEELLKLPVEVITDDDLAAAAAEAADGRPVYCRDRYYRALAGGQYCKWEDLLK

SEQ ID NO: 235544 - protein, 150 aa, Glycine max
  unsure (1)..(150): unsure at all Xaa locations
  Clone ID: PAT_MRT3847_54723C.1.pep
GTLFIVSLIVLRIYLGWSYVGDRLLSAVIPYEESGWYDGQMWVKPPEILARDRLLGSYKVKPVVKLLKQTLVGTGALLVTGVMLFIFATPLENFFRTTFTKERIKSTVQAPKVNTXLLRKRSCFXLPVEVITDDDLAAAAAXAADGRPVY

SEQ ID NO: 235545 - protein, 166 aa, Glycine max
  unsure (1)..(166): unsure at all Xaa locations
  Clone ID: PAT_MRT3847_54724C.1.pep
PTRPFTRSQGWSYVGDRLLXAVIPYEESGWYDGQMWVKPPEILARDRLLGSYKVKPVVKLLKQTLVGTGALLVTGVMLFIFATPVENFFRTTFTKEEIKSTVQAPKVNTKLLRKEELLKLPVEVITDDDLSAAAAEAADGRPVYCRDRYYRALAGGQYCKWEDLLK

SEQ ID NO: 235546 - protein, 103 aa, Glycine max
  Clone ID: PAT_MRT3847_54725C.1.pep
IGFEQSHSIIAGPGGKDHRLQPPTRQILGNGVTTGRREPAEKLYRHIHSDTGGSAITDGWNLYLRTPRSSIPFALTGRPLTTVRFRRGARGNDSVVTRTLPIL

SEQ ID NO: 235547 - protein, 94 aa, Glycine max
  Clone ID: PAT_MRT3847_54726C.1.pep
PTRYEVLNVKCNGHRHCHRHCRKCWVLKQFASLAVQLIFRYTNAVNEAKINRPLQWLNPPIHGLTIAFANASMGLLYTARVSVAAAAGGIRGFL

SEQ ID NO: 235548 - protein, 64 aa, Glycine max
  Clone ID: PAT_MRT3847_54727C.1.pep
GLKNWFITGLKCSNNYCHIIVNETSACFEEHNSKSTHLNLKCLGDTHFICSTRHCIVKNRPLGE

SEQ ID NO: 235549 - protein, 46 aa, Glycine max
  unsure (1)..(46): unsure at all Xaa locations
  Clone ID: PAT_MRT3847_54728C.1.pep
TLVFGVGPVKAPFEGAXMGVPTKNGGCKLGSKCPWDPCRCKGDQHA

SEQ ID NO: 235550 - protein, 77 aa, Glycine max
  Clone ID: PAT_MRT3847_54729C.1.pep
GKKKGALYYRESTFPGSIYRKKSPTTNVLQYFIAKEDFFITITWHKIHPPIRKRQIPTPPRLWGLISFGTKETPFFY

SEQ ID NO: 235551 - protein, 93 aa, Glycine max
  Clone ID: PAT_MRT3847_5472C.1.pep
LAIVDDIVLVISMVSMAFRLLTHVIIDLRLSGHRFYDHCYCLVDREAPHFSVHSVHRIDLRQHTSRGKLCVSNHLPAFTNKAVSLIMSVHKCG

SEQ ID NO: 235552 - protein, 51 aa, Glycine max
  Clone ID: PAT_MRT3847_54730C.1.pep
AFASSVVSFVFKFHKHHVHSSPEDLTRISTKANLSSNCVCIPLTYFKTIPI

SEQ ID NO: 235553 - protein, 47 aa, Glycine max
  unsure (1)..(47): unsure at all Xaa locations
  Clone ID: PAT_MRT3847_54731C.1.pep
XLXXLXXSKDRIKVXRLXWNAXQTXTCSSLHXSLGVGGQXGLSFTEE

SEQ ID NO: 235554 - protein, 752 aa, Glycine max
  Clone ID: PAT_MRT3847_54732C.1.pep
MNESSASNMESYLYLHPSENPAIALVSPVLDSTNYHSWSRSMVTALSAKNKVEFIDGSAPEPLKTDRMHGAWRRCNNMVVSWIVHSVAISIRQSILWMDKAEEIWRDLKSRYSQGDLLRISDLQQEASTMKQGTLTVTEYFTRLRVIWDEIENFRPDPICSCNIRCSCNAFTIIAQRKLEDRAMQFLRGLNEQYGNIRSHVLLMDPIPAISKIFSYVAQQERQLLGNAGPAVENKANEDQAQHHEAHDSVRFSPEQYKALLALIQEPSAGNTTISQSKQMASISSCINTPTNPGMSLSLRTPCVSWILDSGATDHATYSLRNLHSYKQIDPITVKLPNGQCVCATHSGIVKLSSNIILQDVLYIPSFTFNIISISKLVSSVNCELIFSSTSCVLQEVNSHMRIGIVEAKHGLYHLIPAQLTTKTVNSTITHPRCNVIPIDLWHFRLGHPSTERIQCMKAYYPLLKNNKDFVCNTCHHAKQKKLPFSLSHSHASHIFDLLHMDIWGPCSKPSMHGHKYFLTIVDDCSRFTWVHLMKSKAETRHIIMNFITFIETQYDGKVKIIRSDNGIEFSMHHYYASKGIIHQTTCIETPEQNGIVERKHQHLLNVTRALLFQASLPPSFWCYALPHATYLINCIPTPFLHNVSPYEKLHKHPCDISNLRVFGCLCYINTLKANRQKLDAKAHPCIFIGFKMHTKGYLVYDLHSNDVSISRNITFYEDHFPYLSETQHTHLEYPAPSPESFSDRNDDPQTE

SEQ ID NO: 235555 - protein, 131 aa, Glycine max
  unsure (1)..(131): unsure at all Xaa locations
  Clone ID: PAT_MRT3847_54733C.1.pep
RTGWDNTLLSKANDILCCDHARLDGWITMQVMSKMADMINSLCGGDQKLRXERTHLLTAXCSRMVISKEDVWRAEXGIRTGFPLTDICNNIINEMLIRYSYEKLLRQAKAHNMFVQSYKKSADVHEYGDDS

SEQ ID NO: 235556 - protein, 164 aa, Glycine max
  Clone ID: PAT_MRT3847_54734C.1.pep
CLSSKLNSKRMKKILVSIKFLLCLSLLCVLFLSFPLLLQSLKPSLMQFFSYMVEKSYMFLLCNGLLLVLIAINSAPINASSPPTTERAAVAVHIEEKSSQLESKEPDIAVAAPIAGEETESPHKEEKILVRVEQDNVLSDSQEEEEEKDLDTIDEDVHDTEELN

SEQ ID NO: 235557 - protein, 218 aa, Glycine max
  Clone ID: PAT_MRT3847_54735C.1.pep
TKRLDIINGIARGILYLHEDSRLKIIHRDLKASNVLLDYDMNPKISDFGMARIFAGSEGEANTATIVGTYGYMAPEYAMEGLYSIKSDVFGFGVLLLEIITGKRNAGFYHSNKTPSLLSYAWHLWNEGKGLELIDPMSVDSCPGDEFLRYMHIGLLCVQEDAYDRPTMSSVVLMLKNESAMVGQPERPPFSLGRFNANEPGCEDYSLNFLTLSDIVPQ

SEQ ID NO: 235558 - protein, 112 aa, Glycine max
  unsure (1)..(112): unsure at all Xaa locations
  Clone ID: PAT_MRT3847_54736C.1.pep
MAGIGKGSVEFEDLLPVIAGKLGGEGLIKELCKGFRLLMDKEKGVITLESLRRNSAMMGLQDLKEEELASMIXEGDLDSDGVLSEMEFCVLMFKLSPQLMKDSWFWFQQALH

SEQ ID NO: 235559 - protein, 122 aa, Glycine max
  Clone ID: PAT_MRT3847_54737C.1.pep
PRVRLMTALQLVMKKSSAHDGLVKGLREAAKAIEKHAAQLCVLAEDCDQPDYVKLVKALCAEHNVHLVTVPAAKTLGEWAGLCKIDSEGKARKVVGCSCVVVKDYGEESEGLNIVQEYVKSH

SEQ ID NO: 235560 - protein, 85 aa, Glycine max
  Clone ID: PAT_MRT3847_54738C.1.pep
GAGDLAILGLVLSTQLVLAGFHWCLPPPIRWVLRQNVELIKKKFSNFTKLINIMESNFGILLIFMVASNPCSPGTFSISLSHHFP

SEQ ID NO: 235561 - protein, 76 aa, Glycine max
  unsure (1)..(76): unsure at all Xaa locations
  Clone ID: PAT_MRT3847_54739C.1.pep
CFVAYNSFXPKDXXSQXXLXXDXXLKXXXLXXXIPRXRXPLKXXPXXRXRXXAXSXRXXATYVRGRAGTPNAIFFF

SEQ ID NO: 235562 - protein, 81 aa, Glycine max
  unsure (1)..(81): unsure at all Xaa locations
  Clone ID: PAT_MRT3847_5473C.1.pep
YIVQDTIMRARFPLLLLGLAFLASVSASFSIAYWEKENPXHNKCLQSCNSARDSYRNHACDARCKLLTVEXRRSAEGELPR

SEQ ID NO: 235563 - protein, 62 aa, Glycine max
  Clone ID: PAT_MRT3847_54740C.1.pep
NLVMLILKLGLSPQSKCYSDKTLFLSYPGEMPTRTLILTRNKCFDKLKQWRILLYGTFSSIL

SEQ ID NO: 235564 - protein, 73 aa, Glycine max
  Clone ID: PAT_MRT3847_54741C.1.pep
TRTREWVGGNSRKKEETGGQVGNLDLKRGTVSFGLWLGAVRSQSHRVATLSFIFHHSSQSRSSVSPAMSKPKP

SEQ ID NO: 235565 - protein, 59 aa, Glycine max
  unsure (1)..(59): unsure at all Xaa locations
  Clone ID: PAT_MRT3847_54742C.1.pep
EITNVSEYEAIAKQNLPKMEFDYYTSGAXDHCTLHENXSAFSTILFRSRILIDVSKIDI

SEQ ID NO: 235566 - protein, 187 aa, Glycine max
  unsure (1)..(187): unsure at all Xaa locations
  Clone ID: PAT_MRT3847_54743C.1.pep
MAVETSDKPNLPHDFDDDDDGPVIYKRYSSSKKNQLHSEVRKSSSHSHAGQSYRQISDAPSLNGQTFSMQKGSTVPSPKPSPVKPSVAISKASKSLVNTSSTKLPVANSKAPSLGDKQKMSVDVKVEPKYIERCAKNFVEDSEDDEDNKPLSXRLKNSNHDNKATPVVVKKSSEDSDDDVPLAKKLY

SEQ ID NO: 235567 - protein, 82 aa, Glycine max
  Clone ID: PAT_MRT3847_54744C.1.pep
HTLLLILITTNVLLPFSHSCYSLHRPYYSVTINTISLKPHKLTKELMISNNTFIPMLFTYAQTIHIFHEYAHFALRSLMYFF

SEQ ID NO: 235568 - protein, 99 aa, Glycine max
  Clone ID: PAT_MRT3847_54745C.1.pep
MPSLQTALPPELANNATRLYRECLRRAKYIGHRKHNTELLVDLVRQQFKKNMHETDPEKIQKLKDDAARGLINHILYESEQMTGSKFSKSKQPNLLYPK

SEQ ID NO: 235569 - protein, 158 aa, Glycine max
  Clone ID: PAT_MRT3847_54746C.1.pep
LLIVQTWIIRNYPCRACLVVTRGILVAMLSIPPSLISVTDPKDLRLGFDVHLIAIALQAIFGVSLRSIVHIWVMSKKGPLYVAMFKPIGIIFAVIMGIAFLGDSIYLGSVLGAAIVVIGFYAVIWGKSQEQAKEECEVYDSESYSPVVPLLKKKKMEE

SEQ ID NO: 235570 - protein, 136 aa, Glycine max
  unsure (1)..(136): unsure at all Xaa locations
  Clone ID: PAT_MRT3847_54747C.1.pep
IKNGLSSYQAITFSSLAFKAENVGPXALLVRMLTIRNTVTNQDSLGCPWYHQHRVNYFGSIICTAPGLSRQLVPYRVRXNTADLSTYPHSFSTNLYLLLMHYRWAMLGDYGCPYPDXVTGNEPNISKAVWFKAQPH

SEQ ID NO: 235571 - protein, 357 aa, Glycine max
  Clone ID: PAT_MRT3847_54748C.1.pep
MKELGVVAILFSIEFLDVIVYTVSKAAMKKGMNDFVFVMYSNAFATCLLLPITFFFYRKRPLPPLTYFIVAQLFINGFLSCSVQMLRFFGIGYSSPTLATAMSDLIPAFTFILAIVFRMEKLDWKTNSTRAKSIGTLVSITGALIITLYKGQAVIKNHPSNKLFPKKHVSSEQFDWVLGAVLLAGHSFVLSLLFIVQTWIIRNYPTELVIVLTRSTLVAMLSIPPSLISVTDPKALRLGFDVNLIAIAFQAIFGVSLRSIVHIWVMSKKGPLYVAMVKSIGIIFAVIMGIAFLGDSIYLGRHTFLSCLNHMKNWSVLGAAIIWGKSQEQAKEECEVYDDSESYSPVVPLLKNKRMEE

SEQ ID NO: 235572 - protein, 192 aa, Glycine max
  Clone ID: PAT_MRT3847_54749C.1.pep
MNNSSGGGGRGTLMGLSNGYCGRSPFTVSQWQELEHQALIFKYMLAGLPVPLDLVFPIQNSFHSTISLSHAFFHHPTLSYCSFYGKKVDPEPGRCRRTDGKKWRCSKEAYPDSKYCEHHMHRGRNRSRKPVESQTMTHSSSTVTSLTVTGGSGASKGTVNFQNLSTNTFGNLQGTDSGTDHTNYHLDSIPYA

SEQ ID NO: 235573 - protein, 69 aa, Glycine max
  Clone ID: PAT_MRT3847_5474C.1.pep
INITEKKNKKSNSQPQVPISHSLIINKTNKINPINYVCLQETSFVHSKTGKRVRKSKIRKVGTKYFSLI

SEQ ID NO: 235574 - protein, 167 aa, Glycine max
  unsure (1)..(167): unsure at all Xaa locations
  Clone ID: PAT_MRT3847_54750C.1.pep
MGSSPNSKPKIIRGSAGYVLEDVPHMADYIPDIPTYSNPLQNNPAYSVVKQYFVHVDDSVPQKIIANKDSPRGVHFRRAGPRQRVYFESDDVQAAIVTCGGLCPGLNTVIRELVCALYHMYGVKKILGINGGYKGFYAHNTITLTPXSVNDIHKRXGTILXSSRGGH

SEQ ID NO: 235575 - protein, 104 aa, Glycine max
  Clone ID: PAT_MRT3847_54751C.1.pep
MHAYVSSEFGSRWPREAFRVLTMRSLVVVVLALLAVSQAEEGARLLASKSLLNRYAVEGRDLTLQYNIYNVGSSAALDVELSDDSFPPEDFGIVSGMLNVKWDR

SEQ ID NO: 235576 - protein, 45 aa, Glycine max
  Clone ID: PAT_MRT3847_54752C.1.pep
SSRAAAFFFFFFFFFFVQYCPSQGLNYHRAKTHYQELMDSFLINH

SEQ ID NO: 235577 - protein, 71 aa, Glycine max
  unsure (1)..(71): unsure at all Xaa locations
  Clone ID: PAT_MRT3847_54753C.1.pep
VAQVILEDVISGRSKLKREVLVFILDTMLAAWXCHTYDMFPHRMNTDYXPRTWEVKCASWWPVVAAHNIPG

SEQ ID NO: 235578 - protein, 223 aa, Glycine max
  Clone ID: PAT_MRT3847_54754C.1.pep
MTKQQANWSPYDNNGGSCVAIAGADYCVIAADTRMSTGYNILTRDYSKISQLAEKCVMASSGFQADVKALQKVLSARHLIYQHQHNKQMSCPAMAQLLSNTLYYKRFFPYYAFNVLGGLDNEGKGCVFTYDAVGSYERVGYSSQGSGSTLIMPFLDNQLKSPSPLLLPAQDAVTPLSEAEAVDLVKTVFASATERDIYTGDKVEIVVLNASGIRREYMDLRKD

SEQ ID NO: 235579 - protein, 204 aa, Glycine max
  unsure (1)..(204): unsure at all Xaa locations
  Clone ID: PAT_MRT3847_54755C.1.pep
MASATSFLGLGLRPSVPICANRNNGIRFSQFQVSFGFRENSTSLKTLNSTPLKKREAFSNGSSRTRRNPLFSVRCTVSSSGKITQQEFTEMAWQAIISAPEVAKENKHQIVETEHLMKALLEQKNGLARRIFSKVGVDNTRLLEATDKHIQRQPKVVGESAGSMLGRDLEALIQRARDFKKEYGDSXVSVEHXVLGFAQDKRFG

SEQ ID NO: 235580 - protein, 112 aa, Glycine max
  unsure (1)..(112): unsure at all Xaa locations
  Clone ID: PAT_MRT3847_54756C.1.pep
MKGRNSYSFRGRHISLALVTLVIFTTLLWTWERNPIIAMTLRSAHEXTKVCNYAKGKWVADSKIPLYSGFICKQWLSTMWSCRMTQRPDFSFDGYRWQPENCDMQDFDQSAF

SEQ ID NO: 235581 - protein, 71 aa, Glycine max
  Clone ID: PAT_MRT3847_54757C.1.pep
VVICTSRVYPVKPLHIFVAGHYTASMRIRSIAIVWRRRCRLGIIRLLCRITRLMWLIRVTPVTRTLLGVSI

SEQ ID NO: 235582 - protein, 87 aa, Glycine max
  Clone ID: PAT_MRT3847_54758C.1.pep
LEPCCYMTPVLLSESGANAGDNWDGANLVRENASMNSNLNADSSGGSYGYGNLVSVEEGWLRVQETDSDLSAPLMDRGMNVQLGRGE

SEQ ID NO: 235583 - protein, 116 aa, Glycine max
  unsure (1)..(116): unsure at all Xaa locations
  Clone ID: PAT_MRT3847_54759C.1.pep
VWSETEENKDPGINKNRVKDIDNCVSVTSPVSGEVSDYIYRPCFSSVRFSYRNASSKYYCCKVKVSLFYNAYHYYFFCIFFLYIMLTVTKISNHVSIKFALXLKNLFTYNSLLNFC

SEQ ID NO: 235584 - protein, 114 aa, Glycine max
  Clone ID: PAT_MRT3847_5475C.1.pep
GIAWAFGGMIFILVYCTAGISGGHINPAVTFGLFLRRKVSLVTALLYMIAHYARAICRAGLAKRFHKYYYNMFGCRFNTAIDGYNKRTAFISNIISTSFLVYTVFSTTDPNKTT

SEQ ID NO: 235585 - protein, 82 aa, Glycine max
  Clone ID: PAT_MRT3847_54760C.1.pep
PLSLSSHFFFFFCSSLSLSRTIMVEDVCFLYKEILVMKPPKRSPMLLRMAVVIFSMVCGVFIFSVCLMQISTQARTTFMDFK

SEQ ID NO: 235586 - protein, 69 aa, Glycine max
  unsure (1)..(69): unsure at all Xaa locations
  Clone ID: PAT_MRT3847_54761C.1.pep
MPSRGGAPTRPEEATHPDTXKAAMAEIISTFIIVFDDSGSGITHNKLTDNGPDTPAGHISVYIRPCKRP

SEQ ID NO: 235587 - protein, 168 aa, Glycine max
  Clone ID: PAT_MRT3847_54762C.1.pep
FLCNFFFFFFSKNLRKFFLKKNRPSGLKDGLAGSTLDPLDWGAPGLVKPPFPNNLVGTKKGGFFQPANKFLLGVGKEHIWPLSPKFKGGNFGSQIRGGINFFLDLGNKSLVLRTRLKGPNWQTPWGNPGSRPIGLEAPANWSQPLLGPLRDKFGAKLPGEIFLLGTPP

SEQ ID NO: 235588 - protein, 61 aa, Glycine max
  Clone ID: PAT_MRT3847_54763C.1.pep
RLREDDRRGAIKSCIEIVRCIAEEFTKKNIERITSSCYKTWNRSNNIRQMNPNNKGENLKI

SEQ ID NO: 235589 - protein, 54 aa, Glycine max
  Clone ID: PAT_MRT3847_54764C.1.pep
QFFYGKHNNLPKHSTAPYDHALPPKALLSFPSLIITTCHITRFPAVYTVIFACP

SEQ ID NO: 235590 - protein, 114 aa, Glycine max
  unsure (1)..(114): unsure at all Xaa locations
  Clone ID: PAT_MRT3847_54765C.1.pep
GVLQHLFIIIAVLHWGAAARMLGEEDQQQQLLLQYHRGPLISGKISDNIMCGGYLKPXQGAIIYDIITFLSYNKSTDQSFVATWWGGTQYYYLLMKSSPIIILTVGTQILEENY

SEQ ID NO: 235591 - protein, 68 aa, Glycine max
  Clone ID: PAT_MRT3847_54766C.1.pep
MPLPVNPVKCIIPPKGVLIPWPPLLNVESPRPPGFFLSSDGGPYPGGNSKSLLVWTPKLAYSGQCWIF

SEQ ID NO: 235592 - protein, 218 aa, Glycine max
  unsure (1)..(218): unsure at all Xaa locations
  Clone ID: PAT_MRT3847_54767C.1.pep
APKTHYHWTKFFKLWKKKSFKRLGSIPPLSVPKLPKWKSKSSRENQALSKLYNFRSSWVTFSLSYVYXATNNFSAENIIGRGGSAEVYKGCLQNGQLIAVKKLTKGTTDEKTAGFLCELGVIAHVDHPNTAKLVGCCVEGEMLLVFQLSTLGSLGSLLHGSDXNKLDWSERDKIXLGIADGLLYLHECCHRRIISRDIKAENFLLTGDFWATDMGILD

SEQ ID NO: 235593 - protein, 158 aa, Glycine max
  Clone ID: PAT_MRT3847_54768C.1.pep
IPCIKTIGNLARTFKATETRMIGPLVKLLDERETEVSREASIALTKFACTENYLHVDHSKAIISAGGAKHLIQLVYFGEKMVKIPALVLLSYTAMHVPDSEELAQAEVLGVIDWASKQSSIANDPAIEALLLESKSRLELYQSRGPRGFHKLHLHLHQ

SEQ ID NO: 235594 - protein, 82 aa, Glycine max
  unsure (1)..(82): unsure at all Xaa locations
  Clone ID: PAT_MRT3847_54769C.1.pep
NTTFTSASXSIPSFTFLAAISSEVSASSIKISTPQPTNFSSINPSSKTFEFPFFSTSPTHILPTNALVLLKLTLHLIHIYLF

SEQ ID NO: 235595 - protein, 90 aa, Glycine max
  unsure (1)..(90): unsure at all Xaa locations
  Clone ID: PAT_MRT3847_5476C.1.pep
DSAGPRMLXLVHLNKPKEAAEKKKKFKDLKEAFDKXETERCGFITPKALKRKLKKLGESKSKVKGKVMISRFDLKGDGKLNFEKFKNMKK

SEQ ID NO: 235596 - protein, 146 aa, Glycine max
  unsure (1)..(146): unsure at all Xaa locations
  Clone ID: PAT_MRT3847_54770C.1.pep
LKTILPCSHKDXMVANYSIATQFRKFLPHYIRWHLATXLIYILPFLLTAESKYKRNPSNIHISGLIYDGRYKFWTKHEKNLALTEEEKMEVIRNKGIPADVPAKRAHEFEKHVAHEKXKDQIPADDKXHSTKVNKVAKIMNLKQSV

SEQ ID NO: 235597 - protein, 65 aa, Glycine max
  Clone ID: PAT_MRT3847_54771C.1.pep
RVIKFTLHSPQVKIICQPIRRTSLVYVATSYIVRNLLRLSHKKIVHPLWRLRSLSHNELHKLHIN

SEQ ID NO: 235598 - protein, 38 aa, Glycine max
  Clone ID: PAT_MRT3847_54772C.1.pep
ISLGAMFSSSTDPATHFQSVRCQYALLLQKNHALTITR

SEQ ID NO: 235599 - protein, 66 aa, Glycine max
  Clone ID: PAT_MRT3847_54773C.1.pep
KKEAPKSLHGPPQSCCSCEFFRSRFSTRCDHVCVLSRFIILSMDLKFLGEKAKTFDPSAIKRCSGC

SEQ ID NO: 235600 - protein, 50 aa, Glycine max
  Clone ID: PAT_MRT3847_54774C.1.pep
SSRAAAFFFFFFFFFAQLLPPPKTHLSRAFFKHLSTLKNPTTTFILTHTY

SEQ ID NO: 235601 - protein, 76 aa, Glycine max
  Clone ID: PAT_MRT3847_54775C.1.pep
VHQPMCSCRYEYRFRLEGILNSGKGARSDRVGNCPFLAVMRWSYGRSSSRTRRRKNLHQYRIDVIAGAQMKCTASG

SEQ ID NO: 235602 - protein, 77 aa, Glycine max
  Clone ID: PAT_MRT3847_54776C.1.pep
YFLNRAIGFLINWLGEKVHHQRLPVPEKVQRFSCLPVFWTLVSDLARLLRVLRGFSFWLPFYFPCYSGAWTPLVPAD

SEQ ID NO: 235603 - protein, 69 aa, Glycine max
  Clone ID: PAT_MRT3847_54777C.1.pep
HANLCAQAFFVWTESQSDRLCLGTGSEHFHFHRLWRASPPPLLVYKSCVKCAPVCARPAPKRYAGLPAR

SEQ ID NO: 235604 - protein, 80 aa, Glycine max
  Clone ID: PAT_MRT3847_54778C.1.pep
NGNKNKKRGNTGKGKTKTNTCFNKSLYKANLGRKPPEHIQFQYCIGASTTLGKMSSTKWHRHRNQLKLILLKLEAVETET

SEQ ID NO: 235605 - protein, 33 aa, Glycine max
  Clone ID: PAT_MRT3847_54779C.1.pep
CRCTLGGRNPTVYYSYFWGHKVFIHITPMVFHL

SEQ ID NO: 235606 - protein, 43 aa, Glycine max
  unsure (1)..(43): unsure at all Xaa locations
  Clone ID: PAT_MRT3847_5477C.1.pep
XNGGSICPPIXLXXXSXHXRDSIXLFARXXGVPLRNLXPLFLX

SEQ ID NO: 235607 - protein, 113 aa, Glycine max
  unsure (1)..(113): unsure at all Xaa locations
  Clone ID: PAT_MRT3847_54780C.1.pep
MNSSFRGRASSDIYTICFXDCELWNPSLTKAXMTMSFNPNPCAYAWSLEFVKRPVFLXDIICVCAWXAPPMHDGRVSTGFFFFSKEVFKHIFLLVEKKFFFFKKEEGGENFLS

SEQ ID NO: 235608 - protein, 136 aa, Glycine max
  Clone ID: PAT_MRT3847_54781C.1.pep
LEPNRLEVKRWFSLRMAMQAGELCQHQSPHCPLIFFNPIPDFGSFSGGLFLEPKIPDSFVRSISLKIHSTPFSESNPRRHRRRVPAACFLSVSLPSANLVTEPKLQNGEHVSDQVTTFNGVVLQRKVRGRGGNAVY

SEQ ID NO: 235609 - protein, 85 aa, Glycine max
  Clone ID: PAT_MRT3847_54782C.1.pep
ASFMSGEHNLYCKAELTDSTTLRWIALLKLSFITVIKSLVPLFLAILSWIFYSLIIFFSWLKHQKFIVSILYNVCLFKHQPGSHP

SEQ ID NO: 235610 - protein, 133 aa, Glycine max
  unsure (1)..(133): unsure at all Xaa locations
  Clone ID: PAT_MRT3847_54783C.1.pep
RVTLCSSLFFNFYAASCPTAEFIVRNTGSSSSSSDSSIPGKLLRLVFHDCFVEECGFFSSCAFFAXWKIQMGLKMVINNYFMICXGCDASLMLLGNNTEKSDPANRSVGGFSVIESAKRVLEFLCPGTVSCAD

SEQ ID NO: 235611 - protein, 38 aa, Glycine max
  Clone ID: PAT_MRT3847_54784C.1.pep
AQVYHKDNSGVCLLHFTLHELLKLVAKIQDYCFSNHWY

SEQ ID NO: 235612 - protein, 78 aa, Glycine max
  Clone ID: PAT_MRT3847_54785C.1.pep
FITCSSENWEIGMAPVDLFCFPLFSFLLLILRDTRGILSFVSAEIVLEVVLSNDCYECYNLRGLTRIKRSTVLKVPLA

SEQ ID NO: 235613 - protein, 71 aa, Glycine max
  unsure (1)..(71): unsure at all Xaa locations
  Clone ID: PAT_MRT3847_54786C.1.pep
TITFNKLNTRQLNNPNTLEPYQRIXSQRGPIETLKLQHPKLQCSLVTVFKPTLKHNVLHFPFQXPYPQKII

SEQ ID NO: 235614 - protein, 322 aa, Glycine max
  Clone ID: PAT_MRT3847_54787C.1.pep
MNMEGQKKNKRVAVLVGCNYPNTSNELHGCINDVLAMKDTLEKRFGFDPSNIELLTDAPHSSNKLPTGANIKEALANMVDGAEAGDVLYFHYSGHGTRIPSKKHGHPFRHEEAIVPCDFNLITDLDLRQLVNRVPKGASLTILSDSCHSGGLIDKEKEQIGPSSSTEKDSTSKPSCSTPKAIPFESIMQQLSWLTKVNTTDIGTHLLELFGSEASLRFRIPAPDLDLLEPLRPDEGILLSGCQADETSADMNPNVACGQKAYGAFSNAVEMVLRENSPLLSNRDLVIRARKKLETQGFQQHPCLYCSDENANASFLCEMFNK

SEQ ID NO: 235615 - protein, 44 aa, Glycine max
  Clone ID: PAT_MRT3847_54788C.1.pep
HGSVRFLKGVCVPILTTTNFRQSIAFLFEASTMEFPNVFLCFIC

SEQ ID NO: 235616 - protein, 73 aa, Glycine max
  Clone ID: PAT_MRT3847_54789C.1.pep
NRLYTQRVSMCWLRSWTTAFDSQRQKETGPCKLIDVVIFLFEGCFQRKADRPPSELLIALAYPTRWSTQKGSN

SEQ ID NO: 235617 - protein, 139 aa, Glycine max
  Clone ID: PAT_MRT3847_5478C.1.pep
PAVSFSTRKRREANGEVYCETTSGRARPPKHAGRTEINRQTKNPPGARYAAHPRKKPTTEKHGTAATRKTETTPTHFPQNHRNASYPGGKKMGGPMQNPKSRKKKGAPQRQWAEEKNTDTQRITPPNQGSTAPGAAPRD

SEQ ID NO: 235618 - protein, 114 aa, Glycine max
  Clone ID: PAT_MRT3847_54790C.1.pep
FIKWGKVPLFNGETPFCPILDPLLFWGAAFFLKKKFCFFAPSICILRYAKGKKTPFFQFFWGGQKKLNFAFFWGGGNGRFNCDPPRVNGGSACKIHTRPRSRGHKTKIFWSPFS

SEQ ID NO: 235619 - protein, 107 aa, Glycine max
  Clone ID: PAT_MRT3847_54791C.1.pep
GGGFRGPPRPKKGGKKHLGEFPFWKASLRKDPNRFGFCKNLGPFVPWEKDFCFGDGAVKLPMVWPQSLKPGCSFFKPEKSLLSFPLVCSENRFFCGKTDNRDQIFSL

SEQ ID NO: 235620 - protein, 73 aa, Glycine max
  Clone ID: PAT_MRT3847_54792C.1.pep
CCIHYPSQKPLDNEEPMGNGGQNLLNSYKLGFNYQNWLYGHLSHYRNLPDTENQLTTANIITAGTLGFPPTQL

SEQ ID NO: 235621 - protein, 79 aa, Glycine max
  Clone ID: PAT_MRT3847_54793C.1.pep
CLNKLSSLAIYQCTPFIHRVRWFIPQAPIYLLCRMQMGVFSSRVSRFPSQICWNQIHESCYIHAYKPCIVVDHNKSGRN

SEQ ID NO: 235622 - protein, 104 aa, Glycine max
  unsure (1)..(104): unsure at all Xaa locations
  Clone ID: PAT_MRT3847_54794C.1.pep
TVRLLPSEARRVNVTRGIGRGVLPTTAXISSVFTKGSSHINIRYRTXLGKGKKNDVITRVDPFTEAXWMLLLALRTEILSYNATDTMLTRLHDNGKSLKYVHDE

SEQ ID NO: 235623 - protein, 98 aa, Glycine max
  unsure (1)..(98): unsure at all Xaa locations
  Clone ID: PAT_MRT3847_54795C.1.pep
RFLQEEFHTARPTEGRTTTTKVAGGCPYSEAMVHERPMSTKPGDHDTGDKMTTINNISAYGLKPGLSGNRLLGTIPQTMVEQTVRRXMATTRTPSHLE

SEQ ID NO: 235624 - protein, 214 aa, Glycine max
  unsure (1)..(214): unsure at all Xaa locations
  Clone ID: PAT_MRT3847_54796C.1.pep
MPSQKVETGHQDTVHDVAMDYYGKRLATASSDHTIKIIGVSNTASQHLATLTGHQGPVWQVAWAHPKFGSLLASCSYDGRVIVWKEGNQNEWTQAHVFDDHKSSVNSVAWAPHELGLCLACGSSDGNISVLTARADGGWDTVRIDQAHPVGVTSVSWAPSMAPGALVGXGCLIQYRKLCSGGCDNTVKVWKLNNGLWKMDCFPALQMHTDWVRD

SEQ ID NO: 235625 - protein, 95 aa, Glycine max
  Clone ID: PAT_MRT3847_54797C.1.pep
RTEGGTVGGRYRYSSTIDGYHQSAIIAWIVFGIIMIGIATGHCSFCRIIIFGLAAFVPNVIADFPADTSAAFCFVISNAHISFFSCFSASCLLSM

SEQ ID NO: 235626 - protein, 301 aa, Glycine max
  Clone ID: PAT_MRT3847_54798C.1.pep
MPSQKVETGHQDTVHDVAMDYYGKRLATASSDHTIKIIGVSNTASQHLATLTGHQGPVWQVAWAHPKFGSLLASCSYDGRVIVWKEGNQNEWTQAHVFDDHKSSVNSVAWAPHELGLCLACGSSDGNISVFTARADGGWDTARIDQAHPVGVTSVSWAPSMAPGALVGAGLLDPVQKLCSGGCDNTVKVWKLNNGLWKMDCFPALQMHMDWVRDVAWAPNLGLPKSTIASASQDGKVIIWTVAKDGDQWEGKVLNDFKTPVWRVSWSLTGNILAVADGNNNVTLWKEAVDGEWQQVTTVEP

SEQ ID NO: 235627 - protein, 301 aa, Glycine max
  Clone ID: PAT_MRT3847_54799C.1.pep
MPSQKVETGHQDTVHDVAMDYYGKRLATASSDHTIKIIGVSNTASQHLATLTGHQGPVWQVVWAHPKFGSLLASCSFDGRVIVWKEGNQNEWTQAHVFDDHKSSVNSVAWAPHELGLCLACGSSDGNISVFTARADGGWDTARIDQAHPVGVTSVSWAPSMAPGALVGAGLLDPVQKLCSGGCDNTVKVWKLNNGLWKMDCFPALQMHTDWVRDVAWAPNLGLPKSTIASASQDGKVIIWTVAKEGDQWEGKVLNDFKTPVWRVSWSLTGNILAVADGNNNVTLWKEAVDGEWQQVTTVEP

SEQ ID NO: 235628 - protein, 107 aa, Glycine max
  unsure (1)..(107): unsure at all Xaa locations
  Clone ID: PAT_MRT3847_5479C.1.pep
RFKIDLNWTQHLTHEGDSYCSVVTDLGLPRLLMHLAXCEHAYVKEPALRCIFELASNTXDGKDGYNQDSEKMKQLLQERLNYISRMTVYDLHVGRLDSYILYTVMSS

SEQ ID NO: 235629 - protein, 95 aa, Glycine max
  Clone ID: PAT_MRT3847_547C.1.pep
VGPFNVFERAGLENPKGELAVSIQRGVVFFHKGGPPGGASIFVQHGKAQAVNMFGGEWGHHLYHLVWDGHTAVLMFILPPQMQKTTSLIIKVASE

SEQ ID NO: 235630 - protein, 301 aa, Glycine max
  unsure (1)..(301): unsure at all Xaa locations
  Clone ID: PAT_MRT3847_54800C.1.pep
MPSQKVETGHQDTVHDVAMDYYGKRLATASSDHTIKIIGVSNTASQHLATLTGHQGPVWQVAWAHPKFGSLLASCSYDGRVIVWKEGNQNEWDSXHVFDDHKSSVNSVAWAPHELSLCLACGSSDGNISVLTARADGGWDTVRIDQAHPVGVTSVSWAPSMAPGALVGAGLLDPVQKLCSGGCDNTVKVWKLNNGLWKMDCFPALQMHTDWVRDVAWAPNLGLPKSTIASASQDGKVIIWTVAKEGDQWEGKVLNDFNTPVWRVSWSLTGNILAVADGNNNVTLWKEAVDGEWQQVTTVEP

SEQ ID NO: 235631 - protein, 62 aa, Glycine max
  unsure (1)..(62): unsure at all Xaa locations
  Clone ID: PAT_MRT3847_54801C.1.pep
MGNHNVSLHPLLPPPPPPLALKGVPLSPPLPPPPLPLPLSPLPPPVNPPPPXKPPRXSWRSF

SEQ ID NO: 235632 - protein, 76 aa, Glycine max
  Clone ID: PAT_MRT3847_54802C.1.pep
PARNDPRDPHERFDCADAEESYGEGLIRAIPNWGEGLDYMGRIPLTTSEGSADVLSHYNGEEGTRREVNVDGEEIT

SEQ ID NO: 235633 - protein, 301 aa, Glycine max
  Clone ID: PAT_MRT3847_54803C.1.pep
MPSQKVETGHQDTVHDVAMDYYGKRLATASSDHTIKIIGVSNSASQHLATLTGHQGPVWQVVWAHPKFGSLLASCSYDGRVIDWKEGNQNEWTQAHVFDDHKSSVNSDAWAPHELGLCLACGSSDGNISVLTARADGGWDTARIDQAHPVGVTSVSWAPSMAPGALVGAGLLDPVQKLCSGGCDNTVKVWKLNNGLWKMDCFPALQMHTDWVRDVAWAPNLGLPKSTIASASQDGKVIIWTVAKEGDQWEGKVLNDFNTPVWRVSWSLTGNILAVADGNNNVTLWKEAVDGEWQQVTTVEP

SEQ ID NO: 235634 - protein, 56 aa, Glycine max
  Clone ID: PAT_MRT3847_54804C.1.pep
NISLRQEIEQLYSGATLVISYIENMKNLDEVLGRVNIDKVGSATHATKSVTVNTPW

SEQ ID NO: 235635 - protein, 175 aa, Glycine max
  Clone ID: PAT_MRT3847_54805C.1.pep
QKTNYCSVEHMVMELKKLVCGSGESSRLWLMGISTFKTYMKCKICHPSLETIWELHPFTIPVGILILSLNLDSDFQAQERNKVFFKDVAFEDRAGVRNHLTCCRDCTINFEKEAQSITSTISKKACTTSSLPTWLQNCKEERSDIMEDQENARLKDLCKKWNSLCNSIHRHPSIN

SEQ ID NO: 235636 - protein, 67 aa, Glycine max
  Clone ID: PAT_MRT3847_54806C.1.pep
KHTHEVLGIQWNSIIPNERRLRNPHQMTLKDLIRGMDQMSSIGNSVHLTVFTILHFVSHVKCYNTDL

SEQ ID NO: 235637 - protein, 277 aa, Glycine max
  Clone ID: PAT_MRT3847_54807C.1.pep
MVAKIRQSATESPNPKPEVGEIDTSPPFQSVKDAVSLFGEGAFSDEKPIFKKAKPYSAERVLAKETQLHVAQKELNKLREQVKNAETTKAQALVELERAKRTVEDLTQKIKVISDSREIAIEATAAAKCQAKQLTEEKYGVPGGTNGAWKEELESAVKRYASVMTELDAAKQALSKTRQEYDSSLDEKMFAFKQAAEAGDALKENTERASELSKEISAVKESIEQAKLASIVAQQQQTMILAEKDVLRQSYKATLEQSEKKLLALKKEFSPELAKKF

SEQ ID NO: 235638 - protein, 136 aa, Glycine max
  Clone ID: PAT_MRT3847_54808C.1.pep
LKIHTAGFYQMLPPKRALSLPIHWGKSQIGSPSPKVPAPCKSLPPSIRASWKKFFGSFFVPCWLLPPFKNTVFPLKSCLWFFTAHFHAWPQMPQEIFMVFFYPDPGVKSYGGRFGLPPLGRGEFIFDLGQGVTLFV

SEQ ID NO: 235639 - protein, 77 aa, Glycine max
  Clone ID: PAT_MRT3847_54809C.1.pep
CFCLSERAFEISHEESLNYLGKNAIGSWGVGGSAIGGKDLNCSLSCTSSEPNFCQDLKNQPSIFASFHKNFVNLFFH

SEQ ID NO: 235640 - protein, 257 aa, Glycine max
  Clone ID: PAT_MRT3847_5480C.1.pep
KNRKDRIKQEWDLALMNVMTAAACIALVVWSLAPCRSYGNTFRFDLQNTLQKLPNNIFEKSYPLREFDMQKRIQCFLFKAAELCMVGLSAGAVQGALSNSLASKKEGRLSVTVPSVSSNALGYGAFLGIYANLRYQLLCGFDRAMMTHFDVIGVALFFSTAFRILNVQLGETSKRAWLGVEADPLAQSDDLLKVYNRTSENVEKSSSKWFISKNAVVSGLGLLGIKQRNTDGSGAESSAPKTRRKRIVRKKVAAGSA

SEQ ID NO: 235641 - protein, 223 aa, Glycine max
  unsure (1)..(223): unsure at all Xaa locations
  Clone ID: PAT_MRT3847_54810C.1.pep
MPEFPLSSRLERVQNSLRENGSLVYLNVYDLTPANNYLYVFGVGIFHSGIEVHGMEYGFGAHEYPTSGIFEVEPRSCPGFIFRCSVLLGRNDMSYSEFRSFMERLSVKFHGDSYHLIXFTDEVCQQLTGKPIPAWVNRLARVGSFCNCLLPEIVFCQXSLQVAAVRHLPERVAFDDDDGSGSDGLSASIESEEDEPNHHFLTSPNGDVAFLKEKPVRLAREHL

SEQ ID NO: 235642 - protein, 56 aa, Glycine max
  Clone ID: PAT_MRT3847_54811C.1.pep
HSISLFTGLHYASLGIPFSVQKDLKLLNESSSYMYRKLRRGKVGFACPGLLGMCFW

SEQ ID NO: 235643 - protein, 71 aa, Glycine max
  unsure (1)..(71): unsure at all Xaa locations
  Clone ID: PAT_MRT3847_54812C.1.pep
MGEENEXTKTFXDLGLSESXVEACEKXGWXNSIKDXRXKXIPLXIXQXXXVIGLAQXGSGKTGAFALPILH

SEQ ID NO: 235644 - protein, 193 aa, Glycine max
  Clone ID: PAT_MRT3847_54813C.1.pep
LAIHQQWEPSVENIEGEYGRIVQNPTEEIKVLCVNTLEAGVFSSGFPTVSDPVEAYTYPEYLKSGWNLNNILSLSGSLLCFESSEASRNFAPKIHMGMCFSPLNWKVEEHHLYSLYYVHLGEPKVWYGIPGKFAINFETIWKKYLPDLQAGQPDMHDNMVMQLSCSILKAEGIPVYRCIQYPREFVLVFPGSY

SEQ ID NO: 235645 - protein, 100 aa, Glycine max
  Clone ID: PAT_MRT3847_54814C.1.pep
SLENERCLWAFALSCTKGKSFYFPYLQANQISSYLLRRTSAHQICSLPPNLSRACRRTTKLHPVMHTELVYNLALIDHVTYDELLYETLLFNLITPSILS

SEQ ID NO: 235646 - protein, 29 aa, Glycine max
  Clone ID: PAT_MRT3847_54815C.1.pep
NGSKFISMILKPLLTGKSFCFKHGAAYKS

SEQ ID NO: 235647 - protein, 163 aa, Glycine max
  unsure (1)..(163): unsure at all Xaa locations
  Clone ID: PAT_MRT3847_54816C.1.pep
RPPGEKKNPPGGPNANPPPPGGGRFLNATGPPGFPPGKRAGGPPPLKGGGPPLRPPRPSPXASGPEVGGNWERKTISPREPPCPRFPPALKRPPKRKTGAPPGAGPEIPGGPPGPPTRGEKPLGPGGKWRTPRGIPLWLKGPRRGKRIPGTQKKKKGPGVFFP

SEQ ID NO: 235648 - protein, 64 aa, Glycine max
  Clone ID: PAT_MRT3847_54817C.1.pep
LILSASSTTAHHKHHNIHTSPVLGILDGSEHRIDSSLSTDHAKKPDITLTSITLLTHTYKSSSY

SEQ ID NO: 235649 - protein, 42 aa, Glycine max
  Clone ID: PAT_MRT3847_54818C.1.pep
QKLESRGYNLQWIGSKQMGVIGVFPSNNPIYRNRLKALSLHN

SEQ ID NO: 235650 - protein, 59 aa, Glycine max
  Clone ID: PAT_MRT3847_54819C.1.pep
ILNIVNENFDFRPGMIFINLDLNRGGINRFPITAAYGHFGRQDPVFTWDVAKPLKWEKA

SEQ ID NO: 235651 - protein, 87 aa, Glycine max
  Clone ID: PAT_MRT3847_5481C.1.pep
DAWSDAWVGVEADPLAQSDDLLKVYNRTSENVEKSSSKWFISKNAAVSGLGLLGIKQRNADGSGSESSAPKSRRKRIVRKKVAAGSA

SEQ ID NO: 235652 - protein, 165 aa, Glycine max
  unsure (1)..(165): unsure at all Xaa locations
  Clone ID: PAT_MRT3847_54820C.1.pep
PPPTRPDHKALGLKKKDKVSHFRFYFHETFTGSNATTVFVVPPLPQYSSTSSFGAIGVMDNVLTAGPERTSKVVGRVEALAAATSQTEFNLLIFFNFILTQGKYNGSTITVLGRNRTSLKVREIPVXVGGTGVFRFASGYAETNTIFFDXTLGRTIECNIYVSHY

SEQ ID NO: 235653 - protein, 78 aa, Glycine max
  unsure (1)..(78): unsure at all Xaa locations
  Clone ID: PAT_MRT3847_54821C.1.pep
DQRLRIQYDGLCCRLKQLMEHNAQACNQITANLSTYMVQDNIKLFXHTRHNTDTILNNMSETTGIMSHTQALHVNIYE

SEQ ID NO: 235654 - protein, 92 aa, Glycine max
  unsure (1)..(92): unsure at all Xaa locations
  Clone ID: PAT_MRT3847_54822C.1.pep
GPPGPVCFFFPLKIFFSGGNWGWGSSSKFGPGLGGSKMSPPLGSLGSPPPQPLVLGGAPFKAPFGGAQMGGPPXNKGSKWGPNCFFNPCPCK

SEQ ID NO: 235655 - protein, 42 aa, Glycine max
  unsure (1)..(42): unsure at all Xaa locations
  Clone ID: PAT_MRT3847_54823C.1.pep
XYXANLKCKLMPXEVLGXIXXXDYXYGSHXHGTSCSFAAGXI

SEQ ID NO: 235656 - protein, 128 aa, Glycine max
  unsure (1)..(128): unsure at all Xaa locations
  Clone ID: PAT_MRT3847_54824C.1.pep
KAKPSHFIKLLKNNLKNLKPKPHRPKMEPEGGKKMEKKFLPPLSPRGPPPKKGGGGPPPPKKGLKXPPPPTKGGKTRGPPPPXNSQGAFKWAPRPPSFKSGQKKHPKPPGKTKRGGGVPQIWEKNLPF

SEQ ID NO: 235657 - protein, 101 aa, Glycine max
  Clone ID: PAT_MRT3847_54825C.1.pep
YTADSITEHTNTNINILILSLFSFSFGFDLSSSMAGDIGRALPPPDSEEFSTLFNQLLHNSPPLGMDPNHSPSDFTPHNTTININSNNNNNTGPSSPSNFN

SEQ ID NO: 235658 - protein, 81 aa, Glycine max
  Clone ID: PAT_MRT3847_54826C.1.pep
LGKLDVYINLNFWTTLVYGKITYYYKNTLCSIVYLFSKIISFTKWENSNIQVGNGTSNGVNPFSTMKYIWLYHFYKNFMGT

SEQ ID NO: 235659 - protein, 107 aa, Glycine max
  Clone ID: PAT_MRT3847_54827C.1.pep
PTRPPTRPPTRPPTRPSEALSHGENLASKSPPIPQDACKPKDSADNESKDKKIESESIKESCSSLVEEKNETLTLPDKEDSKTEIDETMNDAELNENPEKSDAVLDG

SEQ ID NO: 235660 - protein, 41 aa, Glycine max
  Clone ID: PAT_MRT3847_54828C.1.pep
PGSRCKAGKQFARSVLCAELHCSKPNRPDTCGNCDCADRTD

SEQ ID NO: 235661 - protein, 213 aa, Glycine max
  unsure (1)..(213): unsure at all Xaa locations
  Clone ID: PAT_MRT3847_54829C.1.pep
RVGHASAHASVEEALKMREMMEAKGLYPGVVTFNSILRKLCQDGRIRDANKLLNEMSERKIQADNITCNTLINAYCKIGDLKSALKFKNKLLEAGLKPDPFTYKALIHGFCKTNELERAKELMFSMLDAGFTPSYCTYSWIVDGYNKKDNMDAVLALXEFLSRGLCLDVSVYRALIRRSCKVERVEMCXRVFNHMEGKGISXXSXIYTSLAYA

SEQ ID NO: 235662 - protein, 90 aa, Glycine max
  Clone ID: PAT_MRT3847_5482C.1.pep
IIRCKDRVYQLRKYIFLKKKKKKKKKKKKKKKKKKKKKKKKGRRPLKSLINPENNFEPGPGTLPIFTFTNGKNNWDIQKQRYYLHQNVNR

SEQ ID NO: 235663 - protein, 86 aa, Glycine max
  Clone ID: PAT_MRT3847_54830C.1.pep
IISSGKALSIPNRDSKLPPPLVLAGFKLYPNPPQVQLKAKPFWEMAWILVKGPFKLELKFIMAFFLKLAVPPGQKTNFYVAICTKT

SEQ ID NO: 235664 - protein, 128 aa, Glycine max
  Clone ID: PAT_MRT3847_54831C.1.pep
KLVKGNPHFRNYYRCTSSGCPVRKHIETAVDNSKALIITYKGMHDHDMPVPKKRHGPPSASLVAAAAPASTNNVQLKKTGLLQNQETEAQCLEDTEGELTGEALDLGGEKAIESARTLLSIGFEIKPC

SEQ ID NO: 235665 - protein, 101 aa, Glycine max
  unsure (1)..(101): unsure at all Xaa locations
  Clone ID: PAT_MRT3847_54832C.1.pep
MTMVVLTPLLAIVGIILLLKLVYDNLSCYWLTPLRIKKMMDMQGVRGPKPCFFTGNILDMASLVSKATSQDMKTISHDIVGRLLPHFLLWSGQXGKRFLYW

SEQ ID NO: 235666 - protein, 116 aa, Glycine max
  Clone ID: PAT_MRT3847_54833C.1.pep
MATSDSNMLLNYVPVYVMLPLGVVNVDNVFEDPDGLNDRDGYRPIARMLSRHHAILNFTCLEMRDSEQPSDAKSGPQELVQQVLSGGWREDIRVAGENALPRYDATAYNQIVLNAR

SEQ ID NO: 235667 - protein, 75 aa, Glycine max
  Clone ID: PAT_MRT3847_54834C.1.pep
HASAHACGCGKSYPYYADSKAYVEANVRGSEHCIGCKRYQENTTFKTLSFLGVDVDALLDIAADELCMIYNVRAR

SEQ ID NO: 235668 - protein, 309 aa, Glycine max
  unsure (1)..(309): unsure at all Xaa locations
  Clone ID: PAT_MRT3847_54835C.1.pep
MATSDRNMLLNYVPVYVMLPLGVVTVDNVFEDPDGLKEQLLQLRAAGVDGVMVDVWWGIIELKGPKQYDWSAYRSLFQLVQECGLTLQAIMSFHQCGGNVGDVVNIPIPQWVLDIGESNPDIFYTNRSGFRNKEYLTVGVDNEPIFHGRTAIEIYSDYMKSFRENMSDFLESGLIIDIEVGLGPAGELRVAGEXNALPRYDATAYNQIILNARPQGVNNNGPPKLSMFGVTYLRLSDDLLQKSNFNIFKKFVLKMHADQDYCANPQKYNHAITPLKPFAPKIPIEVFLEAIKPTLPFPWLPETDMKVDG

SEQ ID NO: 235669 - protein, 245 aa, Glycine max
  Clone ID: PAT_MRT3847_54837C.1.pep
NGTYVTEKGKFFLTWYSNKLLNHGDQILDEANKAFLSCKVKLAIKVSGIHWWYKVENHAAELTAGYYNLNNRDGYRPIARLLSRHHAILNFTCLEMRDSEQPSDAKSGPQELVQQVLSGGWREDIQVAGENALPRYDATAYNQIILNARPQGVNNNGPPKLSMFGVTYLRLSDDLLQKSNFNMFKKFVLKMHADQDYCANPQKYNHAITPLKPSAPKIPLEVLLEATKPIPPFPWLPETDMKVDG

SEQ ID NO: 235670 - protein, 45 aa, Glycine max
  Clone ID: PAT_MRT3847_54838C.1.pep
FLCFITYYFNISKQSIRHIILLYIFYFILFLMIYLHFFVSQFIIV

SEQ ID NO: 235671 - protein, 49 aa, Glycine max
  Clone ID: PAT_MRT3847_54839C.1.pep
PRNIFLYLWFRGSDSIQAVDIYSYRVLSRKGNDVVNASCIPKHLESVAL

SEQ ID NO: 235672 - protein, 82 aa, Glycine max
  Clone ID: PAT_MRT3847_5483C.1.pep
WGAKPLVWGGKTKAKRGHPPPPGKNQRLHSFLKLGGKIKEGQKGGPRSQGKLFLKNIFKWKSNFLIFLGMGSQAKPNGGIGI

SEQ ID NO: 235673 - protein, 125 aa, Glycine max
  unsure (1)..(125): unsure at all Xaa locations
  Clone ID: PAT_MRT3847_54840C.1.pep
AASRRLKGIAFSEEQWLLQVSTCWVFVFALSLLLPFQICADESSNKEFVLTLYHSNFHDTVNKHHFMXSIEFYSPWRGHCXKLAPEYDKAASILSSHDPTHVLAXIDAYEENNTHLAFQYDLMGY

SEQ ID NO: 235674 - protein, 54 aa, Glycine max
  Clone ID: PAT_MRT3847_54841C.1.pep
NNTFFVPCLQTQNKLEYLQLWAHVVCLSPYAFRETTNHQIARKVAAMVQLGLLL

SEQ ID NO: 235675 - protein, 45 aa, Glycine max
  Clone ID: PAT_MRT3847_54842C.1.pep
RCVWCVSNKSALSVMRCVDRQKISPYLVAMVIIAIEVVRKRNLFG

SEQ ID NO: 235676 - protein, 93 aa, Glycine max
  Clone ID: PAT_MRT3847_54843C.1.pep
LTINILSDYLTIISSVQVLFTGNSCVKIVTLNRTQKLNTLNYEMIYQIKKNLQMCENDPSVKLVILKANGKAFSAGGDVVSVIMSSLAGHWIY

SEQ ID NO: 235677 - protein, 60 aa, Glycine max
  Clone ID: PAT_MRT3847_54844C.1.pep
ASPTDKLPTTFKRPVVARFHSQDNQRMATILVCVNWQEDMHRSCIFSRLQMFICNTCIHI

SEQ ID NO: 235678 - protein, 81 aa, Glycine max
  Clone ID: PAT_MRT3847_54845C.1.pep
NSSDYFYAGLVHSQRKIESLGWGCFCGNQVSKKEGSKRYSILLIIWNSVNLHERTYYCIGSLEELFVSSHSHTMNLIFIWL

SEQ ID NO: 235679 - protein, 115 aa, Glycine max
  Clone ID: PAT_MRT3847_54846C.1.pep
FILVSVWDFQAFTEGGGFDFVGERCQLRRLRKVKFVCLIDWSFCYLYSTECLLLPFNSDFFSLFWGFPISITEWNWIFFHLRSIHSCWVLIVLSGFLIPFGKVLTFHGSIPPQLL

SEQ ID NO: 235680 - protein, 39 aa, Glycine max
  Clone ID: PAT_MRT3847_54847C.1.pep
TWMKKTNLTSEIRNSYASPRLEQITKLACLFYTPRGGKD

SEQ ID NO: 235681 - protein, 50 aa, Glycine max
  Clone ID: PAT_MRT3847_54848C.1.pep
LAKSRTALSIITPGGTILHNELWRKFWREGNPCGCAYLQSTSLIKGMIRL

SEQ ID NO: 235682 - protein, 83 aa, Glycine max
  unsure (1)..(83): unsure at all Xaa locations
  Clone ID: PAT_MRT3847_54849C.1.pep
MLSLVRVQVAGRIPSYRDLPNQVLATLAVAAILSCAPIHLPPTXGFCLEPSSVVDWLHCSTFFGSMVVFVFGPLGKSVGAFST

SEQ ID NO: 235683 - protein, 55 aa, Glycine max
  Clone ID: PAT_MRT3847_5484C.1.pep
RLNLIIKMPIFTQMNKMKCLSYKILWTLDLEKNQSKVNLSWVKFPIQKKFGSPIF

SEQ ID NO: 235684 - protein, 296 aa, Glycine max
  Clone ID: PAT_MRT3847_54850C.1.pep
MGSTKFLLLVMVFLAVCVGTCRPWGDDVVEDGEEAKHFAAKAVHDVEEETRSWADWAQDKFSKSFGAEEDHEKQATQNMKYQAEDAASRATERVKSAASGASDYASQKATDAKEAVSGAKVIKMPTDSINNAKHTMGDTYEDAKQKMNTASDKASSMAHNAKDNTAESMEYGKDIAANAYDQGKQKINIASDTASEKFYDAKDKASDVRHKVKGAMGCGGDKANNDAKNNMGVKMEHGRDKVAETFDQAKREVGEAYVSAKNTMTEEAKAKYEAAKEKASDATGDLGAKMRNTPNV

SEQ ID NO: 235685 - protein, 84 aa, Glycine max
  Clone ID: PAT_MRT3847_54851C.1.pep
GFHLLRNSGGTEEDISSGSTADPTPDASSAGASCPAVAANVGSINGSSDGQVSKAASLSCAGSQPPWASLSTSAGGYSFGSSRS

SEQ ID NO: 235686 - protein, 71 aa, Glycine max
  Clone ID: PAT_MRT3847_54852C.1.pep
TDENRHGAIFELSHVLPTFLDHFYLCLLPTLPSTTWEANPLSSKHAQQKTMVWIRIRTHFFPHVRGPALRS

SEQ ID NO: 235687 - protein, 143 aa, Glycine max
  unsure (1)..(143): unsure at all Xaa locations
  Clone ID: PAT_MRT3847_54853C.1.pep
NADNKLSGYAPAQRVSLLMLHVAWDCAGTVHLIISTGGLSKTLWNLSELLHRADNXLYIDARLLEPLCAVFSIWSYADYYLIARRSTVQVTRGPVLCFHPATEDXHELASYGLXHDATTGSDHMTDVFRRAIVLSDRYIAALS

SEQ ID NO: 235688 - protein, 40 aa, Glycine max
  Clone ID: PAT_MRT3847_54854C.1.pep
PRKVNQVLDGMLLRVLTIFKEVEKPQKMVYLMCVHTKMEK

SEQ ID NO: 235689 - protein, 85 aa, Glycine max
  Clone ID: PAT_MRT3847_54855C.1.pep
FLSFSMAKGCSNNTYEEARKQRLEENKKRFEDLGISRISKNLTEIASSAKKKLRHVPKQKTKKTNVEVEPRRSSRVRNPVRSYRE

SEQ ID NO: 235690 - protein, 82 aa, Glycine max
  unsure (1)..(82): unsure at all Xaa locations
  Clone ID: PAT_MRT3847_54856C.1.pep
MVKRVNGTQDANIPISGVADIVRCTASYDXSMENIVNLHKCLLLITQLDGVISAGSTDTMKHVNGSAIFCKYPDYFLLSAPM

SEQ ID NO: 235691 - protein, 73 aa, Glycine max
  Clone ID: PAT_MRT3847_54857C.1.pep
SAVLRHHLIGPKEGKISAVKLQILDGTEKNPCLRVSPVSQLLSTNLHKIRARSSIGCPLLLSSRIRLEPIRLE

SEQ ID NO: 235692 - protein, 50 aa, Glycine max
  Clone ID: PAT_MRT3847_54858C.1.pep
KKLYVESTSFIAKCVIIVNLLYNMHVQSKFVQLCPFLELSSKSIRLKTNI

SEQ ID NO: 235693 - protein, 50 aa, Glycine max
  Clone ID: PAT_MRT3847_54859C.1.pep
RLYSELMRTVIWSYIILDSKYRIIDHVNWHPSRILTRPSLNIAIQSICND

SEQ ID NO: 235694 - protein, 41 aa, Glycine max
  Clone ID: PAT_MRT3847_5485C.1.pep
SEGQLVRLVCVPKSSETGVAVMLNLRDLDCYALSFGTQFSS

SEQ ID NO: 235695 - protein, 91 aa, Glycine max
  Clone ID: PAT_MRT3847_54860C.1.pep
FHKQLPQTPSSPISHYHTHIYLPSIITHTTPPNLYSQNPSLPYLSSLFITFYNPLHTTKLNLTKLYLYHSLSYYLTHLYFLSNLSLSINKI

SEQ ID NO: 235696 - protein, 296 aa, Glycine max
  Clone ID: PAT_MRT3847_54861C.1.pep
MSYMHWFIYAYIKRYTYMKIYPSNELYVIHIKTYRLKISNCLMLGWEYTTDGKCEKMPSTRLLNVKIKSLPCFETEGMIWVWPGNDPPTATLPSLLPPSGFEVHAEIVMELPIEHGLLLDNLLDLAHAPFTHTSTFAKGWSVPSLVKFLTPASGLQGYWDPYPIDMEFRPPCMVLSTIGISKPGKLEGQSTSQCATHLHQLHVCLPSSKQKTRLLYRMSLDFAPVLKHIPFMQHLWRYFAEQVLNEDLRLVLGQQERMNNGANVWNFPVSYDKLGIRYRLWRNALERGNKQPPFSK

SEQ ID NO: 235697 - protein, 271 aa, Glycine max
  Clone ID: PAT_MRT3847_54863C.1.pep
SCMKSGLFESAKPLLETYVNSAAKGDLILYTCILAHLVRCQEEKNERHLMSILSATKHKAHSFMCGLFTGPEHRGQPVLTFVREFFQGIDYELEEGAAKYFVNVLLNYLVLMGQINRARCVWKVAYENKLFPKAIVFDQHIAWSLDVRNLSVGAALIAVVHTLHRFRKRMLYYGIVPRRIKLVTGATLKIVIAQMLSSVESPFEVSKVVLRASGDSVMEWFKKPIVQQFLLNEIPSRSDILMHKLNILFPSSAPELRSLSPPKPLIASRAM

SEQ ID NO: 235698 - protein, 43 aa, Glycine max
  Clone ID: PAT_MRT3847_54864C.1.pep
ASEKGKMLWHGEGWDREDSSHVTRCAMPGSCTTRRHAHNKTDT

SEQ ID NO: 235699 - protein, 74 aa, Glycine max
  unsure (1)..(74): unsure at all Xaa locations
  Clone ID: PAT_MRT3847_54865C.1.pep
MASFDEAPHGNTKNGENIFTTKCAHCNTVSKGAGVKQXPDLNGLYDXSSGGTPGYADSTADTYMTVVREENRLS

SEQ ID NO: 235700 - protein, 101 aa, Glycine max
  unsure (1)..(101): unsure at all Xaa locations
  Clone ID: PAT_MRT3847_54866C.1.pep
GNIQLCGYSPSTPCXSQAPSQGVIAPTPEVLSEQHHRRNLSTKDIILIVAGVLLVVLIILCCILLFCLIRKRSTSKAENGQATGRAAXWKDRKRSPSSFCW

SEQ ID NO: 235701 - protein, 50 aa, Glycine max
  unsure (1)..(50): unsure at all Xaa locations
  Clone ID: PAT_MRT3847_54867C.1.pep
GLSYSLGSSFGSGAGSSSFSRTSSSRAVVVKKIETRDGKLVSESXDVLPK

SEQ ID NO: 235702 - protein, 85 aa, Glycine max
  Clone ID: PAT_MRT3847_54868C.1.pep
SSRPPTRPSTRWATYRRARVYKTEKERLFMNMKVCAREPSITETPMASHEYIHHHSLCRRRPESGHIFSSAAVAQTRTSSSPTHR

SEQ ID NO: 235703 - protein, 195 aa, Glycine max
  Clone ID: PAT_MRT3847_54869C.1.pep
GYCKIGDLAEARKIFEDMRDRGYAETTVSYGTMISGLCLHGRTDEAQSLFEEMFQKGIVPDLITYNCLIKALCKEVKIVKARKLLNFLLAQGLELSVFSFSPLIKQLCIVGNPKGAITLWKNMHDRLLEPTASIFGIEWLLNMLSWKQKPQKQTFEYLINSLSQENRVDDILGVLDFMFRIGYILEKGAIYSLGS

SEQ ID NO: 235704 - protein, 107 aa, Glycine max
  Clone ID: PAT_MRT3847_5486C.1.pep
ASTNPAPHLARFPRRGSLRLEAIRYEGPRCWGASLLCRTRAPPFRLISASITRLPLLYHRTKAYRPGHRIRPDLRALPIESITATWICLGNVSYIPPHRAKEAGLGL

SEQ ID NO: 235705 - protein, 77 aa, Glycine max
  Clone ID: PAT_MRT3847_54870C.1.pep
NMVKYRTSYIHFLYTSIITLSLWAKEWGIFLPNIRIKPECANGLKETTKLSTSLHITIKSSVMMSTTKRGHRYNSIP

SEQ ID NO: 235706 - protein, 81 aa, Glycine max
  unsure (1)..(81): unsure at all Xaa locations
  Clone ID: PAT_MRT3847_54871C.1.pep
ARXXLRXXVMSLSVXFTLGXARXSXARXEDXWHAVXPNXXXPSSLRDLLKPXXXSVXIXDHXXQIEETQCPXXXFYXEDXH

SEQ ID NO: 235707 - protein, 55 aa, Glycine max
  Clone ID: PAT_MRT3847_54872C.1.pep
LSFLVFTMAKPTLAAMNASTKTFVSVIAKVRLAICYLFCKDIYLLSLQRGQPSIQ

SEQ ID NO: 235708 - protein, 92 aa, Glycine max
  Clone ID: PAT_MRT3847_54873C.1.pep
QPPNEGMICTQTLERSAIRAGETKRPTHDKHLAQGRPPSQRMDNNLTRGAVCSKHREGFSMPPTRFGPTQPTPGLTFPLYKRRCPSSAQLHR

SEQ ID NO: 235709 - protein, 92 aa, Glycine max
  Clone ID: PAT_MRT3847_54874C.1.pep
VKIKRENNQIKHPLIFKNVPRFSPFTSSWAHPRNHLSMLFSINTHLVFDIGFPYFVDVKHYVEEAIFHDLNLNWYNRPSVVFSQPSRADSAR

SEQ ID NO: 235710 - protein, 102 aa, Glycine max
  Clone ID: PAT_MRT3847_54875C.1.pep
SSHGSSEIPRKEGKVSQTRSKKKNEGIVRKLLKCSWLWRGTKLKKNRKVCPVSLKDLGLNHQVMTLSCSLKSHSAAFFRGLASHPHCPYCRPPVQPSPQIKT

SEQ ID NO: 235711 - protein, 96 aa, Glycine max
  unsure (1)..(96): unsure at all Xaa locations
  Clone ID: PAT_MRT3847_54876C.1.pep
MKECMAIHXIGHAGLHVGNACWELYCLEHGIQPDGQMPSDQTDGGGDDAFNTFFNETGAGKHVPRANDXDLEPTVIDEGRTETYRQLFHPGQNHSR

SEQ ID NO: 235712 - protein, 95 aa, Glycine max
  unsure (1)..(95): unsure at all Xaa locations
  Clone ID: PAT_MRT3847_54877C.1.pep
GHTLHTVVLTNPIFPELVIQSSEIAGHLINDNTYMYIXNYGSKETHGAVISLESARIIHIPLNKIATNYHCNFTTAYGGQLHANANHNGSIIFWD

SEQ ID NO: 235713 - protein, 154 aa, Glycine max
  Clone ID: PAT_MRT3847_54878C.1.pep
MDTGEGKSAQAPNINAPPTGQWTTGLFDCFDDTGICCSTWLCPHSIFGPNAEIIDQGRTSSRSATYIFCGLSLVGWAFLYSFKFRSKLRALYNLPEEPCGDLCVHYCCLVFAISQERRELKNRGLDTSVGWKGNEFAMRKANLVPPPVVPAMTR

SEQ ID NO: 235714 - protein, 149 aa, Glycine max
  Clone ID: PAT_MRT3847_54879C.1.pep
NAKTVNCQFLIIVLFLVSSGSKSAIVTNTTVEIVVPDDTIDSAVINSRSINDFSLGLTSRKGGLELVSGSKSAIVTNTTVEIVVPDDTIDCVYGENGRNLVRLRQISGAKVVIHEPRPGTSDRIIVISGTPDETQAAQSLLQAFILSGS

SEQ ID NO: 235715 - protein, 51 aa, Glycine max
  unsure (1)..(51): unsure at all Xaa locations
  Clone ID: PAT_MRT3847_5487C.1.pep
RCEETVASRTHMHGLKSSETTTFFFFFFFXXXIFVSVYCCHCCPANVRRGS

SEQ ID NO: 235716 - protein, 42 aa, Glycine max
  Clone ID: PAT_MRT3847_54880C.1.pep
LNNIVSLHIRRNVFAVQSQTLPSNLLHQSCQPCSVARYVSIS

SEQ ID NO: 235717 - protein, 127 aa, Glycine max
  Clone ID: PAT_MRT3847_54881C.1.pep
FAHIQCQICHKYGHGASYCHHRHNDDYVPTQPMDYPIQYPDQNQSQTSANSNQNTNSHQIQQSHQSQYNQYPQNTNFPQANLTSVPSAPSMSWYPDSGVSHHVANVSQNIHQTIPFEGPPSVVFSQP

SEQ ID NO: 235718 - protein, 51 aa, Glycine max
  Clone ID: PAT_MRT3847_54882C.1.pep
HSNVWNSLPKIYGPGSLSLRVCVNPHVLISKYGLMCCTQCFRIYANDIGFI

SEQ ID NO: 235719 - protein, 99 aa, Glycine max
  Clone ID: PAT_MRT3847_54883C.1.pep
MFGVLPKRRILMRHGKSQGNQGLAVLHVPLCPHSINIPRAQTVFLEEEDHRREGRVVSLRTRSQDLSENFNFSPFRNCNNLNSLINYFFQLKFSIQTHS

SEQ ID NO: 235720 - protein, 106 aa, Glycine max
  Clone ID: PAT_MRT3847_54884C.1.pep
LRSNFRNVFSLISSALVLSPKLSPALQLAVSGSGHHQVFFRKLQMDSSQSAALGGNGGSGGNGTLISQNIDMAASATGADDSMQKLNQVSNSIQKTLGLIHQLYLT

SEQ ID NO: 235721 - protein, 131 aa, Glycine max
  Clone ID: PAT_MRT3847_54885C.1.pep
SKISQTRSAFCFGKKKRVTRPSFLGAHVQCKPLFGLQVLEPTPALGGPPEYPQFGVTLFWEKNLWKVISRPSEPQRILFVNKRAPPFLGGAHLKPNLPWFTWEKYLPPPPEKKRPGPLYSNRALKKNLEMG

SEQ ID NO: 235722 - protein, 200 aa, Glycine max
  Clone ID: PAT_MRT3847_54886C.1.pep
MVSSDKDPREDVLQAWYMDDSDEDQRLPHHKEPKEFVSLDQLAELGVLSWKLDADNHENDPELKKIREERGYTYMDVCEVCPEKLPNYEQKIKSFFEEHLHTDEEIRFCAAGSGYFDVRDRNEAWIRVWVKKGGMIILPAGIYHRFTLDESNYIKALRFFVGEPVWTPYNRPNDHLPARQQYVKDFVEKDVSNHAVDAAA

SEQ ID NO: 235723 - protein, 75 aa, Glycine max
  Clone ID: PAT_MRT3847_54887C.1.pep
YLKKKLPNTKHSCQQGRCKDTCKLRQDSAGCMQIDLFLLRKLPHSQTLTKRCLSLSLLCHAATCRFLGVTPLCIN

SEQ ID NO: 235724 - protein, 59 aa, Glycine max
  unsure (1)..(59): unsure at all Xaa locations
  Clone ID: PAT_MRT3847_54888C.1.pep
SLDPXTGKVXXKSPXCLTAXXSAVIEXIXNXTVCVVEFSSXXAXGRVSLRSMGXXIAXG

SEQ ID NO: 235725 - protein, 70 aa, Glycine max
  unsure (1)..(70): unsure at all Xaa locations
  Clone ID: PAT_MRT3847_54889C.1.pep
TCSNEPGTVDKVCEIVNKQLALTDDNVINGESKFTALDAYSLDTVEIVMGLDESFGITVEXYNAQTIATV

SEQ ID NO: 235726 - protein, 563 aa, Glycine max
  Clone ID: PAT_MRT3847_5488C.1.pep
MSKVLQAKLEATPTWAVAVVCFVMLAISILIEHILEELGKWLKKKHKKALHEALEKVKGELMLLGFISLLLVMFQDHISNICIPKSVASTWHPCDPGDERKKPDGYYDKCADKGKDQVAFMSEYSIHQLHIFVFVLAIFHILQCIMTLTLGRTKMSIWRKWEDETKSLGHQFHHDPERFRFARDTTFGRRHLSSWSRSPGSLWIVSFFRQFYGSLNKVDYMALRHGFLVAHLTPANEAKFDFQNYIKRTLDEDFAAVVGITPTIWFFAVLILLTNTHGWYSYFWIPFIPVIIILLVGTKLQMIITEMALNSARGGEVVKGAPLVEPGDELFWFNRPRLILFLIHLVLFQNAFQLAFFAWSTYDNGFKINSCFHKTTADIVIRLTMGVLTQVLCSYVTLPLYALVTQMGSTMKPTIFNENVAVALKNWHHTAKKHIKHNKDSTSNTPFSSRPGTPTHGMSPVHLLHKHPRHSDSPVVSPRAYNYENEQWGVEGIHSPSHHARDHDPDHEKTMQMQMQMQQQRPAPTAELPPSGLNPIRTQHEINIALSEFSFGRGHHTGSNTNN

SEQ ID NO: 235727 - protein, 58 aa, Glycine max
  Clone ID: PAT_MRT3847_54890C.1.pep
HALFSYYKGYAVLYPSKTKTLMAKRGRRNRLIYHHGLRRSLRQRWPLCNRRHCRSQST

SEQ ID NO: 235728 - protein, 69 aa, Glycine max
  Clone ID: PAT_MRT3847_54891C.1.pep
YFKKRFSKITALESQITRHYFCTKFKFTSWLIDQFQKSTSQLKYLYGNKLHPTSHTIYTTNIAHSYEPR

SEQ ID NO: 235729 - protein, 204 aa, Glycine max
  unsure (1)..(204): unsure at all Xaa locations
  Clone ID: PAT_MRT3847_54892C.1.pep
MQLAMAANAVVSPSPFRPQPFLRSSFSGVSVKLTPQSITLSRSKPLTVFAATKKAVAVLKGTSAVEGVATLIQEDDGPTTVSVRITGLTPGLHGFHLHEYGDTTNGCISTGAHXNPNKLKHGAPEDKIRHAGDLGNIVANADGVAEATTVDNQIPLIGPNSVVGRALVVHELEDDLGKGGQELSLSTGNAGGRLACGVVGLSPV

SEQ ID NO: 235730 - protein, 204 aa, Glycine max
  Clone ID: PAT_MRT3847_54893C.1.pep
MQLAMAANAVVSPSPFRPQPFLRSSFSGVSVKLTPQSITLSRSKPLTVFAATKKAVAVLKGTSAVEGVATLIQEDDGPTTVSVRITGLTPGLHGFHLHEYGDTTNGCISTGAHFNPNKLTHGAPEDEVRHAGDLGNIVANAEGVAEATIVDNQIPLSGPNSVVGRALVVHELEDDLGKGGHELSLTTGNAGGRLACGVVGLTPA

SEQ ID NO: 235731 - protein, 289 aa, Glycine max
  Clone ID: PAT_MRT3847_54894C.1.pep
ALGLLLHQSTNTSLHLKVSDFGLTAFSDHLKEDGLLHTTCGTPAYVSPEVIAKKGYDGAKADIWSCGVILYVLLAGFLPFQDDNLVAMYKKIHRGDFKCPPWFSLDARKLDTKLLDPNPNTRICISKVMESSWFKKPVPRKLAAEKVDLEEEKIESQLETINAFHIISLSEGFNLSPLFEDKRREEMRFATAGTPSTVISRLEEVAKAGKFDVRSSETKVRLQGQERGRKGKLAIAADIYAVTPSFMVVEVKKDNGDTLEYNQFCSKQLRPALKDIFWNSSQNSAPASA

SEQ ID NO: 235732 - protein, 426 aa, Glycine max
  unsure (1)..(426): unsure at all Xaa locations
  Clone ID: PAT_MRT3847_54895C.1.pep
MSEKEKGNNSEGQSTLLHGKYELGRVLGHGTFAKVYHARNLNTGQHVAMKVVGKEKVIKVGMMEQVKREISVMKMVKHQNIVXLHEVMXSKSKIYISIELVPRQRALQRRDIRYLNHRHLDTLLPPLHXATMFHRPPATCDIHPQEQPCLKLLGLKCAPVDIHPFXYHHTHVGENHEAXGVRPVMLTETVVGPSSSWMRVATPSTAEVPLRTATAFLVAAKTVRGFKRENVMDWGVSLTETPEKDDRXGDEVGTATVKRQRWPPQXLHCDGRGVCDIATKNMCVSICGWLRMKGRYIIRRRSHAFHIISLSEGFNLSPLFEEKRKEEMRFATAGTPSSVISRLEEVAKAGKFDVKSSETKVRLQGQERGRKGKLAIAADIYAVTPSFMVVEVKKDNGDTLEYNQFCSKQLRPALKDIFWNSAPASA

SEQ ID NO: 235733 - protein, 75 aa, Glycine max
  unsure (1)..(75): unsure at all Xaa locations
  Clone ID: PAT_MRT3847_54896C.1.pep
ILXIXMIXEXXXSKRKXXIVEEPSINLEXVHXYPPWXXTFEEPVYIKSRRESNPPLVSSPHGHDFKKKTKGPQLN

SEQ ID NO: 235734 - protein, 60 aa, Glycine max
  Clone ID: PAT_MRT3847_54897C.1.pep
FLLTKAGFDCSLSFIIRARILTFFFRIIIINRFLLYRYFLNYMSIPKLVSRNDQSISFSS

SEQ ID NO: 235735 - protein, 79 aa, Glycine max
  unsure (1)..(79): unsure at all Xaa locations
  Clone ID: PAT_MRT3847_54898C.1.pep
MGKKEKAKXRSEQRLPXLHFRGPFPILINQXWWSXQTVAXVTGXXRXXGFEICRQLPXHXLTVILXSKSYAVLNHSGLQ

SEQ ID NO: 235736 - protein, 95 aa, Glycine max
  Clone ID: PAT_MRT3847_54899C.1.pep
LPELEIVDSSSVIERLLLREIQLQQSGKSGIDSMATSQKLKGDLWAVFSVLSKDMQQLMLSNPERASLLQPSPESPKLPGHPLIQVAVASSTSPQ

SEQ ID NO: 235737 - protein, 55 aa, Glycine max
  Clone ID: PAT_MRT3847_5489C.1.pep
IPSILICFCQLCIPICFQFCAFPLGSVLLSSFGCVVFNFNTYVHKCSCLFLRDFR

SEQ ID NO: 235738 - protein, 68 aa, Glycine max
  Clone ID: PAT_MRT3847_548C.1.pep
FHSTFKKLPYFDFWYSIFLPPLYLSPLVFQIVRAFWGLPRKLSPRAVTFLWVFYPGFGFGAKLWFPFG

SEQ ID NO: 235739 - protein, 54 aa, Glycine max
  Clone ID: PAT_MRT3847_54900C.1.pep
WSLIIQLVSFLDSHVQDPPIPELRSMVNPCILLCGIDQFGVLSIPAGEHEQAHW

SEQ ID NO: 235740 - protein, 56 aa, Glycine max
  Clone ID: PAT_MRT3847_54901C.1.pep
PTRPLYLMRVRGVWCVDNKHSNPPKQSQITCPPHLSITSYNTRSTNQIPCLSCPPT

SEQ ID NO: 235741 - protein, 46 aa, Glycine max
  Clone ID: PAT_MRT3847_54902C.1.pep
GETPKQSQWNCLFTIIFVPLRWKHYRFKKWHYYFLVSCKTYPKFRS

SEQ ID NO: 235742 - protein, 75 aa, Glycine max
  unsure (1)..(75): unsure at all Xaa locations
  Clone ID: PAT_MRT3847_54903C.1.pep
PPGFFFPVLVEGATNFFYQTLFLDVKGNFXKKGTPKGFXKGGFFFSPKFGEDRGWGSPRSPLKCWNWENWEGGFP

SEQ ID NO: 235743 - protein, 75 aa, Glycine max
  unsure (1)..(75): unsure at all Xaa locations
  Clone ID: PAT_MRT3847_54904C.1.pep
SSFMTNFWVEKLFENHVFSPIYGAFCKFVHISRVSLIFMQQIFPXLGFKEVSTSVSGEKMKNKKVVVAGVSLNKT

SEQ ID NO: 235744 - protein, 107 aa, Glycine max
  Clone ID: PAT_MRT3847_54905C.1.pep
PCFRSFPETSVIARPGKEQRHRGLSPGAIVAMVVANCVALLVVASFVVAHCCARGRGSSLVGSGESYGKRKSGSSYNGSEKKVYGGGESDETSGTNRSRLELFERWS

SEQ ID NO: 235745 - protein, 60 aa, Glycine max
  Clone ID: PAT_MRT3847_54906C.1.pep
TYTSQTSFTMYERPRENWHSLRALFSFFFYSIYLLSGMCTSKREISGESERRDSERCCPI

SEQ ID NO: 235746 - protein, 73 aa, Glycine max
  Clone ID: PAT_MRT3847_54907C.1.pep
KGGREKNECNKELVCGPAEPLIRLPFHLVKGIKDERANPGICLYCTRRNAAMVGLSTIHFPVLCIHYDFYFFD

SEQ ID NO: 235747 - protein, 31 aa, Glycine max
  Clone ID: PAT_MRT3847_54908C.1.pep
YECGWVYNFLKNLKKLNISSCQNICLTIWGK

SEQ ID NO: 235748 - protein, 139 aa, Glycine max
  Clone ID: PAT_MRT3847_54909C.1.pep
GKMRYYESTLLSAYKAYLQRLVALEKKPLFQHVAVRCICSLLDANPHFNFRESLLDATVRNISSPNDAIRKLCCSTINSLFANEGKHGGEVTVEAVRLIADHVKAHNCQMHPDSVDVFLSLSFDEDLVMAKRIEDDQKF

SEQ ID NO: 235749 - protein, 41 aa, Glycine max
  unsure (1)..(41): unsure at all Xaa locations
  Clone ID: PAT_MRT3847_5490C.1.pep
LERGHARGESRLYQPIHPETXLAAGINYAAQEFFFTKNGHV

SEQ ID NO: 235750 - protein, 184 aa, Glycine max
  unsure (1)..(184): unsure at all Xaa locations
  Clone ID: PAT_MRT3847_54910C.1.pep
MIRRIIAVVSRSYYTSRSKKPSLYSKISPLGNPNTSVVPVLDDWVFKGNKLRVAELQRIIRDLRKRSRFSQALQISEWMHNKGVCIFSPTEYAVHLDLIGKVHGFSSAETYFDALKDQHKTNKTYGALLNCYVRQRQTDKALSHLQKMKDLGFASSPLTYNDIMCLYTNIGQHEKVXDVLREMK

SEQ ID NO: 235751 - protein, 61 aa, Glycine max
  Clone ID: PAT_MRT3847_54911C.1.pep
MGTLVIIALATALISTLMSAEISAKPSESTRLLVAMPKTKKMKIIFERGSASLRKPRFEAR

SEQ ID NO: 235752 - protein, 115 aa, Glycine max
  Clone ID: PAT_MRT3847_54912C.1.pep
KKMPFGFLPNSYPIPRVFWWGQQKMLVFEEGHPDALFLGTKNLAYFMVLRIWNWNLLRGNFFENGGNPPNVEKSFPFRGEPRAKEVFNKSWAPPGWFPGKNLGIKKPPQSGLNPP

SEQ ID NO: 235753 - protein, 61 aa, Glycine max
  Clone ID: PAT_MRT3847_54913C.1.pep
PNPPCFEDFFLFRKIQRGFPPLPYIFLTPGDSSWFFGPPFVFKTRFFFFPSFFVGPPFPPP

SEQ ID NO: 235754 - protein, 77 aa, Glycine max
  unsure (1)..(77): unsure at all Xaa locations
  Clone ID: PAT_MRT3847_54914C.1.pep
TDLGRAPYQDVDDFYRPCDPYEANWRLYGHARASSDXDMTGIRSGYXLPEPARGITRAKDGMNRRDWLSEAGAHSAS

SEQ ID NO: 235755 - protein, 74 aa, Glycine max
  Clone ID: PAT_MRT3847_54915C.1.pep
LHHNAACLFFHLKPKMDKLEFVVSHKTKFVKCAHIVKWESKHALNSQYNTPIHVCTLNHVLFKPLLVETGFFSS

SEQ ID NO: 235756 - protein, 165 aa, Glycine max
  unsure (1)..(165): unsure at all Xaa locations
  Clone ID: PAT_MRT3847_54916C.1.pep
MASAHGLAPIFKLGFVFSSVSPSQRKRHPLMFPASHCGFSLKFYGGLSARSCKFKNPSFVSAKHGSLRGFRALKSVEMDQYVTSNDEMSDGFFEAIEELERMTREPSDVLEEMNDRLSARELQXLVLVYFSQDGRDSWCALEVFDWLRKENRVDKETMELMVAIM

SEQ ID NO: 235757 - protein, 37 aa, Glycine max
  Clone ID: PAT_MRT3847_54917C.1.pep
VHDLNIMLPWLEKLKHSLVEVLTIPFRRQKFVEVFSC

SEQ ID NO: 235758 - protein, 68 aa, Glycine max
  Clone ID: PAT_MRT3847_54918C.1.pep
FQLRGVSDTESATHSEYIMLLRYNSRFQRPTAILINRTMATRLRHLLLYPDSEKIATPMPMADRPLCR

SEQ ID NO: 235759 - protein, 71 aa, Glycine max
  Clone ID: PAT_MRT3847_54919C.1.pep
MKSLKDKDPNPSKFENSFGQAPFDLESTTQELKSDLKDLYRHPSVPVDVSGYRIAVVIHVAYILKIGFRKI

SEQ ID NO: 235760 - protein, 145 aa, Glycine max
  unsure (1)..(145): unsure at all Xaa locations
  Clone ID: PAT_MRT3847_5491C.1.pep
GPTPQPKGFFPIPKTXLFWGRGPPVPKTRYPLFPFAISLKEKFPGFLKKVPPPGSRVGPGQSPFENGEFWVGNAEKFRLFPFQRLAKKMQKKGWPPKWFXKDGGGCFPNIGGFWGPKEKNFWGGIPFFFGQRCGFPSWLGGAVSF

SEQ ID NO: 235761 - protein, 68 aa, Glycine max
  unsure (1)..(68): unsure at all Xaa locations
  Clone ID: PAT_MRT3847_54920C.1.pep
MAASVSTVGAVNRALLNLNGSGPGVSAPSSSIFGSSLKKVIRSRVLNTXISSGSLKTVAVEEKLEIEE

SEQ ID NO: 235762 - protein, 207 aa, Glycine max
  Clone ID: PAT_MRT3847_54921C.1.pep
TRLLTLSTRKKISSILEHLNRKWGNSSIAAGEVMLFPYGIQRENLVNCPRWTQESTLSAADIYAMIGSPPIFRLRYGWFSNTELGLLNMQVPVASGSMLRQYKSTVDNAKDQIVNSVSFPTPLTNTHSMELSEDCRTSMNRNRTLITASTEESRDPTANTLWHGKDVRDGAVSTQLEDMDELKISSGAGLSAGEWADSLTNISVGDL

SEQ ID NO: 235763 - protein, 500 aa, Glycine max
  Clone ID: PAT_MRT3847_54922C.1.pep
MVLEALEHQLLKDRKKNVRKRPLQGGNCLPAAPTAVSNQSRASGNDARAVKLVLVDNQNILKLGPFKPSTKRTVNMGVNHSNTNPDSNTMKPTRQRKKSGTISTAAYKKWEKAAIAGVSLVADAAEHLERAATVKEIEQDQENPGERCSDPADYVLPSLAKCPQKQFVDNNVNNIMKLKLQLFPIDEPTRRALEMDKHNPHLELTLSTRKKISSILEHLNRKWGNSSIAAGEVMLFPYGIQRENLVNYPRWTQESTLSAADIYAMIGSPPIFRLRYGWFSNTELGLLNMQVPEASGSMLRQYKSSVDNAKDPIVNSVSFPTPLTNTLSMELSEDCRTSMNRNHTLMTASTDLSNARGNNVYLNTSTVESRDPTANTPWHGKDVRDGAVTTQLEDMDELKLSSGAGLSAGEWADSLTNISVGDLLSGVSQDLDNCMNPPIAESCCDVQQIPFSSDSFDAAVAAHMCGHQDRMGRSSLGVGMSSIWDAEETCDAFLFKKDPI

SEQ ID NO: 235764 - protein, 58 aa, Glycine max
  Clone ID: PAT_MRT3847_54923C.1.pep
KRAPAFLFTPRFNFMREQFWGSPLGALIMTAKKKFFYLGKGGGLAFSLRFPKQTGFFG

SEQ ID NO: 235765 - protein, 84 aa, Glycine max
  Clone ID: PAT_MRT3847_54924C.1.pep
PRVYIGCMKSGEVFSDLTHKWYESDWWKSGDGKSYFRHASGEMFVISRAIAQFISINKSALRTYAHDDVSVGSWMIGLAVNHVN

SEQ ID NO: 235766 - protein, 43 aa, Glycine max
  Clone ID: PAT_MRT3847_54925C.1.pep
SWLKTPYFSYGCRYARPIETGLFRHDLTPWRGLVFFLGGGNLI

SEQ ID NO: 235767 - protein, 140 aa, Glycine max
  Clone ID: PAT_MRT3847_54926C.1.pep
MASSISQGLVFTTAMVVSTTVLYLAFSGQKTSPPFQIPPNSSSSHSNKQILRSCIYSEEKKREMKKNKKKVKFAENVMVKLVERNSKVKNREEQGRQYRVSLSSSECRNEIPEKREMPANRIALYNGILKDRVHRMACCH

SEQ ID NO: 235768 - protein, 110 aa, Glycine max
  unsure (1)..(110): unsure at all Xaa locations
  Clone ID: PAT_MRT3847_54927C.1.pep
GGILAFPCNQFGEGEPGTHVPIPGFVCPPFXFEFPLFDKKCGPPPFQVCPPVIGXIEVNGARACPLFKFLKSGQWGIFWGDIQWDFAQFFFSQDGPVVDPFFPPPFPFSL

SEQ ID NO: 235769 - protein, 66 aa, Glycine max
  unsure (1)..(66): unsure at all Xaa locations
  Clone ID: PAT_MRT3847_54928C.1.pep
HGSLLERSCCRXXFCVRVXXXXCRFSRQYRAFRRYHSNGYCVRAGSIAVPFSNLQCTVSQTDAPAE

SEQ ID NO: 235770 - protein, 89 aa, Glycine max
  Clone ID: PAT_MRT3847_54929C.1.pep
KAYFLLFHMVSSRDTCCLASNLSARNVRIYIGRNAISTSGQAPSLLQVSLFPDNDYDGAPITRRCNKKWQRQTHFRTVIVNMKATMSID

SEQ ID NO: 235771 - protein, 97 aa, Glycine max
  Clone ID: PAT_MRT3847_5492C.1.pep
GIRFFLSPMVPYAHTASLCEVDQFCDPFFGQGFGTGWWHFSPKRPTSFFHSNSHFFLAGGRFPARLRRLMVLEELVPQWGPPMCFPTKFLGPIIWSD

SEQ ID NO: 235772 - protein, 59 aa, Glycine max
  Clone ID: PAT_MRT3847_54930C.1.pep
LNKSWEPRLSLLIFFTPTELPKIRTHTFQRRPMTKCKKKSQKEHSVTPLVKEELYSKKH

SEQ ID NO: 235773 - protein, 244 aa, Glycine max
  Clone ID: PAT_MRT3847_54931C.1.pep
MVLHRELDHLFSSPFVDPPKDDAKSSGMSIEKKIEFLESLTGKVTNRRSRRWLNDRLLMELVPRLNAEEIRGLFAPPPWGDEVPPSTFSMTNMEEWDRFRNIDMDKEVNIIHSLENSIEKRKGHIDADKMAVLNGWHRIDCRTRDALRRSCLSELIEGYEECVRAFITESTDGDILELQIQDPFHRLLLHGVCEFYNLASDTVSGYNGVESSRITKIKRKKKGSPVLPNITLSHFLKMSKEGSW

SEQ ID NO: 235774 - protein, 40 aa, Glycine max
  Clone ID: PAT_MRT3847_54932C.1.pep
LCHVRGSKAPIYANCVVSQEGNIGSRSEIPQGRLGDRDSD

SEQ ID NO: 235775 - protein, 49 aa, Glycine max
  unsure (1)..(49): unsure at all Xaa locations
  Clone ID: PAT_MRT3847_54933C.1.pep
XIPRVDMSNXDNVDXNLXLTXDYXNFARNXXRSXXXNPQPHTQRLRHRA

SEQ ID NO: 235776 - protein, 51 aa, Glycine max
  Clone ID: PAT_MRT3847_54934C.1.pep
YHGLGHMPYQLIRWDKSIHPFNMEGPRATNNHFNHAFGYVIIMNDPSFLFT

SEQ ID NO: 235777 - protein, 80 aa, Glycine max
  Clone ID: PAT_MRT3847_54935C.1.pep
KLRAPERAGILTGAKVTSELGRRFQLPIAIQEEYYLQGHEGRGNTLFFHTSFRELKGKNNFRPCCQAPFLDDTLAKQKKK

SEQ ID NO: 235778 - protein, 88 aa, Glycine max
  Clone ID: PAT_MRT3847_54936C.1.pep
MMTVLTRYIHSTPSISKIKSVSIRGRDLFSSNVCSKVEEALNVPPPPTDKVLLSGSDLLVVSHSFIEALERIISAQNPYRPGRSFLHH

SEQ ID NO: 235779 - protein, 92 aa, Glycine max
  Clone ID: PAT_MRT3847_54937C.1.pep
EAGASAGEGTNHRRIIFTTCVIYRRDHKQKGGKSLSFGAIHILIEAHFHRSIVQSPSGMPPLWIPEILAHTGLSSAHFSGSRNVRHKSPKTV

SEQ ID NO: 235780 - protein, 225 aa, Glycine max
  unsure (1)..(225): unsure at all Xaa locations
  Clone ID: PAT_MRT3847_54938C.1.pep
MATVTASELQLQDHRFSRKKLAGIVVGCTIFIIAVTVFGLIFCIRRKKLKQSEANYWKDKSKEDDIDLPIFHFLSISNATNQFSESNKLGQGGFGPVYKGILPDGQEIAVKRLSKTSGQGLDEFKNEVMLVAKLQHRNLVKLLGCSIQQDEKLLVYEFMPNRSLDYFIFDSTRRTLLGWAKRFGIIGGIARGLLYLHQDSRLXIIHRDLLEDEEIFIIGINGMWG

SEQ ID NO: 235781 - protein, 82 aa, Glycine max
  Clone ID: PAT_MRT3847_54939C.1.pep
FSFGFFFFPHPFFFLFRVCGSSGDQKFFFFLTPLKTHFPWPPLKRSLKKRAKAPEKFKTQTVRFLPNPLKSHLERAPFFYFF

SEQ ID NO: 235782 - protein, 76 aa, Glycine max
  Clone ID: PAT_MRT3847_5493C.1.pep
WYVNKQNTFYTLATTNYMPLEKILSQYIKINKKKIMARSDNYHTRSTKLLRCVLSRFQLQYKLFKLIFGKLINSLK

SEQ ID NO: 235783 - protein, 47 aa, Glycine max
  Clone ID: PAT_MRT3847_54940C.1.pep
NRNIEKLGWIFIMKIEQLSKIANDSKDLRIKHGKTTCKVRSTTSRPN

SEQ ID NO: 235784 - protein, 56 aa, Glycine max
  Clone ID: PAT_MRT3847_54941C.1.pep
KSTISYTDHSDQLCGELMIQTFHHFVHLLEKMSPSFNLRISTHGEGVASSTESTEL

SEQ ID NO: 235785 - protein, 77 aa, Glycine max
  Clone ID: PAT_MRT3847_54942C.1.pep
ISSPAVATVNRAGACMVAPFTGLKSMDGFPTINTNDDVASIAIYGVTVQCIQVWTPVGRRKFDTLSYLPDLDDAAIG

SEQ ID NO: 235786 - protein, 74 aa, Glycine max
  unsure (1)..(74): unsure at all Xaa locations
  Clone ID: PAT_MRT3847_54943C.1.pep
REQLQLLQEPGSYVMEPAKEMGNNHVLVYVHPXGKYADDIDNNIDITHITPSTIPALRNDTHVLLLNPAKPPPI

SEQ ID NO: 235787 - protein, 73 aa, Glycine max
  Clone ID: PAT_MRT3847_54944C.1.pep
KNLSLPTQLPPTGRLWKASLPLMPLCLIGVMRFKLAILLLTEKDIGALAMITVEESRVLFLVIPSLSSEQLVP

SEQ ID NO: 235788 - protein, 120 aa, Glycine max
  Clone ID: PAT_MRT3847_54945C.1.pep
MLALVPMASSVKLLFLCFLSLFISFSIAQPSFRPKALVLPVTKDVSASVPQYVTQIKQRTPLVPVKLTVDLGGGYFWVNCEKSYVSSTSKPARCGSAQCSLFGLYGCNVEDRFCSRSFSN

SEQ ID NO: 235789 - protein, 438 aa, Glycine max
  Clone ID: PAT_MRT3847_54946C.1.pep
MAASVKLLFLSFLSLFISFSIAQTSFRPKALVLPVTKDVSASVPQYVTQIKQRTPLVAVKLTVDLGGGYLWVNCEKGYVSSTSRPARCGSAQCSLFGLYGCSTEDKICGRSPSNTVTGVSTYGDIHADVVAVNSTDGNNPTKVVSVPKFLFICGSNVVQKGLASGVTGMAGLGRTKVSLPSQFASAFSFHRKFAICLSSSTMTNGVMFFGDGPYNFGYLNSDLSKVLTFTPLISNPVSTAPSYFQGEPSVEYFIGVKSIKVSDKNVALNTTLLSIDRNGIGGTKISTVNPYTVMETTIYKAVSEVFVKEVGAPTVAPVAPFGTCFATKDIGSTRMGPAVPGIDLVLQNDVVWTIIGANSMVYVNDVICLGFVDAGSSPSVAQVGFVAGGSHPRTSITIGAHQLENNLLQFDLATSRLGFRSIFFDHSNCANFNFTSSA

SEQ ID NO: 235790 - protein, 128 aa, Glycine max
  Clone ID: PAT_MRT3847_54947C.1.pep
LEPPSSLLVITYSIYYIQKIASYILHQFNVVLVHHSFCPRNIMGFDISKPGLRLGLGLGLHDDHSSENCMKTNEQSQRQRQSQKKKETDPCNKAYPSLKLGPPDDEANNNNQQITNIESDEYYYFHPH

SEQ ID NO: 235791 - protein, 99 aa, Glycine max
  Clone ID: PAT_MRT3847_54948C.1.pep
LDLSPHNFQKKKKKKKGSIFILSFLIKSLINQNIFSNLKSIELTSFISSMPFRPLTLPKLFFFRTLKSIKTNHLTFYSELHDFDPIRVCRQKTLSSQIK

SEQ ID NO: 235792 - protein, 155 aa, Glycine max
  unsure (1)..(155): unsure at all Xaa locations
  Clone ID: PAT_MRT3847_54949C.1.pep
MKDLEDGSQMMVVNFYPPCPEPDLTLGMPPHSDYGFLTLLLQDQVEGLQIQFQGQWFTVQPINNAFVINVGDHLEIYSNGKYXSVLHRVIVNAEKKRTSVASLHSLPFNCTVRPSPKLIDEANPKRYADTNFDTFLAYVSTREPKRKEFLDSRKL

SEQ ID NO: 235793 - protein, 75 aa, Glycine max
  unsure (1)..(75): unsure at all Xaa locations
  Clone ID: PAT_MRT3847_5494C.1.pep
HGSMAITKAFGKEHVTGHKANCSISDEFMDISHECVDIXRLNXFAFVTIAIIIDGVGAQRMPTRLRFDEIYNITC

SEQ ID NO: 235794 - protein, 178 aa, Glycine max
  Clone ID: PAT_MRT3847_54950C.1.pep
TAARRRQKGDNGETVSASQKFRRFMIYVHAKGMIVDDEYVILGSANINQRSLAGSRDTEIAMGAYQPHHTWSQKKGHPHGQVYGYRMSLWAEHTGTIEACFKEPECLECVKSVNKIAEDNWKKYTADDYSPLQGHLMKYPVSVNANGKVKSLPGFESFPDVGGKVLGSRSTLPDALTT

SEQ ID NO: 235795 - protein, 80 aa, Glycine max
  unsure (1)..(80): unsure at all Xaa locations
  Clone ID: PAT_MRT3847_54951C.1.pep
LHIENFVIKKTLSRKKAVCQVKTCSRNQKRKNKKHSXLRKEAPCACLRFFCFSNTPLTEMGHTRGTYFCLFLLSILYFAT

SEQ ID NO: 235796 - protein, 198 aa, Glycine max
  Clone ID: PAT_MRT3847_54952C.1.pep
GKKGYGLKAIENVAQGQFLIEYVGEVLDMQAYEARQREYALKGHRHFYFMTLNGSEGTDASAKGNLGRFINHSCDPNCRTEKWMVNGEICIGLFALRDIKKDEELTFDYNYVRVFGAAAKKCYCGSPNCRGYIGGGDPLNAELIVQSDSEEEFTEPVMLTKDGEIEDSVPTPEYSNNVDTQSAKHMLKDRDILDNSTT

SEQ ID NO: 235797 - protein, 46 aa, Glycine max
  Clone ID: PAT_MRT3847_54953C.1.pep
FLISVNVQSCNLQHPCLRTLLYNLISLLLCHLNKIHYTQLTPLNMH

SEQ ID NO: 235798 - protein, 111 aa, Glycine max
  Clone ID: PAT_MRT3847_54954C.1.pep
RCSCILHQRVWSPANLLPSTFRQFSILHFFRSPMNLLPRAVHASSTKESGAPQIYCLALFANSPFSTFICSPMNLLPSTVHASSTNESGAPRIYCLARFADSPFSTFFGAL

SEQ ID NO: 235799 - protein, 89 aa, Glycine max
  unsure (1)..(89): unsure at all Xaa locations
  Clone ID: PAT_MRT3847_54955C.1.pep
MWRSFVGDLGFEVTKMTPPYIKCTDSFFIAFGNPGGDTINYEALPHKLKQIGEIQEKVVLNFLQEEFLTAXLNQVRTATSLTSDGCPYL

SEQ ID NO: 235800 - protein, 205 aa, Glycine max
  Clone ID: PAT_MRT3847_54956C.1.pep
MGKYMKKSKIAGDVAAVIMEAPPPHSHLGVRTRAKTLALQNTSPDSSAYLQLRSRRLLKLPPTPPENPRRSAAETAANSRLAKTTSSRNAEKFASFDDDNNTECSFGENFLDAEPREERSTRESTPCSFIRDSNAIHTPGSTTRRVTRQIIHEHIQRNIPTAYEMEEFFAYAEKQQQTIFMDKYNFDIVNEVPLPGRYEWVPVLH

SEQ ID NO: 235801 - protein, 136 aa, Glycine max
  unsure (1)..(136): unsure at all Xaa locations
  Clone ID: PAT_MRT3847_54957C.1.pep
VLLVVRVGALVFLVLXXGXGVXXGCRAVLFCRVACCCSRLGCGPXVSAGGAGGAARVXLVRCARCFLVRSLAPGRPCFLSACVVVACASLSLWWFAAGSSLLPLVALSFVAVGALLLLPVSGFXASPFRVFWGRVG

SEQ ID NO: 235802 - protein, 99 aa, Glycine max
  Clone ID: PAT_MRT3847_54958C.1.pep
IGKGAPPPKKKTPRGKGKPNPPGGKKKTKLKSPFPPPPPGGGGGGGGPHIPGEKGPPPKIGPKHGRPFGGKRGPPPPFFSGGKNRPCSPRKKPGPPFGG

SEQ ID NO: 235803 - protein, 57 aa, Glycine max
  Clone ID: PAT_MRT3847_54959C.1.pep
EEVLNNALGRVTTIEQDLVATKKALDDALARQVELQAQIDKKKKKKNKLFRFRCFAA

SEQ ID NO: 235804 - protein, 151 aa, Glycine max
  Clone ID: PAT_MRT3847_5495C.1.pep
DPLRIMWGQMVNLSPNELQSIEGVEAMQLLSGLNLSHNKFGSFTALGPVRLLKSLKVLNISYNELGSHSIDTTRYLCSSPVSHTEEFAWDRFEILTGSINATKFWEAFLIFGSLTLTELNITGNAVADENFRSFLVKVLPTLRWLDDEELS

SEQ ID NO: 235805 - protein, 108 aa, Glycine max
  unsure (1)..(108): unsure at all Xaa locations
  Clone ID: PAT_MRT3847_54960C.1.pep
VHHVPVKVAHIVHTFRFQQPXAFDHQQSVIQINRFINICTPKFDAEXQELFKQYIQGXTPHLLSKITDFXFFVGESMGDDXXLVFAXYKDXAADLTFLYFAHALKQVK

SEQ ID NO: 235806 - protein, 312 aa, Glycine max
  unsure (1)..(312): unsure at all Xaa locations
  Clone ID: PAT_MRT3847_54961C.1.pep
MALQFLKHPLTISRGLHNETTLTFISRLRNPKLLFSVRCEDNAQIATSFRSYATAKSEKVLQVRKKKRLDEICVEKYQQYSRSVIQSWILQGKVYVDGKVINKAGTPVPGKAVVEIKADVPKYXGHKLEAAIELLGVDVAGKVALDSGLSTGGFTDCLLQYGASHVYGVDVGYGQVADKIRRDERVSVIERTNLRYLAELPQNVDLVTLDLSFISILLVMPAVVNAMKENAALVTLVKPQFEARRSQVGKGGIVKDPAVHQEVLEKIIKGVENFGFCCKGWIESPLKGAEGNTEFLVHFNRTHNIEVPEDLE

SEQ ID NO: 235807 - protein, 77 aa, Glycine max
  unsure (1)..(77): unsure at all Xaa locations
  Clone ID: PAT_MRT3847_54962C.1.pep
VHMAQPSRGIKCTWHMAQPSSFGIRSANIKGSQVDEKKKEACLRKLSNSSTIHTCKVLECNYSKHISKTSRNQTXNR

SEQ ID NO: 235808 - protein, 106 aa, Glycine max
  Clone ID: PAT_MRT3847_54963C.1.pep
MTIKNTFIPLLYLTSIVGSPCRMPFTFKKSLESWFIDGRNTKQSEILSTDIKEKSLLRKCMQSEELIFLDDTLKECPETHLQNLRTGIYKNTFQLIYTHNCYRMNT

SEQ ID NO: 235809 - protein, 55 aa, Glycine max
  Clone ID: PAT_MRT3847_54964C.1.pep
TQTQLGIRLELKNTLYNQTHLMDSNQIRPFTAEDFSHSYSLYEDTDSNNSLNNHN

SEQ ID NO: 235810 - protein, 140 aa, Glycine max
  unsure (1)..(140): unsure at all Xaa locations
  Clone ID: PAT_MRT3847_54965C.1.pep
FILQRRQRLGVRTVNFSNLSCRYKIQHFPSQFRSVLFYSLNNGVSLSPQQTPLHAPAQLFTLYFATTQQRRNLDQTLSLPQLSTLSSATFRXRTHPLLRPTMDPQPPEPSAPAASAEDFVHVTDLKMESLSESMVRIDEP

SEQ ID NO: 235811 - protein, 74 aa, Glycine max
  Clone ID: PAT_MRT3847_54966C.1.pep
PPDNPRDAPWIFWVGPFFGGAIAPFFPRFFFKTGPPQALGSFRGTPQNWNVFLFMIRALGEKKYLEKWGFLWQV

SEQ ID NO: 235812 - protein, 73 aa, Glycine max
  Clone ID: PAT_MRT3847_54967C.1.pep
KGRKSQGGPLIMKGILIFKGKTNNFTWLQQNKGSTLKPHLYGAQPPLLAIAKHLHVFFESRQRSPLLKGTKNP

SEQ ID NO: 235813 - protein, 53 aa, Glycine max
  Clone ID: PAT_MRT3847_54968C.1.pep
YQESNFSPWFQSLIKAISSRNIIPYLIIIVVPNLFLALILLSPLESILIQISK

SEQ ID NO: 235814 - protein, 79 aa, Glycine max
  Clone ID: PAT_MRT3847_54969C.1.pep
SQIKMKAITIILIVLLVLSVGIENEGPLKVIEARTCQDRLGALNCIQDECHISCIKKHGKLTKVGCSMPLYDCICLYPC

SEQ ID NO: 235815 - protein, 37 aa, Glycine max
  Clone ID: PAT_MRT3847_5496C.1.pep
DQPPKTMASFNLSYSSSPDVSGTLASKHAKSFIDAPV

SEQ ID NO: 235816 - protein, 72 aa, Glycine max
  unsure (1)..(72): unsure at all Xaa locations
  Clone ID: PAT_MRT3847_54970C.1.pep
KIALVFKLHFTGKTEGTGTTLPHQPIATKPYEPKLKTXKWTLNNLSPVFLTRGEVLSNYLIEHLVSMVRYNW

SEQ ID NO: 235817 - protein, 86 aa, Glycine max
  Clone ID: PAT_MRT3847_54971C.1.pep
MSVLIVTSLGDLVVDLHTNKCPLTCKNFLKLCKIKYYNGCLFHTVQKDFTAQTGDPTGTGTGGDSVYKFLYGDQARFFSDEIHIDL

SEQ ID NO: 235818 - protein, 142 aa, Glycine max
  unsure (1)..(142): unsure at all Xaa locations
  Clone ID: PAT_MRT3847_54972C.1.pep
REGVKIYISLQMYKQATCCYEGWILSQATEAVYHLAYAELLYTLGGVENLQTANRYWGCTIEFSRGENTRALFNICLCTSAVTQVTKGESKEDKEGGHLQSLSANGLXKEYNQRAPDKVSQLTTGLQECNIVIMQHLLKSII

SEQ ID NO: 235819 - protein, 90 aa, Glycine max
  Clone ID: PAT_MRT3847_54973C.1.pep
VIHMQLSLRFTEEVGLEPTLRLPIYSVVGGTSMSPKVMSTYACPTYQIFSQLRIFENRESVAAQKLRFLFGAFPSCLPQPTFLSSPADLR

SEQ ID NO: 235820 - protein, 98 aa, Glycine max
  Clone ID: PAT_MRT3847_54974C.1.pep
RLGVSIRRSVVGKEGRIRDSAEVLIGQGKLWFGSSKFFHSVQSSYFVELQLLVRPGIALASSSELAGKRRTLSVVDTLSRTFSVPSVSGPSFQVCGYH

SEQ ID NO: 235821 - protein, 133 aa, Glycine max
  unsure (1)..(133): unsure at all Xaa locations
  Clone ID: PAT_MRT3847_54975C.1.pep
ALITALVRYKMPSNYFSRLGVSIRRSVVGKEGRIRDSAEVLIGQGKLWFGSSKFFHSVQSSYFVELQLLVRPGIALASSSELAGKRRTLSVVDTLSRTFSVPSVSGPSFQVCGYHIGSALAGPDQXSSGTKFR

SEQ ID NO: 235822 - protein, 45 aa, Glycine max
  Clone ID: PAT_MRT3847_54976C.1.pep
FLSNIRFKFNRKQPDKGGRNITFTPQTNSNTTLILYELSSIAKLS

SEQ ID NO: 235823 - protein, 69 aa, Glycine max
  Clone ID: PAT_MRT3847_54977C.1.pep
RWKAASFLCQSSPNNTFYIMFLTKNNSNIASYSRIIKTRKKRQYLHMTELVSTGWYYFPDAVIANHIAG

SEQ ID NO: 235824 - protein, 65 aa, Glycine max
  Clone ID: PAT_MRT3847_54978C.1.pep
AYTYIYIYILKELHSNHMNQIDKKNVSLVLGPRANPMANTHQKRRKMIFHGETTIEQCQKMWSQF

SEQ ID NO: 235825 - protein, 217 aa, Glycine max
  Clone ID: PAT_MRT3847_54979C.1.pep
LPTPNKKPSFQQESMRRSLVFQQQYYADDGMWMETQAQQHGYAFHEESSWSSDKRFPAMHMNNLAAFAVDSDLSTSKQHAKLGAMHMNKLGAFGTDFHILMSKQHVKFGGSSGNMFQQGMHSDHGFGRGYAHHGSGKRSPFGANKASHHFSKGGGGGGKFNSGEHHEYFSEETEYEEAYAEEHVGAITAKVEEMRYQHHNWAGDTCYVNPYDRNKNW

SEQ ID NO: 235826 - protein, 68 aa, Glycine max
  Clone ID: PAT_MRT3847_5497C.1.pep
KWVTYFTVYTKYQMTSLMSYTSSLFKYQCFALVMKKVQFILQVLNMYPIFDISLVRLEFLSNYGALTH

SEQ ID NO: 235827 - protein, 43 aa, Glycine max
  Clone ID: PAT_MRT3847_54980C.1.pep
GTHLFSLNAKLVFGNFPPSHPPPPPPPPPPPPPPPPPPPPPPP

SEQ ID NO: 235828 - protein, 167 aa, Glycine max
  Clone ID: PAT_MRT3847_54981C.1.pep
MSCNGCRVLRKGCSESCILRPCLQWIDTPEAQGHATVFVAKFFGRADLMSFISNVPEPQRPALFQSLLFEACGRTVNPVNGAVGLLWTGNWHVCQAAVETVLRGGTVRPMPELFGLDAPTPTTDDASEGEVTCTDKWRVRDPNPNFGSIIALLGNYEPHLSAITLSL

SEQ ID NO: 235829 - protein, 194 aa, Glycine max
  Clone ID: PAT_MRT3847_54982C.1.pep
MRTLTKTPSFKPCKACSREFTSAVLFEDVNAPERATCSSTLKDCKFPEYLMLDPGGTESEGVSLMKVCPYTYCSLNGHGHGHSPLPPLKSFMSARRHLLETQKNIKAEVASPQRWKVPPCDTKKDSYSEQMVFHGKPACDEADTGNPTITPLAQEIAMDFFFEIYAKEREGADEMGKFNSFKDLEKQEDINFAN

SEQ ID NO: 235830 - protein, 63 aa, Glycine max
  Clone ID: PAT_MRT3847_54983C.1.pep
HLNPGYVYTMVSMIQRMMKSRNISDLFSIDMATASLTRLYCGDTIILSMGCEKPDYVCHRQVK

SEQ ID NO: 235831 - protein, 121 aa, Glycine max
  Clone ID: PAT_MRT3847_54984C.1.pep
MAASKYDFKIEPQVDAQFPAEKGRYHLYVAYSCPFSCRALAARNLLGLEDVISLSVAHPIFQKTKPNDASNDHKGWAFVDPSTSSTMTGANGKTYSTDHCIPDTVNHVTFVRDLYEKVDPA

SEQ ID NO: 235832 - protein, 63 aa, Glycine max
  unsure (1)..(63): unsure at all Xaa locations
  Clone ID: PAT_MRT3847_54985C.1.pep
MKMVLVVGVXVGTSGRDVANGKDGGVNDQKNLMRYGGGGXYSFFLRSGLPFGGVGIGGGIGGG

SEQ ID NO: 235833 - protein, 225 aa, Glycine max
  Clone ID: PAT_MRT3847_54986C.1.pep
MMGQNRFPEERKRDWLGALLKCGFGCCEEHKDIRFNEKNVFCIDCVAGLCRHCKEAHSLHRRFQIYKYSYQDVVRHYDLQKYFDCSNIQTYVSNNEKIVHLRPRTSTKEFKLTRKSKFDNLCSESNAKEVKVATPPKWGGTCEECGKHLQDERNRFCSITCKISVLPHHAQRIPEEGVDQHDNQNSETESSISVAEPYECFEVVTLRKRPRKANPQKTCYFVFPC

SEQ ID NO: 235834 - protein, 41 aa, Glycine max
  Clone ID: PAT_MRT3847_54987C.1.pep
IKILLDKYMFGEPKFLRFRVYFNVYFQIANTIFMKAIKLAS

SEQ ID NO: 235835 - protein, 214 aa, Glycine max
  unsure (1)..(214): unsure at all Xaa locations
  Clone ID: PAT_MRT3847_54988C.1.pep
TRPGISKLSFADSTVGSVLPPYSFPNGVGAVAGEHPXYGEHPSRTLFVRNINSNVEDSELRALFEQYGDIRTLYTACKHRGFVMISYYDIRAARTAMRSLQNKPLRRRKLDIHFSIPKDNPSDKDINQGTLVVFNLDPSVSNEDLRQIFGAYGEVKEIRETPHKMHHKFIEFYDVRAAEAALKSLNRSDIAGKRIKLEPSRPGGARRNLMLQLN

SEQ ID NO: 235836 - protein, 35 aa, Glycine max
  Clone ID: PAT_MRT3847_54989C.1.pep
YGIVKAVFRTETLIPFGSVTEIYNLTQAMKFVSIE

SEQ ID NO: 235837 - protein, 43 aa, Glycine max
  Clone ID: PAT_MRT3847_5498C.1.pep
ELLVGVNVCCYWNSGFEAFRGVNASRVPVRVMKSAGCVIYFRV

SEQ ID NO: 235838 - protein, 71 aa, Glycine max
  unsure (1)..(71): unsure at all Xaa locations
  Clone ID: PAT_MRT3847_54990C.1.pep
VYFVFILKGCRDSWFGGCVCTVVYLWFLLVDCRVKTCCNRVGLXIXPIEGVAIYQLHXXLSFVXXNDGLGT

SEQ ID NO: 235839 - protein, 79 aa, Glycine max
  unsure (1)..(79): unsure at all Xaa locations
  Clone ID: PAT_MRT3847_54991C.1.pep
MGKSYPTXTADYHKAVXNAXXXLTGFXXEKXCAPXXLXLAWXSXXTYDLSXKXTGGPFXTXXXPSEFSXGXYTLVFDSV

SEQ ID NO: 235840 - protein, 113 aa, Glycine max
  Clone ID: PAT_MRT3847_54992C.1.pep
AASSIFLNGSKTSIKKPPMWGSTKVGPTHFFGYVCVIDHPDRPHINLVLKVLMPNNTRLMTSCRLAGITHVVFKLFHLHERRPHNILVNVMGNYYLGCCDAAFSYKRIDHECM

SEQ ID NO: 235841 - protein, 122 aa, Glycine max
  unsure (1)..(122): unsure at all Xaa locations
  Clone ID: PAT_MRT3847_54993C.1.pep
MPSPKAFFDMTIGGQAAGRIVRELCADVTASTAESFRALXTGEKGARRSGKPFQYKGLYFQRVIPNFMCHGGDSTGGDGTRGEVIYGAQAHRQNFVKRHTGPCILYMANARPGTSGSQLHIC

SEQ ID NO: 235842 - protein, 47 aa, Glycine max
  Clone ID: PAT_MRT3847_54994C.1.pep
VLYIKRSTRGTHSTKEIHINGSTVRLKILRGNQTMDTKANDLRNMLA

SEQ ID NO: 235843 - protein, 67 aa, Glycine max
  Clone ID: PAT_MRT3847_54995C.1.pep
NIFTTPFYTKKKIFFKKLFFFTTLKKKVNLFFPKPAFFRGNSPNKTKIFKMSHPLLELFLKTHPNPY

SEQ ID NO: 235844 - protein, 62 aa, Glycine max
  Clone ID: PAT_MRT3847_54996C.1.pep
STFFFKFDQWKCTFEGVGRITKHLSSPKLTFQNTILDCKKETAHNFSLKFAKQQGEMMQLIF

SEQ ID NO: 235845 - protein, 31 aa, Glycine max
  Clone ID: PAT_MRT3847_54997C.1.pep
SQPHRVQFSEDIYFLTANIPDPDIDDDYREL

SEQ ID NO: 235846 - protein, 313 aa, Glycine max
  Clone ID: PAT_MRT3847_54998C.1.pep
MESKWGGAPASIMAANFDDFKWIASMFDPGNDDVKPFSDAAFQNQDAVTAFSTCGGVTDDTLVRSQNLTPIQSTISATIDSQSSFCGTVGSPVSANKPNVRDNQVKGVATTTSGSSREPSDEDDEAGPCEQSTNAIDMKRLRRKVSNRESARRSRRRKQAHLADLEWQVERLRLENANLFKQLTDASQQFRDADTNNRVLKSDVEALRAKVKLAEDMVTRGTLTPINNQILQNQSSLNTPPQLNTNNLHRMTHVSPTITVRGNDDASYGGGITVSGQNSPLGGLGNLDNIPCSDFNSGINSNNAVSSMTSMWP

SEQ ID NO: 235847 - protein, 63 aa, Glycine max
  Clone ID: PAT_MRT3847_54999C.1.pep
FQVISKYLYCSRLARFLRPRRLQRRSIHVLDARSMGEVSRKQSNLCSIILDGLDMYRESHGRH

SEQ ID NO: 235848 - protein, 73 aa, Glycine max
  Clone ID: PAT_MRT3847_5499C.1.pep
ITRVPSNDIPSYFHHRSRTIYRFERTKIVNASLKEIILSRRFVPASTATSVITGVLPPALHHFEKRFSSQPHV

SEQ ID NO: 235849 - protein, 380 aa, Glycine max
  Clone ID: PAT_MRT3847_549C.1.pep
ASLDAIRKKIVKGEIQTKVAEVKEPSVSETKTIPDELVQIQAFIRWEKAGKPNYSREQQLMEFEEARKELLRPLEKGASLDEIRKKIVKGEIQTKVAKQLKTKKYFRAERIQRKKRDLVQLINRNVAENIVEQVIDAPKALTVIEHYANAREEYESGPVLNKTIYKLGDNDLLVLVTKDAGKIKVHLATDSKKPFTLHWALSRTSEEWLVPPATALPPGSVTMNEAAETPFKAGSSSHPSYEVQSLDIEVDDDTFKGIPFVILSDGEWIKNNGSNFYIEFGGKKQIQKVWGSKWNERAYFSTRKVKLDHEYLSMAVLVQEVINADYAFVIHTTNPASGDSSEIYAEVVKGLGETLVGAYPGRALSFICKKRDLNSPQVLL

SEQ ID NO: 235850 - protein, 64 aa, Glycine max
  Clone ID: PAT_MRT3847_54C.1.pep
QAIKSDLTNLFHLATVSICIRVIKRRHVSISLTSILINAHSKLQHPVIHCNRKVLGSPSARVGR

SEQ ID NO: 235851 - protein, 44 aa, Glycine max
  Clone ID: PAT_MRT3847_55000C.1.pep
TVCLVCLGSFPDLYDTSHMRTILRIDRLNQCFSSQFSFTKNGRI

SEQ ID NO: 235852 - protein, 51 aa, Glycine max
  unsure (1)..(51): unsure at all Xaa locations
  Clone ID: PAT_MRT3847_55001C.1.pep
RRPPTXPVSSTLIHWRMDWEMGCVXXIFDVPPYYSLKYRSLTVSRRSSTVC

SEQ ID NO: 235853 - protein, 93 aa, Glycine max
  Clone ID: PAT_MRT3847_55002C.1.pep
FQVLIYVHLPQTVLNRYNRFTGMHYKDDPTIMAWELMNEPRCTSDPSGRTIQLKLVCAGEIDIFYIPVYLPSVVWKAMEDGPPEPTEDLGDES

SEQ ID NO: 235854 - protein, 55 aa, Glycine max
  Clone ID: PAT_MRT3847_55003C.1.pep
EFLKKNPPFVYMCGLKGMEKGINHKMVSLAAKNGIDWIEPKRQLKKAEQWNVQVS

SEQ ID NO: 235855 - protein, 59 aa, Glycine max
  unsure (1)..(59): unsure at all Xaa locations
  Clone ID: PAT_MRT3847_55004C.1.pep
GLGFGRTAAKVLYVEYKYIXRVLLSGLLFLLPTCLGTVHVWANTFNEGPINKLNCYKIY

SEQ ID NO: 235856 - protein, 54 aa, Glycine max
  Clone ID: PAT_MRT3847_55005C.1.pep
YGQLLDSIRCNFTLHDVNFYPFNASVAKFLNSNFQVTLSSLNSIERIRIYDNFL

SEQ ID NO: 235857 - protein, 58 aa, Glycine max
  Clone ID: PAT_MRT3847_55006C.1.pep
SQILFLLSTTHYRASFIWPYQKQLLFNNLAQKPPKSHIQPSFHVSINYQLFQIINPDH

SEQ ID NO: 235858 - protein, 414 aa, Glycine max
  unsure (1)..(414): unsure at all Xaa locations
  Clone ID: PAT_MRT3847_55007C.1.pep
ATRWYRAPELCGSFFSKGGLLISPGSXILSVLQYTPAIDVWSIGCIFAEVLTGKPLFPGKSVVHQLDLITDLLGTPSPETIAGVRNDKARKYLMEMRKKSPVPFEQKFQNADPLALRLLQRLLAFDPKDRPTAQEALADPFFKGLFKVEREPSCQPISKLEFEFERRRVTKDDVRELIYREILEYHPQLLKDYMNGTEGTHFLYPSAVDQFRKHFAYLEENHGKSGPVIPPERKHVSLPRSIVHSSTIPPSSQPSFTSYENKQMALEASKVSRSVESNSRSQLRSSXPPPRVPAAKAGRITGPVLHYDNGRTIKDAYDQXSLPQFVSPHCFHRVQQPTNIKTTSETYKGISQQDIHPLPSQQCSMQGKSDHLNDPVASIDAKLLQAQSQFGAVDAAAVAVAAHRHSGAFQYGLS

SEQ ID NO: 235859 - protein, 591 aa, Glycine max
  unsure (1)..(591): unsure at all Xaa locations
  Clone ID: PAT_MRT3847_55008C.1.pep
MQQDQLKKDINEVEFFTEYGDANRYKILEVVGKXKIHEFVQHMSDAIEILREEKLLRLXLRHPDIVVINRIMSRLPPSKREFKDIYVVFELMERDLLNSVKANEDLTREHHQFFLYQMLCAMKYIYTANVYHXDLNVMNIMSNVNSQLXICDFGLAEVAVSGGRSSTLLDDFAATREYRAPERYGSFFSKYTPAIDIWSIGCIFAEVLTGKPLXFPGKSVVHQLDLITDLLGTPPPETIAGVRNDKARKYLMEMRKKSPVPFEQKFPNADPLALRLLQRLLAFDPKDRPTAQEALADPFFKGLAKVEREPSCQPISRLEFEFERRRVTKDDVRELIYREILEYHPQLLKDYMNGTEGTHFLYPSAIDQFRKHFAYLEENHGKSGPVIPPERKHVSLPRSTVHSSTIPPSTQPSFTSYENKHMAEEASKVTRSVESNSGSQLRSSRPPPRVPAAKPGRIVGPVLHYDNGRTLKDTYDQRIFYRNTLPQAVSPHCFHRVQQPTITKTTSETYKNIPQGKHQLPSQQCSMPARPTIDLNTNPYYQQGKSDHLNDPVASIDAKLLQAQSQFGGVGAAAVAVAAHRHSGSFQYGLS

SEQ ID NO: 235860 - protein, 65 aa, Glycine max
  Clone ID: PAT_MRT3847_55009C.1.pep
SHSHMSGHFIYIKKPLIINHFYLIYLFFFHFHLTILHYYHTHLFLLPQLISNLSSPLNHSRTQPQ

SEQ ID NO: 235861 - protein, 239 aa, Glycine max
  Clone ID: PAT_MRT3847_5500C.1.pep
MLRLLKPQPFPSGHHLIQRCAVSGTAKGKAKIKAGQALKRSRITTKKPGSATAGPPMSRERQERERLYEQCLQAPTPLRHLTQKEREREAEREKLGLISKDRQREIDMMKRKDDKFKVSEKPTIIGTPGLDYVSLGLVDVDKLPKYDLTVEDGRRLAKEYSRVLMRKHRARQAAESNLLRMKKEAIEALPEGLREAALVPDLAPFPVNRFMATLTPPIEGYIEQVREAANRISGKEKIR

SEQ ID NO: 235862 - protein, 43 aa, Glycine max
  Clone ID: PAT_MRT3847_55010C.1.pep
LVLPFVLGGFVCPKRGDSVERALLLPLGKNEEIAVIPYHMPHV

SEQ ID NO: 235863 - protein, 61 aa, Glycine max
  Clone ID: PAT_MRT3847_55011C.1.pep
VIKCYISHIIYRSTRSVFHFPPPAPAVFTFRGCPTQRVKAMIKRKRLPQIHRPLIPIKKLG

SEQ ID NO: 235864 - protein, 62 aa, Glycine max
  Clone ID: PAT_MRT3847_55012C.1.pep
GTPVSQLCPKRGEGVHFRAIPYRTSLRHRMAVGQQSKIHLGLFLQGPGLRKHALTRPHIIVG

SEQ ID NO: 235865 - protein, 83 aa, Glycine max
  Clone ID: PAT_MRT3847_55013C.1.pep
IFFCVPQSYLTVVNPLFFLCKTKAIDHSMLDRLQVRFPSSSSSVFSFYPFLYLYAFFLFFYFFTAWSLFLLKLRFFSPKNFDF

SEQ ID NO: 235866 - protein, 214 aa, Glycine max
  Clone ID: PAT_MRT3847_55014C.1.pep
LAEIACDPNLPVAKFVNLAELVSSFPRASHDGLYRAIDMYLKEHPGISKSERKRICRLMNCRSLSAEACMHAVQNERLPMRVVVQVLFFEQLRTTTSSGGNSTPDHPGSLRSFLPGGSHGSSRSTITNTEEEWDAVGTMEDIKSLKGEVDALKLSGGTGRASSGKDNNSGKGNADNIAASKMKGFMSKKILSKIWSSESGDISSSDTSESPAST

SEQ ID NO: 235867 - protein, 124 aa, Glycine max
  Clone ID: PAT_MRT3847_55015C.1.pep
IPLITLAVANCLPLFNGLCRCLVPLFCRCLCIDNRQAMLPKINLILLRHRLFCASFISVFLYRPVNGDRWGALLPFITLDSILTFRDLYTLFISWVDTVAFFSIQIVLFQCSAAHVWCGVLSDD

SEQ ID NO: 235868 - protein, 82 aa, Glycine max
  Clone ID: PAT_MRT3847_55016C.1.pep
TTSISRRTRRSYTVLAMYSPQDETKEEGTSANPRYRAVHCGRIWHARSLPGLIFPGEWVITAITAWVTLLKNTVHILLAALI

SEQ ID NO: 235869 - protein, 45 aa, Glycine max
  Clone ID: PAT_MRT3847_55017C.1.pep
SFIAATFFYLILFLFSPKENILCSITFLHFYMVRPFHPTFNFAKR

SEQ ID NO: 235870 - protein, 146 aa, Glycine max
  Clone ID: PAT_MRT3847_55018C.1.pep
RDTWGATELAANYSGITYTRVSRPATPVLYTSDEKFELGKCKVARENPADTVLLVGAGVTLYECLTAHDLLSAQGIHVAVIDLFSVKAKRVGGKVLTVEDHYEAGGVGSAVCVALADVANVRVRSLCVRELPSSGPPQALMELYGI

SEQ ID NO: 235871 - protein, 84 aa, Glycine max
  Clone ID: PAT_MRT3847_55019C.1.pep
PASTRSSCMHHLLPKDRYLRLNSNSLRFLRCSPVAGALSSSYIQGKSPNPIFSVLVCYLLPFVTTIAIMLHLLHFAHHWPPHDQ

SEQ ID NO: 235872 - protein, 76 aa, Glycine max
  Clone ID: PAT_MRT3847_5501C.1.pep
QTNPGLHDNPLMPYHSSQTDPWFLLLMLDRALPAYHLPVWRVASKLGNLLAIFSSCVKSNSSYCHAHLSTRLHMLL

SEQ ID NO: 235873 - protein, 64 aa, Glycine max
  Clone ID: PAT_MRT3847_55020C.1.pep
RTKRVSTNKPKIYSYYIYMTLQRPRRKNNYVFINNSFSLSISLSPTQTHKHIPSFLSCPYISNA

SEQ ID NO: 235874 - protein, 90 aa, Glycine max
  unsure (1)..(90): unsure at all Xaa locations
  Clone ID: PAT_MRT3847_55021C.1.pep
MKGGKSKTXSSRVDPTLAVSKKGDATXVRKPAGQGKAGKDPNMPKMPPGALFACMEEFTKVFIKEHPEDNAETAVGIAAAAKWKTMSEAE

SEQ ID NO: 235875 - protein, 80 aa, Glycine max
  unsure (1)..(80): unsure at all Xaa locations
  Clone ID: PAT_MRT3847_55022C.1.pep
HVRDWKCADTSNDNGGVRVRVVEDVARVWFNELGLGRNAPVFXVHEVEDEVLPMLTVEDLXKDMGISVAGSSRKMCPAIQ

SEQ ID NO: 235876 - protein, 115 aa, Glycine max
  Clone ID: PAT_MRT3847_55023C.1.pep
KVFPFGAFPRGVFFPPLFFFTPGGVFFGPLFKIRDPPPLGGWVSPLPINHPAPGGGFWLLIKNMGSPICSKPNFFSGFFPPPLGGFFFGSLGPPLSPLFFFKERFAPTRGSATFS

SEQ ID NO: 235877 - protein, 58 aa, Glycine max
  Clone ID: PAT_MRT3847_55024C.1.pep
GFGPYAPFGFKENPFWFLKNSWGKSWAKKGFSNFSRGPNVFGGAPMVSTGAPKLVFTL

SEQ ID NO: 235878 - protein, 261 aa, Glycine max
  Clone ID: PAT_MRT3847_55025C.1.pep
MAKAAEQSPDSGNVYTLASVREDLVRQEDTIIYGLIERAKFPSNSHTYDEKYAQIQGFCGSLVEFVVKNTEAIQAKAGRYKNPEENAFFPENLPPSIVPSYSFKQFLHPGAASININKSIWKMYFQELLPLLATSGDDGNYAQTAANDLSLLQAISRRIHYGKFVAEVKFRDAPQDYEPLIRAKDKEGLMKLLTFTSVEETVRKRVEKKAVVFGQEVNLDNEDDDNENRKFDPSVASSLYKNWVIPLTKEVQVEYLLRRLD

SEQ ID NO: 235879 - protein, 61 aa, Glycine max
  Clone ID: PAT_MRT3847_55026C.1.pep
ITRSAVHTFIFTQPGKIHTHIECDSERGTGNHRFKLSGVNPYAWFYYTEVHGYGNIFKGAG

SEQ ID NO: 235880 - protein, 60 aa, Glycine max
  unsure (1)..(60): unsure at all Xaa locations
  Clone ID: PAT_MRT3847_55027C.1.pep
GSLPFVWDFFXGHNKIVGYGSPTLPXALPFICGGPWFXAWKNWGFGGLGVSEMGGFLKPG

SEQ ID NO: 235881 - protein, 381 aa, Glycine max
  unsure (1)..(381): unsure at all Xaa locations
  Clone ID: PAT_MRT3847_55028C.1.pep
PRVRKTSSPMEQQAANMYTKKIFAKFQEELVETFAYTANNVEDDGVISKYRVAKYEYDHKAYMVTLNISEMKANCSCQMFEYSGILCRHILTVFTVTNVLTLPSHYILKRWTTNAKSDIRTYEKITDPLDIENLTVRFNSLCREAIKLAEEGAVSVETYNATMNALREGAKRVGIMKKNVAKVTPPNTQGNGSCLKDHSKNSPSSISDVIPSLWPWQDSVSHHFNLNDLGLPVTDLNTPSMAPVSIHRDDILVIALIDYHLSMQVVLTCFKSMTWIISNKNSSSSSKIAVINMKLEEINYGKGPLGETEVQFRVTRVTLEPMLRSMTYINQQLNAPVNRVAIINLXEDTKTTTGQTEVKFQVSRDTLGSMLRSMAYIQEQL

SEQ ID NO: 235882 - protein, 71 aa, Glycine max
  Clone ID: PAT_MRT3847_55029C.1.pep
WRLVPSLYRHINRVFRAGYKQGDPFTGQSYSFRSFRSLKSFFGRWLTFCPISSKEGSSFWDPGDCFSKSGP

SEQ ID NO: 235883 - protein, 51 aa, Glycine max
  Clone ID: PAT_MRT3847_5502C.1.pep
SRSQTQIIKNKVLAMASKRILKELKDLQKDPPTSCSAGSCLCYALPCLCVS

SEQ ID NO: 235884 - protein, 62 aa, Glycine max
  Clone ID: PAT_MRT3847_55030C.1.pep
VGIFTFEDEITSTVAPATLYKALVTDADNIIPKALDSFKSVENVEGNGGPGTINKITFVEDR

SEQ ID NO: 235885 - protein, 40 aa, Glycine max
  Clone ID: PAT_MRT3847_55031C.1.pep
IIPKTINIPSVENLSVYDVAEKYNDERHDMTILPSAEDVS

SEQ ID NO: 235886 - protein, 54 aa, Glycine max
  Clone ID: PAT_MRT3847_55032C.1.pep
RMTAETGRRHGVQVLCSLVCARVHDCDEPTIVCQSSSQGQDARRIRREPLITTR

SEQ ID NO: 235887 - protein, 118 aa, Glycine max
  Clone ID: PAT_MRT3847_55033C.1.pep
PLFRGRVGQNPNLKPQESHVTGGRSSNGSRQNIGDRESAATSKCLDITSSEAAYSGGSFQFTENVNMSHQSDSQKDAQTNMSSEADFGCQPCLITNGGKSGEEFSCESETFPSFDLGF

SEQ ID NO: 235888 - protein, 58 aa, Glycine max
  Clone ID: PAT_MRT3847_55034C.1.pep
KRRQHSPHRGFLHHGGNILTPLIKKSHLQCILKSHLLPFKSHKNNISFHIGSIITTQT

SEQ ID NO: 235889 - protein, 160 aa, Glycine max
  unsure (1)..(160): unsure at all Xaa locations
  Clone ID: PAT_MRT3847_55035C.1.pep
SIPWETLHKRFILKIFRCLLIIIGVKHLQWITFMDSEGRVTDSEALRKRVFYGGLDHKLRNEVWGLLLGYYPYESTYAEREFLKSVKKSEYVNIKNQWQSISSAQAKRFTKFKERKGLIEKDXGDDNPNVNVLRDILLTYSFYNFDLGYCQGMSDLLSSI

SEQ ID NO: 235890 - protein, 67 aa, Glycine max
  Clone ID: PAT_MRT3847_55036C.1.pep
SKNSHILIVRIPFLIMPILKPNEMTSQFLIEFQFHIFNKYRGKNVHISIGIICSLIMPILKPNEMTS

SEQ ID NO: 235891 - protein, 164 aa, Glycine max
  Clone ID: PAT_MRT3847_55037C.1.pep
SPTRPGKGHILIVELFVVHTLSILWLATGGITEYAIPRDCWYYYYYDNYNCDIYPIVIRVFCWVSAGHLLIWSTWLSLLAVGATRRGNREVWISNIGTTNFLRVVHTSPEPSVVVTNLNLRRLSDPETGMPPPYPRGSQEPRTEDREMRYVDLVKTPLNERAIA

SEQ ID NO: 235892 - protein, 161 aa, Glycine max
  unsure (1)..(161): unsure at all Xaa locations
  Clone ID: PAT_MRT3847_55038C.1.pep
RLRVRPRVRPRVRDDADYAASQQQGSASVMLRSDSAKQSSPRNGAEIVFSKDNVAIHPTQFASERISGRLKLIKQSSSLFMTWIPYKAHSSEARLSDKDRNLYTIRAVPFTDIRSIRRHNPALGWQYVIVALSXRSEEDANVFLVNDFQNTLQRTLSSLEM

SEQ ID NO: 235893 - protein, 92 aa, Glycine max
  unsure (1)..(92): unsure at all Xaa locations
  Clone ID: PAT_MRT3847_55039C.1.pep
VTFPNTIVQMEPNIDSKFQLLESTSHWDFXVKGKNLQWVKVXLTFASCGFAXSSLPLHLLDFGLQKTKGLFVGFFERMFNVVINVNQPQKKN

SEQ ID NO: 235894 - protein, 81 aa, Glycine max
  Clone ID: PAT_MRT3847_5503C.1.pep
MKMAYFHSTCFLVFMLIASLLVPGRGGDYGPEEEKLLSKTIGIQGIVYCKSASKLTPLEGALTRIACEAVDEYGFETTPFS

SEQ ID NO: 235895 - protein, 470 aa, Glycine max
  Clone ID: PAT_MRT3847_55040C.1.pep
MPRAVPLACGPSNTSVDESILIENQERADNGANDGRFSVNQFHGRPRHKVDPARDLSIQVLEKFSLVTRVARETTSQLFGENQSNGFSPIDRRTHIQTNLDHPKSSNVEENTSVESPVVLDSQEFDNLSLVWGKPRQPPLGSEEWNAFLDSEGRVTDSEALRKRVFYGGLDHELQNEVWGLLLGYYPYESTYAEREFLKSVKKLEYENIKNQWQSISSAQAKRFTKFRERKGLIEKDVVRTDRSLAFYEGDDNPNVNVLRDILLTYSFYNFDLGYCQGMSDLLSPILFVMDNESEAFWCFVALMERLGPNFNRDQNGMHSQLFALSKLVELLDSPLHNYFKQRDCLNYFFCFRWILIQFKREFEYEKTMRLWEVLWTHYPSEHLHLYVCVAILKRYRGKIIGEQMDFDTLLKFINELSGHIDLDATLRDAEALCICAGENGAARIPPGTPPSLPHEDGSFYAQQEQDEIL

SEQ ID NO: 235896 - protein, 94 aa, Glycine max
  Clone ID: PAT_MRT3847_55041C.1.pep
DWIFEVEERGSNYGYAWGSSERANRSSWQLRLLLDSRNESTGYCLHLGLTYDSENAVSTLKTGFSDSQGVVRSYECADCSARDGMGVAFELLFR

SEQ ID NO: 235897 - protein, 44 aa, Glycine max
  Clone ID: PAT_MRT3847_55042C.1.pep
LGVKEGDTVIVGEMKMIWHDSSDNPGASRMKKISTDSFKWAEWK

SEQ ID NO: 235898 - protein, 328 aa, Glycine max
  Clone ID: PAT_MRT3847_55043C.1.pep
MVLFNPAEEKDNGSDDSLTISSCSQSQPLDENLFSDLTLVVDPLQNLEVAEAERDLQSRQGHAPARRRKRSGLRIGYGRDAFSSNDPPHTPSPLPQPISDSDSVCDADAVRVRDTDTDTETLPSITTATATDDPVTVTLTQPSNESENQNRKHQQSSTESSSRSENEISDAAHDSSTESSSAEFRQLKSSIHDKLNHATQLVKSASSARKDSIRNRRKTVENANLASLKHMELEKQLEEACEAEDFERAEKVSDDLSAAEKEKQAFANSLREADAFVDALDLKLQHALDSQLAIEEQCAILLDHYATVSQVKHTCSCTTFIFLPLHSL

SEQ ID NO: 235899 - protein, 47 aa, Glycine max
  Clone ID: PAT_MRT3847_55044C.1.pep
WAKTTKLGSFLSNQGHFLKKPPLTGSSLSTQGISRKLPLKLYIKPPF

SEQ ID NO: 235900 - protein, 300 aa, Glycine max
  Clone ID: PAT_MRT3847_55045C.1.pep
MTKKKKQNGVVVGEGDGVGGVVDLESVIHNHALFFDKLIELIPAKFYLPTDDKEKPWFQGLNKAAKAKAKKETKENIKKSRRDRLDPDKPSATTLDLLKESFGKEKADDSDEEQGAVALAKPVVSGMKRDDGSVTYEELQQRLRRRLEEFRASRNTGNSDRKRDERNARRGYKDNKRKRDGETEEGNPVRGELAAAEEKVKKDAAEASKDLVFGHVKLQNEEGKKKRKVSKHQELERAKKLEEVKKKDPEKAEAFAKKQSWKAAMDRASGVKEHDDPKLLHKSIHKVDARELKNTEKWKD

SEQ ID NO: 235901 - protein, 46 aa, Glycine max
  Clone ID: PAT_MRT3847_55046C.1.pep
INLPMLPNHTLNDVTHQCFFIIKNSNNMHDTKHDIDKELKTSNSIV

SEQ ID NO: 235902 - protein, 87 aa, Glycine max
  unsure (1)..(87): unsure at all Xaa locations
  Clone ID: PAT_MRT3847_55047C.1.pep
GKAXXTXXXXXQXXKDALPRGNTAEIDXQXTCSHNLTTKYAGKYKXDFTPLLKRVGXXXQKTGGTKPPNQEGTEQPKKGKTRENGDD

SEQ ID NO: 235903 - protein, 46 aa, Glycine max
  unsure (1)..(46): unsure at all Xaa locations
  Clone ID: PAT_MRT3847_55048C.1.pep
GLXXXXXXYXXXXLXXLXFXXXXGMXHXPAXXSSRIXXXXTXTXTV

SEQ ID NO: 235904 - protein, 27 aa, Glycine max
  Clone ID: PAT_MRT3847_55049C.1.pep
NLKIVGSTLFLFMLTNLRAGYISYSCM

SEQ ID NO: 235905 - protein, 206 aa, Glycine max
  Clone ID: PAT_MRT3847_5504C.1.pep
ESLDDSDFSSDESIDFDSPEKPPLMSRFLCKGNQSSPRLSIRIEGETEPSPLIKTKKFHVSINPWKLIKLTREKAQLAAEKAREKIMREKPMGEHNSLKPLPLETKCGPLMSPDKNMDTKDFGSTSFIAKGRLTESPGGRFSSPRRRFSAGSPTVFSSSMMASPHHKYRSSFDLKLTGVSRELETHISRQGLCSVISQDDSEPSPR

SEQ ID NO: 235906 - protein, 70 aa, Glycine max
  unsure (1)..(70): unsure at all Xaa locations
  Clone ID: PAT_MRT3847_55050C.1.pep
YWACXNFSPSIQESTARGLCQLLVQICRLSGMEFSRARVITIYSAPPDLLKKAVKYVHFSVLDKLGGKDL

SEQ ID NO: 235907 - protein, 70 aa, Glycine max
  Clone ID: PAT_MRT3847_55051C.1.pep
VSSSFIPFWKHSYYYNLQQQQQQLLNDLLINLLSLISFFRVSCSFNNNNSFWFFRVILIWVCYGLLVFEK

SEQ ID NO: 235908 - protein, 90 aa, Glycine max
  unsure (1)..(90): unsure at all Xaa locations
  Clone ID: PAT_MRT3847_55052C.1.pep
SLCVRKKKKKRENKLNNEGKKGRPEMCSFAWANQTEWHVSXLPDKPQQETVFDFAWGISHDFEIAGNTLMPAFSVPQATARSFENAESSA

SEQ ID NO: 235909 - protein, 55 aa, Glycine max
  Clone ID: PAT_MRT3847_55053C.1.pep
KNCHFDLIISTTSIVWIKPSVPPANATTHLLLTPYMMFQHWLNRLSGSRPNSSSI

SEQ ID NO: 235910 - protein, 56 aa, Glycine max
  Clone ID: PAT_MRT3847_55054C.1.pep
SDVMSPEGLHLRCYDLSDYVFNGYWEHRVKRGRTWFGGRQTRISRNVRVVPSNGFS

SEQ ID NO: 235911 - protein, 46 aa, Glycine max
  Clone ID: PAT_MRT3847_55055C.1.pep
IILKKARSLHLMSGIIIYQGPSSLLNHMPHCALWRPRRTFKRLGRY

SEQ ID NO: 235912 - protein, 41 aa, Glycine max
  Clone ID: PAT_MRT3847_55056C.1.pep
TRGPPNCAPSISVVTKFDDGTPAPRALMLLEAIWGLTCQDY

SEQ ID NO: 235913 - protein, 124 aa, Glycine max
  Clone ID: PAT_MRT3847_55057C.1.pep
QRPLKLYIIIVLASPRSPGAIVVVTTYRDVVAVEIESKLHLLRQAQSDTLHSLSSPGPFLVPSLEEWRSVPPWHHGQNKVACVYSGSKQAVGCVGAPIGMEEAEDGPLSDHQARSHPTPMLSQL

SEQ ID NO: 235914 - protein, 144 aa, Glycine max
  Clone ID: PAT_MRT3847_55058C.1.pep
GPCVSGAHSTIVTARAGKDLVASLVSGLLTIGPRFGGAIDDAARYFKDAHDRGLSPYEFVEGMKKKGIRVPGIGHRIKSRDNRDKRVQLLQQYAHAHFPAVKYMEYAVQVETYTLTKANNLVLNVDGAIGSLFLDLLAGSGMFN

SEQ ID NO: 235915 - protein, 85 aa, Glycine max
  Clone ID: PAT_MRT3847_55059C.1.pep
GPKRFPHFIFWGPTGPGKWPLKAPIGEKKKTFLAREGKLKPVGPIRKTQHSPPENSPHTTPKKKVKIFPLEPQPEAIGPKKKQKA

SEQ ID NO: 235916 - protein, 63 aa, Glycine max
  Clone ID: PAT_MRT3847_5505C.1.pep
NMSNPPHIKTLIFIMELQLSKLLFHLIILILPCSLTLLKDHSILLIQNIIGHNDLLHYLPIPI

SEQ ID NO: 235917 - protein, 72 aa, Glycine max
  unsure (1)..(72): unsure at all Xaa locations
  Clone ID: PAT_MRT3847_55060C.1.pep
MSGIIHKIEETLHVGGHKXEXHKXEHHGEHKGXHKGXXHXERQGXHKGDQXHHGEHKEXLXXQXXXRIHGDG

SEQ ID NO: 235918 - protein, 60 aa, Glycine max
  Clone ID: PAT_MRT3847_55061C.1.pep
SPTTDNSIPSFLFIITDIFPSCPSNSTTFVYVLLLLLQIAPPHLRFTLTFSTHGNIVLLI

SEQ ID NO: 235919 - protein, 253 aa, Glycine max
  Clone ID: PAT_MRT3847_55062C.1.pep
RVENIDTKQIISVWGIDGFPFRTSDHTRLTQQWNWFWSEMTKLNPRIGDLIEEDRYLFIYGGTDIMWIQEFTTAVEKLKRNVDSISLHVDKKTTEYQLGREDTKVVPRFWIAIDSLLASRKQQMMKGGDQGVQDFATREIKRLLFLKQDPKGWVILSKGYNVKLLGQGEAMCRSVRDFGIWYGKLHEEVSFDVAFKEYYESIKVKDCPKKCEHSEISNYPTDILAHIPCPNMECGRSMEVTSVNYRCCHGLEP

SEQ ID NO: 235920 - protein, 272 aa, Glycine max
  Clone ID: PAT_MRT3847_55063C.1.pep
MAKVFCDFRFLLLVAAGVFIYIQMRLFATQSEYADRLAAAIEAENHCTSQTRSLIDQISLQQGRIVALEEERKRRDQECGQMKSPVQDLERKDLQRLIDKMQVPVAAVVIMACNRADYLERTINSVLKYQRPISSRYPLFVSQDGSNPNVKSKALSCDQLSYMQHLDFEPVQTERPGELTAYYKIARHYKWALDQLFYKHNFSRVIILEDDMEIAPDFFDYFEAAATLLDKDKSIMAVSSWNDNGQKQFVHDPYELYRSDFFPGLGWMLARS

SEQ ID NO: 235921 - protein, 51 aa, Glycine max
  Clone ID: PAT_MRT3847_55064C.1.pep
LWLTNARISTKLQIHVTPLQCFRQNPVENEPLCFLPLRRLGISRKGVILPI

SEQ ID NO: 235922 - protein, 445 aa, Glycine max
  unsure (1)..(445): unsure at all Xaa locations
  Clone ID: PAT_MRT3847_55065C.1.pep
MAKVFCDFRFLLLVAAGVFIYIQMRLFATQSEYADRLAAAIEAENHCTSQTRSLIDQISLQQGRIVALEEERKRRDQECGQMKSLVQDLERKDLQRLIDKMQVPVAAVVIMAWNRADYLERTINSVLKYQXKIKLVVVLNSFRRAETSRPRILLEMDKSIYGCFLMECHLDFETERPGELTAYYKIARHYKWALDQLFYKHNFSRVIILEDDMEIAPDFFDYFEAAATLLEKDKSIMAVSSWNDNGQKQFVHDPYELYRSDFFPGLGWMLARSTWDELSPKWPKAYWDDWLRLKENHKGRQFIRPEVCRTYNFGEHGSSLGQFFKQFLEPIKLNDVKVDWKLMDLSYLLEDKYSMHFANVVKKATPVYGADMVLKASNIDGDVRIKYKDQSDFENIAHQFGIFQEWKDGVPRTAYKGVVVFRYQTSRRIFLVGPESLKLLQIEES

SEQ ID NO: 235923 - protein, 153 aa, Glycine max
  unsure (1)..(153): unsure at all Xaa locations
  Clone ID: PAT_MRT3847_55066C.1.pep
MVCTANDFTXWKDFPKGLRVLLLEGDSSSAAEIRXQLEAMDYKVSTFYDENEALSALSSSPKGFHVAIVEVSTSCSLGGFKFLENAKDLPTIMTSKDQCLNTMMKCIALGAVEFLSKPLSEDKLKNIWQHVVHKVDWTPELHKKFVKAVEQLY

SEQ ID NO: 235924 - protein, 362 aa, Glycine max
  unsure (1)..(362): unsure at all Xaa locations
  Clone ID: PAT_MRT3847_55067C.1.pep
MAKVFCDFRFLLLIAAGVFIYIQMRLFATQSEYADRLAAAIEAENHCTSQTRSLIDQISLQQGRIVALEEKRRXKRRDQECGQTKSLVQDLERKDLQRLIDKVQVPVAAVVIMACNRADYLERTINSVLKYQRPISSRYPLFVSQDGSNPKLEINXGPNLQFCLKNIQLIPLSGHYKWALDQLFYKHNFSRVIILEDDMEIAPDFFDYFEAAASLLEKDKSIMAVSSWNDNGQKQFVHDPYELYRSDFFPGLGWMLARSTWNELSPKWPKAYWDDWLRLKENHKGRQFIRPEVCRTYNFGEHGSSLGQFFKQYLEPIKLNDVKVDWKLMDLSYLLEDKYSMHXANVIKKATPVYGADMVLKA

SEQ ID NO: 235925 - protein, 115 aa, Glycine max
  Clone ID: PAT_MRT3847_55068C.1.pep
SGWRFYWRRVVKGAPFKRSSLLSNKTPPPLIIPPGIKGGFGPSLKKNCLVKKPGKNPPNQVPHGGYPRKKIFFPNKELKEGCGKSFSKKGFPPPQNFLFGFQGAPQIPEGSFSFQ

SEQ ID NO: 235926 - protein, 164 aa, Glycine max
  unsure (1)..(164): unsure at all Xaa locations
  Clone ID: PAT_MRT3847_55069C.1.pep
MVCTANDLQGWKDFPKGLIFLLLERYSSSAAEIRXQLEAMDYKVSTFYDENEALSALSSSPKGFHVAIVEXTSKDQCLNTMMNCIXVEFLSKPLSEDKLKNIWQHVVHKAFNSGENVLSESLKPVKESVESMLQLQTDIGQDKSRISIDLKNVSKFSDNDHQSA

SEQ ID NO: 235927 - protein, 75 aa, Glycine max
  Clone ID: PAT_MRT3847_5506C.1.pep
RLSTAIFLLRQRTVKLTSTVYTRYVLIYADIKLDCDTLTDVSLLGHHVPPINRPPPSRMSPFYTNIVNRAFICCT

SEQ ID NO: 235928 - protein, 54 aa, Glycine max
  Clone ID: PAT_MRT3847_55070C.1.pep
TAYRHLPIAQIALQAKYHQNGRSTSHRRIPSQGGLQVQQGVLSVNAHATCRKAL

SEQ ID NO: 235929 - protein, 258 aa, Glycine max
  Clone ID: PAT_MRT3847_55071C.1.pep
MYACFGDKAIRFRFKVDWTPELHKKFVKAVEQLGIDQAIPSRILEIMKVEGLTRHNVASHLQKYRIHKRQSAPREEDRKWHNQRDAMQRNYYMQRPIMAYPPYHSNHTLSPAPIYPMWGQPGSQTAGVQIWGHPGYNIWHPTESCHWKPYQGVHVDAWGCPLLPAPQAPCFPYNQNIPGLHNPKAVDYRFGMPQSSFEHHPAEEVVDKVVKEAISKPWLPLPLGLKPPSMDSVLAELSKQGISGIPLGNKRSSTPKLR

SEQ ID NO: 235930 - protein, 72 aa, Glycine max
  Clone ID: PAT_MRT3847_55072C.1.pep
KETRTSLQREKMGGLTSVLRELQYKSRNMREPGYYFITVQRAKYVHTYYAGDHTTSRHSNINLSDRNIVCSH

SEQ ID NO: 235931 - protein, 519 aa, Glycine max
  unsure (1)..(519): unsure at all Xaa locations
  Clone ID: PAT_MRT3847_55073C.1.pep
MVCTANDLQEWKDFPKGLRVLLLEGDSSSAAEIREQLEAVDYNVSTFYDENEALSALSSSPEGFHVAIVEVSTSCSLGGFKFLENSKDLPTIMTSKDQCLNTMMKCIALGAVEFLSKPLSEDKLKNIWQHVVHKAFNAGANVLSESLKPVKESVESMLQLQTDIGQDKSRISIDLENVSRFSDNDHEQSAVCDKYPAPSTPQLKQGTRLLDDGDCHEQTNCSTEKESGEHDRECKSVETSCGNLNAESSPQPREPDKTLIREEDDFANVSKGESAVSLNPHNKKFLSNADGNTSPNKTGVLNDSCEIKANRKKVKVDWTPELHKKFVKAVEQLGIDQAIPSRILEIMKVEGLTRHNVASHLQKYRIHKXQRIRLEEDRKWHNQGDAMQRNYYMQRPIMAYPPYHSHHTLSPAPIYPMWGQPGSQTAGVQIWGHPGYPMWHPTESWHWKPYPGVHVDAWGCPLVPPPQAPCFPYNQNTPGLHNPKAVDYRFSMPRSSFEHHPVRQYFPFSSFYHVMNFFL

SEQ ID NO: 235932 - protein, 187 aa, Glycine max
  unsure (1)..(187): unsure at all Xaa locations
  Clone ID: PAT_MRT3847_55074C.1.pep
MKGFAVKVEEGREGTNGELSIGPVYRNLLSKNEFPPLDPDLSTAWDIFSMAVKKYRKNRMLGWREFVDGKIGPYVWKTYEEVYDEVLHIGSALRASGAEPGSRIGIYGANCPQWXIVAMEACCAHNLXCVPLYDTLGPGAVNFIIDHGELDXXCFVQDKKVIHLFDPDCKSAQRLKRWVSFTSLTEE

SEQ ID NO: 235933 - protein, 100 aa, Glycine max
  Clone ID: PAT_MRT3847_55075C.1.pep
LYSANKHVEGTTFKEWKRTKRPKVSILTDKGDNVVDMEVVEDFLYLISSSSPNNIQIWLREAPKKLGRISAGSKITSILAANDIIFCGTETGLIKGWIPL

SEQ ID NO: 235934 - protein, 257 aa, Glycine max
  Clone ID: PAT_MRT3847_55076C.1.pep
MASSSSTVALRTISSFSLKPATTTRSLLNTSTSSTITLLPFTSANSFLSKTLKLNTSSPHSHLSLPLNKSFTCRSQAEPSSDSAKVQELSVYEINERDRGSPAYLRLSQKTVNSLGDLVPFSNKLYSGCLQKRVGITAGICVLIQNKSEKKGDMYEAIYSFYFGDYGHISVQGSYLTYEDTYLAVTGGSGIFEGAYGQVKLHQIVFPFKLFYTFYLKGIKDLPQELLSKPVEPSPSVEPSPSAKACEPHAVIAGFTD

SEQ ID NO: 235935 - protein, 83 aa, Glycine max
  unsure (1)..(83): unsure at all Xaa locations
  Clone ID: PAT_MRT3847_55077C.1.pep
HXXVXMLKXTHNNLXEXXIXRYXSXRMMNSDVKFWRNCIVQWLEHGRCIXRIXHXXLVXEXYPXAQLAXHLQCHRTGXGSLNF

SEQ ID NO: 235936 - protein, 103 aa, Glycine max
  unsure (1)..(103): unsure at all Xaa locations
  Clone ID: PAT_MRT3847_55078C.1.pep
MPIRNTAAGRPEEATHPATXRRQKAEFISPLIYXGDGSRSGIAYKXNRHGAATPAGLIFGCIAHAFELFGGGSVGANIFGGHVNPAATLGAFGGGNLTLLRGM

SEQ ID NO: 235937 - protein, 58 aa, Glycine max
  Clone ID: PAT_MRT3847_55079C.1.pep
CPHFKNSGFSPHVSKIYIMDFVPNPMFHFLPKKRPNSPHLRKYKDQNHHYKNVGTTQF

SEQ ID NO: 235938 - protein, 40 aa, Glycine max
  Clone ID: PAT_MRT3847_5507C.1.pep
MIEQFINFVIRPPRAEYNPDQYLWEKEFTLAGRTYQSIWS

SEQ ID NO: 235939 - protein, 73 aa, Glycine max
  Clone ID: PAT_MRT3847_55080C.1.pep
MLIKIAKVFHLFAGQILEMILDLIPDSRILCSHSLLVAAFILPLSDAENYISRPHRLPSLDHQGKQYEANKMM

SEQ ID NO: 235940 - protein, 67 aa, Glycine max
  Clone ID: PAT_MRT3847_55081C.1.pep
LLSPPCKQKNPFQYRIEEAKRVMWNVSTSWFGTGNLETALAPVPVPGSKSSERIRQRSRAPCLFPRA

SEQ ID NO: 235941 - protein, 68 aa, Glycine max
  Clone ID: PAT_MRT3847_55082C.1.pep
YGEKENLIWAIVMIYLDGRCSTLCCLSRRYALFLRKLLLIQIIDYYDNIFSIKKILLKELKYSCQLSI

SEQ ID NO: 235942 - protein, 70 aa, Glycine max
  Clone ID: PAT_MRT3847_55083C.1.pep
ADRGHLGQSNGDGGTWLLICYKKGMTTHPSVRYIPSTKQQWLSCPYLPRATRLCHDTCLITQHLYFSNRC

SEQ ID NO: 235943 - protein, 88 aa, Glycine max
  Clone ID: PAT_MRT3847_55084C.1.pep
MCRDRTRYAYKSYAMNRTCMYTCVPGTSTLLAASTQETCTCPIPGHSSAFAPQDQRASLHQGPHVESRIRRGATGRSLCHTSPTDTQP

SEQ ID NO: 235944 - protein, 102 aa, Glycine max
  unsure (1)..(102): unsure at all Xaa locations
  Clone ID: PAT_MRT3847_55085C.1.pep
QLPHRYTFHHPQTPPELLFLKESQIQHFHSAMTTLSHSYQPPLCISLHTRAVEGNPISLHKLLHLLEMQLALSWKMNNADWGINFKGSAAFVKINIYPXMLE

SEQ ID NO: 235945 - protein, 73 aa, Glycine max
  unsure (1)..(73): unsure at all Xaa locations
  Clone ID: PAT_MRT3847_55086C.1.pep
YIFHHMXKELDAILDHGEAAPAVSCITDDGSAKFLEKIICPIYQTLDAVSCFIHPLCILQYYVSYLQFLTIFE

SEQ ID NO: 235946 - protein, 61 aa, Glycine max
  Clone ID: PAT_MRT3847_55087C.1.pep
RLLGHGVKFLHVLVLHILFTYLTCPTLKYYAGWADLTFLCQLILLAFTALINDVQDLMIGL

SEQ ID NO: 235947 - protein, 45 aa, Glycine max
  Clone ID: PAT_MRT3847_55088C.1.pep
PVNLSASNRCLYSTGRHVQYIFCSSISLDDRKISLRLVFFFLPSH

SEQ ID NO: 235948 - protein, 100 aa, Glycine max
  Clone ID: PAT_MRT3847_55089C.1.pep
ESEKRLALPNSSVDSRRTGRRLVRPKLLEKSEKRPEELQGGDTEMSDAEGPGGKPGQSSDTDTSNVVQSSQQLARKRVAPTSTSELREESIAPGEKSSDV

SEQ ID NO: 235949 - protein, 279 aa, Glycine max
  Clone ID: PAT_MRT3847_5508C.1.pep
FCEENSEMILVYEYVEKGPLKKHLYGSSLQTPLSWKQRLEICIGAARGLHYLHTGFAQGIIHRDIKSTNILLDENYVAKVADFGLSRSGPCINETHVSTNVKGSFGYLDPEYYRRQQLTDKSDVYSFGVVLLIRLCGRPAVDPQLAREQVNLAEWGLEWLQKGMVEQIVDPHLVGQIQQNSLKKFCETAEKCLAEYGVDRPAMGDVLWNLEYALQLQESGQQREPHANRHASEEFVSVTNAIIPGNPSTNRRTERDHYNCSSDVSTSQVFSQLMNNEGR

SEQ ID NO: 235950 - protein, 50 aa, Glycine max
  Clone ID: PAT_MRT3847_55090C.1.pep
PPTEEARTEAILLMGVENNLCTPKNGEILVASTQDFLTSSFLITRKDTFL

SEQ ID NO: 235951 - protein, 74 aa, Glycine max
  unsure (1)..(74): unsure at all Xaa locations
  Clone ID: PAT_MRT3847_55091C.1.pep
XSXXRFVYNFHEYQXATLIAGPLYIXLSHXYTTHXXPDXXLXYXXXSSAXXXXIPXAXXIXLGRXEEGHXLRLX

SEQ ID NO: 235952 - protein, 71 aa, Glycine max
  unsure (1)..(71): unsure at all Xaa locations
  Clone ID: PAT_MRT3847_55092C.1.pep
VLHNKGSGIGDRLYAEWIDRIISEGAIPILEPDNCSNGWSXDPGDARMVRGPEYFTTRVKVPAGDYMLKPL

SEQ ID NO: 235953 - protein, 58 aa, Glycine max
  Clone ID: PAT_MRT3847_55093C.1.pep
ILTSDHLSSSMQTYTSSTYSITSIYSNTSTILTLSKNSRMSKQKVTTLNTIMTLTSIS

SEQ ID NO: 235954 - protein, 166 aa, Glycine max
  unsure (1)..(166): unsure at all Xaa locations
  Clone ID: PAT_MRT3847_55094C.1.pep
MQKMAYTFSFPEEVLEHVFSFIWSERDRNAISLVCKSWYEIERWCRRKVFVGNCYAVSPLMVIKRFPELRSIALKGKPHFADFNLVPEGWGGYVXPWIAAMARAFPCLEEIRLKRMVITDESLELIAKSFKTFKSLVLTSVGGFXTADGLAGIASNCRNLRELDLQ

SEQ ID NO: 235955 - protein, 39 aa, Glycine max
  Clone ID: PAT_MRT3847_55095C.1.pep
SVLEAEPLSSVVEDVPLCSNIPAETICRVLEKVPLCCFL

SEQ ID NO: 235956 - protein, 40 aa, Glycine max
  unsure (1)..(40): unsure at all Xaa locations
  Clone ID: PAT_MRT3847_55096C.1.pep
QRGKAFCRLQANHWLPLDVYGYRSXGSEHGSRLLGLANRL

SEQ ID NO: 235957 - protein, 260 aa, Glycine max
  Clone ID: PAT_MRT3847_55097C.1.pep
MSAAVCGSKRSFFEELPPSPPLSKRLRCSSSPIRFPPPSSIDQLRPLFPHMDDLVLERALQECGNDIDAAIKRLNELCLGTADGNGIAEESEVVINLGAGKLEGDGNASVSEEQPALNNHLPADGAEWIDFFVREMMVATSVDDARARAARMLEVLEKSISERAKAEATDALQKENLMLKEQIEALIKEKNSFKNAFRIQHERFADYEVKNQELQHLKQLVSQYQEQIRTLEVNNYALAMHLKQAQQSNPFPGRFPPDVF

SEQ ID NO: 235958 - protein, 798 aa, Glycine max
  unsure (1)..(798): unsure at all Xaa locations
  Clone ID: PAT_MRT3847_55098C.1.pep
MAPVLSRTMATASLASLPPSSPFARTSLLRSAFLPPQIGLGRNCFSPAAGLRWTQQRQGRRGGLTVRCEAAVAEKDEATGEKFEYQAEVSRLLDLIVHSLYSHKEVFLRELVSNASDALDKLRFLSVTEPSLLGDAGDLEIHIKSDPDNGTITITDTGIGMTKEELIDCLGTIAQSGTSKFLKALKENKDLGXADNGLIGQFGXVGFYSAFLVAVRVXVVSTKSPRSDKQYMWEAEADSSSYVIKEETDPEKFLRRGTQITLYLREDDKYEFSEPSRIQGLVKNYSQFVSFPIYTWQEKSRTVEVEEEEEPKEGEEPKEEGEKKKVKKTKTEKYWDWELANETKPIWMRNPKEVEKEEYNEFYKKTFSEFLEPLAHTHFTTEGEVEFRSILYVPGMGPLNNEEVVNPKTKNIRLYVKRVFISDDFDGELFPRYLSFVRGVVDSDDLPLNVSREILQESRIVRIMRKRLVRKAFDMIQDLAESENKEDYKKFWENFGRFIKLGCIEDTGNHKRITPLLRFYTSKSEEELKSLDDYVENMGENQKAIFYLATDSLKSAKTAPFLEKLVQKDIEVLYLVEPIDEVAIQNLQTYKEKKFVDISKEDLELGXDDEDEVKERENKQEYNLLCDWIKQQLGDKVAKVQISNRLSSSPCVLVSGKFGWSANMERLMKAQALGDTASLEFMRGRRILEINADHPIIKDLSAACKNAPDSSEAKRAVDLLYDTALISSGFSPDSPAELGNKIYEMMALALGGRWGRSEEEEGDASVEAADSSTSEESSEPEVYEPSEVIAESDPWTTD

SEQ ID NO: 235959 - protein, 76 aa, Glycine max
  Clone ID: PAT_MRT3847_55099C.1.pep
MSAAVCGSKRSFFEELPPSPPLSKRLRCSSSPIRFPPPSFIDQLRPLFPHMDDLVLERALQECGNDIDAVIKRLNE

SEQ ID NO: 235960 - protein, 568 aa, Glycine max
  unsure (1)..(568): unsure at all Xaa locations
  Clone ID: PAT_MRT3847_5509C.1.pep
APDYLKGGATTDIAPENVYMTAQQMNRENSSLAEXNITWNFPVSPGGVPHLVRLHFCDIVSPALNLLYFDVYIKGNIAYKDLDLSALAIHTLASPVYVDFVTNSDDTGFVQVSVGPSELSSSIRMNAILNGAEIMKMVNDVGTNVVHRRKNLWVLVGSIAGGIVVLFLVVTAFLLGTKCRNKKPKQRTVESVGWTPLSMFGGSSLSRSSEPGSHGLLGMKIPFAEIQSATNNFDRNLIIGSGGFGMVYKGVLRDNVKVAVKRGMPGSRQGLPEFQTEITVLSKIRHRHLVSLVGFCEENSEMILVYEYVEKGPLKKHLYGSSLQTPLSWKQRLEICIGAARGLHYLHTGFAQGIIHRDIKSTNILLDENYVAKVADFGLSRSGPCINETHVSTNVKGSFGYLDPEYYRRQQLTDKSDVYSFGVVLFEVLCGRPAVDPQLAREQVNLAEWALEWLQKGMLEQIVDPHLVGQIQQSSLKKFCETAEKCLAEYGVDRPAMGDVLWNLEYALQLQESEPHANSSARESVSVTNAVIPGNPSTNRRTERDYYNCSSDVSTSQVFSQLMNNEGR

SEQ ID NO: 235961 - protein, 299 aa, Glycine max
  Clone ID: PAT_MRT3847_550C.1.pep
MPPMSTIPIHRPEFCTLFFNGSPSPYKCPRITASWIMAMDSKFSSTIKNNSDNDYNLKKKKDEELSVQISTPPISKVETLNSNDLQFDRLQPSDQELGRVKRVWAICQNCAKYWTAAWLRAESHWEDRPFERYVDNYKRKFAEQEFNALKRRCKVQNGDSCACIITVRKEQKNAKHSILKSVVGTLDLNIRYLLQGETYPGERVKAPLFCSINRTPPSRYGYIANLCVIKSARRQGIASNMMSFAIEAAKSNAGLTQVYVHVDRNNRPAQILYQKMGFEMVEMANSRLVEETYLLRLQT

SEQ ID NO: 235962 - protein, 228 aa, Glycine max
  Clone ID: PAT_MRT3847_55100C.1.pep
DIEVLYLVEPIDEVAIQNLQTYKENKFVDISKEDLELGDEDEVKERENKQEYNLLCDWIKQQLGDKVAKVQISKRLSSSPCVLVSGKFGWSANMERLMKAQALGDTASLEFMRGRRILEINTDHPIIKDLSAACKNAPDSSEAKRAVDLLYDTALISSGFSPDSPAELGNKIYEMMALALGGRWGRSEEEEGDAPVEAADSSTSEESSEPEVYEPSEVIAESDPWTTD

SEQ ID NO: 235963 - protein, 260 aa, Glycine max
  Clone ID: PAT_MRT3847_55101C.1.pep
MSAAVCGSKRSFFEELPPSPPLSKRLRCSSSPIRFPPPSPVDQLRPLFPHMDDLVLERALQECGNDIDAAIKRLNELCLGTADGNGIAEELEVVINLDAGNLEGDGNASVSEEQPALNNHLPADGAEWIDFFVREMMVATSVEDARARAARMLEVLEKSISERAKAEATDVLQKENLMLKEQIEALIKEKNSFKNAFRIQHERSADYEVKNQELQHLKQLVSQYQEQIKTLEVNNYALAMHLKQAQQSNPFPGRFPPDVF

SEQ ID NO: 235964 - protein, 85 aa, Glycine max
  Clone ID: PAT_MRT3847_55102C.1.pep
KIPHHSHTFEHGCATDNSMTHVVPKPKIRINVTHLSTIMLSSTGHANLAWPVLPLGILENTGQFCKTKSPEVLRIMAEAVVGLVF

SEQ ID NO: 235965 - protein, 150 aa, Glycine max
  unsure (1)..(150): unsure at all Xaa locations
  Clone ID: PAT_MRT3847_55103C.1.pep
MGHRPPEQPPYFLSEPNPPFPPTTTVRSDSFSLNDRALKVSPSILLIIIILAIVFFISGLLHLLVRFLWETPNXESLMNSINVTALHGQLQQLFHLRVAGPALSXLPLSPCVPLLGLQKAPVVPAGXAVCLCGGQPEDKLRLLPXCSHAF

SEQ ID NO: 235966 - protein, 98 aa, Glycine max
  Clone ID: PAT_MRT3847_55104C.1.pep
AIECRPRTRTNNLKKPMAIAQLAPTSINLKDRDLTFLFMYNPQVASFGNIPEGVCTNSPPSQGLYFLMIRTKDLPLEDIHIHNLFLFSDQQMLVVSFC

SEQ ID NO: 235967 - protein, 64 aa, Glycine max
  Clone ID: PAT_MRT3847_55105C.1.pep
QAFDLLYNQHGHSFCSDLPSWLALAQPVMRCIGDLSGVVKHGGQQPLSKTIQYVISFLGRETEE

SEQ ID NO: 235968 - protein, 130 aa, Glycine max
  Clone ID: PAT_MRT3847_55106C.1.pep
MGFRSDVFVSPPEQPPYFLSEPTPPFPPTVRSDSFSFNDRALKVSPSILLIIIILAIVFFISGLLHLLVRFLWRPQTREPDELDNVTALQSQLQQLFHLHDAGVDQSFIDTLPVFLYKAIIGLKKYPFDC

SEQ ID NO: 235969 - protein, 56 aa, Glycine max
  unsure (1)..(56): unsure at all Xaa locations
  Clone ID: PAT_MRT3847_55107C.1.pep
TSQRCYGRIXGXXXXRMLKXEKKQEPKVKQRXVVVGTRXKKRRXRRXKTIQPGXDF

SEQ ID NO: 235970 - protein, 108 aa, Glycine max
  Clone ID: PAT_MRT3847_55108C.1.pep
LGEVNGAKGDGINGSSSFPNGSFHPASVRKYRASSQFPPPPQNDMLHELPSLNVIEFDCNSSTCHLGQQRAVENRVTVCACCTSRLLQRAKTLVYPVQAIYPKFYGWR

SEQ ID NO: 235971 - protein, 291 aa, Glycine max
  Clone ID: PAT_MRT3847_55109C.1.pep
RTHALSEGCPAEIGHFRKCVCIWIPSLNAWVLDRGGLSTNRLHPIEELASSYLADLSINRTQNPVIGLVDEFSNFPSSSATYTAPVPSAPLLPDNAPWYTDVIVQSTMSAPLLQENPSPINGYSAWPSTYGPLGYDTSFLFYSNGYAPPPGRITSSEWLRWYRENPPPERVNNNMQPTHLNVHGNHENFLHLDTYRFNQFDQWGNPLSPNQYTYVKPPGPPPLLPGYYPYAFGAGEHITNHFHNFQRPSPYGCGSVTEQRNEPLPLLEYLKEREWRLQQDPSLRGPTFTGN

SEQ ID NO: 235972 - protein, 45 aa, Glycine max
  Clone ID: PAT_MRT3847_5510C.1.pep
SSRFGSRCTIHTCLSIGCNLFLGTFLFVYIQALMKMRKLIPKIVL

SEQ ID NO: 235973 - protein, 81 aa, Glycine max
  Clone ID: PAT_MRT3847_55110C.1.pep
LFGLLLTGHAGLRPGLKTVPHVAKPQFHNSRVGYKVPRTKLDPGSNYLKRLGINGLTRDHHFCHQPKIVVRLLNPTIGGPI

SEQ ID NO: 235974 - protein, 38 aa, Glycine max
  unsure (1)..(38): unsure at all Xaa locations
  Clone ID: PAT_MRT3847_55111C.1.pep
IKACSRLSVIPXLPSSVGRTCILFPXXKXWNSMIXXFA

SEQ ID NO: 235975 - protein, 62 aa, Glycine max
  Clone ID: PAT_MRT3847_55112C.1.pep
EVSFSLFFLSHELGTNHHSKFKILAYWNWGGHGILQTIPGLLLVIRPKEPHKGGFGEPYPIF

SEQ ID NO: 235976 - protein, 152 aa, Glycine max
  Clone ID: PAT_MRT3847_55113C.1.pep
MVVLVRAALSLRASLNVYASNKVSLLTNRAGSLRGLRISSHSFQGFRNGRFLGGISIPQPVKLPAPRRYATIPTTSSVNDPSPNWSNRPPKETILLDGCDYEHWLIVMEPPEGSPTRDEIIDSYIKTLAQVVGSEDEARMKIYSVSTKHYFA

SEQ ID NO: 235977 - protein, 58 aa, Glycine max
  Clone ID: PAT_MRT3847_55114C.1.pep
LLRALTRGRTRGYLLYDVQTTLYNGISGHKAREIADGDCQSKSYYAQDSHALTQMTGE

SEQ ID NO: 235978 - protein, 58 aa, Glycine max
  Clone ID: PAT_MRT3847_55115C.1.pep
EREKFLHCNNLGVHSKQLKCLLKNLNAINFCNCFFDFPRAIPKVLFINPFLKKVQKFF

SEQ ID NO: 235979 - protein, 45 aa, Glycine max
  Clone ID: PAT_MRT3847_55116C.1.pep
GAFSSNHWYINRFPISSLFFFLFGYTTGGARFSLAGSTKNKDGLE

SEQ ID NO: 235980 - protein, 73 aa, Glycine max
  Clone ID: PAT_MRT3847_55117C.1.pep
YNSGESGHLSRDCRGGGGGDRYGGGGGGGTYGSRRGGRYSGGRSSRCRRRNCYRRGETGHFARDCPSSARRIY

SEQ ID NO: 235981 - protein, 69 aa, Glycine max
  Clone ID: PAT_MRT3847_55118C.1.pep
SSLPPPHSLIGVVVGEKLPFKGKFSKYSVDSTLFSLYLDSDIFFLFSLYSFVFTQPNLSIAIVFISLGT

SEQ ID NO: 235982 - protein, 34 aa, Glycine max
  Clone ID: PAT_MRT3847_55119C.1.pep
QLTSISTHQSARDSGEYHKRETAHRTRKQPSTKT

SEQ ID NO: 235983 - protein, 241 aa, Glycine max
  Clone ID: PAT_MRT3847_5511C.1.pep
TRPQSVADSESDSVGEIASKHRLLLESVVSLLPAEKGAVSCGFLLKLLKASNILNASSSSKMELARAVGLQLEEATVNDLLIPSLSYTNDTVYDVELVRTILEQFMSQGQSPPTSPARSRFAFERRRSRSAENINLEFQESRRSSSASHSSKLKVAKLVDRYLQEVARDVNFQLSKFIALAEIIPDFARHDHDDLYRAIDIYLKAHPELNMSERKRLCRILDWQKLSMEACMHAAQNELLP

SEQ ID NO: 235984 - protein, 84 aa, Glycine max
  unsure (1)..(84): unsure at all Xaa locations
  Clone ID: PAT_MRT3847_55120C.1.pep
VVDVALLLMAEVGPMAEAETCTPTXLIPCLTTITSCAKPSNAXCTNLKQQKPCLCGYLKNSTLKQYVNSPNARKTDTSYGIPFP

SEQ ID NO: 235985 - protein, 35 aa, Glycine max
  unsure (1)..(35): unsure at all Xaa locations
  Clone ID: PAT_MRT3847_55121C.1.pep
FKQERIYSTKLDRHYNRGKXXXXXTNXRLMAYLVT

SEQ ID NO: 235986 - protein, 87 aa, Glycine max
  unsure (1)..(87): unsure at all Xaa locations
  Clone ID: PAT_MRT3847_55122C.1.pep
LIHXIIIRHXLCEKPPRERDISCFRQFSKKPLSYVADGEEDTFFSKNANPFSKLKCNMEPKKKGEYPYXKKXDEGVSFCYSPSPHFG

SEQ ID NO: 235987 - protein, 47 aa, Glycine max
  Clone ID: PAT_MRT3847_55123C.1.pep
GLWIHGLIQHLSNQSKRAPKVAVGTRTTDASANEWPQGAAYTQYMSS

SEQ ID NO: 235988 - protein, 49 aa, Glycine max
  unsure (1)..(49): unsure at all Xaa locations
  Clone ID: PAT_MRT3847_55124C.1.pep
HSMHRMMNAPEXNDYIDXLLSIDMMGSQGASEASPSKIVFDDKLALPNT

SEQ ID NO: 235989 - protein, 120 aa, Glycine max
  Clone ID: PAT_MRT3847_55125C.1.pep
DNQWQDGKWDHGPTGTLSDATTLVPCVTRKLMPGGIKHTLNSKLMPTIDWILHPPNPFVLNTAHALLVNTTPALMVPFVPLPVLTMIHLADYKKKNVPNHFNENELDHVLEDNDFYVLNH

SEQ ID NO: 235990 - protein, 122 aa, Glycine max
  unsure (1)..(122): unsure at all Xaa locations
  Clone ID: PAT_MRT3847_55126C.1.pep
LAFRASRKFSMTRAIFYVVMQCLGAICGASLVKGFEGKTKYCTVNGGANFVAPGYTKGDGLGAEIVGTLSLRETDLCHIYANTYNTRSNVLITAIVGYCFCAGXDHLATIPITGALMKPATT

SEQ ID NO: 235991 - protein, 51 aa, Glycine max
  Clone ID: PAT_MRT3847_55127C.1.pep
QKGSEEEITRRSLTHTSWDISNSREHERRGWHPVTYKYSDATPMLLKFVKV

SEQ ID NO: 235992 - protein, 73 aa, Glycine max
  Clone ID: PAT_MRT3847_55128C.1.pep
TSTRPELCSLRVMGGCLSVCCSARGCATDEIWAMKEYKVDSSWTKSIVIPNNGFSPICITKDGGIIGSKEVED

SEQ ID NO: 235993 - protein, 62 aa, Glycine max
  Clone ID: PAT_MRT3847_55129C.1.pep
MALASVPKVVFGLIAFAIFWVLAVFPAIPFLPIGRTAGSLLGAMLMVIFQVITPDEAYDTID

SEQ ID NO: 235994 - protein, 62 aa, Glycine max
  Clone ID: PAT_MRT3847_5512C.1.pep
YTTLRKKHYCHHILYILKMCVKELSYLKQEKYEPQDDDDWLPVRRTRWLKCRYSTENIDTSG

SEQ ID NO: 235995 - protein, 63 aa, Glycine max
  Clone ID: PAT_MRT3847_55130C.1.pep
HLFDIYLLEGRGLKKIVSKNNIYHKGKNNHIFYRRVITFLTFIIHDKKNFLSGITFSNLPFFR

SEQ ID NO: 235996 - protein, 90 aa, Glycine max
  Clone ID: PAT_MRT3847_55131C.1.pep
LTKIFLNVIQYSYLIATKLLFCHKKKKHTKEKQVVSHSKSRCLLVLVRPQRQFMKTFAFIGKIFLKGGVAELSTLVVLSETLQIRFLSQL

SEQ ID NO: 235997 - protein, 73 aa, Glycine max
  unsure (1)..(73): unsure at all Xaa locations
  Clone ID: PAT_MRT3847_55133C.1.pep
XFXDXYLXERLPLXXXSDXRLXXXSXXSXXEMXXXAAXDXXXISFLXXXSXTXXIXCXXXXXSXSXFRXLXXS

SEQ ID NO: 235998 - protein, 128 aa, Glycine max
  unsure (1)..(128): unsure at all Xaa locations
  Clone ID: PAT_MRT3847_55134C.1.pep
IMRSRRGRLSALSQFHWEPXLSIGRYLTNGGCLFFGARLLEPSTWSGMLPNRAXGPKSLXXSLITVYRCVASAIXAAAFSRLVSDYCAXXLPXHQHXQYNFGPTCXTVKVCLQKPCPDFLFIXNNKNF

SEQ ID NO: 235999 - protein, 54 aa, Glycine max
  Clone ID: PAT_MRT3847_55135C.1.pep
VARTVTPFLITPLSDQCAANQHMLCNCPLSKDFAIGLNARWLVHLGYRNFRTRR

SEQ ID NO: 236000 - protein, 50 aa, Glycine max
  unsure (1)..(50): unsure at all Xaa locations
  Clone ID: PAT_MRT3847_55136C.1.pep
WVVQSYSGFEMSRSVGFSAETQAQNIVISASYAVGRLGFFGVXRLYRLRE

SEQ ID NO: 236001 - protein, 111 aa, Glycine max
  Clone ID: PAT_MRT3847_55137C.1.pep
PKEPELLFTKTKTMMKKQRRGARTHAVQKEDTTSIAQRTPATAPQKPAQPTPTAPAAAPKPAEPTTPQAPRETTPDRTPDVDKDGNPRQAKAFNKPSRRKKTTQVNNQHKA

SEQ ID NO: 236002 - protein, 104 aa, Glycine max
  unsure (1)..(104): unsure at all Xaa locations
  Clone ID: PAT_MRT3847_55138C.1.pep
ARIARVGELNGNPSGLAVTXICRSIFNEMLIRYSYEKLLRQAKAXSMFLQSFKNLFLWCVWDDNXISVMNCKPYFRVXLKSFLASHNITXTDGIAKLGTLQFRK

SEQ ID NO: 236003 - protein, 217 aa, Glycine max
  unsure (1)..(217): unsure at all Xaa locations
  Clone ID: PAT_MRT3847_55139C.1.pep
MPTLWCWVFTNMNLLSDAQKLFDVMSHRNLVTWSSMVSMYTQHGYNVEALVLFCRFMRSCSEESNEYILASVVRACTQLGSLSHALQVHAFVVKGGFVQDAYVGTSLINFYTKHGYVDEARFIFDGLEXKPVTWTTIIAGYAKLGRSEVSLKLLDQMRGGDVYPDRYVISSVLSACSMLEFLEGGRQIHGYILRRGFDMDVSVVNGIIDFYLKCQKV

SEQ ID NO: 236004 - protein, 42 aa, Glycine max
  Clone ID: PAT_MRT3847_5513C.1.pep
WVLFNHFSIYIGLIQSPFSKKLIFYFYFDKNCTVMRLCAPTL

SEQ ID NO: 236005 - protein, 74 aa, Glycine max
  Clone ID: PAT_MRT3847_55140C.1.pep
SPKRLKIPERGQTGSTRFGRFWHPQKRAFVKGPPNPLPEKKAQKPFWGFFFQKNQTFLTQNPFFYTPQKHYSKK

SEQ ID NO: 236006 - protein, 72 aa, Glycine max
  Clone ID: PAT_MRT3847_55141C.1.pep
ACSNWPNLYSIGQAWNTKISAHLLIYIYTTPAPLIDSLSLMLSLTLAIVNYEPRMCHGCIRRPRLPIRKRGL

SEQ ID NO: 236007 - protein, 330 aa, Glycine max
  unsure (1)..(330): unsure at all Xaa locations
  Clone ID: PAT_MRT3847_55142C.1.pep
MLLTPVSLTSLTLFTMGFIFGVVVGIIVGLAIIVGFVRGENSRAAQRSQLATTVAAFARMTVEDSRKILPPQFYPSWVVFSSSQKLTWLNSHLTKIWPYVNEAASELIKASVEPILEEYRPVVLAALKFSKFTLGTVAPQFTGVSIIEDGGDGVTMELEMQWDGNPSIILDIKTLLGVALPVQVKNIGFTGVFRLIFKPLVDEFPGFGAVSYSLRQKKKLDFTLKVIGGDISAIPGLYDAIEGAIRDAVEDSITWPVRKVVPILPGDYSDLELKPEGILEVKLVQAKELTNKDIIGKSDPYAXVYIRALRERMKKANNQQVSITWTKWEC

SEQ ID NO: 236008 - protein, 153 aa, Glycine max
  Clone ID: PAT_MRT3847_55143C.1.pep
LFTGHLTTKSYVYSFGVVLLELLTGRRATDKTRPKTEQNLVDWSKPYLSSSRRLRYIMDPRLAGQYSVKGAKEMAHLALQCISLNPKDRPRMPTIVETLEGLQQYKDMAVTSGHWPVSSKSTKNRVSNNNNVNVKARAGVNHKQPSPVPSRKT

SEQ ID NO: 236009 - protein, 141 aa, Glycine max
  unsure (1)..(141): unsure at all Xaa locations
  Clone ID: PAT_MRT3847_55144C.1.pep
GVVRNHNAEFLXXYAESIGQANSTIAELTALRKGLELVLENGWNDIWLEGDAKTLVEIIVKRRKVRCTEVQRHINHINTILPEFNNFFVSHIYREGNRAADKFAQMGHHLDQPRIWRHPPDELLAQLLEDAQGKTVLRRKG

SEQ ID NO: 236010 - protein, 34 aa, Glycine max
  Clone ID: PAT_MRT3847_55145C.1.pep
RLVIRPPYEISLITVRTRKAGAAAVLVSCSRAEL

SEQ ID NO: 236011 - protein, 92 aa, Glycine max
  Clone ID: PAT_MRT3847_55146C.1.pep
DPPLVSSERLFHPPMFGLLLLPDIRMILFAPKLRCNTCMVLGTLLFQSTLASHCLFSISLLLSCYYKLLAISLNHWLEPQGFVCTKCQHIVR

SEQ ID NO: 236012 - protein, 62 aa, Glycine max
  Clone ID: PAT_MRT3847_55147C.1.pep
EILIYPQIRNITIRLNDISHKQMHRLYREQEGVRGFRVLTVSVEGNVHHGSSLPASQPLRCT

SEQ ID NO: 236013 - protein, 43 aa, Glycine max
  Clone ID: PAT_MRT3847_55148C.1.pep
NFDGFLPHFLNILPPYSCYRVSSCPKSRSTLEIRTENTALYFY

SEQ ID NO: 236014 - protein, 57 aa, Glycine max
  Clone ID: PAT_MRT3847_55149C.1.pep
VFKFLQQFLVCHHGCCCWVGSRWRMITKFLLASRNTNTRMKNQNFVFFWDYVAARCF

SEQ ID NO: 236015 - protein, 55 aa, Glycine max
  Clone ID: PAT_MRT3847_5514C.1.pep
LSKSPFTLYKHSYPKPNFKNKTWLLRTSHKPIHTSVRNLLTPPKRRRLVVATPPR

SEQ ID NO: 236016 - protein, 80 aa, Glycine max
  Clone ID: PAT_MRT3847_55150C.1.pep
YGWEKTTERAYTCFSFSLTQIGNHCNSQFPLSFSSHPYILHYTRYPLTLIPSLLLSPLLFERTPPHTSCAHPSINPCLLT

SEQ ID NO: 236017 - protein, 421 aa, Glycine max
  Clone ID: PAT_MRT3847_55151C.1.pep
SHRAIEQLPGSNTFEVAGGSSNNFGRSSSFMNDARGPHKRKIPKGIRGNSQDFNASSSSSSTAPPNARHANDVAIMDNTQFHIRSLVEVGPHGSEWSRPNESIMVHDHNHLIHGNYLGQHFPPIAPPWLFQQLNSNNNDGHATPWNQSLPMPCVQAPAINGSSLESVSMGLQRYHDPVGNRNGLRFPYHVPVNQQHHSYHHSTLPMQGVRDHSLNFFPTVTTNSFRVPTNPLRNVAIPTQASFEMGPRHVGPAPSSSLRIYRPHRGVVPETTLRHRSLPPMGFLRVNDVALIDEVGNLVDNHRDMRLDIEDMSYEDLIALGERIGNVNTGLSEETITTQLKTKTYLTGATSINMEEEVCDDQGTFSCIICQDEFKNQEKIGVLQCEHEYHADCLRTWLVVKNVCPICKSEALKSTSVSPPT

SEQ ID NO: 236018 - protein, 221 aa, Glycine max
  unsure (1)..(221): unsure at all Xaa locations
  Clone ID: PAT_MRT3847_55152C.1.pep
LFGHVINKVHEIYDLFWDGIPNQGASWLREAPIETIWAQVVLVPTFGGVIASLLXTSFVNVLTLLSKKKILSXNSICLPKSASRPFLKAMAAFVTLGTGNSLGPEGPSVDIGTSIAKALHPFFDNGKSSGRMLSLLAAGSAAGLSAGFNAAVAGCFFAVESVLWPSSADASLPLTNNTSMVIPSAVIASVVSEIGLGSQPAXKVPEYDFRSPVGSHQHIFL

SEQ ID NO: 236019 - protein, 38 aa, Glycine max
  Clone ID: PAT_MRT3847_55153C.1.pep
VTILERCDLFTPPAPPSNLKFDNIAYTPPNMFIGPPNL

SEQ ID NO: 236020 - protein, 41 aa, Glycine max
  Clone ID: PAT_MRT3847_55154C.1.pep
DSTCSSISVHAQLQRSSLILHYASDPPLLGHTHIPIIQHFD

SEQ ID NO: 236021 - protein, 89 aa, Glycine max
  Clone ID: PAT_MRT3847_55155C.1.pep
MALGWRRRKGNNKNRRKGGKSIAELVTPNHFRCPISLDLMKDPVTLPTGITYDRASVEMRLDEGNITWPVTNHVVRNSDMIPNHPLKVM

SEQ ID NO: 236022 - protein, 107 aa, Glycine max
  Clone ID: PAT_MRT3847_55156C.1.pep
NSARGSSYSALPAYPTHHHHHLPFPYQPHSLHAPGGGSQGQNETTPGGNSSSGRVLRLFGVNMECQPDNDNDSQNSTHECSYTHLYHHQTSSYPSSNPHHHMLPQQP

SEQ ID NO: 236023 - protein, 81 aa, Glycine max
  unsure (1)..(81): unsure at all Xaa locations
  Clone ID: PAT_MRT3847_55157C.1.pep
PXCXFGKPRXPNNGVGMLLXVKPNSSTCLHLTXNHREIFFLEXNSPLVSGYSKAETLXSCAGSMMHNVIRKCXYPNGPSAS

SEQ ID NO: 236024 - protein, 57 aa, Glycine max
  Clone ID: PAT_MRT3847_55158C.1.pep
KEGKNRKLGKFGKIKNTPSDKAKRPVGYLSAKKEETKEMVLDPAEETPHPEGEMKEA

SEQ ID NO: 236025 - protein, 48 aa, Glycine max
  Clone ID: PAT_MRT3847_55159C.1.pep
FWSHACLTDIVIYLCWFCASLFGFHSRWYVFVCILTVSSFNSIHCSFE

SEQ ID NO: 236026 - protein, 80 aa, Glycine max
  unsure (1)..(80): unsure at all Xaa locations
  Clone ID: PAT_MRT3847_5515C.1.pep
RTLLPNCIWQHSHGSLKFFLTSPKLRIFPHKYWILPMLCXLLPSIMCPPASKITLVMYTVTLFVSLFFSFSQRKFTIDRD

SEQ ID NO: 236027 - protein, 169 aa, Glycine max
  Clone ID: PAT_MRT3847_55160C.1.pep
MMCEQSSSLEEFILKDLEMVIGQFTERTRICFRDALYRLARNTEEQHVMLDQNEDLNIQKAIPHTDHNETMRSQDKKPMESATNNIDRIIANLMFKSMEFNIHHSPITSSTNSIQQVIESNNGLHGNSSKAMNMEEKFCYSHPQKLLVDAEIPRFGLSNQPRDTGSYIT

SEQ ID NO: 236028 - protein, 65 aa, Glycine max
  Clone ID: PAT_MRT3847_55161C.1.pep
ESNNGLHGNSSKAMNMEEKFCYSHPQKLLVDAEIPRFRLSNHPRDTGSNITCEGPIKTSFMIGFD

SEQ ID NO: 236029 - protein, 294 aa, Glycine max
  Clone ID: PAT_MRT3847_55162C.1.pep
MQRSELLVAVVKTVLEFLAEAPRFGVEEPKSTLGTSEVLEIISRCNSVGDPSGRFWALSPLDGGSSCGDQHVVALSLIEEGEVVLGVLGCPNYPMRKDWFSYHHSYLRMISKLAPPTSQTWNKGCVIYAKRGSGKAWIQPLLHVNDKFVWPNHAKQVSVSSIDNLEMATFCQPVEKANLSHSFAEGLAHSVGFSNQPLRVYNTMKYTAIACGDAEVFIKFARAGYKEKIWDHAAGAIIIQETGGMVTDAKGHPLDFSKGLYFERLDRGIVACAGATLHEKIIDAVDASWASSCL

SEQ ID NO: 236030 - protein, 75 aa, Glycine max
  Clone ID: PAT_MRT3847_55163C.1.pep
PWHAEIIDDLDDGLTLLRAQTDVTTYNDVVKRGGLKKWKRGVTCNASSHLRERRAFSFFNLREEEKGKRKKRQNG

SEQ ID NO: 236031 - protein, 54 aa, Glycine max
  Clone ID: PAT_MRT3847_55164C.1.pep
MAAPSSLLKVEEIQGRGRGMVASQPLKAGQSVLRDSPILQYSALPLIRQGLACC

SEQ ID NO: 236032 - protein, 170 aa, Glycine max
  Clone ID: PAT_MRT3847_55165C.1.pep
DLTSLKELKQWHYLQVATHESMRLFPPIQFDSEFCLTIVLYGCEKTTEGGTRVTYHPYAMGRLEEIWGCDCLEFRPQRWLKDGVFQPMNPFEYPVFQAGLRVCVGKEVALMEMKSVAVSLLRKFHIELLAPLSFGNPRFSPGLTATFSFGLPVMVRERGTTTTTKPSKGV

SEQ ID NO: 236033 - protein, 75 aa, Glycine max
  Clone ID: PAT_MRT3847_55166C.1.pep
DWVVKILVACPPGLMCLANFFFLIQTSGRSSVFGFFHRLVWVQCCSNKRSSAFGFIYRLVWFQSCSSFCERLGRQ

SEQ ID NO: 236034 - protein, 88 aa, Glycine max
  unsure (1)..(88): unsure at all Xaa locations
  Clone ID: PAT_MRT3847_55167C.1.pep
GKGTGSFSKRRNKTHTLCVKCGHHNFHLQKSHYTTYTFPTTHTEKYNXSIKAIRRKTTKTKKIKYLHNIPHKFKSNFKNNTKATPKKK

SEQ ID NO: 236035 - protein, 47 aa, Glycine max
  Clone ID: PAT_MRT3847_55168C.1.pep
RLERLELEPNRLEYGCEKTTEGLLGVEIGLVKSPNKGVWPIDYIRSG

SEQ ID NO: 236036 - protein, 59 aa, Glycine max
  Clone ID: PAT_MRT3847_55169C.1.pep
YYIHQWVPLKRWALDFSLKAQIFNIIRTKNKDFTFLGNKKQSKYFIKTKIKIRYCFYMN

SEQ ID NO: 236037 - protein, 58 aa, Glycine max
  Clone ID: PAT_MRT3847_5516C.1.pep
APPLYFRTPFAPAGGPSKHQAGTPLVSATPNQFGFNKACFVWGHVCILLLLNHLKFVF

SEQ ID NO: 236038 - protein, 146 aa, Glycine max
  Clone ID: PAT_MRT3847_55170C.1.pep
MEPIGKEEKIACVIGDRSTSDVDVRLRTQEGRDDWLYCHSEILVKNCKYFADRLSENWPTYSSVDDLWHGVRNSLGILQVAVELGCPQIVTACVNYLEAVTWEEAEEDEILKIVPRMGLQAEPILARLQPVNQSAIVNIFVSALRF

SEQ ID NO: 236039 - protein, 212 aa, Glycine max
  unsure (1)..(212): unsure at all Xaa locations
  Clone ID: PAT_MRT3847_55171C.1.pep
MESIGKEEKIACVIGDRSTSDVVVRLRTQEGRDDWLYCHSEILVKNCKYFADRLSENWPTCQILDSRNCVDVYCQELNFDYHXALGILQVAVELGCPQIINACVNYLEAVTWEEAEEDEILKIVPRMGLQAEPILARLQPVNQSAIVNIFVSALRFATSSPPPQLNDLKSSAQEQLEYMLTEDDDAPLLTADGHIKLEGKGCCNRLLFPVLT

SEQ ID NO: 236040 - protein, 82 aa, Glycine max
  Clone ID: PAT_MRT3847_55172C.1.pep
KCSIGYEVQIVVYTRSNNEHVCQRSTGSRRGMRGGMRRRASWRRRQRSSTLSFSSVAHLCYLLLFQTPSCRLFAHASTDAWV

SEQ ID NO: 236041 - protein, 440 aa, Glycine max
  Clone ID: PAT_MRT3847_55173C.1.pep
MESIGKEEKIACVIGDRSTSDVVVRLRTQEGRDDWLYCHSEILVKNCKYFADRLSENWPTCQILDSRNCVDVYCQELNFDYHVNLIRLLYIVIDGSVDDLWHGVRNALGILQVAVELGCPQIINACVNYLEAVTWEEAEEDEILKIVPRMGLQAEPILARLQPVNQSAIVNIFVSALRFATSSPPPQLNDLKSSAQEQLEYMLTEDDDAPLLTADDNIKLEVKECVNRLLSRFNDSLTALFCGSTESLSEAGNIQLFKSYLTDLSWACQILSKLEIMREFVEYWFDASDKIVKVLEQGSSTTEVIEIKLRAIEVTSKVLEAIGYGTVILPTAKRLQVLKVWLPFVRVTKPLIDSVTMNCENAMLLKLDGEMWQSLESTFVSIILALPSGDQAEVLTEWLDNEYMQYPDLTEAFEVWCYRSKVSKRRLSLLEDEHAMTNSF

SEQ ID NO: 236042 - protein, 237 aa, Glycine max
  Clone ID: PAT_MRT3847_55174C.1.pep
MKNGKHNPFQRQLGFLHKENCSLHFLRSASHCSVATYFHLLSLTPHSTTTTYHPSLSFPPAPPSSSSSLSTEKDKTYQNPCDYSNGDWVRDRRSPLYNVTTCGTIKESEKCISNGRPDSGYLYWRWKPNECNLPRFEPLTFLQLVQNKHIAFVGDSLARNQLESLLCMLSTVSSPNLVYQSANDNKFRRWHFPSHNANFSLYWSPFLVQGVERSNEGPYYNTMYLDHVNERWARDLD

SEQ ID NO: 236043 - protein, 67 aa, Glycine max
  Clone ID: PAT_MRT3847_55175C.1.pep
PHVSSEYGSRQTFAKCLSQQSSTIHRLGTIKLRNGAIPHAHPPGANAATRHVLISYTLDAAGLNEVS

SEQ ID NO: 236044 - protein, 78 aa, Glycine max
  Clone ID: PAT_MRT3847_55176C.1.pep
VFEICIGFIGSKYPFEFPQGQPKGLSLCTHRSSSSPLNRPSCGVKLASRSSYYPTPDRVDEAPDPPLHLHRHEFKIFM

SEQ ID NO: 236045 - protein, 286 aa, Glycine max
  Clone ID: PAT_MRT3847_55177C.1.pep
FSLPPRVRSLPHHFTRRSLLLLSTTTTTLSVPSTPPPTPISTPTTPTVTDRVFMDFSLCPNNFLPDRADSLSPLCSDTTLLGRVVLGLYGNLVPLTVSNFKSMCLGLNSTSSSYKNTLVHKVFPGQYFLAGRQGRPDKGEVRPPHDLPRNTDTVAAKAFALTHSRPGVVSLSLSENDDDDEIKLDPGYRNVEFLITTGPGPCPQLDNKNIVFGTVLEGLDVITAIASIPTYLPFERIRQFNDLAQFFGDERAQNARNIWNRPLKSVYISDCGELKVTKPSLTPSLP

SEQ ID NO: 236046 - protein, 58 aa, Glycine max
  Clone ID: PAT_MRT3847_55178C.1.pep
NKLKNIPLPDFQTKGGFKQRVFPPCPVKHPGKGKLHPKKGGHGPEAIHFGEPPSFPHP

SEQ ID NO: 236047 - protein, 59 aa, Glycine max
  Clone ID: PAT_MRT3847_55179C.1.pep
TAKGAPLGLLSIYIRELYLGRMESLVNQVLHIVLMHLMSSCDSYEFSSSISLVQGLSVQ

SEQ ID NO: 236048 - protein, 87 aa, Glycine max
  Clone ID: PAT_MRT3847_5517C.1.pep
FSSPIQKFVWWSTSLLLEKSLQKVGNLCTCVPVGHFSFSGSIIVEAAPRSSEVLVMILTHPQHIVFHFYVAKRVFSGPQNELWFGFG

SEQ ID NO: 236049 - protein, 187 aa, Glycine max
  unsure (1)..(187): unsure at all Xaa locations
  Clone ID: PAT_MRT3847_55180C.1.pep
PTRPPTRPQNSLVDCPVTNQALTWLASQVSILYGAANGKAFVLNFVKKCILVGASVLLLFPLGDNAASKQESQNLGTESGDPKEAKPGAQCGEKKNWILNRKISVSQVAAAVAALHERSLLXQKIKGFWVSQQPSNYQLLAAYSYLSEKANEERTKRXDYRPLIDHDSIHLPQSSNQETSREKTREE

SEQ ID NO: 236050 - protein, 79 aa, Glycine max
  Clone ID: PAT_MRT3847_55181C.1.pep
WEHVSSGKHWTGYDRHIKSLSDSTLYNAECEYSFLDYSLSCTECILIIMLCLGCLKMLMNFGGSPLFHRLWEYTPRNFP

SEQ ID NO: 236051 - protein, 41 aa, Glycine max
  Clone ID: PAT_MRT3847_55182C.1.pep
FGSRVSVVDELGIPVKFVGVGEGVEDLQPFDAEAFVNAIFM

SEQ ID NO: 236052 - protein, 52 aa, Glycine max
  Clone ID: PAT_MRT3847_55183C.1.pep
VSRYKGNYVFPGGKAVGKKKLFAIPWAKFMAEESLYLNDGGLPHRGELPIGP

SEQ ID NO: 236053 - protein, 250 aa, Glycine max
  Clone ID: PAT_MRT3847_55184C.1.pep
GSRSSVADIEFNTVDGFQGREVDIILLSTVRAAHSGITASEINSNSIGFVADVRRMNVALTRARLSLWILGNSRTLQTNQNWAALVKDAKERNLIMKAKMPYHSMFKTDKNKSYAENSDNHARRLKHKKVKDTGQSVTKILVHGKDIVERKTKCVASEVRDRKGNVDENTSSALGKYTPCKERKSEDEHISITKDMGYEVEKYESRSSCGDMFTMSGQQVCNGGREGKDKLKISMGKTALGKRQLKFEHS

SEQ ID NO: 236054 - protein, 62 aa, Glycine max
  Clone ID: PAT_MRT3847_55185C.1.pep
ELTHNLPVMDFSPLISPTRLFCPHYSYFYQEHIYTYTLNNTYIYIYIYIYIHSKYIVSKNSG

SEQ ID NO: 236055 - protein, 159 aa, Glycine max
  unsure (1)..(159): unsure at all Xaa locations
  Clone ID: PAT_MRT3847_55186C.1.pep
ARIASGSSQIACDACQVPQWCLMGTCITITAPNFCPPDYALSTDNESGGTTTKPLYAMYNADFETILKYMAGIVPTIYIKXDCRKTGGIRXDSIGRDYCDTSAVCAAXGAGAISRVXISRSNECNWEPTSRKWGSNWQNPNSVNDDSLCLKILLNNGRF

SEQ ID NO: 236056 - protein, 78 aa, Glycine max
  Clone ID: PAT_MRT3847_55187C.1.pep
FGSSTAARRRQKGPQQLPPPPSKPFEKRCPFFSCGRLVFYSISKTKRLFFFIVSICSFLVANLGPKRWGNWFLIEWKW

SEQ ID NO: 236057 - protein, 58 aa, Glycine max
  unsure (1)..(58): unsure at all Xaa locations
  Clone ID: PAT_MRT3847_55188C.1.pep
EKFHDVELITCXIHGLTHPYLYLQYLLCSSFIQPPPCLKPNLSLCMKKLEPFTNLDNI

SEQ ID NO: 236058 - protein, 91 aa, Glycine max
  Clone ID: PAT_MRT3847_55189C.1.pep
CFFFFFSFFFFGFFFFFFFFFFLGPQTFYFFPIWGPPLGLKKKKLWGGQNYLVKPKKNPFPFLKFPGGGPLNFHKWQKGPFASRPMGFIKD

SEQ ID NO: 236059 - protein, 292 aa, Glycine max
  Clone ID: PAT_MRT3847_5518C.1.pep
NEGGKLWCVGPAAAEMSGYGVVTNSFEELEPAYATGYKKIRGDKLWCIGPVSLINKDHLDKAQRGTASIDVSQHIKWLDCQKPGTVIYACLGSLCNLTTPQLKELGLALEASKRPFIWVIREGGHSEELEKWIKEYGFEERTNARSLLIRGWAPQILILSHPAIGGFITHCGWNSTLEAICAGVPMLTWPLFADQFLNESLVVHVLKVGVKVGVEIPLTWGKEVEIGVQVKKKDVERAIAKLMDETSESEKRRKRVRELAEMANRAVEKGGSSYSNVTLLIQDIMQKNKRDV

SEQ ID NO: 236060 - protein, 84 aa, Glycine max
  Clone ID: PAT_MRT3847_55190C.1.pep
HASVCCVLKAAAQWKPLENYNYNKEEINKVVCNSKSSFVAAADDNGEVKIIDIRQQCLYKTLRAGHTSICSTVEFLPWRSWEGT

SEQ ID NO: 236061 - protein, 50 aa, Glycine max
  Clone ID: PAT_MRT3847_55191C.1.pep
CSYHFYTRSEAEFIKNIVKNALHKLKLIYPIELKEPFCRLLAAVRTRGRR

SEQ ID NO: 236062 - protein, 76 aa, Glycine max
  Clone ID: PAT_MRT3847_55192C.1.pep
LKQRKFWIIKENQSLSQICGLFGDKKKLLTKGKNLMVIWMSLKSETQSVKIKIMNCLVILMRIRILRKGLLGTKES

SEQ ID NO: 236063 - protein, 119 aa, Glycine max
  Clone ID: PAT_MRT3847_55193C.1.pep
MEKEMEAALVHVETTQQHMNPHVLRRKGGFITMPFIIANEALAKLASVGLMPNMVLYLIGDYRLRVLKATKIMFYWFAATNFAPVIGAFVADAYLGRFLAIGLGSILSFLLWILIVLIT

SEQ ID NO: 236064 - protein, 103 aa, Glycine max
  Clone ID: PAT_MRT3847_55194C.1.pep
PLPPGGWVAFRFTPLFFFLHLPWCCFWPGCPVVFSFRPPFFFSKVCLVCTHNRFRFFLGYFRGPRVLGPQCGPFFFFHTPPRVFLCGRFVFFELPFCPPKISL

SEQ ID NO: 236065 - protein, 56 aa, Glycine max
  Clone ID: PAT_MRT3847_55195C.1.pep
CWHCLLLLGGGNFLIYKHIVPLYIAKETQGVKTKVLAPQNFKPPRGDHWGEKNPNF

SEQ ID NO: 236066 - protein, 399 aa, Glycine max
  Clone ID: PAT_MRT3847_55196C.1.pep
PHIWDYTCSTVLTMQWIDGIKLTDETGLNKASLNRRELIDQGLYCSLRQMLEVGYFHADPHPGNLVAINDGSLAYFDFGMMGDIPRHYRIGLIQMIVHFVNRDSLSLANDYLSLGFIPEGIDTHSVSDALQASFADRTTESQDFQGIMNQLYDVMYEFNFSLPPDYALVIRALGSLEGTAKALDPDFKVIQSAYPFVIGRLIADPSPDMRRILRELLIRNNGSIRWNRLERLVAAISEQASEITGDPSFEKFSRSSVWKLFDMHAGVDSTEDLFLFILSAKGLRVRLFLLRDIVEAADVFLQDEVIDCALNENPQGQRTLLFEERAILGRIGKGFEYFCEVVKLAPGEWTAMLIRMAVKPEVHKFALDIISALALHSSPKLQVASWLYLSRLLHKLKLR

SEQ ID NO: 236067 - protein, 35 aa, Glycine max
  Clone ID: PAT_MRT3847_55197C.1.pep
IIGLTKKPDLNDSVLRAKLAKGLGHYYYGQPAWPN

SEQ ID NO: 236068 - protein, 248 aa, Glycine max
  Clone ID: PAT_MRT3847_55198C.1.pep
MANKEFKVPPVAFPSAGNPASAGPNLQQRRMPTPPFQPNSGIPFMSFDIGSAAASTSSGPIYTGPAVGPGGSANFDDEEPLLDELGIHPDQIWSKIRSVLNPFRVNHTVHKDSDLSGPILLYMSFCLFQLLAGKIQFGVILGWIVVSSIFLYVVFNMLAGRTGNLDLHTCTSVVGYCLLPVVIFSALSLFLPVDGVIRLSVASVFVLWATRASAGLVVSLADGGDEHRGLIAYASFLIYTLFSLLVIF

SEQ ID NO: 236069 - protein, 75 aa, Glycine max
  Clone ID: PAT_MRT3847_55199C.1.pep
IIQYASQTIAPVEWPFTFRCPEWGSHSITPTLFIVAPAHELTQTVGQVCVRCRYSTLKKLAHMHDHYVVVRALKL

SEQ ID NO: 236070 - protein, 84 aa, Glycine max
  Clone ID: PAT_MRT3847_5519C.1.pep
PVNSRGSCLISRIQDYQNFSGHHEVSTVLWKLMLCSTGRRTLQNTPPDLRIMPPICIKLTKEWDRAGATWLKNVGCQLAVVIHT

SEQ ID NO: 236071 - protein, 114 aa, Glycine max
  unsure (1)..(114): unsure at all Xaa locations
  Clone ID: PAT_MRT3847_551C.1.pep
NSAPGRREYAIKQYQEIPNNQILEILKVSFDALEEEEKSVFLDIACCFKGYAFIEVKDILVLIMVITXKYHVGMLVEKSLIKVKTVTLHDLTEDMGKKFVTQGSARELGSKGSL

SEQ ID NO: 236072 - protein, 243 aa, Glycine max
  unsure (1)..(243): unsure at all Xaa locations
  Clone ID: PAT_MRT3847_55200C.1.pep
VECCLSFVQWREVLWVDIAIGLVVFSNWVDGFVGYEHHFNETELSLLEAHEASLSYAGTERNNLLLVGLTLIQNAAAKGAVCLDGTLXPGYHLHRGYGSGANSWLIXLQGGGWCNNIRTCVYRKKTRRGSSDFMEKEIPFTGILSNKAEENPDFFNWNRVKLRYCDGASFTGDSEDETAELQFRGQRIWAAAMEDLMSKGMRFANQALFSGCSAGGLATIIHCDEFRXLFXXTTXVXCLXDAG

SEQ ID NO: 236073 - protein, 224 aa, Glycine max
  unsure (1)..(224): unsure at all Xaa locations
  Clone ID: PAT_MRT3847_55201C.1.pep
MAVTFSDLHTEEGIKSLDQFLSGKTYISGDQLTKDDIKVYAAVVEKPGDSFPNAAKWYDAVSSQLAPSFPGHAQGVRFSGAAAPAEAAPAKAAATAEEDDDDLDLFGDETEEDKKAAEEREAAKKPAKKKESGKSSVLLDVKPWDDETDMKKLEEAVRSIEMPGLLWGASKLVPXVGYGIKKLQIMMTIVDDLVSVDTLVEERLTVEPCNEYIQSCDIVAFNKI

SEQ ID NO: 236074 - protein, 50 aa, Glycine max
  Clone ID: PAT_MRT3847_55202C.1.pep
TLRLSSPSRNTNNHHRSRRLTYSFSLSPYILPTFFTKTTIGRRISPLPSL

SEQ ID NO: 236075 - protein, 91 aa, Glycine max
  Clone ID: PAT_MRT3847_55203C.1.pep
TPTHPSPPPPPRHTGAAPPELPRPARLHGAPPPAAPPRRKTSRHESPPKPATTRPRKTRAQGKHGTNQKNDSRAEPRATHAAATAGSLQAP

SEQ ID NO: 236076 - protein, 88 aa, Glycine max
  Clone ID: PAT_MRT3847_55204C.1.pep
VVVLFFFFLFLIFLRSFLFVGHKQTLYCHWRKFECIPFFWATWRWDITNILPFLITKPFGSKLLRWGGLICSIAMVLLRATLTTCRWG

SEQ ID NO: 236077 - protein, 59 aa, Glycine max
  unsure (1)..(59): unsure at all Xaa locations
  Clone ID: PAT_MRT3847_55205C.1.pep
FXSPLXTQLGXAMXXKLDLXXXXFSXPXWXIYPXKXKXXKKKKLTLLHSLRSDGTREGL

SEQ ID NO: 236078 - protein, 74 aa, Glycine max
  unsure (1)..(74): unsure at all Xaa locations
  Clone ID: PAT_MRT3847_55206C.1.pep
XRPCRLMSNIIGATVTISMPYFSLLNFIVTLQSVLFAKLYILIAAVNKKGLSLKAKLGIGLGIGIPSMLAIGLL

SEQ ID NO: 236079 - protein, 88 aa, Glycine max
  Clone ID: PAT_MRT3847_55207C.1.pep
LEQGCSRHGNHGIPQDLSFRFSSTENGLSYKQIYNLTCGRIRKISDSFYMISVLYISAFIYLVQMGGPDLVSYLIDFFWGGGGLCSGI

SEQ ID NO: 236080 - protein, 105 aa, Glycine max
  unsure (1)..(105): unsure at all Xaa locations
  Clone ID: PAT_MRT3847_55208C.1.pep
DIEHQYRLGNDYRSSXKKNTSTNNLRLDDWVLCRTYNKKGKIVIANGVWVADSKIAHVSEEGVQCQDETEPQIKMFGHDDFRYLQLFMDTYDSGPMFHTDSNCSE

SEQ ID NO: 236081 - protein, 119 aa, Glycine max
  unsure (1)..(119): unsure at all Xaa locations
  Clone ID: PAT_MRT3847_55209C.1.pep
FRLIAAARKKGRLRDKIARPANAADKRRDRASLGQVFLTNSNRTQHSDAXXWTKSEPHSRELTVPIKVCGPNNRKETXVTRAGNPNLXHPKVLIDQSKQSTATDIIQAIXQDKQIAGDT

SEQ ID NO: 236082 - protein, 71 aa, Glycine max
  Clone ID: PAT_MRT3847_5520C.1.pep
MSNALSFTLPALNNPQLNALNSPNKARLRHGLRNPVVASCIERKEVLGTPVRPSGSDRIWLLQSGRVPKLR

SEQ ID NO: 236083 - protein, 111 aa, Glycine max
  Clone ID: PAT_MRT3847_55210C.1.pep
FSFFMLYFFFFFFFFFFFFLGFGFLTGLQPPNGGPIKSTMPFFICLPRGEGTLISLSPPMEINGIAYMGFPWINYISVPCLNRLKRMFSHNPPIFLIVRSHKRGLLISKFF

SEQ ID NO: 236084 - protein, 43 aa, Glycine max
  Clone ID: PAT_MRT3847_55211C.1.pep
LAEDRRMEKPVSPFHGRAPRAATEKRLDDLSLEGDSPVDWFPW

SEQ ID NO: 236085 - protein, 196 aa, Glycine max
  Clone ID: PAT_MRT3847_55212C.1.pep
MARVLAQSTGMPGLLSGRRHGPHKGSGKTKRSVKMMSTLRIPALRMSSFSGLRTLNPLDSVSRPRHTFPLTTTSRRERAKRCVPKAMFERFTEKAIKVIMLAQEEARRLGHNFVGTEQILLGLIGEGTGIAAKVLKSMGINLKDARVEVEKIIGRGSGFVAVEIPFTPRAKRVLELSLEEARQLEEEEQRMEWRIE

SEQ ID NO: 236086 - protein, 56 aa, Glycine max
  Clone ID: PAT_MRT3847_55213C.1.pep
SEIDIMGEHSDIILLSPPFYQMLKTDTFECSLFSYMSTNSYHTFHHFRADYLSTLL

SEQ ID NO: 236087 - protein, 46 aa, Glycine max
  Clone ID: PAT_MRT3847_55214C.1.pep
PRGALGSLKKARTPRGLRHNWGLGGRGQHPKITAPRGKTVGVSKKG

SEQ ID NO: 236088 - protein, 123 aa, Glycine max
  Clone ID: PAT_MRT3847_55215C.1.pep
IRLERTLTNTSSCQIPTKATTHAVSSSSSSPALRLNLKRQFSIANPLFLLISDSSLTCILSFSLLFSSTIRYCVVFNFYFLYLIYRVFPFLLIRLMLDDCLELNSLKFRMRFISYASLSISVF

SEQ ID NO: 236089 - protein, 120 aa, Glycine max
  unsure (1)..(120): unsure at all Xaa locations
  Clone ID: PAT_MRT3847_55216C.1.pep
SIKDNCYLIIDILSGSMGPYPPLLRSLNIKPPLFSGIHTGAGGNPSGGAGTPKQXVSSGQPTQERWQETLSLTQNHEKPTLASSKPPKLWGMTRRHPPKDHNWVQWMPQMEATHNLGRLP

SEQ ID NO: 236090 - protein, 56 aa, Glycine max
  Clone ID: PAT_MRT3847_55217C.1.pep
LVEKVLLLVVMIMHRFWSYSKRHMIMYIKKELFCISNMAFHQLFKLCSIMLQKKRT

SEQ ID NO: 236091 - protein, 251 aa, Glycine max
  unsure (1)..(251): unsure at all Xaa locations
  Clone ID: PAT_MRT3847_55218C.1.pep
LPGYRRETPSLGPYSPCVLCTCNGHSETCDPETGVCDCRDNTAGPHCEKCSDGYYGDSTLGTSSDCQPCPCPGGSSCAIVPKTKEVVCTHCPTGTAGKRCELCDDGYFGDPLGSNGPVRLCRPCQCNDNIDPNAVGNCNRLTGECLKCIYNTAGFYCDRCKEGFFGNPLAPNPADKCKACACNPYGTVQQQSSCNPVTGQCQCLPHVSGRDCGTCDPGYYNLQSGQGCERCDCHAXGSTNGQCDIRTGQCE

SEQ ID NO: 236092 - protein, 176 aa, Glycine max
  unsure (1)..(176): unsure at all Xaa locations
  Clone ID: PAT_MRT3847_55219C.1.pep
FSQIALVLICLKYLRGISIFGRHLFRIYAVPLSLTIIWIYASFLTAGGAYNYKGCNPDIPSSNILLDACRKHAYTMKHCRTDVSNALSTAAWVRMPYPLQGGIPIFHFRTSIIMVIVSLVASVDSVGTYRATSLQVNSRPPTXGVVSRGIALEGFCSILAGLWGSWTGATTLTETC

SEQ ID NO: 236093 - protein, 89 aa, Glycine max
  Clone ID: PAT_MRT3847_5521C.1.pep
LEPNRLEANRDVRDGDGVYVYENDKKPCGRKVVLGNEKHDPGVVKHSCTLYIHTSYPACNAFVSSLYFLFSSLGAMGKIVVYRKTWVSL

SEQ ID NO: 236094 - protein, 65 aa, Glycine max
  Clone ID: PAT_MRT3847_55220C.1.pep
RHASITNLNFPDSFQSARSCEDGRHNGGCGHVSSLFSLRDRLLLRCQQCSSYNVQRRGFQRDIVT

SEQ ID NO: 236095 - protein, 50 aa, Glycine max
  Clone ID: PAT_MRT3847_55221C.1.pep
LIQSDLIVNVIMRLNHNRLNIRFLVKSDSIHFVNFYYYLNNLIKANLYML

SEQ ID NO: 236096 - protein, 101 aa, Glycine max
  Clone ID: PAT_MRT3847_55222C.1.pep
KPGRALKPQKATLEKTVFFGGEGNFPGGGGSPPKGPQPIKEQLIIRGTTPQTPFFKRTFRKVKSGKTIKARKVVVWDKQKINVGGPKRVLGQVTYSTPEKI

SEQ ID NO: 236097 - protein, 146 aa, Glycine max
  Clone ID: PAT_MRT3847_55223C.1.pep
MPKRGGTKKTAKATESVTEPQSQTPTRPVQLNFGAAMQRQIDAIRAVRDVEIEHLLTELRFLRSRFDGEELRKPVLHVFEETLPNLAVVVNGECNKNLEVKWRETEGCNDGVNLHASLLQRLSIASIPRFPGFEYSTNEGSFCCKM

SEQ ID NO: 236098 - protein, 89 aa, Glycine max
  Clone ID: PAT_MRT3847_55224C.1.pep
ASIELTQLVQRNPLQLVLSVTSIIVSTAMLVVAMCVLPAMGVDSRLAWNPFCVNGHIYCDTCRAGFETTSTSYIAGAEIILQCKNRVSN

SEQ ID NO: 236099 - protein, 122 aa, Glycine max
  unsure (1)..(122): unsure at all Xaa locations
  Clone ID: PAT_MRT3847_55225C.1.pep
KVQEFVVSYKLGDREENMKVLDFFGAAVVLVAWACHGASFQRVPFRMKTGYWEPSSEGKCARFKLGWETHNIRAFKTISXECVXPTKDYIYGRQXRSDSKTVXQQAFFYASEREVHYNDIFI

SEQ ID NO: 236100 - protein, 60 aa, Glycine max
  Clone ID: PAT_MRT3847_55226C.1.pep
SFCFFLCRLVVFCLTMVHLLRSGLLLVHKLKFCNLMKIHKRYKISILLLKTKEKLKPNFM

SEQ ID NO: 236101 - protein, 45 aa, Glycine max
  Clone ID: PAT_MRT3847_55227C.1.pep
IQRNTVNLLGVGGMNHFASYPTKEESQTLVSARVIGHCTAGHSPL

SEQ ID NO: 236102 - protein, 87 aa, Glycine max
  Clone ID: PAT_MRT3847_55228C.1.pep
VARRLSSRFVGLISHGYGRYRPALHCLCAKGIYYNTFLLTPSPLPTALQTYLWWLAFLSPPPPPPPPPPPPPQRRRTSYSDDGKPSW

SEQ ID NO: 236103 - protein, 45 aa, Glycine max
  unsure (1)..(45): unsure at all Xaa locations
  Clone ID: PAT_MRT3847_55229C.1.pep
SVTLSDLILTVNYSNIXSLLDLTCHTVSTMINGKTPVEISMTYNI

SEQ ID NO: 236104 - protein, 76 aa, Glycine max
  unsure (1)..(76): unsure at all Xaa locations
  Clone ID: PAT_MRT3847_5522C.1.pep
CLLHYCPPEFSSSFAGVSLGRILLRCLTISSSSIFSSSSSVSSSDCITVKAFQLLAEVYGWKFKVRPGTYIISAGX

SEQ ID NO: 236105 - protein, 230 aa, Glycine max
  Clone ID: PAT_MRT3847_55230C.1.pep
IQAGDLKSAKLYVHVKPARARAAFTDVAMWVFCPFNGPSTLKIGITSRAFSKVGEHVGDWEHFTLRICNFSGELWSIYFSQHSGGKWVDAYELEYIDGNKAVVYSSKNGHASYPHPGTYLQGSSKLGIGIRNDATRSNLYVDSSVQYELVAAEYLGDVVREPQWLQFMREWGPKIVYDSKTELDKIINALPGGLRNSFGSLIKKLPVELYGEEGPTGPKEKNNWIGDERW

SEQ ID NO: 236106 - protein, 39 aa, Glycine max
  Clone ID: PAT_MRT3847_55231C.1.pep
MTMDLHTIKMLLEEVVMIPIKRLWNKIVKFLTHVIKRML

SEQ ID NO: 236107 - protein, 39 aa, Glycine max
  Clone ID: PAT_MRT3847_55232C.1.pep
KLSPWFRLVVDNFLFKWWDHLERGALGEVTDMKTIHKLT

SEQ ID NO: 236108 - protein, 50 aa, Glycine max
  Clone ID: PAT_MRT3847_55233C.1.pep
YTSSFFFVYFPSLFGDPSLANILHTPITYVSRRRILCITPPSKGAIFNNS

SEQ ID NO: 236109 - protein, 104 aa, Glycine max
  Clone ID: PAT_MRT3847_55234C.1.pep
LYTVIYALYISSGYEGEVSKGTSTIARASISPSRYFRERNFGYVLTFATCLYISGRVCKTNETISHIRGIFILYLLGCAIERKQGSKLGVHISMIEFPSVRPGV

SEQ ID NO: 236110 - protein, 289 aa, Glycine max
  unsure (1)..(289): unsure at all Xaa locations
  Clone ID: PAT_MRT3847_55235C.1.pep
LHKAWEFFLPLDCPDHNHFLNSLSLLLHQACRSTFHLSLIHDHHLDFEFLPTESPSQASWIAHMMEAQSQHIKGVCLSLEEEPKEEFKVTTTHYCNWDSTATSTYQAHDQVVFGEESHTHTFGGKRGRKPGEKRRTKAEKTISLPVLRQYFAGSLKDAAKSIGVCPTTLKRICRQHGITRWPSRKIKKVGHSLKKLQLVIDSVQGAEGAIQIGSFXNSFPELSSQSSKSNNNNNSSSPTAAAAAAQSPQQPLESESYFLRMKKSVLACHPHWGFTELQLEIPRRFHLND

SEQ ID NO: 236111 - protein, 47 aa, Glycine max
  Clone ID: PAT_MRT3847_55236C.1.pep
FFFLLSLLTISLRIAITFLDLLNLTLKCASKYNKSELLLSITMHYYL

SEQ ID NO: 236112 - protein, 36 aa, Glycine max
  Clone ID: PAT_MRT3847_55237C.1.pep
LESNQSSLEWPGLANKLLSKGTDFLGCNIPSLEGWI

SEQ ID NO: 236113 - protein, 67 aa, Glycine max
  Clone ID: PAT_MRT3847_55238C.1.pep
VVLYNNLWEQKDKTKQERMSGGGGGEEEATLEFTHDVELWYAVCTVIVAISLGAERHLQYGGQFLKP

SEQ ID NO: 236114 - protein, 45 aa, Glycine max
  Clone ID: PAT_MRT3847_55239C.1.pep
AYNLAFKARSGRSGSRQIGRRLRVSRDYAVQDIKFGVEAPALMLK

SEQ ID NO: 236115 - protein, 86 aa, Glycine max
  Clone ID: PAT_MRT3847_5523C.1.pep
FTQSLIVGPPKTNATLVMVQVYHLTWVLGSCCEPAFRLASMIWSQSKPGCPSYTDADGHSKASWAEGSSGKEAPRKRENYGRLNSQ

SEQ ID NO: 236116 - protein, 97 aa, Glycine max
  unsure (1)..(97): unsure at all Xaa locations
  Clone ID: PAT_MRT3847_55240C.1.pep
NSPKNLIKKVYKKKKFFKGKNVKKGIVFWVKTVHCISKISFYLWLGAKKAPWGIYVWRKKNVFSWYIGNPFPPGKNPKKKKKKKKKNKKKIFXXXXX

SEQ ID NO: 236117 - protein, 144 aa, Glycine max
  unsure (1)..(144): unsure at all Xaa locations
  Clone ID: PAT_MRT3847_55241C.1.pep
TSIRAVYCTQLLSSSETTVNLNIWHTIXQERYNNTAPMYYRGATSCIAVYHIXRVDTWVPSLKWVHELPTHGIYKSVMALQANKSYLEPKRQVETQVXSTLLKQNGMFYMEXTSAKTAEDINDLFYEIANRLARALPPKPTGMN

SEQ ID NO: 236118 - protein, 67 aa, Glycine max
  Clone ID: PAT_MRT3847_55242C.1.pep
WYPLYALNPYVVRNCVPYTYFAQVLNITMYSSTSKHTHYTCTSIGPLFRIAFISSAPKHIMRGHLLM

SEQ ID NO: 236119 - protein, 122 aa, Glycine max
  unsure (1)..(122): unsure at all Xaa locations
  Clone ID: PAT_MRT3847_55243C.1.pep
GSSEHSTLNHYLFLTHLAPEINXNFPSAGALTTTPTCLHLLSKHPCIYTVKNLLSLHVLLHYCGPKKLHQIINGTNITITMYQATHTTPGSAGWVNITDLXSGKVPFGPENNHGTLYLTFAK

SEQ ID NO: 236120 - protein, 124 aa, Glycine max
  Clone ID: PAT_MRT3847_55244C.1.pep
GFCFMKTISIHSITTCFSRTMRKGQLQARALPYEAILNCAHSIRDTANAVNTHPRMPGYLSQGLTYYKHPFGRMSNWTTNHTFYRRGISACQRRQPIEISPKDKTLGHEGILHTLAQLHFIRIF

SEQ ID NO: 236121 - protein, 40 aa, Glycine max
  Clone ID: PAT_MRT3847_55245C.1.pep
SRKTSRHPSTQVTSAFVPSFNVHSPILQPYQNSTRGRPHA

SEQ ID NO: 236122 - protein, 254 aa, Glycine max
  Clone ID: PAT_MRT3847_55246C.1.pep
MLAVFAKAIGKPPEELRLPAMGSNNSKTPEEIVQKFQSLWPDSAVYNLPHGNFMALSHEDESPIHPRCIVVLDDIFCIFMGALANIAELRHHYGLPRQATEAMIVIEAYKALRDRAPYPPDQVAKHLDGKFAFIIFDAKTYTLFIARDREGSVKFQWGMARDGSLVCSDDPTIIREGCGQACAAFPPGCIFINGSGLTSFDHPLHKVQAVAHEDDSGNILSVYFQVDLYTKIPSIPRTGSAANWADAVAEVKGE

SEQ ID NO: 236123 - protein, 98 aa, Glycine max
  Clone ID: PAT_MRT3847_55247C.1.pep
SVQIHYKTKDEKKKRALFVKKKKNLGGFTSVFNFWDGSFSPQSFKIKSESEFYDCPVLFWLIQAGALNSGHLHVVGPSMGITLSGDGSIGNKGLFPTA

SEQ ID NO: 236124 - protein, 148 aa, Glycine max
  Clone ID: PAT_MRT3847_55248C.1.pep
MEREILTKTVRNRDASFSSYLRPDNKATPITTAAPIEDATTELSIFDARKYFNDDDSSNNNNNNANNIQKVSISRVSPMERIPERGDAIITEATRYSSASSSVDSYAHIRNYRGRSFHTVTPTASSEASWNSQTGLLSHPPGAIPVSM

SEQ ID NO: 236125 - protein, 73 aa, Glycine max
  Clone ID: PAT_MRT3847_55249C.1.pep
VVPGLQCGCLVNRITVKSSRVIKMYRVIITIDCGVQRHSFEGGCKKRQALISVQWILWKTKKKKGEGATDSSS

SEQ ID NO: 236126 - protein, 184 aa, Glycine max
  Clone ID: PAT_MRT3847_5524C.1.pep
RSSEFGSCGGINIDGISTKPSWRNFSYADLAVATDDFSPENLLGKGGHAEVYKGYLADGQVVAVKRIMRNEKEAEDRAGDFLTELGIIAHINHPNATRLIGFGIDNGLYFVLQLAPHGSLSSLLFGSECLEWKIRFKVAVGVAKGLQYLHHDCPRRIIHRDIKASNILLNENNEAEISDFGLAK

SEQ ID NO: 236127 - protein, 81 aa, Glycine max
  Clone ID: PAT_MRT3847_55250C.1.pep
NYSTNNIHGFGYILILASMTLSFKEIQLYTIGLGPCAINVTSNIGHCVYLIMSSAEMRELKFIIVNTHSAGNKLSPIPLGD

SEQ ID NO: 236128 - protein, 79 aa, Glycine max
  unsure (1)..(79): unsure at all Xaa locations
  Clone ID: PAT_MRT3847_55251C.1.pep
WIGQVHEWRLTVAGQHSDTIFWQEKGTGAKVYIPKHIVFTDRGWQTIDTFMRNXTLRLYRPLGGSNKAVLESNFRETNP

SEQ ID NO: 236129 - protein, 80 aa, Glycine max
  Clone ID: PAT_MRT3847_55252C.1.pep
LYILKIFILLNQQQQTVKIKPYKDQYTKNQPNNTLFTTKASSNSKPQHQFIFQGQGSFLTHITFSDNIYHPYRIRSCCYI

SEQ ID NO: 236130 - protein, 86 aa, Glycine max
  Clone ID: PAT_MRT3847_55253C.1.pep
EDYIWGLRTVHKPRGCVVPLTRLQHRVLLGALYHQNLFTTLSSFSYSIDTPCDHKSVRCSSLARPPNRTRRTHFLKPKQQAVNCTA

SEQ ID NO: 236131 - protein, 89 aa, Glycine max
  Clone ID: PAT_MRT3847_55254C.1.pep
KCSLQLAKRSAFGGFIMLGVPQLKFYGQARSLSSHPSMERPPTHRCQPPVHKLNLHQGCCRKRLFHCLIAVAIAAQGLHHGGPIVRWPR

SEQ ID NO: 236132 - protein, 27 aa, Glycine max
  Clone ID: PAT_MRT3847_55255C.1.pep
THIDDIYDSKLTVEQNKLDISCAVEGI

SEQ ID NO: 236133 - protein, 478 aa, Glycine max
  unsure (1)..(478): unsure at all Xaa locations
  Clone ID: PAT_MRT3847_55256C.1.pep
MVKICGIGAGYVGGPTMAVIALKCPSIEVAVVDISHSRISAWNSNKLPIYEPGLEQVVNQCRGKNLLFSTNVEKHVHEADIIFVSVNTPTKIRGLGAGKAADLTYWESAARMIADVSRCNKVVVEKSTVPVRTAEAIEKILCHNTNSKGIKYQILSNPEFLSEGTAIQDLLNPDRVLIGGNQCPEGLQAIQKLKAIYAHWVPEDRIITTNLWSAELSKLADNAFLAQRISSINAMSALCEATGAEVSQVSHALSKNTKIGPKFLNASVGFGGSCFQKDILNLVYICESNGLTEVANYWKQVIKVNDYQKSRSVRRVVTSMFNTVXGKRIAILGFAFKKDTSDTRKTPAIDVCKGLLGDNACLTIYDPCVTEEQIQKDLSMDGVEWDQQPMSSTMVKQVSVVGDAYEATKEAHGICILTEWDEFKNIDYQRVYDNMHKPAFVFDGRNILNVDKLREIGFIVYSIGRPLEQWLKNMPQQA

SEQ ID NO: 236134 - protein, 69 aa, Glycine max
  unsure (1)..(69): unsure at all Xaa locations
  Clone ID: PAT_MRT3847_55257C.1.pep
STWCALSSSHATHHLVXLQSNXSLKLSSSRSSIVPFILVLIICNRWEIWILPSSSKRSTSRADRYPFXS

SEQ ID NO: 236135 - protein, 58 aa, Glycine max
  Clone ID: PAT_MRT3847_55258C.1.pep
GPRPWKLTQNIGRFNRWLLGPQPPAYIKGKGAPLRFFKRGFGGPGLWNFFLGNQWYQG

SEQ ID NO: 236136 - protein, 83 aa, Glycine max
  Clone ID: PAT_MRT3847_55259C.1.pep
SNDAYESVEHRVMVNSEKERFSIPFFFNPAHDIEVKPLEELTNEHNPSKYRPYKWGKFLVHRKGSNFKKQNVENIQIYHYKIT

SEQ ID NO: 236137 - protein, 334 aa, Glycine max
  Clone ID: PAT_MRT3847_5525C.1.pep
MASSFDRWEKDPFFNAAEEVQESADRMESTYRTWLHATKDASSMWNSDELCRDLRTALSTAKWQLEEFARAVRSSYGKSSSEEARNRHRDFITAIEDNIMKVEHSLSESVVPGGKASLPWLRLDEGEQDELALFLSGMPAANNRNIEDPRLSENVSASDCLKDFHVSSVWGDSKEDISHGHRRAASASADIGFYKISVHDDAQQWSSSSGSSGPIHKVPSLSGFLRSMESVSKLKWPRNGYRKLKAEDHHKETDGELLPTAGLNRGNNARCERSKSGLDSCDESYDKQLYGWHGAIWRQLQRSQYQMQYSQPVRIVVWIVVLLCFIALIAFHAM

SEQ ID NO: 236138 - protein, 64 aa, Glycine max
  Clone ID: PAT_MRT3847_55260C.1.pep
SVLVSALMLGVAVVCLHGAFRVPEDLFLDDQENSQATGFLSFLRGPASAAAAAAAAVPTVASRV

SEQ ID NO: 236139 - protein, 218 aa, Glycine max
  Clone ID: PAT_MRT3847_55261C.1.pep
TSCSCYAPFFFPGGNLITVKNRIDCEGALVAMGEIPDWSVLGAVSVINSSSERLGGARVVATAVVPDDVAKIQDILRRWSDIDQMDLIITLGGTGFTSRDLTPEATKPLIEKETPGLLHVMMQESLKVTKSAMLSRSAAGIRGSTLIINMPGNPNAVAECMEALLPALKHGLKQLRGDKKEKHPRHVPHAEAVPADVWEQSYMLATGAGSDVSCSCCK

SEQ ID NO: 236140 - protein, 225 aa, Glycine max
  unsure (1)..(225): unsure at all Xaa locations
  Clone ID: PAT_MRT3847_55262C.1.pep
MAIQHHNDQLEHNENVSSVLDALYCDEGKWEEEEEEKEEEEDEGENESEVTTNTATCLFPLLLLEQDLFWEDEELNSIFSKEKVQHEEAYDYNNLNSDDNNSNDNNNNNNNVLLDSCLSQPRREAVEWILKXNAHYGFSALTATTGPLLTWYRFLLSFHFQREKPWMIQLVTITCICLAAKVEKTQVPLLXHLQVQDTXYIFKTNTIQRMKLLVLCTLKMKDAPP

SEQ ID NO: 236141 - protein, 77 aa, Glycine max
  Clone ID: PAT_MRT3847_55263C.1.pep
GESPFRTFLPHVLGLCLLHRRGWVCTPPAQKRYGHLAWLYGRCSAWVVAPPCCGFSFLFWFPMSCCLFTFFNFCQKK

SEQ ID NO: 236142 - protein, 126 aa, Glycine max
  Clone ID: PAT_MRT3847_55264C.1.pep
KGPCLAPKKYGGSPPVAPPAFFLLSPPVFCWEFVRDYNFFHGRYFPLFAPPLLYPPIKEKCVAPRGPLLNSRGTPRAPPRFQKKKKKKKKKKKKKKKKKKKKKKKKKKKKKKKKKKKKKKKKKKKK

SEQ ID NO: 236143 - protein, 114 aa, Glycine max
  Clone ID: PAT_MRT3847_55265C.1.pep
APRFLRGKFFLYPPPPPLLGDHLVQPPLPFWLSGPLGGLSPLLKPEPPPGGWPFEPFPPGRAPPGGGLPGVKLSLLQKKLGGNRIFLQGFKKFPAGDFFFFKAFGGFAFKLRLF

SEQ ID NO: 236144 - protein, 52 aa, Glycine max
  Clone ID: PAT_MRT3847_55266C.1.pep
YTKECTYQGHKQFLRQYKPSYLLVKGRFQICINNTHFSCTIGLDLNRQAYHC

SEQ ID NO: 236145 - protein, 49 aa, Glycine max
  Clone ID: PAT_MRT3847_55267C.1.pep
PRVRPLVHTMENDDDIYTLVFIADLRAIKYEIKAAFKMQSDFYTPLVNI

SEQ ID NO: 236146 - protein, 33 aa, Glycine max
  Clone ID: PAT_MRT3847_55268C.1.pep
QLKTFFIIYFYYNYIKIILIQEVTLNLLNTLSH

SEQ ID NO: 236147 - protein, 58 aa, Glycine max
  Clone ID: PAT_MRT3847_55269C.1.pep
TPRVRARRRQKGVDYIIVKNSWGSKWGEKGYIRMRRNIGKPEGICGIYKMASYPTKKK

SEQ ID NO: 236148 - protein, 51 aa, Glycine max
  unsure (1)..(51): unsure at all Xaa locations
  Clone ID: PAT_MRT3847_5526C.1.pep
RPRGVSRHPAPPHRRAPASPPPPPPXFPPIPPPPPXAPAXSQSVERTHNPP

SEQ ID NO: 236149 - protein, 52 aa, Glycine max
  Clone ID: PAT_MRT3847_55270C.1.pep
FPGPTRLLTSPTTTQTRRHFYKHFCVSKTITLLLETPLQVKIPYLFNQSLSI

SEQ ID NO: 236150 - protein, 105 aa, Glycine max
  Clone ID: PAT_MRT3847_55271C.1.pep
NPMYGSQEKSISSSTLALFIASSVPSECSFTIMVPSSYPLNSNNPYGQWRKFLGENCNVSNSSRLLGSYLLTFLFFHLPLSSQAEAHSSCMCYGEGTYSCNNLKH

SEQ ID NO: 236151 - protein, 56 aa, Glycine max
  Clone ID: PAT_MRT3847_55272C.1.pep
HKMTTPPFKRCAQFGVVKGAGGANNARLPLKSVQRKTYCVAILENYTIDFIYKHTL

SEQ ID NO: 236152 - protein, 75 aa, Glycine max
  Clone ID: PAT_MRT3847_55273C.1.pep
QTLLAVVRIPLSQLVVRLSLSCCACLVRANAKRGLPGCLLATRGNIALIRNKTTFKRSLSAWLLYTGYSKRIRCC

SEQ ID NO: 236153 - protein, 68 aa, Glycine max
  Clone ID: PAT_MRT3847_55274C.1.pep
PSLGVLRSISPGNFAPLSSIFHTKELKRSSFFVSAAIRAVIYPRAVPSSERALVKKATGHKRVVIRKV

SEQ ID NO: 236154 - protein, 210 aa, Glycine max
  Clone ID: PAT_MRT3847_55275C.1.pep
MESFALSASTSFSRFSQLHHRPRPVISRSQSLRSPITISQRFSFPSKPSSTFNFNFKFNRFSKPHYPIQASPSSSSSPPPPPPPPPPPPLQGAKPIPFIISISIGLIVRFFVPKPVEVTPEAWQLLSIFLSTIAGLVLSPLPVGAWAFLGLTASVVTKTLTFTAAFSAFTNEVIWLIVISFFFARGFVKTGLGDRIATYFVKWMGKSTLG

SEQ ID NO: 236155 - protein, 85 aa, Glycine max
  Clone ID: PAT_MRT3847_55276C.1.pep
SIDPPLTQPYTLTFILSPSVSSKQRLLHSFGYFLTGISHSDSDEQSTYIISAIEYYPNKYHEIDYNLNIDHRSTSIMHTHILPAP

SEQ ID NO: 236156 - protein, 86 aa, Glycine max
  unsure (1)..(86): unsure at all Xaa locations
  Clone ID: PAT_MRT3847_55277C.1.pep
STAARKTLMTYCKRQIQDLPARISGAPHYNNLGRWNAVVFLPDDTPWNXALDKXTLTYTEDCSTRPPPVRXVSRMYNPNIYADGRI

SEQ ID NO: 236157 - protein, 71 aa, Glycine max
  Clone ID: PAT_MRT3847_55278C.1.pep
LPPKLVLEKVLRAMQKPVYLLDITTLSQLRIDGHPSVYGSGGHLDPDCSHWCLAGVPDTWNELQYASLVKN

SEQ ID NO: 236158 - protein, 65 aa, Glycine max
  Clone ID: PAT_MRT3847_55279C.1.pep
TCGLQATIEELPCLNYPRFGKTTNIPRSHGKSLLEAWNIFYRNRPNTLQQNIKSCSTYLSASITS

SEQ ID NO: 236159 - protein, 124 aa, Glycine max
  Clone ID: PAT_MRT3847_5527C.1.pep
GAELNNWLSAVMTYQQTCIDGFPKGKIKDELSNMFNESKELVSNSLAVVSQFSSFFSIFQGAGELHLPWEITIPSWAAGSIPAWAGPVPVWAGPAEFIGSNEKPTPNVTVAKDGSGNFKTISEA

SEQ ID NO: 236160 - protein, 58 aa, Glycine max
  Clone ID: PAT_MRT3847_55280C.1.pep
EIISLSLCSLTRSTAPPTQTVVHTPGENVESPFHWKEDISLLSVYKVQTNPFHQNRNP

SEQ ID NO: 236161 - protein, 35 aa, Glycine max
  Clone ID: PAT_MRT3847_55281C.1.pep
LQFQSHNPVSKVSDLFSYFGLYRNDGYVTHLLSRS

SEQ ID NO: 236162 - protein, 51 aa, Glycine max
  Clone ID: PAT_MRT3847_55282C.1.pep
PGFFSPPHLAQGAALTVLFQFFGRPPVGGPGAPSGSGSKFPGKTQRPPPGS

SEQ ID NO: 236163 - protein, 61 aa, Glycine max
  Clone ID: PAT_MRT3847_55283C.1.pep
KHCQCNNVVQTSYRIHQLQCIRPKSPFSIAIESDNDPPKKIAMFCPLMRFSIILCIVIKKK

SEQ ID NO: 236164 - protein, 93 aa, Glycine max
  unsure (1)..(93): unsure at all Xaa locations
  Clone ID: PAT_MRT3847_55284C.1.pep
VSCNXGAIKGRSVANTNXCRDVWTEYHEMGFEGVRAVAEXKVYTAGXIVELLQFVAPKMMARGSAHFSYEIADNLDDPKYNHYKYWSNPLETK

SEQ ID NO: 236165 - protein, 96 aa, Glycine max
  unsure (1)..(96): unsure at all Xaa locations
  Clone ID: PAT_MRT3847_55285C.1.pep
PPSTRHFHFLRASKPPRVAFYHISHTYPLFTLHMGAHKTXLLSIFXMAKQSCTVNDKTYASRSKLLSFELLGYNYTMIGFIHYISYKHFIHKIIKL

SEQ ID NO: 236166 - protein, 69 aa, Glycine max
  Clone ID: PAT_MRT3847_55286C.1.pep
FPPKPRNMGQEAQIFFWTQKPPLSLIPPKNQKGGPPRGPTGVKQEGGYFWGTFKKGFLGPGTFNLPKKH

SEQ ID NO: 236167 - protein, 46 aa, Glycine max
  Clone ID: PAT_MRT3847_55287C.1.pep
SFVESPIMMAVRRLITNHVLKKFGYILQVKIVVHHVYRKNLPFTHL

SEQ ID NO: 236168 - protein, 139 aa, Glycine max
  unsure (1)..(139): unsure at all Xaa locations
  Clone ID: PAT_MRT3847_55288C.1.pep
QSLNVMRFLXAINVRHDLTEGLKDLQCRTLILXGESSPFHAESVYMSTKMNHKICALVEVQACGSLVTEEHPNSMISPLEGFLMGFGYHRQTHAASSSSNCSNPASPTSHYSCIAPELLSPESLGIKLKPIRTRVDVQF

SEQ ID NO: 236169 - protein, 229 aa, Glycine max
  Clone ID: PAT_MRT3847_55289C.1.pep
SNVLFAAHTVGFFIYWGITHQMKETLEWSKTYVSNVAGVIAILIALVMWVTSFPGFRRKMYEVFFYTHHLYTLYILFYAMHVGVEWMCMISPGIFLFLIDRHLRFLQSRQCAPLLSARLLPCGALELNFSKNPSLYYNPTSMVFINVPKISKLQWHSFTVISSCNMETDILSVAVKTGGSWSNKLYQELSSSALDHLNVSVEGPYGPTTTSQFLRYKQLGLVSGGSGIT

SEQ ID NO: 236170 - protein, 119 aa, Glycine max
  Clone ID: PAT_MRT3847_5528C.1.pep
IITPVTTIGFSHARQYYPNHRDFSHPSCSAVPSNVRRIFLLCLQVGRELIDFPLPLLGITAIWDPSTLLPSVISTPLSLGCFVFWLTEQASLLTGCRRRLVGGRDWSRCFHERNVSVSA

SEQ ID NO: 236171 - protein, 189 aa, Glycine max
  Clone ID: PAT_MRT3847_55290C.1.pep
MGESSDSVSIDIDLIPLGGKECTVKTSKGSVSVLVCGDREKPALITYPDVALNYVSCFQGLLFCPEAASSLLHNFCIYHIDAPGHELGADVVSSDEPLLCVDDLADQIAEVLDFFGLREVLCLGVTAGAYVLTLFAMKYKERVLGLILVSPICKSPSWTEWLYNKVLMNLIYFYGMCGVLKECLLQRYF

SEQ ID NO: 236172 - protein, 356 aa, Glycine max
  Clone ID: PAT_MRT3847_55291C.1.pep
MGESSDSVSIDIDLIPLGGKECTVKTSKGSMSVLVCGDQEKPALITYPDLALNYVSCFQGLLFCPEAASLLLHNFCIYHIDAPGHELGADVISSDEPLLCVDDLADLNAEIAEVLDFFGLREVLCLGVTAGAYVLTLLAMKYKERVLGLILVSPICKSPSWTEWLYNKVLMNLLYFYGMCGVLKECLLQRYFSKELRCSVQGAESDIILTCRRLLDERQGLNVMRFLQAINARHDLTEGLKDLQCKTLIFAGESSPFHAESVYMSSKMNHKICALVEVQACGSLVTEEHPNSMITPLERFLMGFGYHRQTHAASSSSNGSNPASPTSHSCIAPELLSPESLGIKLKPIRTRVDVQI

SEQ ID NO: 236173 - protein, 79 aa, Glycine max
  Clone ID: PAT_MRT3847_55292C.1.pep
FGSKLFDRSGMLYGELARFVLRLLGIRTKSKKVYPPGPNGQPLLGPGPHNPSGNVNYIEAPKAAPSGSWDNVWGNDANQ

SEQ ID NO: 236174 - protein, 43 aa, Glycine max
  Clone ID: PAT_MRT3847_55293C.1.pep
HILQHNGTKATRSYTCVQYTQGGDMIRVCSIIAYCDFNKQSEK

SEQ ID NO: 236175 - protein, 301 aa, Glycine max
  Clone ID: PAT_MRT3847_55294C.1.pep
MEPKTQPQANSPPPKPWEQAGSSSGPAPFKPPSAGNTSDVVEASGTAKPGEIVSSSDRSAAVNRNTLGRPVPTRPWEQNYGNSTYGGYGSTMNYNSGYGSGMYGSSYGGLGGGMYGSSYGGGMYGNSMYRGGYGGMYGSSGMYGGGMYNSGLGGPMGGYGMGGGPYGEQDPNNPYGAPPSPPGFWISALRVMQGVVNFFGRISILIDQNTQAFHLFMTALLQLFDRSGMLYGELARFVLRLLGIKTKSKKVHPPGPNGQPLPGPGPGPGPHNPSGNVNYIEAPKAAPSGSWDNVWGNDANQ

SEQ ID NO: 236176 - protein, 68 aa, Glycine max
  Clone ID: PAT_MRT3847_55295C.1.pep
HLMRCGRLSVTAVTCCDSMWSRESDNVMAQKLGPEPPDFVSEMKAERRTDVTISANYIILLLRSFEPC

SEQ ID NO: 236177 - protein, 47 aa, Glycine max
  unsure (1)..(47): unsure at all Xaa locations
  Clone ID: PAT_MRT3847_55296C.1.pep
MGEPSEPSRXLTDYKLLLKVINTLRSVDKIPTMATIFTYQPKRSLLY

SEQ ID NO: 236178 - protein, 51 aa, Glycine max
  Clone ID: PAT_MRT3847_55297C.1.pep
ESGSSNTTFRQHELQFKHRCSETDRRSFTLTHSPISNRRVFSKFSKTWKRK

SEQ ID NO: 236179 - protein, 103 aa, Glycine max
  unsure (1)..(103): unsure at all Xaa locations
  Clone ID: PAT_MRT3847_55298C.1.pep
ISHDPVYSNKLGTLFEITPEKNPHLRDLDXLPQCCGYXRGSSSSTTLQFKGDSDTXINEXDASVEXLVGLKEHLQELRREELPLEVRKFRAXLSERDIFVYPS

SEQ ID NO: 236180 - protein, 186 aa, Glycine max
  Clone ID: PAT_MRT3847_55299C.1.pep
PGWPRLRLGGVAKPPIPGLTFLFQGVMDQRLFFLFHHRKSKVEGSTGTGAFRGSLGPLGSFLGLGAPRGGNLKGEWALGPVKLTPLPTHLTGFFGRVPNGFTTNPLFLHLLHLIFKTLNGAGLVFRLWPPQTLPNGKLQTQRGLGFLLGTLGRPVRDWDIFFRGGLLLGNHPRFRFGSGSLEPGGL

SEQ ID NO: 236181 - protein, 84 aa, Glycine max
  Clone ID: PAT_MRT3847_5529C.1.pep
SKVTTTSSPSYTTQAPVQPRQNKSLVVSEDPEKLLVSDAAKDANQVMPKMAERAPEKKGITGSKPAVPLSAKAVLNDKNNDAHR

SEQ ID NO: 236182 - protein, 62 aa, Glycine max
  Clone ID: PAT_MRT3847_552C.1.pep
ASLDIGYCSHLIIYLYSICILLKDDLFDNRGYNANVGTHFSMPMIARFGFLESNDLLPALIA

SEQ ID NO: 236183 - protein, 53 aa, Glycine max
  Clone ID: PAT_MRT3847_55300C.1.pep
IKALRDLTPSVFVLNSQESDFKVQVLVAPIGSAICCIYPRFAFKNVPVPVSFV

SEQ ID NO: 236184 - protein, 47 aa, Glycine max
  Clone ID: PAT_MRT3847_55301C.1.pep
NSKVISIHLMLFNCIDISMCIVQLCAELMNASELLYSMLDAGSEWLS

SEQ ID NO: 236185 - protein, 67 aa, Glycine max
  Clone ID: PAT_MRT3847_55302C.1.pep
LEPIRLELEPPFLFFVDYSHCFQNKGLKAPTFRKRGTTIAGVSCSKKEPILGAPTRGPAGPIGGDKN

SEQ ID NO: 236186 - protein, 55 aa, Glycine max
  Clone ID: PAT_MRT3847_55303C.1.pep
LNPIRFEGPGPPPLSVEPKKKFAKKLSCLGNLYFPLPFNSTVLFPFKPRAFFRNL

SEQ ID NO: 236187 - protein, 52 aa, Glycine max
  unsure (1)..(52): unsure at all Xaa locations
  Clone ID: PAT_MRT3847_55304C.1.pep
QRGSHHLRNKVLGXVGQGCPKXRGXXGRASXXXSXRXLXMXSVXNRXLLXXX

SEQ ID NO: 236188 - protein, 114 aa, Glycine max
  Clone ID: PAT_MRT3847_55305C.1.pep
RPIQEEEEEEEEGFVVRRTSVRNVGGVNKLGDDSDRVALDNDESHTACSMRRLVVRNWLRLVNLRTIRWLKYLKNHTPQERRVQANPNRALGIELVSDWLNLRPIKRLVNRILI

SEQ ID NO: 236189 - protein, 115 aa, Glycine max
  unsure (1)..(115): unsure at all Xaa locations
  Clone ID: PAT_MRT3847_55306C.1.pep
QMATVITPLHFDCSNPSXSELSIDLLSGGILVDKTXGHWITLIQXNSSNSHLLRVTAWKKSXINGQDLMSGNASVXKSDWASLAHVFLTNSNTPEHFDACNLTNIQPHSXWELIL

SEQ ID NO: 236190 - protein, 91 aa, Glycine max
  Clone ID: PAT_MRT3847_55307C.1.pep
NCTETLQTIITSLDLTHSPISNSRVFSTYVKSAKEDDSPSLCSSQRVLLIPLRTRAQRSRKKLRNSCNQVTIAFVSGFNVRQPVIAVYPHA

SEQ ID NO: 236191 - protein, 52 aa, Glycine max
  Clone ID: PAT_MRT3847_55308C.1.pep
TINHSSLHAPEQAQGRGLKNGAASCMAYLFLIPGWQGRESGSINPRSREGQH

SEQ ID NO: 236192 - protein, 278 aa, Glycine max
  Clone ID: PAT_MRT3847_55309C.1.pep
LERLEPGFKLLWNTVKSFLDPKTTSKINVLGNKLDRGLLEIIDASELPEFLGGNCTCMDRGGCMRSDKGPWQDPNILKMVLSGEVQCSRQIVTVSNDEGTVIECDKACYPMPIRSSDTSTAESGSEVEDITSPKASGNYTNPRLTPVHEEARLIGRASGFSEYDEYVPMVDKAVDLGWKEKQVTTQNSYGSTENFLLRAGKSGGNCAYILAVIVGFFVAIFTLVRSLALPVTKRIQDTKSDSAKNMPKTTVDPITKEESPSPSQLPTITNTEFFQSAM

SEQ ID NO: 236193 - protein, 104 aa, Glycine max
  unsure (1)..(104): unsure at all Xaa locations
  Clone ID: PAT_MRT3847_5530C.1.pep
RPDSHRDQRVYLVPHRRWEDAQDSMPADSGNKKGIAVASLRGSSYAGPMKSIANIFYSKLGFRLRREDYMQHSSGDGXVGVLGRDYALVSGDMWMLALERHNGS

SEQ ID NO: 236194 - protein, 51 aa, Glycine max
  Clone ID: PAT_MRT3847_55310C.1.pep
KGCNPPKATYPIFKKGLFYKGLPQEALELLNKLSPKGFLKKSSAHQVVAKM

SEQ ID NO: 236195 - protein, 606 aa, Glycine max
  unsure (1)..(606): unsure at all Xaa locations
  Clone ID: PAT_MRT3847_55311C.1.pep
TTSIFVDMSTNLCFEGMDERRERKLSFENNSEDDRWAKIGSLKKKALFASTKFRHSFKKKRSRKIDSRSNSLSIEDVRDVKDLQAVDAFRQALVLDNMLPPIHDDYHMLLRFLKARKFDIEKAKHMWANMIQWRKEYGTDTIMEDFEFKELNEVLKYYPHGYHGVDREGRPVYIERLGKVDPNRLMQVTTLERYLRYHVQGFEKTFAVKFPACSIAAKRHIDSSTTILDVQGVGFKNLTKSARELITRLQKIDGDYYPETLCQMFIINAGPGFKILWNTVKTFLDPKTTSKIHVLGNKFQSXLLEIIDEXEFLGGSCTCVDQGGCMRSDKGPWQDPNILKMVLSGEVECSKQIVTVSNDEGTVIECDKACYPMPIRSSDTSTAESGSEVEDITSPKASGNYTNPMLTPVHEEARLIGRASDSLKYDEYVPMVDKAIDLGWKEKQATTRNLFCSTANFILIIWRMILXLFGNRARSLAFRVTKGIQDTKSDSAKNMLPNTTVDSITKEESRPPSPVPRLTKTELISSALKRLGELEEKVDILQSKPNVMPYEKEELLNAAVYRVDALEAELIATKRALYEALIRQEELLAYIDSQERRKFEKKKFCC

SEQ ID NO: 236196 - protein, 78 aa, Glycine max
  unsure (1)..(78): unsure at all Xaa locations
  Clone ID: PAT_MRT3847_55312C.1.pep
FGCGGTWGSEASSSSATGCEGFKMYPNLNFTESTTTQTLVMGMAPVKAXFEGAXMGVPAXNQCCKCGPNCFCNPCTCK

SEQ ID NO: 236197 - protein, 243 aa, Glycine max
  Clone ID: PAT_MRT3847_55313C.1.pep
FRMWNFASNCIAGTVGLKNDSKPTHSASECSDDENSVIGREEGLECPICWESFNIVENVPYVLWCGHTLCKNCILGLQWAVVKFPTLPVQLPLFISCPWCNLLSFRLVYRGNLKFPRKNYFLLWMVESMIGDRGDVSHDSLQGGQVCHPESSSSNHYHGDTSNYLSIETLHASLRKSLVLFVHLTAKFPLIIIFLLIVLYAIPVIAAILALYILVTILFALPSFLILYFAYPSLDWLVREIIT

SEQ ID NO: 236198 - protein, 103 aa, Glycine max
  Clone ID: PAT_MRT3847_55314C.1.pep
PPPQARKKAPKMFYEKRMGGPFIQVKGWNTFSEYPSKGPPMGPPNWGLRPTPPQFFGKQAQKGFSGSCLTWMVDHFFVKPFLENPLFFSFVNFWRTPLAQRTP

SEQ ID NO: 236199 - protein, 131 aa, Glycine max
  unsure (1)..(131): unsure at all Xaa locations
  Clone ID: PAT_MRT3847_55315C.1.pep
YAPAHAPGKRTFSQGTPRRXKRMPLSIGGGAGAKNAILMNMPHAGLSMGRHIVGHLGFEVSKMTSPYIKCTVSFFIPLXNLADDTINLEAYAHKLVPPGEIPENSXLNISQEELLTARSTQVRAATTPVAD

SEQ ID NO: 236200 - protein, 49 aa, Glycine max
  unsure (1)..(49): unsure at all Xaa locations
  Clone ID: PAT_MRT3847_55316C.1.pep
SMLPLKXAPSRCLPTVIKFVYLITCDXRHCATILTVNVCCXYCVYTGEF

SEQ ID NO: 236201 - protein, 145 aa, Glycine max
  unsure (1)..(145): unsure at all Xaa locations
  Clone ID: PAT_MRT3847_55317C.1.pep
MASEKKLANPMREIKVQKLVLNISVGESGDRLTRAAKVLEQLSGQTPVFSXRYTVRSFGIRRNEKIACHVTVRGDKAMQLLESGLKVKEYELLRRNFSDTGCFGFGIQEHIDLGIKYDPSTGIYGMDFFVVLERPGYRVGRRCRC

SEQ ID NO: 236202 - protein, 65 aa, Glycine max
  unsure (1)..(65): unsure at all Xaa locations
  Clone ID: PAT_MRT3847_55318C.1.pep
YEGGSSNTYMPLRAIILYLLPIIRLNTDYYGTHVSPAPTWDLSHSKTRNLCSSNLGCSLXKRAIT

SEQ ID NO: 236203 - protein, 74 aa, Glycine max
  unsure (1)..(74): unsure at all Xaa locations
  Clone ID: PAT_MRT3847_55319C.1.pep
FWVFFFFFFVAGKACIIISRDSEFKLAERYTEATIYETLKKNRTNHELDTPITCGGXXNLLKGKTLPLSSKDVG

SEQ ID NO: 236204 - protein, 76 aa, Glycine max
  Clone ID: PAT_MRT3847_5531C.1.pep
NTLITLRPLVSVQKNTWQNCFWGKQEKKTSVIQKKQRGKKIARKKKKTECSKKEGGRTKTPQKKYQRALRTGPPDQ

SEQ ID NO: 236205 - protein, 86 aa, Glycine max
  Clone ID: PAT_MRT3847_55320C.1.pep
EQLVQLMFETFNISGFYASEQAVLSLYAVGRISGCTVDIGHGKIVERIMYLGCYIRSTMPDIAPVIEGAVHHIASRRFEFGSTDLT

SEQ ID NO: 236206 - protein, 61 aa, Glycine max
  Clone ID: PAT_MRT3847_55321C.1.pep
CLWIDGWCRYSMGMPWNVRVRKLGSSRAPAFFFFLDIELEVPQVPLCCHLENEPFGGFLEP

SEQ ID NO: 236207 - protein, 60 aa, Glycine max
  Clone ID: PAT_MRT3847_55322C.1.pep
YWTWKNRYPHLNAVVHFLPLYIPCALCILDNIFFYNILFVLFSAWLSGKNHVLRLLYSVT

SEQ ID NO: 236208 - protein, 111 aa, Glycine max
  unsure (1)..(111): unsure at all Xaa locations
  Clone ID: PAT_MRT3847_55323C.1.pep
EAHGIVDQLVRAISTVSSDNQRQLLENTVVCGGTSSMAXFEERFQKESSLSSSAVQPTLVKPPEYMPENLTMYSAWVGGAILAKVVFPQNQHITKADYDETGPSIVHRKCF

SEQ ID NO: 236209 - protein, 60 aa, Glycine max
  Clone ID: PAT_MRT3847_55324C.1.pep
RAIPTNTFRVFGFQLLSSSILSLLLSGEFEGALDVLHFILFQLLANEFEYLVASKKGFLG

SEQ ID NO: 236210 - protein, 47 aa, Glycine max
  Clone ID: PAT_MRT3847_55325C.1.pep
VSNPLSYSQIIPTQMKQLLDDGSVADNSLADNVTVDSVVRGFIRDWD

SEQ ID NO: 236211 - protein, 112 aa, Glycine max
  unsure (1)..(112): unsure at all Xaa locations
  Clone ID: PAT_MRT3847_55326C.1.pep
MNKKAPTCVTNWQVIIENKDGIFDGLPHLIYASREKRPQYHHNYKAGAMNXLDCDMFVNNPKIVQHALCILMDSQRGKEVAFVQCFQQFYDGIKDDPFGNQWVIAFEYIIRG

SEQ ID NO: 236212 - protein, 267 aa, Glycine max
  unsure (1)..(267): unsure at all Xaa locations
  Clone ID: PAT_MRT3847_55327C.1.pep
MEAAVVDVGSKLLKADFAIPDQTPAMIIPTQMKQLLDDGSVTDSSLADNVTVDPVVRGFIRDWDAIEDLLHHVLYTGLGWEIGNEGQILFTDPLCTPKANKEQLVQLMFETFNIXQVYASEPSMSSLYXIGPVKYSLXHIEHGMICSYPLTPLCFFSHSFVIFCRKGXTDLINFLDLELGMFNQHVNISMSDVEKIRDLYSCCAEDELAYQKTGYSCPMEKHTLPDGQVITIGRERYTVGDALLNRCGPRLTTCNIISLLKCQGTHR

SEQ ID NO: 236213 - protein, 79 aa, Glycine max
  unsure (1)..(79): unsure at all Xaa locations
  Clone ID: PAT_MRT3847_55328C.1.pep
MLVLTSGFEERFQKESSXIPSAIQPTLVKPPEYMPENLTMYSAWVGGAILAKVVFPQNQHITKADYDETGPSIVHRKCF

SEQ ID NO: 236214 - protein, 55 aa, Glycine max
  Clone ID: PAT_MRT3847_55329C.1.pep
SKGSTLPGKECFSPSIGENSLTTLNQRTSCETHHLILNIFQNDNTFHKSGVSTGH

SEQ ID NO: 236215 - protein, 71 aa, Glycine max
  unsure (1)..(71): unsure at all Xaa locations
  Clone ID: PAT_MRT3847_5532C.1.pep
TTQAPAKVEAAPRWIIPPQLDPNNTCPMLRGTTSGLLRKAQEEESYVMTXDSSKEKIYEMPTGMGAIMREG

SEQ ID NO: 236216 - protein, 79 aa, Glycine max
  Clone ID: PAT_MRT3847_55330C.1.pep
IFFTSQGGVPKVGIWPQKKGVCPPKGYPPRGCFFQEKKCFFLEKDPPGGFFLWGARVLFIFRKLAQGSFFPPWPFFNII

SEQ ID NO: 236217 - protein, 354 aa, Glycine max
  unsure (1)..(354): unsure at all Xaa locations
  Clone ID: PAT_MRT3847_55331C.1.pep
MEAAVVDVGSKLLKAGFAIPDQTPAMIIPTQMKQLLDDGSVADNSLADNVTVDPVVRGFIRDWDAIEDLLHHVLYTGLGWEIGNEGQILFTDPLCTPKANKEQLVQLMFETFNISGFYASEQAVLSLYAVGRISGCTVDIGHGKIDIAPVIEGAVHHIASRRFEFGGTDLTNFLAQELGKSNPQVNISMSDVEKIKELYSCCAEDELAYQPIFLSXPYGRLIARREERYTVGEALFQPCLLGLEAHGIVDQLVRAISTVSSDNQRQLLENTVVCGGTSSMAGFEERFQKESSLSSSAVQPTLVKPPEYMPENLTMYSAWVGGAILAKVVFPQNQHITKADYDETGPSIVHRKCF

SEQ ID NO: 236218 - protein, 80 aa, Glycine max
  Clone ID: PAT_MRT3847_55332C.1.pep
ELTSYASNNILSELDAAFDICLGWRREIPRLNNAKMIRSECGITFMIGYCISCGELEAFSGLTILADRIIPVFYHLASNP

SEQ ID NO: 236219 - protein, 67 aa, Glycine max
  unsure (1)..(67): unsure at all Xaa locations
  Clone ID: PAT_MRT3847_55333C.1.pep
NSNRFVAGYCEFFEKNLAFLTIKEVGHTVLXYKPRFLLDFYSRWLFGKRGFLIKAMHHVAFFFFFMD

SEQ ID NO: 236220 - protein, 76 aa, Glycine max
  Clone ID: PAT_MRT3847_55334C.1.pep
MAANTLMSTAISAFPSLLSSSKSRFATAVPLSSFGVTNASSSRFSMSADWMPGQPRPPYLDGSAPGYASISLFLFV

SEQ ID NO: 236221 - protein, 39 aa, Glycine max
  Clone ID: PAT_MRT3847_55335C.1.pep
SPFFIQHNMDDQIGINKLFQWLLKVNPYLTLLFLHLNYS

SEQ ID NO: 236222 - protein, 47 aa, Glycine max
  Clone ID: PAT_MRT3847_55336C.1.pep
PSPSISVSLKISLFTPKIGKSLVITYRLVQHRVLCQPSLNRLTRWNQ

SEQ ID NO: 236223 - protein, 97 aa, Glycine max
  Clone ID: PAT_MRT3847_55337C.1.pep
SPEPLFFFGLANPPPLMLCLGDFSLSGILSFHTLVDVVDPWLPLFFFFFKSIFPLLHSPLFIDFFPPHKYIYMHCQKKNCTECLLFVFLFVYDTKHH

SEQ ID NO: 236224 - protein, 151 aa, Glycine max
  unsure (1)..(151): unsure at all Xaa locations
  Clone ID: PAT_MRT3847_55338C.1.pep
GGGPLTKVLKKKWTREGGRPFVFPVGGQTFWEPGGILKPDRKMDQKIKKGPGMAKLEDLVVVGGRGGPMAGLQLEPQWMAWKEGVHAFFVGKDQNSFTTFVKGWLDELKVAVGXKNMANIKNPRGLGYARIPSKELNLEKKMAAPTGVVLD

SEQ ID NO: 236225 - protein, 117 aa, Glycine max
  unsure (1)..(117): unsure at all Xaa locations
  Clone ID: PAT_MRT3847_55339C.1.pep
ARGLKTLILGYYGMTFDSLEAITMLLIDNITPCMPLRGTITAXGDLEPLTCIGGLLTGTPNYTAVGPYDEMSDCQTSHGXANILAEFFQWQPKEGLVLVHGSAGGSGLGYIALYEAN

SEQ ID NO: 236226 - protein, 234 aa, Glycine max
  Clone ID: PAT_MRT3847_5533C.1.pep
MGGHGGLNILPQKRWNVYNFDNREKVRRDEEQAAREEQLKREETRKRDAELRLDRLRVARGLAPSIPPPPESEPQPSSRSEPVPSSDPGHINLFEGINIFDPIQKDGAAERDWAKRRKKIEKGGGPKPKPTVSVGPEDEKYRLGYGLAGKGVQLPWYLRKPDGEGVGDDNKDEGGDVDRRENKGEKKRKTMEELREERLKRERKEKDRERALRHEKMQSHRDGSGYGSRRRFTR

SEQ ID NO: 236227 - protein, 77 aa, Glycine max
  Clone ID: PAT_MRT3847_55340C.1.pep
VLKQLYGFAYSSPLDIFSTNSWIKYLRGRKAMTLLLIRYCKLVMLLFVGLASGSFTYRDSILHCVMFCNLLGFGTSF

SEQ ID NO: 236228 - protein, 227 aa, Glycine max
  Clone ID: PAT_MRT3847_55341C.1.pep
LMKRRNTDQMMKITLLSTLLLGCLLVMTVQGDSSAGVVPAVAVVEEGNKNKLGVSSQKEPFVRSGAGHVRKLGLGGPRAGTNEVTSVDSKNGKGAYGGETSKISGKDDDGLKKSSGSRDQKNDDQKLMMMGPKEYLKSTKFFVVPRRIPTSTYPKSCSQDCIIAVPVKSSLGSSSSSHEHQISEETPQKDETQRFADAAKEIANMMNKDYHGRPSHRPPINNNEPRN

SEQ ID NO: 236229 - protein, 81 aa, Glycine max
  Clone ID: PAT_MRT3847_55342C.1.pep
QGHKPQKIHVRCSQKPKLMEKKHRHLGLIKKTDCTAALNWFPLYTATEPSCYSLLKSCLDLTSLSDRMGAPFTVRTGANPG

SEQ ID NO: 236230 - protein, 97 aa, Glycine max
  Clone ID: PAT_MRT3847_55343C.1.pep
FGSSAAESSANVSGQGFVFGSFDDSVVNSLGGMALGNSQHSEIDEDLHSRQLVVYGRETMLRLFASSILVSGMQGLGVEIANYLILAGVKSATFADE

SEQ ID NO: 236231 - protein, 177 aa, Glycine max
  unsure (1)..(177): unsure at all Xaa locations
  Clone ID: PAT_MRT3847_55344C.1.pep
SAKPIQFGQSAFGTNAKDFKLFQQPPSQPSFSSNIHTVDKTTDESYRGDEGSDKEDAAEEFVPDVHYEPVVPLPPEVEVSTGEEEEEVIFSARCKLYRFDKDARENKERGLGDIKLLYNPRSXRYXCVMRREQVFKLCANXPIYPDLKIHPREHMPTVYTWACRDFSDEPPQGDDVT

SEQ ID NO: 236232 - protein, 49 aa, Glycine max
  Clone ID: PAT_MRT3847_55345C.1.pep
RFKLFSILSSSLLLLLNVSSFDLSLREFCVEDTLRDFYLKVEFPPIECE

SEQ ID NO: 236233 - protein, 59 aa, Glycine max
  unsure (1)..(59): unsure at all Xaa locations
  Clone ID: PAT_MRT3847_55346C.1.pep
XXKKFKDHLFSLILLDLHVHIKTTKNKTACPTSSSFIKPIKYTNSHTTIYNKYFLFNLI

SEQ ID NO: 236234 - protein, 196 aa, Glycine max
  unsure (1)..(196): unsure at all Xaa locations
  Clone ID: PAT_MRT3847_55347C.1.pep
GSSGLPNLEELVIKSMCDLKSIWPNQLAPNSFSKLKRIIFEDCEGFDYVFPISVAKKLRQLQSLDMKRCVIKNIVEESDSSDMTNIYLAQLSVDSCDNMNTIVQPSVLFQNLDELVVSDCHGVVNIITPSRAESLPKLRILSIGSCNKLEEIYGSKNENDAPLREIYFMKLEGLLLGRVPRLTSLCRXKIHFYFQS

SEQ ID NO: 236235 - protein, 98 aa, Glycine max
  unsure (1)..(98): unsure at all Xaa locations
  Clone ID: PAT_MRT3847_55348C.1.pep
LLGFLELLVLWRHQILPKKKIGYRAGGAEQRXYRDTPAPPXISSDNCFYIVGDLLVLIENGGGQQVFLGEKKRGPFLGGKKKMSRADKVNAYGRHRVS

SEQ ID NO: 236236 - protein, 64 aa, Glycine max
  Clone ID: PAT_MRT3847_55349C.1.pep
KNVKEMLTSQVHKERKKVYGKCQILGFKEVRIKATKESGPNEVGVLGERRRSVSSGNTALAIGF

SEQ ID NO: 236237 - protein, 65 aa, Glycine max
  Clone ID: PAT_MRT3847_5534C.1.pep
FCCSYNSSKIFTNDAACSYGEAWLCGRQSKCKRFLHYYLITNHHKFINDKNFYNKRVIHTNDRII

SEQ ID NO: 236238 - protein, 76 aa, Glycine max
  Clone ID: PAT_MRT3847_55350C.1.pep
LLTHSPYYTYWACLVSHTLKTLWGIKPKTSGHQTMGTTLMGENKTQETYQQAKLDPPPYCMLPTSYITPPLNSQKM

SEQ ID NO: 236239 - protein, 40 aa, Glycine max
  unsure (1)..(40): unsure at all Xaa locations
  Clone ID: PAT_MRT3847_55351C.1.pep
XIKACNKVSGRWWVVETVKDYLFKNIEVLTPQNLTSWGGG

SEQ ID NO: 236240 - protein, 68 aa, Glycine max
  Clone ID: PAT_MRT3847_55352C.1.pep
IFSPPLLDVVFRPQTQARKISKKESYDSVHNLVPFCKIPSNASVTSPPPKVCSLPIFSVSPCAPHPFY

SEQ ID NO: 236241 - protein, 45 aa, Glycine max
  Clone ID: PAT_MRT3847_55353C.1.pep
VASSYLRRAGETHDTVRIQISVGCGQAWGCDLSYDYVKINAEYTT

SEQ ID NO: 236242 - protein, 267 aa, Glycine max
  Clone ID: PAT_MRT3847_55354C.1.pep
MGHLLLLFSTLIRILKRKHAIAYTGSSQEMYGAKATINVWDPSIQVINEFSLSQLWILSGSFDGTDLNSIEAGWQVSPELYGDNRPRLFTYWTSDSYRATGCYNLLCAGFIQTNSRIAIGAAISPVSSYDGNQYDITILIWKDPKVGNWWMSFGDNTLVGYWPAELFTHLADHATMVEWGGEVVNSRTNGQHTFTQMGSGHFAEDGFGKASYFRNLQTVDTDNSLSSVQSISTLAENTNCYDIKSYYSNEWGTYFYYGGPGNNPQCP

SEQ ID NO: 236243 - protein, 87 aa, Glycine max
  Clone ID: PAT_MRT3847_55355C.1.pep
SPFQFSSIQAPNFLLQVPEPEPEPEPEPEPEPRSIAQAQLLSIRRHRSVFGWCHGLFFSCGEGETDEDCCIDRISCLVSPQRIIVRN

SEQ ID NO: 236244 - protein, 93 aa, Glycine max
  unsure (1)..(93): unsure at all Xaa locations
  Clone ID: PAT_MRT3847_55356C.1.pep
MWAAYWLAKCCAARACNACMTDVLGIXRRAVRIDNWGLYGLSIVVAWILREVAXAPLMENIPWYNHCKHTPSRQWVETDARLRVSQGNLMFLT

SEQ ID NO: 236245 - protein, 177 aa, Glycine max
  Clone ID: PAT_MRT3847_55357C.1.pep
RTRGVCPEAWSFVYEYLPSGSLQDYLFRKSSFLPLTRNIRAQWIAEIATALCFLHSSKPETIIHGGLTLETVLLDSALSCKICEFGFSRLVKEESVYLPNFHFSTEPKGSFTYTDPEFQRTGVLTPKSDIYSFGIIILQLLTGRTPVGLMGEVRRAVSCGKLYPILDSSAGKWNSTM

SEQ ID NO: 236246 - protein, 98 aa, Glycine max
  Clone ID: PAT_MRT3847_55358C.1.pep
GGRFFFFYPCWGACWFDRVSCLGSAPDLHLADKGLITSSLVGAQKCWARSCCRGGLTSWASSFPAQPLVSLSMGALHIVQAPSGGAVPAVGQGFLAAR

SEQ ID NO: 236247 - protein, 42 aa, Glycine max
  Clone ID: PAT_MRT3847_55359C.1.pep
PVLKYKNVFMERVSRLMALILTAVQIIRCLLSSMVTTVVQAF

SEQ ID NO: 236248 - protein, 39 aa, Glycine max
  Clone ID: PAT_MRT3847_5535C.1.pep
KFLSGDLVIMDNGEQMMYQVLSLKWILKSFTQAWLCLKS

SEQ ID NO: 236249 - protein, 64 aa, Glycine max
  Clone ID: PAT_MRT3847_55360C.1.pep
HYSSDRHRRLSVHVAYKHSSKYHYYDVTPTHVPIKKRIYFIRHASLDYSILTVKAERIVAIITD

SEQ ID NO: 236250 - protein, 80 aa, Glycine max
  Clone ID: PAT_MRT3847_55361C.1.pep
ATTPYLSPNNPSIHTRYSLGFSWYPLWPTSRHAQGALASGLMPHSYAIRVPTPSFTIVAPPPNPPPKTGGSSYSDDGKPY

SEQ ID NO: 236251 - protein, 125 aa, Glycine max
  Clone ID: PAT_MRT3847_55362C.1.pep
YFTNIPFSFSPTTQSFLGLWFIFLKIHNLSSLISPTPTNRNKASHEFPEPWLDHIKTTPYQQNYPPFSPKKTAGRKTNQKRLKKNEKIEQPELHPGAGCGIKLLKHWGASPEQVLDKQLPLQIPK

SEQ ID NO: 236252 - protein, 51 aa, Glycine max
  unsure (1)..(51): unsure at all Xaa locations
  Clone ID: PAT_MRT3847_55363C.1.pep
VXPAPXPXLKGLLXHLCSFLLNFSXXRLXNASKLVNQXXMXSGFPRXRHGQ

SEQ ID NO: 236253 - protein, 121 aa, Glycine max
  unsure (1)..(121): unsure at all Xaa locations
  Clone ID: PAT_MRT3847_55364C.1.pep
GPNSPSSWNPLPVATGNPGGTAYTYSFPLXNKTPVKNGNPLHNPNTLPIEIPPPSMYLTHVYGENNTNLTQIPQTFGANVAVHYSKPGPSEGLVIVFGAPDQTHAAQCLIQGFILCGQPVA

SEQ ID NO: 236254 - protein, 110 aa, Glycine max
  Clone ID: PAT_MRT3847_55365C.1.pep
VLLRNFWASVGLVVARGGFRCPPLGFVHGLLPCPPGVEGLVVGPGPFVAGACVLFLPLLGPFAGSCLLLAVCGFVGWVSGFCLFGRGFFLGFLGFLAPPGVLVFWVCFFN

SEQ ID NO: 236255 - protein, 80 aa, Glycine max
  unsure (1)..(80): unsure at all Xaa locations
  Clone ID: PAT_MRT3847_55366C.1.pep
MFILMPIPVFMMQWSSGILMKRTGFHWDVICGTGWADTPRLGDQVPIDWLIYYQECVSRTYGVXNPQNPXVLNRWMGNLT

SEQ ID NO: 236256 - protein, 55 aa, Glycine max
  Clone ID: PAT_MRT3847_55367C.1.pep
RRFGHSPSQKTVCPWKISRFKRALTKGTYDHSVKEMFKFEGSIQSNVILQKLYLK

SEQ ID NO: 236257 - protein, 67 aa, Glycine max
  Clone ID: PAT_MRT3847_55368C.1.pep
TDSIIIVLHYYLMADETDIKCVSSVGDDQDRCVIVFFGKIMVEAKVSHAYEEVISADFIKSLYHTHE

SEQ ID NO: 236258 - protein, 74 aa, Glycine max
  Clone ID: PAT_MRT3847_55369C.1.pep
ASFLKLLPPQLKEMNGQIFIFYFPNFFNMNSLVYHCLKIMWVFWLKILLLFHLTLLYLHLVPYCFRYWTADAFK

SEQ ID NO: 236259 - protein, 74 aa, Glycine max
  Clone ID: PAT_MRT3847_5536C.1.pep
MVKRKRRRINDQKGAKVKEIKNGRLAMFAMLGFYFQAYVTGEGPVENLAKHLSDPFGNNLLTVIAGSAERAPTL

SEQ ID NO: 236260 - protein, 49 aa, Glycine max
  Clone ID: PAT_MRT3847_55370C.1.pep
KQLNQAPKLKQKTLKIQQHYNPRCITTGKLKANRTRGRTRGRTPGRTRG

SEQ ID NO: 236261 - protein, 81 aa, Glycine max
  Clone ID: PAT_MRT3847_55371C.1.pep
ETRAQEPKKGSLGIIAPNSIGLVLGANILSTGPLSGGSMNPDSSFGQDVVSGDFATNWIYWVGTLIGGGLAGLINGEVIIG

SEQ ID NO: 236262 - protein, 189 aa, Glycine max
  Clone ID: PAT_MRT3847_55372C.1.pep
MAVETSDKPNLPHDFEDDDDGPVIYKRYSSSKKNQSHSEVRKSSSHSHDGQSYRQISNAPSSSGQTSCLQKGNTVPSAKPSPVKPSVGISKASKSLVNTSSTKLPVANSKSPSLGDRQKMSVDIKGEPKTIEHHAKNFVEDSEDDEDNKPLSFRLKNSNHDNKVTSVIAKKSSEDSDDDVPLAKKYTVI

SEQ ID NO: 236263 - protein, 81 aa, Glycine max
  Clone ID: PAT_MRT3847_55373C.1.pep
CYQTRQMKCCRVSIFLLSLIRLFFFASESQQLSLPSLPPSSVKPATALVAALDGTMYLVDSVSARVIWSFSTGSPIYHHSY

SEQ ID NO: 236264 - protein, 125 aa, Glycine max
  Clone ID: PAT_MRT3847_55374C.1.pep
SFRPRAEIGASKKCPFLHGRRLRASRFCPEQSQIVVVDLFKWDCSSSRPNTQIVTAFGTMEQVGERLLVAELVIPFPPLLSTPKKKWTVKTTKRESSGKKQMQLLIINYLQRTKRNCLIVVELKN

SEQ ID NO: 236265 - protein, 28 aa, Glycine max
  Clone ID: PAT_MRT3847_55375C.1.pep
AAGRAGGTMTGVLSAANEKAVEMFVEEK

SEQ ID NO: 236266 - protein, 247 aa, Glycine max
  Clone ID: PAT_MRT3847_55376C.1.pep
MNASDSEKEDTEIEVIAITPNEENSKLMKKEKKKKKKVSLKDAEKKGGVCYMSRIPPHMDHVKLRHILSQFGDIQRIFLAPQDSSVQVPAKRSRGSRDQAYSEGWVEFGNKSVAKRVANMLNGEQIGGKKRSSFYYDLWNIKYLSKFKWDDLTEELALKKAIREQKLAVELSAAKRERDFYLSKVDQSRALSAIEGRLKKKQKIQQDSGLVEKVIRHFPQTKPIAADTKKNKPELSDDILDAVFGGS

SEQ ID NO: 236267 - protein, 66 aa, Glycine max
  Clone ID: PAT_MRT3847_55377C.1.pep
KIQWGHSVKSPFLEFRVSPPGFLHWPKGLESWDGGWKHDFKLWTQVSLKHLEVVFHPVCLGSKFFF

SEQ ID NO: 236268 - protein, 108 aa, Glycine max
  Clone ID: PAT_MRT3847_55378C.1.pep
LGILQSLYSVGFVGIRDKNTSSYSFCHDGRTPDKGFESNEKLLIHPCYWLGLNLNRNALAPEEAEEINDEYDINIISDNSAIRNKTIGQITTHLDQIPIGNEGATEFE

SEQ ID NO: 236269 - protein, 94 aa, Glycine max
  Clone ID: PAT_MRT3847_55379C.1.pep
DRATYLLEKHAYPTPLATRWTNTPLSEELEREQFLCYVDERSKSCWRTYSQDKTLCAMSICHHYKVSEFHGACHHLDHKMVRHGWEEGDSSALI

SEQ ID NO: 236270 - protein, 78 aa, Glycine max
  Clone ID: PAT_MRT3847_5537C.1.pep
YPYKPYLKKKISLGDPPNFRPPQFFRKPVPPFKGVKSKRGSPQNLKNPCLNPEKFLHGPFFYKFYKKGWRKSLKNRGF

SEQ ID NO: 236271 - protein, 78 aa, Glycine max
  unsure (1)..(78): unsure at all Xaa locations
  Clone ID: PAT_MRT3847_55380C.1.pep
FFFFFFFFFFFFFXXXXXXXXXXXXRSTILQLPQINGLPTKKGREKNNFTIMSNTKLHILQYIYWNQQIAIGYYPKQP

SEQ ID NO: 236272 - protein, 113 aa, Glycine max
  unsure (1)..(113): unsure at all Xaa locations
  Clone ID: PAT_MRT3847_55381C.1.pep
KVDMTITTIFHVYSHKSTTTAHLIYKLACIDNLFIDIFENESSYMNKMSIKYASLLYKLNADPQIXITIHIASCNFETSXYYFTIIDAPAHMYFINNMITVTFQSDFAFLIIY

SEQ ID NO: 236273 - protein, 106 aa, Glycine max
  Clone ID: PAT_MRT3847_55382C.1.pep
SFLLHASLCAAAVSASLLAILFVPEFTVRRSPFLHSPFLSTSGLWLHPLNPILQLCDPWFFSFLSIWECLCRLVCAPSVFFFALGVANIYKARTHGSNRASLLGPP

SEQ ID NO: 236274 - protein, 96 aa, Glycine max
  unsure (1)..(96): unsure at all Xaa locations
  Clone ID: PAT_MRT3847_55383C.1.pep
PTYRERKIFNEKAHIILAKLGHVDSRKYTTTGHLIATLDYIHXTPIASCLKEAPNMNNRALRPPXVLDKLKPKPEKPNTTDLAWDEVANTNKKCLI

SEQ ID NO: 236275 - protein, 33 aa, Glycine max
  unsure (1)..(33): unsure at all Xaa locations
  Clone ID: PAT_MRT3847_55384C.1.pep
EPLSQRDRRVYAGYHGRDLHLVTLLTQXLEAMR

SEQ ID NO: 236276 - protein, 50 aa, Glycine max
  Clone ID: PAT_MRT3847_55385C.1.pep
IKEAFSAIIHFYLFFFNLIACTFSIMFYIVNQLEIIVGMTFKWFLLKSKH

SEQ ID NO: 236277 - protein, 79 aa, Glycine max
  Clone ID: PAT_MRT3847_55386C.1.pep
DAMSNFHGKRHSKHVPYYPSDPFHARPDTKITPFGLLCKNTFKLKKPNVLNFTCFWCVRIFFFFTFSSFHDLINHFHTI

SEQ ID NO: 236278 - protein, 66 aa, Glycine max
  Clone ID: PAT_MRT3847_55387C.1.pep
TRPLGGNLDPPRCPPRNKPGVPGPNNGRPPLFFFPFFFFFFLDKLEMDNKFDYIELLKYFLCSVTH

SEQ ID NO: 236279 - protein, 69 aa, Glycine max
  Clone ID: PAT_MRT3847_55388C.1.pep
DAWVRNSISFSSSSSLSLSGFVVPFLHPQGVLSHFVIQESIKKNDSYPLIWNIFIFCILLFHSFFFNGL

SEQ ID NO: 236280 - protein, 241 aa, Glycine max
  unsure (1)..(241): unsure at all Xaa locations
  Clone ID: PAT_MRT3847_55389C.1.pep
MYLILEIIFHMENWSRVVSGVGSMAYKVDHEYDYLFKIVLIGDSGVGKSNILSRFTRNEFCLESKSTIGVEFATRTLQVEGKTVKAQIWDTAGQERYRAXIKCILLPGALGALLVYDITKRQTFENVQRWLRELRDHADSNIVIMMAGNKSDLNHLRAVSTDDAQNLAEREALSFLETSALEAFNVEKAFQTILFDIYQIMSKKALAAQGAASTTSLPHGTTINVSNMSGSVEKKSACCSN

SEQ ID NO: 236281 - protein, 125 aa, Glycine max
  unsure (1)..(125): unsure at all Xaa locations
  Clone ID: PAT_MRT3847_5538C.1.pep
PPYAVRSTASRGMGVKVKGAXSATWLEDTLRGVTHGXPVXVSDRFLXVRXAXXEXXLAFLLPXXHHVAFSHTLAFLRLASASTXRLLSSYPREMAXEQGATSIYPSAFPILVICATPTTGLRQCH

SEQ ID NO: 236282 - protein, 124 aa, Glycine max
  Clone ID: PAT_MRT3847_55390C.1.pep
MPSIVINPLEEERDADEQIILPSVNAEVDMAVLAALPQSMQLDILAQLKGKKTEGLVKEVDNQNQHDVNYRGKGKGILLIEADMVGCSSRHDNVTSRSDNQHSIDEMLAASIAMEENEELVNNT

SEQ ID NO: 236283 - protein, 46 aa, Glycine max
  Clone ID: PAT_MRT3847_55391C.1.pep
LQDYNIKLTKARQISSWLESTNCSPNYWLYIELEVHGVNFHILDSL

SEQ ID NO: 236284 - protein, 74 aa, Glycine max
  Clone ID: PAT_MRT3847_55392C.1.pep
KGEEKKKKKGRPNTFSINKTPKLVAGPFLLAFRLPDYCFVSGLGAIPLFTDGGEYLSSASTSTVPASGGYFAPI

SEQ ID NO: 236285 - protein, 71 aa, Glycine max
  Clone ID: PAT_MRT3847_55393C.1.pep
YFLTYTFPHLFPPSIKILPPSLNSKFLLLYESHFYSPFGLTHDVKYWTSFAEFQNTPFFSSFRTESFTLTG

SEQ ID NO: 236286 - protein, 50 aa, Glycine max
  unsure (1)..(50): unsure at all Xaa locations
  Clone ID: PAT_MRT3847_55394C.1.pep
SFTXFFLSKLLGLILYYKGFYIITQYSSDFNIVNSFEASSLQNQPIMQLT

SEQ ID NO: 236287 - protein, 124 aa, Glycine max
  unsure (1)..(124): unsure at all Xaa locations
  Clone ID: PAT_MRT3847_55395C.1.pep
PNSHHECRERPKDMDTGRTTCAGDAPNAAFDVVCETDGGLAVGYMVFRGSDPGYYETLGRNAITAFEFADNYRSAYSDNDHVKCNACPYYCDTDGYQDELLWXAAWVMRATQDDNVLNYIQTTG

SEQ ID NO: 236288 - protein, 166 aa, Glycine max
  Clone ID: PAT_MRT3847_55396C.1.pep
QWKMDDEERERLLERERLQIQVIRQLDLEDLVVEEVDHSDEEDIDGDPDEEYALFLSQYHSDASLPPPSSAEFNFDTYIAPLHTYLGDVEDTRHRTAFLDGGAILNLPLFCLGGVVLFPGATLPLRVIEPHLVAAVERALTQDDIPCTIGVEVNSLWLFMPGICLI

SEQ ID NO: 236289 - protein, 185 aa, Glycine max
  Clone ID: PAT_MRT3847_55397C.1.pep
MVMWVFGYGSLISKAGFHYDERIVGFIKGYRRVFYQGSTDHRGTPEFPGRTVTLEPAEGEICWGAAYKIAKKEDAETALVYLEVREKQYDKKEYLDFYTDLTATSPAVSGVMVYIATPDKKSNVNYLGPASIEDIARQIIQAKGPAGPNRDYLFNLEKALHEIGCKDKHVIDLANEVRRILAEEH

SEQ ID NO: 236290 - protein, 94 aa, Glycine max
  Clone ID: PAT_MRT3847_55398C.1.pep
ADVPQATKATITKKDTTSESSNNTYKAPSRPKVLHHFKWDRSKDLLLNGLSGFIPDMFVQGLRARKLFFLRTRLMRENHFCFSRPTYNLEPLGC

SEQ ID NO: 236291 - protein, 59 aa, Glycine max
  unsure (1)..(59): unsure at all Xaa locations
  Clone ID: PAT_MRT3847_55399C.1.pep
LSKTSIPLRRSYNSLLHRRSVEQPHHHFTHLANPAXWFFSPMGTRSPRPLEPKAKRTPR

SEQ ID NO: 236292 - protein, 129 aa, Glycine max
  Clone ID: PAT_MRT3847_5539C.1.pep
IQKAHKMGLFTTPYAFNQYEAIEMAKVGADIIVAHMGLTTTGSIGAKTSVSLKESVVHVQAIADAAHRINPGVIVLCHGGPISGPKEAAFVLKRTKGVHGFYGASSMERLPVEQAITNTVKQYKSISIH

SEQ ID NO: 236293 - protein, 104 aa, Glycine max
  Clone ID: PAT_MRT3847_553C.1.pep
CALFRPRGPLNQNGDPNNTFHYNILFEAIGDASYYAIKTLNFNYIPIVVTETGWPNFGGANEPHPTTKNSETHNNYLSKREINGSCAPNQPKIAINTHLYELFN

SEQ ID NO: 236294 - protein, 119 aa, Glycine max
  unsure (1)..(119): unsure at all Xaa locations
  Clone ID: PAT_MRT3847_55400C.1.pep
ETNRKATTRGGATGRNRRGEQTGHTQRRKEESTAPQPRGNARSHSRRARRTRRRAKPTRTSTITXSRDERRRAKRGNGETKTRKREETSTERGGEEDEKRDPSGNKGDKTRQERDKRIS

SEQ ID NO: 236295 - protein, 70 aa, Glycine max
  Clone ID: PAT_MRT3847_55401C.1.pep
KKKPRDPSFLGAKPPRDFSFKKGSLCQKNLKRLFWFPPNVGWYKKGRKKGGLKNLKFPLKCPALPIFHLF

SEQ ID NO: 236296 - protein, 88 aa, Glycine max
  Clone ID: PAT_MRT3847_55402C.1.pep
MLHEALVNLVKGLADGEVNILLSHSFGLGSSTLDIVREVEAIGGNIGASASREQMGYTFDALKTYAPQMVELLVDCVRNPAFLDWEVN

SEQ ID NO: 236297 - protein, 132 aa, Glycine max
  Clone ID: PAT_MRT3847_55403C.1.pep
LSVNLVTDMASVSEVEKSDTGMLLEKSVVHPVEVTNLAMKINEDNVYSLTNENVTMSSVEEPKPKECDSKMLTSPSASPFTKFTNGEEHIKDCKTAKCSENQPHVALAPNLVQKTSWLSCCGLFEVLSSSNR

SEQ ID NO: 236298 - protein, 144 aa, Glycine max
  unsure (1)..(144): unsure at all Xaa locations
  Clone ID: PAT_MRT3847_55404C.1.pep
MSFHKLIMWNVPLLLVVVVFACSLIGHASASVSYDHKAITINGQRRILLSGSIHYPRSTPEMWPDLIQKAKEGGLDVIQTYVFWNGHEPSPGKYYFGGNYDLVRFIKLVQQAGLYXNLRIGPYVCAEWNXGVFPVWLKYIPGIS

SEQ ID NO: 236299 - protein, 38 aa, Glycine max
  Clone ID: PAT_MRT3847_55405C.1.pep
AEVYGVPWQLNWPMLLSPILISRNQIVCEVGPANNLLL

SEQ ID NO: 236300 - protein, 67 aa, Glycine max
  Clone ID: PAT_MRT3847_55406C.1.pep
TKFEPLLLNTDSGHYHSDVQCYSLAETLCLLGRSWEELYNQRQCLPPIIARRKRNYSLQGHTLGYHS

SEQ ID NO: 236301 - protein, 38 aa, Glycine max
  Clone ID: PAT_MRT3847_55407C.1.pep
RKNLQKLWAKNIATYTTTQPEIHKHYNAKLKPTPIPHF

SEQ ID NO: 236302 - protein, 83 aa, Glycine max
  unsure (1)..(83): unsure at all Xaa locations
  Clone ID: PAT_MRT3847_55408C.1.pep
XXMNSXVGTFXRVSSVIDXXXQLRXXRFSHGXLXAPXXHMAAAXTICYXPXSNXLGTDLLKRRHLXNTSFADRXSPSXXXLVA

SEQ ID NO: 236303 - protein, 37 aa, Glycine max
  unsure (1)..(37): unsure at all Xaa locations
  Clone ID: PAT_MRT3847_55409C.1.pep
XESGYHVLNKSIHYRRDFRGGQNSCGSPILEFFNWVY

SEQ ID NO: 236304 - protein, 69 aa, Glycine max
  unsure (1)..(69): unsure at all Xaa locations
  Clone ID: PAT_MRT3847_5540C.1.pep
XXXXXXXXXCFCFFLTNFNSSKLMMNKEATDISFYSFLSLTHKENKVILLVHVYLYIHPPYLRHSETEY

SEQ ID NO: 236305 - protein, 137 aa, Glycine max
  Clone ID: PAT_MRT3847_55410C.1.pep
QEFVESYRLVYREENIKMFVFFAAAVVLVAWPCHGSSYQRLALLKKTGYGERTSEVKCAENRLGVEAHNIRAFKTIPEEGVDTTKDYLNGKQLISYSETVSQQGSFYASEPEVHNNDILILGINNTVLCNMPYYEKH

SEQ ID NO: 236306 - protein, 48 aa, Glycine max
  Clone ID: PAT_MRT3847_55411C.1.pep
FYFLISIYSSIYYFMYLALITVHMHISCHHIFREHSPIHTDLPYFTAR

SEQ ID NO: 236307 - protein, 170 aa, Glycine max
  unsure (1)..(170): unsure at all Xaa locations
  Clone ID: PAT_MRT3847_55412C.1.pep
KLCRLAGTDSRFPPRPTRSVSTVSRVRGTCVGKGALVVDNVEVSKRDNRVFPAKTTDCXRGLFCQVQAFENEIGILKLVTSPHVVVYIVDDFTCXETVSFRNLHLXVHAMWHLTLIWTRADTVERVVRRYAWCHATALCDVHAHGYVXCDVKRWNVLLFGYGEMANFRDF

SEQ ID NO: 236308 - protein, 117 aa, Glycine max
  unsure (1)..(117): unsure at all Xaa locations
  Clone ID: PAT_MRT3847_55413C.1.pep
AAGLFMDSNRVVKPPGFGAAALHVRSGFMDAGPGTSRSLGQQAWEXPEWFHDANSSEYATKVSEIDARGRSPTHGLGPQLPRHSHPTVVDVLHWCWHQDSSLRPHFSEIQLFLPHAP

SEQ ID NO: 236309 - protein, 91 aa, Glycine max
  Clone ID: PAT_MRT3847_55414C.1.pep
DYDYYYYDYDYYYYYDGEGEINLRAGKDGKAHYSYDGSVLYLYEFTHLFGHPVRRVLLSSNRNPNERVPIAGTGGFAGIGKIVSTPVSRES

SEQ ID NO: 236310 - protein, 63 aa, Glycine max
  unsure (1)..(63): unsure at all Xaa locations
  Clone ID: PAT_MRT3847_55415C.1.pep
LTIFIHCFFCFSPFFDAFPFQEERVSKLVLRFILTFSXSILFPSFSIEASPIPFLFSFFFFFS

SEQ ID NO: 236311 - protein, 79 aa, Glycine max
  Clone ID: PAT_MRT3847_55416C.1.pep
LEPIRLEVVPDPKLREEIKASIASKFVPSHRELFEKYQVGSETVFGLTPDDLEHSLSDILSGSVSSSHSPSPPHRFKRP

SEQ ID NO: 236312 - protein, 78 aa, Glycine max
  Clone ID: PAT_MRT3847_55417C.1.pep
LYTELEVIIYICIVLCYTGRDVGFGEASPEAKAAENLHNFFTFVAVKIVAAQLEVPSPFAFSFVPHLPIAFRARLYSF

SEQ ID NO: 236313 - protein, 140 aa, Glycine max
  unsure (1)..(140): unsure at all Xaa locations
  Clone ID: PAT_MRT3847_55418C.1.pep
RREDNTRGEEEAMGQAIAMRDARGGKHREPKRAXKPMIKRATTTIEEHRQKHEQGEKNEGERDEQEEKAEGSPQKPRNREEGNRAEPPGKAITRKRQKASTKTRGKNNKRARKKRAPRKRPKDEPKNQERGKRQTKEPRG

SEQ ID NO: 236314 - protein, 75 aa, Glycine max
  unsure (1)..(75): unsure at all Xaa locations
  Clone ID: PAT_MRT3847_55419C.1.pep
RINVLGYFTPWIIPLQGGAASASKXPDQDTSETCLYVCRGKRVXRLTQVPFARASLDHDDVYLLDTHKLIDQLDG

SEQ ID NO: 236315 - protein, 112 aa, Glycine max
  Clone ID: PAT_MRT3847_5541C.1.pep
HQGPYKVTTSLLVPGNSQGERPIKLTNTYGQPGKYRIKLPTVSVRTMGTVLVEMVDRNGLYFSDDFSLTFHMHYYKLLKWLLVLPMLGMFGVLVILRPQGSMPLPSFSRNND

SEQ ID NO: 236316 - protein, 100 aa, Glycine max
  Clone ID: PAT_MRT3847_55420C.1.pep
LYSGRDLFCSLGSKDDWIGHRHVPFYEKSIITEWIMYLDSRGMIYDALEQAPDPGYSFVLSLRLEYLDGEASIECAMYSLPKWRPDPEESRSSDALNEAV

SEQ ID NO: 236317 - protein, 119 aa, Glycine max
  unsure (1)..(119): unsure at all Xaa locations
  Clone ID: PAT_MRT3847_55421C.1.pep
LNGCQSLTNIYLFLPLCSLFIQGNLVLHRKNQKRPPSQRKEEKTCCDRHYHFLLGGGTXXKKKAPTKDQKKGGGGGGPKIKTGGGGPMKKRGEKRGGWFKKKKKGGRATSMLLHATPPG

SEQ ID NO: 236318 - protein, 52 aa, Glycine max
  Clone ID: PAT_MRT3847_55422C.1.pep
KMGSKPGFHKGFGGFNFFRGFFFFFPFEGPGIFQGLTEYYGQNFPREKSKPG

SEQ ID NO: 236319 - protein, 41 aa, Glycine max
  Clone ID: PAT_MRT3847_55423C.1.pep
NMMVMELRLCVLSVVMNVASMSSMYLSRSTIMKKIDQDAHL

SEQ ID NO: 236320 - protein, 140 aa, Glycine max
  Clone ID: PAT_MRT3847_55424C.1.pep
PPLNEKVFSKVQKASFPKPIVSLKLVGRFLKLGGALSQAGILAPLWAPLFFFGAGFKWVFLDGAGPGFPLARLVGGGCPPPGGPLLRVFPPWGFPPPNFLIFGPGLVSWAPPCSFGGPPFLVHFSRGVGPVFAPPPRGFA

SEQ ID NO: 236321 - protein, 35 aa, Glycine max
  unsure (1)..(35): unsure at all Xaa locations
  Clone ID: PAT_MRT3847_55425C.1.pep
IXXLSFLSNXLXCELIYRSXKXMPXXNXXYAXXSA

SEQ ID NO: 236322 - protein, 716 aa, Glycine max
  unsure (1)..(716): unsure at all Xaa locations
  Clone ID: PAT_MRT3847_55426C.1.pep
MKGKKNTMTKNDVEDDGAPVPSPTVSDSDSDYEDSSADDDDKSSDSLDSQSESELEDASPENGGSGDVESAEDEDTVNDEDGGSESSDLHQEGAESDSSEDEVAPRNTIGDVPLKWYEDEPHIGYDIKAKKIKKKEKRDKLDSFLASXDDSKNXRNIYDEEDDGLVQLXGNESRRKSKSISTVAPPSDWHPILTRLXSKKLTQKLPFKLHGLAVRSTFHPSRSVFFVCTKKSVRVYEGLITFDKPKEEDGLYHLWGDASGSTERANHLAYIPAPKQKLPGHDESYNPPLEYIPTQEEINSYQLMFEEDRPKFIPQSFVSMRSIPAYENAMKDCFERCLDLYLXPRVRKKRLNIDPESLKPKLLCRKELDPLPTTCYIEYKSQXDAVTSISLEASRQWMASGSRDGTVRIWEVETGRCLKRREVGESVSCVAWNPLPDIHLLAVSVGQDVLLLNTCLGDEEEQKRIKELLWVDSSTASDDSGNKAPSVSWLKDDKHMGLRLRHFKTVTAVEWHRKGDYFSTVMPAGESRAVLIHQLSKKLTQRLPFKLHGLAVRSTFHPSRSIFFVCTKKSVRVYDLLKTKIIKKLDTGLREASSIAVHPGGDNLIVGSKEGKMCWFDMDLSSKPYKILKCHPKDINNVIFHRSYPLFASCSDDCTAYVFHGMVYSDLNQNPLIVPLEILRGHTNSNGRGILDCKFHPRQPWLFTAGADKLIKLYCH

SEQ ID NO: 236323 - protein, 45 aa, Glycine max
  Clone ID: PAT_MRT3847_55427C.1.pep
TTTREVKKLKHLLYLIFSPEKLLYSLGPPHIHNLSQTLLNTLYGD

SEQ ID NO: 236324 - protein, 281 aa, Glycine max
  Clone ID: PAT_MRT3847_55428C.1.pep
MKAKKHAHAEEEGVAPLPSPTLSDSDSDYEDSSADDHHESSVSLDSQSQSELEDASPENGSSGVVESAENESSQYEDTVNEEDGGSESSDLHLEGAESDSSEDEVAPRNTVGDVPLKWYEDEPHIGYDIKGKKIKKKEKQDKLDSFLFGVDDSKYWRKIYDEYNDEVVELTKDEIKLVRRLLKNRAPHSDFDPYPDSVDWFKWEDAKHPLSNAPEPKRRFIPSKWEAKKVVQYVRAIRQGLITFDKPKEEDGPYHLWGDDSGSTERANHLAYIPAPKQKLP

SEQ ID NO: 236325 - protein, 58 aa, Glycine max
  Clone ID: PAT_MRT3847_55429C.1.pep
GNSRVRPTASENPLIVPLEILRGHTNSNGRGILDCKFHPRQPWLFTAGADKLIKLYCH

SEQ ID NO: 236326 - protein, 65 aa, Glycine max
  Clone ID: PAT_MRT3847_5542C.1.pep
REDDRRAIDTDDVYKTAEAIKLAGGKITREPGPIPVMKTKITSCVDPDGWKTVFVDNVDFRRELE

SEQ ID NO: 236327 - protein, 97 aa, Glycine max
  Clone ID: PAT_MRT3847_55430C.1.pep
MDSTTSKHICRDWEMFNTLKIDGEFNHFKLGNREKIRVEGIRSMRMKLYDGAIQTFSNVSGDAKCTRGDTWCCDDRKIKVTFAIWMDKPGRGIMIAK

SEQ ID NO: 236328 - protein, 69 aa, Glycine max
  Clone ID: PAT_MRT3847_55431C.1.pep
ENPHPILLHSHSASHPHLLCLYGSLPVTVAGILVPYIPILCWTFGIFSSLKCADLVIFIIYNMPLKCVC

SEQ ID NO: 236329 - protein, 42 aa, Glycine max
  Clone ID: PAT_MRT3847_55432C.1.pep
SFIKHGWAPKQIFSTKKKKTGLPLKLVIGEVFFLKPLNRGED

SEQ ID NO: 236330 - protein, 133 aa, Glycine max
  unsure (1)..(133): unsure at all Xaa locations
  Clone ID: PAT_MRT3847_55433C.1.pep
DEPIIINAYCSTYCLAPFLKGLDHKFGMINGTITTTHSYTGDQRLFDAIHRDLRHARAPTLNIVPTSTXATKAECLVLPTLKRTLNGIALRVPTPNVSMVDLVDQVSQKTFAEXLNASFRESADIELKGILSE

SEQ ID NO: 236331 - protein, 41 aa, Glycine max
  Clone ID: PAT_MRT3847_55434C.1.pep
SYAGHSAEHSLLPASVIRNNTRKLFPRSSLRCTRCMYHLTC

SEQ ID NO: 236332 - protein, 82 aa, Glycine max
  Clone ID: PAT_MRT3847_55435C.1.pep
AQSSVRKDPPYPSISNIVIGKLWSQTRAPEFVIVHPIVITHSYLEASCSHLAAVPATHLTQYNSWRPAAGNKGHSSHSPPLR

SEQ ID NO: 236333 - protein, 46 aa, Glycine max
  Clone ID: PAT_MRT3847_55436C.1.pep
IICKYFYKYSLSLKICPNPDGPEIQFTSTFSKKKKKKKKKKAAALE

SEQ ID NO: 236334 - protein, 28 aa, Glycine max
  Clone ID: PAT_MRT3847_55437C.1.pep
QNSNYIEKDMIKAFKTRISKSKRQIPMI

SEQ ID NO: 236335 - protein, 253 aa, Glycine max
  Clone ID: PAT_MRT3847_55438C.1.pep
MTDYKQEQDMEIEALEAILMDEFKEIHSGESGLSTSNRCFQIKVVAQDDDADGPITNPAQLALIFSHTETYPDEPPLLNLKSLQGISTEDLRILKENLQQEASENLGMAMIYTLVTSAKEWLADRFCQDDVGSTEAEEAAKEDVVIPHGEPVTVETFLAWRERFEAELALERAKLMPESVLSAPKEKKLSGRQWFESGRAKGVAAVAEESEGEDEEDIDFDEDDFEDDEEEDMLEHYLAEKSDSSTHSSMRAS

SEQ ID NO: 236336 - protein, 523 aa, Glycine max
  Clone ID: PAT_MRT3847_55439C.1.pep
GLIRQPKYGHLKELHKAIKMCERALVSADPAVTSMGNFQQAHVYTTKPGDCAAFLSNFDTKSSVRVMFNNMHYNLPPWSISILPDCRNVVFNTAKVGVQTSQMQMLPTNTHMFSWESFDEDISSLDDGSAITITTSGLLEQINVTRDTSDYLWYITSVDIGSSESFLRGGKLPTLIVQSTGHAVHVFINGQLSGSAYGTREDRRFRYTGTVNLRAGTNRIALLSVAVGLPNVGGHFETWNTGILGPVVLRGLNQGKLDLSWQKWTYQVGLKGEAMNLASPNGISSVEWMQSALVSEKNQPLTWHKTYFDAPDGDEPLALDMEGMGKGQIWINGLSIGRYWTAPAAGICNGCSYAGTFRPPKCQVGCGQPTQRWYHVPRSWLKPNHNLLVVFEELGGDPSKISLVKRSVSSICADVSEYHPNIRNWHIDSYGKSEEFHPPKVHLHCSPSQAISSIKFASFGTPLGTCGNYEKGVCHSSTSHATLEKKCIGKPRCTVTVSNSNFGQDPCPNVLKRLSVEAVCAPN

SEQ ID NO: 236337 - protein, 47 aa, Glycine max
  Clone ID: PAT_MRT3847_5543C.1.pep
SYTNLNDVLFKTILSPSPFTSTSIISPQSTTIPIHFSLYSTILYFQI

SEQ ID NO: 236338 - protein, 64 aa, Glycine max
  Clone ID: PAT_MRT3847_55440C.1.pep
KILKMLNKGSWVSQWGMNHGSELLLLQGYVQILFFRGELLWYNFAVLVCFAKRGCVFSAGGRDF

SEQ ID NO: 236339 - protein, 58 aa, Glycine max
  Clone ID: PAT_MRT3847_55441C.1.pep
VSRKHPTEGPSRQTAVHATPPCPSKSGSPLLTVRARASCTELTFPHVTIMDLRAGRHQ

SEQ ID NO: 236340 - protein, 20 aa, Glycine max
  Clone ID: PAT_MRT3847_55442C.1.pep
GLKNQIPFSPNSNSGQTSNR

SEQ ID NO: 236341 - protein, 76 aa, Glycine max
  Clone ID: PAT_MRT3847_55443C.1.pep
VSELQHKKQSDLIRFYERVRCWEYRSHTSIVRLTKSTRTDEARRLGFKAKQGYVIYRVRVRSGERKTPVPKSIVYG

SEQ ID NO: 236342 - protein, 50 aa, Glycine max
  Clone ID: PAT_MRT3847_55444C.1.pep
LYTMLTMRYHCKYKDIVPLIIYMIISHWITRSSTSLRYKHTQNSTRMECL

SEQ ID NO: 236343 - protein, 460 aa, Glycine max
  Clone ID: PAT_MRT3847_55445C.1.pep
MAMAGTHARQSAWILRLLCLWASAVLVFADEHSLCLTQNATLQLSRGLPVGNSPGSKPGATVIVERVHIHGLSRFRNLGKFAHSIKVKVLPLPTNSNVRLPNIEVCFHRNVSLVAGMCRHGQWEKVTKGSWARSMSLFDHKILDVRTAGSTLENFEVSVEEEFFVYRIVLLTLGIILLSLASFISQSLAFYYSSAMAIGIILVILIIIYQGMKLLPTGRKSSLAIFLYSTALAFGTLTFVAIPGAWSSFWVVHKLVLTEDGSVDISTAQFVAWAVRILAAVMILQSSMDPLLGTLALLCGSFVSLLKKMHRLRFLRHLRRRLFKSPKKNRRRSQVPDSSPFDDSRDELMYKMQSKEDSPLFRPQLRGPTLSPCKSPVTGFTRTPPKSQEALYPSIIHNTPERKRYSAAEWDAFTKKSTETALEELVASPDFGKWLSTNADRISVTPNSRTDQQRGWMLWS

SEQ ID NO: 236344 - protein, 224 aa, Glycine max
  Clone ID: PAT_MRT3847_55446C.1.pep
LGRNLGSSLFRSFSGTKLQGILPCSKISNCPAYSHCFHVNCGGKNVKVMENDENIHYVGDGGVLGSGAANISLIMKITGDFLDDGDQLNSRYLRSLPSSDLPELYKTAHVTPISLTYFHYCLENGKYTVKLHFAEIQFSNDNTFGSLGKRLFDIYVQNILEIQFYWAGKGTTRIPVGGVYGPLISAFSIVSGALPCSDQKNARHKIIVGVGFGVTALCLVFIIV

SEQ ID NO: 236345 - protein, 62 aa, Glycine max
  Clone ID: PAT_MRT3847_55447C.1.pep
AMRRAKANPRRFMDVRVSPYSSDYDDSKSLDTLASSRSEDSYRRKGTDLAQAKDVERYLGRQ

SEQ ID NO: 236346 - protein, 120 aa, Glycine max
  Clone ID: PAT_MRT3847_55448C.1.pep
MYSLSSIEDIGDTVCTTYKDSPLGLPPQSVHPGGFSHDYQASPQRVGLKKRFGWSASQEPPPRYSVTSKLSFLSVFGFMFPQHFCELVLVQGVKYMSNLCFVYLPRFHPISAVAPVSMKS

SEQ ID NO: 236347 - protein, 70 aa, Glycine max
  Clone ID: PAT_MRT3847_55449C.1.pep
KIQTQDIIMHGCLRLHCRSCQQSSFEPEWVWTWRFSYKKKTSKKKKRGGALLIGFRNPGLLFHPVLGVFP

SEQ ID NO: 236348 - protein, 50 aa, Glycine max
  Clone ID: PAT_MRT3847_5544C.1.pep
KSQLKEGTINKTALQILFRNFCTKKVNTEFIALAQPPSSFLAHMHFFVFL

SEQ ID NO: 236349 - protein, 67 aa, Glycine max
  Clone ID: PAT_MRT3847_55450C.1.pep
LYMNRSVYYCRGPDMNLDYDVSSYKHVSTIYRYHLKLRSDQLHYYLFFTISNIPFNATKAFIDTFTQ

SEQ ID NO: 236350 - protein, 251 aa, Glycine max
  unsure (1)..(251): unsure at all Xaa locations
  Clone ID: PAT_MRT3847_55451C.1.pep
ATGSRGQRHDLERRGAKESRAVPAPDANAELPLSMQKRQSQAQSKSRSEKFNPHPEEASGFPIDPPRSGFAVDPPRPTQVPQHKRASHSGPLAHRTAWAKSGNRXHGDAPKISVGGDLSTISGLVAEQSISGSSQMEASKLMNRFPGSFKDISELLIKQDQRHHVPGQVGTSQKEEGRSSNKDLVLVGYGSKGHKIHYSGPLTSSNMDQVLKDHDRQIQEAVRRARLDKAKMRRLQAEGNQITNSLFVSGR

SEQ ID NO: 236351 - protein, 64 aa, Glycine max
  Clone ID: PAT_MRT3847_55452C.1.pep
MPTKQGGKAQPLKKPKSDKKDYDEDDMANIHKKKEEEKALKELKAKAQQKGSFGGSGLKKSGKK

SEQ ID NO: 236352 - protein, 583 aa, Glycine max
  unsure (1)..(583): unsure at all Xaa locations
  Clone ID: PAT_MRT3847_55453C.1.pep
MGEQVAAVHTASNAMQALGRGFDVNFDTRLLYCKGVSGSRVVEIDEEHRRLELWLYEGXAVPDVSRDIGCYQEAMVRQSSGVRSFKEMVEYFNERANVSGKFPIGSFNSAFSFTGSKHVDEAATKTLSSDGFYIPLAKVQLQKSHLRLQGNVKKAVPVNWDPLSLASFIENFGTHVITSITMGGKDVIYVKQHHTSPLSKLEMKNYIQDIGNQRFSDINSQTSSGQTKSKDKGVDPFSFNSQGVYPQPTTATYPIGKEDVTVIFRRRGGDDLEQNHSKWLSTIKSSPDIIEMTFCPITDLLDEIPAKEHLTXAIGLYLEYKPPIEELRYFLEFQIPCVWAPLQDKIPGQQRKXEPVCPSLQFSIMGQKXYARXEQITVGRRPVTGLCLCLGGSKHNRLSVHVQHLVSLPKILHPYWDSHVAIGAPKWQGPEEQDSRWFEPVKWKNFSHVSTAPIEEXETFIGDFSGVYIVTGAQLGVWDFGSRNVLYMKLLYSRLPGCTIRRSLWDHIPNKPPKTVNAGNTSNLDNSTLKENATGNKLVKYVDLSEMTKGPQDPPGHWLVTGGKLGVEKGKIVLRVKYSLLNY

SEQ ID NO: 236353 - protein, 67 aa, Glycine max
  Clone ID: PAT_MRT3847_55454C.1.pep
MSGIIQEIEETLHVGGHKKEEHIGEHHGEHKGEHIGEHHGEHKGEHIGEQLHWEHKEGLCDNIKDKI

SEQ ID NO: 236354 - protein, 101 aa, Glycine max
  Clone ID: PAT_MRT3847_55455C.1.pep
SNTPHCLPLPLCTPHSISMIMASSISSTCDKPQFPHPLSSSFSSSASLIRDLGFHIMFQQKPIRNVVDWCSNSHLVIHFPQQSYNKTEINKKTNNFNGGKA

SEQ ID NO: 236355 - protein, 62 aa, Glycine max
  Clone ID: PAT_MRT3847_55456C.1.pep
PRIWFSVAGHFLVREFWFTKFRKIKVCSFVITKQLSPRGLIKIKKKHRKTTPMNGKTQQLIH

SEQ ID NO: 236356 - protein, 49 aa, Glycine max
  Clone ID: PAT_MRT3847_55457C.1.pep
KVSAYDLRYTWQCRGISLCRKIQITLCRTMQMVRRKQRMIPTCTEKRPL

SEQ ID NO: 236357 - protein, 97 aa, Glycine max
  Clone ID: PAT_MRT3847_55458C.1.pep
RCSLGLSHCSIIRPRGWYIILFAPVHWKHPSLIVEKLMAPRPCLFLVFIYMLSLAALAGLGTVKDAGWGPDGTVPDKTLSPGDMLSYTYCANLLLHR

SEQ ID NO: 236358 - protein, 59 aa, Glycine max
  Clone ID: PAT_MRT3847_55459C.1.pep
KTCLHLTCEPSQKSLPHPLAVALFLKSLPFTLDFALSAISNHPKAFFLLLTCFFFLFSS

SEQ ID NO: 236359 - protein, 54 aa, Glycine max
  Clone ID: PAT_MRT3847_5545C.1.pep
SPSGSENYSCISLTPAPPSFLIMGGLGSVIYMNRKDGGLLCMKRLFFSFGFDHF

SEQ ID NO: 236360 - protein, 42 aa, Glycine max
  Clone ID: PAT_MRT3847_55460C.1.pep
LFGKNQGLNSGDVVKEWTVIKPSVNLSESYFCVCTCTYACSV

SEQ ID NO: 236361 - protein, 72 aa, Glycine max
  Clone ID: PAT_MRT3847_55461C.1.pep
ASLEGILDDPRKMNIDELVLPINHFQRQSKTISGSTPPCLADDNNFYAIRLSHTPLKNKISLVVPPMARHDG

SEQ ID NO: 236362 - protein, 42 aa, Glycine max
  unsure (1)..(42): unsure at all Xaa locations
  Clone ID: PAT_MRT3847_55462C.1.pep
NSFRSFILKCAAMKGFVVVNGXDIENEXLHFYLKHTVQKFLL

SEQ ID NO: 236363 - protein, 135 aa, Glycine max
  unsure (1)..(135): unsure at all Xaa locations
  Clone ID: PAT_MRT3847_55463C.1.pep
TIYDNDEHLERKILDPEHLSKVESIFGNLXKPINNMGSWASXWVGXVGGAYNSAGNHVSNRFLNSFWYLDQLGIASCYSTIVYCRQTLIGGNYGLLNTTTSAPNPDYYSAVLWHRLMGKKVLAVSSDVHIKDFYL

SEQ ID NO: 236364 - protein, 66 aa, Glycine max
  Clone ID: PAT_MRT3847_55464C.1.pep
GAQSPKGGVPYLRVVGRLKGSLVVKNCFLPNLGHFPLANPEKRGFFSPPKKIRVPSAQKKVRRDWL

SEQ ID NO: 236365 - protein, 149 aa, Glycine max
  Clone ID: PAT_MRT3847_55465C.1.pep
MMTNQNVVTHEVINTLIAVAASISNSTALPSATVPESMAVLGGFWGLPHNKNLVKRLEGAKVSAWIDSMRASSPTRAKSESQEKRSWILYHPSALNTFEQIVCSAKGKQVVVFLDYDGTLSPIVVDPDKAFMTRKVFLLFPFFSYTHIH

SEQ ID NO: 236366 - protein, 98 aa, Glycine max
  Clone ID: PAT_MRT3847_55466C.1.pep
DTADVQIKRWAAGKEGNMRALLSTLQYVLWPECGWQPVSLTDMITSSAVKKVYRKANLCIHPDKVQQKGATLEQKYTAEKVFDILKEAYTKFNAEELS

SEQ ID NO: 236367 - protein, 76 aa, Glycine max
  Clone ID: PAT_MRT3847_55467C.1.pep
ARGSETKTKVASLLFASNSMFYRGYHSFYLLFPLSSLQILGLIHNLTYWISSLLFFSVLFNSRYDVWKFSFNLSKS

SEQ ID NO: 236368 - protein, 158 aa, Glycine max
  Clone ID: PAT_MRT3847_55468C.1.pep
MMTNQNVVTHEVINTLIAMAASISNSTVLPSATVPESMAVLGGFWGLPHNKNLVKRLEGAKVSAWIDSMRASSPTRAKSESQEKRSWILYHPSALNTFEQIVYSAKGKQIVVFLDYDGTLSPIVADPNKAFMTRKMRATLKGIARHFPTAIVTGREHS

SEQ ID NO: 236369 - protein, 124 aa, Glycine max
  Clone ID: PAT_MRT3847_55469C.1.pep
YTKEVALCIHIFSIFGNLSKTIKIYGPCSSAWVGEAGEAYNSGGNHVSNRFLNSFWYLDQFGIASCYSTKVYCRQTLIGGNYGLLNTTTFAPNPDYYSAVLWHRLMGKKVLAVSSDVHIKDFYQ

SEQ ID NO: 236370 - protein, 95 aa, Glycine max
  Clone ID: PAT_MRT3847_5546C.1.pep
NRYGNGASIFTTSGVAARKFQTEIEAGQVGINVPIPVPLPFFSFTGNKASFAGDLNFYGKAGVNFYTQIKTVTQQWKDSASESKINLAMPTSQKS

SEQ ID NO: 236371 - protein, 66 aa, Glycine max
  Clone ID: PAT_MRT3847_55470C.1.pep
RLCVYFGALSVYHLDPTVQNVRCLSCIGIHALKLQTFRCSLFFYRSCLLYNILLYEKELGCSVIKR

SEQ ID NO: 236372 - protein, 47 aa, Glycine max
  Clone ID: PAT_MRT3847_55471C.1.pep
VNNIIRNRVLKSMIMISLLKSMIMPPSWSNQKGAKNEEGITETPSSN

SEQ ID NO: 236373 - protein, 55 aa, Glycine max
  Clone ID: PAT_MRT3847_55472C.1.pep
MFFICCIVIYNNFSGRLVIFINFTTIGKIRREELVKILSHWTANMQEMGSLYGVR

SEQ ID NO: 236374 - protein, 83 aa, Glycine max
  unsure (1)..(83): unsure at all Xaa locations
  Clone ID: PAT_MRT3847_55473C.1.pep
WGPSSSGSSGSRALGHQFHCAGXGXTPRGPMGRGVXGAXGALGGGXSPHGGLXSRGGQGFSLQGRFIPGKMGSFDNSGQGGGG

SEQ ID NO: 236375 - protein, 375 aa, Glycine max
  unsure (1)..(375): unsure at all Xaa locations
  Clone ID: PAT_MRT3847_55474C.1.pep
MPLFNTTNNKMTTFLCFLLFLLMTTLSESQPDRFMRRKPLSGGSNQEYFEVSYPPNSHEPTTPSCTHRIIHHAFANTIDSPPYTTTYTPPPRCGAPWSRVVLHFHVRCKGEQYDRIAAIWLAGAEILRTSTAEPSPAGIFWNVRKDVTKYSSLLAKPNQDLTMMLENIVNNEFTGVYHVTVTLLFYNEYAVRVPFVPCPEELNNFDRIQSRSRSRSRSRSLVQEPGSRGVNESPADLIIPISDDGRRGFWFKLEEEKGSCSKTIRIPRNTYRAVLELYVSFHGNDEFWYSNPPNSYIKANGLETERGNGAYREVYVTIDGQVVGWEIPFPVIFTGGINPLFWEPMVAIGAFDLPSYDIDLTPFLGXVLDGKKHVF

SEQ ID NO: 236376 - protein, 69 aa, Glycine max
  Clone ID: PAT_MRT3847_55475C.1.pep
SHDKPILVTTTHNIPSREKTITLDSTSHHMSLLAVAINVATTKQCYTRDEPPFGEGYECGYKKTSYSGG

SEQ ID NO: 236377 - protein, 69 aa, Glycine max
  Clone ID: PAT_MRT3847_55476C.1.pep
RIRISFYKNTRFTHHSDVSKRCGNFQIDRAHSARGSRIISFIELNKLASERVHKFQIMQRIQHFQKIWQ

SEQ ID NO: 236378 - protein, 44 aa, Glycine max
  Clone ID: PAT_MRT3847_55477C.1.pep
KKNARLDIFTTRACAYESLILLLKFVSFIPFSVSYFTLLKFGFL

SEQ ID NO: 236379 - protein, 68 aa, Glycine max
  Clone ID: PAT_MRT3847_55478C.1.pep
QRVDEHIENKAVLNELNLSAVPSLYELFVKLIERLLENKEEDKDSIVIFLLDMLEIVTRDIMDGDIEG

SEQ ID NO: 236380 - protein, 113 aa, Glycine max
  unsure (1)..(113): unsure at all Xaa locations
  Clone ID: PAT_MRT3847_55479C.1.pep
HKRRGRLISFKGRARLVHTTCRIDLXPGTLPRTDXKESNISRDKKTVPEADTPXSIKDVLFLYEFLDRSTSLTVLTGAGSTECGGIPDYRSPNGAYSSXFKPITHXEFLRSSR

SEQ ID NO: 236381 - protein, 118 aa, Glycine max
  unsure (1)..(118): unsure at all Xaa locations
  Clone ID: PAT_MRT3847_5547C.1.pep
LTADYPVFHXGCFKSHQLQGTLKPNHLYFFEGVLYLQAPFDPLVKKTCCLDQSFKGQPKLLNQKKPGEENLPPPXKLKFCWVELENNVPGCQKTVFALEKVLXDGTPYTKKCFKCPLG

SEQ ID NO: 236382 - protein, 32 aa, Glycine max
  Clone ID: PAT_MRT3847_55480C.1.pep
TRLYKNYIIPPRILSFYSYKSRSHLISYSLYS

SEQ ID NO: 236383 - protein, 94 aa, Glycine max
  Clone ID: PAT_MRT3847_55481C.1.pep
VKSFLIITFGAFIESINGCLRFFHVPYGDRIEAATAELTSDQTMSTKLDEILQRLTLLEIHYQLSNVLQPSSTPSSEQTAADAVPQLNTKDGAA

SEQ ID NO: 236384 - protein, 104 aa, Glycine max
  Clone ID: PAT_MRT3847_55482C.1.pep
VEVRPRCYERSPINHVDKFSCPSILFQGLDDKVVPPDQARKIYQALKEKGVPVALVEYEGEQHGFRKAENIKFTLEQQMVFFARLVGHFNVADDINPIKIDNFD

SEQ ID NO: 236385 - protein, 51 aa, Glycine max
  Clone ID: PAT_MRT3847_55483C.1.pep
VKVLFGSLFRGFCLRLFVAIAMEVCLGYLMLCSWRCLFVSLLGFMVSPVPC

SEQ ID NO: 236386 - protein, 56 aa, Glycine max
  Clone ID: PAT_MRT3847_55484C.1.pep
LRYQNKFILLERKHKTNDESHVADSGNHVSIHTSNDDHNDHESSLWADQLFHVRVE

SEQ ID NO: 236387 - protein, 50 aa, Glycine max
  Clone ID: PAT_MRT3847_55485C.1.pep
TRIEDRFGLFKRRLLLLLLPRSIIIWPWLVLVLHLTDIFNVNSETTFFLL

SEQ ID NO: 236388 - protein, 101 aa, Glycine max
  Clone ID: PAT_MRT3847_55486C.1.pep
QVIVYNQITHPKITPQTCRIKQLRRIISPDGTKRISNRDPYLRRAKELSHTKEPQIRNLKEEPHTIIVIIRTIITDRKKKRQFLRSSSTFRRVRRLGFFFI

SEQ ID NO: 236389 - protein, 380 aa, Glycine max
  Clone ID: PAT_MRT3847_55487C.1.pep
TPTRPPTRPYGWPPRSSMPKLEGAYTALQAWKSAVTEDPLKILSSWIGPNVCAYKGVFCAANPQDETVGASAAFPVVVAGIDLNHANLKGTLVKELSLLSDLSLLHLNSNRFTGTVPETFRDLVFLEELDLSNNQLSGPFPSATLYMPGLIYLDLRFNYFSGSLPQELSSKNLDALFLNNNQFDGSIPASLGSSPASVINLANNKLSGSIPASLGFMGSKIKEILFLNNQLTGCIPEGVGLFTEMQVLDVSFNSLMGHLPDTLSCLQDIEVLNLAHNKLSGELSDVVCSLRSLANLTVAYNFFSGFSHECSRLFFRNVGFDFSLNCIPDRDMQRPPPECSGIPGGSLSCLRIPTPRPLVCGSMAVSKSKNIIDPTSSSPP

SEQ ID NO: 236390 - protein, 44 aa, Glycine max
  unsure (1)..(44): unsure at all Xaa locations
  Clone ID: PAT_MRT3847_55488C.1.pep
EEERSPVPDPVLEWVKAYRAYNPYMTTHYYAXSMEENPNACVIC

SEQ ID NO: 236391 - protein, 151 aa, Glycine max
  Clone ID: PAT_MRT3847_55489C.1.pep
APATIPLTSSSTQTLDLSSIGFSFPTRATLQELEYGSVTPIDEELLHDDGDELHKLGRAQGVCVASSEDGSSHMVAITASFFKGEFQDGLRLFGVHKTDVFESHVAVIGGTGKYYGANGYAAVKVVDKVGSSEKEGKVTSSKFLLFDVYLS

SEQ ID NO: 236392 - protein, 43 aa, Glycine max
  Clone ID: PAT_MRT3847_5548C.1.pep
CELRVYGSDILAHVGQNAVWIDISDLSWCHDLNTEVTPPDLRF

SEQ ID NO: 236393 - protein, 272 aa, Glycine max
  unsure (1)..(272): unsure at all Xaa locations
  Clone ID: PAT_MRT3847_55490C.1.pep
LDLQGVRQRCRCLVXKVNVFVGGVIKEHRVKRERGDCVKDEGAEDFVDVLLDLEKENRLSEADMIAVLWEMIFRGTDTVAILLEWILARMVLHPEIQAKAQREIDFVCGSSRLVSEADIPNLRYLQCIVKETLRVHPPGPLLSWARLAVHDVTVGGKHVIPKGTTAMVNMWAITHDERVWAEPEKFRPERFVEEDVSIMGSDLRLAPFGSGRRVCPGKALGLASVHLWLAQLLQNFHWVSSDGVSVELDEFLKLSMEMKKPLSCKAVPRVSV

SEQ ID NO: 236394 - protein, 519 aa, Glycine max
  unsure (1)..(519): unsure at all Xaa locations
  Clone ID: PAT_MRT3847_55491C.1.pep
MSPDFTLLFFPELMQSPMITFQATLCVLLFTLMFTFFFTPGGLPWAWATKSSTRPIIPGPVTALLGIFTGSTPHRALSKLARNYHAEKLMAFSIGLTRFVISSEPETAKEILGSPSFADRPVKESAYELLFHRAMGFAPYGEYWRNLRRISALHLFSPKRITGSESFRSKVGLKMVEQVKKTMSENQHVEVKKILHFSSLNNVMMTVFGKSYEFYEGEGLELEGLVSEGYELLGVFNWSDHFPVLGWLDLQGVRKRCRCLVEKVNVFVGGVIKEHRVKRERGECVKDEGTGDFVDVLLDLEKENRLSEADMIAVLWEMIFRGTDTVAILLEWTLARMVLHPEIQAKAQREIDFVCGSSRPVSEADIPNLRYLQCIVKETLRVHPPGPLLSWARLAVHDVTVGGKHVIPKGPPPMVNMWAITXPKRVWAEPEKFRPERFVEEDVSIMGSDLRLAPFGSGRRVCPGKALGLASVHLWLAQLLQNFHWVSSDGVSVELDEFLKLSMEMKKPLSCKAVPRVSV

SEQ ID NO: 236395 - protein, 209 aa, Glycine max
  Clone ID: PAT_MRT3847_55492C.1.pep
MENNAFRDRILEDNEHEEIPDSFVCCVCLDLLYKPIVLSCGHICCFWCVYNSMNCLRESQCPVCRNQYYHFPTVCQLLHFLLLKIYTAAYKRRENQTLEEEKQSGFYSPQFDPDTCESQAKFGHSGSAANEGDDGTIYYDGESDIIGTPAKGKKMPQEELSVQRKLSVADVTCTMCKQLLFHPVVLNWGHVYCQTCVINIDDEMLRCKV

SEQ ID NO: 236396 - protein, 191 aa, Glycine max
  Clone ID: PAT_MRT3847_55493C.1.pep
MTTPRVRANFLLPLFFFFFFCSHTLFSHAADSITGDTVIRDNDGGDTLVSKDLTFEMGFFSFDNSSRYVGIWYHEIPVKTFIWVANREKPIKGREGLIQIKTDGNLVVLDGERNEVWSTNMSIPRNNTKAVLRDDGNLVLSEHDKDVWQSFEDPVDTFVPGMALPGSAGTSMFRSWKTRTDPLPGNLPNES

SEQ ID NO: 236397 - protein, 421 aa, Glycine max
  Clone ID: PAT_MRT3847_55494C.1.pep
MENNAFRDQIMEDNEHEEMPDSFVCCVCLDLLYKPIVLSCGHMCCFWCVYNSMSCLRESQCPVCRNQYYHFPTVCQLLHFLLLKIYTAAYKRRESQTLEEEKKSGFYSPQFDPDTCESQAKFGHSGIPSSSSILNLTSNSCNVGTSECLEQSGSTANEGDEGTIFSNREPDIIGTPAKGKKLPQEELSLQQKLSVADVTCTMCKQLLFHPVVLNCGHVYCQICVINIDDEMLRCKVCQSPHPRGLPKVCLELDHFLEEQFPEEYGQRRDAIELQQIKVKPDTPSSCSLDGGKKPENTDWWSDPDSKVHIGVGCDFCGMFPIIGDRYRCIDCKEKMGFDLCGDCYASRSKLPGRFNQQHTSEHKFKLVQPNIIHNIMLRLATAQLGEGSIDLESIGNIEVTSDGAALFGDGEDNHNDSEAAN

SEQ ID NO: 236398 - protein, 71 aa, Glycine max
  unsure (1)..(71): unsure at all Xaa locations
  Clone ID: PAT_MRT3847_55495C.1.pep
MVRFSLSNDALNIMISSYKLWKRQFMIRPSXNVIIKFLLVMQNHGYIDEFEYFDDHRAGKILDELNVILNN

SEQ ID NO: 236399 - protein, 101 aa, Glycine max
  Clone ID: PAT_MRT3847_55496C.1.pep
EIVVLDQINLDVILDYCNCQGLCSVLLDIRGSFGEFEELVKEGIKKNYINKFVPEILPVWDGLAEPDPLQTLKSSEQGLKVVNLKSMASDQSVVIEGYFKL

SEQ ID NO: 236400 - protein, 111 aa, Glycine max
  unsure (1)..(111): unsure at all Xaa locations
  Clone ID: PAT_MRT3847_55497C.1.pep
XXXXXEXXXRXXVXXXLLXXSXXXQXXSAXVETXXPXRXAXXXDXTXGRAMHXXNRXPXXSXXXPRXXQXXXXXKMSIXXLXXAKXXXXXXXXXLXXAXAEXRDYXXVXXN

SEQ ID NO: 236401 - protein, 123 aa, Glycine max
  Clone ID: PAT_MRT3847_55498C.1.pep
MMQQRWNRRKTHLHLLGLLFVFFIVLTILHSEHSIQQIHENPDPEAHRQDASLSFVKPNVLISRNGAPEILDRFSKCNGTREYSGRKISWSGRKTESSRRKVKSEKCDVFSGKWVFDNTSYPL

SEQ ID NO: 236402 - protein, 91 aa, Glycine max
  Clone ID: PAT_MRT3847_55499C.1.pep
LSTYQTKVDKDLQSLEDILHQVENKTSEVKQLIKAIQLTYNPDESSKPNMIDAATLKSRKMLEEIMKYEASILTHDSSIRYLQEIYNSNNQ

SEQ ID NO: 236403 - protein, 56 aa, Glycine max
  unsure (1)..(56): unsure at all Xaa locations
  Clone ID: PAT_MRT3847_5549C.1.pep
MRSVPIPRLCVVEKXRAHNXYGYNLHAERGKGHFVGDRDIGSPADLSGLRPVDHII

SEQ ID NO: 236404 - protein, 83 aa, Glycine max
  Clone ID: PAT_MRT3847_554C.1.pep
ACKGFKSQQELPYLHYCTKINAWANLYLVRHSIKHLIIASKSLSLFSLSPPGIWNKCYGQHIPICSPLILNCAMNVCKLNILS

SEQ ID NO: 236405 - protein, 33 aa, Glycine max
  Clone ID: PAT_MRT3847_55500C.1.pep
IMYHFPLNTLTGARVREQDDIIPIGHVSLIQLN

SEQ ID NO: 236406 - protein, 54 aa, Glycine max
  Clone ID: PAT_MRT3847_55501C.1.pep
YPLYPSKHISLPYTISTSQQYITHFLKYNSILIYITLTISYIYFTIPLLTYITY

SEQ ID NO: 236407 - protein, 91 aa, Glycine max
  Clone ID: PAT_MRT3847_55502C.1.pep
IIAEVRYFVNITFNCVSEDPVCEEQNRLGSMPPTCHNKCNQCHPCMAVQVPTSPNHERVHPGLLPPTASMEVFFLQGNTNRYSNYKPLSWK

SEQ ID NO: 236408 - protein, 131 aa, Glycine max
  unsure (1)..(131): unsure at all Xaa locations
  Clone ID: PAT_MRT3847_55503C.1.pep
HPEGRALNPWNLCTVDQVEELKALIKIVPIWTTGIMMGVSISQGSFLVLEASSMDRHITSNFEIPSGSFVTFMILSLVLWVIIYDRILVPVPRXIGAKQKIGIGLLTISIAIASLAIVESIRRKISIAIAF

SEQ ID NO: 236409 - protein, 41 aa, Glycine max
  Clone ID: PAT_MRT3847_55504C.1.pep
LDIIFRLWPWQPATICLNSSDGLSVSYDTRSISGGASYAAP

SEQ ID NO: 236410 - protein, 100 aa, Glycine max
  unsure (1)..(100): unsure at all Xaa locations
  Clone ID: PAT_MRT3847_55505C.1.pep
FXXXPXLXFPPSLLSIXXPXXLLFXXSXPFLNSXXSSSLXXPPXHXSLXSXXXXXXFLXIXXXXXSXSXIXHXXXSPFLFXYXSLXILXPNSXLXYXFLN

SEQ ID NO: 236411 - protein, 81 aa, Glycine max
  Clone ID: PAT_MRT3847_55506C.1.pep
MSAASIAWFVASSSGAVDALNDRLGVCKWNHALRSLQHQARSVIICYRQANPLSSATSAAVANKVNRTKDESMRKVMDLSC

SEQ ID NO: 236412 - protein, 41 aa, Glycine max
  Clone ID: PAT_MRT3847_55507C.1.pep
QIGPYDHDLDMTTRRQLLGKIWTLDYRQWRGANKLILVMPV

SEQ ID NO: 236413 - protein, 58 aa, Glycine max
  Clone ID: PAT_MRT3847_55508C.1.pep
LVPNRHEADSTTSYSRKEKSGSFWFCLICKEVGEDLLNYYLLLWEVGTYLKRHFCSLD

SEQ ID NO: 236414 - protein, 111 aa, Glycine max
  Clone ID: PAT_MRT3847_55509C.1.pep
MGSNFLSPPAKRSALDPNPFPPNGPSKRSRQSKPPPPLSVPPGHVAFRLLCNASRIGGVIGKSGSVIKTLQQSTGAKIRIEDAPQESPDRVILVIADAALSCKVLLRNEEV

SEQ ID NO: 236415 - protein, 395 aa, Glycine max
  unsure (1)..(395): unsure at all Xaa locations
  Clone ID: PAT_MRT3847_5550C.1.pep
GGKGRSKKQGIRKKETVDLRNLLLMCSQSVYANDNRTANELLKQIRQHSSPVGDASQRLAHYFTNGLEARLVGDGTSAQGMYTFLSSKNITVAEFLKAYQVFTSSSPFKKFIHFFANKMIMKAAAKAETVHIIDFGILYGFQWPILIKFFSNREGGPPKLRITGIEFPQPGFRPAERIEETGHRLANYCKRYNVPFEYNAIASKNWENIQVEALKIQSNELVAVNCHLRFENLLDESIEVNSPRNAVLHLIRKINQDIFTQSITNGSYNAPFFATRFREALFHYSATYELIDTVIPRENEWRLMIERELLGREIMNVIACEGSQRIERPETYKQWQVRNTRAGFKKLPLNEELMAKLRTALXNGTTDFVLDEDNNWLLQGWKGHILYASTCWVPA

SEQ ID NO: 236416 - protein, 89 aa, Glycine max
  Clone ID: PAT_MRT3847_55510C.1.pep
LQARAGNSLTTFYKNKIQKCCPPFGIKAGFPVLLSSSTPGLGRAPKKSWALLHVLKALIFPGGPAHQRHTMAQREHYKRCWPNGKDRGG

SEQ ID NO: 236417 - protein, 58 aa, Glycine max
  unsure (1)..(58): unsure at all Xaa locations
  Clone ID: PAT_MRT3847_55511C.1.pep
EDSLLAAPIVLDXVLVAELSTIVELIADNEGEFHSVHAVATILRLLTRAPAGAPGLHW

SEQ ID NO: 236418 - protein, 104 aa, Glycine max
  Clone ID: PAT_MRT3847_55512C.1.pep
QTLSIFRQLFFLRVFNHRIIELILIIVFHILQDSDTIAFLSDNLTSSTGSLFRRRCHSQQIPQANCPRYNYCRLTESHLWVMMRGLRFRFRMKRGRVGKVREND

SEQ ID NO: 236419 - protein, 177 aa, Glycine max
  unsure (1)..(177): unsure at all Xaa locations
  Clone ID: PAT_MRT3847_55513C.1.pep
MPLENRVLDPKKSQNIAILLRALNVTIDEVCDALREGNCDTLGTELLESLLKMAPTKDEESKLKEFQDESPFKLGPAEKFLKVVLDIPFAFKRVDAMLYIANFDSELEYLKKSFETLEVACEELKKSRMFLKILEAVLRTGNRMNVXTNRGDAHAFKLDTLLKXVDIKGLMEHSLHF

SEQ ID NO: 236420 - protein, 230 aa, Glycine max
  Clone ID: PAT_MRT3847_55514C.1.pep
MDHMGDPKSIIHELLQGLELARQLQVYLHMPTSSQETRDLLIQKIISTFEKALEMVNCKGPVPAGESSHHPLGAALIRVSDSPLSSSPRSEDSDRDFKDQDPNAFKKRNTLPRWTKHIRVTPGMGVEGPLDDGYSWRKYGQKDILGALYPRGYYRCTHRNVQGCMATKQVQRSDEDPTIFEITYRGKHTCTVANNVGSSSPIPLENQEPSLNNTISQHQHQQNILQSHEQ

SEQ ID NO: 236421 - protein, 36 aa, Glycine max
  Clone ID: PAT_MRT3847_55515C.1.pep
HGYVAHSAHHLLSQTGNRGAALDRTLHNEPSPSQLN

SEQ ID NO: 236422 - protein, 245 aa, Glycine max
  Clone ID: PAT_MRT3847_55516C.1.pep
MGVEGPLDDGYSWRKYGQKDILGALYPRGYYRCTHRNVQGCMATKQVQRSDEDPTIFEITYRGKHTCTVANNVGSSSPIPLENQEPSLNNTNIPQHQHQQNILQSHEQQQNELLLSLRKGLRVQTENLDSPEQPLVPFRFPLSTNIKNESHVFPSPVLENFTSPSYVSPAASGIGHFSVSPSGVVNSFEGNPNLANSESQINDMIPATTTTSAAPNSSTVGLEFPFDQFEFDGQNFTFDNPRFFS

SEQ ID NO: 236423 - protein, 57 aa, Glycine max
  Clone ID: PAT_MRT3847_55517C.1.pep
LCYLFSYLRVLTYSSAPIIVNIHGTLEVNFVVSTLKPGSFFYFFNLLMHCFFLSLFP

SEQ ID NO: 236424 - protein, 69 aa, Glycine max
  Clone ID: PAT_MRT3847_55518C.1.pep
LSSPPPRRVIKEPDRFPLNWRGIKVPNLSQGLFPEDPLRQRPRVLGKTEIFFFTMAPSLEGMSYFSARV

SEQ ID NO: 236425 - protein, 64 aa, Glycine max
  unsure (1)..(64): unsure at all Xaa locations
  Clone ID: PAT_MRT3847_55519C.1.pep
LNKFADITPYESSKEYLQAPKDVSQXITMANKKMKTEQPTCDYPPASWDCRKKGSITQIKCQWR

SEQ ID NO: 236426 - protein, 118 aa, Glycine max
  unsure (1)..(118): unsure at all Xaa locations
  Clone ID: PAT_MRT3847_5551C.1.pep
MGCCCTKQRVDHKDPADLASQTYVNISEIETLYDLFKKLSSSIIHDCVISKEEFQLGLFGSSEKRSLFADRGSQLFDXKNDGVIEFGEFVKALNVFQPAAPQAQRADFAFRLYDISQR

SEQ ID NO: 236427 - protein, 184 aa, Glycine max
  Clone ID: PAT_MRT3847_55520C.1.pep
MVALFSPPVFSTKGWLLEEDPLSYDVSSEYSFPYQFYSPQTQIELEIERSTSPSPEDPAMVKKLSHNASERDRRKKVNHLVSSLRSLLPVADQTKKMSIPTTVSRVIKYIPELQQQVEALSKKKEDLLCRISRQLQGDAVNKESQRRISHHNSDFAVSTSRLNDCEAVVHISSYEAHKAPLSDI

SEQ ID NO: 236428 - protein, 35 aa, Glycine max
  unsure (1)..(35): unsure at all Xaa locations
  Clone ID: PAT_MRT3847_55521C.1.pep
WLVIILCKQMQHQRXKQANKQXTTLEXXWYYWSTQ

SEQ ID NO: 236429 - protein, 287 aa, Glycine max
  unsure (1)..(287): unsure at all Xaa locations
  Clone ID: PAT_MRT3847_55522C.1.pep
MEKEENEPHVQKSGGESEDAEPIELVLFQVPECYVYIIPPRKSAASYRADEWDVNKWAWEGILKVTRMGEECLIKLEDKSTGKPQLNLLQVHRRFSVEPVIDSSRYFVLRIXQDIGGRLRHAFIGIGFRERTEAYDFQAALHDHMKYLNNKKTAEEMDQHYQQTSSVDYSLKEGETLVLQIKTNKSGSVAQCESIALAXVRVIFEISSXMGKESIPSIKLSPPPAPLSPVFGTQKSPTNSPTNLSLEKTNIVETPKTVKDTEPENSPEKQSTEDVPDDDFGDFQAAG

SEQ ID NO: 236430 - protein, 101 aa, Glycine max
  Clone ID: PAT_MRT3847_55523C.1.pep
FLLSHSFLIAIAHFSCCQPQALSLLLALILRATVSSRRADFDYEDGYDVRGRSWEPLLNPQPGQPSGSSKGDNSGNHSDFWSARMRQKYGLNHGDKCSYQP

SEQ ID NO: 236431 - protein, 101 aa, Glycine max
  Clone ID: PAT_MRT3847_55524C.1.pep
MQAAIAAMAAHTILFSSFPAPQSIALPATTKKAVAILKGNSSVHGLVTLTQQQDNGPTTVTVRVSGLTILRARVRLRRTGDIMDVISTATNHEFEDKSATY

SEQ ID NO: 236432 - protein, 66 aa, Glycine max
  unsure (1)..(66): unsure at all Xaa locations
  Clone ID: PAT_MRT3847_55525C.1.pep
ARRVIGVQKLLQXSPGISSVDQVVQTGRNVVQGSDSPENCKRGIALWFKEGKVCDWTPVLSSWLKV

SEQ ID NO: 236433 - protein, 61 aa, Glycine max
  Clone ID: PAT_MRT3847_55526C.1.pep
SSLHYKRGMIFSRKIINRNSLESKNSQSKYYIIIQLGKRMKTISNKFTPLKICVDSYIVYF

SEQ ID NO: 236434 - protein, 102 aa, Glycine max
  unsure (1)..(102): unsure at all Xaa locations
  Clone ID: PAT_MRT3847_55527C.1.pep
LAGGRPWFFFFLTPHYINVIRKTXTGTGQSCTTATPTIXXRKIQGVHGTLNDWRRSPLWSKCPQVGILSPQNWSTTGKCTGNKLNLSARSSQTAMGHRQAPL

SEQ ID NO: 236435 - protein, 109 aa, Glycine max
  unsure (1)..(109): unsure at all Xaa locations
  Clone ID: PAT_MRT3847_55528C.1.pep
VTGWTVTLVQEGQVSIDWCISSEECVRRTYCVLNAHSPCVLYRGLGKLTFPQGTCRSGQRMPFYIGGGAGAKNAIVMNVPHAALSMWRYSVGELDFEXVCKMTSPYIKC

SEQ ID NO: 236436 - protein, 78 aa, Glycine max
  Clone ID: PAT_MRT3847_55529C.1.pep
PPYWFLPPREGGNKSTLTQFSPLFGANGAVHVSKPGPPEGLVIVFGAPNQTPLAQGLIQGFFLGGQPLALGSKTKGPF

SEQ ID NO: 236437 - protein, 68 aa, Glycine max
  unsure (1)..(68): unsure at all Xaa locations
  Clone ID: PAT_MRT3847_5552C.1.pep
PLSLAXXXXLFAXXXXXVSXVXFGVSXXLLXPSXXXXFXRGXXXLPFSSLPALXLXXLXFGXAXXXVL

SEQ ID NO: 236438 - protein, 356 aa, Glycine max
  Clone ID: PAT_MRT3847_55530C.1.pep
ELRSQATQFITFSLSFSKEKRKKKSSIPMEVSCKILRRSIHSFLQNYHYFTSTAAFLALPFSASIILSQAFVPASSSLLPQIHSHLRTLFDAAGFPSTSQLFTILNLKVSQTITSSIFTLPFTLTFLLIAKASIIQALSHHKPTLPTSFTSILYHYKPLLLTYIYNSFFILSANASCFCLLFLAFTFAEGLGYTSSSSTLLMSAASAVLYSVILANAFVICNMSLTLSGMEGHGGYMAILKACVMLRGRTSMALFLALPANVGLAAIEALFQFRLERAYHNGEMSSWPFMALEAIFIAYLYSVFITIDTIVSCKFYKSCKVGLRGDQEDKHFMRIEFPEEDSCGYLVLKNFEELPK

SEQ ID NO: 236439 - protein, 40 aa, Glycine max
  unsure (1)..(40): unsure at all Xaa locations
  Clone ID: PAT_MRT3847_55531C.1.pep
QIIXPKSHXPLTHCHPQMPXXXSXASNQSGLNXLXXHFIP

SEQ ID NO: 236440 - protein, 56 aa, Glycine max
  Clone ID: PAT_MRT3847_55532C.1.pep
EVFRGLKGFFQFKKGQNWCFLFTKKQGLCFFFPQKKVSFLGEVKKTLFNVAFGAPF

SEQ ID NO: 236441 - protein, 62 aa, Glycine max
  unsure (1)..(62): unsure at all Xaa locations
  Clone ID: PAT_MRT3847_55533C.1.pep
ITIQXXXTLQKANNEDAPKLECETQENKPIPGPYQKARTFGWLEFACHKSKSLNWGGFLPEN

SEQ ID NO: 236442 - protein, 65 aa, Glycine max
  Clone ID: PAT_MRT3847_55534C.1.pep
LCSAPGAYSAGALLFICMTPVLQCVDRYMWTISSKGISHLCIEASSRLVRQGEPRAGAYFFNRPQ

SEQ ID NO: 236443 - protein, 40 aa, Glycine max
  Clone ID: PAT_MRT3847_55535C.1.pep
FNFEQGIFKSVINITNPKYFLLLKLTYKLFLFVFFFTYLI

SEQ ID NO: 236444 - protein, 90 aa, Glycine max
  Clone ID: PAT_MRT3847_55536C.1.pep
IKKCIQHKTNTLTINERMVCTGEMGSIVDKKSWYEEDTKSQRKPTKKYDSQCQQAYQTAKKGKDVNFVSFRIRGSGCISVWAFDVGDFDY

SEQ ID NO: 236445 - protein, 50 aa, Glycine max
  Clone ID: PAT_MRT3847_55537C.1.pep
HSNDLDTKEFPLNKPPNVSYYHMSLHPLITGSDRYSFHQPYMSRICCSLT

SEQ ID NO: 236446 - protein, 148 aa, Glycine max
  Clone ID: PAT_MRT3847_55538C.1.pep
TALMGVTGAGKTTLMDVLAGRKTGGYVGGNIKISGYRKKQETFARISGYCEQNDIHSPHVTVYESLLYSSWLRLSLDINVETRKMFIEEVMELVELKPLRHVLVGFPGVTGLSTERRKRLTIAVELVANPSIIFMDEPTSGLDARAAA

SEQ ID NO: 236447 - protein, 98 aa, Glycine max
  Clone ID: PAT_MRT3847_55539C.1.pep
MWEISVMMKIIRHPRSPSTRMHDVNRRPTRSTFHQDTTAKVHEDVGDFSHDEDLTSSEIAFYQDVIGEEILEREMLSSDEECDSLGDESNPSKDMTSP

SEQ ID NO: 236448 - protein, 61 aa, Glycine max
  Clone ID: PAT_MRT3847_5553C.1.pep
RNGPHTWKTGLSQNPIKLIGLRRLNESTGRKYALKCVDYSRRTRLGYSSPFPNKTPYENNI

SEQ ID NO: 236449 - protein, 44 aa, Glycine max
  Clone ID: PAT_MRT3847_55540C.1.pep
SQIHLHFLCSHGPGYRALFQLTVYARSVGVHVHQMNKYLSHAYI

SEQ ID NO: 236450 - protein, 162 aa, Glycine max
  Clone ID: PAT_MRT3847_55541C.1.pep
QVEGDGVSPRPRQRTPPSLLRRPSFSGRMRLAGIDVPNAENDTGKLGTNKIVQEPQMSPCQLANGNVPHISRQVTTREPQKAFERSSKGLQTDSSNSASSSVSIQGCELADDATTFIDMREQMLPNHEKVNHIVGVESCPDRSQPTTCAHCKMVEKVPKETC

SEQ ID NO: 236451 - protein, 84 aa, Glycine max
  unsure (1)..(84): unsure at all Xaa locations
  Clone ID: PAT_MRT3847_55542C.1.pep
IIHHSKYNAFYYPYDLILLKTISTSTLHSLESPIALTXSNPILXSHPLISGWVHTHTINQNYPNNHHSLPSPILYHPISYNSYT

SEQ ID NO: 236452 - protein, 72 aa, Glycine max
  unsure (1)..(72): unsure at all Xaa locations
  Clone ID: PAT_MRT3847_55543C.1.pep
LSLXSPVSSPSRRAVNYLVSWGTSCGGCSPCGKVVPRPPSGGKIAFSLVERRGFPGFNTKGYLELFPDWGRP

SEQ ID NO: 236453 - protein, 70 aa, Glycine max
  Clone ID: PAT_MRT3847_55544C.1.pep
SFPFIFVLPTCYDFLFFSTFNSSETLGDSTTNLYCIKSKAEKERERERNKNRNKTTLSAKQRDLSNMGCP

SEQ ID NO: 236454 - protein, 99 aa, Glycine max
  Clone ID: PAT_MRT3847_55545C.1.pep
TNPSHSECTSHGSTTNYHSTMHSRRMAAILQPSVIQSGPIDDLCYHQQVHLSIEESQLNGLESLSETELFAPRMPIAQVTRILRQLTLLRKNQIPCRLI

SEQ ID NO: 236455 - protein, 89 aa, Glycine max
  unsure (1)..(89): unsure at all Xaa locations
  Clone ID: PAT_MRT3847_55546C.1.pep
RCCRCFSFAFIIIRVFIGAVYGDNVTYDGRSLIIDGQHKILYSGSIHYTCSTPHMWSNINAKANESVLEVXQTYVFRNFYEPLLGQFDF

SEQ ID NO: 236456 - protein, 105 aa, Glycine max
  Clone ID: PAT_MRT3847_55547C.1.pep
MEQYEILEQIGKGAFGSALLVRHKHEKKKYVLKKIRLARQTDRTRRSAHQEMELISKVRNPFIVEYKDSWVEKGCFVCIIIGYCEGGDMAEAIKKANGINFPEEK

SEQ ID NO: 236457 - protein, 584 aa, Glycine max
  unsure (1)..(584): unsure at all Xaa locations
  Clone ID: PAT_MRT3847_55548C.1.pep
GETSLDSPQSCLTISYAHQEMELISKVRNPFIVEYKDSLVEKGSIVCIIIGYCEGGDMXTVLKKCNGQNHNXEKLSKXLVQLLMNTDYXAELQYSSREKANINISRERSGKCSWSTILTKDQDIRLGDFGLAKMLSSDDLASSVVGTPSYMCPELLADIPYGSKSDIWSLGCCIYEMAAYKPAFKAFDIQSLLIKINKCIVSPMPTMYSAAFRGLVKSMLRKNPELRPTAAELLNHPHLQPYIHKIQLKLNSPRRSTFPFQWMXTNHVRRTRLVDRETIYTLSELGRWLXGSCAKDMLPSVSGTEQVSQCSTERAHGLSTCSKEKIYELSVGCVREKYKTDKSKASKFSTVERTPRSRAVTVSATTKRHTIATSKTTHSGPKRDSLPASHAPSRKFSTPPRTRARATPNLYTNVLGSLDSLDVSINAPRIDKIVEFPMAFCEDPFSPIRGPSSTSARCSSSSAGSTADCSITKDKCTIQEDKVTLPTSITDACPAPKETKCSYEHVKDCVSSHSSTDLDQRRFDTSSYQQRAEALEGLLEFSARLLQQQRFDELGVLLKPFGLEKVSPRETAIWLTKSFKQTAV

SEQ ID NO: 236458 - protein, 58 aa, Glycine max
  Clone ID: PAT_MRT3847_55549C.1.pep
RDGPCSGALSPPAVRGTLSVARTVGSASKHRYLGLLDCLSRHVRQISASSCKSWAAFR

SEQ ID NO: 236459 - protein, 67 aa, Glycine max
  unsure (1)..(67): unsure at all Xaa locations
  Clone ID: PAT_MRT3847_5554C.1.pep
ELRVTXTPLLKTLGAEEVVEFVMVALVLPTTTCVGIHKNKTKSNNTLPSNILPCLVTHSTSICEKNP

SEQ ID NO: 236460 - protein, 219 aa, Glycine max
  unsure (1)..(219): unsure at all Xaa locations
  Clone ID: PAT_MRT3847_55550C.1.pep
VQMEQYEILEQIGKGAFGSALLVRHKHEKKKYVLKKIRLARQTDRTXRSAHQEMELISKVRNPFIVEYKDSWVEKGCFVCIIIGYCEAXDMAEAIKKANGINFPEEKLCKWLVQLLMALDYLHGNHILHRDVKCSNIFLTKDQDIRLGDXFGLAKMLSXDDLASSXVVGTPSYMCPELLADIPYGXXSQIIWSFGKVXSMKWAAYKPAFKAFDIQSLLI

SEQ ID NO: 236461 - protein, 46 aa, Glycine max
  Clone ID: PAT_MRT3847_55551C.1.pep
QTTLNWLIILFLRENCVFSERAEGTYQHNHNVNLKAQTPLGMNPCQ

SEQ ID NO: 236462 - protein, 106 aa, Glycine max
  unsure (1)..(106): unsure at all Xaa locations
  Clone ID: PAT_MRT3847_55552C.1.pep
PPPTTTTTPTTTTPTXLTLIQLLTTTFSNKCSLPALGQISTITSHYYGTLTPPTTSSPPTKRRRPTTTTTLLLMSFFPPSTSTPPPRFRQPPTPLVTGRRLRACPC

SEQ ID NO: 236463 - protein, 336 aa, Glycine max
  unsure (1)..(336): unsure at all Xaa locations
  Clone ID: PAT_MRT3847_55553C.1.pep
MLQHQLLRDSGLLNMPLSLPGNDVVVDASTFESPNPSGKASVQTLYNGFAGSLHGVGQSSNQTQHFQHPQGSSNPMQGQNFGAVPAGGGSATNQAPASGAAAGGAPAQPRQRVRARRGQATDPHSIAERLRRERIAERMKALQELVPNANKTDKASMLDEIIDYVKFLQLQVKVLSMSRLGGAAAVAPLVADMSSEGGGECIQANGKSNGGGAHAPNTNSSQTTATTTSNDSLTMSEHQVAKLMEEDMGSAMQYLQGKGCLMPIXLPRNLATCHTRNVTVNVPLINAAAAAQIPTAANPAGDGPSSPSMSVLTVQSAVAVNDGSAAVKDAASVSKP

SEQ ID NO: 236464 - protein, 194 aa, Glycine max
  Clone ID: PAT_MRT3847_55554C.1.pep
YIIMQPCSREMQGLNSLLNSSSQISLQDLQNHTTNQIQNSHMNHQHQLAHFDSTSHDDFLEQMLSSCSWTDLNPNKPLLWDPNTLNDIKPPDETTPSNNNNDATTNVASFSSFDEHSTLASKFRNHQISSNNNAPKNAAAAALMLQHQLLRDSGLLNMPLSLPGNDVVVDASTFESPNPVTYRKFLFFFLNLYT

SEQ ID NO: 236465 - protein, 50 aa, Glycine max
  Clone ID: PAT_MRT3847_55555C.1.pep
ERFTNCFRWVEMMAPVFSRAAWRCIWYMIQNDLIHAWGLDMQLGYCAQAC

SEQ ID NO: 236466 - protein, 75 aa, Glycine max
  Clone ID: PAT_MRT3847_55556C.1.pep
SHTVLRLYRIFFKEKEKKKFCGVPWVTDAFGAQFFLISISTCYYCSTSETLVFVCFILMRLCWATAVPIFILEPN

SEQ ID NO: 236467 - protein, 101 aa, Glycine max
  unsure (1)..(101): unsure at all Xaa locations
  Clone ID: PAT_MRT3847_55557C.1.pep
MGFRLPGIKKASLNQASSKAVDVPKGYLPVYVGEKMKXFVIPLSYLKQTSFQDMLSLSDEEFGYKRPMGGLMIPCGENVFLDITSRSLELIGSNPTMIRLT

SEQ ID NO: 236468 - protein, 38 aa, Glycine max
  Clone ID: PAT_MRT3847_55558C.1.pep
SIVVTSHVGKNMPAACEVDEDLCMRMVLMREAIEEMIF

SEQ ID NO: 236469 - protein, 73 aa, Glycine max
  Clone ID: PAT_MRT3847_55559C.1.pep
QVNYFPIESYRSVKLRLASWNLWHSYECQWQCSTVYPNCQVPILLALNSSSCVVHAARHSKGPFLVIRLGRPS

SEQ ID NO: 236470 - protein, 71 aa, Glycine max
  Clone ID: PAT_MRT3847_5555C.1.pep
VKKSSVKQESAGALADELNRLSAENKNLTEMLTEMCENYNTLRSNLMEYMMKNPDKELSSSRKRKSSILNN

SEQ ID NO: 236471 - protein, 151 aa, Glycine max
  Clone ID: PAT_MRT3847_55560C.1.pep
VLMIIKGLFGRYERWNPVHPTHGAFWGMGVGVGCGVGWGPGFGPEVIGYVGAGCGIGFNVGITFAGVGVGLPANFIFEGPYNGVSWIGNLPCISDLQREANGKLFEFRQKHLSIKGINFFDKKNSLPLLTSASKSIQAFRNQIFSSHKGKD

SEQ ID NO: 236472 - protein, 109 aa, Glycine max
  unsure (1)..(109): unsure at all Xaa locations
  Clone ID: PAT_MRT3847_55561C.1.pep
QFLPPYSLQIKRRKAKRSKFKSKHTGTQTTLFMQTLINIYSRRGASHSHMCYTISFHPIGAKRRKRHTXENKGRHVPRPVTGAVSSMSYSLILCLIKNMENRKEIFELI

SEQ ID NO: 236473 - protein, 219 aa, Glycine max
  unsure (1)..(219): unsure at all Xaa locations
  Clone ID: PAT_MRT3847_55562C.1.pep
RPPQQQNQQQQNNYDLFLETFRKVEVNIPLLDALKKIQRYAKFLKELCTHKRKLKGNGRISMGRNVSALIGKXIPCIIGNKKFENAMVDLGASVSVMPLSIFNSLSFGPLHSADVVIHLANRSVAYPAGFIEDVLVRVGELIFPANFYVLDMEEGFSHGSVPIILGRPFMKIARTKIDVYADTLSMEFGDIVVHFNIVDAMKHPYEDHSIFRAKILDQI

SEQ ID NO: 236474 - protein, 112 aa, Glycine max
  Clone ID: PAT_MRT3847_55563C.1.pep
WNSVLEGGCAGVPMVTWPMFPKQFSNVKFLPAIVKIGGRVGVQTWIGIMGRAPVKKNPVKKAVRRFMVGKEPKEIRTRAKRLAQMAKRFVKEEGFFSTDFNSLIEDLGWGAR

SEQ ID NO: 236475 - protein, 210 aa, Glycine max
  unsure (1)..(210): unsure at all Xaa locations
  Clone ID: PAT_MRT3847_55564C.1.pep
GMDAIKLEGGSPSRIVAAKAIVEAGIAVMGHVGLTPQAISVLGGFRPQGKNVASAVKVVETALALQEAGCFSVVLECVPAPVAAXTTASLPIPTIGIGSGHFCSGQVLVYHDLLGMLQHPHHAKVTPKFCKQYARVGDVINKALLEYKEDVINGSFPDAHHSPYKISKTDADVFSTELQRLGLDKAASAASEAVQKMDTTKSTSEGKQTK

SEQ ID NO: 236476 - protein, 50 aa, Glycine max
  Clone ID: PAT_MRT3847_55565C.1.pep
SKKIRIFTIREEGVEMVVFDLVSEECQRVIINSRESFVITSEREIERCET

SEQ ID NO: 236477 - protein, 448 aa, Glycine max
  Clone ID: PAT_MRT3847_55566C.1.pep
MVIINLVKKKKKSEREGMRLGKYELGRTLGEGNFGKVKFARNTDSGQAFAVKIIEKNKIVDLNITNQIKREIATLKLLRHPNVVRLYEVLASKTKIYMVLEYVNGGELFDIIASKGKHIEGECRKLFQQLIDGVSYCHTKGVFHRDLKLENVLVDNKGNIKITDFGLSALPQHLREDGLLHTTCGSPNYVAPEVLANKGYDGATSDTWSCGVILYVILTGHLPFDDRNLVVLYQKIFKGDVQIPKWLTPGAQNMIRRILDPNPETRITMAGIKEDPWFKKGYIPANPEDEDVHVDNEAFSSHEEPNEAEQRNSGSPTLINAFQLIGMSSCLDLSGFFEKEDVSERKIRFASILSVKDLIDRIEDTVTEMEFRVEKKNGKLKVMRENKVHKTLGCLSVVVEVFEISPSLYVVELRKSYGDGSVYKQLCKKLLNDLGVPPKQGLVRSAAN

SEQ ID NO: 236478 - protein, 108 aa, Glycine max
  Clone ID: PAT_MRT3847_55567C.1.pep
NLPLLNKKPTPVEKNGKGKTWGIVSPFPLYLGKWAPPYGSTPLPERLETGLRFPSFKNKWNGQMQFFFVTTPLFFWFLGPLKNTPPALVNSKKLFFLPNHPKLNKVFW

SEQ ID NO: 236479 - protein, 216 aa, Glycine max
  Clone ID: PAT_MRT3847_55568C.1.pep
MSKSKAKKKNSDSDEDDDVFYYRYSSVNPTQTQTQTQTLQHNPNPKSNNNKGSSSSSLAPSKSTLYVSNIDYSLTNSDLHTLFSTFGRVARVTVLKDRHTRLSRGVAFVQFVSRHDAHDAAAQMDGKVLNGRTLAGSIAGDNGRAPEFIRKRVYRDTDRCFECGEQGHLSYDWPRNQLGPRQRPEPNGPGGGLTPGGITTMMPEATMTIMTGLNRV

SEQ ID NO: 236480 - protein, 75 aa, Glycine max
  Clone ID: PAT_MRT3847_55569C.1.pep
ALTESGPSPSSFITLLQLLVSFSVADTYVLATPKRIRSDDLDCSDAIKLLMHHGYAISAVALPTTQSQNTWLRDL

SEQ ID NO: 236481 - protein, 111 aa, Glycine max
  Clone ID: PAT_MRT3847_5556C.1.pep
MEVMVKARRVEDKSRISGKLPVGNGKGSNLQKNVHSGQKLVRDWQPANNKVAVVQNATKTGSSGWKGRRTFHNLSPAEVNKKIRKGGCLTCEEKYNPTHVCKNSQFRLMIM

SEQ ID NO: 236482 - protein, 67 aa, Glycine max
  Clone ID: PAT_MRT3847_55570C.1.pep
FTTKLQHLVQEYLQPTNVILEQIFGDPEIPEFSPRNVIPRLISRSLAVITATIIAAMLPFLGDMNSL

SEQ ID NO: 236483 - protein, 107 aa, Glycine max
  unsure (1)..(107): unsure at all Xaa locations
  Clone ID: PAT_MRT3847_55571C.1.pep
NFFRFPPXXKXPTQNFSMKKWCPGGFHWSIPQDIFLGKKKRTPFYLFILGADFEHPLVFGGGELQSHFFLHLQAKTQFEALTAPFFFFRSSRKKGGKNFRVGRRGKN

SEQ ID NO: 236484 - protein, 75 aa, Glycine max
  unsure (1)..(75): unsure at all Xaa locations
  Clone ID: PAT_MRT3847_55572C.1.pep
NRSAKPFSTHAAAFFHTTTRXKKGGNFKXXAHFYTQISKLQIILKQWVISLFNFIAPPRLKKKSFYHVEDTKISG

SEQ ID NO: 236485 - protein, 557 aa, Glycine max
  Clone ID: PAT_MRT3847_55573C.1.pep
MASHCVMAVTPSTPLLSFLERLQETAFETFAHSNFDPKTYVDMPLKSALTVTEDAFQKLPRNANGSVPVEDLKRFIEAYFEGAGDDLVYRDPQDFVPEPEGFLPKVNHPQVRAWALQVHSLWKNLSRKISGAVKAQPDLHTLLPLPGSVVIPGSRFREVYYWDSYWVIRGLLASQMHDTAKAIVTNLISLIDKYGFVLNGARAYYTNRSQPPLLSAMIYEIYNSTGDVELVKRSLPALLKEYEFWNSDIHKLTILDAQGCTHTLNRYYAKWDKPRPESSIMDKASASNFSSVSEKQQFYRELASAAESGWDFSTRWMRNPPNFTTLATTSVIPVDLNAFLLGMELNIALFAKVTGDNSTAERFLENSDLRKKAMDSIFWNANKKQWLDYWLSSTCEEVHVWKNEHQNQNVFASNFVPLWMKPFYSDTSLVSSVVESLKTSGLLRDAGVATSLTDSGQQWDFPNGWAPLQHMLVEGLLKSGLKEARLLAEEIAIRWVTTNYIVYKKTGVMHEKFDVEHCGEFGGGGEYVPQTGFGWSNGVVLAFLEEFGWPEDRNIEC

SEQ ID NO: 236486 - protein, 200 aa, Glycine max
  unsure (1)..(200): unsure at all Xaa locations
  Clone ID: PAT_MRT3847_55574C.1.pep
MAEYAQNYKVLILTWLSLTLVTVTASHCVMAVTPSTPLLSFLERLQETAFETFAHSNFDPKTYVDMPLKSALTVTEDAFQKLPRNANGSVPVEDLKRFIEAYFEGAGDDLVYRDPQDFVPEPEGFLPKVNHPQVRAXALQVHSLWKNLSRKISRAVKAQPDLHTLLPXPGFVVIPGSRFREGYYLDFLLVIRGLLASQMH

SEQ ID NO: 236487 - protein, 64 aa, Glycine max
  Clone ID: PAT_MRT3847_55575C.1.pep
FFSSPRCHVRYHCLTARGSLNGHCNSCNTVANVSPFLCTRTTLTWPVLVLTIIRRWSSRTCSHA

SEQ ID NO: 236488 - protein, 93 aa, Glycine max
  Clone ID: PAT_MRT3847_55576C.1.pep
PHYTSCSVLPYWTSTEFLVATLYISLTEACLVQDSLYVTLLCSQIIYAYFVNHDADYCKVNDLGVILLSVCKLIQFNMVYRCTYNKVKKKKKK

SEQ ID NO: 236489 - protein, 126 aa, Glycine max
  Clone ID: PAT_MRT3847_55577C.1.pep
LVPICSRVLTLLVSSALRFTAVRLIGSKSSPVGTFLFFLNGPLASFFFWSPASFVLASPSVAFNPSHPSAPSRAILFSFVSFSPPPFLPLPSFSSSLRSLHLLRSSFLLDFLGFQFFVFIFLGLNY

SEQ ID NO: 236490 - protein, 240 aa, Glycine max
  Clone ID: PAT_MRT3847_55578C.1.pep
RVASATYIHIFAKPPIPLSVSTVALSRDNLCKNCKRPGHYARECPNVAICHNCGLPGHIASECTTKSLCWNCKEPGHMASSCPNEGICHTCGKAGHRARECSAPPMPPGDLRLCNNCYKQGHIAAECTNEKACNNCRKTGHLARDCPNDPICNLCNVSGHVARQCPKANVLGDRSGGGGGARGGGGGGYRDVVCRNCQQLGHMSRDCMGPLMICHNCGGRGHLAYECPSGRFMDRYPRRY

SEQ ID NO: 236491 - protein, 237 aa, Glycine max
  unsure (1)..(237): unsure at all Xaa locations
  Clone ID: PAT_MRT3847_55579C.1.pep
MSSDSRSRSRSRSPMDRKIRSDRFSYRDAPYRRDSRRGFSRDNLCKNCKRPGHYARECPNVAICHNCGLPGHIASECTTKSLCWNCKEPGHMAXSCPNGGMWHTCGIAGHXLRRVLSPSKSSKGVEVCNNCRKTGHLARDCPNDPICNLCNVSGHVARQCPKANVLGDRSGXGGGGGARGGGGGGYRDVVCRNCQQLGHMSRDCMGPLMICHNCGGRGHLAYECPSGRFMDRYPRRY

SEQ ID NO: 236492 - protein, 89 aa, Glycine max
  Clone ID: PAT_MRT3847_5557C.1.pep
LFVRDNLDPLVKRAVAAASAVPDLQDRYHKIPSYIESKLLPFQREGVRFILQHGGRVLLADEMGLGKTLQAIHCLILNHFHTSTVHYDA

SEQ ID NO: 236493 - protein, 258 aa, Glycine max
  unsure (1)..(258): unsure at all Xaa locations
  Clone ID: PAT_MRT3847_55580C.1.pep
MSSDSRSRSRSRSRSPMDRKIRSDRFSYRDAPYRRDSRRGFSRDNLCKNCKRPGHYARECPNVAICHNCGLPGHIASECTTKSLCWNCKEPGHMASSCPNEGICHTCGKAGHRARECSAPPMPPGDLRLCNNCYKQGHIAAECTNEKACNNCRKTGHLARDCPNDPICNLCNVSGHVARQCPKANVLGDRNGGGGXAAARGGGGGGYRDVVCRNCQQLGHMSRDCMGPLMICHNCGGRGHLAYECPSGRFMDRYPRRY

SEQ ID NO: 236494 - protein, 628 aa, Glycine max
  unsure (1)..(628): unsure at all Xaa locations
  Clone ID: PAT_MRT3847_55581C.1.pep
MALSRLRHPLFSRSLRILSSPARSLSRTSNSSIFTLGGDHHNIIRPAFCSRLTGIHDRSLKSKWTDVKYFSSSDSSHEVLGMPALSPTMTQGNIAKWRKKEGEKIEVGDVLCEIETDKATLEFESLEEGFLAMILVPEGAKYVPGGQPVAITIEDENDIQNVPASGGGXRLRVEEKKPTLGGVSDERKSESTSSVVNASELPPHLLLEMPALSPTMNQGNIAKWRKQEGDKIEVGDILCEIETDKATLEFESLEEGYLAKILAPEGSKEVAVGHSIAITVEDASDIEAIKNSVSSSTNQQKAPQRGTKSEVKAQKNNITRISPAAKLLIAEYGLDAPTLNATGPYGTLLKGDVLSAIKSGKLSPKPASSKEKALSSQSHQQVAASQESKSDLKKSDAYEDFPNSQIRKVIAKRLLDSKQNTPHLYLSSDVILDPLLSLRKGLKEQYDVKVSVNDIIIKVVAAALRNVPEANAYWNVEKDEVILNDSIDISIAVATEKGLMTPIIKNADQKTISAISSEVKELAAKARAGKLKPHEFQGGTFSISNLGMFPVDKFCAIINPPQACILAVGRGNKVVEPVIGTDGIEKPSIATKLSLTLSADHRVFDGKVGGAFLSALQSNFSDIRRLLL

SEQ ID NO: 236495 - protein, 85 aa, Glycine max
  Clone ID: PAT_MRT3847_55582C.1.pep
PTMNQGNIAKWRKQEGDKIEVGDILCEIETDEATLEFESLEEGYLAKILAPEGSKEVAVGHSIAITVEDASDIEAIKNSVGLLSC

SEQ ID NO: 236496 - protein, 116 aa, Glycine max
  unsure (1)..(116): unsure at all Xaa locations
  Clone ID: PAT_MRT3847_55583C.1.pep
ATSTLLYKFFLHHMTVPYLLNGLTALYDLEWGHCFTWRDLXTQNRQVGMTLXRGYGGYGKIYTPQLIDGKTGDMKKLLNNIGQAEGELTRGAKATAHGLHKNLSRLVDYKHRMHVT

SEQ ID NO: 236497 - protein, 469 aa, Glycine max
  Clone ID: PAT_MRT3847_55584C.1.pep
QNVPASAGGETRVEEKKPTREDVTDERKSESTSAIINASELPPHVLLEMPALSPTMNQGNIAKWRKQEGDKIEVGDILCEIETDKATLEFETLEEGYLAKILAPEGSKEVAVGHPIAITVEDASDIEAIMNSVSRSSTNQQKAPQRDTKSEAKAQKNNIIRISPAAKLLITEYGLDASTLNATGPYGTLLKGDVLSAIKSGKLSPKPASSKEKVSSFQSHQQVAASQESKSDLKLSDAYEDFPNSQIRKVIAKRLLDSKQNTPHLYLSSDVVLDPLLSLRKDLKEQYDVKVSVNDIIVKVVAAALRNVPEANAYWNVETGEVVLNDSIDICIAVATEKGLMTPIIKNADQKTISAISSEVKELAAKARAGKLKPHEFQGGTFSISNLGMFPVDKFCAIINPPQACILAVGRGNKVVEPVIGTDGIEKPSIATKLSLTLSADHRVFDGKVGGAFLSALQSNFSDIRRLLL

SEQ ID NO: 236498 - protein, 135 aa, Glycine max
  Clone ID: PAT_MRT3847_55585C.1.pep
DDLILIHAVAATSLFFSCLLNRIKSLIHNDMALSRLRHPLFSRSLRILSSPARSLSRTSNSSIFTLGGDHHNIIRPAFCSRLTGIHDRSLKSKWTDVKYFSSSDSSHEVLGMPALSPTMVSLGKQFFSLFYLYSV

SEQ ID NO: 236499 - protein, 80 aa, Glycine max
  Clone ID: PAT_MRT3847_55586C.1.pep
LLIFSSFSIYFFFFCSCFLFISFFFLFSFFSREKGGDFNSQIPIPHFHRSPDVSPPKGGTLTPKNHLRGNKISSQQPHTK

SEQ ID NO: 236500 - protein, 87 aa, Glycine max
  unsure (1)..(87): unsure at all Xaa locations
  Clone ID: PAT_MRT3847_55587C.1.pep
SNPVNFSSCDCPILKSTTTIVTGLLNNLLSHSLSVARKWQHNQLHHLNIHXYQCAKFMIKHAVNVPRSLAVYSVEEVRNVINDLFPN

SEQ ID NO: 236501 - protein, 61 aa, Glycine max
  Clone ID: PAT_MRT3847_55588C.1.pep
TQTFSKVQHSTLFGVPRKTPFQPETRSFKNSNFMNRKCRSTQLHQNHHTSSQCKRAASVFP

SEQ ID NO: 236502 - protein, 45 aa, Glycine max
  Clone ID: PAT_MRT3847_55589C.1.pep
QLLNFVLNIRDKNIVLRNIHHRKLIGLVIKIKLFILTTLKLLLVR

SEQ ID NO: 236503 - protein, 205 aa, Glycine max
  unsure (1)..(205): unsure at all Xaa locations
  Clone ID: PAT_MRT3847_5558C.1.pep
MSFQGLVLCNFHFPPGWLFLSQHFGTAIGCVVAPLTFXLFDKGFDVGNPDGNYKAPYDIXYRNMAILGVGGLSGISHHCVQLCYGFFAFAIAANLVRDLAPNIIGKCFPLPMAMAVPFLVGGFFAIDLCMGSLGVFLXPKLCRDRAGFMVPTVXFGLTCANXLWILPSLNLALFKIGPPMCVSFLSAMFQSKSSTITFKYMLSTT

SEQ ID NO: 236504 - protein, 102 aa, Glycine max
  Clone ID: PAT_MRT3847_55590C.1.pep
VMVCQSFFPCLLLLRMVIRLTRWSVCASQHAVGVGRFHCGHCCPGHWLWVFVCFPLGPVPLSHPVPHQNLQLRPPRLFVCPRHHSTSVSRALVRFVAPIKPI

SEQ ID NO: 236505 - protein, 134 aa, Glycine max
  Clone ID: PAT_MRT3847_55591C.1.pep
RFYPLFPLNPNVALMNSFQTFKYFSNPKQNLRPQIHNQPISLKPLMIIIMRMSNTICFLYWSINNYLPLTTRNKKNNDKPKILTMQNFKFLESSKYIRYLATLLVAYGISINLFDVTFKSKLKSQFPKPNKYSS

SEQ ID NO: 236506 - protein, 103 aa, Glycine max
  unsure (1)..(103): unsure at all Xaa locations
  Clone ID: PAT_MRT3847_55592C.1.pep
GRAIYAIYTIWCEDCELSNAACTQALTMSFNPNPGADAWSTELLKRTGFHCEIIXVTGWTATPMQDVQDTMDWVISYHECVPRTYCVLNPQNPFVLNKWMGKL

SEQ ID NO: 236507 - protein, 49 aa, Glycine max
  Clone ID: PAT_MRT3847_55593C.1.pep
AGEKMVKSSSENMQDRFHWYLSNADVQGNFGRLPIWQKSKMCFYSMSCA

SEQ ID NO: 236508 - protein, 68 aa, Glycine max
  Clone ID: PAT_MRT3847_55594C.1.pep
GSKGISHILMRGITFKSVIVNAHANAEGDFATGDPLLRVELLEMTTNTHMERSTRKSGTNPTPCIMTC

SEQ ID NO: 236509 - protein, 67 aa, Glycine max
  unsure (1)..(67): unsure at all Xaa locations
  Clone ID: PAT_MRT3847_55595C.1.pep
RQMQINPYPNSRFCRGLPDPNIRIXDVGISMKSVGDYPFCVHLXSWTXENVSSAAVAAATTASTSYM

SEQ ID NO: 236510 - protein, 64 aa, Glycine max
  Clone ID: PAT_MRT3847_55596C.1.pep
DGFNWTHLQYVGTIFSAPNFCYRFLNMAYISEVDYCKGHTFIQFEPAPMRGEPYVTLRTPYYFL

SEQ ID NO: 236511 - protein, 94 aa, Glycine max
  Clone ID: PAT_MRT3847_55597C.1.pep
AKSEFLGPFWIQNRGFYGPVDFGGIFKAMKPFLFPKQFLFIKVYLFPFQFLGFCQVVETLFCCRKAVVFVPKLNLACAICSCSLRVGRPFFGVF

SEQ ID NO: 236512 - protein, 90 aa, Glycine max
  Clone ID: PAT_MRT3847_55598C.1.pep
KKSKKIWGPPPQVSREETEKKPPFLVPQLFQNFSKYKSKLFSSQKRGFPFFLGGYLGEKIFLKGICFFKAQLKLGFGPLFHPGKKKKLWG

SEQ ID NO: 236513 - protein, 55 aa, Glycine max
  Clone ID: PAT_MRT3847_55599C.1.pep
RPPTPLIFLIMYTTDGCYYCCRNNSLVIIFLLVEQHTFLLLCRLKQPPLLLLLLL

SEQ ID NO: 236514 - protein, 42 aa, Glycine max
  Clone ID: PAT_MRT3847_5559C.1.pep
HDTGFLGGGAGIINLYNSSKAPLETLSYTLTLPRADFKSFLH

SEQ ID NO: 236515 - protein, 874 aa, Glycine max
  unsure (1)..(874): unsure at all Xaa locations
  Clone ID: PAT_MRT3847_555C.1.pep
GRVGFSVGGCVVDGNGMGVEGVKIIVDGHERSITDNQGYYKLDQVTSTHYTIEAQKEHYKFKKLENYMVLPNMASIEDINAISYNLCGLVRMASGDLKVKVALTHGPDNVKPQKKQTDENGNFCFEVLPGEYRLSAIAATPENGAGLMFAPSYIDVVVKSPLLNIEFSQALVNIHGAVSCKEKCGPFVSVTLVRQVDKHNEERKTISLTTESSEFLFSDVIPGKYSLEVKHSSPESVTLEDNWCWEQSFIDVNVGAEDLEGILFVQKGYWVNVISTHNVDGYLTQPDGSNVNLKIRKGFQHICVEQPGVHEFSFVDSCIFFGSSSVKINTSDQLPIHLIGEKYLLNGQINVQSGSLDALPDNIVVDIKHDGAGVIDYATATFKSHSKDQMEAAIFEYSVWTNLGEKLTFIPRDSRNDGQKKLLFYPREHQVSVTDDNCQVYIPTFSCQLGVYIEGSVSPPLSGVHIRVFAAGDSSFTTLKSGELVLETTTGIDGSFVAGPLYDDIGYNVEASKPGYHLKQVAPHSFTCQKLSQISVHIHHKDDSKEPIPSVLLSLSGDNGYRNNSVSGAGGTFLFDNLFPGMFYLRPVLKEYAFSPPAQAIDLGAGEFKEVVFQATRVAYSATGIVSLLSGQPKGEVSVEARSESKGYFEETVTDSSGNYRLRGLLPDTDYVVKVAKRDVGSSNIERASPDSIAVKVGTEDIKGLDFIVFEEPEMTIISCXHVEGMGPDELRKHLMVEIRSASDLNKIESVFPLPXSNFFQVKGLXKGRHLLKLQSGLPSSSLKFESDLIEVDLEKNVQIHVGPLRYWIEDQLKQELTPAPVFPLIVAFLVVALFLSMPRLKDLYQATVDIPTPGLTAVSRKDVKKPMLRKKTY

SEQ ID NO: 236516 - protein, 68 aa, Glycine max
  Clone ID: PAT_MRT3847_55600C.1.pep
ETNFYFQKLTMGLGRFGDAEKNCPEDFIIHVPHLIQEYHPNNNWKSSHVRLSTPVEETRLLRVLHPIY

SEQ ID NO: 236517 - protein, 85 aa, Glycine max
  Clone ID: PAT_MRT3847_55601C.1.pep
MAIARLVRQAKRPHGLWVKMTAVTILGLCFIFVWGGFSSSSTSVTTQRESFEDIAEPVSSSSSHKPQKLKKDESKKGGGGGKSEK

SEQ ID NO: 236518 - protein, 39 aa, Glycine max
  Clone ID: PAT_MRT3847_55602C.1.pep
FSLSINLTSNIYALTHQHIYDDVTLYYMAMSAFSLCTEC

SEQ ID NO: 236519 - protein, 64 aa, Glycine max
  Clone ID: PAT_MRT3847_55603C.1.pep
YGGQNDSRSLWPAQRVIFFPLRNRAQISSKKLRGSCNQVSIAFVSEYKAHLPMLSVYQNWCEES

SEQ ID NO: 236520 - protein, 97 aa, Glycine max
  unsure (1)..(97): unsure at all Xaa locations
  Clone ID: PAT_MRT3847_55604C.1.pep
SLDNGTKTGGPFRTIKHPAELAHSANNGLDIAVKLLEPLNAEVPMLSYADFYHLAAVAALEVLGGPXVSFQPRRKDMAWSTSEGCVTNAPDGTQLLR

SEQ ID NO: 236521 - protein, 105 aa, Glycine max
  unsure (1)..(105): unsure at all Xaa locations
  Clone ID: PAT_MRT3847_55605C.1.pep
PLAPPEVLILRENAFKTRASAGPXTRQEMVSMVESEQILEAVDEFYTSVVLPEVSKFLDSSNSPWEKWVENLDKYSSIPNAELDEVKKAWKTWKENFRLKSASKA

SEQ ID NO: 236522 - protein, 42 aa, Glycine max
  Clone ID: PAT_MRT3847_55606C.1.pep
MLSEDLCFKMNSHGSPMLVELIDHLYALVGSNRTKWARGSSY

SEQ ID NO: 236523 - protein, 68 aa, Glycine max
  unsure (1)..(68): unsure at all Xaa locations
  Clone ID: PAT_MRT3847_55607C.1.pep
SSSDAFLVKYGFKLNXSILAEDNLIPMDEELAGMAKVVLIAGSSTQNLFRVVQWMLLAPCTTCYFGCI

SEQ ID NO: 236524 - protein, 213 aa, Glycine max
  Clone ID: PAT_MRT3847_55608C.1.pep
HKFKTHGIITIHASASPAAAPVRRRTLSLPMPLVHHPPIKKGDTHHLVSLTSTTYGSLLLIDQKDPNLTQKNQPRLTKTSNQTDPAHSLSPDSVINTWELMDGLDEEEEEEEEEIANAKKKPPYTSILDKPSSCRYTAFDGSARKKLLDSFESLKTSQTAMEKENSSSSPAPTKKPLWQHLSEEALLAKLDPSVAWSYRRALSSRNLGRNTLS

SEQ ID NO: 236525 - protein, 58 aa, Glycine max
  Clone ID: PAT_MRT3847_55609C.1.pep
RSQILWQCLKFFFKLSCNQEHRVKQPKFKKFNLLSKGLIAVVASKACLTFSFSSYICR

SEQ ID NO: 236526 - protein, 132 aa, Glycine max
  Clone ID: PAT_MRT3847_5560C.1.pep
MGNLSWMLDKFCISSCSKTCFCVNSMEFEDEFESKALIASDSDHKLRLKDVVDGKQTLAFQLKPKIVILRVSMHCHGCAKRVEKHISKLEGVSSYKVDLETKMVMICGDILPLEVLESVSKVKTAELWNSPC

SEQ ID NO: 236527 - protein, 35 aa, Glycine max
  Clone ID: PAT_MRT3847_55610C.1.pep
TKLHLFISILFHYLINPCVYIARGNQQCIRYISIN

SEQ ID NO: 236528 - protein, 70 aa, Glycine max
  Clone ID: PAT_MRT3847_55611C.1.pep
ATYSYYFWDYCHMTPPGSYLTYKDTYISPTGGSGVSTVAYEQVKMRKIVSHGVLFSTFHVDVIKDLPEDL

SEQ ID NO: 236529 - protein, 60 aa, Glycine max
  Clone ID: PAT_MRT3847_55612C.1.pep
LNSSAAPRVRTVVRRRQIVTSSITMFCLTTSCRCLYATHQCFHCHSQLLIYTFLILRILD

SEQ ID NO: 236530 - protein, 376 aa, Glycine max
  Clone ID: PAT_MRT3847_55613C.1.pep
MKFTVSNLSSSMFLLVLFIALVSHTHGSKIDHHRSNKHVALFIFGDSFLDAGNNNYINATTLGQANFWPYGETYFKFPTGRFSDGRLISDFIAEYANLPLVPPYLQPGNSNYYGGVNFASSGAGALVEAFEGSVIPFKTQARNYKKVAALLRHKLGSSETKSLLSSAVYMFSIGSNDYLSPFLTHSDVLNSYSHSEYVGMVVGNLTSIIKEIYKRGARKFVFMTLPPLGCLPGTRIIQLEGKGKCLQELSALASLHNGVLKVVLLQLDKQLKGFKFALYDFSADLTLMVNHPLKYGLKEGKSACCGSGPFRGVYSCGGKRGEKQFELCDKPNEYLFWDSYHLTESAYKKFADLMWGFTNNSSNIGPYTIGDLFQLP

SEQ ID NO: 236531 - protein, 89 aa, Glycine max
  Clone ID: PAT_MRT3847_55614C.1.pep
GFTPHNPSLKKKHLLPPVIVNPPFFFFVVRYTFPPNPQGIVFAPHLEYFLKFFFFQKLALFRWVYWRFFLGLTTQFSVLQPLILFFPPF

SEQ ID NO: 236532 - protein, 72 aa, Glycine max
  Clone ID: PAT_MRT3847_55615C.1.pep
APMCCWSLSLDTSSPSSPINKFQHREQYKATQEVPKSFSLHTGLFLFSIYIITHRRRVRGKRKGVLWKESEK

SEQ ID NO: 236533 - protein, 65 aa, Glycine max
  Clone ID: PAT_MRT3847_55616C.1.pep
FTGPPETADINPFFWGVANRGAFVRVGGAPKKAGKGYFWGKRPASPMGPYVVSSMIADPPLFWKP

SEQ ID NO: 236534 - protein, 65 aa, Glycine max
  Clone ID: PAT_MRT3847_55617C.1.pep
KKKKKKKKIIKKKKKKKKKKKKKKKKKKKKKKKKFKKKKKKGPPFLRVQVFLPLLSNFLFFFLVP

SEQ ID NO: 236535 - protein, 68 aa, Glycine max
  unsure (1)..(68): unsure at all Xaa locations
  Clone ID: PAT_MRT3847_55618C.1.pep
MAERGGGDRGSDRGGXRRGFEGRGRGRDRSLCRSPSPRREEEEKWVPMTKLGRLLKEAIITILEQIYL

SEQ ID NO: 236536 - protein, 61 aa, Glycine max
  Clone ID: PAT_MRT3847_55619C.1.pep
SSVFSMDGVLELLLHPSFLIVKSSGVTCLACYLVLLQVVRYSPSPSAFSPSIHSCASRKNG

SEQ ID NO: 236537 - protein, 64 aa, Glycine max
  Clone ID: PAT_MRT3847_5561C.1.pep
ATLKFKFMTKQVRWIGFWSFHNYWPFKPSATKMSTRQSTCPYQENITRQNTPDRRGNLSTTPKA

SEQ ID NO: 236538 - protein, 72 aa, Glycine max
  unsure (1)..(72): unsure at all Xaa locations
  Clone ID: PAT_MRT3847_55620C.1.pep
VYQLFSGCFALREQAQQNECQIQKLNALKPDNRIESEGGFIETWNPNNKPYQXAGDAHTRCTLNRNALRRPT

SEQ ID NO: 236539 - protein, 36 aa, Glycine max
  Clone ID: PAT_MRT3847_55621C.1.pep
FFFFFFFFFFFFFFFFFFFFFFFFEKSYSHHLMLDT

SEQ ID NO: 236540 - protein, 69 aa, Glycine max
  unsure (1)..(69): unsure at all Xaa locations
  Clone ID: PAT_MRT3847_55622C.1.pep
HNSSKCIPSKTKYTETLHLFXTLLLLAQDSHIRKRINLCAHIYLKLSLPSVVEDRSQSGFNMNLNQFNR

SEQ ID NO: 236541 - protein, 200 aa, Glycine max
  unsure (1)..(200): unsure at all Xaa locations
  Clone ID: PAT_MRT3847_55623C.1.pep
MDDEAIANGNGAPSPPCVVSVSALSGSRRRLSTSFVERSRLHFSSSEKLKPMAWVSLQGRLLNADEASSARTIGGGSSAXELAIAWNLFPPIHRFLVVAVIGTAVARSRKDLQIFQLKNSVHLRDQVLLNMQQKLDSLCELVNNSKLHSTNKSCDKDGELQLNETLGSGKINFVDCGCWHCEQHSAFLNELMVDSVARTS

SEQ ID NO: 236542 - protein, 188 aa, Glycine max
  Clone ID: PAT_MRT3847_55624C.1.pep
LDNAECLDDSDVDSHLLCSEEYASRSGIIGPFGLLALASEDQTEHTAIFFRIYRAPNRYLCLMCSDQSRSSLRQDLDKTPYGTIFDIDPNVKTISLRSLIDRSIIESFGEKGRICITSRVYPSLAIDLKIIMTLTLLIILMEMNFKKMMTSMKLIIHPGREEYQIVHRRNLWLKVEKHLKSLRRLMMI

SEQ ID NO: 236543 - protein, 43 aa, Glycine max
  unsure (1)..(43): unsure at all Xaa locations
  Clone ID: PAT_MRT3847_55625C.1.pep
NKEQSRGFFHRXKKSIKIPLYWRPSNKIMASSGILKENSFSLN

SEQ ID NO: 236544 - protein, 51 aa, Glycine max
  Clone ID: PAT_MRT3847_55626C.1.pep
NLIKNFKKILYILINLKIFLNKYAFFLKVNKNMKTLGITKNKCYCSKIMLL

SEQ ID NO: 236545 - protein, 68 aa, Glycine max
  Clone ID: PAT_MRT3847_55627C.1.pep
MLLFILFDILLFIFFSWGIPEVENDGDFKVHLFSSSSELLEKLHEKWSSVEKPPYPAMYSSIYGGIIL

SEQ ID NO: 236546 - protein, 184 aa, Glycine max
  Clone ID: PAT_MRT3847_55628C.1.pep
QNNQKRGNSPPKTGKSPTPERTTTRGGGPDGKGGKKKKGEKREKKEKKKRGEKSKKGKNQNRRNGCPKSPRKGGGPRARRAKNGPNKKKGGEPKKRNPEHPPPRGKKKPRGGVKTGENGKGGGGEKEKKRQTTGGPMEKNPLSHGCQKGARPGGARGKRKNRELENQKAQKKQNLIMGKRAPAK

SEQ ID NO: 236547 - protein, 34 aa, Glycine max
  Clone ID: PAT_MRT3847_55629C.1.pep
LLLQNNHISCYNFIIFIMVCWMRYINVCFNVICL

SEQ ID NO: 236548 - protein, 63 aa, Glycine max
  Clone ID: PAT_MRT3847_5562C.1.pep
IHSSRRDYHIWPWALLRLSESTQFTRRADSDYDNEEKTELYANSKTTHSNEIKDVDTKLKALE

SEQ ID NO: 236549 - protein, 78 aa, Glycine max
  Clone ID: PAT_MRT3847_55630C.1.pep
NFVTSYTTLSLSLLFLCDSLKNQYKLWRNRHRKTRSSRGWPTRQMVSPLGHASSPYPSLVSPLVTLLYIACLSPLTAA

SEQ ID NO: 236550 - protein, 504 aa, Glycine max
  Clone ID: PAT_MRT3847_55631C.1.pep
MNSTQGYVLAESTVGELQHKRLYLLFEVSVGWGFGVGAPMAFLMAIVVVGVVLVLCFCSALLRWNEVRYRKKGLPPGTMGWPLFGETTEFLKQGPNFMKTQRARYGSFFKSHILGCPTIVSMDPELNRYILMNEAKGLVPGYPQSMLDILGKCNIAAVHGSSHKYMRLALLSIISPSLIREQLFQKIDQCMRAHLSNWDDKVINIQEKTKELGITSFLMQSAGMESGSLSDSFMADFFKLVLGTPSLPIDLPGTVFHCGLQARKTIVKILSKLLEERRASHETYHDMLGCLMGRDESRYKLSDEEIIDLVITITYSGYETVSTTSMMAVKYLHDHPKALEELRKEHLAIRERKKPDEPLDCNDLKSMRFTRAVIFETSRLATIVNGVLRKTTQDMELNGYLIPKGWRIYVYTREINYDPFLYPDPLTFNPWRWMDKSLESKNYFFIFGGGTRQCPGKELGITEISTFLHYFVTRYRWEEVGGDKVMKFPRVEAPNGLHIRVTSY

SEQ ID NO: 236551 - protein, 57 aa, Glycine max
  Clone ID: PAT_MRT3847_55632C.1.pep
LGLQVVGYQGDEELGKALEGADVVIIPAGVPRKPGMPRDPPLNINAGIVKTLCTALL

SEQ ID NO: 236552 - protein, 116 aa, Glycine max
  Clone ID: PAT_MRT3847_55633C.1.pep
RSMVSLGGWESMAMLHCSCSRTRPSGIHAAWNSVSAKTLGSYSCQLKCPRGSWGLSQLGSQRSVIRMGCSMPISLAPSWEPLEARNESWCLATWCTVPSFLPFQPWDLHPPCIQSP

SEQ ID NO: 236553 - protein, 62 aa, Glycine max
  Clone ID: PAT_MRT3847_55634C.1.pep
PPTHPIKNCCLLQTGEEANTQLNAESSNIREFMPSIINLSRHQSLSTAQAGLSHRYSDELRD

SEQ ID NO: 236554 - protein, 81 aa, Glycine max
  Clone ID: PAT_MRT3847_55635C.1.pep
YQISMSSFLIFILFVVQPGNSRSCFKKDGLLSQWWWWFAVARGDRGGYDVRSLGLVLVAEGGGCGCCWGLPKVVVVLRRMA

SEQ ID NO: 236555 - protein, 73 aa, Glycine max
  unsure (1)..(73): unsure at all Xaa locations
  Clone ID: PAT_MRT3847_55636C.1.pep
MGKPFTLSLSSHXLLLKSSACIAISSSKLNECQLNNLNALEADHRVXSDGGLIQTWNSQHPELKCAGVTVSKL

SEQ ID NO: 236556 - protein, 139 aa, Glycine max
  unsure (1)..(139): unsure at all Xaa locations
  Clone ID: PAT_MRT3847_55637C.1.pep
RMRPTLPAGKAKXTDDXESHGXGTLAGAVRIARVRAPSRDPTHWDRPWDIRAEKCLQTRAEWETDHSNHETTKQLRPSGAGRRTGPGDNLPTSAMATPPAYIIQSDHLQELGPHXQILKGGDAKDRTDERAGLTRPRAH

SEQ ID NO: 236557 - protein, 126 aa, Glycine max
  Clone ID: PAT_MRT3847_55638C.1.pep
TIEKPNGNASLKTEPGEIQKQGNGPNEKQVTNIENETKGNGIQSKLSSSEGNGIRVITISGENRGAHMQITKSRKKQQQPIHHKMGNSDGEKVRTLSSPPMRGVYGNSNVQCVNNSMLFHTSLTNH

SEQ ID NO: 236558 - protein, 76 aa, Glycine max
  Clone ID: PAT_MRT3847_55639C.1.pep
MSYAPPSPPHENLGHHSPHGSSSSSSYHDQNLTISNICRIMKNAMSPNLKIANDSKDTVHEFCTHFIYFITNEAIY

SEQ ID NO: 236559 - protein, 58 aa, Glycine max
  Clone ID: PAT_MRT3847_5563C.1.pep
CLKIFVPQIQTLHLRTREMHLLQPPHPKHLTHRPPPLNPPPPPKPPRPLKDKFSGAVN

SEQ ID NO: 236560 - protein, 139 aa, Glycine max
  Clone ID: PAT_MRT3847_55640C.1.pep
PVKQNVFSFGVIVLEIISGRKIRGFCDPYQNLNLFGHAWRLWTEKRSMEFIDDLLGNSARLSEIIRNIHIGLLCGQQRPEDRPNMSSVILMLNGEKLLPEPSQPGFYTGKVHSTMTESFPRKTDGYSFNEISNSLLEAR

SEQ ID NO: 236561 - protein, 149 aa, Glycine max
  Clone ID: PAT_MRT3847_55641C.1.pep
MADQLTDDQIAEFKEAFSLFDKDGDGCITTKELGTVMRSLGQNPTEAELQDMINEVDADGNGTIDFPEFLNLMARKMKDTDSEEELKEAFRVFDKDQNGFISAAELRHVMTNLGEKLTDEEVDEMIREADVDGDGQINYEEFVKVMMAK

SEQ ID NO: 236562 - protein, 83 aa, Glycine max
  Clone ID: PAT_MRT3847_55642C.1.pep
CPFFFFLFKGYFIILARFWGGRTFKFQEPLQRIGRYKSNGTPMGAGVIKENCPKWELQGTNLFAPSRYFGLMVGKLQLFQGLK

SEQ ID NO: 236563 - protein, 71 aa, Glycine max
  Clone ID: PAT_MRT3847_55643C.1.pep
LTKKTLVLQLKSWSLTVLFFKTLVELYPKSKKKHRISKLHVKIKNLDVTSKSMVMDCSFKTLVELYLKSNN

SEQ ID NO: 236564 - protein, 51 aa, Glycine max
  Clone ID: PAT_MRT3847_55644C.1.pep
SPTPYNVRIQKLSFRCMLVILAAFFPGLIPSQFPPPPPPKKEDVHTVMTET

SEQ ID NO: 236565 - protein, 39 aa, Glycine max
  Clone ID: PAT_MRT3847_55645C.1.pep
MKSLPFVNFQGVNYNLPKHLYYDNVISAPLFISLSLQID

SEQ ID NO: 236566 - protein, 70 aa, Glycine max
  Clone ID: PAT_MRT3847_55646C.1.pep
KDIEKNTVHDIIRPIINSESIKYCNQLKKTTVNYHQRHLLSVIRCMRCWLCFIQLDSFCSNDSSLVYKLN

SEQ ID NO: 236567 - protein, 82 aa, Glycine max
  Clone ID: PAT_MRT3847_55647C.1.pep
PSPLTLEQLVEKDLARRGSWLNIQVDTEDIAIEVERDVLEKLVLEIASEMEDVRNWTHCNEAMSTYSWDDKALWKDYQATIF

SEQ ID NO: 236568 - protein, 121 aa, Glycine max
  Clone ID: PAT_MRT3847_55648C.1.pep
SFICKEDVAGLTQSLSRSGVFSHLQELSIRGCHQIEKLLTPGLVPQLQNLESISVSYCKSIKEIFAGDSSHNIALPNLTKLQLASVPELKTVSTGILLINSEDILHINNCPSYEKPRIGRV

SEQ ID NO: 236569 - protein, 95 aa, Glycine max
  unsure (1)..(95): unsure at all Xaa locations
  Clone ID: PAT_MRT3847_55649C.1.pep
SPXXPXTYGGLLXXLRXSPXYALXXHGTXXFRTXXXXXIXSGFXGSSXRXRSXPXKXEFXGSXXXXVRHHXYXSLXPWXKXAIEPNPEPTXXCXX

SEQ ID NO: 236570 - protein, 56 aa, Glycine max
  unsure (1)..(56): unsure at all Xaa locations
  Clone ID: PAT_MRT3847_5564C.1.pep
VGLHXXXHKXETLCEXCXIKRSEXXMIIDRXHSLWXTXPXIGLXXXVCPXSXCHVC

SEQ ID NO: 236571 - protein, 108 aa, Glycine max
  unsure (1)..(108): unsure at all Xaa locations
  Clone ID: PAT_MRT3847_55650C.1.pep
VIPSGLPITDDCQIILNEMRICYSYEKLLRQAKAPSMYLQSFKNLVSLXVYGDDNLIGVHEXYINAYFRGTELKSHXFFIILTITDGNDKTSATLQFRKKAHRRSLKR

SEQ ID NO: 236572 - protein, 240 aa, Glycine max
  unsure (1)..(240): unsure at all Xaa locations
  Clone ID: PAT_MRT3847_55651C.1.pep
IYMASGVTTVDCEKQVRSWRLIRSLMQLLIPTCNCATIIEDGQDVTTTTNETLRNTSKYTYSPSSSLMSSTTNITGTIFGYRRGKVSFCIQANANSTNPILLLELAVPTTILAKEMRGGTLRIALESGNDDDDGDGDGQVDTLLSTPLWTMYCNGRKVGYAVKRRPSNTDFEALRLMRSVVVGTGVMKCKELVNKEDDQLMYLRASFQRVRGSDNCESFXXIDPEGDIDQELSVFFFRFR

SEQ ID NO: 236573 - protein, 99 aa, Glycine max
  Clone ID: PAT_MRT3847_55652C.1.pep
LHWNTGSSHEDPALFSNPETFDASRFEGAGPTPFSYVPFGGGPRMCLGQEFARLEILVFMHNIVKRFKWDLVIPDEKFKYDPLLEPVKGLAIRLHPSHF

SEQ ID NO: 236574 - protein, 231 aa, Glycine max
  unsure (1)..(231): unsure at all Xaa locations
  Clone ID: PAT_MRT3847_55653C.1.pep
PPAHPGLDPNTMAATASRTTRFSSSSSHPTFPKRITRSTLPLSHQTLTKPNHALKIKCSISKPPTAAPFTKEAPTTEPFVSRFASGEPRKGADILVEALERQGVTTVFAYPGGASMEIHQALTRSAAIRNVLPRHEQGGVFAAEGYARSSGLPGVCIATSGPGATNLVSGLADALMDSVPVVAITGQVPRRMIGTDAFQKXPDREVSRSITKHNYLMLDVDDIPRVVAEAF

SEQ ID NO: 236575 - protein, 79 aa, Glycine max
  Clone ID: PAT_MRT3847_55654C.1.pep
VEVVSDGVNGGHSGNHDETIRAGIEGAIVHMLDLVHVHFTDVTVQCKPTRDVAESRDVVRVVPKLCDTASAQRSLARAL

SEQ ID NO: 236576 - protein, 157 aa, Glycine max
  unsure (1)..(157): unsure at all Xaa locations
  Clone ID: PAT_MRT3847_55655C.1.pep
TLIQMISRRALKRRTVVEGLTNRQWVLDIHGGLSVTVLVEYLQLWNLVDGIVLQPDIADQHIWRLSAHGTYCSKSAYDALFTGSIPFGPWRRVWKTWASXRCKFFVWLAIKNRVWTADRLAKRGLPHPVACPLCDQAEETIQHIPVSCVFARQIGRV

SEQ ID NO: 236577 - protein, 231 aa, Glycine max
  unsure (1)..(231): unsure at all Xaa locations
  Clone ID: PAT_MRT3847_55656C.1.pep
MKVSTICHSAAAVVGSHRRLGEKSYKIWEMAAARGLVLSRPVTFVTGNAKKLEEVRAILGNSIPFQSLKLDLPELQGEPEDISKEKARMAAVQVNGPVLVEDTCLCFNALKGLPGPYIKWFLQKLGHEGLNNLLMAYDDKSAYALCVFSFAAGSNSEPITFSGKTPGKIVPPRGPNDFGWXDPIFEPDGYDQTYAQMPKEEKNKISPRSKSLALVKSHFAEAGYTFDIKNV

SEQ ID NO: 236578 - protein, 26 aa, Glycine max
  Clone ID: PAT_MRT3847_55657C.1.pep
NTLNLHTTKLSYLKPLYLYTDNNLIL

SEQ ID NO: 236579 - protein, 140 aa, Glycine max
  Clone ID: PAT_MRT3847_55658C.1.pep
MGEVKLLGVWPSGFVYRIIWALELKGVKYEYILREFNKADFSDLLLKYNPVYKKVPVLVLEGKPIAESMVILEYIEETWPQPHLLPQDPYERAVARVWVSFAEEKSVSFMSFFVSVGEEFQKARKEVREVLKVLEETIGD

SEQ ID NO: 236580 - protein, 78 aa, Glycine max
  Clone ID: PAT_MRT3847_55659C.1.pep
RGVFKGLKGGYRTIVQIRKILPFRPLNTPLNHFTLSSSSNIGSFRIILVTIELIRVSLSDPTNAFLNIFQRKMNHTKT

SEQ ID NO: 236581 - protein, 45 aa, Glycine max
  Clone ID: PAT_MRT3847_5565C.1.pep
HNFVTFLIYSPGLVVYMILYTRPSRVGVLATPIWSRISACCCHGH

SEQ ID NO: 236582 - protein, 161 aa, Glycine max
  Clone ID: PAT_MRT3847_55660C.1.pep
APVQSSNTTIYALLQCTPDISKQNCTECLQSALSEISTFCDGKMGGQYLRPSCSVRYETYLFFEPIVDAPAPAPQPATDHVTTPIGEEKRNPSRSIIVIVVPMVVVIELLAIMYNYLGARRRRRNKPIQSEGECDYDEGELAYDIKTHDRAGAFDFANMKC

SEQ ID NO: 236583 - protein, 61 aa, Glycine max
  Clone ID: PAT_MRT3847_55661C.1.pep
KGLGGKFLFFPFFSQKVVLDFGSPNFILGGSLPFAELRVCPKLFMPKSPFFLSPPQNFQGF

SEQ ID NO: 236584 - protein, 43 aa, Glycine max
  Clone ID: PAT_MRT3847_55662C.1.pep
HASAHASGQQSCMIIVLMASNLVEMKYGSSDWLMQLNGYELFL

SEQ ID NO: 236585 - protein, 83 aa, Glycine max
  unsure (1)..(83): unsure at all Xaa locations
  Clone ID: PAT_MRT3847_55663C.1.pep
MKXXXLXEVSGYXCSSNCXRLSXNSTPXXPGFRRSRMELWNGXCFAQPHAQNPSSLAMAFSRKTKSEENRKGHHQATKXHSCN

SEQ ID NO: 236586 - protein, 73 aa, Glycine max
  Clone ID: PAT_MRT3847_55664C.1.pep
NPRGYSPEKVRFCLRAIFFPTGGCLMPLVRDQPPIKKSRNPSFLALGPPPKGGGDLIFFCLKRKAFKGPIFKH

SEQ ID NO: 236587 - protein, 129 aa, Glycine max
  unsure (1)..(129): unsure at all Xaa locations
  Clone ID: PAT_MRT3847_55665C.1.pep
ARALQRKQITLVDGDGVKLKFFLWGEQILLANLFREGSMLALDKPYVNISVDCDTETSEDLCLEYGSETQLYLVPYIQHEEQVCVTLTPNRRHGSRTLGSFNSRQXLSLSQVSLPRDSQGTIDISNYPF

SEQ ID NO: 236588 - protein, 77 aa, Glycine max
  Clone ID: PAT_MRT3847_55666C.1.pep
LAFTQHLYLAERIGTLLPHKSYGYTHGFSEKHFTKQSLRARLKEVDILCIKQIFCLLTSGERRMPSKNLCQSLQFYL

SEQ ID NO: 236589 - protein, 54 aa, Glycine max
  Clone ID: PAT_MRT3847_55667C.1.pep
KKNNLFALFTLPTPLNKLPHLFFYFSSFVTIKIYTFLYLTHTSFKHVILFYHIF

SEQ ID NO: 236590 - protein, 314 aa, Glycine max
  Clone ID: PAT_MRT3847_55668C.1.pep
MGSSSRRCLSFTTWRDRYLRYSFSRAGLKSTTTDLGDGTIMHCWAPKAHNHSTTSLLLIHGIGANATWQWNHFISPLTRHFNVYVPDLLFFGDSHTTRPERSEWFQAKCVMALLEALGVRQTSVVGLSYGGFVAYAVAAMFPERVEKVVVCCAGVCLEDRDMEDEGMFWVKSVDEVVSVLLPQTPQKVMCTEYRQERTELIQALHKDRKLSNLPKITKPMQIIWGEQDQVFPLELAHRLKRHVGEKAQLVVITNAGHAINVEKPNELCKNLKSFLIDPSKQENHSNGLKVDPQKQKNFSALWICMFLDYFMQQL

SEQ ID NO: 236591 - protein, 340 aa, Glycine max
  Clone ID: PAT_MRT3847_55669C.1.pep
MGSSSRRCLSFTTWRDRYLRYSFSRAGLKSTTTDLGDGTIMHCWAPKAHNHSTTSLLLIHGIGANATWQWNHFISPLTRHFNVYVPDLLFFGDSHTTRPERSEWFQAKCVMALLEALGVRQTSVVGLSYGGFVAYAVAAMFPERVEKVVVCCAGVCLEDRDMEDEGMFWVKSVDEVVSVLLPQTPQKVRELLQLTFANPIKLLPTCFLKDFIHVMCTEYRQERTELIQALHKDRKLSNLPKITKPMQIIWGEQDQVFPLELAHRLKRHVGEKAQLVVITNAGHAINVEKPNELCKNLKSFLIDPSKQENHSNGLKVDPQKQKNFSALWICMFLDYFMQQL

SEQ ID NO: 236592 - protein, 74 aa, Glycine max
  Clone ID: PAT_MRT3847_5566C.1.pep
HVIIDGVIGPPRGPTLTSSSSQRGNSLGEQSSGGGGEGTMDPDALAQTFWHLHVQDRNAWTLEMDLRSPSARFF

SEQ ID NO: 236593 - protein, 85 aa, Glycine max
  Clone ID: PAT_MRT3847_55670C.1.pep
SPVPGREFGSQFLGHGVGPNKEAENCVSDLNVYWPPLCREHSGIGFPQGIPMCFSFGFRIGLIRKRIIACHMWAVLPPYFLRMWD

SEQ ID NO: 236594 - protein, 62 aa, Glycine max
  Clone ID: PAT_MRT3847_55671C.1.pep
HGSFSSFGLILSCIISTDASGLSNGYCSVQYDNEYAAHNAIYKLNGMLINDYQVYVCHSLLK

SEQ ID NO: 236595 - protein, 43 aa, Glycine max
  Clone ID: PAT_MRT3847_55672C.1.pep
PPLGLKKGEQKIVIRQNTLCFNININNLGCVPPNVNVLLLKNH

SEQ ID NO: 236596 - protein, 46 aa, Glycine max
  Clone ID: PAT_MRT3847_55673C.1.pep
TLSTDLQELVNLFHTTFSFLLFVFYLFSKINYYLKIKKCNKYFLFL

SEQ ID NO: 236597 - protein, 79 aa, Glycine max
  Clone ID: PAT_MRT3847_55674C.1.pep
HAHVYVIHIHHSMNELAKTGIKFNTLEEICMRAKKVEKPYPNNAEVPSWTFSQTVHALTFSNNEVKFDACNVLNNKSCI

SEQ ID NO: 236598 - protein, 97 aa, Glycine max
  Clone ID: PAT_MRT3847_55675C.1.pep
MAEENVRQPLLEKKYYEDCPGCKVDQAKELSKGQGVSIRNLLIIWMVVLCSALPISSLFPFLYFMVRDFNIAKTEADISSYAGYVGSSYMLGRCLTS

SEQ ID NO: 236599 - protein, 60 aa, Glycine max
  unsure (1)..(60): unsure at all Xaa locations
  Clone ID: PAT_MRT3847_55676C.1.pep
MHTSVRXLGIRLERRXTXXLXIXXXXXAXAMXXGRQRERXXLXVXGTILXYKRSKXNQXS

SEQ ID NO: 236600 - protein, 41 aa, Glycine max
  Clone ID: PAT_MRT3847_55677C.1.pep
GFLFKGSLTYQPNFGIPLNVPVFKNIILLNNDIIITKPKPL

SEQ ID NO: 236601 - protein, 187 aa, Glycine max
  Clone ID: PAT_MRT3847_55678C.1.pep
MMAKTTLDSGWLAARSTEVHFTGTQLTTTHPPSASTQPWMEAIVPGTVLATLVKNKAVPDPFYGLGNEAILDIADSGREYYTFWFFTTFQCKLSGNQHCDLNFRGINYSADVYLNGHEMVLPKGMFRRHSLDVTNIIHSDSSNLLAVLVHPPDHPGSIPPQGGQGGDHEIGKDVATQYVQGLDWMAP

SEQ ID NO: 236602 - protein, 94 aa, Glycine max
  unsure (1)..(94): unsure at all Xaa locations
  Clone ID: PAT_MRT3847_55679C.1.pep
SPRSIIPCPACKPPPPSMQGSPPGPXPKPSFFSPPPTALPPMIGSPIPWGSFSRGVLLAGPGAPGPPGGSPLGIYSGIISRKPVFFYLPPLWVF

SEQ ID NO: 236603 - protein, 111 aa, Glycine max
  Clone ID: PAT_MRT3847_5567C.1.pep
LTLRFLFFLEGYFNLLVFIFLPFPPLSFLKNKNNHYFCKKTGFFKNNSNMLEKKQNCIQTKKFVLQLFQKKKTKEPTLTRSAPKLPTYPLQDHTLICHPWSIYRYKPIDNM

SEQ ID NO: 236604 - protein, 75 aa, Glycine max
  unsure (1)..(75): unsure at all Xaa locations
  Clone ID: PAT_MRT3847_55680C.1.pep
MAXXSVXEXPXKKXXDXGEXNGISVSXDAXGGKXPLXNGXSSVIXGWXSXISAMXXXEAHSLKVXKIXXQGXSXY

SEQ ID NO: 236605 - protein, 73 aa, Glycine max
  Clone ID: PAT_MRT3847_55681C.1.pep
NSAQKIKGIRALFFPTLSFPRLFSPPKLLGPPMQFLAPSPIPRVNSKGGFFKPFCNPRKRCPKGGAQRVPYKG

SEQ ID NO: 236606 - protein, 53 aa, Glycine max
  Clone ID: PAT_MRT3847_55682C.1.pep
TQVDSVKGEIYIAFNMSHLPFTVTLRERPGYKWEPSVDTSKPTPYDFLTPDLP

SEQ ID NO: 236607 - protein, 120 aa, Glycine max
  Clone ID: PAT_MRT3847_55683C.1.pep
HASELHKLISNTLKLSTFKLCPLNLLYLSEVISFTFFLNSNKFLMNTPSSHISMYLFSLSLHSIFQRRCLSELNIFLCICFLSFSFLIFLFVLIFNVSESCFFFFFYRIFLIERLHHGFF

SEQ ID NO: 236608 - protein, 53 aa, Glycine max
  Clone ID: PAT_MRT3847_55684C.1.pep
RFNRTFVQTNEEEFISGSNYGRKKDCSLACTRIFLLLCSITLGILIEANSEIR

SEQ ID NO: 236609 - protein, 44 aa, Glycine max
  Clone ID: PAT_MRT3847_55685C.1.pep
NRWVVERLDYVYSYVESFNFCAYSSRGRYTGTQCYKFLDVIGGI

SEQ ID NO: 236610 - protein, 51 aa, Glycine max
  Clone ID: PAT_MRT3847_55686C.1.pep
TLFLFSDPSRIYGSSSIIRSHKKFFIPFYILQIISNIINLFIINLPFHLSL

SEQ ID NO: 236611 - protein, 90 aa, Glycine max
  Clone ID: PAT_MRT3847_55687C.1.pep
QTGAVGVIKNVEKKDPTGAKVPKAAQKKKLIVRAGSSRDVGFHKRWVPFWTPGSSFLGSLFFGPRFKFPPFFCHWWFQNWGFGSRWPKWL

SEQ ID NO: 236612 - protein, 77 aa, Glycine max
  Clone ID: PAT_MRT3847_55688C.1.pep
VPIPNSTDASRLLADDRRQRNGHQLTTGAINRVFEVTSHRNMKTTIMMYDGHSHESHVSCGILRTMPLSSSPLISIS

SEQ ID NO: 236613 - protein, 79 aa, Glycine max
  Clone ID: PAT_MRT3847_55689C.1.pep
SNVKMGKNQWNAASLSKNVSAAFAGVIGKQMRANTHFTRRQRKARGVKAQELRLKPRLLVILLIPISLVVGARVEGRVG

SEQ ID NO: 236614 - protein, 31 aa, Glycine max
  Clone ID: PAT_MRT3847_5568C.1.pep
KCGIERRMKIGHVLIFSLIVGYNLIVHARMI

SEQ ID NO: 236615 - protein, 67 aa, Glycine max
  Clone ID: PAT_MRT3847_55690C.1.pep
PFGAFVGQVLVKKLVPIQGRAPLIIFILPRPFFVSAISLGGGGISTMIQRIANKGSMGFETLCPHSP

SEQ ID NO: 236616 - protein, 65 aa, Glycine max
  unsure (1)..(65): unsure at all Xaa locations
  Clone ID: PAT_MRT3847_55691C.1.pep
MRDIILAALGGIRDVAGSHNSLEIDGLTRFAVEXHIKYLNALLGFEKVVSAEQLVAFVTLYTIIL

SEQ ID NO: 236617 - protein, 79 aa, Glycine max
  Clone ID: PAT_MRT3847_55692C.1.pep
RKATTSSACGSYVLDPKGLILLQQSGRYPAPSPSSCGDVGAVTTPLSLIVSIASIILSTSFYLVSNISMLVSFAIWCAV

SEQ ID NO: 236618 - protein, 184 aa, Glycine max
  unsure (1)..(184): unsure at all Xaa locations
  Clone ID: PAT_MRT3847_55693C.1.pep
PILKMNCYNLQKNAFSACEEMRGSLPIADQNGPVFCPKPRRAGVLMNLPIRPVKWHLGQQAEGSDSKAGAELLDIVLKRDIVLKRESYGGRIXNQIPSSPPYFCGSPPVRASNPLIPDARFGDRKVLXISTISSAFRFTGLHLQHLAKAGCARMKFGLKPAAVRVEGFDCLSRDCQNSGIPAVA

SEQ ID NO: 236619 - protein, 187 aa, Glycine max
  unsure (1)..(187): unsure at all Xaa locations
  Clone ID: PAT_MRT3847_55694C.1.pep
DAWGSATASRTTPFSSPSSSSHPTFPKRIARSTLPLSHQTFIKPNHALKIKCSISKPPSPPATTTTAAPATSEPFVSRFASAEPRKGSDILVEALERLGVTNVFAYPGGASMEIHQALTRSSTIRNVLPRHEQGGIFAAEGYARSSGXPGVCIATSGPGATNLVSGLADALWTAXPVVAITGRSPRA

SEQ ID NO: 236620 - protein, 187 aa, Glycine max
  Clone ID: PAT_MRT3847_55695C.1.pep
TEVNTFRRRRRRTATTRDFFEDECDPDELFSGRFGGSDVFGRNNHVYRTRGGMGNPNHQHRHEFNAGGSGGRHHNVMLLIQLLPFLIIVLLAYLPFSEPEYSLHKHYSYQIPKTTDRHGVQFFVKSAAFDVNYPPGSDAREAVEESVMKDYRSMLRRYCQVEMQRRSWNRNLPAPHCDKLHNFAVMA

SEQ ID NO: 236621 - protein, 120 aa, Glycine max
  Clone ID: PAT_MRT3847_55696C.1.pep
VGAGWVFPGSPWVNPGLSQSRGCPPKAGVLFLGGVIQVVWRPPPAFFFSPLGWGPAQVCFFVKWIPPPRPFFGDFLGHLRNFLLKGRMPSFCSPLFQGWVFRAPRFWTQGFQDLMFKTPV

SEQ ID NO: 236622 - protein, 156 aa, Glycine max
  unsure (1)..(156): unsure at all Xaa locations
  Clone ID: PAT_MRT3847_55697C.1.pep
HQLENFKGITFLRTFSPSHXXNGLWNKGGNCVRTKPFRNNEXKLEGHNLELHMXQLEEFKIAKKEGIKKGLKFMLLDTTQAMLLRPDGHPNRYGYWPNENMTLYNDCVHWCLPGAIDIWSDFLLEMLKMEGMRSTSKKMLSFTEKLVIIFINAIHM

SEQ ID NO: 236623 - protein, 73 aa, Glycine max
  Clone ID: PAT_MRT3847_55698C.1.pep
AFSMIFSPAVITVNLAGADMVAPFTVLMSMAGFPTRKTNNDITSIASNGGRVQCMQVRPPICKNKSETLSYLA

SEQ ID NO: 236624 - protein, 62 aa, Glycine max
  Clone ID: PAT_MRT3847_55699C.1.pep
RKNQLCGFEEFTNKKHETHTMPKDMNSQRTTVQISNLLQVVTLQIFTWLHFYFFGKNNAYIL

SEQ ID NO: 236625 - protein, 118 aa, Glycine max
  Clone ID: PAT_MRT3847_5569C.1.pep
MDRRAVSSINTDQECPLDDTDSSSALFSYIKQMLMEDDTQESYSIFHDSLALQHTERSFYQVITHNYPPSSSSPHHQSPEQSLSVSSSDSRSSLSTNSTSSSADSSFRKPSPLLPHST

SEQ ID NO: 236626 - protein, 143 aa, Glycine max
  unsure (1)..(143): unsure at all Xaa locations
  Clone ID: PAT_MRT3847_556C.1.pep
LHPTLLFTTAEPSTVKQALISPPWRQAMQADFDALMENKTLTLTSLPSGKAAIDCKWVFRIKENLYGTLNRYRSRLVAKGFHLKFGCDYSETFSPVIXAVTIRLILFIALTNHWPLQQVDINNAFLHGLLTEEVYMVQLPGFE

SEQ ID NO: 236627 - protein, 39 aa, Glycine max
  Clone ID: PAT_MRT3847_55700C.1.pep
VSTVNYNPQRARFRIQHRARIKVISYPGSHICFGRYALQ

SEQ ID NO: 236628 - protein, 39 aa, Glycine max
  Clone ID: PAT_MRT3847_55701C.1.pep
YHSEILLYYTLSTNPNNACWVKRKYPTTSNTQEMNNLGP

SEQ ID NO: 236629 - protein, 64 aa, Glycine max
  Clone ID: PAT_MRT3847_55702C.1.pep
RVRERRLRDRPNALVPNNQENFEKLKDQTLFRHSFIDHNGEASLRLQPPSPNHSKVRRRPRFHG

SEQ ID NO: 236630 - protein, 49 aa, Glycine max
  Clone ID: PAT_MRT3847_55703C.1.pep
QVISPLHLFSKKKKFPKRPFNVLPLHLEGGTAPSFLSHSRINFKTKFRG

SEQ ID NO: 236631 - protein, 72 aa, Glycine max
  Clone ID: PAT_MRT3847_55704C.1.pep
SIEAVVKLPRLHNLIKQHVDHSFVDLRNLMQRLVRYNALEILSAMFAFKLSFFTIEPIRQVFSSISGILVCF

SEQ ID NO: 236632 - protein, 250 aa, Glycine max
  Clone ID: PAT_MRT3847_55705C.1.pep
MMDSSGATNEKLLENGTPSSSQMRKGGLRTMPFIIVNESLEKVASYGIMPNMILYLRDEYRMSIAKGTSVIYTWTAASDILSIFGAFLSDSYLGRFLVIAIGSFSSLLGLTMLWLTAMIPDLKPTCESDMLGCNSATAVQLALLFFSMGLISIGAGCVRPCSIAFGADQLTIKERSNDERLLDSYFNWYYTSIAISSMIALSVIVYIQENLGWKIGFGLPALLMFISAASFILGSPFYVKVKPGHSLLTY

SEQ ID NO: 236633 - protein, 45 aa, Glycine max
  Clone ID: PAT_MRT3847_55706C.1.pep
TYGCEKTTEGDLFVSMQRGNLPFSVLLWLKPRSDYGELQLDHSKA

SEQ ID NO: 236634 - protein, 75 aa, Glycine max
  Clone ID: PAT_MRT3847_55707C.1.pep
ITTTVVAIRPSHVITPTCYCARTCSRAVTNHLCAGNLQMHDSNTCDHECQNVTATNDDHACLSLRGSGRCFPLVV

SEQ ID NO: 236635 - protein, 103 aa, Glycine max
  unsure (1)..(103): unsure at all Xaa locations
  Clone ID: PAT_MRT3847_55708C.1.pep
MGRIPERWDRXIKNKPYPKSRFCRRVPDPNIRIYDVGLKNKGVDEFPFCVXHLVSXRQENVSSEALDAARIACNKFIGKFAGKDALHLIVRVQPFHVLTIKQM

SEQ ID NO: 236636 - protein, 88 aa, Glycine max
  unsure (1)..(88): unsure at all Xaa locations
  Clone ID: PAT_MRT3847_55709C.1.pep
GALSLWFSSSSFSYISFFFWSSRHAETLAGKGEGPAIGIDLGTTYXCVGLWQHDRVEIMANDQGNRTTPSYVGFTDTEGLXGDGAKNQ

SEQ ID NO: 236637 - protein, 52 aa, Glycine max
  Clone ID: PAT_MRT3847_5570C.1.pep
IPIPTYQTNSIDMLLIVYRGAFLYLNKAALSCDGYNDARLLSTFYYQPRGST

SEQ ID NO: 236638 - protein, 35 aa, Glycine max
  unsure (1)..(35): unsure at all Xaa locations
  Clone ID: PAT_MRT3847_55710C.1.pep
XVNTIGGXFFLFRNMLVLLVXXSXXXDLXXSYXSH

SEQ ID NO: 236639 - protein, 74 aa, Glycine max
  Clone ID: PAT_MRT3847_55711C.1.pep
VLGGRGRVPLKGCWELAPSSVPGSFIPLGLKYSPFRPPGPLSWGWDTSVFLYDLTQLFCYAALYGHMFKGFPRS

SEQ ID NO: 236640 - protein, 56 aa, Glycine max
  unsure (1)..(56): unsure at all Xaa locations
  Clone ID: PAT_MRT3847_55712C.1.pep
PLPSPXPPPPPPXSPPPPPPXPXPPSLXXSXPXPPPHPPPPPTTPPQYRSYWEHPR

SEQ ID NO: 236641 - protein, 52 aa, Glycine max
  Clone ID: PAT_MRT3847_55713C.1.pep
RKIRGRHCSCFGKPLIGSNFTGLECFFSFCIKLVELFKTLPTITAIQIGHSD

SEQ ID NO: 236642 - protein, 76 aa, Glycine max
  Clone ID: PAT_MRT3847_55714C.1.pep
GHRALDKPSLTCDKKMMRAMPPRDVLDILSSDGITSHLKSSSKPERGVRTDFSEPPNMWTLIYMNLSEILGGGSLW

SEQ ID NO: 236643 - protein, 48 aa, Glycine max
  Clone ID: PAT_MRT3847_55715C.1.pep
TTHLALIICPQASVCTITGSGPLPRGERMVIIHMFITIESIVKLSSCL

SEQ ID NO: 236644 - protein, 47 aa, Glycine max
  Clone ID: PAT_MRT3847_55716C.1.pep
IPVRPDPSVTPNCCESFLFLKQNLFLKWAQFFIIGWGNKNLFLFSYQ

SEQ ID NO: 236645 - protein, 97 aa, Glycine max
  Clone ID: PAT_MRT3847_55717C.1.pep
SISIPTKFGVSTKSVFDRRLISGPMESLRLSCVQLCSIKGHKAGNLLGQGLSLPSIRGGHLSVPTPKIRSTMLYVQVCRVTQLLLEGLECILRCKAP

SEQ ID NO: 236646 - protein, 74 aa, Glycine max
  Clone ID: PAT_MRT3847_55718C.1.pep
PTRPPTRPYGCEKTTEGEGIVFWNSGNCCFWSFKIKMLTVLSFKRKYVQASFNMKFRRRFYVIIKLTIFILKKN

SEQ ID NO: 236647 - protein, 44 aa, Glycine max
  Clone ID: PAT_MRT3847_55719C.1.pep
KPAFRAPNDWDSEHSPLTSFRHRDQHCCSMATLELCSCLVERTC

SEQ ID NO: 236648 - protein, 80 aa, Glycine max
  Clone ID: PAT_MRT3847_5571C.1.pep
CSKATGWGHFNIVSDITGQGNSAEGAPTSVNAPYGASIPYGTVASVLDNNEGTEACRATLETRVTIPPPERGLNVIQHEV

SEQ ID NO: 236649 - protein, 45 aa, Glycine max
  Clone ID: PAT_MRT3847_55720C.1.pep
INGKVRLVYHEGQWDWIHTMIYMWSIAVIYLFMCIIKQMNNGLEM

SEQ ID NO: 236650 - protein, 57 aa, Glycine max
  Clone ID: PAT_MRT3847_55721C.1.pep
MQLFYSSYYNICGLQFICMLTLSFVVGCWTHLSLLAFPMNNIRIKMHPALGWFTSSA

SEQ ID NO: 236651 - protein, 45 aa, Glycine max
  unsure (1)..(45): unsure at all Xaa locations
  Clone ID: PAT_MRT3847_55722C.1.pep
HRLIFAGXHLEEGRTLSNYNIQKESTLHLDLKLRCGMQIFVNTLT

SEQ ID NO: 236652 - protein, 93 aa, Glycine max
  Clone ID: PAT_MRT3847_55723C.1.pep
TRAPTVKDAESVWPTESALIWSELSQAILSKNWEKAREAKKAVEERQRELLRERESKGETWVPKHFILSQSKEGIWDCSPIQKWVPASPIVTL

SEQ ID NO: 236653 - protein, 98 aa, Glycine max
  unsure (1)..(98): unsure at all Xaa locations
  Clone ID: PAT_MRT3847_55724C.1.pep
LNELFLDWACFAGGRLPMTWYPQGYLAKVPMTNMDMRPNPATGYPGRTYRFYKGPVVFPFGHGLSYSRFSQSLALAPKQVSVXILSLQALTNSTLSSK

SEQ ID NO: 236654 - protein, 488 aa, Glycine max
  unsure (1)..(488): unsure at all Xaa locations
  Clone ID: PAT_MRT3847_55725C.1.pep
MTQDLEMKDRSTPSNSVSSPAPSTLQHLKEIASLIETGSYSKEVRRIARAVRLTIALRRKLTASAISSFLDHVLTPGSEVHAKLSAYLPKDDDHEMEVDAATSAIQTPAKHLLPELEIYCYLLVLLFLIDQKKYSEAKACSSASIVWLKNINRRTVDVIASRLYFYYSYSYELMGDLAEIRGNLLALHRIAXTLRHDELGQETLLNLLLRNYLHYNLYDQAEKLRSKAPRFEAHSNQQFCRYLFYLGKIRTIQLEYTDAKESLLQAARKAPVAARGFRIQCNKWAVIVRLLLGEIPERTVFMQKGMEKALRPYFELTNAVRIGDLELFRNIADKFATTFNADRTHNLIVRLRHNVIRTGLRNISISYSRISLADVAKKLRLNSASPVADAESIVSKAIRDGAIDATLDHANGWMVSKETGDIYSTNEPQLAFNSRIAFCLNMHNEAVRALRFPPNTHKEKESAEKRRERQQQEQELAKHIAEEDDDDF

SEQ ID NO: 236655 - protein, 137 aa, Glycine max
  Clone ID: PAT_MRT3847_55726C.1.pep
MQETLLNLLLRNYLHYNLYDQAEKLRSKAPRFEAHSNQQFCRYLFYLGKIRTIQLEYTDAKESLLQAARKAPVAARGFRIQCNKWAVIVRLLLGEIPERTVFMQKGMEKALRPYFELTNAVRIGDLELFRNIADKFA

SEQ ID NO: 236656 - protein, 182 aa, Glycine max
  unsure (1)..(182): unsure at all Xaa locations
  Clone ID: PAT_MRT3847_55727C.1.pep
PLPLCRFRIFTKLFQLFALYFFFSLLFGFADLKEIASLIETGSYSKEVRRIARAVRLTIALRRKLTASAISSFLDHVLTPGSEVHAKLSAYLPKDDDHEMEVDAATSAIQTPAKHLLPELEIYCYLLVLLFLIDQKKYSEAKACSSASIVWLKTXNRRTVDVIASRLYFYYSYSYELMGDLA

SEQ ID NO: 236657 - protein, 147 aa, Glycine max
  unsure (1)..(147): unsure at all Xaa locations
  Clone ID: PAT_MRT3847_55728C.1.pep
NEGLFFIFLCSFSDLQNPQGDLDGKACAAVGQSSLMALYDLMFSQLDVTSSQLLVNDGFFRDTAFRKQLSDTVSSLLDLRVIPIFNENDADSTRKAPYEGELSXDSSGIFWDNDSLAGLLALELKADLLVLLSDVDGLYSGPPSDPK

SEQ ID NO: 236658 - protein, 155 aa, Glycine max
  Clone ID: PAT_MRT3847_55729C.1.pep
IIVIGGGLAGMSATLEALSNGAKVILIDKEPTLGGNSAKASSGINGCGTKVQEKLGIDDTAERFHSDTMAAGDRENDPGLVDLLVHQSASAIDFLTENGVDLADINLCGGHSVPRTHWLLSPKEGKPLPVGVAIIRTLNAKLEEWKARDPERLKI

SEQ ID NO: 236659 - protein, 72 aa, Glycine max
  Clone ID: PAT_MRT3847_5572C.1.pep
HHHHFHMYKTAAQTQTSPESDIRSSGDRSESIVDGKSESGKWNGESGEKKGLAALRDQEGEESTGSEITLKF

SEQ ID NO: 236660 - protein, 50 aa, Glycine max
  Clone ID: PAT_MRT3847_55730C.1.pep
VQTICMLLVASHVYHVYRIESNYRYYLALILKNHGLITHILLIKKLLSFK

SEQ ID NO: 236661 - protein, 126 aa, Glycine max
  unsure (1)..(126): unsure at all Xaa locations
  Clone ID: PAT_MRT3847_55731C.1.pep
PPSHEPHGSHRTNNEFKSQTHPLHTPNSNLEKLPGIHSSHLSPPTCRTPIPPLTPKPSSPTHPPHPPSNQXPCPQSHDPPPPPPPPPAQPAQDPHPLPPTHTQYPPGATPLHAPPPPRPPPPPPPP

SEQ ID NO: 236662 - protein, 93 aa, Glycine max
  Clone ID: PAT_MRT3847_55732C.1.pep
MELVPESSAQHFHSFLRYFPPAKKKGYMPTILEPTGGLTLGKTRNWAMAGMQIFSGRKKNFLAKGMGPGVGLAKIGGKQPGFIHFEPPNFDSY

SEQ ID NO: 236663 - protein, 134 aa, Glycine max
  unsure (1)..(134): unsure at all Xaa locations
  Clone ID: PAT_MRT3847_55733C.1.pep
QRPRTPGGGGRRNLHIQRGGPDTVTELSTLRLCVAEQTRELHSALGWGHPRGYSPGRRGGVVTHSQGQAVFEGDIKGNRCAQXTEAGELTRTLLLEPRATVNGKPNLQIGGWDGKCAHGAAISDLEERQLLYFQ

SEQ ID NO: 236664 - protein, 113 aa, Glycine max
  unsure (1)..(113): unsure at all Xaa locations
  Clone ID: PAT_MRT3847_55734C.1.pep
KKKKKKKKRKREKKEKKKKKKKKKKKKKKKKKKKKKKKRKKKKKKKKGXKGERKNPPPKKKNEKKKTAPQRHSADRRAQRTGNQAKPPAFQETKPPSQDFEDSSRTRGDRERT

SEQ ID NO: 236665 - protein, 95 aa, Glycine max
  unsure (1)..(95): unsure at all Xaa locations
  Clone ID: PAT_MRT3847_55735C.1.pep
SLSGTMVSTSFMRRQPMTTTSLXTFPNVGEALFGLKSGRGGRVACMAYNKVLLITPVXEMELECPYDDYIVDKAEDDGIXLGYSCRAGACVSCGG

SEQ ID NO: 236666 - protein, 56 aa, Glycine max
  unsure (1)..(56): unsure at all Xaa locations
  Clone ID: PAT_MRT3847_55736C.1.pep
YIIMYSIDDKIHPPRRKTRYILGATQAYSACVGAAPAPQKTRPCSVXFXXTHTXVX

SEQ ID NO: 236667 - protein, 44 aa, Glycine max
  Clone ID: PAT_MRT3847_55737C.1.pep
LHPLAYSISLHNIFNKISSFLLNNILTLSHNFFILYNSHSYFSY

SEQ ID NO: 236668 - protein, 96 aa, Glycine max
  Clone ID: PAT_MRT3847_55738C.1.pep
PPKLRVLKPPPPPFRGYMESGVPPFRKKIIKMGINPSPNLGIPWIGPRPVLLFPCPWGATGKHGQFFLKLFVCVKRGVFPPPPLFPCKLDEGFSIA

SEQ ID NO: 236669 - protein, 83 aa, Glycine max
  Clone ID: PAT_MRT3847_55739C.1.pep
LVHPHSSLWVPSVSVCFDQCHLSPGCAITHGAGLVNPCSNGLHCVLREAESDAEDLVIVPAGVTGISRRDSRCGLPNRRCGLL

SEQ ID NO: 236670 - protein, 101 aa, Glycine max
  Clone ID: PAT_MRT3847_5573C.1.pep
RSYSTGSAPNTPKHHAVNVIPRHKLAKQSSASSFSLSSSSSTSSSAYYFYDSCQKNPSLKKTLTKTQAQTLFSASHTHRNSLQPTSFSPTARSFPLKSTAD

SEQ ID NO: 236671 - protein, 61 aa, Glycine max
  unsure (1)..(61): unsure at all Xaa locations
  Clone ID: PAT_MRT3847_55740C.1.pep
DISLTLRKLTDRVYYXHTGSMDHLKQRTLKDQMAKNPTEVIRKADLSILPINKLPVDWYRK

SEQ ID NO: 236672 - protein, 79 aa, Glycine max
  Clone ID: PAT_MRT3847_55741C.1.pep
LLYYGLTLTDNNQPHATPLPSFQKPTGRPTTKVTTPPGTDTHIDNQPADTMHRTHEYQKTKQGIAPAPNSTHMRLSAPS

SEQ ID NO: 236673 - protein, 69 aa, Glycine max
  Clone ID: PAT_MRT3847_55742C.1.pep
MDMAKLVLCLRFLLNSGRSARRAEAQQNECQIEKRNALKPDNRIEAESGITETWNPNNKPEHCAGDTPT

SEQ ID NO: 236674 - protein, 80 aa, Glycine max
  unsure (1)..(80): unsure at all Xaa locations
  Clone ID: PAT_MRT3847_55743C.1.pep
TMQCRQPVFTSGLIGKDHSISRHGNQGIYWLDNVNKPGSLLLMAQKPQTFCNQHATVPFKVTRMNKIVWKAPFCCLXSSR

SEQ ID NO: 236675 - protein, 75 aa, Glycine max
  unsure (1)..(75): unsure at all Xaa locations
  Clone ID: PAT_MRT3847_55744C.1.pep
EAKNSSKALIAGAGKGDMPTYGVGGTEYNYNRKXTIIINASSTTNSLTPFIKRLKHKLITINNTMTTTHSYTSYQ

SEQ ID NO: 236676 - protein, 86 aa, Glycine max
  unsure (1)..(86): unsure at all Xaa locations
  Clone ID: PAT_MRT3847_55745C.1.pep
NLQNLINNFINPFXXPFSYIYPYYIFYTPPYNNLXFQIITXNSLFKPNLSNFPRKLNVFLVLSHYLFXHPHINYLSYIPSNKGLPF

SEQ ID NO: 236677 - protein, 59 aa, Glycine max
  Clone ID: PAT_MRT3847_55746C.1.pep
PRVRGLFECGKALSTLRSRRTSPVFKKCLWFKKSVFSQLVCFVIQFSPKNCSANQVPCS

SEQ ID NO: 236678 - protein, 110 aa, Glycine max
  Clone ID: PAT_MRT3847_55747C.1.pep
ESSQAELLIPILAVHHDQAIWGKDANEFNPGRFREGVSRAGKHPLGFIPFGVGVRTCIGQNLALLQTKLALAIILQRFTFCLAPTYQHAPTVLMLLYPQYGAPIIFQLIH

SEQ ID NO: 236679 - protein, 154 aa, Glycine max
  Clone ID: PAT_MRT3847_55748C.1.pep
NINSASYGPTWRTLRRNLASEMLHPSRAKSFSEIRKWVLHTLLTRLKSDSQSNDSIKIIDHFQYAMFCLLVFMCFGERLDDGKVRDIERVLRQLLLGMNRFNILNFWNPVMRVLFRNRWEELMRFLKEKDDVFVPLIRARKQKRAKDDGRVSYV

SEQ ID NO: 236680 - protein, 103 aa, Glycine max
  Clone ID: PAT_MRT3847_55749C.1.pep
GSAKQGKLTIKTTDMEAVYDMGSKMIDAMTKERVMAGDIISIDKSSGKITKLGRSYARSRDYDANGVDTKLLQCPDGENQKRKEVVHTVTLHDNDVINSTTQG

SEQ ID NO: 236681 - protein, 42 aa, Glycine max
  Clone ID: PAT_MRT3847_5574C.1.pep
RVSLYLQECWVAHIILFQISPTWHYLKEMIMAKPVQSPKKRK

SEQ ID NO: 236682 - protein, 114 aa, Glycine max
  Clone ID: PAT_MRT3847_55750C.1.pep
RPQGAREVTNLGRTDREVGARHNIFPDYSSYLKLGLLECTILTQHCTHVPTKVALEGGGPLSSNLNGVGINPLPFTTFQNYDMDPFGHSNAMRLGSSKPGLAKRMFFHTNHILE

SEQ ID NO: 236683 - protein, 66 aa, Glycine max
  Clone ID: PAT_MRT3847_55751C.1.pep
PPAPPAKVARKGGEPFPLSGGKTLERGTVTGLFSFTPAGKNGLFQGAFHLGFRRGFPWEGRLKRAP

SEQ ID NO: 236684 - protein, 127 aa, Glycine max
  Clone ID: PAT_MRT3847_55752C.1.pep
RVLLTTFYGTKKIRSYAHCAKESKGITILVLNLDNSTTVQVNVALKFNKLPYRRVGEPARREYHLTAPDRNLHSQTMLLNGKMLSVNSAGEIPPLEPLYVNSRKPIIVGPLSIVFAHIPNVLLSACS

SEQ ID NO: 236685 - protein, 55 aa, Glycine max
  Clone ID: PAT_MRT3847_55753C.1.pep
SVDIGENLCLKSSYVELTSNSTASSFVMQADTRSGQRVVHIPYRQMEESCTVRMK

SEQ ID NO: 236686 - protein, 141 aa, Glycine max
  Clone ID: PAT_MRT3847_55754C.1.pep
MSSKVVYEGWMVRYGRRKIGRSFIHMRYFVLESRLLAYYKRKPQDNQVPIKTLLIDGNCRVDDRGLKTHHGHMVYVLSVYNKKEKNHRIMMAAFNIQEALIWKEKIEYVIDQHQGAQPSNGNKYISFEYKSGMDNGKTASS

SEQ ID NO: 236687 - protein, 65 aa, Glycine max
  Clone ID: PAT_MRT3847_55755C.1.pep
PNCLLIVTPKGGHLGWVAGDEAPLGAPWTDPLVMDFIQYLESEAVKTPETNSNPGSKETLYHLEV

SEQ ID NO: 236688 - protein, 93 aa, Glycine max
  Clone ID: PAT_MRT3847_55756C.1.pep
MSSKVVYEGWMVRYGRRKIGRSFIHMRYFVLESRLLAYYKRKPQDNQVPIKTLLIDGNCRVEDRGLKAHHGHMVYVLLFYNKKEKNHRIMMAA

SEQ ID NO: 236689 - protein, 53 aa, Glycine max
  Clone ID: PAT_MRT3847_55757C.1.pep
ARAKLLYEASAQQKRERGVWIIIFLHWRRSHWRDRWHWHSLLLIQGHLAGLVL

SEQ ID NO: 236690 - protein, 60 aa, Glycine max
  Clone ID: PAT_MRT3847_55758C.1.pep
LWPLKSVMSLFRMPISKLTSFSTLVNFKNYQSLDCTSGLLFPPSNFPSNSYVSQSWKSLL

SEQ ID NO: 236691 - protein, 79 aa, Glycine max
  Clone ID: PAT_MRT3847_55759C.1.pep
KEVNQGRLIPNLFPSRIQSSSWFEVETKKPFVRIRKLPSCSIKKTPLVVHGESQASRRTSHLPSIATATQRYICVCETC

SEQ ID NO: 236692 - protein, 124 aa, Glycine max
  Clone ID: PAT_MRT3847_5575C.1.pep
LPPIVTMSRTHDAAAAVRRGVDNVESGIHKGVDKVERGFARVQEDASTALHRGVQRVETYTTALDNYILAQATRLRNDIQPLLPTISTTGLIFAGSLPLSFYFNSLSIKRVVGVQDYGFPTNLV

SEQ ID NO: 236693 - protein, 158 aa, Glycine max
  Clone ID: PAT_MRT3847_55760C.1.pep
TLGGTRGTPEEPGRGPNGPKREPKKSRRKAGEKRGPGGNRKKIGIPHKNQPGTKKRKTGGTQGGPKETKNERESRGAPKRENKRKNGDERSGKKPEKNRGKAGRKGGPSGPRGNGKKTGDPKGPSLKKPKKEDKKGPPQGGKKKKKAGKTGEKTGTKQ

SEQ ID NO: 236694 - protein, 91 aa, Glycine max
  unsure (1)..(91): unsure at all Xaa locations
  Clone ID: PAT_MRT3847_55761C.1.pep
RRRPLLLLFLNLPLLVFFQFPVGIGLSHVFFLITNVSLRCVCVCVCVFPSLSLCCRLGPGWVVLRRCLDQTSXCVLCCLRVXGRXLVLRRF

SEQ ID NO: 236695 - protein, 132 aa, Glycine max
  unsure (1)..(132): unsure at all Xaa locations
  Clone ID: PAT_MRT3847_55762C.1.pep
VMLFEMKSLISNWAPYLKALTHTGNGLNGPLRAVAQAPCSNSCNLLVKYHYEKLLKKKKKXFGMPGSKSVASLDWXWVAFIGACNKKVETKFIALNLHMLTCTCLSTCLPKYGSKELTILFFPWRIKSGTSH

SEQ ID NO: 236696 - protein, 82 aa, Glycine max
  Clone ID: PAT_MRT3847_55763C.1.pep
IIFSQRGAVRLAQALLGGGAFDWGVNPLTEWPVLFFFAVGAFFAKMGAVGGAPGFPGQIKPPRRPFQIKKCRPLARAFWGVF

SEQ ID NO: 236697 - protein, 25 aa, Glycine max
  Clone ID: PAT_MRT3847_55764C.1.pep
LPIITCSAQFNNALVQHSTPYLCVH

SEQ ID NO: 236698 - protein, 131 aa, Glycine max
  Clone ID: PAT_MRT3847_55765C.1.pep
MAMALVSLSTILTPPSSSSSSFSSPKPSSSSIVRFRPLTPLPRFRRHLVRMAPDEEKMTRRSPLDFPIEWERPKPGRRPDIFPQFSPMKTPLPPPLPADPPEEDEEEEEKKEEEEEPEKEEPDKPDKPEKQ

SEQ ID NO: 236699 - protein, 210 aa, Glycine max
  unsure (1)..(210): unsure at all Xaa locations
  Clone ID: PAT_MRT3847_55766C.1.pep
GSCYHVVXRYKEAVKDNDAALDLELDSMDKFVLQCLAFYQKEIALYTASKFNSEFFWFDIDGDIDPLFKEYWCKRLHPKNVCEKVYRQPPFRESLRKGKLRKQELVLTKQKTALIQAADSIGKRIQYDCPGFLPNGRQHRMAGFAAIEIAQKVSKAWRSFQAEWKHSNKNNSNSKNGKRARRRERINMLSQNRGGAGCSTSSASEISPSY

SEQ ID NO: 236700 - protein, 62 aa, Glycine max
  unsure (1)..(62): unsure at all Xaa locations
  Clone ID: PAT_MRT3847_55767C.1.pep
VAPGGPARXFSLPPSPPLVLLAAPRXFVSVXLASSWPFGALVSLWRGPXRXLVXLPASARWV

SEQ ID NO: 236701 - protein, 57 aa, Glycine max
  unsure (1)..(57): unsure at all Xaa locations
  Clone ID: PAT_MRT3847_55768C.1.pep
XLXFFFXXXXGNQGFCSQSALKLNSSRPGHSSSTQTQFTAQDITVPLHKSKLVNGGC

SEQ ID NO: 236702 - protein, 157 aa, Glycine max
  Clone ID: PAT_MRT3847_55769C.1.pep
MRECRWNRRASTAREVMQASGSCEEVHERLAQVTPHHHQLQQHAHHHQISNSAFHISRPSHPISTIISPPPLHHTSIILDDNSYHVSRIMLQNENFQQQQQQHHKLGGRSASGLEELIMGCTSTEIKEESSITNAQEAEWLKYSSYWPDPDNQDPHG

SEQ ID NO: 236703 - protein, 109 aa, Glycine max
  unsure (1)..(109): unsure at all Xaa locations
  Clone ID: PAT_MRT3847_5576C.1.pep
MLSQLFEISSRCTLLRECLGGGSIIIIISRDXILRRHGVDDVYQVQTLDQEHVVQLFCKNAFKSNYAMSDYKRLTCDVLSHAQGHSVAIEVLGSSVFGRDVSQREEEII

SEQ ID NO: 236704 - protein, 49 aa, Glycine max
  Clone ID: PAT_MRT3847_55770C.1.pep
HQMPSHTFSLSLVVFFSQVNINCLINNSSLSLVCRQANLASRSLVSSDI

SEQ ID NO: 236705 - protein, 46 aa, Glycine max
  Clone ID: PAT_MRT3847_55771C.1.pep
KFTKNFSNFLHQATIVNLRFIRRREPHILHSPTQPNSIFPIQLILI

SEQ ID NO: 236706 - protein, 166 aa, Glycine max
  unsure (1)..(166): unsure at all Xaa locations
  Clone ID: PAT_MRT3847_55772C.1.pep
RGKKDPPHPPNPRLSDAGQHPQGGGNPPLSLPGPPPRGTPPKGGQHQKHDPLKGPEKGKGGKHGPHGQPRPXGTDVKVRHPPTKREGPPDHGGREGNEPQTARTTNGGSPPHRLKLKAPKPTSPLXPLTQNPTPGGPPRGGPRNTQPPPRGPRRSTPLGTPEGGTQ

SEQ ID NO: 236707 - protein, 75 aa, Glycine max
  unsure (1)..(75): unsure at all Xaa locations
  Clone ID: PAT_MRT3847_55773C.1.pep
IXXXXQTMFXXLLXIXQCXISRGXSQHLXVMSXXEGLSXXXGSXXXXRXSTRSSXLGGXXXYXLEPNSEXTYAXX

SEQ ID NO: 236708 - protein, 87 aa, Glycine max
  unsure (1)..(87): unsure at all Xaa locations
  Clone ID: PAT_MRT3847_55774C.1.pep
MEPSPYNSSDASSLEALHAWEWHFHQAYIQSTAARCHFTAXWSMPSAAMTPXFGDLATSYPDVLELTCDADECNGVGSKMDVKAMPT

SEQ ID NO: 236709 - protein, 63 aa, Glycine max
  Clone ID: PAT_MRT3847_55775C.1.pep
LKRTYSPTTLFSKTLLHSTVTYRCSIHQMAVPDLNSQHLNTHHFQSLPTHQLFSSLSLHTLII

SEQ ID NO: 236710 - protein, 165 aa, Glycine max
  Clone ID: PAT_MRT3847_55776C.1.pep
MSVSLEALAMAGASDVEFAMDIEEWERKDLEQYPPPHLLAHEKEGNNGVYGLPTTHFLPNHNTWEYDKEEEHVEAFAMAGVDCMENTINNVCALEQSLSPEAEKRHCNITTSSSLDDGMAIEWVKMKMREWASAAASNNDTKANLTVSEILLIMDNHFMRPKPDT

SEQ ID NO: 236711 - protein, 80 aa, Glycine max
  Clone ID: PAT_MRT3847_55777C.1.pep
SSREKTTEGGERHEERSLDSSTWSTFSGSALCFTVNVSKIWFTKAKRHKNQKRKQRPLVLSLLSAALPDLAYKHTPRALC

SEQ ID NO: 236712 - protein, 243 aa, Glycine max
  unsure (1)..(243): unsure at all Xaa locations
  Clone ID: PAT_MRT3847_55778C.1.pep
MSTEDDNNKPYQVPKENYSVNSHRRLFNKYACACVMTASIISAIFGYAMGVMAGALIFIKEDLQISDLQVQLLAGILDVFAVSGAMAAGRTSDYIGRRYTVILASLIFLLGSILMGYGPSYSILIIGRCIVGIGVGFALIIVPVYSTEISSPSKRGFLTSLPDLCINLGFLLGYVSNYLFEKLPLKLGWRIMVALPAIPSLILVILMLNSVESPRWLVMQGRIAXARKVLLLVSNTNEEAKQR

SEQ ID NO: 236713 - protein, 47 aa, Glycine max
  Clone ID: PAT_MRT3847_55779C.1.pep
FNQSTIEFCVVLINILNFNLFLSTLYNTPIFHPPSFFFSSLLYPNSY

SEQ ID NO: 236714 - protein, 61 aa, Glycine max
  Clone ID: PAT_MRT3847_5577C.1.pep
AVIDDVLDALLVVSPDDRCSWSAILCDNNRSLRYSNKMNLCDFSSECMKWFSFNICVSFKN

SEQ ID NO: 236715 - protein, 46 aa, Glycine max
  Clone ID: PAT_MRT3847_55780C.1.pep
NAIYRYLKLCFCVLPYFPSLLGSNVPWPKHDHLNLTFLNMLPFWRF

SEQ ID NO: 236716 - protein, 61 aa, Glycine max
  Clone ID: PAT_MRT3847_55781C.1.pep
ECQSRHSISVLSDIIGVLARLVIVLDALAIGTEHSRLWCEACSLLGPNGCCYPSPRLRSLI

SEQ ID NO: 236717 - protein, 71 aa, Glycine max
  unsure (1)..(71): unsure at all Xaa locations
  Clone ID: PAT_MRT3847_55782C.1.pep
HKYHLDTHTKNXNKIYTHSPLCPLISSLSINLLIIFSTYSTLFLAPVHYKNIFPLTSTSLSTLNITLSTHL

SEQ ID NO: 236718 - protein, 345 aa, Glycine max
  unsure (1)..(345): unsure at all Xaa locations
  Clone ID: PAT_MRT3847_55783C.1.pep
LTRISEKALRDLNTILGTERKNEDSSKACLSKPSVDNADENIEEWQKKKNSSSLVSPAVNGNLAVTANSSAEVVNAEVEYIESENLNDVDDADTCLKTLLAGLDSKDWVLVCDTLNNVRRLSIFHKEAMLDMLGDVITSIAKSLKSPRSAVCKTAIMTSADIFSAYNDRILDSLDPLLVQLLLKASQDKRFVCEAAEKALIAMTTWISPISLLPKLQPCLKNKNPRIRAKASMCFSRSVSQLGEEGIKTYGIDKLIQVAASQLSDQLPESREAARTLLLELQNVYEKXHDLIKPATPTVNNDAYCEXENPEVSSWESFCQSKLSPLSAQAVLRVTTSIAREGLVS

SEQ ID NO: 236719 - protein, 194 aa, Glycine max
  unsure (1)..(194): unsure at all Xaa locations
  Clone ID: PAT_MRT3847_55784C.1.pep
RLAVTGPFPGLASLDPLLVQLLLRXSQDKRFVCEAAEKALIAMTTWISPISLLPKLQPCLKNKNPRIRAKASMCFSRSVSRLGEEGIKTYGIDKLIQVAASQLSDQLXPESREAARTLLLELQNVYEKSSHDLMPATPVNNDHNNVNEHTVNGDSVNEDSEVRSWESFCQSKLSPLSAQAVLRVTSIAREGLVS

SEQ ID NO: 236720 - protein, 71 aa, Glycine max
  Clone ID: PAT_MRT3847_55785C.1.pep
PRVRPRVRPRVRPRVRTAARRRQKGQAIGLFAQATCALEFGLPRPFNQRLLVLHVGGGAVKRRVQFKTNKF

SEQ ID NO: 236721 - protein, 96 aa, Glycine max
  Clone ID: PAT_MRT3847_55786C.1.pep
EGVKHGKKTPIARGDAEVFMKFARAGYKEKIWDHAAGVIIIQEAGGMVTDAGGLPLDFSKGLYLEGLDRGIVACSGATLHAKIIDAVDASWGSSSL

SEQ ID NO: 236722 - protein, 67 aa, Glycine max
  Clone ID: PAT_MRT3847_55787C.1.pep
HQTSTRCFDAVTLGTVAGRWNGKPMVVIMHAVNAARSKGGLGLTSCMRNASSGPLHDHMWRISVHRI

SEQ ID NO: 236723 - protein, 53 aa, Glycine max
  Clone ID: PAT_MRT3847_55788C.1.pep
HASVYISHCMYQTCHCQLPRYRGFACSSVINSLLRFYFKHSQLICTLILYTIL

SEQ ID NO: 236724 - protein, 38 aa, Glycine max
  Clone ID: PAT_MRT3847_55789C.1.pep
VPLNQNERLMFIKSYNDRIMLASGSLYLSSHYPHFIYR

SEQ ID NO: 236725 - protein, 44 aa, Glycine max
  Clone ID: PAT_MRT3847_5578C.1.pep
YSPKCPRINPPPRNKLDHYQILKYPPTIEIGMKKIEDNNPLWFI

SEQ ID NO: 236726 - protein, 81 aa, Glycine max
  Clone ID: PAT_MRT3847_55790C.1.pep
LVPPFWAKTSCPSNGSLGYFRRSRSLLCLCFLRRSFLQSRAHHCWSIEGVGGCLYFVMSSVNAGLTTACVWAPSLLCSEDR

SEQ ID NO: 236727 - protein, 111 aa, Glycine max
  Clone ID: PAT_MRT3847_55791C.1.pep
TPQWPPFSFFLFLIFFFFLSSQLLIRGGGFLNKKKGFFFPNIVKIFTKFHLSPPWVKVFHKYFLSYPWEKCLSNNIRTPLLFITVPLLTFYFFFFPPNPPVFLCPTLFFTT

SEQ ID NO: 236728 - protein, 71 aa, Glycine max
  Clone ID: PAT_MRT3847_55792C.1.pep
YYQVQVSPLFCSLSTVKDKMSSLALPLFHLPCSLIRPFGSNGEMLCLKTNLAPPYISHLLEGCVSMLQLIL

SEQ ID NO: 236729 - protein, 38 aa, Glycine max
  Clone ID: PAT_MRT3847_55793C.1.pep
VNYKVYRYSCNIISVNPVLIRPLDFSSPQGYHFCVVQA

SEQ ID NO: 236730 - protein, 244 aa, Glycine max
  Clone ID: PAT_MRT3847_55794C.1.pep
MYSFTKFRKLFCSVLFSWLCFGGLAMAAGESSSSSRDLDQTPTWAVAAVCTVFILVSIALEKSLHKVGTWLVQKHKTALLEALEKVKAELMILGFISLLLTFGQSYIVRICIPEKLADIMLPCPYKEAKKASDSEEEHRRKLLSYERRYLAADTASFKCSREGHEPLLSVNGLHQLHILIFFLAVIHVFYSAITMMLGRLKIRGWKAWEAETSTHNYEFANAASRFRLTHETSFVRAHTSFLTR

SEQ ID NO: 236731 - protein, 125 aa, Glycine max
  Clone ID: PAT_MRT3847_55795C.1.pep
DACDPLASSKHQLDPLSTIAYTSKHWNPAQLKYSTVKKEVLAIVLCISKFQSDLLNQKILIRVDCKLAKDILQKDVKNLASKQIFARWQAILSVFDFDIEYFKDTSNSLPDYLTREFLQKNIDAS

SEQ ID NO: 236732 - protein, 54 aa, Glycine max
  Clone ID: PAT_MRT3847_55796C.1.pep
IPFSGFKKNRWACNRLKKDCHLTNFPFAFSTLSSCPWGLGNPLFSCYKKKNPFP

SEQ ID NO: 236733 - protein, 51 aa, Glycine max
  Clone ID: PAT_MRT3847_55797C.1.pep
SLHFKIKTFDICFKEYAILIFYFKIKRFDLLFYKFFNFSPILNLIYHQKMI

SEQ ID NO: 236734 - protein, 40 aa, Glycine max
  Clone ID: PAT_MRT3847_55798C.1.pep
PRADSARGSRLTEPSPLPCQTLHLITTRYLPNILINVLFV

SEQ ID NO: 236735 - protein, 84 aa, Glycine max
  Clone ID: PAT_MRT3847_55799C.1.pep
IWGFPLSKWPGGLTLIMWVVFFFRFLGLHLFPLGLAFCFFLPTFNISPFKQKWSFFRQGPGFSGWGKGVGKKEPGPDSKIKTPP

SEQ ID NO: 236736 - protein, 77 aa, Glycine max
  Clone ID: PAT_MRT3847_5579C.1.pep
GELMDNVQQLTSWITACRLIASDVGICGRQLCASRARGTAYSESWYCSVAGYHRHGAGRINSVSICSEVGTNSDLVQ

SEQ ID NO: 236737 - protein, 61 aa, Glycine max
  unsure (1)..(61): unsure at all Xaa locations
  Clone ID: PAT_MRT3847_557C.1.pep
KKKKKNKNKKKKRKNNKQKKKRKKKXKKKKKKEKKKNKKKIKKENNNTRKIRNKFNECTPQ

SEQ ID NO: 236738 - protein, 308 aa, Glycine max
  Clone ID: PAT_MRT3847_55800C.1.pep
ARAWALRITGRVLEDGNGKDSVAEGISTKEYPKFSAFFKKITIYLDQGLYQDNHVVVWDSAHSAAAQQRDGFEVKRKGDKEFTAVVRMAMNYSPDKFVVSPQLARVLGVEFDSRSRIIAALWHYVKAKKLQSPNDPSFFMCDASLQRVFGEEKMKFSVASQKISQHLSHPQPIHLEHKIKLSGNGPAGSTCYDVQVDVPLPLEKDMSAFLASTERHKDIDTFDELISDSIKKIHEHHRRRAFFLGFSQSPAEFINALIASQSKDLKLVAGDVSQNTENERRAEFYNQPWVEDAVIRYLTRKNARSDAP

SEQ ID NO: 236739 - protein, 69 aa, Glycine max
  unsure (1)..(69): unsure at all Xaa locations
  Clone ID: PAT_MRT3847_55801C.1.pep
IWCLEXSEXYEXXMXHVVYXVGDXDRTIKFYTECXGYEAXXQRXSPEEKYRSWAKSVNQSPRITVARHL

SEQ ID NO: 236740 - protein, 35 aa, Glycine max
  Clone ID: PAT_MRT3847_55802C.1.pep
EFSKTNTANSFGAPYESRQIGTNSRVPYHKYRASA

SEQ ID NO: 236741 - protein, 60 aa, Glycine max
  Clone ID: PAT_MRT3847_55803C.1.pep
SDGWHHSRVAKEEYSFIVPIQFLVVEIPLFDLISFLFYGLLSFAISPWLMFFYFKFHPYI

SEQ ID NO: 236742 - protein, 116 aa, Glycine max
  unsure (1)..(116): unsure at all Xaa locations
  Clone ID: PAT_MRT3847_55804C.1.pep
KIYCPNVSTVNHAGAGMVAPFTGLKSMADFPTRXTNNDITSIASNGGRVQCMHVWPPDGKNKVDTLPYLPDLDDAQLANEGXYLHTKGWIPSLEYELEHGNVYPEHNMSPXYYDGR

SEQ ID NO: 236743 - protein, 133 aa, Glycine max
  Clone ID: PAT_MRT3847_55805C.1.pep
TKQDPRQVNPPMSQPRFISRISPCVTLFLFPPCTGLPFVGLNFHEVDVMPQRVCPQSIGEGFSFPKPEMDLEPPKKVLAKQKKYLSFYPLKKNMVPFYRGGAFFSNCHAIRANPFNKGWEVISAWAKGPTLQT

SEQ ID NO: 236744 - protein, 80 aa, Glycine max
  Clone ID: PAT_MRT3847_55806C.1.pep
MLQWTGQRITIRQGSANSKNPSSIWNNNNNNNNNNDDDDDDDDDDKTNMHDNRKKLRDKKYQPYIIYNNNNNNNNNNNNN

SEQ ID NO: 236745 - protein, 56 aa, Glycine max
  Clone ID: PAT_MRT3847_55807C.1.pep
SCAYIYIYIVIQNLGNIYLWLIYRFWKKHIQLQDQDGIKKEHFPMWVKCRCRRRCL

SEQ ID NO: 236746 - protein, 69 aa, Glycine max
  Clone ID: PAT_MRT3847_55808C.1.pep
KLILYNRFWSRKLGTQIFLFPLTYIRGFPTLTSNHHHHPDLSCNQRTFVSFQNLIFKTIFIKQVFFGYF

SEQ ID NO: 236747 - protein, 33 aa, Glycine max
  Clone ID: PAT_MRT3847_55809C.1.pep
LQRKLLSSIIEGCSIDAVMNICRPKHSVSHWCC

SEQ ID NO: 236748 - protein, 87 aa, Glycine max
  Clone ID: PAT_MRT3847_5580C.1.pep
PFPQKSDGSFGRPKGRLSPVSPGPGVIAGGPVRFVLEMPGVANALGNPLGGNKALTRAGAPAAAGQKINPFGEVLRERGFPREELGK

SEQ ID NO: 236749 - protein, 39 aa, Glycine max
  Clone ID: PAT_MRT3847_55810C.1.pep
WGEKVSQCVIFWEVKSDQIKSDNISTTYQKEKRMYEPKN

SEQ ID NO: 236750 - protein, 67 aa, Glycine max
  Clone ID: PAT_MRT3847_55811C.1.pep
MAIGFMEVQLVKAKGLHNADIFGEMDPYVLIQYNDQEQRSSVAIGQGTNPVWNEKFMFKVEYLGSGD

SEQ ID NO: 236751 - protein, 115 aa, Glycine max
  unsure (1)..(115): unsure at all Xaa locations
  Clone ID: PAT_MRT3847_55812C.1.pep
WCGALFKSCEMALKGQREVISSVQISTFISFKDLDNIRVLVIKLEGVLESLLQNAIFAIKIKXEDEVKFAIDEIKKKIETFSETMESLSAHADKCSRQIRRARTVVIQNIIKKPD

SEQ ID NO: 236752 - protein, 458 aa, Glycine max
  Clone ID: PAT_MRT3847_55813C.1.pep
MEFTESYKQTGPCCFSPDARFIAVAVDYRLVIRETVSFKVVQLFSCLDKISYIEWALDSEYILCGLYKKPMIQAWSLTQPEWTCKIDEGPAGIAYARWSPDSRHILTTSDFQLRLIVWSLLNTACVHLQWPKHASKGVSFTRDGKFAAICSRRDCKDYINLLSCHTWEIMGNFAVDTLDLADIEWSPDDSAIVIWDSPLDYKVLIYSPDGRCLFKYQAYESGLGIKSVSWSPCGQFLAVGSYDQMLRVLNHLTWKTFAELMHPSTVRGPCYAAVFKEVDEPLQLDMSELCLSDDFSQGHDDSPEEPFRVRYEVMEVPINLPFQKPPAEKPNPKQGIGILSWSTDSQYICTRNDSMPTVLWIWDIRHLELAAILVHKDPIRVAAWDPTCTRLVLCTGSTHLYMWTPSGAYCVHVPLSQFTITDLKWNSDGSCLLLKDKESFCCAAVPLLPESSEYSSDD

SEQ ID NO: 236753 - protein, 119 aa, Glycine max
  unsure (1)..(119): unsure at all Xaa locations
  Clone ID: PAT_MRT3847_55814C.1.pep
RVPGLAGGGGCFRGFLAASPFFLFGFGGLVRGGWPXXSLCLSLCLFLSLSFSFFPVLCSCSGWGPXLWGVVRVSGRLFVWSSSVVWLVCGRAPLVLFPGPPSWRCSXFRDALKFXXXGG

SEQ ID NO: 236754 - protein, 58 aa, Glycine max
  Clone ID: PAT_MRT3847_55815C.1.pep
NTSSLGIIRLFLYQFEGHYLLPFDNWELFVISVGPEKYDFTYPTTGIFSEFLRSLSVS

SEQ ID NO: 236755 - protein, 215 aa, Glycine max
  Clone ID: PAT_MRT3847_55816C.1.pep
SRKAASSISLLLLTKSNILFLLTLDSYGANPRRAQTWDPIISKCERKLAKWKQRHLSFGGRVTLIRPVLTSISYFFFLFFRVSKKVVDKLVRLQRRFLWDGADEQNKIAWIKWDTVCLPKDNGGLGIKDITTFNLALLGKWKWNLFQHQGELWARVLESKYGGWRSLSEAPRDGIESIWWRDLKLVFQHPQHGDAMQNAASWRVGCGDNIKADAW

SEQ ID NO: 236756 - protein, 213 aa, Glycine max
  Clone ID: PAT_MRT3847_55817C.1.pep
PRVRPRVRERPGVAANATLSEQDTRKGWSSGSQLPPVDDSSAIAEDAFASSTFRRTPPGQVPGSQNQINHSLGSSQPHDAWKISHHPSNIFSNRGRARNLMIPPMDNIRNTDNNPYWVRPSMSRMEARPSVLPAPFEMRPSVNVNVTRPPIINPINPLQKHVRSQFNAINTSNPIANHVNKSSFMPKQSFDSVENKDASISKIHQLPNQLPGV

SEQ ID NO: 236757 - protein, 47 aa, Glycine max
  Clone ID: PAT_MRT3847_55818C.1.pep
GSSDLGSSVSGLAGASLSNAAVEFRSTGFVRQASDGVRRGWGPFLKG

SEQ ID NO: 236758 - protein, 73 aa, Glycine max
  Clone ID: PAT_MRT3847_55819C.1.pep
CDFRSDQESIWFNLDDFPIQTNQLNLFSLVLDDWFCLIFFIITRNKPTQFVGFVFVWISGFIKKCSKIKKKKK

SEQ ID NO: 236759 - protein, 61 aa, Glycine max
  Clone ID: PAT_MRT3847_5581C.1.pep
GFKFFYESPRGFNFLTKINSPFGGDQHHHPQNKKAKRVLKEGLANEKGPPKIHQGNPRRKG

SEQ ID NO: 236760 - protein, 83 aa, Glycine max
  unsure (1)..(83): unsure at all Xaa locations
  Clone ID: PAT_MRT3847_55820C.1.pep
ILVGFNYKTYKIMILVGSIGICQLYSHEPENSFLLRPLWEYPPKPFLEILHYXVANVSIGILCTLYGMKILEXAIQVFDAVLF

SEQ ID NO: 236761 - protein, 82 aa, Glycine max
  unsure (1)..(82): unsure at all Xaa locations
  Clone ID: PAT_MRT3847_55821C.1.pep
XXAXXSPXXDXRXXFEHEXXGKSXXXXXLXXSAXXXXEXSERXPGRXXSRXXESSQXWXVXXXARXXARAXXRXGXAXEAET

SEQ ID NO: 236762 - protein, 51 aa, Glycine max
  Clone ID: PAT_MRT3847_55822C.1.pep
RVTHISRNGLSLRLIIHRHCPQFHIWSQNAYCMAEPRSLSNLRAFEDTLRI

SEQ ID NO: 236763 - protein, 203 aa, Glycine max
  Clone ID: PAT_MRT3847_55823C.1.pep
MLFDRLAFCCSKHTSSSQRKYPTVIEELRHQFSLANLKKSTNNFDENGVIGYGRFGKVYKGCLQHNDGSDYSVTLKRLGVKDSRGLEQFKNEIELLCQLRHPNCVSLIGFCNHKKEKILVYEYMSNGSLHQHLRGGLLSWKKRLEICIEAAHGLHYLHTGAKRTIIHRNINPSNILLDNNMKSKLTDFRLSIQGPRYGSKPKP

SEQ ID NO: 236764 - protein, 345 aa, Glycine max
  Clone ID: PAT_MRT3847_55824C.1.pep
MAFHDHLQHEIAFQRFTEEQELTENRDMQQRLPPPTWLNNVNARQQNFLDTEKSVDRNNRSESNCESEDLREYKADILGHPLYDQLLSAHVSCLRIATPVDQLPRIDAQLQQSQRVVEKYSALAHNGVVDEKELDQFMTHYVLLLCAFKEQLQQHVRVHAMEAVMACWDLEQSLQSLTGVSPGEGTGATMSDDEDDQAESNANLYEGSLDGGETLGFGPLVPTESERSLMERVRHELKHELKQGYKEKIVDIREEILRKRRAGKLPGDTTSLLKAWWQSHSKWPYPTEEDKARLVQETGLQLKQINNWFINQRKRNWHTNNPSSSSNSKSKRKSSAGEASNQSFM

SEQ ID NO: 236765 - protein, 185 aa, Glycine max
  Clone ID: PAT_MRT3847_55825C.1.pep
MAFHDHLQHEIAFQRFTEEQELNENRDMQQRLPPPTWLNNVNVNARQQNFLDSEKSVDRNRSESNCESEDLREYKADILGHPLYDQLLSAHVSCLRIATPVDQLPRIDAQLQQSQRVVEKYSALAHNGVVDEKELDQFMTHYVLLLCAFKEQLQQHVRVHAMEAVMACWDLEQSLQSLTGKFPAL

SEQ ID NO: 236766 - protein, 516 aa, Glycine max
  Clone ID: PAT_MRT3847_55826C.1.pep
MAGICCGVVGEGDTPAPLEPTPRPSRRRSLDILPLKYIADMPMPPPEALRKRPKLNLRDCDNAIENCDESTGHKVTKKESKVDYDDDVVSETKNVTVSEVEEESPKFGVTSVCGRRRDMEDSVSVRPCFTQGFHYFGVFDGHGCSHVATMCKERLHEIVNEEIESARENLEWKLTMENGFARMDDEVHRRSQSNQTFTCRCELQTPHCDAVGSTAVVAVVTPDKIVVSNCGDSRAVLCRNGVAIPLSSDHKPDRPDELLRVQSKGGRVIYWDGPRVLGVLAMSRAIGDNYLKPYVISEPEVMVTERTEEDECLILASDGLWDVVSNETACGVVRMCLKAQKPPGSPGSDVAADGSDRACSDASILLTKLALARHSSDNDFVKDGKTKSEGGGACGFCLIKWKICVDKGINRPVDTPFLFVHNRIYKLDFPLVRVSTNFYFKFILGNIGSKFIIQFARAFVQLSQDYSSSINFYIFCSVVLLAVQHWIWTTLVICSFTRRAMESFAIVTKFQNQPLH

SEQ ID NO: 236767 - protein, 86 aa, Glycine max
  Clone ID: PAT_MRT3847_55827C.1.pep
GPGLCLGFPKIRLFKSLCFSNFPGSHSKGTGAVVPPPLLPLGLGKLKKNKLPVFVWEKKKKKKKKKKKKKKKKKKKKKKKKKKKKK

SEQ ID NO: 236768 - protein, 111 aa, Glycine max
  unsure (1)..(111): unsure at all Xaa locations
  Clone ID: PAT_MRT3847_55828C.1.pep
GTMGSTSFMRRQPMTTTSLKTLPNVGEXLFGLKSEQGXRGTCMASXNVFFFTPXXEXQXESLYDRFNAEEGEEXGIEITYSXKARNWDNCVGKTGEGNGGQSHGKYLEDEQ

SEQ ID NO: 236769 - protein, 400 aa, Glycine max
  Clone ID: PAT_MRT3847_55829C.1.pep
MAGICCGVVGEGDTPAPLEPTPRPSRRRSLDILPLKYIADMPMPPPEALRKRPKLNLRDCDNAIENCDESTGHKVTKKESKVDYDDDVVSETKNVTVSEVEEESPKFGVTSVCGRRRDMEDSVSVRPCFTQGFHYFGVFDGHGCSHVATMCKERLHEIVNEEIESARENLEWKLTMENGFARMDDEVHRRSQSNQTFTCRCELQTPHCDAVGSTAVVAVVTPDKIVVSNCGDSRAVLCRNGVAIPLSSDHKPDRPDELLRVQSKGGRVIYWDGPRVLGVLAMSRAIGDNYLKPYVISEPEVMVTERTEEDECLILASDGLWDVVSNETACGVVRMCLKAQKPPGSPGSDVAADGSDRACSDASILLTKLALARHSSDNVSVVVVDLRRDQRQSSNYNDVN

SEQ ID NO: 236770 - protein, 183 aa, Glycine max
  Clone ID: PAT_MRT3847_5582C.1.pep
MRFVGYIAQWRSAAKEALDRTAITVKFLCWLHFTGNYLCSPCHTYGVSMLPTLNVAGDVLLADHLSPRLGNIGHGDLVLVRSPLNPKIRLTKRVVAVEGDTVTYFDPLHSEAAQVAVVPKGHVWIQGDNIYASRDSRHFGPVPYGLIEGKVFFRVWPPDSFGPLLEPRNFKGVLMVSHLAKCT

SEQ ID NO: 236771 - protein, 401 aa, Glycine max
  Clone ID: PAT_MRT3847_55830C.1.pep
MAGICCGVVGEGDTPAPLEPTTRPSRRRSLDILPLKYIADMAVPPSDGSRKRPKLDLRDRDNVVQNCDESTGHKVVKKEAKVEIHDNISETKNVTVADASEVEDSPKFGVTSVCGRRRDMEDSVSVRPSFTQGFHYFGVFDGHGCSHVATMCKERLHEIVNEEIDSARENLEWKLTMENGFARMDDEVNRRSQSNQTFTCRCELQTPHCDAVGSTAVVAIVTPDKIVVSNCGDSRAVLCRNGVAIPLSSDHKPDRPDELLRVQSKGGRVIYWDGPRVLGVLAMSRAIGDNYLKPYVISEPEVTVTERTEEDECLILASDGLWDVVSNETACGVVRMCLKAQKPPSPPGSPGSDVAADGSDRACSDASILLTKLALARHSSDNVSVVVVDLRRDQRQSSNSN

SEQ ID NO: 236772 - protein, 41 aa, Glycine max
  Clone ID: PAT_MRT3847_55831C.1.pep
GHRSLLFDVLKQFVGLYFVLRFKLKPMRLWGFRINRISCLQ

SEQ ID NO: 236773 - protein, 92 aa, Glycine max
  unsure (1)..(92): unsure at all Xaa locations
  Clone ID: PAT_MRT3847_55832C.1.pep
GFAECRSFGSSGQLEGVVALTARRSRLHPGTRYLARGLNSCFSTGNEVECEQLVXIPKRAGQSVPLNRXVWRRGTIPIWWGAELKITAAGMQ

SEQ ID NO: 236774 - protein, 61 aa, Glycine max
  Clone ID: PAT_MRT3847_55833C.1.pep
TKSGRGKPWGNPNKKPGGKNPLCPPGEKPKGPKPGDFPKRGPPIREIGPPPEGAKNPRGGG

SEQ ID NO: 236775 - protein, 89 aa, Glycine max
  Clone ID: PAT_MRT3847_55834C.1.pep
VYKVWSLGLGYLNPVFPWSCVGIRFRVLFYVVAHTHTAPQTKSWGDAPKRISPSEPPVVVCNLRDDHRHSLSGQIDNQGQVTATGTLRL

SEQ ID NO: 236776 - protein, 150 aa, Glycine max
  unsure (1)..(150): unsure at all Xaa locations
  Clone ID: PAT_MRT3847_55835C.1.pep
GTSSSMTAIAFLFILLSTYTCTAYAQSGVCSGRLGYFLPTPQEVVALYNHSNLLTMPIYGPGPQLLEPLTGSAIELLLDIPTDNLRNLPSSPDNAHSWVQDHIPSYANNVXFRYVSVRHEVIPEHSFAQILVTALXIVQRGLSYAGLGTE

SEQ ID NO: 236777 - protein, 150 aa, Glycine max
  unsure (1)..(150): unsure at all Xaa locations
  Clone ID: PAT_MRT3847_55836C.1.pep
VDFLRDPCIEILQYEKYEEKVLSSENQNNSVHTNQDPCGALLKWILPLDNTLPPAXPPVISSSIFFEFSHFRSYSMSALPQNTNSPSPPLKAASSKPSFDIEDWDQFPSQKLRKKNGVEELLSFRGVSLEPERFSVCCGLEGIYTPGRRW

SEQ ID NO: 236778 - protein, 74 aa, Glycine max
  unsure (1)..(74): unsure at all Xaa locations
  Clone ID: PAT_MRT3847_55837C.1.pep
FILTFAVLTVNHYTHEKVCKIVNKHLTMPETDVVTLDSKLSTLGADSLYTDXIKMALEATFAIAIEEDSAHIIY

SEQ ID NO: 236779 - protein, 151 aa, Glycine max
  unsure (1)..(151): unsure at all Xaa locations
  Clone ID: PAT_MRT3847_55838C.1.pep
KGGRRXETKKGXTXXXGXDXKANGXQSPAGPRGEGTXKREDVFLCKERSAXQCDGCTRHNTWGRDHCKWKGKPLYTKGQEGCIERSGTKFGRSLAPVGTEDDGGDGTTGNEVHKYKAPGLKGTPETKAIWAQNCHRNQKKKEIQSETPTFT

SEQ ID NO: 236780 - protein, 67 aa, Glycine max
  Clone ID: PAT_MRT3847_55839C.1.pep
ISIIPTKPHLLQLQPNIKKQKNANNRLIVICKGSNNYSYLEDRKCDMAPFFLDQNINIITPSTILNP

SEQ ID NO: 236781 - protein, 62 aa, Glycine max
  Clone ID: PAT_MRT3847_5583C.1.pep
FYSGRKQCMTMIQAVIRLTIYKEGWYAGRGRELINWWVRKKIRGRPPIFFFFSLFFFFFFFF

SEQ ID NO: 236782 - protein, 87 aa, Glycine max
  Clone ID: PAT_MRT3847_55840C.1.pep
RRRARQLNGCNFRGYKCCPVEKKIQLVHYFREPSMSKDEKFLVDMCQGAPLGLCLLFHPFSFSSPREYSRPPCSITGFPPIILQVQL

SEQ ID NO: 236783 - protein, 107 aa, Glycine max
  Clone ID: PAT_MRT3847_55841C.1.pep
GTKPPLVIFPILKPPPFFVKKGGRGGNNTILEKKTKKGVFFGPTNPMPIFFDYFYVPQKHLKKKMCPLKTPKLWGLFMNPPLKGIYWSHGWFLLNAPPIFAVFPHPI

SEQ ID NO: 236784 - protein, 137 aa, Glycine max
  unsure (1)..(137): unsure at all Xaa locations
  Clone ID: PAT_MRT3847_55842C.1.pep
LEFLLKCAACSPKGGAPGFYVAILGAAGGIGQPLSLLMKMNPLVSLLHLYDAANTPGVTADVSHMDTGAVVRGFLGQHQLASALTGVDXVIIPAVVPRKPVMTRDDLFKIKAGIVRTLCEGIDQIXRNAIVNLISHP

SEQ ID NO: 236785 - protein, 94 aa, Glycine max
  Clone ID: PAT_MRT3847_55843C.1.pep
RGFKRLKVASPNGLIRILGLENVLQVQSIGSRRSQALWLLRVKKLPSICKRRPALFVSPSTTFAFVFGFPDFIIGRFGGLISAFNGHCWLRSNP

SEQ ID NO: 236786 - protein, 42 aa, Glycine max
  Clone ID: PAT_MRT3847_55844C.1.pep
FGVSSLGKAFMTKILNNYRNQDFAEKKKKKKKKKNFFLKKKK

SEQ ID NO: 236787 - protein, 49 aa, Glycine max
  unsure (1)..(49): unsure at all Xaa locations
  Clone ID: PAT_MRT3847_55845C.1.pep
XXVPTFLNQWDLCGSQTWEPYTQXXYLRSISFWILLRGFLXXIFGLXWL

SEQ ID NO: 236788 - protein, 99 aa, Glycine max
  unsure (1)..(99): unsure at all Xaa locations
  Clone ID: PAT_MRT3847_55846C.1.pep
NEAAAIDDPAYWGYDFKKGIMQVIGGVFRKSKEPRAFVNITQIXNAVKDARSSIYKXQWIPLNPKQLANPASYSDCVHGCLPGFPDIWNELLFVELFYP

SEQ ID NO: 236789 - protein, 164 aa, Glycine max
  Clone ID: PAT_MRT3847_55847C.1.pep
MQRNMAMSFFQRRFFSQQRRTQMVARRVLEPCDVFLNHRSMDTKKTVATLLYDHLKRHGFNPFLDNKNMKPGDKLFEKINRAVMECKIGVAVLSPRYTESYFCLHELALLLGCNKKVIPIFCDVKPSQLRVVNNPKWSEDELRRFRRALEEVKFTVGLTFNSSK

SEQ ID NO: 236790 - protein, 69 aa, Glycine max
  Clone ID: PAT_MRT3847_55848C.1.pep
FGPDVKSHPPRKCSLWRVPCFSFNHVMPGFLPYNTRFRVLGPFSPKKKKKPKKKKKKKKKKKKKKKKKK

SEQ ID NO: 236791 - protein, 556 aa, Glycine max
  unsure (1)..(556): unsure at all Xaa locations
  Clone ID: PAT_MRT3847_55849C.1.pep
ITSTDLNYLVFRYLHESGFTHSALAFGYEAGIDKCKNDDSVVPPGALVTFIQKGIQYLELETNLSGSVSDMDKLLSFLQSVDVIKXNIVKARKENLRQHKFESNKIINDLSQDDPRREETEKERKEKENEHTLEKIRLEKDKEPPKPEYKEIQHTDQNHTEKPEDKITVENLENRAQGGAEPMEISQSPMSSPDDTPCGYVKLLKGHTSEVFACAWNPSAPLLASGSGDSTARIWKIADGACDSSVQNEPVNVVVLQHFKESTNEKSKDVTTLDWNGDGTLLATGSYDGQARIWSRDGELNCTLNKHRGPIFSLKWNKKGDYLLSGSVDKTAIVWNIKTGEWKQLFEFHTGPTLDVDWRNNVSFATCSTDKMIHVCKIGENRPIKTFSGHQDEVNAIKWDPSGSLLASCSDDHTAKIWSLKQDNFLHNLKEHVKXIYTIRWSPTGPGTNSPNQQLVLASASFDSTIKLWDVELGNVLYSLNGHRDPVYSVAFSPNGEYLASGSMDRYLHIWSVKEGKIVKTYTGKGGIFEVNWNKDGDKVAACFSNNIVCVLDFRM

SEQ ID NO: 236792 - protein, 84 aa, Glycine max
  Clone ID: PAT_MRT3847_5584C.1.pep
IDAALYQRFIAPISCVFLALDALVCTPGTFVLTALRVCLALVCCPLLLAASDTTGIMITPTSTSINCTSRTTTNTTNTTSYFTI

SEQ ID NO: 236793 - protein, 103 aa, Glycine max
  Clone ID: PAT_MRT3847_55850C.1.pep
IGHRLFFCFFKRSCHCAFPEHEKAQCEIPLHKKQMLHHLGLCTPLISAFRTSSNSSSISIFTFFQQKCYSRNVAAATRYTASRHKPKAQEEDNQATISLNDSA

SEQ ID NO: 236794 - protein, 129 aa, Glycine max
  Clone ID: PAT_MRT3847_55851C.1.pep
MAGGSIKRHCFSEEDDVEPGYSGHNHFHHYQHGFISRTLGYGTFYNRRVRSHSIFSPRSGRFYDARFEDHQPHFLQACSLCKKPLGDNRDIFMYRGDTPFCSEEWRQEQIERDEAKEKNKNLSSLDEGF

SEQ ID NO: 236795 - protein, 51 aa, Glycine max
  Clone ID: PAT_MRT3847_55852C.1.pep
SKSYTMQHGNMLTYASDKHNYDEQRKMLNDIKDSIDKLIEKDTKKASLPMK

SEQ ID NO: 236796 - protein, 36 aa, Glycine max
  Clone ID: PAT_MRT3847_55853C.1.pep
SGFRIGSFFVFDCVEEESLAFVAVLAANFCRLLAAV

SEQ ID NO: 236797 - protein, 116 aa, Glycine max
  Clone ID: PAT_MRT3847_55854C.1.pep
KKKRNLLFLEAGAGPPTDNDDMIVGGYTCEENSVPYHVSLNAGYHFCGGSLISDQWVVSAGHCYKSRIQVRLGEYNIDVLEGNEQFINSAKVIRHPNYYSWILDNDIMLIKLSSPA

SEQ ID NO: 236798 - protein, 62 aa, Glycine max
  Clone ID: PAT_MRT3847_55855C.1.pep
IPLILSLLRIPQYMGTVLFNYSPPLGFKGLIMVAEDSLLGHADIWRYMSCFTDSGDLKAVIE

SEQ ID NO: 236799 - protein, 403 aa, Glycine max
  Clone ID: PAT_MRT3847_55856C.1.pep
NGKSRCFGFVNFQNPDSAAAAVERLNGTTINNDRVLYVGRAQRKAEREAQLKAKIGQERISRLQKLPGIRFCGKNLDDSFSDEKLKDLFSEFGTITSCKVMIDSNGRSKGSGFVSFSTPEEASKALNEMNGKLIGRKPLYVAVAQRKEERKAHLQAQFAQIRAPGGMAPLPAGIPLYHPGAPRLAPQQLYYGQGTPGFMPPQPAGFSFQQQILPGMRPGVAPNFIMPYHLQRQGQLGQRTGVRRNGNFQQVQQNQMLHRNSNQGFRYMPNGRNGMDPSLVPHGLMGPMMPMPFDGSGVTAAPNDNQRPGALSTTLASALASATPENQRMMLGEHLYPLVERLAPNQYTAKVTGMLLEMDQSEVINLIESPEDLKTKVSEAMQVLHEVASGSEVDQLGSMSLNE

SEQ ID NO: 236800 - protein, 75 aa, Glycine max
  unsure (1)..(75): unsure at all Xaa locations
  Clone ID: PAT_MRT3847_55857C.1.pep
DAKPTSGDLARSLVGLEHNTNDNSSNDFHTILXSTTPSGDDTCHCRCHLSILFLWPTIHRLDLATNRLSQVKGDA

SEQ ID NO: 236801 - protein, 135 aa, Glycine max
  unsure (1)..(135): unsure at all Xaa locations
  Clone ID: PAT_MRT3847_55858C.1.pep
MRDLKLVERFKSTQVHALNSEATSRRNKATVGARARAITIRSLVSKSKSNTTTTSTTTTTSAVANLVVPLQLPSADTLEPSIEPHLKPINLVEALSELYQRLECWCLQSEKKTSLWVXSXSPLLRSLGNQKLLKR

SEQ ID NO: 236802 - protein, 159 aa, Glycine max
  Clone ID: PAT_MRT3847_55859C.1.pep
RPKKKKKKKKKKKKKKKKKKKKKKKKKKKKKKKKNKKKKKKIKKKKRGGRLLRVPNFPPPWIPQLFFFFWPPKLKPLARFSKSRLGKNPWFSPFFSFGKIPLLPGLVNEKKPPPFRLFHPLAPLYLKGPPPLRRHLTPGVGGVPPRVPLFFGRPFAPVF

SEQ ID NO: 236803 - protein, 99 aa, Glycine max
  Clone ID: PAT_MRT3847_5585C.1.pep
GYGQTGYGQTGSEYQQTGLAGAGLAGTTTGYNETSTLNKGFVEGQSTTQTGVIREEVIVEQPVIVEQEVIRETAPVENRHLFTEQQQFIEPRTFFERSR

SEQ ID NO: 236804 - protein, 50 aa, Glycine max
  Clone ID: PAT_MRT3847_55860C.1.pep
TCTYPILWQFCYNYCSSTLLGWGDRYYKGDDDKAKAEAKAEFTYAVEQDH

SEQ ID NO: 236805 - protein, 243 aa, Glycine max
  Clone ID: PAT_MRT3847_55861C.1.pep
LELTKMRKESVEKASIICSLNELDSLGGCEGNTPEQISAQLERLNQTIRRESQRYSESIDDLRMLYKKKERKIIKRQQVYKTLRQKLDACQRALELRKRKFQRNATYLKHQLSWKFNGHLRKKGISGLIKVNYEDKTLMIEVQMPQDASNRAVRDTRGLSGGERSFSTLCFALALHEMTEAPFRAMDEFDVFMDAVSRKISLDPLVDFAEAHGSQWIFITPHDTSSVRAGDRIKKMQMAAPRF

SEQ ID NO: 236806 - protein, 55 aa, Glycine max
  unsure (1)..(55): unsure at all Xaa locations
  Clone ID: PAT_MRT3847_55862C.1.pep
QPPKAHKMHGKQALGHPKNRTPLCRQITTCSIPHLNGLAQIIPCPSARRLXRTRG

SEQ ID NO: 236807 - protein, 55 aa, Glycine max
  Clone ID: PAT_MRT3847_55863C.1.pep
TNHYKEASCPCNLVKVLSDSLSDFTVILLHQTFLSHQHNLLTQFHLHCRDLSTIT

SEQ ID NO: 236808 - protein, 117 aa, Glycine max
  Clone ID: PAT_MRT3847_55864C.1.pep
PKFLKKFGFFFLKGHLGMPFRVPFSATPRGLPVKKISPTSQVFIFFPTPRVDFLVEKFTPPPLFSQFNLILAFVTNFFLLTPKFGFSFPFSKNFKKVCDFLGKFFFCYFFENFSAKF

SEQ ID NO: 236809 - protein, 35 aa, Glycine max
  Clone ID: PAT_MRT3847_55865C.1.pep
KKKKKKKKKKLLKKKKKKKKKKKKKKKKKKKKKKK

SEQ ID NO: 236810 - protein, 41 aa, Glycine max
  Clone ID: PAT_MRT3847_55866C.1.pep
LCGGGNQDYKVHIQLHIQLHLINRSMSLERMSDHDFISPLQ

SEQ ID NO: 236811 - protein, 284 aa, Glycine max
  unsure (1)..(284): unsure at all Xaa locations
  Clone ID: PAT_MRT3847_55867C.1.pep
GSRPDVXXEKSHEDDISGLKFSSDGRILLSRSFDGSLKVWDLRKTKEPLKVFEDLPNHYAQTNIAFSPDERLFLTGTSVERESMTGGLLCFFDRVNLELVSKVGISPTCSVVQCSWHPKLNQIFATTGDKSQGGTHILYDPTVSERGALVCVARAPRKKSIDDFEAKPVIHNPHALPLFRDQPSRKRQREKVLKDPLKSHKPELPMTGPGFGGRVGTSQGSLLTQYLLKKGGMIKETWMEEDPREAILKYADAAAKDPKFIAPAYAETQPEPVFAKSDSEDEEK

SEQ ID NO: 236812 - protein, 73 aa, Glycine max
  unsure (1)..(73): unsure at all Xaa locations
  Clone ID: PAT_MRT3847_55868C.1.pep
FIAPPHLFVTPLGGIKKQTPGGIPLAFVLRAKGXRSPGVKSKKXLSPQGGFFKKKGRVFFPGLISKAPPGEIF

SEQ ID NO: 236813 - protein, 143 aa, Glycine max
  Clone ID: PAT_MRT3847_55869C.1.pep
VNGIRVAITLVQSKRFPKYTMCDQRTAKQIMNLTVKDNFKFIPKHPHDPGSIAQFSKDAVIPIWHSHGGYHAGKVVSPDYKVLGVDKLPVVNGSTFDGSPGPNLPSTVTIMGRNMRVKFFSHSDGEIGWYIRSNPLCEDHGDS

SEQ ID NO: 236814 - protein, 49 aa, Glycine max
  Clone ID: PAT_MRT3847_5586C.1.pep
KKIPLANFFNCKGAPGLAKPTGKGKVRPGKKLFHLRPLKLGLPISMTPI

SEQ ID NO: 236815 - protein, 60 aa, Glycine max
  Clone ID: PAT_MRT3847_55870C.1.pep
DLNYALLLFLVLSSLFGLHLNNHDFKFSSVIVHMQAVVLDMLSLSLIVLIFSWVQQIILQ

SEQ ID NO: 236816 - protein, 108 aa, Glycine max
  Clone ID: PAT_MRT3847_55871C.1.pep
INIMQQIAQNLMPINPTTNQPELKTLKRKASDHPTLDLDLSLKLNSKINDAEEGTLNNHEVDSTNLSLSLCSQLSSSSNPSSRLIKEAQQDRCDEQGKIMASTLDLTI

SEQ ID NO: 236817 - protein, 133 aa, Glycine max
  Clone ID: PAT_MRT3847_55872C.1.pep
QGCTILSGDVIISHLAAYSKPIYVVFLTDVYGVYDRPPTEPNAILLKEIAVAEDGSWSVVKPKLQNSIELTVAAHDTTGGMKTKIAEAAMIAKLGIDVYIVKAATSHSLRALNGDLRSSIPDDWLGTVVRSLR

SEQ ID NO: 236818 - protein, 118 aa, Glycine max
  Clone ID: PAT_MRT3847_55873C.1.pep
MSRAAIISIAILLITRSGALASISCATVIEEVAPCTSFLQGGSKQPSVACCNGIKKLSGEAGTHQNRTAICQCLKEGLATIGNYDPKRVPQVPKDCGLSATLPPIDKNTDCSNISFMM

SEQ ID NO: 236819 - protein, 69 aa, Glycine max
  Clone ID: PAT_MRT3847_55874C.1.pep
EISMKSFSIRAISPVLSSMAPAIIFIISGTHQGQLLHNNLQLGIYQVCSTGYHQHMNIIHKDASSSHRA

SEQ ID NO: 236820 - protein, 83 aa, Glycine max
  unsure (1)..(83): unsure at all Xaa locations
  Clone ID: PAT_MRT3847_55875C.1.pep
SDDAAPGISASPSEDNIRYFNVMILGPTQSPYDRGVLKLXLFLPEEYALAAPXVRFLTPISHPNIDQLRRICADILNTKRSPA

SEQ ID NO: 236821 - protein, 85 aa, Glycine max
  Clone ID: PAT_MRT3847_55876C.1.pep
GCPPRGNRGWRPRKGRLRQDSRPGARAWGHPRSGPGQGLGIEMGPPAPEGFLCVLLNIVLGQFNGESAKGVKLWPRIGVYDYVLH

SEQ ID NO: 236822 - protein, 70 aa, Glycine max
  Clone ID: PAT_MRT3847_55877C.1.pep
EAVKYLLIAKYTCRQAETMSNENITSCERNRLLSNYHETVLQVIQCLVPLSIRSIKLESISGHIIDSICA

SEQ ID NO: 236823 - protein, 121 aa, Glycine max
  Clone ID: PAT_MRT3847_55878C.1.pep
ERLLLREINQSLHDPPPFFNSLTLQILQDSGARKIATTSGKEIQLKEEVSYDLQKLATEGLVLDSIIQLEGADIEKKKHVHKDDDEDEDDRVKKGMGFDKEEDEEEDKDEHKKMVGKDVHG

SEQ ID NO: 236824 - protein, 81 aa, Glycine max
  Clone ID: PAT_MRT3847_55879C.1.pep
NQSSLTDILICVCNSSPDLHATLLTAANYKPYPCSYFSAYHNSTLRKTTQHLFVCSTHFTYQAHQSEIHQKPVHRGFADAW

SEQ ID NO: 236825 - protein, 49 aa, Glycine max
  Clone ID: PAT_MRT3847_5587C.1.pep
SGHVMPVSKYKRFGLVRRVIRTRMRVFLLLMIGNGVAIRIKFGLYRFFF

SEQ ID NO: 236826 - protein, 70 aa, Glycine max
  unsure (1)..(70): unsure at all Xaa locations
  Clone ID: PAT_MRT3847_55880C.1.pep
NLIKYFKIQGIEARFPLLLLGXMFSLASVSVPIGIAYWEKENPKHNKCSQSCKIQRDSYKKQACHAPCKL

SEQ ID NO: 236827 - protein, 152 aa, Glycine max
  Clone ID: PAT_MRT3847_55881C.1.pep
TKSQFAIVVFEFLSFVVGNRSSSSSSSSWIHLRSVLFVVTSSSPASCSSSDRGRLKSPWSRRKRKHVLTPQQWKSVFTQDGRIRDGGIKFLKRVRSGRVDPSIRAEVWPFLLGVYDLDSTKEERDAIRTHNSNEYEKLRRQCRQLLKHSNGN

SEQ ID NO: 236828 - protein, 286 aa, Glycine max
  Clone ID: PAT_MRT3847_55882C.1.pep
LGNLSQLFHLGLGENKLEGNIPSSIGNCQMLQYLYLRQNNLRGTIPLEIFNLSSLTQVLDLSQNSLSGSIPKEVNNLKNINLLDVSENHLSGEIPGTIRECTMLEYLYLQGNSLQGIIPSSLASLKSLQRLDLSRNRLSGSIPNVLQNMSFLEYLNVSFNMLDGEVPTEGVFQNASGLVVTGNSKLCGGISKLHLPPCPVKGKKQTCLPLSTSCTNPATLLRRRAPPPPPDLIARDPFASKHMHPCTFNDAAVPPAPPRAFSFSFSSISYVSMFFFFVSIMHCVHV

SEQ ID NO: 236829 - protein, 539 aa, Glycine max
  unsure (1)..(539): unsure at all Xaa locations
  Clone ID: PAT_MRT3847_55883C.1.pep
MNPLRRSHNSQSSSSNSSPSSSVAISSSSSSSSWIHLRSVLFVVTSSSPASCSLLKSPWSQRKRKHVLTPQQWKSMFTEDGRICDGGIKFLXKRVRSGGVDPRISADVWPFLLGVYDLDSTKDEKXDVKRTQNRKQYEKLRRQCQKLLKQSNERNKLNEVGEISYEEDGGSLSHDSGSASSDDAASARESLSCEDRSPDVEYSDNPSSALLEGDDVPNANNTDVSTLDTDFSDSDSSEGPEVIQTVPSDDLLREVSSPFKAKFPSKLPTSEDFSTWQRIIRLDAVRANAEWKAFYPCQAAASDRKECRENSAQWLKXFRRLRADVRLHAVRLYGLGEEKRIKDCYXGLILESNRRNSPXMPATSKAQEAFWCFVGFMKKARQNFKLDEVGIRRQLDIVXKIIKFKDAHLFRHLEKLQAEDCFFVYRMVVVMFRRELTFEQTLCLWEVMWADQAAIRAGIGKSAWSRIRQRAPPTEDLLLYAISASVLQKRKLIIEKYSSMDEIIKECNSMSGHLDVWKLLDDAHNLVVTLHDKIETSLS

SEQ ID NO: 236830 - protein, 53 aa, Glycine max
  Clone ID: PAT_MRT3847_55884C.1.pep
GRGNKPKYMGIFNILTKKKKKYFPGGNGGWVILIHPKEIKNLFQGGFGGVKNT

SEQ ID NO: 236831 - protein, 67 aa, Glycine max
  Clone ID: PAT_MRT3847_55885C.1.pep
AAQHGYGYAPQAFYGFLATSGLWVRGTTWVRVRSSSSCCCISSKTGEEQFGNWIGCSDAFMFLFWTF

SEQ ID NO: 236832 - protein, 42 aa, Glycine max
  Clone ID: PAT_MRT3847_55886C.1.pep
LCLNDILHIVYYSGLRGAPAPLARAEGLYLQCMLCWFLFIHT

SEQ ID NO: 236833 - protein, 92 aa, Glycine max
  unsure (1)..(92): unsure at all Xaa locations
  Clone ID: PAT_MRT3847_55887C.1.pep
VSCRERRGRLSFFSVRLFVMGGVVCFLLMYHPFDSSEGVVELVLRCILTFLREGAGIDVAIGLVYLCERGLVFVTVRLVXFVGGEKLKMGGG

SEQ ID NO: 236834 - protein, 141 aa, Glycine max
  unsure (1)..(141): unsure at all Xaa locations
  Clone ID: PAT_MRT3847_55888C.1.pep
SELAMVVSRNSTKDLVEVIKELDDYFLKAADAGSHVSLLLEVPNSGFSDNSKACKPASLACNNFWRVXVVFVVGKVHSYGWSLSPSLWAWGSSPKLNGGAFGVNGVGSVGHCSTVERLYAWEKKLYQEVKVCRFFAELSFL

SEQ ID NO: 236835 - protein, 49 aa, Glycine max
  unsure (1)..(49): unsure at all Xaa locations
  Clone ID: PAT_MRT3847_55889C.1.pep
SCXXHXCSXXTHXXXEYPQCLPSSTILGXXXXXLCGRQXAREECTELVT

SEQ ID NO: 236836 - protein, 49 aa, Glycine max
  Clone ID: PAT_MRT3847_5588C.1.pep
PVVFLIHIIYIYIYIYIYIYIYIYIYIYIYFNLTIMISVLFKFILSFNL

SEQ ID NO: 236837 - protein, 34 aa, Glycine max
  Clone ID: PAT_MRT3847_55890C.1.pep
YYDEGAHQCHQSRVPQHHCRTLPQEPSSMCIYLS

SEQ ID NO: 236838 - protein, 261 aa, Glycine max
  Clone ID: PAT_MRT3847_55891C.1.pep
MEETGTQAQSKDNKDEEGKFQDDSEELVVETETETEVQCEENKEEGKVRDSEEHVEEMETETGAEAQPEEKKDEGKVRDSEKLVEETQTETEGQSEEKKDEEGKVAVMSSSVSETYDSDSVAVSMKKRKDKKKKVTSARKSLSLQQEHKNKHYKTRGKVANEEEVTSFKTTSLGQQPQRMKQSSLAAKRKRLLWTAEEEKVLKEGVSKFSTENQNIPWRKILEFGCRVFDETRTPVDLKDKWKNIISKKSRSTDCSYTFDL

SEQ ID NO: 236839 - protein, 105 aa, Glycine max
  Clone ID: PAT_MRT3847_55892C.1.pep
SKNIKVRKHGPPSSFSPECWSFQNSCTTQGSILWWEFLSWVKEVRTIHCRPMDFLQHSPTAGSSATARRWKLWWLAATNEIWKLGNDIIFHSQSFDISKLADSIL

SEQ ID NO: 236840 - protein, 69 aa, Glycine max
  Clone ID: PAT_MRT3847_55893C.1.pep
ISTFQRSNGCHNHIMGLLKIVGSEGLSLIKTRTFNFKPFPGSNPTSRRVEPPLSRAIHLLFFLGLNWLL

SEQ ID NO: 236841 - protein, 83 aa, Glycine max
  Clone ID: PAT_MRT3847_55894C.1.pep
MSFTITACSEKPMKIGSKLYDDGRRKRTVAWITVSAHIVTAVIWLRMLVLALAICHMGWVAGPGGHFVFYVITDLTYTLLDDC

SEQ ID NO: 236842 - protein, 42 aa, Glycine max
  Clone ID: PAT_MRT3847_55895C.1.pep
YLGMHKIYLVNHKYSWKYLYKFIENKNNVIFIIVILIIYHIK

SEQ ID NO: 236843 - protein, 68 aa, Glycine max
  Clone ID: PAT_MRT3847_55896C.1.pep
EGSEVTMDEEADLLLVFTLNYLFKMLIFIVLSCGCVMTPLVFGKYSREISMYFERNVNYTLIYIYFIG

SEQ ID NO: 236844 - protein, 68 aa, Glycine max
  Clone ID: PAT_MRT3847_55897C.1.pep
TGAKRPPERRHSAQSEPHPLPYQARTYFHHHHTCVALTLPILITHPPRNLVTRRLFHHHPCSFRGHGS

SEQ ID NO: 236845 - protein, 85 aa, Glycine max
  Clone ID: PAT_MRT3847_55898C.1.pep
LERLDWGFFPPLFTIWGAFFFFVAEVLFPLFWRPRGALFFSRRIPHVDQTGLFVFRETQTCVPSYVVQDRNLVIREIIYCSHIKK

SEQ ID NO: 236846 - protein, 54 aa, Glycine max
  Clone ID: PAT_MRT3847_55899C.1.pep
NDEGPRFLCPTLNYFAVFFIRCITLLERPQSFFTDPLLGYTGSSSSHGTTTALI

SEQ ID NO: 236847 - protein, 147 aa, Glycine max
  Clone ID: PAT_MRT3847_5589C.1.pep
MALSSAFHERLHHMDRARMQRLSLLQAEKELQGNKSRVLASKLANIRATEQRCSWLDQKIASQNFKLLALKSQIENLEAKHESLSLELRSMQNEVEEIEELRVKRDYYYEAKRMEMKEFKEIAERFVVKCKVEVQSLRNRVNEVTMS

SEQ ID NO: 236848 - protein, 89 aa, Glycine max
  Clone ID: PAT_MRT3847_558C.1.pep
ALSNLMSNMAKDVPRFLFINLSHMLSYPNLSNLLIRYVQFSTKHISEEMLDVRESGPILGPVKNQIPHKCLDIGIPDIGIWYSKFASQN

SEQ ID NO: 236849 - protein, 110 aa, Glycine max
  unsure (1)..(110): unsure at all Xaa locations
  Clone ID: PAT_MRT3847_55900C.1.pep
GKEWASASPTTRETQDIDEAGIQEDANKRIDWTKTAQRXGTKTRLWKGDSKLHHEAVCDTLTXEKAPGGESLVKEIVKAGKDAITEDVGYGEPVTYTDEEGGQILGEGKL

SEQ ID NO: 236850 - protein, 41 aa, Glycine max
  Clone ID: PAT_MRT3847_55901C.1.pep
ERGNTCKCGNSCEGCNTYPYLNYTESTTTKTSVMAAAPHYA

SEQ ID NO: 236851 - protein, 77 aa, Glycine max
  Clone ID: PAT_MRT3847_55902C.1.pep
FLGLNASKTSTRFYSVFGLIRVYLQPSTRCVCAPVGSVTRAAGCLSHTDMAYAFDSSCWVWVVWLGVLSVSLGFRNV

SEQ ID NO: 236852 - protein, 82 aa, Glycine max
  unsure (1)..(82): unsure at all Xaa locations
  Clone ID: PAT_MRT3847_55903C.1.pep
HLKTLNAPXHCMLDKLCDTFAHKPFSEPHKSNECLPFILIFKKPVKVALTYRDNLEISMLPEVTYDVKILTNIDSPSSIHGL

SEQ ID NO: 236853 - protein, 242 aa, Glycine max
  unsure (1)..(242): unsure at all Xaa locations
  Clone ID: PAT_MRT3847_55904C.1.pep
KEYAALQNQLQLLKQKQVALIDTLRQLETEKVDLENTVVDESQRQLNDQEASSRLRQEKSSASASESEDDNERNDAAEEETDEDDSAFFDTRDFLSSSNSFKSNGSDIRASSFSSDDGLYTVESEEDVDPSIKSVGGNYPSVKRRKKLPDPVEKEKGVSLWSMIKDNIGKDLTKVCLPVYFNEPLSSLQKCCEEMEYSYLIDRAYEWGKXRGNSLMRILNVAGFAISAYASTEGRICKPLTH

SEQ ID NO: 236854 - protein, 45 aa, Glycine max
  Clone ID: PAT_MRT3847_55905C.1.pep
VMSTCMYLEFQNLGRIAQLHHCVCPFDACQTLPNSFLPHVCNQQL

SEQ ID NO: 236855 - protein, 57 aa, Glycine max
  Clone ID: PAT_MRT3847_55906C.1.pep
FVFFFFFFFFFFFFFFLGGKTLFSFEYLVPLIKTPPPFFFFPPNKKSKFFFFPLKLF

SEQ ID NO: 236856 - protein, 51 aa, Glycine max
  Clone ID: PAT_MRT3847_55907C.1.pep
CNVMYVTVYLGVEMVLHKRHQLCISYICTQEHGWPRKIVLREVFCASCPCV

SEQ ID NO: 236857 - protein, 211 aa, Glycine max
  Clone ID: PAT_MRT3847_55908C.1.pep
AFRASALSTRAPVNKRFFTPSAYNMTIKSYFDVSWEGPEVQVDKSGNVTSQGAPKTQSGRINFELFDDVVPKTVENFRALSTGEKGFGYAGSKFHRVIPDFMLQGGDFTRGNGTGGKSIYGEKFADENFKLRHQKPFLLSMANAGPNTNGSQFFITTTVTSWLDGKHVVFGQVPDGDVESYKVVRAIEAAGSQSGQIKYKNVPTITNAGTE

SEQ ID NO: 236858 - protein, 142 aa, Glycine max
  unsure (1)..(142): unsure at all Xaa locations
  Clone ID: PAT_MRT3847_55909C.1.pep
XGGLIGLGXTMDPPLPXXXXLVGQVLGKVGSLPXVFVELEVNFFLVXRFFGVRTKGFXNQGKVSXLAKGKMLMLNLGSISPGVKVISFKNSLAKLQLTSPGGPNKGXKLPLVDVFXKHWGFIGWGQIQTGILFDVPPPPHLS

SEQ ID NO: 236859 - protein, 53 aa, Glycine max
  unsure (1)..(53): unsure at all Xaa locations
  Clone ID: PAT_MRT3847_5590C.1.pep
IEDXEVVAIHVGIVAGVVIAIVRTGAGTLPVGSVDDDELVQIHNADVIVADAW

SEQ ID NO: 236860 - protein, 155 aa, Glycine max
  unsure (1)..(155): unsure at all Xaa locations
  Clone ID: PAT_MRT3847_55910C.1.pep
MFVILNIVGKYFLVDAGYTNGPGFLAPYXGTRYHLNEWIGNTPQSYEELFNLRHASARNAIERSFRILKKRWSILRTPSFFYIKTQIRIINAFFVLHNFIRDEQQTDQLLEVQDLEFLSVVDEELVHQSREEALLKSSRSHTTIQATEEWTRLIH

SEQ ID NO: 236861 - protein, 87 aa, Glycine max
  Clone ID: PAT_MRT3847_55911C.1.pep
IIKDKKLSSAPPAARAAWDQIKNWVFGTPQGPWGSKGENFNGSPNVPAGVINSFPVPWANGEWPKVQGLPLNEFSKKKLDFPPKKLF

SEQ ID NO: 236862 - protein, 70 aa, Glycine max
  unsure (1)..(70): unsure at all Xaa locations
  Clone ID: PAT_MRT3847_55912C.1.pep
RRGRQNHYKDSLRTTWGAKGCWLLLFLVGXTAGRMELSFFQSDQSSSYDDDEYSNHAGSLMSHANASHAL

SEQ ID NO: 236863 - protein, 128 aa, Glycine max
  unsure (1)..(128): unsure at all Xaa locations
  Clone ID: PAT_MRT3847_55913C.1.pep
XXKIVLFFYXXQRKXXGGRVKIEKRPVTPLPTRPKIKKKKIIGSSGPYQKQVKGTELMPTTRPSTIFEKEAHPLWRSKPLGDFKHPFSKKRAPTIQTGNKTNNQNFPPEGQKKKHPGGNQLTYEKQTS

SEQ ID NO: 236864 - protein, 100 aa, Glycine max
  Clone ID: PAT_MRT3847_55914C.1.pep
TWTWTSPVTAQSPTQSPLLMMTMVATGTIGPPSSTGTPSPAPTTTSTTSSTPSCATAPPRRRTTSAPTITPPATPPSPPSRRRRTTTPTKKPAPSTIPRA

SEQ ID NO: 236865 - protein, 85 aa, Glycine max
  Clone ID: PAT_MRT3847_55915C.1.pep
SERVSSYSHSLLGQMEQSESGKMYQWGASFVCLSDSISNCIRQGGLQDMDKVVFSRRILYNLVIRLLFQVALIAIRTQKPISYLT

SEQ ID NO: 236866 - protein, 114 aa, Glycine max
  Clone ID: PAT_MRT3847_55916C.1.pep
GKLGKPKTKRLTRPTKKGGASLGKNKNGGKTPPFLKRGEKNGPKKKPAPKKKKPGKKFTGNKNKFQGRPGKKKGKPPEIGAKKALGKATIPETKQGIKKKIGPNWGGIFGPLGP

SEQ ID NO: 236867 - protein, 96 aa, Glycine max
  Clone ID: PAT_MRT3847_55917C.1.pep
VYDCTALFCLMQAGALKPWHFHIYVASIGITLSVDDSTVNEGILLTGLLPVFVLVKGKLLALISSFGWPLSFQGQMLKGNFFNFTLSFFFTYRKIN

SEQ ID NO: 236868 - protein, 324 aa, Glycine max
  Clone ID: PAT_MRT3847_55918C.1.pep
SSWPFICFASTGSGFFQPIPTTCISEDCRSGGSPVVGAESAGDSGWGRAVDVAAAGFPDRPTRPAHGTFVANERLTKDLPVELEVGQSLRFAASTRAYILRKNDAALFPRPPPPTEINFPPPPDPSDEEAVVAYNTLLNRYGINKADLVSKSGESGSSVSGKNKDYQTERPSKRIRKTRVSFRDQVGGELVEVVGISDGADVETEPGPVGVKEGSLVGKYESLVQITVIPKGKEQSSVKEADSSPKGVTDKLQEVLKKIKTPVKTGIYDDLYGESLSVKVGSSWAYSPALGTGERAPDKEDGAGSGKSESNPNAVDGDDDDLFG

SEQ ID NO: 236869 - protein, 57 aa, Glycine max
  Clone ID: PAT_MRT3847_55919C.1.pep
LIQLSLSCLVPTGLSITNQLPTTENRLPAYDQRGKIHFRGMDTPYTLIPPPPPPKSL

SEQ ID NO: 236870 - protein, 78 aa, Glycine max
  Clone ID: PAT_MRT3847_5591C.1.pep
YLLCDSVQTQLALLILSSCVESSFVSHLKTKCFGGNKTPGSYSQSFTSSGGCATKRNLTYSKSTFTRNLAQVISTLPG

SEQ ID NO: 236871 - protein, 420 aa, Glycine max
  Clone ID: PAT_MRT3847_55920C.1.pep
MYGRASSGLDRFKKAQSLEPFSVSVNSSSRNGAQPSTKVVDPSSALPPQAQASSNQPQQHAFQKTVGVEAAPLLGQNQQATQVGGGQSTWQPPDWAIEPRSGVFYLEVLKDGQVLDQINLDRRRNIFGRQIQTCDFVLDHQSVSRQHAAVIPHKNGSIYVIDLGSAHGTFVAIERLTKDSPVELEVGQSLRFAASTRAYILRKNDAALFPRPPPPTEINFPPPPDPSDEEAVVAYNTLLNRYGINKADLVSKPGESGSSVSGKNKDYQSERPAKRIRKTRVAFRDQVGGELVEVVGISDGADVETEPGPVGVKEGSLVGKYESLVQITVIPKGKEQSSVKEADSSPKGVTDKLQEVLKKIKTPVKTGIYDDLYGESLSVKVGSSWAYSPALGTGERAPDKEDGAGSGKSPVDGDDDDLFG

SEQ ID NO: 236872 - protein, 240 aa, Glycine max
  Clone ID: PAT_MRT3847_55921C.1.pep
PTRPPTRPPVTNKTKSNGAVCRNQRRFPQRQSHSSFRHRPIRRRLQRGPKQPHRPRPPFSLRSQKPFHHRRRSPKLRRRQPWLIQMVETELEKRKQQGTYKGGFRGQSHFFGYEGRCGLPTNFDSTYCYALGYGAAALLQSGKTGLISSVGNLCAPVEEWTVGGTALTSLMDVERRHGKFKPVIKKAMVELEGAPFKKFASLRDEWALKNCYISPGPIQFTGPGSDAINHTLLLELGAQA

SEQ ID NO: 236873 - protein, 49 aa, Glycine max
  Clone ID: PAT_MRT3847_55922C.1.pep
IQRGVDFISVWVMNQHESSLLLRLPSALTLLYREMSAYCAPRLITCSCT

SEQ ID NO: 236874 - protein, 159 aa, Glycine max
  Clone ID: PAT_MRT3847_55923C.1.pep
MAALQYLESLRNAHPELSDWYNSLADLYQNKLWHQLTLKLEQFVALAVFQAGDALIQLYHNFITDFETKINLLKLAHFAVIVSRQYAEKEAAVGYLGGVIQKLQDTREQRIEEPILYIKMQIAILKLEQGDQKECKKLLEDGKSTLDSMTDIDPSVYAS

SEQ ID NO: 236875 - protein, 391 aa, Glycine max
  unsure (1)..(391): unsure at all Xaa locations
  Clone ID: PAT_MRT3847_55924C.1.pep
MAALQYLESLRNSHPELSDWYNSLADLYQKKLWHQLTLKLEQFVALAVFQAGDALIQLYHNFITDFETKINLLKLAHFAVIVSRQYSEKEAAVGYLGGVIQKLQDTREQRIEEPILYIKMQIAIFKLEQGDQKECKKLLEDGKSTLDSMTDIDPSVYASYYWVSSQFHKTCQEFAEFYKSALLYLAYTSVESLSDSFKLDLAFRFVPSLTLLGDNIYNFLESYLPIPIIKSPYGEKKEELLYYILQAFQFXGTIVRYQXYCRVHNAALRAQPXALVQNEQKLLEKINILCLMEIIFSRPSEDRTIPLSVIAERTKLSIENVEHLLMKSLSVHLIEGIIDQVEGTVHVSWVQPRVLGIQQIKSLRDRLDSWTGKVHTALLSIEAETPDLIGS

SEQ ID NO: 236876 - protein, 393 aa, Glycine max
  Clone ID: PAT_MRT3847_55925C.1.pep
NWQFKQAEETAKKLDLDGLVVIGGDDSNTNACLLAEHFRSKNMKTRVIGCPKTIDGDLKCKEVPTSFGFDTACKIYAEMIGNVMIDARSTGKYYHFVRLMGRAASHITLECALQTHPNITIIGEEVAAKKMTLKDVTDYIVNIISKRAEDNYNYGVILIPEGLIDFIPEVQHLIAELNEILAHDTVDEGGLWKKKLTDQSLKLFEFLPKAIQEQLMLERDPHGNVQVAKIETEKMLIQMVETELEKRKQQGTYKGGFKGQSHFFGYEGRCGLPTNFDSTYCYALGYGAAALLQSGKTGLISSVGNLCAPVEEWTVGGTALTSLMDVERRHGKFKPVIKKAMVELEGAPFKKFASLRDEWALKNCYISPGPIQFSGPGSEVINHTLLLELEAQA

SEQ ID NO: 236877 - protein, 50 aa, Glycine max
  unsure (1)..(50): unsure at all Xaa locations
  Clone ID: PAT_MRT3847_55926C.1.pep
NIHSLQWCACKLFCVLITLICKWRISYRENTFNPIMSLYASXFGXXXXQT

SEQ ID NO: 236878 - protein, 54 aa, Glycine max
  Clone ID: PAT_MRT3847_55927C.1.pep
LHKKIVLNITLKIHYKLWQKDIKNTFEKKIIFNSLTNVYLPKVYVKKFIGFTFQ

SEQ ID NO: 236879 - protein, 52 aa, Glycine max
  Clone ID: PAT_MRT3847_55928C.1.pep
LNSFTAPIHFTLILTNIIKIQHAIKALCTTPHHQTHKPKRYRNVTALLTISL

SEQ ID NO: 236880 - protein, 58 aa, Glycine max
  unsure (1)..(58): unsure at all Xaa locations
  Clone ID: PAT_MRT3847_55929C.1.pep
DCELWKPACTKAMTMSFKPNXCSDAWSLEFLKRTGTHXDIICXTGWTATPMQDVQATT

SEQ ID NO: 236881 - protein, 188 aa, Glycine max
  Clone ID: PAT_MRT3847_5592C.1.pep
IDHDARSGSRGPWWGWDDVKNGLERLWLFGDVAISGRRGFERRYALASDVLPASALETTVPRAEAITELTRRAAVAYGIATASDLADYWRIRDRPAVLAGIRQLVDAGELIPVEVEGWQIAGRPARAWLHRDAGRPRRVDAAALLTPFDPVVWFRDRAERLFDFDYRIEIYTPAPRRRFGYYTLPVLV

SEQ ID NO: 236882 - protein, 64 aa, Glycine max
  Clone ID: PAT_MRT3847_55930C.1.pep
LVELHVMPSFVLAMTTIANFAKPSILGHPPSPAPGGVQLTEHFSLLHWGGGGSPFVLHDCYCVS

SEQ ID NO: 236883 - protein, 378 aa, Glycine max
  Clone ID: PAT_MRT3847_55931C.1.pep
MAAAGPENVPPFIAAQLSHLLSHFGLTVKVEQMWSSDKYNSTPLDRFTLLIPYCLDFIKWDVIYDAESPNTAPDVIFSPEDDDFHPFHMFPSSSEPANNCLSDWNYKDPTRLLTLIQYLRDQYVLYQRKRVGEVDDDRLTFEISTILSREGIEMHMSSGAEKSEEVKFAVPLLDMNINKMVACCPWRYSQRIYLQVVYPVGRKYMSVPSAPRLKLVSSPELKAVFSIDDVKLPPWLDGMCLAEYLPNLEEYLGKQVLEAVSLIEVRRHFIEALSSPLGRPVEADAVFCRKATFLAASGVFSFLVHLLIPTQFPKQQPAIMLQSSQHFNSQMAPMKSRVMSDYPWSPRWEPSMMAERICDFLADEALNFKRQCSEGQVQ

SEQ ID NO: 236884 - protein, 58 aa, Glycine max
  Clone ID: PAT_MRT3847_55932C.1.pep
QLSSLPGLRQPAHYKILLQIGSRTGRERSVAQVRMYSFTKCNDSSCVTKNALLISTVN

SEQ ID NO: 236885 - protein, 71 aa, Glycine max
  Clone ID: PAT_MRT3847_55933C.1.pep
FETAFRYHAQGSALGTPVIDHGAIVAADLLNKTFVMGSLRPAPIRHLACEFLAKPSFTKGIRSLVSTNKLL

SEQ ID NO: 236886 - protein, 91 aa, Glycine max
  unsure (1)..(91): unsure at all Xaa locations
  Clone ID: PAT_MRT3847_55934C.1.pep
XXFFXHERXXRXXXXXXFXXLLXXDSXXLXLHXXYPXXIITSXSRXCLACMXXFXMXGSXXPTLGQIHEXQGRXPXXVXVIEXXVRRXSIV

SEQ ID NO: 236887 - protein, 67 aa, Glycine max
  Clone ID: PAT_MRT3847_55935C.1.pep
LEDKCYIHSIFFLSTLPFYFNLNFLLPLIFRKVIFKMGGEFIQVQKVIFGMRIWREIGGERAGAGRG

SEQ ID NO: 236888 - protein, 90 aa, Glycine max
  Clone ID: PAT_MRT3847_55936C.1.pep
SSPACKPDKSLCHEAVFKIDILIVQSQVAMHRYNVATLEDAILDGVTRILSKCSSFIDRTSIITLDSSRLSVRQRCWSRTQPVRVDLCFA

SEQ ID NO: 236889 - protein, 44 aa, Glycine max
  Clone ID: PAT_MRT3847_55937C.1.pep
TRFQSLQYSLTFQLPSRDMDYTPAKYPFIIHTLCIVCFYNILIF

SEQ ID NO: 236890 - protein, 72 aa, Glycine max
  Clone ID: PAT_MRT3847_55938C.1.pep
KNCCFFTGGACGYGNLYSQGYGTNTAALSTALFNNGMSCGSCYEMKCDTDPKWCLPGSIIVTATNFCPPNFA

SEQ ID NO: 236891 - protein, 285 aa, Glycine max
  unsure (1)..(285): unsure at all Xaa locations
  Clone ID: PAT_MRT3847_55939C.1.pep
MEQEHPNLESFLSWAAQLGISDSTTRTNQPQHSLSSCLGSSLSVSHFPHSGGRGLGAVRDLRRGEIVLRVPKSALMTRETVMEDKKLCDAVNRHSSLSSAQILIVCLLYEMGKGKTSRWHPYLMHLPHTYDVLAMFGEFEKHALQVQFILEIXVNLVRWMRQCGSQKKPCLKPVDEAMWVTEKAMLKAKSEWKEAHSLMQDLMFKPQFFTFKAWVWAAATISSRTLHIPWDEAGCLCPVGDLFNYDAPGIEPSGIEDLDRLLSNTSIPDTIVLNGDKNIMVDAEQ

SEQ ID NO: 236892 - protein, 178 aa, Glycine max
  unsure (1)..(178): unsure at all Xaa locations
  Clone ID: PAT_MRT3847_5593C.1.pep
MMEMPARRSNYSLLSQIPDDQFSASAAPSSSGDGKSARAGKSDRAAFDWDLVADHRAANRIGNLYSSIGLQRQSSGSSYGESSLSGGGDFYAPTLSTAAVSDVDAFGYLHDERSKFSEVGAGEDXGSSSGKSWAQQTEESYQLQLALALRLSLHATCADDPNFLDPXVPDDAAPRLSS

SEQ ID NO: 236893 - protein, 60 aa, Glycine max
  unsure (1)..(60): unsure at all Xaa locations
  Clone ID: PAT_MRT3847_55940C.1.pep
XFIFFILXXQXIXHNNYHXKYAHXIHXVIKRKPTIXANSKIXIVIXGWHSVQXKQGVLKG

SEQ ID NO: 236894 - protein, 72 aa, Glycine max
  Clone ID: PAT_MRT3847_55941C.1.pep
LILGGFLRQTHPYTFVYSPRANNRHSPRVSVTTKSLLPSNYLAAPNLPFNLIMINFKTHTRFTTHLLLFEVV

SEQ ID NO: 236895 - protein, 145 aa, Glycine max
  Clone ID: PAT_MRT3847_55942C.1.pep
LRMWNFASSLIAGSVGLKNDSPKPTHSASEFSDDETSMVSREERLECPICWESFNIVENVPYVLWCGHTLCKNCILGLQWAVVNFPTLPIRLPLFISCPWCNLLSLRLVYQGNLKFPHKNYFLLWMGENMNGDRVKSHSTVCGDH

SEQ ID NO: 236896 - protein, 152 aa, Glycine max
  Clone ID: PAT_MRT3847_55943C.1.pep
FRMWNFASSLIAGSVGLKNDSAKPTHPASECSDDETSMVTREERLECPICWESFNIVENVPYVLWCGHTLCKNCILGLQWAVVKFPTLPIQLPLFISCPWCNLLSLRLVYRGNLKFPRKNYFLLWMVESMNGDRVKSHSTVCGGSSTSLANN

SEQ ID NO: 236897 - protein, 83 aa, Glycine max
  Clone ID: PAT_MRT3847_55944C.1.pep
PGVGKNHPCIKGKTPPPGGGAQTFRVPPGSGGQPPPKGTSVQSQLGRDDHPPPYHPLLREATPERRRNPPRPGGCHKREPATP

SEQ ID NO: 236898 - protein, 50 aa, Glycine max
  Clone ID: PAT_MRT3847_55945C.1.pep
RCSARFARGTARRDSASGELRWLRASQMRLTCMAPLVTSWHRRERNHAHM

SEQ ID NO: 236899 - protein, 60 aa, Glycine max
  unsure (1)..(60): unsure at all Xaa locations
  Clone ID: PAT_MRT3847_55946C.1.pep
KARRKLFLLSLNSASNRFTTLHVLRQKVAPHDSREQKKXNISLYLHFKHACIQYESSMIG

SEQ ID NO: 236900 - protein, 66 aa, Glycine max
  Clone ID: PAT_MRT3847_55947C.1.pep
STSSHYLRHMIQLEQGWASTMTSSINSLPTAHSQIYSISHELPCDQNICLNALPHISSTKYYVSIG

SEQ ID NO: 236901 - protein, 81 aa, Glycine max
  unsure (1)..(81): unsure at all Xaa locations
  Clone ID: PAT_MRT3847_55948C.1.pep
IPACRGAAIXRRPXRCXRRIKXXPYPXSRFXRGVPDXKIRIHDVCMKKKGXDEFPVCVHLVTXXXENVSXEALEAXRIVLQ

SEQ ID NO: 236902 - protein, 90 aa, Glycine max
  unsure (1)..(90): unsure at all Xaa locations
  Clone ID: PAT_MRT3847_55949C.1.pep
PLPVXAPFLPLXXXPXGFLXSXXXGPVRXFLVGFRAXXXXXXPXFXXXXSSAGAFXGPPRSFXXXXFXXQRSQFSPPPGRKKLINHIKTL

SEQ ID NO: 236903 - protein, 45 aa, Glycine max
  Clone ID: PAT_MRT3847_5594C.1.pep
IRAYDQSIELETCKNRIKHGSSKLSEKSNHKNTNRKSRDRAIEIE

SEQ ID NO: 236904 - protein, 273 aa, Glycine max
  unsure (1)..(273): unsure at all Xaa locations
  Clone ID: PAT_MRT3847_55950C.1.pep
MGHEHSKLSEGKGSRRARFKERLRLHFRRRRSGNGSSDHKLLDADNFAGIALLALLRAEMKFKDKWIACLSLGEQTFRTNTSDHTDKPLWNSEKKLLLEQNGAHVARISVFETNRMSSNTLVGYCEVDLLEFLTKDSDSDVEVFNLLDPSVPGKVVGNISISCTVEDPIETEKGFVRRILSIVDYNEDGMLSLSEFSDLIDAFGNQVATSKKEELFKAADKNGDXVVSMDELASLLTFHQEREPLLNCCPVCGEVLQISDQLNSMIHLTLLFD

SEQ ID NO: 236905 - protein, 96 aa, Glycine max
  Clone ID: PAT_MRT3847_55951C.1.pep
VSRSALLQHNAFLLNLNSYTLDIRYFSKIVSFLVFFGANFNELIREKPSNFPILLNSICNQEEKDRSCTTPKTPSYTVPVKLGYISPTLILHLQIN

SEQ ID NO: 236906 - protein, 41 aa, Glycine max
  Clone ID: PAT_MRT3847_55952C.1.pep
SLNMRLNCRQCNGISFRQLSIIWYSRLMLIQYIGVSQYLKT

SEQ ID NO: 236907 - protein, 56 aa, Glycine max
  Clone ID: PAT_MRT3847_55953C.1.pep
QTTLLWFFDGGFERQSGRLKFLSVWFTKHCLVKRIGNFGGCNYLRQKIVWGLAFFC

SEQ ID NO: 236908 - protein, 189 aa, Glycine max
  Clone ID: PAT_MRT3847_55954C.1.pep
MFGVVFPNRSFPMDISTFAQIDTFHWVLDMNTFVGEAYDQVRELCIFLLNGFTLPPEKALAVYIQSPGSPFVFCGAVTVARPSAVLTLAWPEPGAGGPLQLTADAQPLSAKIGVSVEDLASLPSLDMAAEKRIEGLAMKVGENLFNFMQSFCGVDGSKLVVPMDILERWFKKFQERARRDPEYLKGFAS

SEQ ID NO: 236909 - protein, 60 aa, Glycine max
  unsure (1)..(60): unsure at all Xaa locations
  Clone ID: PAT_MRT3847_55955C.1.pep
WGGVSYFQLLXAHPYKINLNFNYKTDHSTISLLLHTSHNIPPIITNTFSQSQTFSTYNPF

SEQ ID NO: 236910 - protein, 82 aa, Glycine max
  Clone ID: PAT_MRT3847_55956C.1.pep
SYIWWISFPGLLLDDATSFSFHLPLFLWCTYSPYLCTRNYAHYPFTLRSPSFNMTYSKLFAFSIAHCSTITVLPFVLVLTVL

SEQ ID NO: 236911 - protein, 49 aa, Glycine max
  Clone ID: PAT_MRT3847_55957C.1.pep
IITGGPSTIASLMMNMIDHGIIVINMIAAALMMSTTISYNTLDDTVNMT

SEQ ID NO: 236912 - protein, 46 aa, Glycine max
  Clone ID: PAT_MRT3847_55958C.1.pep
LSLKSSYIYIQSLTVSYTSYTKNYNLTQYITRYQISNKTHINNNNS

SEQ ID NO: 236913 - protein, 220 aa, Glycine max
  unsure (1)..(220): unsure at all Xaa locations
  Clone ID: PAT_MRT3847_55959C.1.pep
MRFHGNFIICRYLSRLRNQFNSNFEFPLPNFRHRAPFFLRSYSAEVPAQLSPELLNIMEQRLSAIEYRTSCLNNFLNQPEASPSEYARANKELRKLSGSVDLIKELRAKQKEIDGLXGTGGEEASLFAMDIFRMYEKYALKNGWKFEVVDIXQSDLKGYNEASAAIAGVGVFGKLKFESGIHRVQSLRILVTEKSGCINTNAVSVAILPQADEVIGNHPL

SEQ ID NO: 236914 - protein, 67 aa, Glycine max
  Clone ID: PAT_MRT3847_5595C.1.pep
YRLVIIKDIHIMHKFKIIGISVKSIIHNKLERLEQVIQVITDYLNGYKCRHANAVAYLAHNWKIRSV

SEQ ID NO: 236915 - protein, 52 aa, Glycine max
  Clone ID: PAT_MRT3847_55960C.1.pep
RRGIFQYSKYFRLQSEMSMMNFVEKCTPNQMFHDEPYGRRAHNHTHTKSKKS

SEQ ID NO: 236916 - protein, 114 aa, Glycine max
  Clone ID: PAT_MRT3847_55961C.1.pep
MSSSGYATSSALFFLFLAVFAAKVSFCFSTKVYVVYMGSKSGEHPDDILKENHQILASVHSGSIEEAQASHIYTYRHGFRGFAAKLSDEQASQISSMSRGSFLLLYFLCLFSTS

SEQ ID NO: 236917 - protein, 62 aa, Glycine max
  Clone ID: PAT_MRT3847_55962C.1.pep
FIHNKFGIFSYAVMTNFFMDELVFVPCSKYVRIGMINYDQDYLYECPCTHCSWAYMCLCSGH

SEQ ID NO: 236918 - protein, 215 aa, Glycine max
  Clone ID: PAT_MRT3847_55963C.1.pep
RDNIKAIIMDVMFGGPETVASGIEWAMAELMTSPADLRRVQRLEADVVGLVWRVEESDLEKLVYLKCAVKETLRLHPPIPLLLHETAEDAAVCGYHVPKGSRVMINAWAIGRDKSAWEDAEAFKPSRFLNPHVPDFKGSNFEFIPFGSGRRSCPGMQLGLYTLELAMAHLLHCFTWELPDGMKPSELDTSDVFGLTAPRASRLVAVPFKRVLCPL

SEQ ID NO: 236919 - protein, 58 aa, Glycine max
  unsure (1)..(58): unsure at all Xaa locations
  Clone ID: PAT_MRT3847_55964C.1.pep
LPXTXIPRNNDHWILLSXAXMXWVXXGXGGVXVADXXXKSRXXXEXVRKDYXNKGSAC

SEQ ID NO: 236920 - protein, 54 aa, Glycine max
  Clone ID: PAT_MRT3847_55965C.1.pep
KMVQAFWPTIKEGARDYNMNLSHSDHVFKYSTSGSIRPKPQHTCLGNRVIFFYH

SEQ ID NO: 236921 - protein, 27 aa, Glycine max
  Clone ID: PAT_MRT3847_55966C.1.pep
VFESEWKLEFMFYNGGTNWIYYEWWLC

SEQ ID NO: 236922 - protein, 99 aa, Glycine max
  Clone ID: PAT_MRT3847_55967C.1.pep
PYNIGFQKLPKAEFNFNNLIMTTSSIGSERKKRKLLHIEFNLIMFLIIFYKNLLVLYVILVNRSTINKKLVQNGFKTSSAINRNKTDLNLFYKKIIPFY

SEQ ID NO: 236923 - protein, 111 aa, Glycine max
  unsure (1)..(111): unsure at all Xaa locations
  Clone ID: PAT_MRT3847_55968C.1.pep
MMSRSYTNLLDLASGNFPAMGGRETRERKRMPRVMSVPGFLTEVDDDQAVSVSSDNPSTVTTDRMIIVANQLPLKGKAKEDQQGWSFSWNEDSLLLQLKDGLXDDMEVLYV

SEQ ID NO: 236924 - protein, 60 aa, Glycine max
  Clone ID: PAT_MRT3847_55969C.1.pep
LLTSCDPIAAVVTTPSLNSVQGMALGNSQPPTIDENLHSTNFIMYGLVTILKFFAYIILF

SEQ ID NO: 236925 - protein, 55 aa, Glycine max
  Clone ID: PAT_MRT3847_5596C.1.pep
KKGPNFHQRSVLVAKSKFVCIKSPSSEFLFNYFFLVGKKGRYRSRLLMKEGCFPS

SEQ ID NO: 236926 - protein, 36 aa, Glycine max
  Clone ID: PAT_MRT3847_55970C.1.pep
SIPPEHNVGVLNILITPGLKQPLAFICMNDFYKRLV

SEQ ID NO: 236927 - protein, 64 aa, Glycine max
  unsure (1)..(64): unsure at all Xaa locations
  Clone ID: PAT_MRT3847_55971C.1.pep
GYNIVGIFGDVFKNLLGRHIAEFNTFKLQNXCIPLRGSSPFQQYILPRYXHVMPCVHLGAPLSL

SEQ ID NO: 236928 - protein, 207 aa, Glycine max
  unsure (1)..(207): unsure at all Xaa locations
  Clone ID: PAT_MRT3847_55972C.1.pep
SAFGVPEPVMDSVNTTLSNLQQLRTHFNEFLSLSDPQTLSQMPPLQRAHSLFILAKVTSTLLALNLRCTGVHPDDHPIKSELDRVSLYEDKLERLLDLSKAPLRPSTTLNYQAATRFIEHSLXPDLTTEQRENMRNISRGERPKTNRLGQAGQKRKYQSSEKPSVQAAAKEFLQKAARELLGDNSGGIKGPLQVDILDNDDDELPLP

SEQ ID NO: 236929 - protein, 202 aa, Glycine max
  Clone ID: PAT_MRT3847_55973C.1.pep
MVEFGTRMGSIWTVLFCFASVFAIVSAERSIVKMEVPRFNVTSREPQQSFLTKALNFLWQSGESGYQHVWPDMEFGWEIVLGTFVGFCGAAFGSVGGVGGGGIFVPMLSLIIGFDPKSSTAISKCMIMGAAVSTVYYNLKLRHPTLNMPIIDYDLALLIQPMLMLGISIGVVFNVGFPDWVGTILLIGLFLGTSTKAFFKGV

SEQ ID NO: 236930 - protein, 164 aa, Glycine max
  Clone ID: PAT_MRT3847_55974C.1.pep
TGEFQSCIVIRDSDIIDEHVNVNVSVPREVESTDQTIEDTDRFSFSTATNSTVYLSCSDIDEDGTSLSPHKDKALFSPNTCQASNIGALQSQQATDNEEHHQRCLEGSPVPNSRNISVTHATMNRDVSGMEERMSSCCVFVPKKITEDSLLSVALWSSLIQSKH

SEQ ID NO: 236931 - protein, 71 aa, Glycine max
  Clone ID: PAT_MRT3847_55975C.1.pep
YHTRAAQSSFEHHPAEEVVDKVVKEAISKPWLPLPLGLKPPSMDSVLAELSKQGISGIPLGNKRSSTPKLR

SEQ ID NO: 236932 - protein, 73 aa, Glycine max
  Clone ID: PAT_MRT3847_55976C.1.pep
HIRCHSLAFKQNGYLWYPGYEALWLVNNPKRKKKKKKPFLVTNPLLGTPILDWPGVQTIFLKIYYQSGIFLKG

SEQ ID NO: 236933 - protein, 79 aa, Glycine max
  Clone ID: PAT_MRT3847_55977C.1.pep
GPKKFWKKKFRGPPRGRTGRPLKGKNYYGKKKQTRRGPKPQGPPPLKRPLVKTNKIGGKTHHGDKKEGVLKKQGGKPGP

SEQ ID NO: 236934 - protein, 35 aa, Glycine max
  Clone ID: PAT_MRT3847_55978C.1.pep
YIASPSKLIRCQKYDKLFPIDRSNKSLSLSQKIYI

SEQ ID NO: 236935 - protein, 33 aa, Glycine max
  Clone ID: PAT_MRT3847_55979C.1.pep
GCFRTVSLLILPPKTLGLPRQSQYELFILTDPV

SEQ ID NO: 236936 - protein, 69 aa, Glycine max
  unsure (1)..(69): unsure at all Xaa locations
  Clone ID: PAT_MRT3847_5597C.1.pep
XTPLFXYRDXRLLSEXSXXCXXXYNLSKKNIXTVXXXRCFTPYTQITXPYNQLEHXTVILRXQWDTLNX

SEQ ID NO: 236937 - protein, 61 aa, Glycine max
  unsure (1)..(61): unsure at all Xaa locations
  Clone ID: PAT_MRT3847_55980C.1.pep
RERFQKGLEPEKIFKEFLRDWVIRHRDPXRNKGLPDAPEDHVCELDRPNIFLFWPISKSKF

SEQ ID NO: 236938 - protein, 185 aa, Glycine max
  Clone ID: PAT_MRT3847_55981C.1.pep
MNGGESYGAIETQYIRRHHKHEPRENQCTSALVKHIRAPVHLVWSLVRRFDQPQKYKPFVSRCIMQGDLGIGSVREVNVKSGLPATTSTERLEQLDDEEHILGIRIVGGDHRLRNYSSIITVHPEVIDGRPGTMVIESFVVDVPDGNTSDETCYFVEALIKCNLSSLADVSERMAVQGRTNPINH

SEQ ID NO: 236939 - protein, 185 aa, Glycine max
  Clone ID: PAT_MRT3847_55982C.1.pep
MNGGESYGAIETQYIRRHHKHEPRENQCTSALVKHIRAPVHLVWSLVRRFDQPQKYKPFVSRCIMQGDLGIGSVREVNVKSGLPATTSTERLEQLDDEEHILGIRIVGGDHRLRNYSSIITVHPEVIDGRPSTMVIESFVVDVPDGNTRDETCYFVEALIRCNLSSLADVSERMAVQGRTDPINH

SEQ ID NO: 236940 - protein, 151 aa, Glycine max
  Clone ID: PAT_MRT3847_55983C.1.pep
MTQSRKPRKPNPQAREAQQNHPSSSFSSSGMKLIVPLQGVVQGRGGLLLGTLVPCALFYFLQLYLKRRRSNFSPPSPSEPTLPRTSSRSSLSTRGSISRVRVSKLATQISRPDESLYYVGLERVSRDPYDALENPNGIIQLGLSDTSCAWI

SEQ ID NO: 236941 - protein, 50 aa, Glycine max
  Clone ID: PAT_MRT3847_55984C.1.pep
MAKVNGSVSVALGKAGLVTQPFILLSAPVVIFSTKAFPSGIRAGLLEIMG

SEQ ID NO: 236942 - protein, 44 aa, Glycine max
  Clone ID: PAT_MRT3847_55985C.1.pep
LNERLLINHSSNFFIHQLIRYCSYTATLNTFVNKIVGNFSEARV

SEQ ID NO: 236943 - protein, 61 aa, Glycine max
  unsure (1)..(61): unsure at all Xaa locations
  Clone ID: PAT_MRT3847_55986C.1.pep
HNTLSNDRYVQVVGLTCIHPTNCFYNVXKQDEIILLTHKIKLLQSDQLLEADSSSLPGCTR

SEQ ID NO: 236944 - protein, 55 aa, Glycine max
  Clone ID: PAT_MRT3847_55987C.1.pep
TGSARSGRRNKWALKNVAHQLFQIPMQNPSQRFRFLGSIRVTVCSSSSVTSVMSI

SEQ ID NO: 236945 - protein, 74 aa, Glycine max
  Clone ID: PAT_MRT3847_55988C.1.pep
RRQLLSPLFRPVIILLIIRKGGPPAGAGQLFGGPPRRPCCYNKTPEWCCCKKTTEWCGCHPTTEGISFCLKKKK

SEQ ID NO: 236946 - protein, 54 aa, Glycine max
  Clone ID: PAT_MRT3847_55989C.1.pep
DRQRIFVYCGHMWMQYCAFTNVITQELTLMDDLRDGPLTLMLVPLDIDSELVIY

SEQ ID NO: 236947 - protein, 148 aa, Glycine max
  Clone ID: PAT_MRT3847_5598C.1.pep
MASTSSSSCSLASQFLPPPRKLSVIPFHSTNCTHLSFPAVVTPRQQPLLLFSSTSTCLAAAAASNSNNIWNSNNNNKPASSKEKEVEVEVDEELPWIQEKALDLVEFTGSVTQAIPGPRVGPTSLPWILAIPLTYAGLTFVIAFVKTI

SEQ ID NO: 236948 - protein, 114 aa, Glycine max
  Clone ID: PAT_MRT3847_55990C.1.pep
IFGRKTDGGPQFFPVGFGTVKTGPPINSGHFPPRISMGAPPRAFFLLLGTSSSRLGGAPLGESLENLFWGGVFPPPFWNSFFYKGALIWGNLRPVDPQPPPLPIQLMEKGFFPP

SEQ ID NO: 236949 - protein, 88 aa, Glycine max
  Clone ID: PAT_MRT3847_55991C.1.pep
WGVFIYKIFLLLISPQRGTPMGFIYFFQLNHIEDLQYMQSKHGAPVCLEKKEGAPLGGKRGRKKKISISQGGPNTEPFTGVIPRKKTK

SEQ ID NO: 236950 - protein, 82 aa, Glycine max
  Clone ID: PAT_MRT3847_55992C.1.pep
PRPATYAQQRPLLPAAYQLVLINYCQRPTLLRNSLTTTTNRHQVRVTLQHTSHTPTTPSGPTNPRPVAEHTHTHTHRHNGGD

SEQ ID NO: 236951 - protein, 326 aa, Glycine max
  unsure (1)..(326): unsure at all Xaa locations
  Clone ID: PAT_MRT3847_55993C.1.pep
MVHPIAEANEESPFGKLTPEEFYAHHSVSHGSEFVTNPRGLKLFTQWWTPLPPKTIIGTLAVVHGYTGESSWLLQLTAVHFAKAGFATCALDHQGHGFSDGLVAHIPDINPVVDDCITFFENFRSRFDPSLPSFLYAESLGGAIALLITLRRREMLWSGVILNGAMCGISAKFKPPWPLEHFLFXVVAAVIPTWRVVPTRGSIPEVSFKVEWKRRLALASPRRTVARPRAATAQELLRICRELQGRYEEVEVPLLVAHGGDDVVCDPACVEELHARAASKDKTLKIYPGMWHQMVGEPEENVELVFGDMLEWLRTRAQRAPEHGVA

SEQ ID NO: 236952 - protein, 60 aa, Glycine max
  Clone ID: PAT_MRT3847_55994C.1.pep
YHVLKQVVHFIIIGPAAPLVTQSFRPSPQYDAACSNYRCPVVNHIHRAQYRECNMMHPRA

SEQ ID NO: 236953 - protein, 175 aa, Glycine max
  Clone ID: PAT_MRT3847_55995C.1.pep
MQRSESMRLKEKKVKDLMVDKKRLVEVPYMASLAHTMTTLVANKVVAVPVAAGPGQWIGAGESMIVESDKQTGTVRKHYIGMVTMLDIVVHIAGDNHLSGDDDDITKDLDQRMSGPVSSIIGHSFEGLSLWTLNPNTSLYIYSEVSFILLFIERIKHGKFIGMCENTRDSLHDTN

SEQ ID NO: 236954 - protein, 65 aa, Glycine max
  Clone ID: PAT_MRT3847_55996C.1.pep
RARGLLTMVVSFAPCKSYSPPRTGMVPFYVGGRRGLPALLPWSLKSGRKIRVAHHLVSRIIPAVH

SEQ ID NO: 236955 - protein, 104 aa, Glycine max
  Clone ID: PAT_MRT3847_55997C.1.pep
TSCSFKRVVDELEHLGAIDSLITLFTEVRSEELQEKTIWMIEKILRVDNVSDRYALNHSLVRALVESFKHGNTNTRKHAQDALTLLKQLSGVSGKTSSQTRARR

SEQ ID NO: 236956 - protein, 89 aa, Glycine max
  Clone ID: PAT_MRT3847_55998C.1.pep
RLEYVDGIKEFSVPNDGGCQDQMLFKFRSSGLSRRQKTQFGYDSDIGQDGSRVRTQAQGPQQRAKGDLRKDQEGDHPPWKTLALWILDT

SEQ ID NO: 236957 - protein, 41 aa, Glycine max
  Clone ID: PAT_MRT3847_55999C.1.pep
SRSRAAPFFCSLNTMLQWYLKSNPTTRITSEVIVSFWTLEL

SEQ ID NO: 236958 - protein, 102 aa, Glycine max
  Clone ID: PAT_MRT3847_5599C.1.pep
TAVESPYCLTFFFSTPRHYYVYNVRVTPSSHVLPLRPAKEKPKSMHRRFFFLPKYLQATGTCSDERGKEERTRNKRRQEKDVRRKNSEKENKGKSPKKNNYW

SEQ ID NO: 236959 - protein, 159 aa, Glycine max
  Clone ID: PAT_MRT3847_559C.1.pep
TSIYSRNLPFIAALGSLQKVFKKFGLTVGEGLEVIRRKSGFCFGFVEFEELSSMHSALQASPITVGERQAVVEEKRTTTRVSGSGRGRYSGRGGFRSDSFRARGKFGSGRGYSRNEFRNQGEFSGQPRSSQRPNQNGGGRGGGRQGVGNRNSTPSASAA

SEQ ID NO: 236960 - protein, 55 aa, Glycine max
  Clone ID: PAT_MRT3847_55C.1.pep
PRSPVRYAPFALFPVRSMLPPVGLAFGSGVSLQALSIVDCSTLVRGNVYVLGRTC

SEQ ID NO: 236961 - protein, 89 aa, Glycine max
  unsure (1)..(89): unsure at all Xaa locations
  Clone ID: PAT_MRT3847_56000C.1.pep
XRDMADYDERYEGNGEEEELPQFSXSSPXXXLXXLLXPXTTISXIPNXTMGPRDYDRDSSRSRDKXREKGRDREKKREXGRDREGIEVG

SEQ ID NO: 236962 - protein, 28 aa, Glycine max
  Clone ID: PAT_MRT3847_56001C.1.pep
HFLPPQKKKNGLLFKPFLSLIVHIVLNS

SEQ ID NO: 236963 - protein, 78 aa, Glycine max
  Clone ID: PAT_MRT3847_56002C.1.pep
QFQSLIHQLPLSTPHINIHINPFLNPTSTTPQSSLITILFLYQSTNNFTFKMFPITIFKQLLYNILQLQKPSFIQSSN

SEQ ID NO: 236964 - protein, 75 aa, Glycine max
  unsure (1)..(75): unsure at all Xaa locations
  Clone ID: PAT_MRT3847_56003C.1.pep
SASXEEXXNKRTGXLEKSDPTPPGXEXPKDEKPPRRKXXDKPKTRGXTKXPKEXKPAARQKAPNTARTTTKKRDK

SEQ ID NO: 236965 - protein, 95 aa, Glycine max
  Clone ID: PAT_MRT3847_56004C.1.pep
CDLKFRAWMSPMMFQNNNNIHPKCSVWSSCYSFDSVPLQRVLASDFLHYGDPNFSQLSAGGALSRPVYAVLPIIRSLCAALKSGLRGAVMGHLSL

SEQ ID NO: 236966 - protein, 517 aa, Glycine max
  unsure (1)..(517): unsure at all Xaa locations
  Clone ID: PAT_MRT3847_56005C.1.pep
MGLVSNLRGSRTEAAPQLEALPVXLAVSGVAPKRKWTNLMQAGRRPTSSLRRVAFLGRLDMAKNAEMVDTLAVFFYRPRAVVEGDDLGLGKLGWWRVRCXKSISYRCXEWLEREDAVTYSRDFAEEPVFVSGALIEWKSCSVGCKFGFSGDKKPDAAFGLPQPGETASVLRSMESAQYYAENNLAMARRRGYDIVMTTSLSSDVPVGYFSWAEYDIMAPMKPKTEAALAAAFISNCGARNFRLQALEALEKSNIKIDSYGGCHRNRDGRVDKVEALKHYKFSLAFENSNEEDYVTEKFFQSLVAGTIPVVVGAPNIQDFAPSPGSILHIKEIEDVESVAKSMRYLAENPEAYNQSLRWKYEGPSDSFKALVDMAAVHSSCRLCIHLATVSREKEENSPGFNKRPCKCTRGPKTVYHIYVRERGRFEMESIYLRSSNLTLEALKSAVVSKFTSLNHVPIWKTERPEILRGGNDLKLYKIYPVGLTQRQALYTFSFKGDADFRSHLESHPCAKFEVIFV

SEQ ID NO: 236967 - protein, 30 aa, Glycine max
  Clone ID: PAT_MRT3847_56006C.1.pep
IQFYLRFHSTSYLFYSGTYIQVTGRQFTTS

SEQ ID NO: 236968 - protein, 237 aa, Glycine max
  unsure (1)..(237): unsure at all Xaa locations
  Clone ID: PAT_MRT3847_56007C.1.pep
ADTEFAILASVSTREVRYGNFFMTELLYKTMPWEVSSGEESSHLIVSWGIVFLQSTMMKGMIEGGARQGLKESFSQFSDQLARNFKVLDKADLPDKEHLLATLQTEDQWCCPXTLTCLEFSGLELPDSFGELITSGILFIQLQRVYNMVSHFVQARFQMGTDHGLKAHGDGWVLTVALIEGVDLASLESEGLSDPYVVFTCNGQTRSSSVKLQTSDPQWNEILEFDAMEEPPSVLHV

SEQ ID NO: 236969 - protein, 103 aa, Glycine max
  Clone ID: PAT_MRT3847_56008C.1.pep
SPKPPKQPATTGTVAPRLVPYNLCPQYAVERGIHWFASAYATPLDCPGHRLDVSRRWVPPPGRLWNERAMEPGQHPPEQHFPARWKASPAKPSHFQKKRPTRP

SEQ ID NO: 236970 - protein, 89 aa, Glycine max
  Clone ID: PAT_MRT3847_56009C.1.pep
IHPLFRRKGFFFFLGTQFSFQCRTIEFLLAFLNARVRFDFALLLLLRFSLLFKHSLIEKFENWFGELEVGLALLKCNFIEMRDVLMRGQ

SEQ ID NO: 236971 - protein, 122 aa, Glycine max
  unsure (1)..(122): unsure at all Xaa locations
  Clone ID: PAT_MRT3847_5600C.1.pep
TTTLAGADVMQPHLCNXGIGTDCDGSTGDDAPWAVIPNIVDRPPYTXVMNEMRKNYTNXGDKLYSKRGILTLKYLIEQLIVRDXINMVMNLHITFYNELLVDAEQHPVLLTEALFNAKDTCA

SEQ ID NO: 236972 - protein, 45 aa, Glycine max
  Clone ID: PAT_MRT3847_56010C.1.pep
LNYLTKVIRCIKNLHSYHTQPYQGIIAYPDETKNNIIRNSTLSKN

SEQ ID NO: 236973 - protein, 34 aa, Glycine max
  unsure (1)..(34): unsure at all Xaa locations
  Clone ID: PAT_MRT3847_56011C.1.pep
IPVAVKKGDPVFLPENGGTXVKLYNKKYHLFKND

SEQ ID NO: 236974 - protein, 97 aa, Glycine max
  unsure (1)..(97): unsure at all Xaa locations
  Clone ID: PAT_MRT3847_56012C.1.pep
FGVEIAWDLVDYGAKTSILARSPVHFLSREMVSLGVXLRKYXSVSTVDXLMEMLRTMINGDVTKYGVARPKEGPFYMKEKDGKNPVIDRGTYEKIKS

SEQ ID NO: 236975 - protein, 244 aa, Glycine max
  unsure (1)..(244): unsure at all Xaa locations
  Clone ID: PAT_MRT3847_56013C.1.pep
ILKPNGDYLPKDIFGKXXGNESERVHPFDLVEPMQYLFVXIWKARGLAPPSEGPIVRVRMSSQSRRSNPASYRPSEPPDSPEWNQTFALSYNNTNDANSATLEISVWDSPTENFLGGVCFDLSDVPVRDPPDSPLAPQWYRLEGGTADQNPGRVSGDIQLSVWIGTQSDDAFPEAWISDAPYVAHTRSKVYQSPKLWYLRVTVVEAQDLNIAPNLPPLTAPEVRVKVELGFQSQRTRRGSIGRW

SEQ ID NO: 236976 - protein, 123 aa, Glycine max
  Clone ID: PAT_MRT3847_56014C.1.pep
TSGDLSGGGSPVKFPNLEKGPFFLGVFNFIFPPRGVYKNILKLGWVSPQRGKYFPPGKFYNKHPFGRGVKHATVFLGVNSIHGKIPPAPPPPPPPPPPPPPPPPPPPPPPPPPPPQRRRTSYS

SEQ ID NO: 236977 - protein, 146 aa, Glycine max
  Clone ID: PAT_MRT3847_56015C.1.pep
TQLIQPLNKFAWFRTHTTELTQTSPPHRQPRRKIPRRFRLPAMASATSFLGLGLRPSVPICANRNNGIRFSQFQVSFGFRENSTSLKTLNSTPLKKREAFSNGSSRTRRNPLFSVRCTVSSSGKVNLYIHNNIPCYKQPFLLVFRI

SEQ ID NO: 236978 - protein, 107 aa, Glycine max
  Clone ID: PAT_MRT3847_56016C.1.pep
AVGVLEGLQLAKLKGFPKVELQIDSQAAVMSIKGRNVGSSNGRRLITTIRKLMADFEGTRVVHIYQDVNMCTDALTNTAYDSEVDFVMFNQPPVCLTRHIRLNVLMF

SEQ ID NO: 236979 - protein, 87 aa, Glycine max
  unsure (1)..(87): unsure at all Xaa locations
  Clone ID: PAT_MRT3847_56017C.1.pep
LWXISNTCRSFLRFAPSWSPTPAPXXKVXAEFITDLAAHRXTSGIKGQAQRQRCRHXDYLVRXLFXIIRSFFSPTLQXXXSNMGQLS

SEQ ID NO: 236980 - protein, 52 aa, Glycine max
  Clone ID: PAT_MRT3847_56018C.1.pep
FYFYVSLVFRKFAIHIKRWRRRLLSSSCYVRFLCVCGSSLSLTLCQLWIRME

SEQ ID NO: 236981 - protein, 48 aa, Glycine max
  Clone ID: PAT_MRT3847_56019C.1.pep
IRNFVMCNFLLLNKVQMPVDLVEILPLALPVGNASQAKEPNQSLVPNV

SEQ ID NO: 236982 - protein, 166 aa, Glycine max
  unsure (1)..(166): unsure at all Xaa locations
  Clone ID: PAT_MRT3847_5601C.1.pep
DLHLWMDNXYLDNCFAHTGKVVAAXLLRDKQAGYTEGYGIHRSSIHVSTIEIVLLNYNGTMMPNTDHEFLLNWATFTAXKMRSCYGTSDLSIFVEDLHIDVTDDMLLHTIAGRYTYIIAIKADIDSNNDRSKSYGVIKVDDEYVIPRAKTDMNVVYCSMRSIQLCA

SEQ ID NO: 236983 - protein, 36 aa, Glycine max
  Clone ID: PAT_MRT3847_56020C.1.pep
PIKPPLNVEHTHLLIDGKIIHATTGKTIPTLYPITR

SEQ ID NO: 236984 - protein, 42 aa, Glycine max
  Clone ID: PAT_MRT3847_56021C.1.pep
KDNAKRFSFEDFMEHGGNLTIPADRFLHEIAFKLWKAPKYGA

SEQ ID NO: 236985 - protein, 39 aa, Glycine max
  Clone ID: PAT_MRT3847_56022C.1.pep
FSASLVAAGKIINANKTDIIHILNAVPWANNDIYSPPFV

SEQ ID NO: 236986 - protein, 149 aa, Glycine max
  Clone ID: PAT_MRT3847_56023C.1.pep
GDVVKTPKFRKSQTINLGRRDLVKKVSANTPTSEQLASLNLKEGRNTITFSFPTVKGKQQVDAHMYLWKWNTRIVISDVDGTITRSDVLGQFMPLVGIDWSQTGVAHLFSDIKGNGYQLLFLSARAISQAYHTRQFLCNLKQDGKLLPD

SEQ ID NO: 236987 - protein, 257 aa, Glycine max
  Clone ID: PAT_MRT3847_56024C.1.pep
FVCMVQGIIPEKKKSMKRGRVHSVFKAKEYNATIEFYWAPFLVESNTDIRIIGDPKKRIIKVDQITERAKNWTGVDILVFNTYVWWMSGLRLKALWGSFANGEEGFEELDTPVAYKLGLRTWANWVDSTIDPNKTRVFFTTMSPAHTKSADWGHKDGIKCFNETRPVKKKNHWGSGSNKDMMSVVAKVVKRMKVPVNVINITQISEYRIDAHSSVYTETGGKILSEEERANPLNADCIHWCLPGVPDTWNQIFLAML

SEQ ID NO: 236988 - protein, 88 aa, Glycine max
  Clone ID: PAT_MRT3847_56025C.1.pep
PAPPVEQPPPPKLKQSQPSKKTKGSDFKSPKPVSGKHSGKLVFGSNATTFAIQTTPKVSQKTPRQKKSQKEKKPKFKPFPGKKYSLKS

SEQ ID NO: 236989 - protein, 236 aa, Glycine max
  unsure (1)..(236): unsure at all Xaa locations
  Clone ID: PAT_MRT3847_56026C.1.pep
KDNGALFLLSTNDKTIIFWKGQEKKDKKVSXLNVDPKLMVNXGSIACTSNSRSYTSYSCKCTXTDGPYNYLNNDFSFPPGGVPSLTLPLVVTSHETSLMARCRRVYAHAHDYHINSISNNSDGETFISADDLRINLWNLEISNQSFNIVDVKPANHEGLTPMSASAELHPTHCNIMALSRLLGHDKHHSVHVADNEGNLEGLIPLRDIISRLVHEPRGYFGDFFDGVLPMPPNSRV

SEQ ID NO: 236990 - protein, 63 aa, Glycine max
  Clone ID: PAT_MRT3847_56027C.1.pep
LLKEVNALFNDSPGIKNVKRSSFTCRVNHGNRPLDCNDCYKFWCLAPETVSDSGPELKPNRRG

SEQ ID NO: 236991 - protein, 66 aa, Glycine max
  Clone ID: PAT_MRT3847_56028C.1.pep
HSDFNFSLALEIENKGEISFLVCIYVSILLSASNYKGHISGSSIYILATLPFSGFFAKDTRVLLII

SEQ ID NO: 236992 - protein, 68 aa, Glycine max
  unsure (1)..(68): unsure at all Xaa locations
  Clone ID: PAT_MRT3847_56029C.1.pep
GRHPFSSSLXLHQALSFQKKILPYISKQKLPARYFVTCISNGVPLPLNISLLGNPLKVEKRGVKLKLK

SEQ ID NO: 236993 - protein, 36 aa, Glycine max
  Clone ID: PAT_MRT3847_5602C.1.pep
LIKFTTYSFNLFWPNRNDRDSYTEHLTTYKHNVFTE

SEQ ID NO: 236994 - protein, 274 aa, Glycine max
  unsure (1)..(274): unsure at all Xaa locations
  Clone ID: PAT_MRT3847_56030C.1.pep
MRGKNGNLHSQPLRSNSFPLQPPFIPNNSFSPNPQTFATSVVPPRTGGPSFSAAPLLNVPNISNRKISGYPSNAHDPRPVKQWNGDLKQSSNNNAPSPVKSIGEQTGHMVQNTQQLYNGHPHGPEYQPTSLTTMGNNNLPGNGIWGSPGCPKPSEYVQGLIGVVLLALNTLKIEKIMPTEANITDCIRCGDPKHRNTDVKKALENAIEQQMVVKQNVGALQLFIGKNDKVWXCVSPVSGYPKKHSKETWDEIKKFLSTPSGRLVIMGTQCKYET

SEQ ID NO: 236995 - protein, 72 aa, Glycine max
  Clone ID: PAT_MRT3847_56031C.1.pep
QNMLIDDLYYCQPRHTKQDFFKYTLPDALQMNFVARTNKKTVFSHFLQDHYRLCTIQQNLYKKYPTLKTSNP

SEQ ID NO: 236996 - protein, 66 aa, Glycine max
  Clone ID: PAT_MRT3847_56032C.1.pep
YEGRCRGAEIWRRDSEINSAMEEWSMLDIVKPEGYHKIAHITTKAFLTLCDLALQVIDKIGQPWLI

SEQ ID NO: 236997 - protein, 167 aa, Glycine max
  Clone ID: PAT_MRT3847_56033C.1.pep
CSIIMFHPAMTYKFNSPGLNVHATGSQDFEKNKANQMEREVSSPFEEDPNDIDALLSIGVDELDDFDEEEVSTARTQENYESLSDTCSSYCSKSRKRSSSSSVQKSSGAGGFCHNEGKHWEMKRMVRMLRKIVPGGGNQMDSVAVLDEAVKYLKSLKVEVEQFGVEP

SEQ ID NO: 236998 - protein, 117 aa, Glycine max
  Clone ID: PAT_MRT3847_56034C.1.pep
RKYSAWQTSINWLYPITPTLILICPTSFTAWYLFIVTAKYILSPPNSFGNEKENNLMKRVASQPNGTTPELIKLQNHTKKHHQANTISFVIHKQGNPRHLDLAPLQIIRNDKHRNLT

SEQ ID NO: 236999 - protein, 112 aa, Glycine max
  unsure (1)..(112): unsure at all Xaa locations
  Clone ID: PAT_MRT3847_56035C.1.pep
MRSLRAILKHPYDFHPLLNLKMAEKNAEKHIPPDPHWAFCYTMLHKVSRSFPLVIQHLGIDLHNAVCIFYLVLRSLDTGEDDSSINTDVRAPILIAFHRYIYXDRDWLFLCG

SEQ ID NO: 237000 - protein, 115 aa, Glycine max
  Clone ID: PAT_MRT3847_56036C.1.pep
MPMPMPSPSFQPLKSPHNLCIVKSLLSNPSLSDAVSSLDLLRLKGIRLPSHVLATLLRHCSKTRSYREGKFIHLHLKLTGFKRPPTLLGNHLISMYFSCGDFAQARKGFDKMDDR

SEQ ID NO: 237001 - protein, 58 aa, Glycine max
  Clone ID: PAT_MRT3847_56037C.1.pep
YQNVLREHYFLKIRPCLKPILHTQVSITERCQVFFMNDASLKRPKFLSSLQQMLPLCD

SEQ ID NO: 237002 - protein, 100 aa, Glycine max
  unsure (1)..(100): unsure at all Xaa locations
  Clone ID: PAT_MRT3847_56038C.1.pep
RKSVAYGARLGHIAFDYEKLSKFFCLMTQAPHFSELRGVYXEQHQKIFGLKGYKKNTGCFTSWDIWNKEKGFGIRDQKIAQGSGPLFDAQPPMCPWTPEN

SEQ ID NO: 237003 - protein, 51 aa, Glycine max
  Clone ID: PAT_MRT3847_56039C.1.pep
MHLIFINHRFLCQLLQNFLLVQLPLFFFFFFFCITRMLDLCFQHFIPDYML

SEQ ID NO: 237004 - protein, 165 aa, Glycine max
  Clone ID: PAT_MRT3847_5603C.1.pep
MKRSFPWENQIDVSSSSSPNSLRPNPLTIPNSPIDTKSQDALIRRAEMYQDYMKQIPIPNHRGTMIPFTSWMGLGRSMKQIYGQPLHYLTNILLKQWDQLRIGSEDEYKPLDNIVHPHKAEATIWLIEEIHRQTSSHFHLASLWKVDPMYNGFVDSIFPTLEHTS

SEQ ID NO: 237005 - protein, 467 aa, Glycine max
  unsure (1)..(467): unsure at all Xaa locations
  Clone ID: PAT_MRT3847_56040C.1.pep
MDGKVGEGEFIVSVTKEEIVVPELPMKEQWLPLSNLDLLIPPVDVSVFFCYKKPLPEKYYCFGTMVGSLKNALAQALVYYYPFAGEMVANTMGEPELFCSNRGVDFVEAXADVELQCLNLYNPDDTVEGKLVPRKKHGVLAVQATGLKCGGLVVACTFDHRIADAYSANMFLVSWAEAARPNKPIISAQPCFRRSLLTPRRPPSIHPLLHHMYVPVSALPPPSDPNKKLVFESEPLISRIYYVTSESLNRMQALASSNGTVKRTKLESFSAFLWKMVAEATASVDGKKNVAAKMGVVVDGRKMLCNDEKNMGSYFGNVLSIPYGGNAVDELVEKPLSWVAEKVHEFLKMGVTEDHFLGLVDWVEEHRPVPGLSRIYCGHGKEKGPSFVVSSGQRFPESKVDFGWGKPVFASYHFPWGGDSGYVMPMPCANGNGDWLVYMHLLKAHLNFMEVRAPQILRPFSWDYLLN

SEQ ID NO: 237006 - protein, 86 aa, Glycine max
  Clone ID: PAT_MRT3847_56041C.1.pep
KTPKRVCFGPFPQKVICSKPPGPRRCGGAYFRGNTKKRGLGKVFFKKGWGQPFLVGLGLKTFFFPLGPLKRIPFFGSKKKKLALGG

SEQ ID NO: 237007 - protein, 47 aa, Glycine max
  Clone ID: PAT_MRT3847_56042C.1.pep
GRVGEFCSTKSRNLRRWNRWFSRNLAILFHSKTLYFLPMLIVRLYFI

SEQ ID NO: 237008 - protein, 25 aa, Glycine max
  Clone ID: PAT_MRT3847_56043C.1.pep
LINMIISIRNYDSLPRGIALPMLDS

SEQ ID NO: 237009 - protein, 65 aa, Glycine max
  Clone ID: PAT_MRT3847_56044C.1.pep
MFNQRRILEDKEHQLDTKDFPYSAFHYNQKLLWDKGEDYEGMVQKLKVGLVVVLWEFHHLAVKLG

SEQ ID NO: 237010 - protein, 86 aa, Glycine max
  unsure (1)..(86): unsure at all Xaa locations
  Clone ID: PAT_MRT3847_56045C.1.pep
SRADSSRAARAEEEGLQTVKLLSNKEHSGFSNVNDFLPSDAANXSEVNHIGKPVLFXXXKFQNFCXLTIFIEDNQSGSEITKVQKI

SEQ ID NO: 237011 - protein, 77 aa, Glycine max
  Clone ID: PAT_MRT3847_56046C.1.pep
SAAVLFFLFFFFSFDFYSWMPLTWPEALFIESVKTGKNSLKKRETKKIYTATFTSHGAPNMKRGSAKIKNNPRKTYA

SEQ ID NO: 237012 - protein, 601 aa, Glycine max
  unsure (1)..(601): unsure at all Xaa locations
  Clone ID: PAT_MRT3847_56047C.1.pep
MQMENIVCVAQRINMGTRITFQLEERYNLQHGMSGAGGAIRVERARKQRATTHGFKLDRGLVKKQRRVGVPFKAAATAESEAQVRTISKDPIMLANYVPVYVMLPLGVVTNDNVLQDRVGLENQLKELQAAGVDGXMVDVWWGIVESKGPQQYDWSAYRTLFQMDQDCKLKLQAIMSFHKCGGNVGDSVLIPLPKWVLEIGESDPDIFYTNRKGIRNKECLSLGVDNQPLFHGRTAIELYTDYMQSFRDNMEDFLESELMIDIEVGLGPAGELRYPSYTKNLGWEFPGIGEFQCYDKYLKADFKGAALRADHPEWELPDNAGESNDVPESTEFFKSGGTYQTEKGKFFLTWYSNKLLTHGDEILDEANNVFLGCKVKLAAKVAGIHWWYKAESHAAELTSGYYNLHHRDGYRPVARMLSRHNAILNFTCLEMRNHEQPAKAQSGAQELVQQVLSCGWMENLEVAGENALARYDREAYNQILLNARPNGVNQFGPPTLKMYGVTYLRLSDKLMQQTNFNIFKAFVRKMHANLEYCPDPEKYYHFTVPMERSKPKIPLEVLLEATKPVEPYPWYKETDMSLDVTGFLDYIVAIIVRIFKLKLN

SEQ ID NO: 237013 - protein, 155 aa, Glycine max
  Clone ID: PAT_MRT3847_56048C.1.pep
PDKNPSLYVPMLFLLCTLFSILSLALFLFLIFPTATTTTTLHPSLSPFSSSTINVYVADLPRSLNYALLHTYWSSFSDSRLPTDADHTTPPSSLHQTAKIPPYPENPLIKQYSAEYWITGDLMTPPQHRATCFAKRVLDPLLADVVFVLFFATLS

SEQ ID NO: 237014 - protein, 42 aa, Glycine max
  Clone ID: PAT_MRT3847_56049C.1.pep
GLISAPLDLGSRSKIMGLKAKGIRRFHFFFEGNEIVSHKQLP

SEQ ID NO: 237015 - protein, 197 aa, Glycine max
  Clone ID: PAT_MRT3847_5604C.1.pep
PTRPPTRPYGCEKTTEGGRQEMKEINDPAAPSPPREAILMDQMKTFLLYIAKIKEELESDPQLYWHSIYRIEKMDVSGDDSVEKLTSKILQCIEKMDTGLRWESVLLLRLEKTIKELYPELWVVNVCGLGIVIADSVLESKFAPHAVDLSLPELESRNIIKGYIGSRYRRPYYPMVGNHKRLQVYTDIHVERCLAKW

SEQ ID NO: 237016 - protein, 48 aa, Glycine max
  Clone ID: PAT_MRT3847_56050C.1.pep
KIRFFPSGQKFQRHSSYMAQKNVFTKYDLVLNLGPPMVTLSLAFPIKG

SEQ ID NO: 237017 - protein, 73 aa, Glycine max
  Clone ID: PAT_MRT3847_56051C.1.pep
MAEVGFQERSSWRVGLRARYSSPDSVVFTLESNLSLFSYASASVDRCSFSSDSHDHDSFVSEISLDSTLLSTV

SEQ ID NO: 237018 - protein, 76 aa, Glycine max
  unsure (1)..(76): unsure at all Xaa locations
  Clone ID: PAT_MRT3847_56052C.1.pep
TRSFTVANEAALLDTWTRPLGMRHQIALAEXGIKYEGNXYDLLNMNRSLLILNPGHMKIQDLMRSGKPIWQSNGAG

SEQ ID NO: 237019 - protein, 156 aa, Glycine max
  Clone ID: PAT_MRT3847_56053C.1.pep
MQETQIIVGGASLCSILAILATVVVVPSLYSEINEIATKVHDGVQAFRVDTDSAWTDLMDLQITVTPPSKPRQNPFSSIFRQKRQLPGHCQCAGVQQPNCPPGPPGPDGSSGQPGQPGQSGGPGQPGVPGQQGPPCPVYTHPCQHCPAGPPGQSRS

SEQ ID NO: 237020 - protein, 41 aa, Glycine max
  Clone ID: PAT_MRT3847_56054C.1.pep
RGLQGFCILPQPSVKIVSFFFFLKNGLKNRVPAMCIKKTFC

SEQ ID NO: 237021 - protein, 71 aa, Glycine max
  Clone ID: PAT_MRT3847_56055C.1.pep
PGAGKRRGRGPSGPPANHLTRLAQEPSRSGSEPRGCAPVGRGTGPPRQKGPAPKGQEKKGGPPPPRVPSPQ

SEQ ID NO: 237022 - protein, 116 aa, Glycine max
  unsure (1)..(116): unsure at all Xaa locations
  Clone ID: PAT_MRT3847_56056C.1.pep
LTISPLRVCSYLILFPDQKSYGGSFSLSTLSILSPRSAPLAPKAPXTXHDPPXDLXXPSSLXVLSCFSFXXFFLVSPLGLRPPLSLKPXPTRGLVTSPSLLLSYLLCFSTSPPXLS

SEQ ID NO: 237023 - protein, 78 aa, Glycine max
  unsure (1)..(78): unsure at all Xaa locations
  Clone ID: PAT_MRT3847_56057C.1.pep
MAAASAMALSSQSLPAKALNXGPLSPKIGKVSXRKTVTNQVSXGAQWYGPDRVKYLAQFFARPRSXLTAEFPGDYGWD

SEQ ID NO: 237024 - protein, 231 aa, Glycine max
  Clone ID: PAT_MRT3847_56058C.1.pep
MAQPSSNGDLNNNQQGQVQQQQQQWAAAQPHQYQQQWMAMQYPATAMAMMQQQMMMYPQHYMPYAHPHYPPPPPPPPPQSSHHHHHKQAAAAAAAAASSDEIRTVWLGDLHHWMDENYLHNCFAHTGEVVSAKVIRNKQTGQSEGYGFVEFYSRATAEKVLQNYNGTMMPNTDQAFRLNWATFSAGERRSSDATSDLSIFVGDLAIDVTDAMLQETFAGRYSSIKGAKVVI

SEQ ID NO: 237025 - protein, 93 aa, Glycine max
  unsure (1)..(93): unsure at all Xaa locations
  Clone ID: PAT_MRT3847_56059C.1.pep
MSDEDHHFDSHADAGASNTYPQQAGTIRNNGYIFITSRPCTVVXVSTLNTGNHGHAKCHFVAIDIFNGKSLHDIFPSSHSCDVPHVTRTDYHL

SEQ ID NO: 237026 - protein, 190 aa, Glycine max
  unsure (1)..(190): unsure at all Xaa locations
  Clone ID: PAT_MRT3847_5605C.1.pep
NIESRNSRRPPNHFNFFLQSVSAPLFCILLLAAASLFHTSVTSIGIVLMESWSYVPEEKGYLFSDEMDFSLDAFMRSRKALVEWDNKSNFVEKDGFNSHREVVRSMEFVDLGFPDLLQKSFHGSQPLETSSYELDSNNSSKRGNSSPHVIALDSSMGEEEXDSKHLSSLGESKTHDCSLIDLELGRFSTL

SEQ ID NO: 237027 - protein, 110 aa, Glycine max
  unsure (1)..(110): unsure at all Xaa locations
  Clone ID: PAT_MRT3847_56060C.1.pep
MKSTTSLALFLRCARISSYQPSAVADIVLDTECNPIRNSGTYYVLPVMRRKGGXIQFAKTETDTCPLTVVQSPFEVSXGLPLMISSPVKILDITDGLILSLSFTYVLTCA

SEQ ID NO: 237028 - protein, 76 aa, Glycine max
  Clone ID: PAT_MRT3847_56061C.1.pep
YPNIHLFPHQCSRHQKRLTTPQQNKYYSCMYESVCVQLSRNTDLAHSMESKRVQAIILHNYIYQSLKFKLTVTVII

SEQ ID NO: 237029 - protein, 466 aa, Glycine max
  Clone ID: PAT_MRT3847_56062C.1.pep
FGSSTPAASHIIRIRKATGGILLTASHNPGGPDEDFGMKYNLANGAPAPESVTNKIYETSKTLSSYKIADIPDIDLSTIGTQKYGSLEVEIVHSTEDYLKMLKDIFDFDLIKSFLKQHSDFKVLFDGLSGVTGSYGVDIFEKELGIPNSTQNCVPKPDFGGHHPDPNLVYAKSLVDAVDKNGVHFGAASDGDGDRNMIYGANSFVSPGDSLAIIAHHAELIPYFKKQGIYGLARSMPTSGAIDLVAKKKGVECYEVPTGWKFFCGLFDSNKMNICGEESFGTGSNHIREKDGLWAVVAWLNILAGVGQQTGTTPSIASIQKDFWKTYGRTFFTRYDYEGCETEGANKVTSHMKELITTKKDEFIGSTVAGRKVVEADDFSYTDLDGSVSKNQGIFVKFDDGSRIVVRLSGTGSSGATIRLYIEKHTSDESTYDMDAQDYLKDNVKLATDLLKLQEYVGRTEPDVKT

SEQ ID NO: 237030 - protein, 47 aa, Glycine max
  Clone ID: PAT_MRT3847_56063C.1.pep
TKTNSIKTSNSSVPLKNTQIHSCKGNHTIIVNLVIELTKSLITKYPH

SEQ ID NO: 237031 - protein, 59 aa, Glycine max
  Clone ID: PAT_MRT3847_56064C.1.pep
FLGGFKIFAIEQVDVAIMEVGLGGIYHASNVGQTPIVWGTTSLGYDHMEILGNTLGEIA

SEQ ID NO: 237032 - protein, 295 aa, Glycine max
  Clone ID: PAT_MRT3847_56065C.1.pep
MQYTKPAFRNAAFYCQGFSRSLTLNPNPLLLVSPFRKPETFRLASPVSCLSSSSMAVPPSSLEKQFDDFRVQLEESGTLRERIRSVVSEIESSTRLIYATLLLVHQSRPTPELLEKAKSHVNVLKKQYKQLAEVVGGCPGQYYRYHGDWKSETQSVVSMLTFMHWLETGSLLEHKEAEEKLGLNSSEFGLDVEDYLIGVCFMSNELPRYVVNQVTAGDYDCPRKVLKFLTDLHAAFRMLNLRNDFLRKKFDGMKYDLRKVEEVYYDVKIRGLTPNGEPVGDLEIKESQDNLNLKL

SEQ ID NO: 237033 - protein, 78 aa, Glycine max
  Clone ID: PAT_MRT3847_56066C.1.pep
LDISGAGSSSIVSAPFVFTSGLALPVSLASRLSRLFCPVVAPVGAKVADRTLGVKINVLALMLGPDVKLMRSKFHLEP

SEQ ID NO: 237034 - protein, 164 aa, Glycine max
  Clone ID: PAT_MRT3847_56067C.1.pep
MASTKVNNRGSPGSKRFRNDASPKDGDWTCPNCGNLNFSFRTGCNQGRCGAPRPPLTPPAPIISPYRNSHPFYYGGVGIPPPSYGMPSQFGSPIPHPGIQYDYGLYARARAPYSPLPMFPPASFGGINYGPRPRIDGYGYGYGFQSPPPPWVEGLIADNFASRK

SEQ ID NO: 237035 - protein, 37 aa, Glycine max
  unsure (1)..(37): unsure at all Xaa locations
  Clone ID: PAT_MRT3847_56068C.1.pep
VXXXXKDELGXPELLGSTPXSRXXDNEAXFRXCRTQR

SEQ ID NO: 237036 - protein, 93 aa, Glycine max
  Clone ID: PAT_MRT3847_56069C.1.pep
MAFRSGSLSRSLMSTARASLRPAAPSSTLPRLRPPPLAAPRVQSRRFSMPASRNLGQLGCTHSLLPLGITCMTSHIAVSARACCELSHGDPDS

SEQ ID NO: 237037 - protein, 57 aa, Glycine max
  unsure (1)..(57): unsure at all Xaa locations
  Clone ID: PAT_MRT3847_5606C.1.pep
LSIFPQLLFHLRRSQFVQVFNTSXDATAYXRMLLHRENAANSVLMVQHPFISHSLHA

SEQ ID NO: 237038 - protein, 50 aa, Glycine max
  Clone ID: PAT_MRT3847_56070C.1.pep
EGKPGLSICCTYQGSFFPMKEFPLALVDSRVVLSVLTKLAPVYELFSSVF

SEQ ID NO: 237039 - protein, 185 aa, Glycine max
  Clone ID: PAT_MRT3847_56071C.1.pep
TLYFPFLCSHSHTLVLVSDSPRIKTQPFFLPLSILSALSVRVFYLEQKNHLSLIRVLKCGGRMEGSESDSVSLSISNGEEPQLGRPSSPAAPPEPSDLNHAAEEETLSGELQSKLDLKDVDESEEKVSDFNDGGGVCDEETGKGDGDSKGWETNSWNEEVGVDVDVDGDGDGDGDDDDFGAQSPL

SEQ ID NO: 237040 - protein, 55 aa, Glycine max
  Clone ID: PAT_MRT3847_56072C.1.pep
SITHGSKHTYKGTNPHKVPITYSRDRPSLLNPNALIPYTIAFIYHALNPTKTIKY

SEQ ID NO: 237041 - protein, 102 aa, Glycine max
  unsure (1)..(102): unsure at all Xaa locations
  Clone ID: PAT_MRT3847_56073C.1.pep
LQWLVPVSLFQSIHYCSYISIDGNTENGNNLFYYFLSSKRNPKNDPILLLLNGGPWCSNFYGFVYEHGPFNFEAXNSKGNLPTLHFNPYSWSKVFSVLYLDS

SEQ ID NO: 237042 - protein, 223 aa, Glycine max
  Clone ID: PAT_MRT3847_56074C.1.pep
MTSHALARNSARANCGDVSPNVLGAFCIDTELPCDFNHSTCGGKNELCYGRGPGYSDEFESTRIIGERQFKKAVELFNGASEQIKGKVDFRHAFIDFSQLEVNPSKVGASEVVKTCPAAMGFAFAAGTTDGPGAFDFKQGDDQGNPFWKLVRDMLKTPSREQIDCQHPKPILLDTGEMKKPYDWAPSILPIQILRIGQLIILSVPGEFTTMAWRRLRDAVKMV

SEQ ID NO: 237043 - protein, 80 aa, Glycine max
  Clone ID: PAT_MRT3847_56075C.1.pep
QVAGRNKIWGAGLVLYQPIYHVHLLQNEVDILSKNLARSNQWIDSNLDSLLATVGATPKDCHFPATRAPVMWPELPQYGN

SEQ ID NO: 237044 - protein, 222 aa, Glycine max
  Clone ID: PAT_MRT3847_56076C.1.pep
GPRRRYIIGSDCSKPGIDFRSSNIIDKRGSDNELDCAIVDALEFARQVAQEVNRYFSSSSEKISEDRIRQPGSPNSVRKEDQLTPVPPKEVSSRQSHATEAYSMERHASILDNNEAEPKCRPDMVSLEVTETAQDSAGNSEKRLCGFDLNEVGADDMDVSVNATSTPIPVVSASRPVPTPGLPVAPLQFEGTLGWKGSAATSAFRPASPRKIVIMTGIFLLI

SEQ ID NO: 237045 - protein, 42 aa, Glycine max
  Clone ID: PAT_MRT3847_56077C.1.pep
LIQYHKTIQRLINSKYRVHYKHWFAEHNQYTILSLSQVCSLP

SEQ ID NO: 237046 - protein, 163 aa, Glycine max
  unsure (1)..(163): unsure at all Xaa locations
  Clone ID: PAT_MRT3847_56078C.1.pep
PNPPSPIFGGSPGGLLRKAQVEEFFVFPWAPPKKQIFXMPPGGGAFLRGGPPLFKLARKDQGLVFGIRLGSKSKIKSPFSRVFPHGGVQFLPPKDGVSPXKVTPGPQGVGQNFRFFGKNVSPFGVKFPGKPPFDLWATLSSFPPAFSLRLYAILSFHVMPGRL

SEQ ID NO: 237047 - protein, 76 aa, Glycine max
  Clone ID: PAT_MRT3847_56079C.1.pep
PTRPYRCERTSDGGVLVVHNGPFSECALSIYCDLATNPNPLGTVASIGLAGPFSKKILFLVFDYSTNLRVDPYRLP

SEQ ID NO: 237048 - protein, 33 aa, Glycine max
  Clone ID: PAT_MRT3847_5607C.1.pep
TLTINITSSNVNLKNLSRQLYVYIALTGKNELF

SEQ ID NO: 237049 - protein, 115 aa, Glycine max
  unsure (1)..(115): unsure at all Xaa locations
  Clone ID: PAT_MRT3847_56080C.1.pep
QRCVPTTFTRPEDVQHNPAKTYIIGTIGSLRQRGYXLSQLMSSALKFNCQNHWKSLSGLIATSSKTCEHDSSLLVKKTPAALSASLEYKAXKENEQHLNYTSQSYAITKSHFEEL

SEQ ID NO: 237050 - protein, 73 aa, Glycine max
  Clone ID: PAT_MRT3847_56081C.1.pep
PYGRVKHHPYHSVSVAKNTFFMGRRGGHLSSPLPFYIPGGNKIMCARPPYNFTLLTINTSFIMRIPSVVFSQP

SEQ ID NO: 237051 - protein, 77 aa, Glycine max
  Clone ID: PAT_MRT3847_56082C.1.pep
CPGCRAPLAYQEGLRVIPGKFRHLFYSGLRICSGGFPVQSPNPCRSPMGNISCAVSRHITSLQSLSRQMKLWEYSKR

SEQ ID NO: 237052 - protein, 54 aa, Glycine max
  Clone ID: PAT_MRT3847_56083C.1.pep
YRSHKTTDGGIQFIHELTVTATCAKPQVPHTRLLYRLHAYISVHATSYLFYVAT

SEQ ID NO: 237053 - protein, 91 aa, Glycine max
  Clone ID: PAT_MRT3847_56084C.1.pep
NTNVEDAQLNTLTKSLDAMPKDLPDPENLWPIMKQSSLHQRTELTDCITEITFLKAHIAGAHLGNNMAISDVNTVKPESLEEYNVDMHKSQ

SEQ ID NO: 237054 - protein, 170 aa, Glycine max
  Clone ID: PAT_MRT3847_56085C.1.pep
GVIYISPQDGADFDIGDFVMHDSAISSYGEGPMIPDIIESTVGLLSAVDVTLHSALVVDPCEDVMVDNVLIHEVAETDEHTFKSASQYPMERLQDVEKDEGEEESPNPVPIPLSDINTATTNPAVSQEQSTIKSCMYRDGNIPKNKRKRGERKACSGGWSKKCSGDSENP

SEQ ID NO: 237055 - protein, 76 aa, Glycine max
  unsure (1)..(76): unsure at all Xaa locations
  Clone ID: PAT_MRT3847_56086C.1.pep
MGGGWRKIGWENFIKVPAGGNSFCLXGKDVLVFAKTGSGRIVVMVFPLMHAYLEALFSNFFFCLFCGFSNCGILFI

SEQ ID NO: 237056 - protein, 94 aa, Glycine max
  unsure (1)..(94): unsure at all Xaa locations
  Clone ID: PAT_MRT3847_56087C.1.pep
MSTRGHGIVMSVYATVACVEDQRAKDMPYIDSMDMYVGGINVMFQLVRNKFAGPIDFESENVTEATHIVLIVHSNXHERHWQDLISMDAFCHAN

SEQ ID NO: 237057 - protein, 59 aa, Glycine max
  unsure (1)..(59): unsure at all Xaa locations
  Clone ID: PAT_MRT3847_56088C.1.pep
DWIFTFPFTISVNIGLPNLYSHRDFYXRVXXLICXWXGGXXNXXILPIXYDSGVYERXR

SEQ ID NO: 237058 - protein, 66 aa, Glycine max
  Clone ID: PAT_MRT3847_56089C.1.pep
GVNLKLGKKKVFPGSWGKWFTLPNSKKNTSRKNKGGGGGGLKGGQTPVNGGGPTAPFQNRKPGGQK

SEQ ID NO: 237059 - protein, 36 aa, Glycine max
  unsure (1)..(36): unsure at all Xaa locations
  Clone ID: PAT_MRT3847_5608C.1.pep
XXVXXKXLLGRAVGXTYACCEKIGIGAAETXSGVYL

SEQ ID NO: 237060 - protein, 159 aa, Glycine max
  unsure (1)..(159): unsure at all Xaa locations
  Clone ID: PAT_MRT3847_56090C.1.pep
MKGNNTLLLHLFYTTHNPQLVVSSSSSTGNECNXDTNSKEVYIVYMGXAADSTKASLXNEHAQILNSVLRRNENALVRNYKHGFSGFAARLSKEEAASIAHKPGVVSVFPDPILNLHTTRSWEFLKYQTHVKIDTKPNAVSNSSSSSDIILGVLDTGYQ

SEQ ID NO: 237061 - protein, 302 aa, Glycine max
  Clone ID: PAT_MRT3847_56091C.1.pep
NPPVIHRDLKCDNIFVNGHQGRVKIGDLGLAAILKSSQHAHSVIGTPEFMAPELYEEKYNELIDIYSFGMCMIEMLTFEFPYSECANPAQIYKKVTSGKLPEAFYRIENLEAQEFVGKCLANVSERPSAKELLLDPFLAMEQLEIPLPPSIPALFTNKSFKLNCPAPVPSDHRDQTKSADMTITGSINEEDNTVFLKVRISDITGHTRHVFFPFDTLKDTAIQVAMEMVQELEITHLEPLEIAARIDHEVSALVPTWRDRVKCHHQRQYSFNYEEDEDVNNHHPFFLSSSPSSPRGSGHMSA

SEQ ID NO: 237062 - protein, 55 aa, Glycine max
  Clone ID: PAT_MRT3847_56092C.1.pep
HVFKITIVVYMLTYFLYLKVPILVITHSLTCSDFKVFHEILSSHSLSHSLHLASD

SEQ ID NO: 237063 - protein, 72 aa, Glycine max
  unsure (1)..(72): unsure at all Xaa locations
  Clone ID: PAT_MRT3847_56093C.1.pep
EIAAASSMGLSXSPSLAGNAVKLGSSAPEVRTVSMRMTVTEQDSSRTPWYGPHRVKYLGSFSGETPSYLNGE

SEQ ID NO: 237064 - protein, 236 aa, Glycine max
  Clone ID: PAT_MRT3847_56094C.1.pep
ETTLVDTHLLTIWRQQFLDALRLLRPESKKIKNACLRLACIFWQLLILPWRFLFAFVPPCQIAHGWISFICSLLFISGIAYVVTKITDVISCVTGINAYVIAFTALASGTSWPDLVASKIAAERQKTADSAIANITCSNSVNIYVGIGVPWLIDTLYNFIAYREPLRIQNAGGLSFSLIVFFSTSVGCISVLVLRRIIFGAELGGPRLWAWITCAFFMLLWIIFVVLSSLKVSGFI

SEQ ID NO: 237065 - protein, 60 aa, Glycine max
  Clone ID: PAT_MRT3847_56095C.1.pep
MPDVQALVNDFVNLLKKRIEGSQATAKQTAVLLRSVISQQRVPHTNQATVLINAVRAVGE

SEQ ID NO: 237066 - protein, 113 aa, Glycine max
  unsure (1)..(113): unsure at all Xaa locations
  Clone ID: PAT_MRT3847_56096C.1.pep
MKKTNTKKMPKKMGVNTKADAARAFXSAADTERKEKESPXNEDQYWREAEGSKSRASKNMEEEAEKRAEASVRKAXARPLAEHDDKELEKSMKNVDKNATRVSIPVPNVTEVD

SEQ ID NO: 237067 - protein, 84 aa, Glycine max
  Clone ID: PAT_MRT3847_56097C.1.pep
KTKLYGGLYHNSYQIVFRGLKPSRSHQNCFSSQSLSQLGAPFEEAYLMPHRVLLPRDGKIIHHQKKSLARRKKIGFQSGCHLFH

SEQ ID NO: 237068 - protein, 65 aa, Glycine max
  Clone ID: PAT_MRT3847_56098C.1.pep
CFPHVTWSELPEKTCYSIIHLFVDGRGKPRPKCFRQYTTGVSGGGISECTQALICVQLFSDPVNL

SEQ ID NO: 237069 - protein, 78 aa, Glycine max
  unsure (1)..(78): unsure at all Xaa locations
  Clone ID: PAT_MRT3847_56099C.1.pep
QLSYFLFIFHLLFFSMLLPPLSLSLFKPQAATMHDHHAATPTSTKYSPHQKSNCPNLYSDLKLQNLLLLNSVDLVXXS

SEQ ID NO: 237070 - protein, 50 aa, Glycine max
  Clone ID: PAT_MRT3847_5609C.1.pep
ISIKHAETDTFIIVTTHKMDEGNYLNATPLTPPSNKYDLERQSCFNNKKH

SEQ ID NO: 237071 - protein, 61 aa, Glycine max
  Clone ID: PAT_MRT3847_560C.1.pep
QHLLFIIAIPHQACFEYTGSVAQKCWTTTSLHLKKNGARSKDSIFTYSCITTILTATITIP

SEQ ID NO: 237072 - protein, 81 aa, Glycine max
  Clone ID: PAT_MRT3847_56100C.1.pep
DTTSHHRNRVSGICEKDDNKTMAIDELQLPEKNLKTWIYDIHSMKMNTMLQEITALNDKEAPLNAANKYLHDNDRGEYCNF

SEQ ID NO: 237073 - protein, 56 aa, Glycine max
  Clone ID: PAT_MRT3847_56101C.1.pep
IKLLHETTKTWLRFTCGATLTLTIEQHPDWHSLCKPTKSNTVNSLTILKITFLQIF

SEQ ID NO: 237074 - protein, 43 aa, Glycine max
  Clone ID: PAT_MRT3847_56102C.1.pep
KTSFYCSGIVHTAVQTWSIRSCKIIGSSPQGLEVGISKRAGFF

SEQ ID NO: 237075 - protein, 103 aa, Glycine max
  Clone ID: PAT_MRT3847_56103C.1.pep
LNKYNSNYRGQFILYTHKPPIPMLNCYTSIQQCHDFLSPQNESLKPITFNMQFRILAQNFNLIIGFTITSWKKDNVPNISKAHCKKTIIANLIMNPKFFTVPF

SEQ ID NO: 237076 - protein, 59 aa, Glycine max
  Clone ID: PAT_MRT3847_56104C.1.pep
SKAFKGCPRVKFKLMPSMEIFSPQGHMEIFFGKGMKTVFWLCGDVFNTFFLKTQLSFPH

SEQ ID NO: 237077 - protein, 134 aa, Glycine max
  unsure (1)..(134): unsure at all Xaa locations
  Clone ID: PAT_MRT3847_56105C.1.pep
SSICVSYTCCEACSAVIXQVFNPDHTMSYPQCTKQGLTVXHIICYYSDLSLTLDCPSSTMSLLLRNXSPYLTVYETQSTTLSITTIHSIXLSLYLNDSNTKYSFHDSTGQTWILYATYAHEGRTSTLAKIASNA

SEQ ID NO: 237078 - protein, 40 aa, Glycine max
  unsure (1)..(40): unsure at all Xaa locations
  Clone ID: PAT_MRT3847_56106C.1.pep
SLLYHTALSSNLRHKHHFLSYNFNSHSLINXYGDHHGVXT

SEQ ID NO: 237079 - protein, 62 aa, Glycine max
  Clone ID: PAT_MRT3847_56107C.1.pep
LMNVLGLIDYTHSCGGTWNREYISVTPGPNRSSPLITYTTIRSHSGGHGEEALATQEVERRI

SEQ ID NO: 237080 - protein, 117 aa, Glycine max
  Clone ID: PAT_MRT3847_56108C.1.pep
PRVRPRVRIEWEVEGRKSDSNNANVRELQNLHNLTTLEISFKDTSVLPMDFQFPANLKRYDILIGSWQLFYLWYVGGLERTLKLTGNWWTSRSLFNTVEELSFAELKGVKDLYDLDV

SEQ ID NO: 237081 - protein, 49 aa, Glycine max
  Clone ID: PAT_MRT3847_56109C.1.pep
IQVKNRTIYRCLIYRGSKANLALCQGETMSCDTTNVPLARAIMAWISRY

SEQ ID NO: 237082 - protein, 94 aa, Glycine max
  Clone ID: PAT_MRT3847_5610C.1.pep
TCETHLEKQKESNQSRQKPYFNNLNFPNTMQKKQKDKSVTTFKISIPKHLFIFACIQNMSPRIQFVACIDQTPNEENKKTYIKHKTICYDSTSI

SEQ ID NO: 237083 - protein, 61 aa, Glycine max
  Clone ID: PAT_MRT3847_56110C.1.pep
HPRFYQGITNTFHIAFPTILKIWSQVPGVYKSSCLAFRTLVPPLNPEPAIGSRTKESWAII

SEQ ID NO: 237084 - protein, 64 aa, Glycine max
  Clone ID: PAT_MRT3847_56111C.1.pep
YLITLLGLRSSHSEAHMASFYEELINRARAAITKLLLTFFLIDCHMTQSVRSLEHISVWARTTL

SEQ ID NO: 237085 - protein, 67 aa, Glycine max
  Clone ID: PAT_MRT3847_56112C.1.pep
MATDVAAAERGSFSGKDYQVPPPAVLIDAEELTKWSFHRALIADCIATLRFLYITVLTVDRVPAPDG

SEQ ID NO: 237086 - protein, 228 aa, Glycine max
  Clone ID: PAT_MRT3847_56113C.1.pep
PRVPSNTCIIRILTVIAICIPRAKSFHLDFPAVFNFGDSNSDTGALIAAAFESLYPPNGQTYFQKPSGRYSDGRLTIDFLMDAMDLPFLNAYLDSLGLPNFRKGCNFAAAAATILPATASSLCPFSFGVQVSQFLRFKARALELIAKGRKFDKYVPDENVFEKGLYMFDIGQNDLAGAFYELTLDDIRHSDPTIPLELETGIKSLYDQGARYFWIHNTGPLRCLPQNI

SEQ ID NO: 237087 - protein, 64 aa, Glycine max
  Clone ID: PAT_MRT3847_56114C.1.pep
YMYTMIPISGVTILLPQMAKQIYTSPTHFKAKNKYKSQLEIVKQPIAGTIKCTVCYLISWWAEV

SEQ ID NO: 237088 - protein, 219 aa, Glycine max
  Clone ID: PAT_MRT3847_56115C.1.pep
MLSPEPCDPNFLLCLPDDVFGMVSRFLLPRDVCNLSLCCKSLYALSSSEKVWFPQCYMVGVVPQKDLVEWREGVSSYQALCRFLLSVKPLLGIWVHQNPELGNLVYVMPGFVSVVGCRIIPQELGPLGIQDGPIQWSSVFEVIGDFDGSATFFLHGREEGMDYVYRGSVKYIDESCNVLLLEVEPREQKYGINLLHGRSLDDSGGDGFRRGLWVKQGAF

SEQ ID NO: 237089 - protein, 90 aa, Glycine max
  Clone ID: PAT_MRT3847_56116C.1.pep
SLVIIFLLWWLLLYTMVNFGGLPLITASETIRCLIPSSWPRNCILHMKESGMIHVSPYYILTLVLLSWSYKTNLFNLSFLLFIYLFYFYF

SEQ ID NO: 237090 - protein, 83 aa, Glycine max
  Clone ID: PAT_MRT3847_56117C.1.pep
QSKTSPLASFQAKHINEFKKIQKLDPPPQKKTLKVQKKTNAPPKNNTPGFKNRFIQTSFFLLDQNTKLQLNINIRKKWEDKLL

SEQ ID NO: 237091 - protein, 59 aa, Glycine max
  unsure (1)..(59): unsure at all Xaa locations
  Clone ID: PAT_MRT3847_56118C.1.pep
WDGLVVGVVVHLYLAGNIILKTEPHFTTKAGNQXFFIFXKQLYLTRGKMKKVINLXLSK

SEQ ID NO: 237092 - protein, 141 aa, Glycine max
  Clone ID: PAT_MRT3847_56119C.1.pep
EGEVWLLYSTATGGGIQRDRIDPKFQIYKFVFLFPCQYLGSFLFPSQYLGSCYPFGFLLWWLLLYTMVNFGGLPLITASETIRCLIPSSWPRNCILHMKESGMIHVSPYYILTLVLLSWSYKTNLFNLSFLLFIYLFYFYF

SEQ ID NO: 237093 - protein, 132 aa, Glycine max
  unsure (1)..(132): unsure at all Xaa locations
  Clone ID: PAT_MRT3847_5611C.1.pep
GPPNKPVINACGVIPLLAHILRDGSHRAKATAAWLSLIYXTHTNSLTIIFETNPSPDIEDPLMTWKKTLKPADXCRAMLESLWVSDEGRTALTYEEGGALALGEALGSGTLQSREHAVGSLMTLCSRDRRKC

SEQ ID NO: 237094 - protein, 44 aa, Glycine max
  Clone ID: PAT_MRT3847_56120C.1.pep
QPQRHLWVSDFNCCNALTSYLNPHYKTIPVYLKYKCGPHNDFRI

SEQ ID NO: 237095 - protein, 142 aa, Glycine max
  unsure (1)..(142): unsure at all Xaa locations
  Clone ID: PAT_MRT3847_56121C.1.pep
GIRGGRTRTPTRSSSIIHLGSLKHLYLGKNHLRGGSPXDFFNLGMLSLMLLILNHLTGIIPLSVSKIYRLSDLDLSSNRLFCSFPFXLCTIPVLSTLNLDRNSLXGLISSSLLIYGCIFILNLIPNCFEGSIPYLFISHLYF

SEQ ID NO: 237096 - protein, 61 aa, Glycine max
  unsure (1)..(61): unsure at all Xaa locations
  Clone ID: PAT_MRT3847_56122C.1.pep
FVNSGEAXPGGFFSHXYCPTSTTENSTKESLSNAMTTLTVNSKASPTLPRIAKHLNFIIFL

SEQ ID NO: 237097 - protein, 104 aa, Glycine max
  unsure (1)..(104): unsure at all Xaa locations
  Clone ID: PAT_MRT3847_56123C.1.pep
KAMGIGRSIDGYAYRAGCEYMDDVATGVLDTDCRCGSERSARLCAKGMSCRDVGYWNTKIDGXAQTDECEEDGATTWKMLDEGAGPTNVSMMGAGHASANLCDL

SEQ ID NO: 237098 - protein, 58 aa, Glycine max
  Clone ID: PAT_MRT3847_56124C.1.pep
DTKPTEIRCGKMFGGDNKRLKHCSLTLGCCMNFHMYFPSSNAVSYKFPLLYFVSGLTC

SEQ ID NO: 237099 - protein, 78 aa, Glycine max
  Clone ID: PAT_MRT3847_56125C.1.pep
MPAAATLALQHISPERPEAAVRFLNKRLQIPVQVDPVVAQIIRDCWQTEPHLRPSFSQLMSRLYRLQHLIVPKTSSTH

SEQ ID NO: 237100 - protein, 44 aa, Glycine max
  Clone ID: PAT_MRT3847_56126C.1.pep
KIYRISFAYPLLLTPKRSLLFLYNYNSFTLSHQNLFLLLKTVQF

SEQ ID NO: 237101 - protein, 44 aa, Glycine max
  Clone ID: PAT_MRT3847_56127C.1.pep
HNQFNVVGGLTKFCRMVRKLIVQLSKEKTVIYFSFFTWSNNQAR

SEQ ID NO: 237102 - protein, 117 aa, Glycine max
  Clone ID: PAT_MRT3847_56128C.1.pep
HQASAEYHVFNYTDCQAGNGNNETKEEISASPKVSNPRTGGSSPIIETEATYSRAMTMPQERHRNNKDKMLRTYFCPSPHPSHVHPKLPDYDDIAAKFTALKRERMENMDCSKDQNK

SEQ ID NO: 237103 - protein, 89 aa, Glycine max
  Clone ID: PAT_MRT3847_56129C.1.pep
SSTIHRSSRVVHCLCCSEHQVTKSILGSMVRPPWSRCTIHSICECYDSIRPLSFSYDACPALVHLTEGTACVQCSSPRSHQLLGSPLEL

SEQ ID NO: 237104 - protein, 39 aa, Glycine max
  Clone ID: PAT_MRT3847_5612C.1.pep
REREREREREREREREREREREREPHAEFGTRLPRMLLL

SEQ ID NO: 237105 - protein, 66 aa, Glycine max
  Clone ID: PAT_MRT3847_56130C.1.pep
VCCVELYGDTNLTRHLARSRTTPSCKMTCYMESWYVCRYRSVIKSVIDMITSRGPECLSAVSKRMI

SEQ ID NO: 237106 - protein, 55 aa, Glycine max
  Clone ID: PAT_MRT3847_56131C.1.pep
EYFITIHLNERLIVNMLSFLGKYPRQSELKDSLRIINSKSFQSLFTVYRRLLLSF

SEQ ID NO: 237107 - protein, 49 aa, Glycine max
  Clone ID: PAT_MRT3847_56132C.1.pep
WLKEFELLIYKYCDLKSFKSAALLDLLHLNVLFDLIKNLYHLSMASITN

SEQ ID NO: 237108 - protein, 49 aa, Glycine max
  Clone ID: PAT_MRT3847_56133C.1.pep
YSLSLRAVHATLSFWVVTVLGKKSQFVVVFLSPQSPHSVVLSHLYARVG

SEQ ID NO: 237109 - protein, 59 aa, Glycine max
  unsure (1)..(59): unsure at all Xaa locations
  Clone ID: PAT_MRT3847_56134C.1.pep
DILPTLITLVHFYLLIYYLYLLSFFEIGLYYEVLLGLYIALMDCFXFGSIGITNVNHHV

SEQ ID NO: 237110 - protein, 52 aa, Glycine max
  Clone ID: PAT_MRT3847_56135C.1.pep
KINLPGPKIKKKIFYLTLHIFKAFGIDPGTSNFGSLLLFWGNPTLEWIHQFN

SEQ ID NO: 237111 - protein, 76 aa, Glycine max
  Clone ID: PAT_MRT3847_56136C.1.pep
FGNFSFGKITHPSHHISDLYKRSANFQISLSYSTKGDCLIFFIESNKQPSLRTPLFHIMQKIPKFQNIRQLPVAPK

SEQ ID NO: 237112 - protein, 262 aa, Glycine max
  Clone ID: PAT_MRT3847_56137C.1.pep
MGESKKRKRHRNKRGGKEEQPVLPSPCAKRTKLKEPSSFLQKMRARLSGGHFRMINEKLYTCTGEEALDYFKEEPSLFDVYHTGYKTQMSNWPEQPVNVIIKWLKKQSPSFVVADFGCGEALIAKSVKNEVFSLDLVSNDPNVIACNMANTPLDSSSVDVAVFCLSLMGTNYQSYLKESYRLLKPGGWLLIAEVKSRFDPNTGGADPKKFSNAISELGFSSVKQDFSNKMFILFFFTKKENQISKRKEIEWPMLKPCLYKRR

SEQ ID NO: 237113 - protein, 63 aa, Glycine max
  unsure (1)..(63): unsure at all Xaa locations
  Clone ID: PAT_MRT3847_56138C.1.pep
QFLLTXRXMVPIXQISSRFXXPDRXRSMXXSAPCTSEGXEMENSLFTGGGRRGRREKRKWKRR

SEQ ID NO: 237114 - protein, 186 aa, Glycine max
  unsure (1)..(186): unsure at all Xaa locations
  Clone ID: PAT_MRT3847_56139C.1.pep
YYRGXXHAXXXXAKEEGIFXXYKGLGTTLLTVGPSIAISFSVYETLRSYXXSNRSDDSPVVISLACGSLSGIASSTVVYYAFDAEKESLVQELHQVSNQTDPXNQRPATFPLDLVRRRKQLEGAGGRARVYTTGLYGVFRHIIRTEGFRGLYRGILPEYYKVVPGVGICFMTYETLKMLLADIATG

SEQ ID NO: 237115 - protein, 128 aa, Glycine max
  Clone ID: PAT_MRT3847_5613C.1.pep
MEDEVMSEVAAPPRRVLLVSAGASHSVALLSGNVVCSWGRGEDGQLGHGDTDDRLFPTKLSALDGQDIICVTCGADHTMARSESGRDVYSWGWGDFGRLGHGDHSDLLIPHPIKALQGLMIQQIACGD

SEQ ID NO: 237116 - protein, 174 aa, Glycine max
  Clone ID: PAT_MRT3847_56140C.1.pep
MPPRIVKRGAAAKRASRGSSKAAPENQPEPETTEVVVKNNQENPVVDAVVEEKLVDVEQEHEEVPNESAKVENTEEEVKESIDEYEKDEHLDFEDNYPEYEAEEYGGVDYDEKEIEQEEGQEEGDEVEEDPEEIVGEEEGDTGDERVEYVYERVEDDDDDDDEHACEEFEHDEH

SEQ ID NO: 237117 - protein, 330 aa, Glycine max
  Clone ID: PAT_MRT3847_56141C.1.pep
MQMEARVGVAVDGGGVRKLVQPPPPKHIGTVSQLLAGGVAGAFSKSCTAPLARLTILFQIQGMHSNVATLRKASIWNEASRIIHEEGFGAFWKGNLVTIAHRLPYSSVNFYSYEHYKKLLKMVPGLQSHRDNVSADLCVHFVGGGLAGVTAATTTYPLDLVRTRLAAQTNFTYYRGIWHALHTISKEEGIFGLYKGLGTTLLTVGPSIAISFSVYETLRSYWQSNRSDDSPAVVSLACGSLSGIASSTEKETTFPLDLVRRRKQLEGAGGRARVYTTGLYGVFRHIIQTEGVRGLYRGILPEYYKVVPGVGICFMTYETLKMLLADIGTA

SEQ ID NO: 237118 - protein, 334 aa, Glycine max
  Clone ID: PAT_MRT3847_56142C.1.pep
MQMEARVGMAVDGGGVRKLVQPPPKQIGTVSQLLAGGVAGAFSKTCTAPLARLTILFQWKCFQIQGMHSNVAALRKVSIWNEASRIIHEEGFRAFWKGNLVTIAHRLPYSSVNFYSYEHYKKLLKMVPRLQSHRDNVSADLCVHFVGGGMAGITAATSTYPLDLVRTRLAAQTNFTYYRGIWHALHTISKEEGIFGLYKGLGTTLLTVGPSIAISFSVYETLRSYWQSNRSDDSPVVISLACGSLSGIASSTEKETTFPLDLVRRRKQLEGAGGRARVYTTGLYGVFRHIIRTEGFRGLYRGILPEYYKVVPGVGICFMTYETLKMLLADIATG

SEQ ID NO: 237119 - protein, 93 aa, Glycine max
  Clone ID: PAT_MRT3847_56143C.1.pep
MGIVEFNSSVILFSATFPLDLVRRRKQLEGAGGRARVYTTGLYGVFRHIIQTEGVRGLYRGILPEYYKVVPGVGICFMTYETLKMLLADIGTA

SEQ ID NO: 237120 - protein, 97 aa, Glycine max
  unsure (1)..(97): unsure at all Xaa locations
  Clone ID: PAT_MRT3847_56144C.1.pep
GGEAPAGDFPXPDFKPGVFFFYGQGPGPIVPSWGDAVPQPISTAPGVNWGGPPKTPFFFSKKNWGEIFSPPQKIPVSPFGNDSVQPTGWEKKRGFLS

SEQ ID NO: 237121 - protein, 160 aa, Glycine max
  Clone ID: PAT_MRT3847_56145C.1.pep
PTRSPTRPVLGTRCEAEPQTHHTNAATEKHAQLNAALNRVGAFERAPLYTRIIPHESEPEMCRVAESTAHSVVLNSAYRREEVIESSEHIIWQPHFGGQFVHASRRAGDVSALLQLQLAETSARSLQAQHIIWVDNRPVGAPPHYRAGAAREEYALLEDN

SEQ ID NO: 237122 - protein, 128 aa, Glycine max
  Clone ID: PAT_MRT3847_56146C.1.pep
MAMALVSLNTIHTSPSSFSFSSPKPYSSSNYAPPLTLLPRFRRHLVRMAPDEEKMTRRSPLDFPIEWERPKPGRRPDIFPQFSPMKTPLPPPLPADPPEEDEEEEEKKEEEQEPDKEEPDKPDKPEKQ

SEQ ID NO: 237123 - protein, 120 aa, Glycine max
  unsure (1)..(120): unsure at all Xaa locations
  Clone ID: PAT_MRT3847_56147C.1.pep
YTRPKGLGAIRLPGICLAQPNESEGHPSRXTQKQVNAFTDRXINMVKVRTCLRVSDEVKIYDKLLFNSSLAKAHCAPDTLKMLAQFTVLSRLKEPENSNIYSKMRVYDGENLKDTDPKAK

SEQ ID NO: 237124 - protein, 124 aa, Glycine max
  Clone ID: PAT_MRT3847_56148C.1.pep
MGLLDHLWDDTVAGPRPENGLGKLRKHHTFTFRPSSGKETEGGSVRSYGDESSEEATRVTRSIMIVKPPGYQSGSPPVSPAGSTTPISPFSGGKDSFRFRRRSASDAYEKRGQNRSGPSSPFDV

SEQ ID NO: 237125 - protein, 76 aa, Glycine max
  Clone ID: PAT_MRT3847_56149C.1.pep
HSERAPRSECISRDPFCTPILTRKTVSADEISCRPPPACALHAISSTIAEITVGSCDFVITPSRLSAEPILLAIGG

SEQ ID NO: 237126 - protein, 85 aa, Glycine max
  Clone ID: PAT_MRT3847_5614C.1.pep
MVKSSSTKSKTTEDVDLLKDVASFASELGLSTSQPHSGFNDVDFRKTKPNKLPKKQQTPEKVTPQNSHNPKNKTFGKNNGPHEKR

SEQ ID NO: 237127 - protein, 124 aa, Glycine max
  Clone ID: PAT_MRT3847_56150C.1.pep
MGLLDHLWDDTVAGPRPENGLGKLRKHHTFTFRPSSGKEAEGGSVRSYGDESSEEATRVTRSIMIVKPPGYQSGSPPVSPAGSTPPISPFSGGKDSLRFRRRSGSDAYEKRGQNRSGPSSPFDV

SEQ ID NO: 237128 - protein, 131 aa, Glycine max
  unsure (1)..(131): unsure at all Xaa locations
  Clone ID: PAT_MRT3847_56151C.1.pep
MKPGEVYSLAYNAIQXLGWRFILVKTVLGLASAHSFSELYQNVEMELKILQTAAILEIDHSVRGLVRLSMVTTIDQGLSRVTGVWLILHKVASARVSLCAPMLMVAWSITEVGRYSIYALNLLNAVLYALT

SEQ ID NO: 237129 - protein, 52 aa, Glycine max
  Clone ID: PAT_MRT3847_56152C.1.pep
LIHMFNNNIHIFPKLCNESIKINFFTKLRFLLENITHIFHEWGCFYKNGVKS

SEQ ID NO: 237130 - protein, 110 aa, Glycine max
  Clone ID: PAT_MRT3847_56153C.1.pep
MRLNLCHVSLGFVLKFLNFLQCFVGLSILLYSLWMFNEWDHSVPPDPPLPPAFHFYLKLNSINLPAPWFIYNFMGFGILVLCISFLGCIAAEMINGCCLCFYSILVVVLL

SEQ ID NO: 237131 - protein, 59 aa, Glycine max
  Clone ID: PAT_MRT3847_56154C.1.pep
TAAIRGVKQKINYIYLFIFLLTKVSLLVLLEMSGDSNYDLCPLPSSFPLFQLLGQPYIP

SEQ ID NO: 237132 - protein, 38 aa, Glycine max
  unsure (1)..(38): unsure at all Xaa locations
  Clone ID: PAT_MRT3847_56155C.1.pep
CIICPLTLTAKNSYPTILITYRGGTNQFHXXPRTRNFC

SEQ ID NO: 237133 - protein, 75 aa, Glycine max
  Clone ID: PAT_MRT3847_56156C.1.pep
QWDRAGEKGFSTKGFSHPRGGGLSLKMKYEGGKICLRNSRWCLPQPNFVIYNRMCVLFFLFSQKKKKTKKNMNTP

SEQ ID NO: 237134 - protein, 41 aa, Glycine max
  unsure (1)..(41): unsure at all Xaa locations
  Clone ID: PAT_MRT3847_56157C.1.pep
DKQNLFNKVESHXHSTVGAANKPPYLHNNYTLLMFPFINLT

SEQ ID NO: 237135 - protein, 68 aa, Glycine max
  Clone ID: PAT_MRT3847_56158C.1.pep
LAWPYTVQAEIAYLEAHAGEVVKQAVEAPWEHTRVSSEGAYLQLAMPIRGKQHAHDRWPCDVLFSFSK

SEQ ID NO: 237136 - protein, 62 aa, Glycine max
  Clone ID: PAT_MRT3847_56159C.1.pep
EGRTINSLVFMAQTKLNGFYLSLFSGVLNRFYILQRLLKSVPRFLIRSTHLPNKFCGPPNYK

SEQ ID NO: 237137 - protein, 103 aa, Glycine max
  Clone ID: PAT_MRT3847_5615C.1.pep
MQTLYTDQYVHDRVLQRVNKSYYQLLHVTDYRMWKVNYKPNTLLLRDNAVRDHLQAVLNETAIVTSVISNARDSYNLDSVDGLRVGAATTYYVVDHDGDDSRR

SEQ ID NO: 237138 - protein, 62 aa, Glycine max
  Clone ID: PAT_MRT3847_56160C.1.pep
SRVRVLVGRLDIHYLARSGDWHIHDDYYYHHLLSSLSFKSCDQECVQQAALVLGHVRLMSER

SEQ ID NO: 237139 - protein, 110 aa, Glycine max
  Clone ID: PAT_MRT3847_56161C.1.pep
MAAKFLEDIEGLVVRLQLQDTWSWEGESSGRYTVWNAYRLLDRGSPNENQDGVFNIIWKLRIPSKASIFAWRLIRDKLPTKSNLRRRNVEINDVSCPFCRHHGEDASHLF

SEQ ID NO: 237140 - protein, 76 aa, Glycine max
  Clone ID: PAT_MRT3847_56162C.1.pep
VERLAAAQLVRSNLQGNLGGVAVGLPLRVVLARLDSVAWLHNAGTAPSRAGRPRAPAGAPRGPGRRPTRPSLPASA

SEQ ID NO: 237141 - protein, 71 aa, Glycine max
  unsure (1)..(71): unsure at all Xaa locations
  Clone ID: PAT_MRT3847_56163C.1.pep
TFLIAYVHFLYTVYRYDQIQLIYGEVKRLARVLEVKVVRKAQLFVHYKLLLPIWRYRAPFSLXALEGGSPL

SEQ ID NO: 237142 - protein, 49 aa, Glycine max
  Clone ID: PAT_MRT3847_56164C.1.pep
ARLPNVVQASASPQGKPLICGTIVLVRSTPSVVFSQSSHAWADAWAHDR

SEQ ID NO: 237143 - protein, 84 aa, Glycine max
  Clone ID: PAT_MRT3847_56165C.1.pep
EQCTPCDLNFYCVLFTGMSSGKSSVTSFQGSPVPAGLMEGGLIDVQHQLNPSSSDPNAPSLEPHKIVQQVTGLDLPAKLRRGAG

SEQ ID NO: 237144 - protein, 67 aa, Glycine max
  Clone ID: PAT_MRT3847_56166C.1.pep
DRRKSLGQTKKYHSYAALYHSIAIIIHSYLLKWLPSMLLSQPHRSIAQLLFIHKPYLPFLLCQQSVR

SEQ ID NO: 237145 - protein, 142 aa, Glycine max
  Clone ID: PAT_MRT3847_56167C.1.pep
MSSARLFLLSLLFLSLSLHLALSAPSPSPSPSYSVHAPNASPASLPLGSSPPFRSPVASPAHSPGSSPAPSPADGNHIDVYEDDRAENSSSRGGLSGSKKAGLAIGVIVAASVIVLAGMVYKKRKQNIRRSQYAYAVRREFL

SEQ ID NO: 237146 - protein, 42 aa, Glycine max
  Clone ID: PAT_MRT3847_56168C.1.pep
KVSRQNQINISNSRFKCPSLFSHLRITQNPLQILFADYLVKF

SEQ ID NO: 237147 - protein, 50 aa, Glycine max
  Clone ID: PAT_MRT3847_56169C.1.pep
KKLCIHDRIDFGRMFHGARSSHDWQLAENLIFGADPHTLNEALCITLHSI

SEQ ID NO: 237148 - protein, 55 aa, Glycine max
  Clone ID: PAT_MRT3847_5616C.1.pep
CQSIISMRITLIDSLAPKTSNIHHLRPSFWVQLTLTFHMNKYLWGAVSTIQRGCV

SEQ ID NO: 237149 - protein, 305 aa, Glycine max
  unsure (1)..(305): unsure at all Xaa locations
  Clone ID: PAT_MRT3847_56170C.1.pep
MASEKLVLAVIRAARPTFRNQNDKIAFAVHSSFLTSGYVLTATGSPGXPNNAFSDPSNDEVSVDHWNELNDEYAFVYANPEKGSEKVLVKCLVMNDKLLVHALTQGSSEPLSLEIDVGDYAEEDGVSNYSQQFENLDKLVKRIDGDILSKLDGSARASSSSRSSETSDRTRQRDTXILLLGFGEPGGPPTQFIFPSVAIGSGSDLVPGPAAGVFPSRGGHGIGGSMLVGPNDPRWFGGVGGIGGDPAFPGGLPGVPPGARFDPXDLPGVPGFEPNRFCKEXPRRPGYDTHPDWQHFRRDADSDYI

SEQ ID NO: 237150 - protein, 118 aa, Glycine max
  Clone ID: PAT_MRT3847_56171C.1.pep
YFVLLLYRIIFPSVAFLTGSDLVPGPAAGVFPSRGGHGIGGSMLVGPNDPRWFGGIGGDPAFPGGLPGVPPGARFDPYGPPGVPGFEPNKFARNPRRPGYDAHPDLQHFRRDADSDYI

SEQ ID NO: 237151 - protein, 84 aa, Glycine max
  Clone ID: PAT_MRT3847_56172C.1.pep
TVLNMGVCFTPLAGHQTPFKSIPYAAGSGRESLWSMDANMEITDRTPRVKGGSCITHSTKNIMTAIVKEQNLPEATCVNVEAIP

SEQ ID NO: 237152 - protein, 53 aa, Glycine max
  unsure (1)..(53): unsure at all Xaa locations
  Clone ID: PAT_MRT3847_56173C.1.pep
KNLKNKIKKKKKKKKXFFKKKKKKKKKKKKKKKKKKKKKKKKKKGGLFKRTKI

SEQ ID NO: 237153 - protein, 276 aa, Glycine max
  Clone ID: PAT_MRT3847_56174C.1.pep
PRVRGRVGGRVGVDIRSNNRSGDAILIHKKGKVVGIHCNPIQPDIFLTCGNDHFARIWDLRQIEAGSSLYDLKHMRVVNSAYFSPISGTKILTTSQDNRLRVWDSIFGNMDSPSREIVHSHDFNRHLTPFKAEWDPKDPSESLAVVGRYISENYNGAALHPIDFIDTSTGQLVAEVMDPNITTISPVNKLHPRDDILATGSSRSLFIWKPKEKSELVEEKDEQKIVVCGKAEKKRGKKNGNISDESDDEGFMSKSKKSKSKKTEWKLSRCTTKDNR

SEQ ID NO: 237154 - protein, 78 aa, Glycine max
  unsure (1)..(78): unsure at all Xaa locations
  Clone ID: PAT_MRT3847_56175C.1.pep
MGELYALDFYGIIFDICIESFLFAMKASKVXWPDLFDVVDVTSENWVIDHMHTLRPVLDTWYGHCLLVRLVLESIAPT

SEQ ID NO: 237155 - protein, 77 aa, Glycine max
  unsure (1)..(77): unsure at all Xaa locations
  Clone ID: PAT_MRT3847_56176C.1.pep
AALEGVVDXGLFLNMASSVIIAGTDGVSVKTNMXXSCFVVCVEFYNLMYKLLVXKQLIRCFNKGVPPMWGLTITYCG

SEQ ID NO: 237156 - protein, 150 aa, Glycine max
  unsure (1)..(150): unsure at all Xaa locations
  Clone ID: PAT_MRT3847_56177C.1.pep
GRLNLLLGWTLAVRLWRNYLHPTCGHLIPDHYANICAAVENSGRRACTNEWQQTFITVPSTLYLYYHNCFIHNYHASIFITSXGNNKSYNTSPXDNLAVADNKFGTLIRADTARHTXPHCTRKVADTNVVTYDTCSVXSLSVTPSYTIDL

SEQ ID NO: 237157 - protein, 59 aa, Glycine max
  Clone ID: PAT_MRT3847_56178C.1.pep
MIIRGSTILINLINFRWSKIAKHLPGRTDNEIKNFWRTRIQKHIKQAETSQQHGKFIRE

SEQ ID NO: 237158 - protein, 67 aa, Glycine max
  Clone ID: PAT_MRT3847_56179C.1.pep
VIIGPINIIEASLTIVYSIHNFDTYPTMYYTRTYVITDTTSSLHSSPPCLVYQRLSEVFRTRVLTRV

SEQ ID NO: 237159 - protein, 33 aa, Glycine max
  Clone ID: PAT_MRT3847_5617C.1.pep
LYTLFYSTSELSQTRTLETGGVTYYEALTVSPS

SEQ ID NO: 237160 - protein, 126 aa, Glycine max
  Clone ID: PAT_MRT3847_56180C.1.pep
ANRSNQPQSSQPRSPSQQLPHRGSASKVQYSAARRHSGLIDLQRYDPRYPGLLLQPDSRPISQEQLASEVKSIYAGLTMVETKCIHVDRAQAAAAQDPSDPNHKLTSEHWQALIALHRTLLHEHHD

SEQ ID NO: 237161 - protein, 143 aa, Glycine max
  unsure (1)..(143): unsure at all Xaa locations
  Clone ID: PAT_MRT3847_56181C.1.pep
MNEEGKVGLKGPLPAISKAKKRTKKPKKAAGTTGPERGTKTGYKTKTRRATMREPTDHPLSPGLCPQKKKTNQGKKPPTSPRGGPRXRGKSPGTKNQTPTPKGPPEPTQPPNQEWPPQGDPRAHPEINPGEPGRHPTGAQQNP

SEQ ID NO: 237162 - protein, 77 aa, Glycine max
  Clone ID: PAT_MRT3847_56182C.1.pep
MEKKIMNSSIAKKWRQLSGQDHGKGLIDPLDIDLRRYIIHYGEMAQAAYDAFNTETALKYAGSSRYAKKSFFSKGGL

SEQ ID NO: 237163 - protein, 199 aa, Glycine max
  Clone ID: PAT_MRT3847_56183C.1.pep
MNINNIIFWLWLLLPYLMLASSSSFCNHHDTSALLLFKNSFTLNTSLHYDYFWLSYSSKTESWKNGTDCCEWDGVTCDTISGHVIGLDLSCSYLQGQLHPNSTIFSLRHLQQLDLSYNDFSGSSLYSAIGDLVNLMNLNLSYSQISGDISSTISHLSKLPSLDLGDHQSMMRVDPYTWNKLILNATNLKELCLDGVDMS

SEQ ID NO: 237164 - protein, 83 aa, Glycine max
  unsure (1)..(83): unsure at all Xaa locations
  Clone ID: PAT_MRT3847_56184C.1.pep
MTKGTSSSGKRRNMTHTLCRRCGSKAXHLQKSTCGTCGYPAKCKRQYNWSGKANRRHTTGTGRMRHLQIVYRRFRHGFRVGST

SEQ ID NO: 237165 - protein, 36 aa, Glycine max
  Clone ID: PAT_MRT3847_56185C.1.pep
LESLEPLAGGQRHFSAKEQGSESTNQVEADEHYVYR

SEQ ID NO: 237166 - protein, 114 aa, Glycine max
  Clone ID: PAT_MRT3847_56186C.1.pep
AAPLPLTPLPAAHCTPPRVLLSEIARTAIQGPWAASSIVIDVLNGNTAHESQALFPGRCSPTRNGQSPLDPYRPRSSHVIQTPPRRRVYWWCRHSNAVSSAAIDSSNNFQTGDL

SEQ ID NO: 237167 - protein, 49 aa, Glycine max
  unsure (1)..(49): unsure at all Xaa locations
  Clone ID: PAT_MRT3847_56187C.1.pep
FTFPHIIRLYPLALQIFFQGKVCISXSSRVRCLSDQTEHVEVXSCELYR

SEQ ID NO: 237168 - protein, 47 aa, Glycine max
  unsure (1)..(47): unsure at all Xaa locations
  Clone ID: PAT_MRT3847_56188C.1.pep
TFFYDVFSVKXASFSGGAEMMSPLFLVLSAIQKKRVSCVLFAGCSHF

SEQ ID NO: 237169 - protein, 46 aa, Glycine max
  Clone ID: PAT_MRT3847_56189C.1.pep
QADASRKLALLLMYPRLKRGIWFWWATNLHKLPHTGHRNQWNQTFP

SEQ ID NO: 237170 - protein, 39 aa, Glycine max
  Clone ID: PAT_MRT3847_5618C.1.pep
AIQLRKSKPSTPTTRSPGLTTATEHSQPGACCLQQPFRA

SEQ ID NO: 237171 - protein, 94 aa, Glycine max
  unsure (1)..(94): unsure at all Xaa locations
  Clone ID: PAT_MRT3847_56190C.1.pep
LIPCMLNGCYMNXVRILHVQSRSSIKNKDSILREGPLAKRKVQKSSEAEGVCECQSYLISLQFVLCKPKEYGYVTTQDSVSLLPLLPKTGSYFV

SEQ ID NO: 237172 - protein, 112 aa, Glycine max
  Clone ID: PAT_MRT3847_56191C.1.pep
EKTKGIRLLGRDPFFWKSVLERTKPDPNLSSSQKNAPKGKWGGLIYEKSKGGENERGPLLGLGKSPFISLISFSSNSNPRKRKRAFAFFFFFFADPHLGRKTPFWIGFQVPI

SEQ ID NO: 237173 - protein, 50 aa, Glycine max
  Clone ID: PAT_MRT3847_56192C.1.pep
APLIANCSPGVFPTSDRQILAADSVAVIAPFYFYPCHWQFASVCMSKCQT

SEQ ID NO: 237174 - protein, 101 aa, Glycine max
  Clone ID: PAT_MRT3847_56193C.1.pep
WPNFLILQKTSLKKNLFEINPCWPPKKFFPINFTKNFLFWENLQKGPTRQSFSPVGDVKYFKVFFFFRKFLFFKNPCGFFPKLPLFKNFPLVYNGAPKIIG

SEQ ID NO: 237175 - protein, 92 aa, Glycine max
  Clone ID: PAT_MRT3847_56194C.1.pep
TVISLDILFSPRTLYDQFPRVEGSISSYYIGSNVLGFCAVLTKGSIPTLYCPKLLPLLHHLGKRASIYASLPSPVIQKEKSLYGVFVCQKLL

SEQ ID NO: 237176 - protein, 92 aa, Glycine max
  Clone ID: PAT_MRT3847_56195C.1.pep
LIIMGVFFLSKWGKGKKKVYLGFLKTKGTFVKKLAGKNFGKKGLLIKKFKDKLYLFKSAGGMDPCKKIKPAPFFFFGNPSKLANKKTSCFFW

SEQ ID NO: 237177 - protein, 59 aa, Glycine max
  Clone ID: PAT_MRT3847_56196C.1.pep
MGDLQRRDLFLGLLIEVAKERALPVEPEEGGWGMSYDLLYGRAGFLWGALVANKHLGDD

SEQ ID NO: 237178 - protein, 128 aa, Glycine max
  Clone ID: PAT_MRT3847_56197C.1.pep
MPVMKRYVLRLFISLKYITANVVDRNNGRFVVSSSTAEQTIKESLECNRSCNAKAAAVVGEVLARRLKVEGLNEGEGRGIHANITKEVGKKGFKNQTKVWAVVNALKNNGVKLILDDDDDDKNCLPNS

SEQ ID NO: 237179 - protein, 146 aa, Glycine max
  Clone ID: PAT_MRT3847_56198C.1.pep
MDRLKSSPQLMIVSDLDHTMVDHHDSENWSLFRFNALWEAHYRQDSLLVFSTGRSPTLYKQLRKEKPLITPDIAIMSVGTEITYGKSMVPDDGWVRCLNQKWDKDIVIEETSKFPELKRQAETEQRPHKVSFYVEKDKAKHVTETL

SEQ ID NO: 237180 - protein, 66 aa, Glycine max
  Clone ID: PAT_MRT3847_56199C.1.pep
PNWFSNPFCGEKWGKMVRFALLAKFGIRHPTLTLNNWVPKLQKKKKNDFRPSSHGFPYEKGWKILF

SEQ ID NO: 237181 - protein, 64 aa, Glycine max
  Clone ID: PAT_MRT3847_5619C.1.pep
ILKAIRVKKLITNYSQINVQLRQKRMENIPLQNTPCLKAVNSNIKHMQGNALETASVSMRIKLN

SEQ ID NO: 237182 - protein, 389 aa, Glycine max
  unsure (1)..(389): unsure at all Xaa locations
  Clone ID: PAT_MRT3847_561C.1.pep
GKHKVENELPEKIERLIRCEASSYQKLLMKRVEENLGAIGNSKARSVHNSVMELRNICNHPYLIQFHAKEVDNFIPKHYLPPIIRLCGKLEMXDRLLPKLKATDHRVLFFSTMTRLLDVMEEYLTSKQYRYLRLDGHTSGGDRGALIELFNQPGSPYFIFLLSIRAGGVGVNLQAADTVILFDTDWNPQVDLQAQARAHRIGQKRDVLVLRFETVQTVEEQVRASAEHKLGVANQSITAGFFDNNTSAEDRREYLESLLRECKKEEVAPVLDDDALNDLLARSETELDIFEAVDKERKEDELATWKKLVLGQAADGSDSDIPPLPARLVTDEDLKQFYEAMKISDVPKAEVESSGVKRKGGYIGGLDTQHYGRGKRAREVRSYEEQWTE

SEQ ID NO: 237183 - protein, 88 aa, Glycine max
  Clone ID: PAT_MRT3847_56200C.1.pep
MSDKVTIERVKDELYSHRCYTMVKITLCGFPEIRDLAVYEKNNMMTIAVGCCNPEQLRDLTYCKGCGTIYDNALVEPSKPYPRLNLKR

SEQ ID NO: 237184 - protein, 209 aa, Glycine max
  Clone ID: PAT_MRT3847_56201C.1.pep
MAIDSVYTSSPPFQSGPSGHSRHFYLAVDRLHFKMQTVIELVDLVARRPCLPIVVCCSTRDDLDSLCSSLSTLPFLSSSALYSDLGEDERSFILEKFRQVTARWNQTNHGGAPNEDEIGKDERSHMIIVTDACLPLLASGEFPLNAHLLINYELPAKKETYGRRLATCLTADGIVINMVVGGEVVTLKSIEESSNIVMQEMPMQILDIL

SEQ ID NO: 237185 - protein, 237 aa, Glycine max
  unsure (1)..(237): unsure at all Xaa locations
  Clone ID: PAT_MRT3847_56202C.1.pep
MAIDSVYTSSPPFQSGPSDATRXHFYLAVDRLHFKMQTVIELVDLVARRPCLPIVVCCSTRDDLDSLCSSLSTLPFLSSSALVSLNSFSSSXFHALHYFPNSFLFSSCQYSDLGEDERSFILEKFRQVTARWNQTNHGGAPNEDEIGKDERSHMIIVTDACLPLLASGEFPLNAHLLINYELPAKKETYGRRLATCLTADGIVINMVVGGESRNFKSIEESSNIVMQEMPMXXLDIL

SEQ ID NO: 237186 - protein, 197 aa, Glycine max
  Clone ID: PAT_MRT3847_56203C.1.pep
AQGSNDEEKVLACLQRANPKLVAFIHLIEDEKTSFESVKEEFKGIMSNAAVEVRRPFCNCLIDICRNKDLRERAHELLYLGTLYGLYPGLHNKTDNEWCLDVRSLSVGAALTALEEWMWTLTKIVKREETLPELFLAQTGTGAHKFAQGLNISFASHLRKLAAPFKQSEEKIGCFIASREDLVSWVQSKSTAAATAT

SEQ ID NO: 237187 - protein, 62 aa, Glycine max
  Clone ID: PAT_MRT3847_56204C.1.pep
LTFVPNLYLLRKEYHDQYLVSMFAVLSALTIGSTTASTSSPYSSASKVHSFHSSSRLQLHFN

SEQ ID NO: 237188 - protein, 80 aa, Glycine max
  Clone ID: PAT_MRT3847_56205C.1.pep
VDITTCTSITINPNKSCQGLETPRPNPKVQKFKINIIIIHIMQHAMPSGYTHLVLQHLIITIKIMQHALPNGHSHLVLHI

SEQ ID NO: 237189 - protein, 111 aa, Glycine max
  Clone ID: PAT_MRT3847_56206C.1.pep
KNFVIVPGIAKNSGPMGGHHGRTLGAALLYDHTFPYGGPQFHIFSIMTPRFNSVPGCFLGETWKTLNYPTISLEEKPVSPGGVIERRPSPLLLSNNCPLLMGKGTPPDRIN

SEQ ID NO: 237190 - protein, 47 aa, Glycine max
  unsure (1)..(47): unsure at all Xaa locations
  Clone ID: PAT_MRT3847_56207C.1.pep
PIFKSTSSKITILPIKLXSLSLSYTRFFLPQFFFSPYHPFLPLNLXX

SEQ ID NO: 237191 - protein, 90 aa, Glycine max
  Clone ID: PAT_MRT3847_56208C.1.pep
LIGHGLSTFAYLWLWTWSLASWPRVIGNAPAFVDELRGSRGDGGASVARCRSSPGCCGVSPCACLGTQYFLMKARLVGGMMPLLEVTGTP

SEQ ID NO: 237192 - protein, 105 aa, Glycine max
  unsure (1)..(105): unsure at all Xaa locations
  Clone ID: PAT_MRT3847_56209C.1.pep
GGFVRWFSFLLPGSLGWASWGCGLLFRCVLAGXCVPXCCRPFPRGXFLALRVXASXXXXVFCXPXXXFXCLXGXXRXWXXXSGGRFWGXXPWWRCXXGCGVXKNQ

SEQ ID NO: 237193 - protein, 35 aa, Glycine max
  Clone ID: PAT_MRT3847_5620C.1.pep
SLTSACSRAGQIMCEKYNFFIYFKKVNLKLRGLSG

SEQ ID NO: 237194 - protein, 37 aa, Glycine max
  Clone ID: PAT_MRT3847_56210C.1.pep
ANKFSMKLVLNYIWFLTQIVSLWFCTWMIDKKMSKCH

SEQ ID NO: 237195 - protein, 39 aa, Glycine max
  Clone ID: PAT_MRT3847_56211C.1.pep
MRAPKSLFKGPAPDIPRPVPGPGALAGYHKSQVLVFGKK

SEQ ID NO: 237196 - protein, 69 aa, Glycine max
  Clone ID: PAT_MRT3847_56212C.1.pep
SIILGQEQDSFGGNFEGSQSLVGDIGNVNMWDFVLSPDEINTIYLGGPFSPNVLNWRALKYEVQGEGFT

SEQ ID NO: 237197 - protein, 455 aa, Glycine max
  Clone ID: PAT_MRT3847_56213C.1.pep
ARAYDHQSVPPNYAPPNTNSTPSVYNSAPYSYTGVSSVPPIPTYEPAYDAPVRPDHGGGYFDDRYCSGFTRSHSDLGSDFYGKSVGGASRYDGVADDGYGDGVYAYEGGKVEPYGARGTAPKSSTWAAFDDYGRSISFPSQKESSVGGKIVKAVPKADTQEDVKGGGVQKFRVKLLAESGGQSTMDVLCQIGLDGIRMLDPNTSRTLRIYPLENITRCDKSARSTFAFWSKSPVDIEPRRIRLQSNSYTTNTLLDIVTAATIQFKEMGGSRWPAEAVKPNEQPTERKKGFGDWMNLIKPANEEKDHWVPDEAVSKCTACGTDFGAFVRRHHCRNCGDIFCDKCTYGRIALTADENAQPVRVCDRCMAEVSQRLTSAKESSSKPALQSHEDLARKLQEELERNRKTSGSKSDGSARRMKEVACPICTVHLQVQVPSSGSETIECGVCQHPFLVSAH

SEQ ID NO: 237198 - protein, 39 aa, Glycine max
  unsure (1)..(39): unsure at all Xaa locations
  Clone ID: PAT_MRT3847_56214C.1.pep
LFFLKVXLPWRRYISGNFLNMLTIATYQDYACLXGATVT

SEQ ID NO: 237199 - protein, 59 aa, Glycine max
  Clone ID: PAT_MRT3847_56215C.1.pep
GNKFICPCPGFPANAQGKVVRGPAPLFLALAPFYINNGKVGFVPWVEPDFRPGDAPWGG

SEQ ID NO: 237200 - protein, 40 aa, Glycine max
  unsure (1)..(40): unsure at all Xaa locations
  Clone ID: PAT_MRT3847_56216C.1.pep
XXXTKQTKLRLKSKPRIFFSNQRMGSTRMNKIIIYLKQTL

SEQ ID NO: 237201 - protein, 65 aa, Glycine max
  Clone ID: PAT_MRT3847_56217C.1.pep
RSRARWLRRLALGLVIWWSVCSSVCLVSELSREAVLGPREMKGLAGLISPPPSDLCVNTEKKSLY

SEQ ID NO: 237202 - protein, 170 aa, Glycine max
  Clone ID: PAT_MRT3847_56218C.1.pep
PRVRVEEGEGKGTLHLTGQLGDVMKESAQIAHTVARRILLEREPENPFFANSKLHLHVPAGATPKDGPSAGSTMTTSLLSLAMKKPVKKDLAMTGEVTLTGKILPIGGVKEKTIAARRSEVKTIIFPSANRRDFDELAPNVKEGLDVHFVDDYMQIFNLAFDDEQSQNIK

SEQ ID NO: 237203 - protein, 69 aa, Glycine max
  Clone ID: PAT_MRT3847_56219C.1.pep
GLKRKTIAARTSEVKTIIFPSANRRDFDELAPNVKEGLDVHFVDDYMQIFNLALGDDQSQNIERVINVL

SEQ ID NO: 237204 - protein, 35 aa, Glycine max
  Clone ID: PAT_MRT3847_5621C.1.pep
HYDTLNDWLAEAKPYYPTPLRTPSERASKTGSIFP

SEQ ID NO: 237205 - protein, 105 aa, Glycine max
  Clone ID: PAT_MRT3847_56220C.1.pep
KPVLFQVECVLVALNPMDISSPFLKGNVKISSALEWIRPWALYVPDWAPHKECYPMAMTCKQPHVKMAFQTSRALESVKNSLKAGPVFPSNASKVPIKIPPLNGD

SEQ ID NO: 237206 - protein, 52 aa, Glycine max
  unsure (1)..(52): unsure at all Xaa locations
  Clone ID: PAT_MRT3847_56221C.1.pep
VKIVTGGPDAIPVKGLSLEELXRESSSVGQSPLTGFYSWQTFVLPFFTAVFK

SEQ ID NO: 237207 - protein, 164 aa, Glycine max
  Clone ID: PAT_MRT3847_56222C.1.pep
TPLPTVVDVYFTDTKRTRFSITTPCRQKTNRKFFIHCATSNSTPEAPPTLTSDNNNNNKKNTSLSDQLAPLANKTLSSATRDQSYALSKPKSTWVNPTKAKRSVLSSERQKRATYSYSPQLRDLKRFAQKLNESGSSEDEFLACLEEIPRPISRENALLILNTL

SEQ ID NO: 237208 - protein, 99 aa, Glycine max
  unsure (1)..(99): unsure at all Xaa locations
  Clone ID: PAT_MRT3847_56223C.1.pep
GEFGFQPLGIAXDPASLRRYMHAQLAHCRFAMLEVFGILMTDLLLVQGFSNIPVWLETGATQYDFANTETLFLDQLFLMGLAETKRSVDHVNPGSAAYD

SEQ ID NO: 237209 - protein, 70 aa, Glycine max
  Clone ID: PAT_MRT3847_56224C.1.pep
EVEGPSKRPKQKPFSPVTKRVGFDPVSPPKIYKFLTRLFWFFGCPSLLSFNPRKFRFLSLLVFRGKTPSV

SEQ ID NO: 237210 - protein, 95 aa, Glycine max
  Clone ID: PAT_MRT3847_56225C.1.pep
QIRKTSFSTAMNAFELISMSKGLNLYILFDSHQGFLWHTRFTSLSSAYEILNRSVESARPFGFDVHIKNYNHNLAYVKPAPKGYLNVATKIFQAA

SEQ ID NO: 237211 - protein, 106 aa, Glycine max
  Clone ID: PAT_MRT3847_56226C.1.pep
NIQKLDPLSTRENTRGQERANAAPTGRGRGFRSRIIQTSHSLLEQDTKPQRGGTYGPNVKTCYLEGTPCRDPLAPLQEDRGRVRWMPTRCPPGGPASRGGCSGRPQ

SEQ ID NO: 237212 - protein, 43 aa, Glycine max
  Clone ID: PAT_MRT3847_56227C.1.pep
QFTLKPLKIFKNNEEMFCKCFDQVQHHIHVTILVALSYYKSYL

SEQ ID NO: 237213 - protein, 75 aa, Glycine max
  Clone ID: PAT_MRT3847_56228C.1.pep
NKTQTNLRGRKNTKRRALCHGSFTKIARPFMSYGTQRTNSITVSTMLENTNGSSIVNTIIYAKDIIMANTKLENT

SEQ ID NO: 237214 - protein, 364 aa, Glycine max
  Clone ID: PAT_MRT3847_56229C.1.pep
MYSNMLVNCSNCRTPLQLPPGAGSIRCALCRAVTLIGDPRALPSQPPASTHAPPPPSSPYSHAPPPPNPHGRKKAVIVGISYRFSRHELKGCINDAKCMKYLLINKFSFPESSIIMLTEEEDPHGPKFPTKHNIRMAMYWLAQGCQPGDSLVFHYSGHGSQQRNYSGDEADGYDETLCPLDFETQGMIVDDEINAALVRPIPHGAKLHALIDACHSGTVLDLPFLCRMNRSGQYVWEDHRPRSGVWKGSSGGEVICFSGCDDHQTSADTSALSKITSTGAMTFCFIQAIERGHGATYGSILTAMRTSIRNVGGGGGGTGGGDVVTSLLSMLLTGGSLSGVGGLGQEPQLTACEAFDVHRKPFSL

SEQ ID NO: 237215 - protein, 78 aa, Glycine max
  Clone ID: PAT_MRT3847_5622C.1.pep
RTARRTNFMPIVPNSDEASALDTASDVAGNDLGLGFARRLAGSSPQQIKQKGDPSSSAALSESEESGVADVKPKEEGR

SEQ ID NO: 237216 - protein, 149 aa, Glycine max
  Clone ID: PAT_MRT3847_56230C.1.pep
IPHGAKLHALIDACHSGTVLDLPFLCRMNRSGQYVWEDHRPRSGVWKGSSGGDIICFSGCDDHQTSADTSALSKITSTGAMTFCFIQAIEGGHGATYGSILTAMRTAIRNVGSGGGGSAIGGGDVVTSLLSMLLTGGSLSGVGGLRQVI

SEQ ID NO: 237217 - protein, 82 aa, Glycine max
  Clone ID: PAT_MRT3847_56231C.1.pep
ATIIQIRKLNYEMSINKQRKDNHTLSTSVEGKENITSSSFLAYSCLIYKIKSIVLVFNIRHIGNNNGSSITPLDSLFRLCEL

SEQ ID NO: 237218 - protein, 117 aa, Glycine max
  Clone ID: PAT_MRT3847_56232C.1.pep
RVSGYLNQPSSYSYCAPTAAQPYGAHPSLQSYGAPPSSQSYGAPTTPQPYGAPSSAQPYFVYPYAQPYGPYAVPYNKTLKNESHSHGGGSRGGYPAPGDARPVASMVPFAYPSGTDP

SEQ ID NO: 237219 - protein, 138 aa, Glycine max
  Clone ID: PAT_MRT3847_56233C.1.pep
EVSHHPQPYRRLLDTTICNTPPPPPRSNPDFQPTQSRLAYPHQPPDYLTLTPIMPSRFHQLIARDHEAQLSQTIVNLLIALLVLLVISICMCGALLFFRHRRRSQKSLHGLPLYNDKRSSGSSIASSIRRPFSKTTES

SEQ ID NO: 237220 - protein, 89 aa, Glycine max
  unsure (1)..(89): unsure at all Xaa locations
  Clone ID: PAT_MRT3847_56234C.1.pep
DYQTHHLSIVNAKDCVVFLPLLIRFILRSSSGDCSEXHHHHSQMDTIGCLHYSGCSQHSVGAEGLARLAINFLKSMENSLSDFAMVVKA

SEQ ID NO: 237221 - protein, 90 aa, Glycine max
  unsure (1)..(90): unsure at all Xaa locations
  Clone ID: PAT_MRT3847_56235C.1.pep
KILKFVVQIFRLRDQGEINNNNNNIKKNKSGEFLSCFSIXLVLLDVDDIRVCLYLNFIKIFWLLFLMFQLVMCSNFNGISTLYFLSPKMY

SEQ ID NO: 237222 - protein, 205 aa, Glycine max
  unsure (1)..(205): unsure at all Xaa locations
  Clone ID: PAT_MRT3847_56236C.1.pep
MMNAATAANSSVYSQTQCRPLSSDVRGSIPYLNERKSRLVVRAGGGGRPPKEDGEKQQQQQQQPVSLRLDDVNPVGLGRRSRQLFDEVWRKFSGLGQISGTIRSDDQEALDALLVREGPMCEFAIPGAQNTTVLVVGATSRIGRIVVRKLMLRGYAVKALVRRADXERFKSCLSRSVEIVIGDQAEKLTDAIKANCSRELQFYRR

SEQ ID NO: 237223 - protein, 136 aa, Glycine max
  Clone ID: PAT_MRT3847_56237C.1.pep
IRHQPAAPLTMDLLAVLSTTLSGGSAPDASASPSQNHSCNSDGGSADQTRQQQFFSVGGERSSSSSRSPVEDSDCQEDVRVNLPLQLFSSSPEDDSLPKLASSRKYFSSDSSNPAEERSPSSSPVVEMLFDLQGGA

SEQ ID NO: 237224 - protein, 133 aa, Glycine max
  unsure (1)..(133): unsure at all Xaa locations
  Clone ID: PAT_MRT3847_56238C.1.pep
QIFLEVRDALPMMTIVTDQGTAVVTSVPNDALRHYMGLHDLHATAELRETYRGKDECAHASESVPIIEVPQIRNTYTQTVXLQMIIDCLNDKEKVVDTKKLTYLNGLTERTMTVXELARRRVKEAKHFITITL

SEQ ID NO: 237225 - protein, 142 aa, Glycine max
  Clone ID: PAT_MRT3847_56239C.1.pep
MDSQSETQQLAVPKMEDFYFGDHQQDLKAMIVPGFKALSGTNSGSEVDDSTSNKTVTRVAPAALGGAHSGESNCKGSALTLCDVAANGSDDSNNKAVVAVGFDTRKKVAHTFGQRTSIYRGVTRHRWTGRYEAHLWDNSCRR

SEQ ID NO: 237226 - protein, 78 aa, Glycine max
  unsure (1)..(78): unsure at all Xaa locations
  Clone ID: PAT_MRT3847_5623C.1.pep
AIELSVPHPLGYQSGAYSQVFLPAEEGVXSYIRLLSNAYVDVIDSCYHRLVRYWLNTHAFVEPFIISTNWHLVVDSPY

SEQ ID NO: 237227 - protein, 114 aa, Glycine max
  unsure (1)..(114): unsure at all Xaa locations
  Clone ID: PAT_MRT3847_56240C.1.pep
KKGIGPIGPGGPPNGQRGKSPKNKEGPPLGGGKKNPRGPFHXPRGPPGPGGPPGNSGPGPGGEPIFPKGRRKKAGGKKGKKGSRGKNVIPSKFHKKKKPEKKRGKPGGPKGGPT

SEQ ID NO: 237228 - protein, 100 aa, Glycine max
  Clone ID: PAT_MRT3847_56241C.1.pep
HTFCCGYLVRRVYGKGTMAAQTLIVGPIDVLISFGQTIMGAELVTSVGLSHMWLSDASKELVEWQPNGRTPFCSLRMMKFPSWVSWEAVHMDWMPCITVC

SEQ ID NO: 237229 - protein, 86 aa, Glycine max
  Clone ID: PAT_MRT3847_56242C.1.pep
TPRATSLSAFSLNLAKWGIRSPSRVRKHNINFASRTAKINLHGRIILPKGAAPIKTSELREWLLKLWHPVCQWKVTSIISDDHRKE

SEQ ID NO: 237230 - protein, 194 aa, Glycine max
  Clone ID: PAT_MRT3847_56243C.1.pep
LELEPIRLEEGSETRFDQDPLLGENSKCCSCCNEQLVLKGYDQRLVITKSIGSGSADFDGSNAVGNKFHKKRRVKPFVSSRAAHLRNKHEDPLSHVGYTELKITSDTESEPDVSLSDDDGTSIPVQGTDDTKEDIEVSCEHMEPHIHDSNENLAFEKLGTSASGLQPSLSESGMRLENIDVHGTKSTATTESRD

SEQ ID NO: 237231 - protein, 50 aa, Glycine max
  Clone ID: PAT_MRT3847_56244C.1.pep
SSVRSRGAITGQRSGNVDTGVLDRGTRPPLVVAPSLWGQQLCESGSIARP

SEQ ID NO: 237232 - protein, 76 aa, Glycine max
  Clone ID: PAT_MRT3847_56245C.1.pep
RVSGWQKDSGLTVEYGGGMSYVAKKDTQPQEKDLTEGNFASHIKFCSTTEKVTSTKAHLVRVITFKYDIIGAGSHS

SEQ ID NO: 237233 - protein, 62 aa, Glycine max
  Clone ID: PAT_MRT3847_56246C.1.pep
TGECAFWMGLKWQCHACQLVLSDRCKARTLMVKNQISLSLSLPQKWKSRKHRNFSLTHNWRL

SEQ ID NO: 237234 - protein, 173 aa, Glycine max
  unsure (1)..(173): unsure at all Xaa locations
  Clone ID: PAT_MRT3847_56247C.1.pep
LLNFLQHEPTANXLDYFLERKKLSELLRRNPIDRIAAISFCDQFVEQALVGERDLATMERNNAIEKDDFMSTHYKIEDLWLCALSCFAACDWDLSLLIKNSNAIRVGALLSRLIRWAFESDLSSQSRTLFAEEPFKFLNSFDRVGASRLFSGWLYARWVLKTDLDGRFPVPPA

SEQ ID NO: 237235 - protein, 91 aa, Glycine max
  Clone ID: PAT_MRT3847_56248C.1.pep
SRKLANQELMKKKRSLKVGREVLPGKEVKNMTEMKRRRGTLQLGMDMGRTGMQENGGCSRKKGFECGRLTGSRCDSLTSRLVYAKCALRTC

SEQ ID NO: 237236 - protein, 136 aa, Glycine max
  unsure (1)..(136): unsure at all Xaa locations
  Clone ID: PAT_MRT3847_56249C.1.pep
RGVAAWKKGCLMDKIXVMSGNASVKRSDWALLVQVFLTNSNSTEHFDACKWTKSXEPHSWELIFPIEVCGPNFGYXMLSFWWANXTLWHLSFLIXHTKQSTVFDXISLGISQEFVIXGSTLMPFFSVSQVTCQILL

SEQ ID NO: 237237 - protein, 124 aa, Glycine max
  Clone ID: PAT_MRT3847_5624C.1.pep
AGLSRLDTSVIFEALATGCTSTTAYMSIHNMCVWIIDRFGSEEQRHRLCPPLCTMEKFASYCLTEPGSGSDAASLMTSAVRQHDHYILNGSKAFISGGGEADIYVVMCRTGGPGPRGISCVVVE

SEQ ID NO: 237238 - protein, 70 aa, Glycine max
  Clone ID: PAT_MRT3847_56250C.1.pep
LGQSSLLERVSDMGCILILVMFERRDFRNGVTAYAVFSFQSNRRHRRIHFMQSKLKPKPKINSTALTKSS

SEQ ID NO: 237239 - protein, 87 aa, Glycine max
  unsure (1)..(87): unsure at all Xaa locations
  Clone ID: PAT_MRT3847_56251C.1.pep
IGRPISQLAPVQPIHISSLDLSMGXLASQGFGGPSLDLDLLPGSSSSPMLNVPPFQPACLSDMDKSLMSDIASNAMEEMIRLLQTNE

SEQ ID NO: 237240 - protein, 98 aa, Glycine max
  unsure (1)..(98): unsure at all Xaa locations
  Clone ID: PAT_MRT3847_56252C.1.pep
MASATVSAAKRAIHANGKGFSEFYGIRRSSGXLAVCRKSSEDLHSGIAFQTYAVTSSTRYMKAVTEAKLXLLINRYAKIGTNYLTRCHSPIDFRLDVI

SEQ ID NO: 237241 - protein, 169 aa, Glycine max
  unsure (1)..(169): unsure at all Xaa locations
  Clone ID: PAT_MRT3847_56253C.1.pep
MKSVEVAKTVLEVADVAWTAVEHTHHLRHRSHPVPAAPAADVCPSDQDLESLRSENRRLRNLLDQNLKLLQNLSEATCFDNCPPDLSDRLXLPRFLQQETASGGNQFPFKEATELDHRSADILVNIDSQEPSWWVWVTDEWXPINVEELSGIDDESYVYSFYQIMYFSF

SEQ ID NO: 237242 - protein, 266 aa, Glycine max
  Clone ID: PAT_MRT3847_56254C.1.pep
MKSVEVAKTVLEVADVAWTAVEHTHHLRHRSHPVPAAPAADVCPSDQDLESLRSENRRLRNLLDQNLKLLQNLSEATCFDNCPPDLNDRLVATMRSDEYLTRLKYLQQETASGGNQFPFKEATELDYRSADILVNINSQEPSWWVWVTDEKEPINVEELSGIDDENYLVISEEHVVDGVANFMARCILSNPKALKFSPEELQKALSKALRGTSKLEKIMDIWEAGKLFYCLSTWGLALAGLYQSRAILRVAAKGVHSGSKLALKAL

SEQ ID NO: 237243 - protein, 68 aa, Glycine max
  Clone ID: PAT_MRT3847_56255C.1.pep
FRCEIPRAKRSFEDKPTISIKGLIYCWQSSGQMKFYQWSTRGVKVHVQGNSSRKLNVVMRKRIIVLMY

SEQ ID NO: 237244 - protein, 77 aa, Glycine max
  unsure (1)..(77): unsure at all Xaa locations
  Clone ID: PAT_MRT3847_56256C.1.pep
SLLASWCSSWHRCLLFGLSLLASGFPVSLWVLRPPPRGGSVSASSPVGGAPPHQRMFRXXVSLCCLSVLLRFFSLPL

SEQ ID NO: 237245 - protein, 40 aa, Glycine max
  Clone ID: PAT_MRT3847_56257C.1.pep
IEIEIGLSIWDHLLSDRNYDLNESKNCVRKVGSGEMESEV

SEQ ID NO: 237246 - protein, 46 aa, Glycine max
  Clone ID: PAT_MRT3847_56258C.1.pep
ELCGVLCHIPPFPNSHLESQGSSFLNRICIFELNGWVLLQFREKGI

SEQ ID NO: 237247 - protein, 55 aa, Glycine max
  Clone ID: PAT_MRT3847_56259C.1.pep
QKKKREECDEKIKKKYLCCQHLYSSTNINHYFYWRLFCINIMIRKNKFKTRKKSM

SEQ ID NO: 237248 - protein, 236 aa, Glycine max
  Clone ID: PAT_MRT3847_5625C.1.pep
MLHNKSFVKKTKGGKVIKQVREHYLRDDIYCGAPFCTVCDSSSARLSASPSTILVVDTNVVLNQIDLLENPAIDDVVVLSIVLEEVKNKNMSVYNRIRAICSNSMRKFFVFSNEYHRDTYIKEMSGETKNDRNDRAIRVATQWYQNHLGGAVKVLLLTNDKENKRKASEEGILAETVESYVKSLDQPDLLDLLVRPASEDVDMEEVEDLRPCKRKVIYCEHKPVSEITCGVAWGDM

SEQ ID NO: 237249 - protein, 121 aa, Glycine max
  Clone ID: PAT_MRT3847_56260C.1.pep
SPTHQKAHEWGGTKGDNCYKETDQITEEGYWGNGSIPSMMRVVENVIENLNGRGLNVQLLNITQLSEYRKEGHPSIYRKQWDPLTEEQLSNPKTYADCIHWCLPGVPDAWNELLYAYIFHR

SEQ ID NO: 237250 - protein, 34 aa, Glycine max
  Clone ID: PAT_MRT3847_56261C.1.pep
MRRSRSSETMNIPDGVSIKVHANVIEVEGPRGKS

SEQ ID NO: 237251 - protein, 64 aa, Glycine max
  unsure (1)..(64): unsure at all Xaa locations
  Clone ID: PAT_MRT3847_56262C.1.pep
WVGSHLEDDTRSPVAPATLYKALVXDADNVIPKAFXAFRSVENLXGNGGPGTIKKITFVEDGES

SEQ ID NO: 237252 - protein, 36 aa, Glycine max
  Clone ID: PAT_MRT3847_56263C.1.pep
GSSTSPSNLIVFNKLLKHVWVVFWNPSEVSVINPVN

SEQ ID NO: 237253 - protein, 260 aa, Glycine max
  unsure (1)..(260): unsure at all Xaa locations
  Clone ID: PAT_MRT3847_56264C.1.pep
MCVPSDVAKLASPQSSDADVGMASPHTEAAADKNKQLVNPVSRSPKASTATRLQESTGLKASNSTTXPVNRYKLDNRPAAFCIIPPLPSGLANVAVLKEHFSPYGELSAVELEDVQVNDSSQQEAHITFTTRWAAERAFINGKCWNDHNLKFMWLTPTSSSSISSNATASRERSLSAPKEPLDSDDHSEENLENCVNQEAMVSDDEHKNSETKNGLELTEREASEDRQCTTRQVSSPKQSPRLRAISVEDLLMVRFVQAG

SEQ ID NO: 237254 - protein, 205 aa, Glycine max
  unsure (1)..(205): unsure at all Xaa locations
  Clone ID: PAT_MRT3847_56265C.1.pep
MATHVSHVIVAAAFLLLLLPFSFSFSISHSHRSAAINLFAATPTSLEDAYEALRVFQILGIEEKNTPVNEDTCQKVVESLASSSPLKDLFYALKVNAILKCNVNGNVFKDIASRLKATVHDASALLDIYYSIGGLVVIKDQDSNVDVLLADVDGVFHXIKVLSQXDGRWRYSSDNPESSTYAGWIKLLNPLLELISLASSEFDQS

SEQ ID NO: 237255 - protein, 147 aa, Glycine max
  unsure (1)..(147): unsure at all Xaa locations
  Clone ID: PAT_MRT3847_56266C.1.pep
LNLSNLCVLLRLFDYIQGKNNYKQKIEMTAPVISEVLPSDGPFCESSFVVSFYVPKENQANPPPAKGLQVQRWKTVFVAVRQFGGFVKDSSVGEEAAALKASIAGTKWADAVEKSQKRAGHASVYTVAQYNAPFEYDNXVNEIWVLV

SEQ ID NO: 237256 - protein, 234 aa, Glycine max
  Clone ID: PAT_MRT3847_56267C.1.pep
MAATIITCKLSLLLSLLSVSLLLGVSSSDTLQNVGAIPPTCKRIECPSYDVIHFGNGYEIRRYNSPVWISNSPILDISLVEATRTGFRRLFDYIQGKNNYKQKIEMTAPVISEVLPSDGPFCESSFVVSFYVPKENQANPPPAKGLHVQRWKTVFAAVRQFGGFVKDSSVGEEAAALKASIAGTKWADAVEKSQKRAGHASVYTVAQYNAPFEYDNRVNEIWFLFDIENEPQTV

SEQ ID NO: 237257 - protein, 234 aa, Glycine max
  Clone ID: PAT_MRT3847_56268C.1.pep
MAATIITTCKLSLLLSLLSVSLLLGVRSDTLQNVGAIPPTCKRIECPSYDVIHVGNGYEIRRYNSPVWISNSPIQDISLVEATRTGFRRLFDYIQGKNNYKQKIEMTAPVISEVLPSDGPFCESSFVVSFYVPKENQANPPPAKGLQVQRWKTVFVAVRQFGGFVKDSSVGEEAAALKASIAGTKWADAVEKSQKRAGHASVYTVAQYNAPFEYDNRVNEIWFLFDIENELQTV

SEQ ID NO: 237258 - protein, 69 aa, Glycine max
  unsure (1)..(69): unsure at all Xaa locations
  Clone ID: PAT_MRT3847_56269C.1.pep
PRLFFFLWGRVALGGLAHAGSYCCLWLSFWSGGRNCRRRCSFFFIRGGHPLVLVWRRLEKGQXXPPKKI

SEQ ID NO: 237259 - protein, 101 aa, Glycine max
  Clone ID: PAT_MRT3847_5626C.1.pep
FNILLTKLSRMNLDPPRSLRGAHQDSNTPLNKAALYAPDDTLWDGGTSCLSVPCTADYPILPPTVRDRPRMRDADLYADGRRRWLILQQNRSSICDVAAIL

SEQ ID NO: 237260 - protein, 119 aa, Glycine max
  Clone ID: PAT_MRT3847_56270C.1.pep
NSSSRASSDHINNNKSTKHNEMVQHHNINMGFMGQSKPPTTEHIVDKINESEASSDVNTTLGLSKYNAYRAATMALPVVPMDEEALMMMQQHLSKLRLLQHMFQQSSLLGLPVPTTVEW

SEQ ID NO: 237261 - protein, 72 aa, Glycine max
  Clone ID: PAT_MRT3847_56271C.1.pep
DHSKSDEVYSLTCCDLFIFTRSVPPQCSCEDITLNSCHSDCKSCMCTRSQSGQCRCLDTNDFCYKPCKSRDD

SEQ ID NO: 237262 - protein, 123 aa, Glycine max
  unsure (1)..(123): unsure at all Xaa locations
  Clone ID: PAT_MRT3847_56272C.1.pep
LPLGCFLFGGGPSFFVGPPFWGWCRPVGLLVRXWRSCGFSPRGGLXPGLSXSPCLGGSSASLSRGLFACVLWLWLKSFGHCVGLPNAKKVQNLCFNNKNCFIKGLFFSFFLILTLPPFCRLLA

SEQ ID NO: 237263 - protein, 83 aa, Glycine max
  Clone ID: PAT_MRT3847_56273C.1.pep
VGCVFQVYGGEARISTLRELFPLMEDKKSLASSEERSQIKGKASLLAALDYYVGLHSDIFISASPGNMHNALVSCAICIFRCL

SEQ ID NO: 237264 - protein, 83 aa, Glycine max
  unsure (1)..(83): unsure at all Xaa locations
  Clone ID: PAT_MRT3847_56274C.1.pep
SEAEIERLLGGGEAKXAMTEPPKADRGDDSDSVKLAEPLHGRDAKVDFIGSTLFALQQATGKSARQWHSDPVERRAGVPTYTE

SEQ ID NO: 237265 - protein, 127 aa, Glycine max
  Clone ID: PAT_MRT3847_56275C.1.pep
KGARDYFNTSRSSSVYLSECSRSSDRSFLYRIYPNPAFSLPNYKRVVPTSPFRTFLGSSDHHDGRIIKRDLMSFCDNNNNNSSSTFSKLKASTEKDHQQQQTNEDETNVEPKEVPFIDFLGVGVSSS

SEQ ID NO: 237266 - protein, 155 aa, Glycine max
  unsure (1)..(155): unsure at all Xaa locations
  Clone ID: PAT_MRT3847_56276C.1.pep
MNSGGYAVEVTGLSPKATDKDVRDFFAFSGVIENVEIIRSGDYACTAYVTFKDAYAQETACLLSGATILDQRVCITRWGHYEDEFDFWNQPSYSHEDETASTTPQSNQFVSSAGEAVTMAQEVVRTMLSKGYVLXKDALAKAKDFDESHQGFHCT

SEQ ID NO: 237267 - protein, 103 aa, Glycine max
  unsure (1)..(103): unsure at all Xaa locations
  Clone ID: PAT_MRT3847_56277C.1.pep
KDPRDPSTANSVSFNAXSRKKLLSHVFSIVXGIIEDQWSVLLEGLKVETRPFKLRNXPCHTFSSSSHLSTNXLAPIHLYVIRCVQIGALASLYDVSPVCQPVK

SEQ ID NO: 237268 - protein, 182 aa, Glycine max
  unsure (1)..(182): unsure at all Xaa locations
  Clone ID: PAT_MRT3847_56278C.1.pep
EKLPRRKIFDKPKTRCFTILPMEFNLVVRQKSLKICEXFMKKWDKLMCEVGINQYXSMEWTGLAKKLXLSKGNDISXCDYASFDGLITQQVMSKMAEMINSFWGGDEKLIRERTXHLLEAXCSRMAIXCKKNVWKVESGITSCIPVIVXCNCISNEMLYNKVIKNSGPVKAQKFFHHPQKFV

SEQ ID NO: 237269 - protein, 60 aa, Glycine max
  Clone ID: PAT_MRT3847_56279C.1.pep
TWVTQLAVKVIYYENARVVEKRQSVRLRLPPLWRVVTRQWQFCVYFRSTFLVHFCFFFFF

SEQ ID NO: 237270 - protein, 56 aa, Glycine max
  Clone ID: PAT_MRT3847_5627C.1.pep
IPGGIFWGRGPNFIQKKVRVGKTKGKFVLGLTKIRVFYFRLKFRDKAEGNILQGGF

SEQ ID NO: 237271 - protein, 80 aa, Glycine max
  unsure (1)..(80): unsure at all Xaa locations
  Clone ID: PAT_MRT3847_56280C.1.pep
RTPDIRQTAVWNTLLIILLRTGRDKSAAXKTLSLPTIAPXNYNRLGTVGIAHIGPGNSELSAEGHPEWIMEDPLHPAIKG

SEQ ID NO: 237272 - protein, 58 aa, Glycine max
  Clone ID: PAT_MRT3847_56281C.1.pep
VDVNGPFTTPVYQFLKSSAGGFLGDLIKWNFEKFLVDKNGKVIERYPPTTSPFQIEVC

SEQ ID NO: 237273 - protein, 585 aa, Glycine max
  unsure (1)..(585): unsure at all Xaa locations
  Clone ID: PAT_MRT3847_56282C.1.pep
MTNPKLGYAGISDSGNHIPSSKKNHKKLLLSLLATLLVAASVVAIVVGVKNKNSDNSATSTSLSLSHHSHTIVKSACSSTFYPELCFSAIASEPNVTHKITNHRDVIQLSLSITFRAVEHNYFTVKKLFTKHDDLTKREPRAPHPEFQDLSWQASEXYSRTVTMQSSISDVIDPIGWHEWSGNFALSPLVYREYQNTGXCADKHVRKALEKGQVHVEHMCSNALAMTKNMTDSDIANYEYNINRKLLVENDVEWPEWISAADRRLLQASTVKADVTVAADGSGDFKTVTEAVDAAPLKSSKRFVIRIKAGVYRENVEVPKKKNNIMFLGDGRTNTIITASRNVVDGSTTFHSATVAVVGSNFLARDLTFQNTAGPSKHQAVALRVGGDLSAFFNCDILAFQDTLYVHNNRQFFVKCLIAGTVDFIFGNSAVVFQDCDIHARLPSSGQKNMVTAQGRVDPNQNTGIVIQKCRIGATNDLESVKKNFKTYLGRPWKEYSRTVIMQSSISDVIDPIGWHEWSGNFGLSTLVYREYQNTGPGAGTSNRVTWKGYKVITDTAEAREYTPGSFIGGSSWLGSTGFPFSLGL

SEQ ID NO: 237274 - protein, 279 aa, Glycine max
  Clone ID: PAT_MRT3847_56283C.1.pep
MTNPKLGYAGISDSGNHIPSSKKNHKKLLLSLLATLLVAASLVAIVVGVKNKNSDNSATSTPLSLSHHSHTIVKSACSSTFYPELCYSAIASEPNVTHKITTNRDVIQLSLKITFRAVEQNYFTVKKLFTEHDDLTKREKTALHDCLETIDETLDELREAQHNLELYPNKKTLYQHADDLKTLISAAITNQVTCLDGFSHDDADKHVRKALEKGQVHVEHMCSNALAMTKNMTDSDIANYEYNMRVENNGQNGNSNRKLLVENDVEWPEWISAADKRLL

SEQ ID NO: 237275 - protein, 56 aa, Glycine max
  Clone ID: PAT_MRT3847_56284C.1.pep
GRPRVRNTLKLHTTKLCYLNSHDLYKVMSLTIFINSDRYLMNTLYSHISMYLFYIT

SEQ ID NO: 237276 - protein, 129 aa, Glycine max
  Clone ID: PAT_MRT3847_56285C.1.pep
LPLPKTTGIVIQKCRIGATKDLESVKKNFKTYLGRPWKEYSRTVIMQSSISDVIDPIGWHEWSGNFALSTLVYREYQNTGPGAGTSNRVTWKGYKVITDAAEARDYTPGSFIGGSSWLGSTGFPFSLGL

SEQ ID NO: 237277 - protein, 236 aa, Glycine max
  Clone ID: PAT_MRT3847_56286C.1.pep
MLGVFSSSIVSPPEELVAAGSRTPSPKMTAAALRKWFEEKNPSAVSVEVGEHVQLAYTHQNESPFQPRSFAVKDEVFCLFEGALDNLGNLRQQYGLAKSTNEVLLVIEAYKALRDRAPYPANHVVGHLSGSFAFIVFDKSTSTLFVASDQYGKVPLYWGITADGYVAFADDAELLKGACGKSLASFPQGCFYSTAVGGLMCYENPKNKITAVPANEEEIWGATFKVEGPAVVVARQ

SEQ ID NO: 237278 - protein, 95 aa, Glycine max
  Clone ID: PAT_MRT3847_56287C.1.pep
VTPTTRVRDPDSQTRGNSCSDDNGSQSDIGGTVCGHLNASNAPNDADDRFIRYRGYNGLFSHNELTQAAIVLRDRDELYKSDPKNGTICTTKKRK

SEQ ID NO: 237279 - protein, 46 aa, Glycine max
  Clone ID: PAT_MRT3847_56288C.1.pep
VFFFFFFFFFFFFLFAFSFCCFGVFFFKINHLYLFLKRTCYKQNQN

SEQ ID NO: 237280 - protein, 66 aa, Glycine max
  Clone ID: PAT_MRT3847_56289C.1.pep
FGFSWDQLHTFRLENYFKPLSNFYTCCSFNKDRSRLPYIFVKIPLNMFIYEQKKDLCPCGDYTNCN

SEQ ID NO: 237281 - protein, 62 aa, Glycine max
  unsure (1)..(62): unsure at all Xaa locations
  Clone ID: PAT_MRT3847_5628C.1.pep
WLHLFRTLRFLILHEVGRYPHLSRIFIPGSLSFFGGEIHQRSNIQLVIIVLAPAEFRXYXAC

SEQ ID NO: 237282 - protein, 64 aa, Glycine max
  Clone ID: PAT_MRT3847_56290C.1.pep
AKQVKSSFSNDPDPMPYLCIVEQITKRNRFPLKFCGAGALDPKLKPFFTICHHPLYAPANVKRS

SEQ ID NO: 237283 - protein, 69 aa, Glycine max
  Clone ID: PAT_MRT3847_56291C.1.pep
FSACSHVRFQDQESLLCVCLQYHFSRFPRSYFEQCLSTTPSRPGSICRMRHNDFLPCPLAIIQCISTHN

SEQ ID NO: 237284 - protein, 55 aa, Glycine max
  Clone ID: PAT_MRT3847_56292C.1.pep
AQATESACSPYSRGVWSRPRFASVVTSPSTSIRGLSHKLSFFFHALEQARCSFPS

SEQ ID NO: 237285 - protein, 46 aa, Glycine max
  Clone ID: PAT_MRT3847_56293C.1.pep
EDYTSKAPSHMVLCKFTISITSPTISLVSDCNSAHGIDQIYESMQS

SEQ ID NO: 237286 - protein, 110 aa, Glycine max
  unsure (1)..(110): unsure at all Xaa locations
  Clone ID: PAT_MRT3847_56294C.1.pep
PKSSVKGAAVSTIHVTPQDGLNNASFRSFGYHHKVLKLKKIVKRGGACFLQNEFNKAVHVNGASNLFEHTSFLDVKEYYRXNRISQGLEMGGSLVDQNYFQNVFKVVHLE

SEQ ID NO: 237287 - protein, 98 aa, Glycine max
  Clone ID: PAT_MRT3847_56295C.1.pep
WLTSLYHRRSCFVFWTSLTKETNSCRCDCHTTSTTTLLCLETTDRVILYSRGWDRQSDPHSWGYNPYGLANKECLADQNPVTMIKILCLLSGNPAPLA

SEQ ID NO: 237288 - protein, 256 aa, Glycine max
  Clone ID: PAT_MRT3847_56296C.1.pep
MTRRQASSTRRGGLSRILHSKSKSSPLLSISLVLFGAILLILYACSGSGVLGGRKDVVSRVEGDFSCTFEVSSAIPVLKNAYGGSMKNVLHVGPESCSVVSKFLREGETEAWGVEPYDIEDADRNCKALVQKGIIRVADIKFPLPYRAKSFSHVIVSDALDYLSPKYLNKSLPELARVSADGIIIFAGYPGQRRAKIAQLSKFGRPAKMRSSTWWQQLFTETSLEENEAAVKKFEQTASKMSYNPACQIFHLNSYH

SEQ ID NO: 237289 - protein, 102 aa, Glycine max
  unsure (1)..(102): unsure at all Xaa locations
  Clone ID: PAT_MRT3847_56297C.1.pep
FXXXTXLXSXXYXLPLMXXXPXDPXXXXXXRXXAXQXPXYSXPXXXXXXLDLGCXXXXTFPXXXSXXXXXXXXXXXXXXXLXXXXXXXXXPXSRIXXHTXYV

SEQ ID NO: 237290 - protein, 71 aa, Glycine max
  unsure (1)..(71): unsure at all Xaa locations
  Clone ID: PAT_MRT3847_56298C.1.pep
RDXXFXLLXSSRWLHRWLNLXSEGXFRXXPFXGXTIXGVNXKGGVGLGAESXKXHXSVFXNRALXKIISXW

SEQ ID NO: 237291 - protein, 41 aa, Glycine max
  unsure (1)..(41): unsure at all Xaa locations
  Clone ID: PAT_MRT3847_56299C.1.pep
NHTFAKVVNLCRHTGYLLLLPFEKHCFARMPXKMSFLRYSN

SEQ ID NO: 237292 - protein, 103 aa, Glycine max
  Clone ID: PAT_MRT3847_5629C.1.pep
SFLASKYILHTLYGTRLYLYLDKMSINRAFIKKWVPTETWPIFGIVGIACGGAGYYLWKLAMGPEVVWDRKGDWRPWDKVKHDQNLKFLSYNPEFWAQRKKEA

SEQ ID NO: 237293 - protein, 37 aa, Glycine max
  Clone ID: PAT_MRT3847_562C.1.pep
STDSTLWPGANNSTGGLLSYTIGFRFIPTPKCYQYEH

SEQ ID NO: 237294 - protein, 56 aa, Glycine max
  Clone ID: PAT_MRT3847_56300C.1.pep
MIYDVNSPLFRSFLSQKGGSSDKRKPDEQKPKEQKPKASENKPIMTECQQICCIQL

SEQ ID NO: 237295 - protein, 61 aa, Glycine max
  Clone ID: PAT_MRT3847_56301C.1.pep
TIPVSEKDYFPQLTIIPVANILGDSIWRVPDHSSVSSLYRFTLRVFCSYFSELRLIVLLIC

SEQ ID NO: 237296 - protein, 65 aa, Glycine max
  Clone ID: PAT_MRT3847_56302C.1.pep
TGSFSYEGWLRLIYYEMVVVVLVSAHMWVGLYVNHYGLWGALDLVMNSVVDFGGALNEDMNSVVD

SEQ ID NO: 237297 - protein, 66 aa, Glycine max
  Clone ID: PAT_MRT3847_56303C.1.pep
ARVKKWSQTWHWIWISFGTSTASPKDLEHSLFSPPKFVDSKSYRQRTLLRRFRRRYRQELKWGLTC

SEQ ID NO: 237298 - protein, 68 aa, Glycine max
  unsure (1)..(68): unsure at all Xaa locations
  Clone ID: PAT_MRT3847_56304C.1.pep
CYYRVSPSSCPLGAFVLSVLFGLIRFGRXPFVLSALCGGRGLPDGVSNVSGRWCLEPCLYMCXRVGGR

SEQ ID NO: 237299 - protein, 96 aa, Glycine max
  unsure (1)..(96): unsure at all Xaa locations
  Clone ID: PAT_MRT3847_56305C.1.pep
MLMAHRKFDHLTHGSLGWLPRKRAARHRGKVKALPMDDPCKAPRLTAFLSYKAAMTHIVREVDNPGSQLNKKETCQPVPIIETRTMAIGAXVAHVK

SEQ ID NO: 237300 - protein, 66 aa, Glycine max
  Clone ID: PAT_MRT3847_56306C.1.pep
ISLLRTMLFCFCISLSLSLSQLCFLCSIGWWYCLPASQKLLTLIWCIEMKTVKVTAIERKLIWILN

SEQ ID NO: 237301 - protein, 87 aa, Glycine max
  Clone ID: PAT_MRT3847_56307C.1.pep
VRSCQSRILLPSTPPLLRLSPPPCPLPSPRLRHLRRRQLPLPRPYLLPPSPRPSPLRPRPRRSPLKPALEDSRIARSPAQELRNVTL

SEQ ID NO: 237302 - protein, 83 aa, Glycine max
  Clone ID: PAT_MRT3847_56308C.1.pep
VEAGLWHLIDSIIVGVENLPELIFEFMVCWLWICSFEGANIVGMFRVALLQLASFAFKKIKFLTVLEDHSSIICDGSLEYMEG

SEQ ID NO: 237303 - protein, 104 aa, Glycine max
  unsure (1)..(104): unsure at all Xaa locations
  Clone ID: PAT_MRT3847_56309C.1.pep
KALFLSSQIFHFMAILPPASSLPSSSEGICCSTYGITSNSIKLPIDGRRWHDLASTRCKSPFFGSPHLLWLSTGHDLCLSXGNVGADYSDSIPDSSDQMDEQGY

SEQ ID NO: 237304 - protein, 39 aa, Glycine max
  Clone ID: PAT_MRT3847_5630C.1.pep
MSAESPSSARKVVVHLRATGDAPILKQSKFKVSPFDLPL

SEQ ID NO: 237305 - protein, 166 aa, Glycine max
  unsure (1)..(166): unsure at all Xaa locations
  Clone ID: PAT_MRT3847_56310C.1.pep
RKGLIQLKELQGRRTAPEKDETVPLISEDRLVEADGLXIGFPTQYGSMAGQMKWIFDSGCQQGRAEEGDWRGACSFVSTGTQGGGEXCTAWTAITQLGHHGMLYVPIGYTFGAGMFEMDSVRGGSPYGAGVFAGDGSRQASETELALAEYQGKYMATIVKKLGQKS

SEQ ID NO: 237306 - protein, 94 aa, Glycine max
  Clone ID: PAT_MRT3847_56311C.1.pep
EGVAMLWFYIWGQKNPDSDWESFSTALMKRSGDHYGNPHKKRLSIMKKEEQIETETHMKKRETSTEFLKERTNISELKHMLRKILNEEVDSHAS

SEQ ID NO: 237307 - protein, 74 aa, Glycine max
  Clone ID: PAT_MRT3847_56312C.1.pep
SMVTIRSVIWFLNSCCIVCIMKPYSCIIEGLTCIYTSTTCTAFIIIYIILFLLIKKKTMTYSDHKVPRSNEEYR

SEQ ID NO: 237308 - protein, 69 aa, Glycine max
  Clone ID: PAT_MRT3847_56313C.1.pep
PFTSFNCIAGAIETYCVSTVLYGSPIRCITNLVSFSSRSHQGVCHRYLGIMVCDRTLDSSIEIARRCSV

SEQ ID NO: 237309 - protein, 56 aa, Glycine max
  Clone ID: PAT_MRT3847_56314C.1.pep
STRVRALIFGGAVLGGIYKSDSWHISLDVHTTLPTIRALDSQSLDSYALKTLYGAE

SEQ ID NO: 237310 - protein, 165 aa, Glycine max
  Clone ID: PAT_MRT3847_56315C.1.pep
RHFSQQREFSSEKIQAIIDETVNSRNLDYSHFISLPLAIHPELVNKLISFQHSILGIGSCMDENTYTESDSNEDEGTTTDTKEVDQLSKENSGVAVELKANDNSESVKVNLTNIPLVSYAPKASKSSAPSDLGIDKSIFIKPKTFHLTVLMLKLWNNERIKTASE

SEQ ID NO: 237311 - protein, 40 aa, Glycine max
  Clone ID: PAT_MRT3847_56316C.1.pep
VYVVDVETRTHISMQLSMGQSRRDVTSFVCGFPVLKIIIK

SEQ ID NO: 237312 - protein, 76 aa, Glycine max
  Clone ID: PAT_MRT3847_56317C.1.pep
SITPCIRVRDRICYYNLSCDHPNAKECQMQYTYKFRHGHCTYTKGSVHDVIVQKDRNRYDPLKECDDRGLRGLCVK

SEQ ID NO: 237313 - protein, 64 aa, Glycine max
  Clone ID: PAT_MRT3847_56318C.1.pep
KNGHGGGCRRCYSHLGFRPPPTLPGALLCLFCVVGAQRHNHFVLTFPNNFSVGRKFCVVGTRAC

SEQ ID NO: 237314 - protein, 82 aa, Glycine max
  unsure (1)..(82): unsure at all Xaa locations
  Clone ID: PAT_MRT3847_56319C.1.pep
DVXAQXKLXLHXKNXKNXXFXXKXXXPXXRILNSEKDATQXLXSXPLQRAEXAXXXDNXTKFLKIKILQLQRKTKILVHXXS

SEQ ID NO: 237315 - protein, 202 aa, Glycine max
  Clone ID: PAT_MRT3847_5631C.1.pep
MIDMKLMMMLLMWGSESQGRLLSIPTKPNPDDAPASARWLVSLNFWGVLNTISSDLGGAPFGNVVSYSDGLPNESTGIPYFYLTTLDPTARNALQDDKASFTVSEYPLGTCGRRDPMNPTCSKISLTGKLKLVDEKSKEAEFARNALFSKHPEMKDWPEDHNFQVFKLEIENIFLINWFGGPKPLTVEQYLHPKVNNVGLIL

SEQ ID NO: 237316 - protein, 202 aa, Glycine max
  unsure (1)..(202): unsure at all Xaa locations
  Clone ID: PAT_MRT3847_56320C.1.pep
GRCHCHCTKGIGIWPKFSTDIGLDPDLVMASCGDISTHETLAAIDLLLQHFPDLKIRYVNCVDLFKLIHPSEHPHGLSDQEWVSLFTEDTPIIFNFHSYPWMVHRLTYKRPGSQNIHVRRYKEKGNIDTPLGLAIRNQXNRFSLAIDAIDRMPQLNNRGAAARQAMLNAQIEARTEAFERGMDPEYLTKWTWKRDGLWSKHT

SEQ ID NO: 237317 - protein, 68 aa, Glycine max
  Clone ID: PAT_MRT3847_56321C.1.pep
RFSQALQKQTGLDFKNYSGSTYFFVNDFLKERKSLSEGETRSWAIIIFPALSSFAEHSSIRDTTPCHI

SEQ ID NO: 237318 - protein, 130 aa, Glycine max
  Clone ID: PAT_MRT3847_56322C.1.pep
MASLRSGASSLLTRLSKSLLLHSKNPNPHSQLLLPSLSRLPGAISPQNDAEFPHKQGFLYPCGLPSLRFFLPQGDAPSSDDPMLLFPKRTYQPSVIRRKRNHGFFARKATKGGRRVIARRLAKGRFRITA

SEQ ID NO: 237319 - protein, 192 aa, Glycine max
  unsure (1)..(192): unsure at all Xaa locations
  Clone ID: PAT_MRT3847_56323C.1.pep
MYRHGILGGHDRSSVTSYQCFFKPPPSLGLGLGLGFEFRRKGRRLRRHLNLVISAQLSNSFSLSFGLDSQNLNSFQSNDPSQLSWMGPVPGDIAEVEAFCRIFRNSERLHSALMDALCNPLTGECSVSYEVPSDEKPQLEXDKIVSVLGCMISXLVNKGREDILSXGRSSIMNSFRAAEVSTTEDKPPPLAL

SEQ ID NO: 237320 - protein, 191 aa, Glycine max
  unsure (1)..(191): unsure at all Xaa locations
  Clone ID: PAT_MRT3847_56324C.1.pep
MEAREGISSGVTVIGAEAPSAYHVAPRSEAPNQVHVPDGGGGAAATAAPVGVSPVSVGLDGTVKKKRGRPRKYGPDGSVTMALSPMPISSSAPPSNDFSSGKRGKMRGMDYKPSKKVGLDYLGDLNVCSDGTNFMPHIITVNAGEDITMKVISFSQQGPRAICILSANXVISNVTLRQPDSSGGTLTYEGR

SEQ ID NO: 237321 - protein, 105 aa, Glycine max
  Clone ID: PAT_MRT3847_56325C.1.pep
MASLRSGASSLLNRLSKSLLLHSNKNPNPQSQLLLPSLSRLPGAISPQNDAEFPHTQGFLYPCGLPSLRFFLPHGEAPSSDDPMLLFPKRTYQPSVIRRKRNHGF

SEQ ID NO: 237322 - protein, 208 aa, Glycine max
  Clone ID: PAT_MRT3847_56326C.1.pep
MNKLSLGPQANKDLHISEALQMQIEVQRRLNEQLEVQRHLQLRIEAQGKYLQSVLEKAQETLGRQNLGIVGLEAAKVQLSELVSKVSSQCFNSAFTELKDLQGFCPQQPQTNPPNDCSMDSCITSCDRSQKEQEIQNGLRHFSSHMFMEQKEAKEAPNNLRNPEIKWYDDGKKNTFLAPLSKNEERRNYAAECSPSNLSMSIGLERET

SEQ ID NO: 237323 - protein, 148 aa, Glycine max
  Clone ID: PAT_MRT3847_56327C.1.pep
MEAREGISSGVTVIGAEAPSAYHVAPRSEAPNQVHVPDGGGAAATAAPVGVSPVSVGLDGTAVKKKRGRPRKYGPDGSVTMALSPMPISSSAPPSNDFSSGKRGKMRGMDYKPSKKVGLDYLGDLNACSDGTNFMPHIITVNAGVRGR

SEQ ID NO: 237324 - protein, 59 aa, Glycine max
  Clone ID: PAT_MRT3847_56328C.1.pep
FSYQRACTRSVGWTQVLKLDEMAVASRRLRARSTACNLAPWCDGEIRHSFIEAPTKSKG

SEQ ID NO: 237325 - protein, 43 aa, Glycine max
  Clone ID: PAT_MRT3847_56329C.1.pep
RDARAAIFMIITFLSSQQIWLIKHLLCIGYVQITVILTSSSTR

SEQ ID NO: 237326 - protein, 54 aa, Glycine max
  Clone ID: PAT_MRT3847_5632C.1.pep
GTENLLYSTFKSTPKKRKKRHTLFKALMVTLPALYYRKASLVDPLHAKKQVPTN

SEQ ID NO: 237327 - protein, 96 aa, Glycine max
  Clone ID: PAT_MRT3847_56330C.1.pep
TFTLWAPTSRTLGPKLWTFCSSAFRGPTCNFQNRFRPITAPCPKWSLFPGRFQILGGGFEGGHCFSGPFPSGPGPCALRIPRGVAWSHPPQRFFFF

SEQ ID NO: 237328 - protein, 44 aa, Glycine max
  Clone ID: PAT_MRT3847_56331C.1.pep
ARIFYRGGPLFFFFLVQNIKTYLMPPPTRRLENITDTPKAVVMR

SEQ ID NO: 237329 - protein, 66 aa, Glycine max
  unsure (1)..(66): unsure at all Xaa locations
  Clone ID: PAT_MRT3847_56332C.1.pep
NNGMQSIEALLYXMHINFYIKVFYMVSVWTRVLACSYSLDDLGVEIXIKLKVDLSSHLSENKWGRF

SEQ ID NO: 237330 - protein, 64 aa, Glycine max
  Clone ID: PAT_MRT3847_56333C.1.pep
MYLQFYINDNGDKVYTTKKDSPLGLPTQSAHPARFSPDDKYSRQRVLLKKRFGLLPTQQPPPKY

SEQ ID NO: 237331 - protein, 47 aa, Glycine max
  Clone ID: PAT_MRT3847_56334C.1.pep
RFPGLTHASEKNHSFPISRLYSKDIKIVYKRRKSNLCEKTIPFKFAL

SEQ ID NO: 237332 - protein, 223 aa, Glycine max
  Clone ID: PAT_MRT3847_56335C.1.pep
MESSGAANEKLLENGTSSDKPTKGKGGLRTMPFIIVNECLEKVASYGIMPNMILYLSNDYGMAIVEGTKVINTWSAMCSVLSLFGAFLSDSYFGRFIVICIGSFSSLLGLTTLWLTAMIPELRPSCQSLMLGCNSASAAQLAVLFLSLGLISIGAGCVRPCSIAFGADQLTIKVRSNDERLLDSYFNWYYTSVGVSTVFSMSVIVYIQENLGWKIGFWIPAVL

SEQ ID NO: 237333 - protein, 103 aa, Glycine max
  unsure (1)..(103): unsure at all Xaa locations
  Clone ID: PAT_MRT3847_56336C.1.pep
RXXSKSMPXXLRXDLXXHXVPXXPVXPXXXXXXXXXSXXAGFXPXVSSSSXXXXLGVXLFXSIXPXQLLFXPXXXXRXXXXXXDLXXSXFXLXPXSXLXXACL

SEQ ID NO: 237334 - protein, 55 aa, Glycine max
  Clone ID: PAT_MRT3847_56337C.1.pep
GSAGNKFRMSLGLPVATTFSCADNTLASSLSIVSLQGIKGRLNRLPSACVGDIVM

SEQ ID NO: 237335 - protein, 108 aa, Glycine max
  Clone ID: PAT_MRT3847_56338C.1.pep
VLLFNLMNLGFGSNYYCEALLAAVADTRINFDHASLITLFIIIEIIFYSTVTDRPSWRVTASSVSLSLFSIMEGLDWMHCLMQPLPEKKKKICRNFIGIKIKFSSLTL

SEQ ID NO: 237336 - protein, 132 aa, Glycine max
  unsure (1)..(132): unsure at all Xaa locations
  Clone ID: PAT_MRT3847_56339C.1.pep
FVIXTLKKYELKVMLNMLPKYYHHVGSYENTLITKFFGLHRITLRGGKKVRFVVMGNMFCTELHIHRRYDLKGSTQGRYTDKDKINSNTTLKDLDLKYEFHMDKKLRESLFKQISLDCMFLESQQYINYAHV

SEQ ID NO: 237337 - protein, 142 aa, Glycine max
  Clone ID: PAT_MRT3847_5633C.1.pep
MAKVSLFVVCVVCILALASAQSATNVRATYHLYQPEQHNWDLLAVSAYCSTWDADKSLAWRSKYGWTAFCGPSGPQGQQSCGRCLRVTNTRTNAQETVRIVDQCSNGGLDLDIGPFQKLDTDGNGIAQGHLIVNYDFVDCGD

SEQ ID NO: 237338 - protein, 126 aa, Glycine max
  Clone ID: PAT_MRT3847_56340C.1.pep
KHTPPFRNNPLPSPQTPLSGETSPQSKDSPKPFFFLVTPTPATPGRTKFASPPPPLGKKKKPLALEMAPGAKKKQTPPPPKPPGGPHHGPPHLEARPQPNPPCGGPPPIPSCPEQPHGFQNLKNPP

SEQ ID NO: 237339 - protein, 87 aa, Glycine max
  Clone ID: PAT_MRT3847_56341C.1.pep
MPKLIFCLLLSYSLSFLVILILASVMGIVLNFNMFLCTNSNSALTTTTIGGVFKGIGFHNLVFFFIGWGSVPAFNCGWIGYHTAGGV

SEQ ID NO: 237340 - protein, 155 aa, Glycine max
  Clone ID: PAT_MRT3847_56342C.1.pep
TSRPFGLPSPSGSPRLLCGALSAVFLPSRSRVPTHLVHPCLSPASTSFVVFYRVVPSRSCLTVHPPGLFRAVRALAYHIICASPPPPQLVSFFGNSEAPCVPPPGPTPPGPALPFLLFSHSFPTVTASEVGFAAPASSLALARGRRRVCVCGRAP

SEQ ID NO: 237341 - protein, 370 aa, Glycine max
  unsure (1)..(370): unsure at all Xaa locations
  Clone ID: PAT_MRT3847_56343C.1.pep
EQSESERDFYEALFERSKVQFDQYVAQGKVLHHYANILDLLMQLRRCCNHPFLVMCGSDTQKRADLSRLARKFFQTNTEFPDESNQNDPRQQAELNKLASRLLLKSASSLHSVQPHAYIAEVLENIQKGDIIECSICMESPEDPVFTPCAHKFCRECLFSCWGTSVGGKCPICRQLLQKDDLITYSSESPFKVDIKNNVTESSKVSKLFEFLQRILNTSSEKSIVFSQWTSFFDLLENPLRRRGIXFLRYDGKLTQKQREKVLDEFNETREKRVLLMSLKAGGVGLNLTAASNVFIMDPWWNPAVEEQAIMRIHRIGQNRRVVVRRFIVKDTVEDRLQQVQARKQRMISGTLTDDEVRTARIQDLKMLFT

SEQ ID NO: 237342 - protein, 119 aa, Glycine max
  unsure (1)..(119): unsure at all Xaa locations
  Clone ID: PAT_MRT3847_56344C.1.pep
MLAIYHNAYAHPPDQLNNPASYTGLKKTRVPVETLKDLLLHHTHNTSSMSFGDAADLAYVRPDQSLSSYQTLAXAIQDLYGVSTGSLSNLSILYKQCGLPKHTDEDMLDIEASDTLPEL

SEQ ID NO: 237343 - protein, 109 aa, Glycine max
  Clone ID: PAT_MRT3847_56345C.1.pep
PVYFPIKKNAPEKAGPPPRFSQKVVFFFEGGAYKKEMGAPIKKIFPVCPPKKSFQEQKEFFFPPFIPGVLYTVFQRRVFPGLGRFFLEKKPRVGQNPFLKKMFFFWGGF

SEQ ID NO: 237344 - protein, 37 aa, Glycine max
  Clone ID: PAT_MRT3847_56346C.1.pep
TRSQFDPRVRALLVASTSHPAFIIPAIALLGMPLLKP

SEQ ID NO: 237345 - protein, 153 aa, Glycine max
  unsure (1)..(153): unsure at all Xaa locations
  Clone ID: PAT_MRT3847_56347C.1.pep
ERREPQQAPDRKTREDPSPHLKTRTHERPGGGKGKEPAAPRKKGEKGKRRPAAGEGEKKTEMPGTREEEAHNKPTEEXEKSAPTKRGSERPKEEKQPRHKKRDKPKTRSTTTRPTEDNHAEGHKTRNHARHSKKKRDKPRRQAGNNPDTKERT

SEQ ID NO: 237346 - protein, 81 aa, Glycine max
  Clone ID: PAT_MRT3847_56348C.1.pep
DAEVEQLIQVALLCSQGSPMDRPKMSEVVRMLEGDGLAERWDEWQKVEVLRQEVELAPHPNSDWIVDSTENLHAVELSGPR

SEQ ID NO: 237347 - protein, 52 aa, Glycine max
  Clone ID: PAT_MRT3847_56349C.1.pep
QPQPPPSMRHYIPFRMVSLCGPLRCCTRWMCQNLMIHSLKFAPNSQSHSLSV

SEQ ID NO: 237348 - protein, 50 aa, Glycine max
  Clone ID: PAT_MRT3847_5634C.1.pep
RKKNKLFKIHILINPFSILTVKSMMIRCDSYPLFSQLRLFLCMYLISSGS

SEQ ID NO: 237349 - protein, 118 aa, Glycine max
  Clone ID: PAT_MRT3847_56350C.1.pep
FESHFSHSSLVKLHIHKKQAYIGLVFEGLLLLPLLFITALLFWLELENSIVQSEILRLGPHPFPLASSNMVRMERLGTSITLVTAITANLCYKRENTMRTRCRHKIVLDSPSVVFSQP

SEQ ID NO: 237350 - protein, 112 aa, Glycine max
  Clone ID: PAT_MRT3847_56351C.1.pep
YYLFFVFSTFSLFLLIVKLKNSMAYTIILQHLTLPFLFFLKIYSIYNLQIYLFHTYPIQNNFILITIHYPSHYSFNPPNISFNTIFFHPYIYINFIIFLYIFNYQFYPLYNH

SEQ ID NO: 237351 - protein, 87 aa, Glycine max
  unsure (1)..(87): unsure at all Xaa locations
  Clone ID: PAT_MRT3847_56352C.1.pep
MSSVPARTGRQRQRYEDNLRLVSGCIPYRWTKDNTDQXGGNPGDIEVLMVSSPNVMTLYSQGWMEDDETVTESCPWHGFFYYLCDVK

SEQ ID NO: 237352 - protein, 144 aa, Glycine max
  unsure (1)..(144): unsure at all Xaa locations
  Clone ID: PAT_MRT3847_56353C.1.pep
HNLIVRLRHNVIRTGLRNISISYSRISLADVAKXLRLNSASPVADAESIVAKAIRDGAIDASLDHANGWMVSKETGEXLSTNEPQLAFNSRIAFCLNMHNEAVRALRFPPNTQKEKESAEKRRERHQQEQELAKHIAEEDDDDF

SEQ ID NO: 237353 - protein, 232 aa, Glycine max
  unsure (1)..(232): unsure at all Xaa locations
  Clone ID: PAT_MRT3847_56354C.1.pep
MSSVPARTGRQRQRYEDNLRLVSGCIPYRWTEDNTDQMGETREIIEVLMGPSPRRDDXVCPNGGWEGDETVTEAACREALEEAGVKGILREIPLGIWEFRSKTSQGLCSVEGGCRGYMFALEVTEELETWPEQKNHARQWLNIKDAFKLSRYDWMCNALEAFLRVMAEDRKPENQDQNVELEPPSIVEDMPECQSMSPNCYKRSSTMQHHGMPPKANLLSRATREIAIHFGY

SEQ ID NO: 237354 - protein, 597 aa, Glycine max
  unsure (1)..(597): unsure at all Xaa locations
  Clone ID: PAT_MRT3847_56355C.1.pep
RPPRVRQQSTSDSYNNSAPLSRVGSSNSNSSARVQQKFTKENRGSTREEHVDNFHYQDGRRNEVYFDDRTANSELSSAPPLSSFKSRTSSESSWDGSSAKSSKSTRERRGRKNTSSIASPVYAKGKNVSETSSNRVDDENREWTPLSTMASNIPERSNWPTSGTSMHVPRNQISGFETAQTSGSDSPLPIAPVLLGPGSRQRENSGVVPFTFYPTGPPVPFVTMLSLYNFPTESSDTSTSNFNLEEGADNCDSSQNFDSSEGYEHIEEXVRPTSSTSMHVPRKQISGFEXLIDKWISLWINLQFGRFWQNSRLPPSMTYPSPGMVPPVYLQGRYPWDGPGRPISGNMNIFSQLMNYGPRLVPVAPLQSVSNRPANIYQRYVDDMPRYRSGTGTYLPNPKVSARDRHSTNTRRGNYNYDRSDHHGDREGNWNTNSKLRGTGRGHNRNQNEKPNSKTERLSSSESRAERPWGSHRHDNFIPHQNGPVRSNSSQSNPSNVAYGMYPMPAMNPSGIRLEGPTMPSVVMFYPYDHNTGYGSPAEQLEFGTLGPMGFSGVNELSQANEGTQSTGAHEDQRFRGGHSQRSSPDQPSSPHVSRGP

SEQ ID NO: 237355 - protein, 234 aa, Glycine max
  Clone ID: PAT_MRT3847_56356C.1.pep
LCVDTSRQKRRRIAAAKVCDVESEQEENFLTLSLHSFPCQSDQEQTPSQKAKTLFPSTCQYNNGSNYKRTLKNVHFLQHQLKQEHCLYVREDRKRAQLQAAEQKSMGRGPIQHLIGAEVRGRVDGPFDSVSLSPAAVNGRIFRGVIFSPGAAGVVSKGGSVEPKCSLTSSFPFSSQAYLNSNHVGNLTASQQAPIRLHAEPCHGSWQTPVALPFPIIRGTPSVVSKENKINSDL

SEQ ID NO: 237356 - protein, 87 aa, Glycine max
  Clone ID: PAT_MRT3847_56357C.1.pep
NRHWDRKGKGGTRRDPNAYFKNENSKALLPFEMECTEKEGKAVLNLISSEEDKGASSSSSSSSSSSSSSSSSSPTNLKLLSFRSNFP

SEQ ID NO: 237357 - protein, 229 aa, Glycine max
  Clone ID: PAT_MRT3847_56358C.1.pep
MASPVYAKGKNVSEISSNRLDDENREWTPLSTMASNIPERSNWPTSGTSMHVPRNQISGFETAQTSGSDSPLPIAPVLLGPGSRQRENSGVVPFTFYPTGPPVPFVTMLPLYNFPTESSDTSTSNFNLEEGADNSDSSQNFDSSEGYEHPEVSSPSNSMTRVAIESSEHRPDILNSDFVSHWQNLQYGRFCQNSRHPPSMTYPSPVMVPPVYLQGRYPWDGPGRPISVT

SEQ ID NO: 237358 - protein, 79 aa, Glycine max
  Clone ID: PAT_MRT3847_56359C.1.pep
KKKKKKKKKKKKKKKKKKKNKNKKKKKKKNIQKKNKKNNNTLIKIKRRRILKSLNFKINELSQANAHKRAINYNNQANI

SEQ ID NO: 237359 - protein, 50 aa, Glycine max
  unsure (1)..(50): unsure at all Xaa locations
  Clone ID: PAT_MRT3847_5635C.1.pep
LQSPFHLXMGVPLTGPWTLQGPPIKLRVLHAAGQLPFFPGGAFFPRGNFF

SEQ ID NO: 237360 - protein, 74 aa, Glycine max
  Clone ID: PAT_MRT3847_56360C.1.pep
ATTTKPNQLILFFSNSLFFLSWNKERRNRQTIPIPPKALSLFQIYNQIFKHLFIQSLKIVTRNYQNTKFLNISI

SEQ ID NO: 237361 - protein, 72 aa, Glycine max
  Clone ID: PAT_MRT3847_56361C.1.pep
HLVDLIIAFDKKMQSLLNLDTCFLAVPGSFEGLSRGVSVLSIFCNRPDWLKVWAKIEFKNAWKKLKPELIEE

SEQ ID NO: 237362 - protein, 113 aa, Glycine max
  unsure (1)..(113): unsure at all Xaa locations
  Clone ID: PAT_MRT3847_56362C.1.pep
NFPPKGKLIFPAPLKASFKLGNYGRGKCLKIYSGHVKREPCIPSPFFVTKGKKIVGGFKNPWVXKGVLHQKLVQNLKAHPTPVIFVPCPPPKNKIAFGGLPGKKTVRVGVQNP

SEQ ID NO: 237363 - protein, 44 aa, Glycine max
  Clone ID: PAT_MRT3847_56363C.1.pep
SFSTLQFSVILQNLFPLYDQLFVTFMGNSSISCNSYPLLSRAIF

SEQ ID NO: 237364 - protein, 72 aa, Glycine max
  Clone ID: PAT_MRT3847_56364C.1.pep
RPRVLPRVRPRVRPRVRPRVRPRVRIKKKKKKKKKKKKKKKKKKKKKKKKKKKKKKKNLNKNRGGPFKSTKV

SEQ ID NO: 237365 - protein, 45 aa, Glycine max
  Clone ID: PAT_MRT3847_56365C.1.pep
ARNVGKFKPANPSAASRHLPTCNCANQAPFPDGPSTALSTDPLVV

SEQ ID NO: 237366 - protein, 40 aa, Glycine max
  Clone ID: PAT_MRT3847_56366C.1.pep
RFDPVSGCIGPAENGRSARAPRQSLDLNKAVLGVQAILPC

SEQ ID NO: 237367 - protein, 82 aa, Glycine max
  Clone ID: PAT_MRT3847_56367C.1.pep
NNNPRTTSVHYVLPLYHTHKIKYTHSCNIPLPQVTTILQKVIFHYGYYKIITYMPCSNAKKNVILAKGKMILHTTLKRPYHL

SEQ ID NO: 237368 - protein, 216 aa, Glycine max
  unsure (1)..(216): unsure at all Xaa locations
  Clone ID: PAT_MRT3847_56368C.1.pep
MSVNFLSWMDHALLRRHANPVVYHSPETSIELQKEFKGLDGALXVAAETSTQITGWVMTSATYITTTVSQGFSFKNSMKFPHYGSIMTVKQKFKAKKKVKVIDGKGESITRLKVKRRYPLRVVTNTKLFQDGSYRLVTDLSHTLKEKHVSGCFVKSINNEQNSKGWIDVKGHSVVSGQASTSQNYSYFDRFTCYSRNVAATNGRIVADNSTFVCEL

SEQ ID NO: 237369 - protein, 70 aa, Glycine max
  Clone ID: PAT_MRT3847_56369C.1.pep
MTASLLVRGYEVVIGFETHAQLSTQSKIFSGASTRFGAEPNTQACAVDLALPGVLPVMNRGAVERAIQFG

SEQ ID NO: 237370 - protein, 117 aa, Glycine max
  Clone ID: PAT_MRT3847_5636C.1.pep
SVQDDELVKLTLKALAEQPAQPTDAQRHDLSWVRATKRFLKAADLDKPLDRKLLRTSSNFLAASINLQEKVDEASAYVHHVASGFEVSRRIFGAIPDSLQPDEELRKELGLTEASTK

SEQ ID NO: 237371 - protein, 50 aa, Glycine max
  Clone ID: PAT_MRT3847_56370C.1.pep
PLPNLRRFDLSGSKNLIVMPYIEDALYLESLNLEGCIQLEEIGHVIVLSP

SEQ ID NO: 237372 - protein, 47 aa, Glycine max
  Clone ID: PAT_MRT3847_56371C.1.pep
RTIYEHRQTRAFYPERGHPNVSAYPGRIRLGEYVSLSNMGECPVVTD

SEQ ID NO: 237373 - protein, 49 aa, Glycine max
  Clone ID: PAT_MRT3847_56372C.1.pep
ENRIITINAFILYQSFLVFADKKKKFLVFFLISENWVLSFKHKNQKLAS

SEQ ID NO: 237374 - protein, 75 aa, Glycine max
  Clone ID: PAT_MRT3847_56373C.1.pep
MFVLFLLSLSYFYILSFHFFFNLFFYFFHIFNLLFFSILYIYLFSFIFLFSFYYYFFYYIIYFFFFLLFYYFFIF

SEQ ID NO: 237375 - protein, 113 aa, Glycine max
  unsure (1)..(113): unsure at all Xaa locations
  Clone ID: PAT_MRT3847_56374C.1.pep
VGLANGYLMVGPFVKSGPLRNCQIVGQEGLFSXGGHVVILSVCLAIYGKSSFIEEEPSRSRSMSFSGRNKETDQLQTGDGWDKFLSGFFFGGISGVKWAYFLLXVVALPYSIK

SEQ ID NO: 237376 - protein, 229 aa, Glycine max
  Clone ID: PAT_MRT3847_56375C.1.pep
VLKGTNEIEQWETQASTLFAELQISSVNETLLEGNVCELAEMFRVLHTEKTELQRMVENLKIKYDEAEVMLEEQANQILKLSTDKDHQNEELICLCEVNQKLESEMGYLRQELGETKLREKKLGDEVLKGTNEIEQWETQASTLFAELQIFAVNETLFEGKVCELADACENLERRNYSKDMESEHLKERVSELEVENGRLCEQLIAYVPAVSALNDCITSLEMQTLAHE

SEQ ID NO: 237377 - protein, 55 aa, Glycine max
  Clone ID: PAT_MRT3847_56376C.1.pep
QTHLYSLKFRKKLCYVRSFFVEFWYNFIKDLVFSDFYNYKVSILYIFYNFIFCTL

SEQ ID NO: 237378 - protein, 105 aa, Glycine max
  Clone ID: PAT_MRT3847_56377C.1.pep
TAWVRSRAYPVDGSFFFFFFFFFFFFFFFFFFFFFFGDLNKSSLKFLYIFVPLTFEKIHLPIFSPPNPLILKLSDHGGVMPWGGFHFKEKEGWQKRGPNIVDQDL

SEQ ID NO: 237379 - protein, 77 aa, Glycine max
  unsure (1)..(77): unsure at all Xaa locations
  Clone ID: PAT_MRT3847_56378C.1.pep
MASSQEEVTLLGATGSPFVCRVHIALKLKGVQYKYVEENLREQXVDXLXNSNXFXQEXPXVIXHGEAIAXSPVMVNT

SEQ ID NO: 237380 - protein, 69 aa, Glycine max
  Clone ID: PAT_MRT3847_56379C.1.pep
IFVHDRYTDKHHSLLNAISDNWTSVGCRSVYLMVLISGMYSISVTHVVDVVHFIIPTNVVGNASRIIVS

SEQ ID NO: 237381 - protein, 50 aa, Glycine max
  Clone ID: PAT_MRT3847_5637C.1.pep
ECQVYNQQDFSHWCQTLNMVLKPLLIWQKFYLQDKTNYKSKRMQCLTDAS

SEQ ID NO: 237382 - protein, 395 aa, Glycine max
  Clone ID: PAT_MRT3847_56380C.1.pep
MGSQIRLLGLCLWMYLSSLSFIGAGAVYGREGEVVKGIVLVHGKTAIGRIDDDSVCATLDWWPPQKCDYGKCSWGHASLLNLDLNNKILLNAVKAFSPLKIRLGGTLQDKVIYGTEDCRQPCTPFVLNANELFGFTQGCLPMYRWDELNSFFQKAGVKVAFGLNALAGKSMKSGSAVGPWNYTNAESLIRYTVRKKYTIHGWELGNELCGSGIGASVAADQYASDVAALRNIVENAYRGIEPKPLVIAPGGFFDSDWFKEFISKSGKSADVITHHIYNLGPGVDDHLTEKILDPSYLDGEANTFSSLKGILQSSSTSVKSWVGEAGGAYNSGHHLVSDAFVYSFWYLDQLGMSAVYDTRTYCRQSLIGGNYGLLNTSTFVPNPDYYSALLWHRLM

SEQ ID NO: 237383 - protein, 64 aa, Glycine max
  Clone ID: PAT_MRT3847_56381C.1.pep
LIFWRQDSFQLALIVTIGFTGSTSAPMSMSWISLPPIGRCFGKNFPWILVIEIVTYGLNPCTMF

SEQ ID NO: 237384 - protein, 138 aa, Glycine max
  Clone ID: PAT_MRT3847_56382C.1.pep
KGGRKIDLKVYPLSPIIHRFVFRGGVKGDHDVHHDGKGSESIYGGTFPDDNFKIKHSHAGVVSMANSGPDSNGSQFFFTTVKARWLDGEHVVFGRVVQGMDIVYVIEGGAGTYSGKPRKKVVIADSGEIPKNHWDEEN

SEQ ID NO: 237385 - protein, 49 aa, Glycine max
  Clone ID: PAT_MRT3847_56383C.1.pep
HVMSYVDGLVDHMIQVGIGNGGKIKVTGQEFVSGLRRVCSRRWPVFRCL

SEQ ID NO: 237386 - protein, 70 aa, Glycine max
  Clone ID: PAT_MRT3847_56384C.1.pep
MGFSVTTLVFAVIGIVASLSTSICFNRGPSANLFHLTLVLTATTCCWMMWAIVYLAQMKPLIVPILSEGE

SEQ ID NO: 237387 - protein, 77 aa, Glycine max
  Clone ID: PAT_MRT3847_56385C.1.pep
SASVQSFIVFYAVCGSNYRWTSDQSFSSWLRSFPLRGRAQISSCSVWLVNGQYSECGAVSLCILNFTLGSCVACLRV

SEQ ID NO: 237388 - protein, 70 aa, Glycine max
  Clone ID: PAT_MRT3847_56386C.1.pep
HPTLAISRGAIASQQMSDHQFTLQLSSKHRQPSATKLSSKARGPPATNHSSISQLPTNTQQPTTTVYLRP

SEQ ID NO: 237389 - protein, 88 aa, Glycine max
  Clone ID: PAT_MRT3847_56387C.1.pep
IQNSPKLIILESQETKPNNQSSYKGPFHSLGTKIPQEKEKSITGGTTQEGEGFIISAAPIHMQRKPPIQSFHYHPFSSANKKKKKKTF

SEQ ID NO: 237390 - protein, 97 aa, Glycine max
  Clone ID: PAT_MRT3847_56388C.1.pep
GTETEEQILKRLRNADAEIEQGKCSQVFDFILYNDNLEECHERLKKLLGLDGFVTAPPISGKDFPKIELPMDHSVSKIDNKIIINCIFLGEKESKNL

SEQ ID NO: 237391 - protein, 68 aa, Glycine max
  unsure (1)..(68): unsure at all Xaa locations
  Clone ID: PAT_MRT3847_56389C.1.pep
RPLFFFFFFFFFWNSILTPKYRISTFFSKSNPRLFLTLFNSYVRECDCIFLFLRDKYSKXRLKYFRVF

SEQ ID NO: 237392 - protein, 76 aa, Glycine max
  Clone ID: PAT_MRT3847_56390C.1.pep
QTTNQLTNPLTSRHSASQRRTGRHRRCQTRLQIVTQHPPRFGNVPHFFAVLEIKQRKRHIYTLSLNCLHFFFCSNN

SEQ ID NO: 237393 - protein, 63 aa, Glycine max
  Clone ID: PAT_MRT3847_56391C.1.pep
CQVCWLRVLHILENHEHSCLVQVSIRLDIDDHITKDIYKCSKVEDQKGLSSDPGTKIDPVENK

SEQ ID NO: 237394 - protein, 92 aa, Glycine max
  Clone ID: PAT_MRT3847_56392C.1.pep
KLINRAEHEAPFLLLISRRKVNEKIPILIRTQDMRYQSDEIDSHKLIIAACCIHRGFSSLLFLLSKELVSKTSKNLFSSELQHCITVLLESE

SEQ ID NO: 237395 - protein, 82 aa, Glycine max
  Clone ID: PAT_MRT3847_56393C.1.pep
IEKWSYELCVKINQITKFYIDLVIFFPPKKDMHDETKINVKLCCITTCLVSLLPVTSSTRSNSQHVITFWVRHILNMAISMH

SEQ ID NO: 237396 - protein, 70 aa, Glycine max
  Clone ID: PAT_MRT3847_56394C.1.pep
MGLLDHLWDDTVAGPRPENGLGKLRKHHTFTFRPSSGKGTPCLVNHTHIIHQRFSLTTSPQLQSLTQLLS

SEQ ID NO: 237397 - protein, 199 aa, Glycine max
  unsure (1)..(199): unsure at all Xaa locations
  Clone ID: PAT_MRT3847_56395C.1.pep
LFSSSQASLIFSFTYPPPRLVRGFKLSYSPTTMLXNKTKTNLVPSSSSSPTTKVESTGSQKKKEELRKVFSTFDKNGDGFITKQELRESLRNIRIFMTEQEVDDIVVKYDSNGDGLIDFEEFCLLTSECVGVDHEKEGDGVIENEKVDLKEAFDVFDKDNDGLISVEESALVLTSVGLREGXKIRECPEMIYKVDMDGD

SEQ ID NO: 237398 - protein, 294 aa, Glycine max
  unsure (1)..(294): unsure at all Xaa locations
  Clone ID: PAT_MRT3847_56396C.1.pep
MASATIRNAVVTGANKGIGFGICKQLVSNGITVVLTARDEKRGLEAVEKLKEFGVSDQVVFHQLDVTDPKSIESLANFIKTQFGKLDILVNNAGIHGAYVDRDALAAAGEKVANVDWRKISTENFEAAEAGIRTNYYGVKLMCEALIPLLELSGTPRIVNVSSSMGKLEKIPNAWARGALSDAESLTEEKVDEVLNQFLKDFKEGSLETKGWATXFSAYIVSKAALTAYTRILAKKYPSFCINAVCPGFVKTDLNYNTGYLSVDEGAESVVRLALLPNGGPSGLFFSRSEVAPF

SEQ ID NO: 237399 - protein, 178 aa, Glycine max
  unsure (1)..(178): unsure at all Xaa locations
  Clone ID: PAT_MRT3847_56397C.1.pep
MSSAAASTWITSFSCSPNATPNLPHWLRFIFLSPCPQRALLSGVDILLLLTLFVFALIKLYSRFTSIGNHNSELDKPLIRNNRVSNRTTAWFKLTLTTTAVWTILYTVACILVFTSSTDGTWKQTDGFFWLLQAITQLVLAVLIIHEKKFQAXVHPLSLRIYWIANFILVSLFTAWGH

SEQ ID NO: 237400 - protein, 56 aa, Glycine max
  unsure (1)..(56): unsure at all Xaa locations
  Clone ID: PAT_MRT3847_56398C.1.pep
VVTVYSNCAITXTNKFPFFVKVGLSQMLRGGVIMDVVDADHARIADEAGSFAVICL

SEQ ID NO: 237401 - protein, 148 aa, Glycine max
  unsure (1)..(148): unsure at all Xaa locations
  Clone ID: PAT_MRT3847_56399C.1.pep
ACSTGGTDACVQVLEDYRLTYKYSSLPVGGGFCVGDRGPIHLYNPNSKNGGGQDSKNLRVKLILXGDSSVCKSYIGLRFGNGQFDSTYKVTVXASFLSQTIILQDSTTVKFDIWDTGGXLRYAVLASLYYHSAKFSGIAYYFNKPKIF

SEQ ID NO: 237402 - protein, 153 aa, Glycine max
  unsure (1)..(153): unsure at all Xaa locations
  Clone ID: PAT_MRT3847_5639C.1.pep
NPLWRFVXGGPQGNAGLTDRRIIIDSYGGWGAHGGGAFSGKDPSKVDRSAAYAARWVAKSLVAAKLCKRALVQVSNAIGIAKPLSVYVNTYGTGVKSDAEILKIVEDNFDLRPGCIIRDLKLRRPIYQKTAAFGHIGRNDPDFTWEQPKALKF

SEQ ID NO: 237403 - protein, 65 aa, Glycine max
  Clone ID: PAT_MRT3847_563C.1.pep
LLYIQEILQTEKGILTKANSNKNNFHSFGIYRSNTRSKAASLVFIVLLYIVLGLVGNKIFINFNF

SEQ ID NO: 237404 - protein, 104 aa, Glycine max
  Clone ID: PAT_MRT3847_56400C.1.pep
RLREDDRRGASQIWKTHNPFLSLSLCSCRCVSFRFFPTSIHLRFSSSSSPFDFHFSFLFFFSLLITIIIHLRFFALSFLRFFSLPFSLCPLLDPSLDHSEKQCC

SEQ ID NO: 237405 - protein, 76 aa, Glycine max
  Clone ID: PAT_MRT3847_56401C.1.pep
KGSICCLKISAILMIWRVLISVTQRAKLPIIAMNNGQVFLQEQCMEALKTISTAGAQIDLMENKVIVILMRNMKNV

SEQ ID NO: 237406 - protein, 59 aa, Glycine max
  unsure (1)..(59): unsure at all Xaa locations
  Clone ID: PAT_MRT3847_56402C.1.pep
GRVYEHRRLVXVVETRHIYSGWIKTYVMGGDQLYSVILISHLSEDPYRSRTVISMLWRF

SEQ ID NO: 237407 - protein, 71 aa, Glycine max
  unsure (1)..(71): unsure at all Xaa locations
  Clone ID: PAT_MRT3847_56403C.1.pep
SHACSVTNEAVHNAAAAFKDSNRLHSTNVSAILDSQQKKLNLPILSTTTIVSFPQTLXLMKVLPEFKANKI

SEQ ID NO: 237408 - protein, 101 aa, Glycine max
  unsure (1)..(101): unsure at all Xaa locations
  Clone ID: PAT_MRT3847_56404C.1.pep
XXDXXXQXSXXIXXPXRMXSXPXXDDXXXIKLXVXVXXXXKXXRAXXQLXXYXXXXXXHXHXAALXXXXQXXPXXQXXYXXXXTSXFRSSSIVSPAHPXSX

SEQ ID NO: 237409 - protein, 99 aa, Glycine max
  Clone ID: PAT_MRT3847_56405C.1.pep
YHTLTKFIHLDPYHTPITRHPKLSHLFLKLLQQNLLSKHNFDRLIHPNHSIFLKPDLFYLISPSDRNHTRFRSSYYHTYTSNIPKFSYHLSEAYSIRFY

SEQ ID NO: 237410 - protein, 71 aa, Glycine max
  Clone ID: PAT_MRT3847_56406C.1.pep
QKYGRIVDLYSDSGAGSVRLTLATTPVISFWTTPESTGMYYTICRISMVDEGTSYAYLDQVLDEWEHVSHP

SEQ ID NO: 237411 - protein, 53 aa, Glycine max
  Clone ID: PAT_MRT3847_56407C.1.pep
IPKPMSGPPPLGLRFPTSHMGCVNQWGPIGHNGLGSLKNIPKGRLTQQEKTPN

SEQ ID NO: 237412 - protein, 63 aa, Glycine max
  unsure (1)..(63): unsure at all Xaa locations
  Clone ID: PAT_MRT3847_56408C.1.pep
EKKSKKNQKDKNNKKKEXKKKKKKKYRNRKKKIMTIHESKKQKQGKKAIAQRKKKKKEKKIKK

SEQ ID NO: 237413 - protein, 52 aa, Glycine max
  Clone ID: PAT_MRT3847_56409C.1.pep
KVIVTFPNFWLLPFRVRHLLRMKFLWQRRTASGVCLLPYFFGKIIFMLNNLY

SEQ ID NO: 237414 - protein, 98 aa, Glycine max
  unsure (1)..(98): unsure at all Xaa locations
  Clone ID: PAT_MRT3847_5640C.1.pep
MKMKALVFFVATILAAWQCHAHDMFPLRMNTGYGARTPEVKCASCRLDAEAHNIYAFETIPAECVAATKEYMHGEQYGSDSGAADXRAYFYAGVLSVF

SEQ ID NO: 237415 - protein, 52 aa, Glycine max
  unsure (1)..(52): unsure at all Xaa locations
  Clone ID: PAT_MRT3847_56410C.1.pep
AKAIQTVVGEYHRSHETPSVKTLWRQPTERIYXVEPDRSTQSKGEFWCHNKI

SEQ ID NO: 237416 - protein, 76 aa, Glycine max
  Clone ID: PAT_MRT3847_56411C.1.pep
PFLPLNKAKSFPRPQGEPKNLDPQKKAPFFLPFNGQNLPSQAPFTNEEFTHYLNLGPHIGPHSFFDLGKPIFLDFF

SEQ ID NO: 237417 - protein, 385 aa, Glycine max
  unsure (1)..(385): unsure at all Xaa locations
  Clone ID: PAT_MRT3847_56412C.1.pep
GGQAGRALICFVTTPCAVSVLAFPALARQNHLSKCTEARKVKDWKVILKESQAAISLGADSAPLVYCLHTEALLKLLRHQEAHATYEKMPKFDLDYSNKLFGPVRSAXILLEGAHIYLATGRFEDAVTASEQASKLDPSSFEMNAVVRRARAVTSARMSGNLLFKASKFTEAYAVYNEGLEHDPYNSVLLCNRAACRSKLGQFEKAIEDCNVALIVQPSYSKARLRRADCNAKLERWEAAIQDYEMLLREKPGDEEVARALFETQLQLKTLRGEDIKDLKFGSNLFFISSNDRFRHYVTSPGMSVVLFCNKATHKQVLLVLEQTCKRFPSVNFLKVEIEDHPYLAKSEGVNCIPAFKIYKNGSRVKEIPGSNHDLLEKLVKLYSN

SEQ ID NO: 237418 - protein, 101 aa, Glycine max
  Clone ID: PAT_MRT3847_56413C.1.pep
IYQVYSLHTEALLKLLRHQEAHATYEKMPKFDLDSSNKLFGPVRSAYLLMTGAQIYLAAGRFEDAVTASEQAAKLDPSNFEMNAVVRRARAVTSARMSGYY

SEQ ID NO: 237419 - protein, 155 aa, Glycine max
  unsure (1)..(155): unsure at all Xaa locations
  Clone ID: PAT_MRT3847_56414C.1.pep
RWEAAIQDYEMLLREKPGDEEVARALFETQLQLKMLRGEDIKDLKFGSNLFFISSNDRFRHYVTSPGMSVVLFCNKATHKQVLLVLEQTCKRFPXGNFLKGRNFEVEIEDHPYLAKSEGVNCIPAFKIYKNGSRVKEIPGSNHDLLEKLVKLYSN

SEQ ID NO: 237420 - protein, 118 aa, Glycine max
  unsure (1)..(118): unsure at all Xaa locations
  Clone ID: PAT_MRT3847_56415C.1.pep
PRVRTAARRRQKGFRNEKKKKKKKKKSGRSKGSKLTHSRRSPSYSSCIWDAIFFSLARPYIQFAGGKSLTLPTVKTLXFPTLFAFXLIPLSPPLFPPFPPPXPFSLLFPSPLXFFFSP

SEQ ID NO: 237421 - protein, 46 aa, Glycine max
  Clone ID: PAT_MRT3847_56416C.1.pep
HSPQAHPNYLRKQFIQNYILIDASVIINQCGNMSYDVLQESLPHPD

SEQ ID NO: 237422 - protein, 134 aa, Glycine max
  Clone ID: PAT_MRT3847_56417C.1.pep
MQAFRTTEVIHILKHLKFKSLHLIHKFFLTIFSSQVSTHTTTMGFRLPGIRKTSIAANQASSKAVEVPKGYLVVYVGEKMKRFVIPVSYLNQPSFQDLLNQAEKEFGYDHPMGGLTIPCKEDEFLTVPSHLNDL

SEQ ID NO: 237423 - protein, 181 aa, Glycine max
  unsure (1)..(181): unsure at all Xaa locations
  Clone ID: PAT_MRT3847_56418C.1.pep
NARASGSCESPSSSSQNSRTSWQPGPGGDMKQRFVGHCNMGTGEKQASFLGQRGEYVATGSDDGRWYIWGKRTGRRMVVXRNYFLLDKVVNCVQCHPFDFVVATSGIDSTIKIWTPTAPVPSSVAGGSAGPETGDVLVAMESNQQKLSRSHNSILPLLESFRRQDFPEGSLRLHPFECAQS

SEQ ID NO: 237424 - protein, 64 aa, Glycine max
  Clone ID: PAT_MRT3847_56419C.1.pep
WIWFSYLILQEYMLRAEFRLPSIVDEEATPERKAPIRVKFEIPYFTVSGIQVLLRVLMYNLLIF

SEQ ID NO: 237425 - protein, 71 aa, Glycine max
  Clone ID: PAT_MRT3847_5641C.1.pep
QGAFLEKIRSENPGIPCFLFGHSTGGAVVLKAASHPHIEVMVEGIILTSPALRVKPAHPIVGVSFAFVSCA

SEQ ID NO: 237426 - protein, 83 aa, Glycine max
  unsure (1)..(83): unsure at all Xaa locations
  Clone ID: PAT_MRT3847_56420C.1.pep
DVDVLDECYGCSKYGYKVVHPTPRKSPIKNPFPPTPRYVHASPPPPXPRLDSDSSVAPHGSQELVQIKVEGIMRHTVYAVYSV

SEQ ID NO: 237427 - protein, 139 aa, Glycine max
  unsure (1)..(139): unsure at all Xaa locations
  Clone ID: PAT_MRT3847_56421C.1.pep
PLELKFPFKLKKQISYSLQLSNKTNIYITFKVKTTNPKKYYIHPNTSIITPRSTYNIIFTIQTQKESPTNIQYENKFLLESIKTIDNTXPKNITTDMFNKRTEHIVEKCKXKSRYICAPQPXSXVPKDSEEKSSPMSSV

SEQ ID NO: 237428 - protein, 31 aa, Glycine max
  Clone ID: PAT_MRT3847_56422C.1.pep
DPYAKEFAIMLSEKLAQVAARILPAPRLIHH

SEQ ID NO: 237429 - protein, 71 aa, Glycine max
  unsure (1)..(71): unsure at all Xaa locations
  Clone ID: PAT_MRT3847_56423C.1.pep
XNIHISGLFYDGRXKFWTKHEXXXALXEEDKMEVIRXXGXPDDXLXXRVHEFXKLXXHEXXAXYXXXCXXL

SEQ ID NO: 237430 - protein, 236 aa, Glycine max
  Clone ID: PAT_MRT3847_56424C.1.pep
MSGPQCCSNPPSLNPGGGVGHVDKVGGVDSYFTGSPHSKLAVLMLSDVFGYEAPNLRKLADKVGAAGYYVVVPDLLDGEPFNPQNSDRPFPAWIKDHGPVEKGAEATKPIIEALKSKGVSAIAAVGFCWGAKVVVELAKSRLIQTAVLLHPSFVSLDDIKGVDIPIAILGAEIDQYSPPELVKQFEQVLAAKSGVASFVKIFPKVSHGWAVRYNPEDAETVKVAEKAPQDLLDWLV

SEQ ID NO: 237431 - protein, 141 aa, Glycine max
  Clone ID: PAT_MRT3847_56425C.1.pep
VEKGAEATKPIIEALKSKGVSAIAAVGFCWGAKVVVELAKSRLIQTAVLLHPSFVSLDDIKGVDIPIAILGAEVDQVSPPELVKQFEQVLAAKSGVASFVKIFPKVSHGWAVRYNTEDAETVKVAEEAHQDLLDWLAKHHK

SEQ ID NO: 237432 - protein, 101 aa, Glycine max
  Clone ID: PAT_MRT3847_56426C.1.pep
VVHCKLNILNPVPGKNSIQLFFNRKIDCDLSMDYTILKFYDDLKPSQRTFNFSFLQPVKYHPSQRLFDNTAIDFEFQSTHDAGTVPPKPTAPVRTTAVHLL

SEQ ID NO: 237433 - protein, 93 aa, Glycine max
  unsure (1)..(93): unsure at all Xaa locations
  Clone ID: PAT_MRT3847_56427C.1.pep
QKAASEASSKFGPALASGSVFFVFEKVSTFIVTEEKDVEAPPGVETKTEEEXSSVVKEREIVVEEEKKKEKKEEEKPQVIETSDEKKVEEKTS

SEQ ID NO: 237434 - protein, 70 aa, Glycine max
  Clone ID: PAT_MRT3847_56428C.1.pep
PATASAPALNLIYIFFFYNYSLDHKEGGILNTSKQPATETKQKTNTSHKAEHIPYPTLKRESAKSPLIHD

SEQ ID NO: 237435 - protein, 75 aa, Glycine max
  unsure (1)..(75): unsure at all Xaa locations
  Clone ID: PAT_MRT3847_56429C.1.pep
IAYLPIMIRIRSNLPLFSVVLSRISHNSIAVNHCHIVKKPLMGATFNFFDPFKSETFLAPTKVWFLSQAFXYFIF

SEQ ID NO: 237436 - protein, 107 aa, Glycine max
  Clone ID: PAT_MRT3847_5642C.1.pep
GSTRGTCCPKDKVIKRPLVTNIVEQAERVYVHEDLFYQRSSLAYHVVKMHYSWPCAIHYDVVRVTSHTDERNHDPGLLSITCEDDAPTTGLSAQDPRAVGVRAPARA

SEQ ID NO: 237437 - protein, 91 aa, Glycine max
  unsure (1)..(91): unsure at all Xaa locations
  Clone ID: PAT_MRT3847_56430C.1.pep
LLFFFFFFFXFFLVVFFYGGGVRPGNGPRDPGGHPNSQNVPKMRANVNHGDNYCQRENRRGIESRTSKKKKSQRGKKKRAHGDHKQKSFGL

SEQ ID NO: 237438 - protein, 33 aa, Glycine max
  Clone ID: PAT_MRT3847_56431C.1.pep
LSPRFGGLEPSMNGLCRSKFKGNSFRIYKATSP

SEQ ID NO: 237439 - protein, 74 aa, Glycine max
  Clone ID: PAT_MRT3847_56432C.1.pep
NLTDQPKEVQESEKNGHPTENMGSGVIINNHEEEIQLQNNVGNMSEVPAEVHDGKTVDNSAARGRGIKRKKKRL

SEQ ID NO: 237440 - protein, 128 aa, Glycine max
  Clone ID: PAT_MRT3847_56433C.1.pep
KIKLASETDHQRAIMTGLVLEANGKRLIRQGKYKDALEVLSMAEETFSLCDDSDTLELIDIIPIMQINMVWCYFMMQDISSLSEAGKLLAKAREGLEDAYGKHALRARLLKSGCFLELAWHLRLELLE

SEQ ID NO: 237441 - protein, 91 aa, Glycine max
  unsure (1)..(91): unsure at all Xaa locations
  Clone ID: PAT_MRT3847_56434C.1.pep
ARNSARXSXXXXXDXXXXXGQXXXXXVVXXLXXXPFPXCSXXXYXXXRXXRMXHXXXXXVXXXXXXLXSXXXXYMXLXXXPXSLPXXXXPX

SEQ ID NO: 237442 - protein, 107 aa, Glycine max
  unsure (1)..(107): unsure at all Xaa locations
  Clone ID: PAT_MRT3847_56435C.1.pep
MVSKKWSTNCHYFFIIELTRSTLFFFLSYLIFFHLIFFYFYLYIFLLIIFLSIFIIYFLFFFYFYFIYIIYILFXFIFIYFPCYKFIYIIFVHLIFICVICFILSLF

SEQ ID NO: 237443 - protein, 74 aa, Glycine max
  unsure (1)..(74): unsure at all Xaa locations
  Clone ID: PAT_MRT3847_56436C.1.pep
PSRKKKKKXKFYFFKKKKKKKKKKKKKKKKKKKKKKKKGGRFKGPKLTNPYMQRWGLFLGGPKIKSRGGRLKTF

SEQ ID NO: 237444 - protein, 114 aa, Glycine max
  Clone ID: PAT_MRT3847_56437C.1.pep
GCPVTALAATSQSRDQRLKHQQSSPFVHSFPTSHSSGPHSHVSPLFPSHPAATREYSPAQLPPAHMLPWPSSPSRPQPSLHSSATPIGVIPVFSLPGWQCLPWKTFIQKRSLSD

SEQ ID NO: 237445 - protein, 60 aa, Glycine max
  Clone ID: PAT_MRT3847_56438C.1.pep
STALQHWSYYLINLSMLFLLLPLKLYSKSCLQILRLSIKVEMLKYLRLLKKTPCYRLLEP

SEQ ID NO: 237446 - protein, 59 aa, Glycine max
  Clone ID: PAT_MRT3847_56439C.1.pep
YIELLSYSFPARWSSIAKHLPKRTDNEIKNYWNSYLRKQFEKNAGDSSSPKPIISDSFP

SEQ ID NO: 237447 - protein, 75 aa, Glycine max
  Clone ID: PAT_MRT3847_5643C.1.pep
LTYIKNIRIAVIPLSAIPLSHFWGRPLCSAAPVLTTMNLGRKRHQQRLIPLGEVGYMDHTMPFNTVKNQIFRNII

SEQ ID NO: 237448 - protein, 368 aa, Glycine max
  unsure (1)..(368): unsure at all Xaa locations
  Clone ID: PAT_MRT3847_56440C.1.pep
MVXYNASNRTLYVSWSFNGAATPNSKNSSVSYQIDDLMDILPEWVDVGFSASTGDLTERNIIHSWEFSSTLNSSTVSNNNSSDNNGAKDRNGLSSVAVVAVAACAIVLVAAAANFAAWVIIMKKRRGKGDYYDNDESGHTSAKFDLDRETIPRRFDYKELVVATNGFADDTRLGRGGSGQVYKGVLSHLGRVVAVKRIFTNSENSERVFINEVRIISRLIHRNLVQFVGWCHEXGEFLLVFEFMPNGSLDSHLFGDKKTLPWDVRXKVALGVALAIRYLHEDAEQSVLHRDIKSANVLLDTDFSTKLGDFGXKLLDPRLRTQRTGVVGTYGYLAPEYINGGRASKESDIYSFGVVALEIACGRRTYKD

SEQ ID NO: 237449 - protein, 79 aa, Glycine max
  unsure (1)..(79): unsure at all Xaa locations
  Clone ID: PAT_MRT3847_56441C.1.pep
VSPFVLSAGCTHLDCVVTLHLSXNKFICPWHGSQFIDQGIVVRGPAPLSLPLPHCDIYFFNVLFVPWVETHFRTRDAPW

SEQ ID NO: 237450 - protein, 68 aa, Glycine max
  Clone ID: PAT_MRT3847_56442C.1.pep
HSVIMSMSFEGVGTDDLCVPSISNPVRCLQARLSASNHSAQSSVQISYSTLRSSLPVAAPICRLLAAV

SEQ ID NO: 237451 - protein, 53 aa, Glycine max
  Clone ID: PAT_MRT3847_56443C.1.pep
MRILPLYRHSKDWATPAKSLDSSSVINAEGKLSSPVAGALRQDRALHLRVTQP

SEQ ID NO: 237452 - protein, 68 aa, Glycine max
  Clone ID: PAT_MRT3847_56444C.1.pep
SVDATQHKSLIPKPHEQSGSRVSHRWGLTRIPGSKGVPLSHSVRPVAPQVRRLFPNSSPTLLRATSRR

SEQ ID NO: 237453 - protein, 78 aa, Glycine max
  unsure (1)..(78): unsure at all Xaa locations
  Clone ID: PAT_MRT3847_56445C.1.pep
SFISFIFLSVPFXLVLIPFLFFFLGGASSXFFSLFFSFELTKPFSTFLGGAFYSLPSHPHPFIPQSFNSKKKNSHNLR

SEQ ID NO: 237454 - protein, 136 aa, Glycine max
  Clone ID: PAT_MRT3847_56446C.1.pep
QPYWNPILKVSIIVAGYFVGDYVTTSRLRRGADDQVSSLYNNNAFLKTRENLVRSFEPLNRKFTEDEIHQFYVNKYRKDNHERRWIYNPYIHGEKEDYERLIKNATGKTPATDLPHVRAKINEENKEKIAAGEAIQ

SEQ ID NO: 237455 - protein, 75 aa, Glycine max
  Clone ID: PAT_MRT3847_56447C.1.pep
MQINHVLSICFNIKCRDFLLSFRGLGLKSVECVRLLTLQNIAFPVDTNVGRIAVRLGWVPLQPLPEALQLHLLEL

SEQ ID NO: 237456 - protein, 49 aa, Glycine max
  Clone ID: PAT_MRT3847_56448C.1.pep
TKKQRFIYPTCGFFSSVYNLNPPKYSSLFNPSNLTYPSQRLSILFFIIT

SEQ ID NO: 237457 - protein, 50 aa, Glycine max
  Clone ID: PAT_MRT3847_56449C.1.pep
NFLLNKKSFPFKERNIVLDDCYQMLFPQGLHLWPFIIFKLFIFGINILFL

SEQ ID NO: 237458 - protein, 63 aa, Glycine max
  Clone ID: PAT_MRT3847_5644C.1.pep
FFQSRNPTFNFISTIFLFFKIISLSFLYTLFLSSLPKHLGLRHSCTSLSSLAYFDLSFLTYLK

SEQ ID NO: 237459 - protein, 100 aa, Glycine max
  Clone ID: PAT_MRT3847_56450C.1.pep
GGTSTARPKGGGLKFCASSQFTTRHIYADAAVTVKWLAGIFIPKLLLVLIKTSPFSLRGEDFSLQVEVTISSSRASQSSSNNGGGSKTSTLRARRGGRQL

SEQ ID NO: 237460 - protein, 74 aa, Glycine max
  Clone ID: PAT_MRT3847_56451C.1.pep
ALLFFFPPPLFFFFLNHGRGRIFKFPNHHKKNFLYQNRKVCFSRRWSPVSWSRFPKLNVCGPPLVFVLLATPGL

SEQ ID NO: 237461 - protein, 114 aa, Glycine max
  Clone ID: PAT_MRT3847_56452C.1.pep
MKLVWSPESALQAYIDTVKSCEKFKETGVPELLSAMAAGWNTKFIVESWSYGGPIAASVGLAVAARNTGARHVCIVPDERSRAQYIKALAEMGVSPPPEVVVGEAEVAVSQLAL

SEQ ID NO: 237462 - protein, 83 aa, Glycine max
  Clone ID: PAT_MRT3847_56453C.1.pep
KIFFFVPRPFQVPGLCPAARGVAPFSGGFWGLFFGAGSSGPHNPLGVLLDKFPVCIRAPVVSHQRSGRGGFHKRFPLPFKTRG

SEQ ID NO: 237463 - protein, 244 aa, Glycine max
  unsure (1)..(244): unsure at all Xaa locations
  Clone ID: PAT_MRT3847_56454C.1.pep
MAFHEHLPHEITFQPFAEEQQQQQLGQSRDMQRLLPLSGGAPTWLNNSNAATLRQQNFLHLQPESAATAAQQNDDVRAMDRNRTESNSEADDLAEYKADILGHPLYDQLLSAHVSCLRIATPVDQLPRIDAQLQQSQRVVDKYSGLGNGNGVVDDKELDQFMTHYVILLCAFKEQLXHVRVHAMEAVMACXSEQSLQSLTGVSPGETGATMFALASSLTIFLLRSWFYKLCATVIACGCNRKVF

SEQ ID NO: 237464 - protein, 370 aa, Glycine max
  Clone ID: PAT_MRT3847_56455C.1.pep
MAFHDHLPHEITFQPFTEEQQLGQSRDMQRLLPLSGGAPTWLNNSTAATLRQQNFLHLQPESAATTQQNDDVRGGGGSGMDRNRTESNSEPDDLAEYKADILGHPLYDQLLSAHVSCLRIATPVDQLPRIDAQLQQSQRVVDKYSGIGNGNGVVDDKELDQFMTHYVILLCAFKEQLQQHVRVHAMEAVMACWELEQSLQSLTGVSPGEGTGATMSDDEYYQAESNANLFEGSMDGADSLSFGPLVPTETERSLMERVRQELKHELKQGYKDKIVDIREEILRKRRAGKLPGDTTSLLKAWWQSHSKWPYPTEEDKARLVQETGLQLKQINNWFINQRKRNWHTNPSSSSGSKSKRKSSGAGETSNQSFM

SEQ ID NO: 237465 - protein, 218 aa, Glycine max
  Clone ID: PAT_MRT3847_56456C.1.pep
PRVRVEKDEDCNGNILTLESESRVAEAADLIVDSSVGLGGEDKTERGESEEEEKDEDCGGNIVTIEVPVAETSENMDVDVEDLSVEGYGFVVGDFVWGQVESHPSWPGRIYDPSDESYFALRLKQKNRLLVAYFGNGTFAWCQPSQLKPFGDNFDDMVKQNSSIDFASAVQEAVNEFGRLLHLKLSHPFVAKKTGPESSLPLAKNSGIKEGVLVPEMP

SEQ ID NO: 237466 - protein, 85 aa, Glycine max
  Clone ID: PAT_MRT3847_56457C.1.pep
KSFNLHEDSISLTNMPKGNFCTRNYMVLLTRFLLWGKPSPPTFFFFKHPFFMEQNCTHFGKLLKFNYFYYYFLDRAPCLQDFKNT

SEQ ID NO: 237467 - protein, 42 aa, Glycine max
  Clone ID: PAT_MRT3847_56458C.1.pep
CMSFKNIASSNDMNIGNPDAVCLYPQWFVLGVSVHSEAERVG

SEQ ID NO: 237468 - protein, 179 aa, Glycine max
  Clone ID: PAT_MRT3847_56459C.1.pep
MTVTSENKVAEAAVLSMDGLVRVGGEDIRNGGRWEGVAKDEDCGGNIVTIEVPVAETSENMDVDVEDSSVEGCGFVVGDFVWGQVESHPSWPGLIYDPSDASDFALKLKQKNKLLVAYFGNGTFAWCQPSQLKPFQDNFDDMVKQSSSIDFANAVQEAATEFGRLLYIKLSRPFVTKKT

SEQ ID NO: 237469 - protein, 38 aa, Glycine max
  Clone ID: PAT_MRT3847_5645C.1.pep
AWASHYPPSMVLFVNSRDSILKSGRVCEYITMWGTELH

SEQ ID NO: 237470 - protein, 70 aa, Glycine max
  Clone ID: PAT_MRT3847_56460C.1.pep
QPALAPLNTDQNLDGKGIPLPITNMNLLEDCESMQAQPRLHTLDKANSLYIYRSASSSSIWRTEAESDMT

SEQ ID NO: 237471 - protein, 90 aa, Glycine max
  Clone ID: PAT_MRT3847_56461C.1.pep
LFRLSDTITDSRRASVEVENEYLELQTWSDLPTELLELILSRLSLDDNVRASVVCKRWHSVATSVCVVNQSPWLMYFPKFGDWYEFYDPA

SEQ ID NO: 237472 - protein, 99 aa, Glycine max
  Clone ID: PAT_MRT3847_56462C.1.pep
LTKRLICFCHLEYVLSSYCITTAGQATDGDESVTTCLFDCSGEWTSLIPHEGVELPIDFSWNFSWTVWDCTPLTFMYGPSHMITMDSGDTDFLYLVQRP

SEQ ID NO: 237473 - protein, 56 aa, Glycine max
  Clone ID: PAT_MRT3847_56463C.1.pep
KLKHTIHTTKAGMKFLQMKFHEEFSNLGNILLMINLFKFFAILFHSILLSIPLLKK

SEQ ID NO: 237474 - protein, 90 aa, Glycine max
  Clone ID: PAT_MRT3847_56464C.1.pep
AFQGYKGLIEKYGAWTPYGAHDINQTQERESQHGKHLLEISKRSLRDQEKALLYMSTLSLGINIQLEQKTWSHSYEISCLVIPRVPHGDW

SEQ ID NO: 237475 - protein, 74 aa, Glycine max
  Clone ID: PAT_MRT3847_56465C.1.pep
ESPQRLWLVFLPVCGFVLWRTWTIVCLCRQQKTKTTTKEKAKVAIELRVMLLTGRQRDGNSSEGGKMVDVTLLF

SEQ ID NO: 237476 - protein, 84 aa, Glycine max
  Clone ID: PAT_MRT3847_56466C.1.pep
IRSEVNEVRRKQASLENKGVLVFLVCCIFSMLVILRLSLDMATSVYRVLQSVNRTDCSRKFCAVSSSWFLLLLNCIIIIFILTL

SEQ ID NO: 237477 - protein, 81 aa, Glycine max
  Clone ID: PAT_MRT3847_56467C.1.pep
MSSDTKANSNVGGGSRSRLNHYLYSGDKKHVFVGLTLITAVFTIPWFLMNRGTKHQSHQDYLEKADKARSQRLSSSSASAK

SEQ ID NO: 237478 - protein, 123 aa, Glycine max
  unsure (1)..(123): unsure at all Xaa locations
  Clone ID: PAT_MRT3847_56468C.1.pep
RVYYPGXPSLLEHQLPKRQMTGIGGVASFEIDADVQATIKVTDSVTMPGTAASLGGXESIVDQPDIVSDWDLPQSERAKANIYDYLVRFSXFGEEDYEELKADVLRAVSAIEAVVLIPPGVYV

SEQ ID NO: 237479 - protein, 41 aa, Glycine max
  Clone ID: PAT_MRT3847_56469C.1.pep
VLLFMVYLWTQLEHSGKKNYISELSGMRTGCYSEFDAHHIV

SEQ ID NO: 237480 - protein, 269 aa, Glycine max
  unsure (1)..(269): unsure at all Xaa locations
  Clone ID: PAT_MRT3847_5646C.1.pep
VKRAVGCLAVGFGIPACSGCPTLGLHGWAAYFSPPGPVLANGFMAEELTVENTSGPDAHQAVAFRLDSDLSVIENCEFVGNQDTLYAHSLRQFYKSCRIEGSVDFIFGNAAAVFQDCQILVRPRQVKPEKGENNAITAHGRTDPAEPTGFVFQNCLINGTEEYIALYLSKPQVHKNYLGRPWKEYSRTVFINSILEALVTPXGWMPWSGDFALKTLYYGEFENKGTGSDLSQRVPWSSKIPAEHVLTYSVQNFIQGNDWIPSSVGSPSS

SEQ ID NO: 237481 - protein, 102 aa, Glycine max
  unsure (1)..(102): unsure at all Xaa locations
  Clone ID: PAT_MRT3847_56470C.1.pep
SXARVRKLXIXLELEPMPFWAPRFPXFXXXXXXXXLXXEGGLWELXQXIXRXXXQGDRXGVARXXFAXXAXLXVXXXYDGMXLMEGXWCHWXRXXXNQYXXX

SEQ ID NO: 237482 - protein, 172 aa, Glycine max
  Clone ID: PAT_MRT3847_56471C.1.pep
GKAEDSQDGNTVSSINVNESVSASDSTSENSTTNAMGLTKRSVLPPPPAGYFLGYRLPPGHPCNSFTLPPPPADKKRTGPRPCPVCYLPVEEAIGLMPALPSPSPVLGNLTYVYEENLSRDGEFGGSDFGGYPTLKQRNDSFDIRESMSVHCGFVRGIKPGRNTGFDIDEAD

SEQ ID NO: 237483 - protein, 160 aa, Glycine max
  Clone ID: PAT_MRT3847_56472C.1.pep
LPFSVTFKESRSGKTEIWVEGRGERQPYAEGTIPTSAPLPAPSPGITWLVAPPVLTLGSPIAPLFSLFGPPSHPTGLCSLNPCWSDFCPPHTHPSPPPAPSILCTRYHVTSFSLLQTCTFTAPPSHHPFGSAPPQYLLTHSPEGMDNEAGERERWEAKTP

SEQ ID NO: 237484 - protein, 134 aa, Glycine max
  unsure (1)..(134): unsure at all Xaa locations
  Clone ID: PAT_MRT3847_56473C.1.pep
RARAXRPGAPXGRSPASAPPXSSAPASLPARRSAAASCGPLLSQARHRRRRTSLLDASCASLAVSPPAQCRWRWAPGGGMRSRPRRREERARRIVPSFACARSRPGGRGSAAATPFSLLVKRDHCVRLSGEDQG

SEQ ID NO: 237485 - protein, 293 aa, Glycine max
  unsure (1)..(293): unsure at all Xaa locations
  Clone ID: PAT_MRT3847_56474C.1.pep
ELCPIRAGGHECGFLSVLPKLIMEQCVARLDVAMFNAILRESDDDIPTDPVSDPISDPKVLPIPXARASFGAGAQLKTAIGNWSRWLTGLFGMDDDDPLEDIDDNDLDSNDESQNTFKSFHLLNALSDLLMLPKDMLLNASIRKEVCPMFSASLIKKILDNFVPDEFCPDPIPTDVFEALDSQDDLEDENESISNFPCNAAPTAYSPPSSATITNITGEFGSESQLRRSKSSVVRKSYTSDDELDEINYPLSSILNSGSSSPASSKPNWKWKDSRDESAVRYELLRDVWMNSE

SEQ ID NO: 237486 - protein, 72 aa, Glycine max
  unsure (1)..(72): unsure at all Xaa locations
  Clone ID: PAT_MRT3847_56475C.1.pep
STALWYLLQFVVNVFXGSIFILDIFQVGCTSSVRPIWCVNVFICYLSFPTLFFKCLSDFWSSNGGPGFLFVG

SEQ ID NO: 237487 - protein, 104 aa, Glycine max
  unsure (1)..(104): unsure at all Xaa locations
  Clone ID: PAT_MRT3847_56476C.1.pep
TSRLAIFSEAIFVITLFSLHKFDYEHGSICSDSITLTSSARAPIAAVPPLCSRESASSCSFHLLNPRANFLKVSTFTSLTHGXCKTNHQSHQTADIGFPCNWIA

SEQ ID NO: 237488 - protein, 101 aa, Glycine max
  unsure (1)..(101): unsure at all Xaa locations
  Clone ID: PAT_MRT3847_56477C.1.pep
VRKLXIRLREXXXXXXHSXXXXXGXXXXCXQXVXXDXXRXXRDGFXXXXRPXXXIPXSXLXKXXQXXXLXEXXXTXXXXXEXIYXKXXXXXXXEXXXXEVF

SEQ ID NO: 237489 - protein, 44 aa, Glycine max
  Clone ID: PAT_MRT3847_56478C.1.pep
VGSCCSYYYLGKKGRGCGVRGNINVIKPGPVVNLVDDVGYYFNY

SEQ ID NO: 237490 - protein, 55 aa, Glycine max
  Clone ID: PAT_MRT3847_56479C.1.pep
HCLNPSFYSIPEAYLQTPGMENIAQKQKEKQETELRDLPKRISASGTANPGHRNE

SEQ ID NO: 237491 - protein, 92 aa, Glycine max
  Clone ID: PAT_MRT3847_5647C.1.pep
TSQEKISLSHHRRNYFLGTIGSNICWHSKKSSHFLQPNFFPFSITWGLGALVATFPIYSKRILWVHNCGLRCPQGMLKFGLPQKGSNLFLVW

SEQ ID NO: 237492 - protein, 81 aa, Glycine max
  Clone ID: PAT_MRT3847_56480C.1.pep
GEKRGALGKKKGALNNFKKFPQRFSPVFKKFFQEKFFSIPPLKNALTCLQSFGKFKGQKKRGEGYKNFFGGKPRPPLGGKI

SEQ ID NO: 237493 - protein, 51 aa, Glycine max
  Clone ID: PAT_MRT3847_56481C.1.pep
KFPSSRPKKLPKIPVLNRFQHCFCATNLSLGFSVFFEWDSFVSPRLYNLSR

SEQ ID NO: 237494 - protein, 146 aa, Glycine max
  Clone ID: PAT_MRT3847_56482C.1.pep
GVVCDGYLAVVRGIRRAIMTGRAVRVNSQLKSHKRFANAFPRFCKLVDDARLYCTNDVGGPPQLKWRKDGDQNQNLPDPKDIKCLERIGSVNVEADSIYELYKDPSPIMEPGSVWKDIVLSPSRYNNDQKELKEFIQKIETSIRKR

SEQ ID NO: 237495 - protein, 288 aa, Glycine max
  Clone ID: PAT_MRT3847_56483C.1.pep
MAQFTTQGRLKLLLNGEGVSSVLEHKDPFLYKCRSVQTHKRRTRYAGSSARIYYASTSSLSSKSHRCNAEARHTSGNGSVHDEYDDIDDDEDEDDEEEEEEDVFDRDGLSCFRGLVLDIAYRPVNVVGWKRAICLEFMEKADVLEYYAKTVNSPSGSFYIPAVLRVPHLLQVVKRRIIKNNLSRKNILFRDNYTCQYCSSHENLTIDHVVPAALGGEWTWENLVTACAKCNCKKGRKTLEEAKMKLIKPPKVPKDYDILAIPLTAAALRMLTIRKGTPEEWRQYLRSP

SEQ ID NO: 237496 - protein, 167 aa, Glycine max
  unsure (1)..(167): unsure at all Xaa locations
  Clone ID: PAT_MRT3847_56484C.1.pep
MGSNYLQEVTGAGARKNAGKFVVLHLRFDKDMAAHSACDFGGGKAEKLALAKYRQVIWQEXRSQIKGKASLLAALDYYVGLHSDIFISASPGNMHNALVGHRTYLNLKTIRPNMALMGQLFLNKTIEWSEFQDAVVEGHQNRQGEPRLRKPKQSIYTYPAPDCMCQA

SEQ ID NO: 237497 - protein, 118 aa, Glycine max
  Clone ID: PAT_MRT3847_56485C.1.pep
GSRASNNSGNNSNGNSSVKKDSEDEEKQMQSRMQHPLGDRSTNQMHRVVTSTMAMHAANKQQQPNQGNEGTLNLQGPKVNGNGKQNHQSHQQSFSYSGIYMKGRELEDPENKAYMKAM

SEQ ID NO: 237498 - protein, 515 aa, Glycine max
  Clone ID: PAT_MRT3847_56486C.1.pep
MELLGYLNQGHPSRGTTLVITLSLVLSTLVSFSTFTHAFSSSAFPELNPIKPRHSRLLRSAVQHETPTSQLSEIWSPLESQGWKPYVESNKPTLPEKSEGYIQVFLDGGLNQQRMGICDAVAVAKILNATLVIPYLELNPVWRDSSSFMDIFDVDHFIDVLKDDISIVKELPKEFSWSTREYYGLAIRETRIKAAPVHASAHWYLENVLPVLQSYGIAAISPFSHRLSFDNLPMDIQHLRCKVNFQALTFVPHIRALGDALISRLRYPEGSAGEMGSNYLQEVTGAGARKNAGKFVVLHLRFDKDMAAHSACDFGGGKAEKLALAKYRQVIWQGRVLNSQFTDEELRSQGRCPMTPEEVGLLLAAMGFDNSTRLYLASHKVYGGEARISTLRELFPLMEDKKSLASSEERSQIKGKASLLAALDYYVGLHSDIFISASPGNMHNALVGHRTYLNLKTIRPNMALMGQLFLNKTIEWSEFQDAVVEGHQNRQGELRLRKPKQSIYTYPAPDCMCQA

SEQ ID NO: 237499 - protein, 72 aa, Glycine max
  Clone ID: PAT_MRT3847_56487C.1.pep
ARPSKTPASSFLSYPSSQSLWWALSTKDAQHFLDPPLLRMNPKFYTKHTSFGRNQAILITDESDLLSYYNLH

SEQ ID NO: 237500 - protein, 142 aa, Glycine max
  Clone ID: PAT_MRT3847_56488C.1.pep
FYHGPNTVGGVFSTTRPPNFIVGNSVIAGVIGSFFLFSGYFISKQEIPKYWIFMHYISLFKYPFEGLLINEFSNSGKCLEYMFGACVKSGEDVLKEEGYGGESNRWKNVGVTVCFILVYRFISYVILRYRCSQMGFGRVVTN

SEQ ID NO: 237501 - protein, 59 aa, Glycine max
  unsure (1)..(59): unsure at all Xaa locations
  Clone ID: PAT_MRT3847_56489C.1.pep
TIFYAIEREVHHTDLFMFGIDNTVLSNIPYYEKHGYGVEECNATXYDEWLDTGDAPAFQ

SEQ ID NO: 237502 - protein, 61 aa, Glycine max
  Clone ID: PAT_MRT3847_5648C.1.pep
MNLSVIIKVAMVDIFKQKKKKKKKKKKKKKKKKKKKKKKKKKPKKKKKRGGRFKGSKLTYA

SEQ ID NO: 237503 - protein, 70 aa, Glycine max
  Clone ID: PAT_MRT3847_56490C.1.pep
GGWRRKHTYIFLGFFFSLREKISGLLFVYDQASINHHRINEFFIHILVTLLSTCTVVTSHYSNIIIASYT

SEQ ID NO: 237504 - protein, 61 aa, Glycine max
  Clone ID: PAT_MRT3847_56491C.1.pep
VALRWYFLASLISLFTHCCFGYMPSRSQFIIVFWSMVFSLILVDICFSHPQSLSCIAYSCS

SEQ ID NO: 237505 - protein, 83 aa, Glycine max
  unsure (1)..(83): unsure at all Xaa locations
  Clone ID: PAT_MRT3847_56492C.1.pep
SGIFXXSREXYILTKRFSNSFSLFXYSCVGFRWVFLFLAPEILXFHSLLKFFXTKLNTSAKKSKSPKTLQLSISGLTIIFFLA

SEQ ID NO: 237506 - protein, 117 aa, Glycine max
  unsure (1)..(117): unsure at all Xaa locations
  Clone ID: PAT_MRT3847_56493C.1.pep
VPLKVREDPVFRKEGXNIQVEAVLSIPQAILGGTIQVPTLTGDVVFKIGPGPQPGQKVVLKKKGFKPKNFSPFGDQYVHFKVSIPNILKKRKRELIEKFPKKNQEVFNNQKVASALG

SEQ ID NO: 237507 - protein, 60 aa, Glycine max
  Clone ID: PAT_MRT3847_56494C.1.pep
IINETYHTNKQKFKNERHMASTLIKKLNKVPFAKPTVIFTLSELDKLSRIPFHYVDLVDP

SEQ ID NO: 237508 - protein, 59 aa, Glycine max
  unsure (1)..(59): unsure at all Xaa locations
  Clone ID: PAT_MRT3847_56495C.1.pep
YYNDXFHHPCTPMYFPLCLASSSRNTTHTPDMLYIILLPTFPNFTLLTYRNNIYIYFFL

SEQ ID NO: 237509 - protein, 90 aa, Glycine max
  Clone ID: PAT_MRT3847_56496C.1.pep
MEIWANMFFPLRRVWLSLSARLKPRKNGAGLLKLQDDVQTCGYQDVQVMWEMLQRTEGEVIENHHKRKQFPFWRIFVWSNHTQSANHASS

SEQ ID NO: 237510 - protein, 32 aa, Glycine max
  Clone ID: PAT_MRT3847_56497C.1.pep
VIMGKEKTHINIVALGHVDSGKTATTGHLIYR

SEQ ID NO: 237511 - protein, 36 aa, Glycine max
  Clone ID: PAT_MRT3847_56498C.1.pep
YLNWRSLEFFIFLIYKPIFVLHLKGHSLNPLFLEIY

SEQ ID NO: 237512 - protein, 97 aa, Glycine max
  Clone ID: PAT_MRT3847_56499C.1.pep
MFLKKAPPSKFIFGFFWDPFSNFLGGLENQPHHPGGVFLVCNLNRGPGLPLGGDLKNLGNDGGALHSLAWGGPFNWAGLGEPPWGWGTLVRGLAGLP

SEQ ID NO: 237513 - protein, 41 aa, Glycine max
  Clone ID: PAT_MRT3847_5649C.1.pep
IKKINKIQRITDHLHRLIVWVNGCMSTLFAKMDVYVYIRAK

SEQ ID NO: 237514 - protein, 48 aa, Glycine max
  Clone ID: PAT_MRT3847_564C.1.pep
TLIRQTPVTRKTQDLNTNLKHIYALNGPCSVPPVWRHLHKTKTCFHGP

SEQ ID NO: 237515 - protein, 66 aa, Glycine max
  Clone ID: PAT_MRT3847_56500C.1.pep
VATSTQIPRCSPLGPSHRTQICGTHMRTALECCNNYYRRKRWKYSAFTTARSDLDLSRSVKKKFFI

SEQ ID NO: 237516 - protein, 58 aa, Glycine max
  Clone ID: PAT_MRT3847_56501C.1.pep
KIPFHLRHWFIYCLVSLPIQENQDSNSDALKKKKKLVYTKRVRIPTRNEENRLNPNVY

SEQ ID NO: 237517 - protein, 52 aa, Glycine max
  Clone ID: PAT_MRT3847_56502C.1.pep
FMSPNVFVVKNNRGPWGGKPWFTKNISHHRGDTLNPLSPFNNYWITGAPLLF

SEQ ID NO: 237518 - protein, 52 aa, Glycine max
  Clone ID: PAT_MRT3847_56503C.1.pep
YHAHSVTQATKGLECDCKMAMLSSQQIYKAHLLCLSGALTIFRLLKPLFGSA

SEQ ID NO: 237519 - protein, 54 aa, Glycine max
  Clone ID: PAT_MRT3847_56504C.1.pep
RGSAHNVCAYVHGYTRRTFYYLHIKAYKVSLYITLVRHKFLQTKRCGTKPTQVL

SEQ ID NO: 237520 - protein, 82 aa, Glycine max
  Clone ID: PAT_MRT3847_56505C.1.pep
IKGERLSKNGKMIVVINSHFKEFASSVHLMGTFEKCYCTTLVKGKNVYLPILLHGRVVYSCRLLGCIAVLVVLVCSCICCCC

SEQ ID NO: 237521 - protein, 72 aa, Glycine max
  Clone ID: PAT_MRT3847_56506C.1.pep
YAVLLLFGRARSLAVSSIAVAPRAISSRLYTQPVSLVSHAGVTRSSSFIFLWLSLEFLPVSGMFIDYTLLNS

SEQ ID NO: 237522 - protein, 61 aa, Glycine max
  Clone ID: PAT_MRT3847_56507C.1.pep
VWMVNSGSSYFITTKPTLGGSPMQTRSKSHFLTFFTMKNSSLHSLPPSLFTTIVVANGDCT

SEQ ID NO: 237523 - protein, 59 aa, Glycine max
  Clone ID: PAT_MRT3847_56508C.1.pep
RHSARVEVAYDDMRPSVFLLWLVITSVLAHSALASISLSLCRRLWGHPRGNGRQSHAHS

SEQ ID NO: 237524 - protein, 329 aa, Glycine max
  unsure (1)..(329): unsure at all Xaa locations
  Clone ID: PAT_MRT3847_56509C.1.pep
MANTNNFLTQLHNCTRKKPNTLFTNLYLLTFATFLCTLFYFLGLWRHYPTTTAAAIAAVAESSSLCFHPNTTATTQSSTNLDFAAHHLLPDLPPTVARGPYLPPCASPFSEHTPCEDQQRSLSFPRHRLAYRERHCPAPEERLRCRIPAPYGYRQPLRWPASRDAAWYANAPHKELTVEKKGQNWVRFDGNRFRFPGGGTMFPRGADQYINDIGKLINLRDGSVRTAIDTGCGVASFGAYLLSRDILTMSFAPRDTHISQVQFALERGIPALIGILATIRLPYPSRAFDMAHCSRCLIPWGQYDGVYMTXHDRVLLNFFYWIPTGQTLN

SEQ ID NO: 237525 - protein, 147 aa, Glycine max
  Clone ID: PAT_MRT3847_5650C.1.pep
MGWSFSISVLLFLTFLIQIHGRGFAENYGCNLFQGSWVYDESYPLYATSQCPFIEKEFDCQNNGRPDKFYLKYRWQPAGCNLTRFNGEDFLRRHRGRSLMFVGDSLSLNQWQSLTCMLHIAVPQAPYSCFLTSHSDTWKRLCKELWL

SEQ ID NO: 237526 - protein, 52 aa, Glycine max
  Clone ID: PAT_MRT3847_56510C.1.pep
HSICYLISHNTIYVSVIPLTRNLKADLRNQCVIFKAIMAFDQHGRPKLFFVF

SEQ ID NO: 237527 - protein, 151 aa, Glycine max
  Clone ID: PAT_MRT3847_56511C.1.pep
GVAREKTNQQSPPPDLLDLGEPTVTVAPPSVDPFKQLEGLLDPNLSSTANRSGAAVTNAPDIMALYAETPESRESGSGDYSIPVRGDNVNLLSEFSNAAARGTTVETTVTPLSQSVKGPNVKDSLQKDAKVRKMGVTPSGQNPNLFSDLLG

SEQ ID NO: 237528 - protein, 95 aa, Glycine max
  Clone ID: PAT_MRT3847_56512C.1.pep
TLLEPFKKKGPSLQNSKKALDGTKSEKEGETPGGEKKGGPSPWGPHPKKNSAKKGRGGGYYVHPGFFKTLRGKGRGGGLGGKIYADYKGEKRGGG

SEQ ID NO: 237529 - protein, 246 aa, Glycine max
  Clone ID: PAT_MRT3847_56513C.1.pep
MAKIALGSTREATQPDCIQALIVEFIATFLFVFVGVGSSMVVDKLGGDALVGLFAVAVAHALVVAVMISAAHISGGHLNPAVTLGLLAGGHITIFRSMLYWIDQLVAAATASYLLYYLSGGQATPVHTLASGVGYGQGVVWEIVLTFSLLFTVYATMVDPKKGALAGLGPTLVGFVVGANILAGGAYSAASMNPARSFGPALVAGNWTDHWVYWVGPLIGGGLAGYIYETFFIDRSHVPLPRDEEN

SEQ ID NO: 237530 - protein, 40 aa, Glycine max
  Clone ID: PAT_MRT3847_56514C.1.pep
KSCVIQSIFILNDHYSRGYCALRPVPFTAEKFLLTGLPSL

SEQ ID NO: 237531 - protein, 89 aa, Glycine max
  unsure (1)..(89): unsure at all Xaa locations
  Clone ID: PAT_MRT3847_56515C.1.pep
ASWLEYSLLYANPHKDHVLIGNKCDLSHRRALSKEEGEQFAKENGLFFLKVFVRTVKNVKKXFIXPVERIFKKLKKGIFMCPMSSFGFK

SEQ ID NO: 237532 - protein, 245 aa, Glycine max
  Clone ID: PAT_MRT3847_56516C.1.pep
ARIALGSTREATQPDCIQALIVEFIATFLFVFVGVASSMVVDKLGGDALVGLFAVAVAHALVVAVMISAAHISGGHLNPAVTLGLLAGGHITIFRSLLYWIDQLVAAAAASYLLYYLSGGQATPVHTLASGVGYGQGVVWEIVLTFSLLFTVYATMVDPKKGALAGLGPTLVGFVVGANILAGGAYSAASMNPARSFGPALVTGNWTDHWVYWVGPLIGGGLAGFIYETFFIDRSHVPLPRDEES

SEQ ID NO: 237533 - protein, 39 aa, Glycine max
  Clone ID: PAT_MRT3847_56517C.1.pep
EKPTESMVVLKIKLLCDGCIGNILRIIMRFKGVLSVSLV

SEQ ID NO: 237534 - protein, 50 aa, Glycine max
  Clone ID: PAT_MRT3847_56518C.1.pep
TVVIECGPNMFDDRADRHERVSDEEGELSEASAQVVSVLTEGTKLTQLIK

SEQ ID NO: 237535 - protein, 192 aa, Glycine max
  Clone ID: PAT_MRT3847_56519C.1.pep
MGVDYYKLLQVDRNVSDEDLKKAYRKLAMKWHPDKNPNNKRDAEAKFKQISEAYDVLSDPQKRGVYDQYGEEGLKGQVPPPGAGGFSGGSDGGPTMFRFNPRSADDIFSEFFGFSSPYGMGDMGGRAGPSGYPRFADDLFASFSRSAAGEGSSNVPRKGAPIEKTLQCSLEDLYKGTTKKMKISRDVIDSSG

SEQ ID NO: 237536 - protein, 65 aa, Glycine max
  Clone ID: PAT_MRT3847_5651C.1.pep
LRVIMAMVSCYGKKTIYLTSHSITSVQERRARHEYDISWSCDIAPSPAALYFGLDILLSKDMKPT

SEQ ID NO: 237537 - protein, 148 aa, Glycine max
  unsure (1)..(148): unsure at all Xaa locations
  Clone ID: PAT_MRT3847_56520C.1.pep
LRFFFREVDSQKGVAHIGQMQYGGYDPLATKTNLVETPKEWPLDXLPWDKIPSVLTTTDERLVGTEHEGSDPFLGGNQKYATPMMPLDEEILFKVAQDMVVEWFDWVDXEEDFFXEVSLSAALYGVVGLDYLERIPFANMTGFLILLH

SEQ ID NO: 237538 - protein, 490 aa, Glycine max
  Clone ID: PAT_MRT3847_56521C.1.pep
MQPFSRLVEPFKYHVFLSFRGKDTRFTFTGNLYRALQDRGFRVFMDDQKIDKGKKISQELPKAIKESRIYIIVLSENFASSWYCLVEVVMILDEFAKGKGRWIVPIFFYVDPSVLVRTYEQALADQRKWSSDDKIEEWRTALTKLSKFPGFCVSRDGNIFEYQHIDEIVKEVSRHVICPIGLDEKIFKVKLLLSSGSDGVRMIGICGEAGIGKTTLAHEVFHHADKGFDHCLLFYDVGGISNQSGILSILHGKRVFIIFQDIKHFKQLEDIRELTKQLGSGSKVIITAQDKHLLDRYGIGFESICEIKGFSDSEADRLLEFKVLNSATVSPKYVNILNRIKSYALGHPWTLEVMCSNLSGKSIEECESALLKYESITDRDIQKILEVSFIALEKCQQQMLIHIALYLKDQKLVDVEAELCNKYKVCPRLDIRVLLDKSLIKINHHGQVTLHTSTQEMIKDKASRFEEHGNQEMQFVLNDGSGDWDPMELD

SEQ ID NO: 237539 - protein, 67 aa, Glycine max
  unsure (1)..(67): unsure at all Xaa locations
  Clone ID: PAT_MRT3847_56522C.1.pep
FFFFFFFFFFXDKYYDLIERLYITKKKTLNYKTKRPFLFRHCRVVAVINVQKKRKKENKRGGVNLKI

SEQ ID NO: 237540 - protein, 66 aa, Glycine max
  unsure (1)..(66): unsure at all Xaa locations
  Clone ID: PAT_MRT3847_56523C.1.pep
FHXAYGSXXVGXRXTXXXXXAXCXXLXSXXXRXWXLGSXLXXXSXXXFXXXXSXRFXRXXSLXSXP

SEQ ID NO: 237541 - protein, 53 aa, Glycine max
  Clone ID: PAT_MRT3847_56524C.1.pep
MYIIRVINTNVDGEHIILFTTTTIKGIEKRFDHISCKIADVNNNNTDRELTDA

SEQ ID NO: 237542 - protein, 165 aa, Glycine max
  Clone ID: PAT_MRT3847_56525C.1.pep
LTCHALFSNAFILLLRLWRFDRPPVEHVMGGAATPALGSQLGPEYLLLVRNCMLASYGKSPRDRVRSRRFSKMISFSLEPLFMDSFPKLNIWYRQHQECIAFTCNTLAPGGPVSQIVEALLSMMCKKINRSAQSLTPTTSRSSNSSLSSLDDAMIVLKVPAWDIL

SEQ ID NO: 237543 - protein, 50 aa, Glycine max
  Clone ID: PAT_MRT3847_56526C.1.pep
GKHIIEIPKPYWSGKEFSKIGIVLAKCEGHYRLTDPNRKSMPHQILHDIT

SEQ ID NO: 237544 - protein, 244 aa, Glycine max
  unsure (1)..(244): unsure at all Xaa locations
  Clone ID: PAT_MRT3847_56527C.1.pep
NFCVPVGLLPGYPGPLGLFCSPDGSVNFAIFSRRAESVVLCLYDENDMEKPALELDLDPYVNRTGDIWHVSFESAKGFMSYGYSCRGGVLKRNKDDGFAEHVVLDPYAKIVGNSYPDGVGFVKNLGWLGKEPDFDWGGDCHLDLSMEKLVVYRLNVKRFTQHESSQLPSGLAGTFTGLAKKVQHFKDLGVNAILLEPVXTFDEKKGPYFPSHFFSLMHIYGPXSGGPVSAIASMKEMVKTMHAN

SEQ ID NO: 237545 - protein, 169 aa, Glycine max
  unsure (1)..(169): unsure at all Xaa locations
  Clone ID: PAT_MRT3847_56528C.1.pep
DARGRTRYRRPCEDYLTNHALTQPILSQGELLRAIISVHLNRAHWKEGNTNALGPTCRNDHEPSCWXDWLDLYDYALRTLNEPIGIYTKSTHTDTLRWISISLTNLAXCGNGFYDLGVPDYALPLMTNSVTKLLMNTMSLNIGPYHFKPARYKEWFEHXLKPDDRKLCN

SEQ ID NO: 237546 - protein, 60 aa, Glycine max
  Clone ID: PAT_MRT3847_56529C.1.pep
LGGAFSSFLGRMDVLYSPPGKKFLDFYMLAACPWLEYLQDVLVIGCYSRYLSVLFFKKKP

SEQ ID NO: 237547 - protein, 68 aa, Glycine max
  unsure (1)..(68): unsure at all Xaa locations
  Clone ID: PAT_MRT3847_5652C.1.pep
CMTSHLQLNLDNLPVXAXELKDSVHXLXXXSSHSLHIFINFFPLLXTHSILKMILLHLTRXLPMTFPY

SEQ ID NO: 237548 - protein, 64 aa, Glycine max
  unsure (1)..(64): unsure at all Xaa locations
  Clone ID: PAT_MRT3847_56530C.1.pep
KKNLRKGTGDFLDPNWLRNCLLSTSMKTQASCNTEGGCKTITTPVDSQSRLCTEPVXRIFFDKN

SEQ ID NO: 237549 - protein, 89 aa, Glycine max
  unsure (1)..(89): unsure at all Xaa locations
  Clone ID: PAT_MRT3847_56531C.1.pep
QKFGSHVVEKCLAAFNDENRSRIILELLFTPHFEHLLQDPXANYVVQSALRHSEGHLHNLLVEAIESHKAVSRNSPYSKKIFSQKLLKK

SEQ ID NO: 237550 - protein, 76 aa, Glycine max
  Clone ID: PAT_MRT3847_56532C.1.pep
KSKSYLPGVKKALGKYGPADVEDTTGSGATDSKDDDDIDLFGSDDEEESEEAKRLREERLAQYESKKAKKPALVAK

SEQ ID NO: 237551 - protein, 81 aa, Glycine max
  Clone ID: PAT_MRT3847_56533C.1.pep
DHSYQRPHDGSRGQLFLATNRLNIAGYRVCIGRTYQQHLWRPEMLVRRPTENMGKDRLGGKVDTHDLPYMPAIINGTVSYA

SEQ ID NO: 237552 - protein, 144 aa, Glycine max
  Clone ID: PAT_MRT3847_56534C.1.pep
PSGTTPSMADVPPPPHQVMAMWIQNIPSTLNHDVIFLQYNVFLNIFEITPKATHPSCPSIKTTYGIACSLLNSETNEHSSIKNIANAFDNWIDANMTLREIKLLLHVDHDNWDAIKDIVPPPLRKIFNDDYIAYDLMNTDLHRL

SEQ ID NO: 237553 - protein, 50 aa, Glycine max
  Clone ID: PAT_MRT3847_56535C.1.pep
TFSFYNSFRGGEFSEHAKDHAQVEGQPQHHPKASQAGPSSLEATKCMIEA

SEQ ID NO: 237554 - protein, 60 aa, Glycine max
  Clone ID: PAT_MRT3847_56536C.1.pep
KFVGMNTGFSPVEDCDSMCINGFYCWFCHWNVLNNFQLTLCLYIACIFASGVWSKSFYFL

SEQ ID NO: 237555 - protein, 158 aa, Glycine max
  unsure (1)..(158): unsure at all Xaa locations
  Clone ID: PAT_MRT3847_56537C.1.pep
THPLPHNYFGNAVANVATXEGDIISNPLGFAAHKIREASHAVTDEFVKSQLNVSRLGQVQLDNIRAFFMRQGHRVNIPYALNHNVLFLTSFTNMPVYESDFGWGKPVHFGLASRSPADRAAILPSPDGDGVIVALFFQTALMQLFKNYFYEDMYLSLL

SEQ ID NO: 237556 - protein, 77 aa, Glycine max
  unsure (1)..(77): unsure at all Xaa locations
  Clone ID: PAT_MRT3847_56538C.1.pep
VRYGPAIGPYTIVDLRIYPLAPGGVFFPSRVLQAFWGFSLPPKFFVPHRIPNKTPWPLLFXMKKTRVANSNGGGINL

SEQ ID NO: 237557 - protein, 90 aa, Glycine max
  unsure (1)..(90): unsure at all Xaa locations
  Clone ID: PAT_MRT3847_56539C.1.pep
HDDNTLDLLLVGGKGRWKLLKFFILLQFGGHLSLPYVEYVKVECVKLHPGANTRNGCEIYDELCRVKGHVLXSLFQDQGKLIGRQSNKSP

SEQ ID NO: 237558 - protein, 40 aa, Glycine max
  unsure (1)..(40): unsure at all Xaa locations
  Clone ID: PAT_MRT3847_5653C.1.pep
KAYSKEGRRRRSWPPFSLFLTPXRMLSRPCKHINKHINQP

SEQ ID NO: 237559 - protein, 294 aa, Glycine max
  Clone ID: PAT_MRT3847_56540C.1.pep
MMRYIYIYGQHTSTETQTYTHNLIEKEREQKKRKEKKQSGKQRETTKDLQEKQKEKKHKKDKKDKEKRESKEKREKEGRDGKHKEKKDKKEKHREKKKDKDKDKDKSKDRDKSKSSTADDKGFPRQAEGLNAGKPHQKEIKQDNKKGILFENRLTKQYAGNNGEKAREKNHLAEENKGKEKVKEKKDEKEKAKEKTEERKVKEKKDEGKEKVKEKKDDKRRDKRKDKEKEKKGHGKDKDRDKEKKKEEKAKEHGELKTTEQNKNVSDTTWSKSDAEHKSGDEAKSSNKFLKIIK

SEQ ID NO: 237560 - protein, 83 aa, Glycine max
  Clone ID: PAT_MRT3847_56541C.1.pep
RVACPVFKNCFGPPPAFYDQGKDFCFSLGGFPRPLKGPFSSPGGGLNPFSFSSRSWGKKLPFPSGNECGWGAQWAFFPIPAFF

SEQ ID NO: 237561 - protein, 580 aa, Glycine max
  Clone ID: PAT_MRT3847_56542C.1.pep
MAVQKLNGDNFTLDEDPRVSSVLLRMLLYKEYPNGAQYSYDFCYGEKQKEKKHKKDKKDKEKRESKEKREKEGRDGKHKEKKDKKEKHREKKKDKDKDKDKSKDRDKSKSSTADDKGFPRQAEGLNAGKPHQKEIKQDNKKGILFENRLTKQYAGNNGEKAREKNHLAEENKDSKFLLELDRRIKDDDGGANHQLVHKFTNTNHRKDEGTVRLVAKGGGTRSDGNEKLKDMGLDVKKIDGRGIQDEVRPIGNAAPVQNHVGNFHPRVDGIPKLLGKYFERNLEATVEGKEKVKEKKDEKEKAKEKTEERKVKEKKDEGKEKVKEKKDDKRRDKRKDKEKEKKGHGKDKDRDKEKKKEEKAKEHGELKTTEQNKLKESNKVGLINSNSFAQPSRNSHGNTVSGENRKKRKDIESNGVPHVNDSLPNKFPKLSSSHPFNENGRVWEPCQVSIPNASDRPREATSVKVEKKESKINGIIESKPFAASSIKTPTATVPATLVTEASAKPPHPDTKYLGQVYSVPKVEQWSDFDDQEWLFDTNVSQERKSVVKSSIEVGETPQVWAEALRIEPADVFALPYVIPY

SEQ ID NO: 237562 - protein, 39 aa, Glycine max
  Clone ID: PAT_MRT3847_56543C.1.pep
FVVHSKRSLTNPSKCDRLRYLGFARINFFISAYMEKKIR

SEQ ID NO: 237563 - protein, 44 aa, Glycine max
  Clone ID: PAT_MRT3847_56544C.1.pep
DQARYYCTPRRATLNTDHQLHGIGEASFLDLSNIYPTTWEYIIF

SEQ ID NO: 237564 - protein, 52 aa, Glycine max
  Clone ID: PAT_MRT3847_56545C.1.pep
PPPEGANGQSLQLFRVWLKGQHGKKNPTGKSRKKGRQNVPTAPSAQELNTLV

SEQ ID NO: 237565 - protein, 313 aa, Glycine max
  Clone ID: PAT_MRT3847_56546C.1.pep
QQPLHPYYPGRYVDTNPDSYELYSHNAMLHPPTCSCFHCYDSKQRGSVPALPASFINSRFPDTPNDPMLYHHEIPGAFGPHVHNSRTTIPPLSVREKQLHARWASDVNSEMGGFVRSRPRKVMLASSSQRCYPVAGGSPFISCHNCFELLLLPKKPLVLVKNHQQKVQCGACSTEISFAVINKKLVISPNLETKGASSRGDSSSNEVVSSHMSHSRGHVNRTGANFSSDDYSGYDFHSVDREPFSLVALNSNKSREIPSFHSSSLSTSEDENSPETMIAPREATKSIHRPTTDSLSPAGSPLQVFDYSNITMQ

SEQ ID NO: 237566 - protein, 34 aa, Glycine max
  Clone ID: PAT_MRT3847_56547C.1.pep
VGRHPKLVNQDNPPRYKSKKYKDYAYYKLNKIPR

SEQ ID NO: 237567 - protein, 98 aa, Glycine max
  Clone ID: PAT_MRT3847_56548C.1.pep
QDARAYTQRSNLTIVNPNCIVPLAMSHPTMPFIVMWLFEQTQFLSLHNPKISSASVNYIIATNSLPSLRLHLESTVAPLCIATASSHQTFYSFAAICS

SEQ ID NO: 237568 - protein, 148 aa, Glycine max
  Clone ID: PAT_MRT3847_56549C.1.pep
MALSFGFGLLSSSSSSSSLCVLPPSETHTFMMRPSASSGLRMMRTSRITCCTLSQSSKPARKIRGIMKPRKVSPEMEDLVGAPEMARTQVLKRIWAYIKDNNLQDPTDKRTINCDEKLKKVFAGKDQVEMLEIARLISPHFLKSESES

SEQ ID NO: 237569 - protein, 167 aa, Glycine max
  Clone ID: PAT_MRT3847_5654C.1.pep
ARAQQADLCIVHIVLSLGFFEPAFLVTLLFLLNASIKTKTPKNNDKWAITFVLLTCLPFATLQALLIFFAPFENRVPAETSVVLNDGYGFETVLCAYPFLSSALFAVFGVTYSTWFLFSCWRVLSLVINKGLRMKIYVLAWIVLVAIPLQIVTLGFIVRWSPHQEVH

SEQ ID NO: 237570 - protein, 57 aa, Glycine max
  unsure (1)..(57): unsure at all Xaa locations
  Clone ID: PAT_MRT3847_56550C.1.pep
YRTHXKQTQKKLNRHHIKSKRVFHIYKQKTKVTGRKTSSQAKSTVNSNDCKALQGNN

SEQ ID NO: 237571 - protein, 139 aa, Glycine max
  Clone ID: PAT_MRT3847_56551C.1.pep
MALSSGLFLCSSSRVLPPPETHTFMRTRPSSAALRTISVSCCTVSQSSKPARKIRGIMKPRKVSPEMEDLVGAPEMARTQVLKRIWAYIKDNNLQDPTDKRTINCDEKLKKVFAGKDQVEMLEIARLISPHFLKSESES

SEQ ID NO: 237572 - protein, 80 aa, Glycine max
  Clone ID: PAT_MRT3847_56552C.1.pep
MAPSFAINGAFPSARVTPPSVTGRFAAVYSEVQNSRIDHALPLPSVLKNPFIIVDGPQSSAAGNPGLAPSHSLLQFSVDN

SEQ ID NO: 237573 - protein, 66 aa, Glycine max
  Clone ID: PAT_MRT3847_56553C.1.pep
MAAVSGGGSEIWKAHTAMAMVQLFNGGYHVITKVALNVGVNQIVFCVFRDLIALAILAPLAYIRVK

SEQ ID NO: 237574 - protein, 261 aa, Glycine max
  unsure (1)..(261): unsure at all Xaa locations
  Clone ID: PAT_MRT3847_56554C.1.pep
MAPSFAINGGFPGARVTPPSVTGRFAAVYSEVQNSRIDHELPLPSVLKNPFIIVDGPQSSAAGNPEEIAKLFPKLFGQPSAALVPSDSHAPHANRKLKIGVVLSGGQAPGGHNVISGIFDYLQDLAEGSTLYGFRGGPAGIMKCKYVELTSDYIYPYRNQGGFDMIRSGRDKIETPEQFKQAEETVQKLNLDGLVVIGGDDSNTNACLLAEHFRSKNMKTRVIGCPKTIDGDLKCKEVPTSFGFDXACSMQNDWHVMIDAR

SEQ ID NO: 237575 - protein, 59 aa, Glycine max
  Clone ID: PAT_MRT3847_56555C.1.pep
GAWYNLILMETTEPASSNYSWYYFSLRSKNAAENCYFSFLLASFLSNTYSGRSKKKKKK

SEQ ID NO: 237576 - protein, 76 aa, Glycine max
  Clone ID: PAT_MRT3847_56556C.1.pep
CLGPSARSPAPCADPSLPESLIRIRCRQPLCARCSGDSTCGSVGSEFDPKVSWKHLTRSKNYNRKGFGYKEETLQS

SEQ ID NO: 237577 - protein, 59 aa, Glycine max
  Clone ID: PAT_MRT3847_56557C.1.pep
MHKGLITAMAINTAEDILYTASLDKTVKVWRISDLKCIETIKAHTEPINAIIVADDGVL

SEQ ID NO: 237578 - protein, 84 aa, Glycine max
  unsure (1)..(84): unsure at all Xaa locations
  Clone ID: PAT_MRT3847_56558C.1.pep
RSVFGGGGNDKRARVDGELATTTNATTTLTNSSNCYRKANSNSTEEEVSRDNGEDLQNQNLGSLEGSEPGSSGRRPRGRPHGXK

SEQ ID NO: 237579 - protein, 58 aa, Glycine max
  Clone ID: PAT_MRT3847_56559C.1.pep
YRLCNSTLSKWLPRLGPNLVASLPYMVLNYQHALFLWTKTIILFGFNQLWFNCVFMYP

SEQ ID NO: 237580 - protein, 102 aa, Glycine max
  Clone ID: PAT_MRT3847_5655C.1.pep
RSQDAIHCIPMTIYEVIPPHHSALNLTLGPFDALFSFLMYLTPSGLRAVINFKFPPFHSVFLSNSSVLSIKPQHFPSCNNIVFNLHLSYVFHLPHSMMFYPY

SEQ ID NO: 237581 - protein, 52 aa, Glycine max
  Clone ID: PAT_MRT3847_56560C.1.pep
GEGSVNATDAVFTDVTLEAALISVTEQALSKPVDALDDLHRIAPASLIKICL

SEQ ID NO: 237582 - protein, 48 aa, Glycine max
  Clone ID: PAT_MRT3847_56561C.1.pep
LTWEYTRAACRSYCEPKGLLRCYTETDTYRIMYDSAQLKQKMYTNSSL

SEQ ID NO: 237583 - protein, 50 aa, Glycine max
  Clone ID: PAT_MRT3847_56562C.1.pep
HIGMRFSWCMLQTCVLNPVTLKGGLAPANMLFYTPYVRDAHFDMRSAFTA

SEQ ID NO: 237584 - protein, 59 aa, Glycine max
  Clone ID: PAT_MRT3847_56563C.1.pep
LLTNPTTSVSPGTACESTPDPSYCKFVLPPQNSNIYDYGRFSVKKLLSQAHKFLNLVNK

SEQ ID NO: 237585 - protein, 87 aa, Glycine max
  unsure (1)..(87): unsure at all Xaa locations
  Clone ID: PAT_MRT3847_56564C.1.pep
AKATFVFLPFFKKSGSLCVYGDDNYTRVHEYVKPYFKPSXLQSYLATHNITTTDAIDKTSATLQLTKFTNLAFLMTNFQAPSTALWV

SEQ ID NO: 237586 - protein, 48 aa, Glycine max
  unsure (1)..(48): unsure at all Xaa locations
  Clone ID: PAT_MRT3847_56565C.1.pep
SFISLLLSFQKQNINRVHVLLKTILLXXHLISFLMLLKLDNNYTGVTV

SEQ ID NO: 237587 - protein, 45 aa, Glycine max
  unsure (1)..(45): unsure at all Xaa locations
  Clone ID: PAT_MRT3847_56566C.1.pep
YETQGHLKRQIGKTTKVIKSKAPPLVDCIRLKANRVYRTRAXTRG

SEQ ID NO: 237588 - protein, 415 aa, Glycine max
  Clone ID: PAT_MRT3847_56567C.1.pep
MWCGNDMHERVMGVPQKDPETLIKADSIQYFMLQLLTTSTTPLPILSFFVGTSTMSDAGLCLPPQFLAGDTHRTLSNSDFSFPSEFPYEFRVSSPPSTETESSDGEEDFLAGLTRRLSQTSLHEARKQFSTVSEIPRKTRQGLVGSPQSTLAGIGSWSGRSTISGEGSPNGYTRVPSPSTMPFDENNDPWEVIYAVAGQIARMKINSNNQVPPQFDFHNNRGLLTHHRPNQSFNQLNQVGRAKQQCGSVWGRPTKPNYLVQQQQVQVQVQNRAREFGHDSVNVKCTRPSAWPPLQVEQQNNRVQLGGSRVVIPGGGGSSVKKGCGGTGVFLPRHYETPSEPPRKKTGCAPVLLPAKVVHALNLNIDDLNGTTQPRFSNAFAVDYDAILARRNALLMQQREEAANYEIRLPQEWTY

SEQ ID NO: 237589 - protein, 166 aa, Glycine max
  Clone ID: PAT_MRT3847_56568C.1.pep
MRNVPCSSAWPPLQVQQQNNRVQFGGSGSRVGGSSVKRGCGGTGVFLPRHYETPSEPRRQKTGCAPALLPAKVVHALNLNIDDLNGTTQPRFSNAFATDYEAILARRNALLMQEQQQRLISVRREEQPTMKFAFLKSGLTDKRRHKFLLKNLKKFGIVYFGCFDRR

SEQ ID NO: 237590 - protein, 132 aa, Glycine max
  Clone ID: PAT_MRT3847_56569C.1.pep
AGRFGTPSLLAFQSHFAKEQMAHLTSTTCLIFGLVIFTSVISKGNSCELSVIGGGCPDLKECTETCRPCYRGIGEVHAYCVPASGGIPYDQCVCRMMNGAPCNPAGPPICPRPWPPTATIATNHSQTHNATP

SEQ ID NO: 237591 - protein, 391 aa, Glycine max
  Clone ID: PAT_MRT3847_5656C.1.pep
MARDGSVVPADPQAMAVVKKKTQSSRSWILFDATGQGTLLDMDKYAIMHRVQIHARDLRILDPLLSYPSTILGREKAIVLNLEHIKAIITAEEVLLRDPTDENVIPVVEELQRRLPQLSATGLKQQGDGKEYLGGQNDAEAAEEEESPFEFRALEVALEAICSFLAARTTELEMAAYKAFDELTSKISSRNLDRVRKLKSAMTRLTARVQKVRDELEQLLDDDDDMADLYLSRKAGSASPVSGSGAANWFAASPTIGSKISRASLATVRLEENDVEELEMLLEAYFSEIDHTLNKLTTLREYIDDTEDYINIQLDNHRNQLIQLELFLSSGTVCLSFYSLVAAIFGMNIPYTWNDNHGYMFKWVVIVSGVFSAVMFLIITAYARKKGLIGS

SEQ ID NO: 237592 - protein, 161 aa, Glycine max
  Clone ID: PAT_MRT3847_56570C.1.pep
SDFGLAKICTRKESMISVFGTRGTAGYIAPEVFSRNFGTVSHKSDVYSYGMMILEMVGRRKNIKTEVNCSSEIYFPDWIYNRLESNEELGLQNIRNESDDKLVRKMTIVGLWCIQTHPSTRPAISKVLEMLGSKVELLQIPPKPFLSSPPTSPVHLSCETL

SEQ ID NO: 237593 - protein, 464 aa, Glycine max
  unsure (1)..(464): unsure at all Xaa locations
  Clone ID: PAT_MRT3847_56571C.1.pep
IHRVHGITLSYKQAWRGKERIMAAMRGSFEEGYRLLPQYCEQVKRTNPGSIASVYGNQADGCFQRLFISFQASIYGFLNAFRPLWGLDRTYLKSKYLGTLLLATGFDGDGALFPLAFGVVDEENDDNWMWFLSELHNLLEIHTENMLRLTISSDRQKGLVAGGAPWFPPACPRLCLLPLRGCSRLHFFGSLPVTLLRVAAFAPSALMWMHXILEIEEISQDAAYWIRRIPPRLWATAYFEGHRFGHLTANIVESLNTWILEASGLPIIQMMECIRRQLMTWFNERRETSMQWTSILVPSAERRVAEALDRARTYQVLRANDAEFEVISHEGTNIVDIRNRCCLCRGWQLYGLPCAHAVAALLSCRQNVHRFTESCFTVATYRKTYSQTIHPIPDKSLWKELSEGDANASKATEVVINPPKSLRPPGRPRKKRVRAEDRGRVKRVVHCSRCNQTGHFRTTCAAPI

SEQ ID NO: 237594 - protein, 121 aa, Glycine max
  unsure (1)..(121): unsure at all Xaa locations
  Clone ID: PAT_MRT3847_56572C.1.pep
RGWQLYGLPCAHAVAALLXSCRQNVHRFTESCFTVATYRKTYSQTIHPIPDKSLWKELSEGDANVSKATEVVINPPKSLRPPGRPRKKRVRAEDRGRVKRVVHCSRCNQTGHFRTTCAAPI

SEQ ID NO: 237595 - protein, 68 aa, Glycine max
  Clone ID: PAT_MRT3847_56573C.1.pep
RVAFVEKLSGVAHQLTDDEKSAFRQTLAPYKIPKAVQYMPLPRNHLGKVQKNVLRAMPELKELFAVKK

SEQ ID NO: 237596 - protein, 63 aa, Glycine max
  Clone ID: PAT_MRT3847_56574C.1.pep
YGLSRLIANHNAFLVNTYPLHLNSGVLKNLPVRVLILPLFINFLLVSYLVSLNEKLYTNVNYF

SEQ ID NO: 237597 - protein, 176 aa, Glycine max
  Clone ID: PAT_MRT3847_56575C.1.pep
MATLSSAVTLAAKPLSLPLNHRARAAAAFHSPKPHLKRAEFKFFSNGSAASVHSLTRRLRVSSNDAHFNSGPEESQQQQSSSFAEFITSERVKVVAMLALALALCNADRVVMSVAIVPLSLANGWSRAFAGIVQSSFLWGYLVSPIAGGVLVDHYGGKVVMAWGVALWSLLLFYPL

SEQ ID NO: 237598 - protein, 58 aa, Glycine max
  unsure (1)..(58): unsure at all Xaa locations
  Clone ID: PAT_MRT3847_56576C.1.pep
ALIHGLNRHYYSIAINYRKNELEEKMLLRLHKKKWTDGLTLRHXDSHSRTNEQTVHVS

SEQ ID NO: 237599 - protein, 78 aa, Glycine max
  Clone ID: PAT_MRT3847_56577C.1.pep
PTTGTFTGETSTLAASRAVTPTRVYALPIRWTSALRPIPPYRTVFHLYSLRHRVEDWSGRRRRRGPGYFPLRSQNELG

SEQ ID NO: 237600 - protein, 79 aa, Glycine max
  Clone ID: PAT_MRT3847_56578C.1.pep
IYDSYFVIYNIHNVGIFLKKKKKKKKKKKKRKKKKKDKKKRKKKKNPQKKKKKGGAPLRDPILTPGGGKGIFFFRGPQN

SEQ ID NO: 237601 - protein, 399 aa, Glycine max
  unsure (1)..(399): unsure at all Xaa locations
  Clone ID: PAT_MRT3847_56579C.1.pep
MLTKFETKSNRVKGLSFHPKRPWILASLHSGVIQLWDYRMGTLIDKFDEHDGPVRGVHFHHSQPLFVSGGDDYKIKVWNYKLHRCLFTLLGHLDYIRTVQFHHENPWIVSASDDQTIRIWNWQSRTCISVLTGHNHYVMCALFHPKEDLVVSASLDQTVRVWDINSLKRKYVSPVDDILRLSQMNTDLFSGVDADVKYVLEGHDRGVNWAYFHPTLPLIVSAADDRQVKLWRMNDTKAWEVDTLRGHMNNVSCVMFHAKQDIIVSNSEDKSIRIWDATKRTGIQTFRREHDRFWILAAHPEMNLLAAGHDSGMIVFKLERERPAFVVSXDSLFYTKDRFLCFYEFPTQRDAQVLPFRRPGSLSLNQSPKTLSYSPTENAFLLCSDGXGGSXYELYWISK

SEQ ID NO: 237602 - protein, 51 aa, Glycine max
  Clone ID: PAT_MRT3847_5657C.1.pep
IEEHVFALVGQMGRETFSGTIELLATLCHSTLCTSHSLVGRFYLQDPVVAV

SEQ ID NO: 237603 - protein, 64 aa, Glycine max
  Clone ID: PAT_MRT3847_56580C.1.pep
FENSPTIEFSLIANPDCGTFVSINFRCFWSAVHSNVQLGHIASFRLITVILNCSGRTAESDDRL

SEQ ID NO: 237604 - protein, 59 aa, Glycine max
  Clone ID: PAT_MRT3847_56581C.1.pep
LKYCQDGRFYMHDSLMHHVQLLVPPSREVPWDVFACAVQGSTHQLCACFYDPFVSLSQL

SEQ ID NO: 237605 - protein, 74 aa, Glycine max
  Clone ID: PAT_MRT3847_56582C.1.pep
HNSKHDGDVMIHLGQHPWQKTSKPCVINRPGRSVFLCNMALWHSCPYDLSLILDGNESNCMAWACGVDTVMFGK

SEQ ID NO: 237606 - protein, 137 aa, Glycine max
  Clone ID: PAT_MRT3847_56583C.1.pep
FLVPPQIDPRVGNSGVDVKLPSKSEKVDSTKARQVSVPTDKYDRVGAATHAREDGTEQEDHDPPIGGVARLAHTMVPLDEEVQAKVAPDMVEECLDGVETARGSREDLKSSESKRGRGKDTYGGTILRRDRWAYLWA

SEQ ID NO: 237607 - protein, 489 aa, Glycine max
  unsure (1)..(489): unsure at all Xaa locations
  Clone ID: PAT_MRT3847_56584C.1.pep
MASCDDDDDFSLLRDDSHHHLHQPYAPHHHHFSPSAVAASVPPKPVAEAEDFANPFEDDDGSASEKRKECDEIGEGAASYGFNNKRSKATPSNGVAVSGGAEYRKDREEWSDTAIVCLLEAYTEKFTQLNRGNLRGRDWEEVAAVVSERCENQSKSVEQCKNKVDNLKKRYKLERHRMSSGCISTSHWPWFKQLEQIVGNSLPAKFSDEDKAVISAGTSPRQSKRYGVATPSTGGPANSMKSKALSNSRWRMVVLKISGAALTGSDTCNIDPKVAMLVSREVAIASRLGVEVAIVCWRSXLSSGEARVNVTGLERCTAYQVGMMATVMNSILLQSTLEKMGVQTRVQTSVAMQEFAEPYNRQRAIRHLEKGRVVIFGGIGFGAGTPLFSTDIAAALRASELNAEAVLKGTNVDGVYDCNSRDNNFTFEHISFRELGSRGVTSMDMSALTFCEENAIPVVVFNLLEPGNISKALCGEQVGTLIDQTGAIS

SEQ ID NO: 237608 - protein, 63 aa, Glycine max
  Clone ID: PAT_MRT3847_56585C.1.pep
GRLTIVIWSAELMSFNLNPQHLIAECNAPQLLNLSLYRNHFFAVYVFLSLKSSDAAFLKRWIF

SEQ ID NO: 237609 - protein, 88 aa, Glycine max
  Clone ID: PAT_MRT3847_56586C.1.pep
KSLAYFCLARGLLLRSKLSENHSAHLCILSKDCNHLFHPHFYTLIVQSPIPPFSQFQFLIPFQNGLILCMCALKAQSNKLAYPSCLVI

SEQ ID NO: 237610 - protein, 49 aa, Glycine max
  Clone ID: PAT_MRT3847_56587C.1.pep
LGASDLARISTWRERCKISFPSNGRTEIWVSLDLVVYIGFSTHIHTYNT

SEQ ID NO: 237611 - protein, 51 aa, Glycine max
  unsure (1)..(51): unsure at all Xaa locations
  Clone ID: PAT_MRT3847_56588C.1.pep
FFFFFFFFFFFFFVFFFXFSVNWDQFFSALIHVDFFMSFKKSKRRGHNTSL

SEQ ID NO: 237612 - protein, 127 aa, Glycine max
  Clone ID: PAT_MRT3847_56589C.1.pep
MKDMNTTRKLSAIIGASFAASMAVSQSAQADQSLFGFQPLSHGYNLAMLEGSCGADKKKEGSCGEKKKDGKCGEGKCGEKKADGKCGEGKCGEKKKDGKCGEGKCGEKKKDGKCGEGKCGEKKEEKK

SEQ ID NO: 237613 - protein, 116 aa, Glycine max
  Clone ID: PAT_MRT3847_5658C.1.pep
CHSTLEPERLVVSSFAMEGLALAWFQWLIRSGQVSSWIGLLHALEARFAPSQYEDPTGSLCKLTQQGSVSAYLSQFEMLANRIIGLLAPFLLSCFMSGLAPEIRREVQALHPLTLV

SEQ ID NO: 237614 - protein, 58 aa, Glycine max
  Clone ID: PAT_MRT3847_56590C.1.pep
LSFFGPPEVFYIPLKGPQKHLHNMPEQAPHQKPQKLNPNFYIKTCPNAQKIVADALAD

SEQ ID NO: 237615 - protein, 60 aa, Glycine max
  Clone ID: PAT_MRT3847_56591C.1.pep
IMWLTSPYVLHVFMVDLFTNIMEVNLLIMLCLLKFIFDIYMVISFYFVYFLIHFKMSSYE

SEQ ID NO: 237616 - protein, 46 aa, Glycine max
  Clone ID: PAT_MRT3847_56592C.1.pep
YYYIIILLLFGFQRGYGMTERLDFILTEINGYYNSNDRWKFILFFD

SEQ ID NO: 237617 - protein, 125 aa, Glycine max
  Clone ID: PAT_MRT3847_56593C.1.pep
RSTQTALFCRKLVTRSHSCVNTTLPSLRHTYYMSTLPPLGLTRRSLAPPPPLEVSSSYVCNLPHLYTFLPRTYLTRRPPHFTEVPKSPLYYLFIFGHQAHILPFAPPPPPQRRRTSYSDDGKPSW

SEQ ID NO: 237618 - protein, 261 aa, Glycine max
  unsure (1)..(261): unsure at all Xaa locations
  Clone ID: PAT_MRT3847_56594C.1.pep
IRLEGSPRDSVGHGTHTASIAAGVHVNNASYFGLAQGTARGGSPSTRIAAYKTCSDEGCSGATILKAIDDAVKDGVDIISISIGLSSLFQSDFLSDPIAIGAFHAEQKGVLVVCSAGNDGPDPFTVVNTAPWIFTIAASNIDRNFQSTIVLGNGKYFQGTGINFSNLTHSKMHRLVFGEQVAAKFVPASEARNCFPGSLDFNKTAGSIVVXCVNDDPTVSRXIKKLVVQDARAIGIILINEDNKDAPFDGSAFPSLQLAIL

SEQ ID NO: 237619 - protein, 740 aa, Glycine max
  unsure (1)..(740): unsure at all Xaa locations
  Clone ID: PAT_MRT3847_56595C.1.pep
ALACSLRVYEKASIEGTEDSHEGRYDSDGSEKSLDSFVIQLFELMXPIVGNPRLGKVVVANIRELVYYTIAFLQMTEQQVHTWSVDANQFIADEEDATYSCRVSGVLLLEEVVKSSAGXVILSITDDAKQWFTESQIRKAAGNASWWRIREATLFALSSLSEELLETEETGFDSCCLLHLVEQIFTEDSLIGPLEYPFLYARIFTSVAKLSSLISNGLLEHFLYLAMKAITMDVPPPVKVGACRALTNLLPEAKKEIVQSQLLGLISSLTDLLNHASDETLLMVLDTLLAAVKAGHESSTLVEHMISPVILNVWASHVSDPFISIDALEVLEAIKSIPECVHPLVSRILPSIGPILNKPQEQADGLVAGSLDLVTMLLKNAPADVVKAIYDVSFNAVINIILQSDDHSEIQNATECLSAFISEGRQQILAWGSDSGSTMRSLLDIASRLLDPKLESSGSLFVGSYILQLILHLPTQMAVHIQDLVAALVKRMQSAQNSVLLSSLLIYGCEKTTEGVPNVGQFIDLLISIPAEGHGNSFAYIMSEWTKQQGEIQGAYQIKVTTSALALLLTSRHNELANIHVQGYLIKSGEGITTRSKAKSAPDQWVMLPLSTKIVALLADALTEIQEQVLAADDEDSDWEEVQADGIENDKEFLYSVSTSSGKATDEQLEAMVKVFNEDQDDHYEDDLLSIADPLNQINLANYLLDFFVSFSQSDRQLLDHICKSLSQSQRNAIQMVLKR

SEQ ID NO: 237620 - protein, 81 aa, Glycine max
  Clone ID: PAT_MRT3847_56596C.1.pep
FCVVSLDKHRSSLMISSIFLPTSATCSVRFSLILYIILWTNTHFSPTCIQASFSISSKAPARFCSLSSLCDPALLSLLLLT

SEQ ID NO: 237621 - protein, 376 aa, Glycine max
  Clone ID: PAT_MRT3847_56597C.1.pep
MVPPPHVAVPGYAFPLGPGPFPGAENPLVKPVSQAPGQAFAPPAHAVDGKNVQPLVRGDPNAYVGNFSNGRTNIQEQGDHLNHAWHHQRPFPSRVNIPMQQGLGPRPFIRPPFYGPPPGYMVGPSFPGPAPVWCVPMPPPGSIRGPHPRHFVPYPVNPTPQPPPPETVSLRTSIVKQIDYYFSDENLQNDHYLISLMDDQGWVPISTVADFKRVKKMSTDIPFILDALQSSNTVEVQGDKIRQRDSWSKWIGASSGNSGSSTAQVQQGQLVDGAFNSLENSDAVGDKMKEISEENPKDAVHDSIFEEHNQPNRDMLQVSLMNQEKNNEGHRSNDKSHEGVKFCDFETTNNNLCSQQEVEPKVFDINEAGNLDGLTE

SEQ ID NO: 237622 - protein, 213 aa, Glycine max
  Clone ID: PAT_MRT3847_56598C.1.pep
MKTKLLAFLLFFALTTKPLLLGAAGAAPEPVIDTSGKKLRADANYHIIPAVPFTICGFVGCFTGGGLSLDSIDESCPLDIIIEKANEGLPLRFSPVNTKKGVIRVSTDLNIFFSDSDERCPHHSTVWMLDQFDASIGQTYVTTGGVVGNPGEHTILNWFKIQKYEDAYKLVYCPRVCPSCHHLCKDIGMFVDANRRMHLALSDDPFKIKFKEA

SEQ ID NO: 237623 - protein, 98 aa, Glycine max
  Clone ID: PAT_MRT3847_56599C.1.pep
MIYAEPKPKEEAPDFSKFMNGDLSSLLTVIPSSNMQGHEWHNNSAREMSNVQSSVSGMTDDNFGLDIKPIASLFPLSNTTNHDENQGCYSWDNLPGLC

SEQ ID NO: 237624 - protein, 205 aa, Glycine max
  unsure (1)..(205): unsure at all Xaa locations
  Clone ID: PAT_MRT3847_5659C.1.pep
MKLVLLRDPTDENVIPVVEELQRRLPQLSATGLQQQGDGKEYLGDSSSSAALEVALEAICSFLAARTTELEMAAYPALDELTSKVQNKLTNKPRVRQAYFSEIDXTLNKLTTLREYIDDTEDYINIQLDNHRNQLIQLELFLSSGTVCLSFYSLVAAIFGMNIPYTWNENHGYMFKWVVIVSGVFSAVMFLMITAYARKKGLVGS

SEQ ID NO: 237625 - protein, 63 aa, Glycine max
  Clone ID: PAT_MRT3847_565C.1.pep
HTKIVLSFFQKENPYLGILLPCKALTPVQCCILKKSEKLKFFTSHVTPNVPSLGLPRPLYKIN

SEQ ID NO: 237626 - protein, 81 aa, Glycine max
  Clone ID: PAT_MRT3847_56600C.1.pep
YLIFLTHNKGTEFTTLQSPYLLRIRSFTKPYWTKHSILEEQPLTLKYHNGSLLTGPVTWDLSVTRTITFIQRSIIINCISA

SEQ ID NO: 237627 - protein, 336 aa, Glycine max
  Clone ID: PAT_MRT3847_56601C.1.pep
RNSARASAERLGYATEQLAFYTGPTVGGLLNATFGNATEMIISIYALKSNMIRVVQQSLLGSILSNMLLVLGCAFFTGGIVHYKKVQVFDKAAAVVNSGLLLMAVMGILFPAVLYFTHSEVHQGKSVLSLSRFSSCIMLLAYASYLFFQLRSQQNVYSPVDEEGDNGENSDEEEEHELTQWEAIIWLAILTAWVSILSGYLVDAIQGASESLNMSVAFISVILLPIVGNAAEHASAIMFAVKDKLDITIGVAIGSSTQISMFVIPFCVVVGWCMGKEMDLNFQLFETATLFITVLVVAFMMQEGTSNYFKGLMLILCYLIVAASFFVHVDPKSGDD

SEQ ID NO: 237628 - protein, 64 aa, Glycine max
  Clone ID: PAT_MRT3847_56603C.1.pep
FNFPKQRNLLKSPSGNSSLLLLWVLKFKERDTYNFPFQGFFFPLQNGKNPFFQTIHPPKEREKR

SEQ ID NO: 237629 - protein, 61 aa, Glycine max
  unsure (1)..(61): unsure at all Xaa locations
  Clone ID: PAT_MRT3847_56604C.1.pep
PTSRRSFAIHEVRLRHFSIGCKHHTRIGRKFLVIRLVMXXXXXLXVFFFFFFFFFFFFFFF

SEQ ID NO: 237630 - protein, 33 aa, Glycine max
  Clone ID: PAT_MRT3847_56605C.1.pep
VEASASHSEGHSMRTLTLARAKLSPCGGTSIRG

SEQ ID NO: 237631 - protein, 60 aa, Glycine max
  Clone ID: PAT_MRT3847_56606C.1.pep
MHFYVKTLTGKTITLEVQSSDTIDSFKAKIHDKEGIPSDQQRLIYAGMQLADRRTLADYN

SEQ ID NO: 237632 - protein, 48 aa, Glycine max
  Clone ID: PAT_MRT3847_56607C.1.pep
NTVRGLGRLVLIIWIFVVLIINSSYTASSTSILTVQQLSSQIEGIDSL

SEQ ID NO: 237633 - protein, 96 aa, Glycine max
  Clone ID: PAT_MRT3847_56608C.1.pep
RSSRIDLLHTNRPMVKHVTLLNSLPAYLFLPSRYFRPGCANPTALGLHYYIVRLQVHLSPLRWGVPANQRMQALYTATHQGLGASLVTGPWTVRST

SEQ ID NO: 237634 - protein, 47 aa, Glycine max
  Clone ID: PAT_MRT3847_56609C.1.pep
MILFYIIDYNSVIINSLLGNLFWNSKKQLCLNIFFLIFRFHQKINIL

SEQ ID NO: 237635 - protein, 55 aa, Glycine max
  Clone ID: PAT_MRT3847_5660C.1.pep
CAHPFDLVTVSSLTLSLLNTPFLLKSIQEERRDSTTIYINASQRKGYVLLTNYGI

SEQ ID NO: 237636 - protein, 54 aa, Glycine max
  unsure (1)..(54): unsure at all Xaa locations
  Clone ID: PAT_MRT3847_56610C.1.pep
LLPKRLQGGNLTPCXKHIMVKILGRGDDDDDDDDDSHILRTMRGRITTYARNEG

SEQ ID NO: 237637 - protein, 171 aa, Glycine max
  Clone ID: PAT_MRT3847_56611C.1.pep
MISQQIGEPKSSNGYKSLNSEKERGSKSDNKLLAANSDPGLSPSSSVGSMSSEKSTLNPNAKEFRLNPNAKSFIPSQSHARPRSPMSDGSFYFPATVSTIPNMPAMSMGIGVGTTFAGPQPVVYNPQAAQMPSQPYFHPNGPQYGQLLGHPRQVLYMPSYLPEMPYKGRDH

SEQ ID NO: 237638 - protein, 366 aa, Glycine max
  Clone ID: PAT_MRT3847_56612C.1.pep
LEEIEGEETQDLHLAEERGLYHNFDIDEETRFSSVYRGKGVDDSGYDENEDRLLDSHNSETFDNIYGLVNKSPGEASGRKGSNGAQTWSNFSSVFHAQNHSELSQSSSGVDLCRSGSKDHAKQLASELPALNNAITKEENPIQAEEDVQLSRSEDSQGPLYSKKDGSDKGVLSSNASSYAPSSHTSSKTHEKMGSHGDLVEGSASGKANGETKSVNSRGIPSGSDLVGGIAASSVPGLSPSSSVCSLSSEKSTLNPNAKEFKLNPNAKSFIPSPARPPTPVSDGSFYFPTNVTTVPSMPGMPMGIGIGPTFASPQPVIYNPQVAQMPSQGYFHPNAPQYGQLLGHPRQALYMPSYMPEMQYKGRDY

SEQ ID NO: 237639 - protein, 85 aa, Glycine max
  unsure (1)..(85): unsure at all Xaa locations
  Clone ID: PAT_MRT3847_56613C.1.pep
GCTRMTMPNCILYSDNLFKDVLESMGNYHYWXKVSGGYDTMLPTAAIEQMIDIAYMTDESVCTGDGDGHMIGQRSLCWKEYVQEC

SEQ ID NO: 237640 - protein, 49 aa, Glycine max
  Clone ID: PAT_MRT3847_56614C.1.pep
FFIMGEATDFFYLQGDHLKALDLKNDPFCLVRKTEMIDFLNVFQRGYVD

SEQ ID NO: 237641 - protein, 55 aa, Glycine max
  Clone ID: PAT_MRT3847_56615C.1.pep
GKPVSHQRGGVKGQHMGKKLKVIHNTHFIQIRMVLPPKKTFNREKRWYQLAGGGV

SEQ ID NO: 237642 - protein, 87 aa, Glycine max
  Clone ID: PAT_MRT3847_56616C.1.pep
FRPKKKKPPLRGWPWANQTGFSQKWSFFGVQMVSGVPLKVNYRGGRFYPLFWFVFKGAPGMVFGEKLEAPFGSFPVGRNWFLFKALV

SEQ ID NO: 237643 - protein, 150 aa, Glycine max
  Clone ID: PAT_MRT3847_56617C.1.pep
WLRRGNQHIGNDDLRVFRRKLDLMKRHEFVWEPYTPTVMAALPQICVVGSVVWFAVVPLICFHVVEWHQPDRVLRQYGLQQPIPGCPSQPQNLHGITLKGKQDENWFHLLAPIINQWNNAAQFTVDVYPRQQGLLGFNSDYMVWYRRKTK

SEQ ID NO: 237644 - protein, 41 aa, Glycine max
  Clone ID: PAT_MRT3847_56618C.1.pep
VSNRSPQKIKAIFPFTALLLDGMHNNQFNYSKLLYVSKDHL

SEQ ID NO: 237645 - protein, 47 aa, Glycine max
  Clone ID: PAT_MRT3847_56619C.1.pep
IVLPEDYYEDIALTRHRNGCHPLVLNHLADNHPTKRRIVITDELAHT

SEQ ID NO: 237646 - protein, 165 aa, Glycine max
  Clone ID: PAT_MRT3847_5661C.1.pep
LEPIRLEELYYHFLGTDQSQDILCWRDPENPKYMFGGTVTEDGKYVLLYIEEGCDPVNKLYYCDLSELPNGLEGFRNESSLLPFVKLVDKFDGQYQAIANDDTLFTFLTNKDAPKYKLVRVDLKEPNAWTDVIPESEKDVLESARAVNGNQLIVSYLSDVKYVLQ

SEQ ID NO: 237647 - protein, 65 aa, Glycine max
  Clone ID: PAT_MRT3847_56620C.1.pep
MFSSCFILVSNTSKNYQQNFLFTYFVFVCKYFNGSIIVKDLFATIYVDRSQSHTVHIRSNKYKHT

SEQ ID NO: 237648 - protein, 103 aa, Glycine max
  Clone ID: PAT_MRT3847_56621C.1.pep
FYGSGPTGLASKVVVVRVPPSYCALYGQLKGASHSSFMLGNRLHCPSLPALFILLQFGPSCSLTSLFTWAASRVCPIKQGWASVQLFQSRWLYRRPHSLFVPL

SEQ ID NO: 237649 - protein, 50 aa, Glycine max
  Clone ID: PAT_MRT3847_56622C.1.pep
SALLRHARSLDQSHHVLEQHLSQNGWWQTFRMMNTLSNDHRVPDPCSTSS

SEQ ID NO: 237650 - protein, 100 aa, Glycine max
  unsure (1)..(100): unsure at all Xaa locations
  Clone ID: PAT_MRT3847_56623C.1.pep
HEIWFASTEEEKMEVIXTIGIPWLMVLCKSELHEFXKNNVAHESLKDQIPAVDKLYATKDYKFAKIMNLRQSDVGDLKLFTDGKLYEGXHIPVSNISAGE

SEQ ID NO: 237651 - protein, 129 aa, Glycine max
  Clone ID: PAT_MRT3847_56624C.1.pep
FSLYFFSFGAASTDVMDLVRHRRHPNLRLPLPEPSERRLRVRLSLSATTTRLPELTATPYVGVDLQKTRISWSRKRRHTFTKSCTWLTSPPTRSRSFTKTPTTRRRCRILYETFMLRRVTDCPHVDRFH

SEQ ID NO: 237652 - protein, 111 aa, Glycine max
  Clone ID: PAT_MRT3847_56625C.1.pep
LRVVKVAPIFLDLFPPVNRQYSAILYRGFHGIPVYSGKFQKTALYRFLEKLAEYGCKSNLNNHVSHCHIYFEWPWKNRKTSGVPGIQIKTIFIFFYPSKEKKKKKKKKKQN

SEQ ID NO: 237653 - protein, 85 aa, Glycine max
  Clone ID: PAT_MRT3847_56626C.1.pep
GYNQGSVRSSEVDGNQERLRMHPEQFRICTMVTLVNDRIGNLQYRIRMAGSSWSLLRTYGLLQLYYDDSYHLSFPFHFCIDVEKI

SEQ ID NO: 237654 - protein, 107 aa, Glycine max
  unsure (1)..(107): unsure at all Xaa locations
  Clone ID: PAT_MRT3847_56627C.1.pep
QLLHAQVLVEKRRSYRTLLELGNGEGKNHGAYXPQEGPDPDTDYMKGYESWPXIDNVHDKILIADDXYMLRRSAYINYTSMCGARSYENDMLDDQPSDLFNTQAAHG

SEQ ID NO: 237655 - protein, 60 aa, Glycine max
  Clone ID: PAT_MRT3847_56628C.1.pep
VSPPKTHYKTHPKPSNQLLYDCARTLSDRNEPYSTSMINKLRHMCSIQGDPSQRIACYMA

SEQ ID NO: 237656 - protein, 54 aa, Glycine max
  unsure (1)..(54): unsure at all Xaa locations
  Clone ID: PAT_MRT3847_56629C.1.pep
KQRRPXPLGLAMDYXSELDIXXSPKTXRNWVXXSVPLCYXHLXXXXLMWXFXXT

SEQ ID NO: 237657 - protein, 87 aa, Glycine max
  Clone ID: PAT_MRT3847_5662C.1.pep
HALLQPLQTLLHLLLPLEEAFFKSLCHRTRFSSVHLGFSLPIYGFFETYPLSTFPFPIQFSQKIYMEQSSTLLFTQKDRKVANFYLF

SEQ ID NO: 237658 - protein, 230 aa, Glycine max
  Clone ID: PAT_MRT3847_56630C.1.pep
TNFPSQAHTELSLGRNFSVGGGGRGGGALEEPPPHNNNINNNPYYQTQKAHLQHLHQHHSNASRATTSTTTSSSNHMSHINYGVSLLDVSSEGMRPIKGIPVYHNRSFPFLPLEHSRSDKDHHAKMCLYHHMPTYPSLSSSCSPLCPSSSSSSPAAPYFAATAATAGGLDPMSYLSCSGGTTNPAAHRAATATRCKGISGEALKFYHPLHHHHHSLTSSASPQYGVGPGP

SEQ ID NO: 237659 - protein, 47 aa, Glycine max
  Clone ID: PAT_MRT3847_56631C.1.pep
TRSLEEQVHGDYLHHALKHGSSCSPGVLGTNHADHNSGRSTTKICRA

SEQ ID NO: 237660 - protein, 84 aa, Glycine max
  unsure (1)..(84): unsure at all Xaa locations
  Clone ID: PAT_MRT3847_56632C.1.pep
RQPSRHNSWPSPSSVTAVSAAETGYHNHTVGGGTGWSFNSTTNTSATNYSSWASNQTFDLGDYLIFNTNSNXTVVQTFNKPNHS

SEQ ID NO: 237661 - protein, 59 aa, Glycine max
  unsure (1)..(59): unsure at all Xaa locations
  Clone ID: PAT_MRT3847_56633C.1.pep
QGFAIPKDAQGKVCNIXFSWSSQTNLNMAXVVNADITSCTNTXNPRVMVGADTVVKNAY

SEQ ID NO: 237662 - protein, 65 aa, Glycine max
  Clone ID: PAT_MRT3847_56634C.1.pep
QNRLQIHTKLTLKLKKLEKDKRQNQHPIQNQREKLKSKSVLSIGKSPNRQSTKSNNFYNCCFFII

SEQ ID NO: 237663 - protein, 61 aa, Glycine max
  Clone ID: PAT_MRT3847_56635C.1.pep
GSSWFDTPTAHDFCAPLFHYRSTMRRSLILNREIDFIVIQLKRFYGLNIFPYSEMDVKLVQ

SEQ ID NO: 237664 - protein, 473 aa, Glycine max
  unsure (1)..(473): unsure at all Xaa locations
  Clone ID: PAT_MRT3847_56636C.1.pep
MKNANGLISTTSSNTAQSQSTGLKTYFKTHEGRYKLYYDKTYPSTLLHYAHGKTVSQVTLAHLKDKPVPSTPTGQSSTFSATSGVRSAAARLWGGSNGSRSLSFVGGNGTSKSHGGNSRIGSIGASSTSSAMANPNFDGKGTYLIFNVGDAIFISDLNSQDKDPIKSIHFSNSNPVCHAFDQDANGHDLLIVMRQTLQQILVSHADGNLYVYEKNKDSAGDSSFPAXDQTQFSVAHARNSKSNPIARWHICQVITVFLSLDGTYIATTVIIKCWSMDGKYILTGGEDDLVQVWSMEDRKVVAWGEGHNSWVSGVAFDSYWSSPNSNDNGETVRYRFGSVGQDTQLLLWDLEMDEIVVPLRRPPGGSPTYSTGSQSSHWDNVVPLGTLQPAPSMLDVPKISPLVAHRVHTEPLSGLIFTQESVLTACREGHIKIWMRPGVAESQSSNSENLLATSLKEKPSLSSKISSNSSYKQ

SEQ ID NO: 237665 - protein, 53 aa, Glycine max
  Clone ID: PAT_MRT3847_56637C.1.pep
KTRVVVILILMAHLDVPHSSDLNTHDRVHISSVVHHNLQVSCVIGTERPASNT

SEQ ID NO: 237666 - protein, 417 aa, Glycine max
  unsure (1)..(417): unsure at all Xaa locations
  Clone ID: PAT_MRT3847_56638C.1.pep
DPRLLFTFRWFCLCSSESDDRRICWGRVSIFQILSLIHLGEEDGKKVNNLLEMNRGEGANDGFSGPGPNDSLLPGLIDDVALNCLAWLSGSDYAALSCINKKFNKLINSGYLYGLRKQLGAVEHLVYMVCDPRGWVAFDPKINRWMSLPKIPCDECFNHADKESLAVGXKLLVFGRELMEFAXIWKYSMICRGWVKCQEMNQPRCLFGSSSLGSIAIVAGGSDKYGNVLKSAELYDSSTGMWELLPNMHTXRRLCSGFFMDGKFYVIGGMSSTTVSLSCGEEYDLKTRSWRKIEGMYPYVNVGVQAPPLVAVVDNQLYAVEHLTNMVKKYDKEKNTWNELGRLPVRADSSNGWGLAFKVCGEQLLVVGGQRGPEGESIVLSSWCPKSGISNGTIDWQVLGVKEHVGVFVYNCAVMGC

SEQ ID NO: 237667 - protein, 216 aa, Glycine max
  unsure (1)..(216): unsure at all Xaa locations
  Clone ID: PAT_MRT3847_56639C.1.pep
MTKKLRLGCSFQGEEDGKKVNNFLEMDRGEGVNDGFSGPGPNDSLLPGLIDDVALNCLAWVSGSDYAAXSCINKRFNKLINSGYLYGLRKQLGAVEHLVYMVCDPRGWVAFDPKINRWISLPKIPCDECFNHADKESLAVGCELLVFGRELMEFAIWKYSMICRGWVKCQEMNQPPCLFGSSSLGSIAIVAXGSDXYGNVLKSAELYDSSTGMWEL

SEQ ID NO: 237668 - protein, 113 aa, Glycine max
  unsure (1)..(113): unsure at all Xaa locations
  Clone ID: PAT_MRT3847_5663C.1.pep
MKRSTVLCMFNGMSLCFLQCLYIFTNQRVHHHHHHQPHHVKNIIHXTRCRPFLLSITNATPSYNTLVSEAVRLLVPSARFEASKLKVVLLEDQINKHASIIPRTYILSHCDFT

SEQ ID NO: 237669 - protein, 106 aa, Glycine max
  Clone ID: PAT_MRT3847_56640C.1.pep
VVDNQLYAVEHLTNMVKKYDKERNTWNELGRLPVRADSSNGWGLAFKACGEQLLVVGGQRGPEGEAIVLSSWCPKSGISNGTIDWQVLGVKEHVGVFVYNCAVMGC

SEQ ID NO: 237670 - protein, 128 aa, Glycine max
  Clone ID: PAT_MRT3847_56641C.1.pep
MPSLQDVNVTIDKTKPHKEVVANLVQGEKRNRNSSLVRIEEDLAEARVAIRRAILKRNFTSDKKEIFVPRGCVYRNAYAFHQSHIEMLKRFKVWTYKEGELPLAHEGPMSSIYGIEGHLIAQIDNRTG

SEQ ID NO: 237671 - protein, 97 aa, Glycine max
  Clone ID: PAT_MRT3847_56642C.1.pep
TGKESLHTSKKCYSKLYYFQEQVEPQFIASCLHLSMTPQGLETLIINDLHTGANEMSERWEKQSKCEPHHKSPLHQCKGYNGEAEEEACVTNDLHTG

SEQ ID NO: 237672 - protein, 66 aa, Glycine max
  unsure (1)..(66): unsure at all Xaa locations
  Clone ID: PAT_MRT3847_56643C.1.pep
RRCWQSYRRWQFILHFRVTGNKKFVFRMQGREEGIQEKRSMTVKVFXVAPQEAGREFTKSAKDLLK

SEQ ID NO: 237673 - protein, 42 aa, Glycine max
  Clone ID: PAT_MRT3847_56644C.1.pep
EFRRGLPRDFMDYMGAQHSDSKDPRRTAFMEKVRVLVARLGH

SEQ ID NO: 237674 - protein, 92 aa, Glycine max
  Clone ID: PAT_MRT3847_56645C.1.pep
VCPRFPFNPLLKKGFFLPLLKPIGGSGLGSQIFFFFPFSLWGGWGGNHPFSLFWVEAILKPFPRGWPGFPLFPVYLLARFIFSMGKALGGFS

SEQ ID NO: 237675 - protein, 99 aa, Glycine max
  Clone ID: PAT_MRT3847_56646C.1.pep
AENLFIYRNPSLGTHMYNTVLHYLVEAKESDTVIAIFKKMKLCGCHPDSETYNIMIDCCTILKSYRSACLLLSMMIRKGFHPVICTYNAIIEILWEDET

SEQ ID NO: 237676 - protein, 103 aa, Glycine max
  unsure (1)..(103): unsure at all Xaa locations
  Clone ID: PAT_MRT3847_56647C.1.pep
SNSLSVCFKFKLLTSSVMQEPLIEDXXSSQGNDTGQVDMIKSLAAIWASHWVRSYKLKGSCKQQQKMSQKFCKVLKNLELKNEYHGFQHGRKATELVSEXGQA

SEQ ID NO: 237677 - protein, 194 aa, Glycine max
  Clone ID: PAT_MRT3847_56648C.1.pep
GSRVHHRDDHSRLSQSLSSYHSFPGDDIPLSGSSYSNRDFDSESGRSLFHADITAGVLQEIALKCGTKVEFLSSLVASTALQFSIEAWFAGKKVGEGFGRTRREAQNKAAECSIKQLADIYMSHAKDDSGSTYGDVSGFHGSNNNGFVSSGNSLGNQLLPKESVSFSTSSDSSRVSDPRMEVSKMSTDSISALK

SEQ ID NO: 237678 - protein, 63 aa, Glycine max
  Clone ID: PAT_MRT3847_56649C.1.pep
PLQCGHKNFSSKMEKKYRDVGTKEVKLLYIHFRWDLHELFGLKKGKGVVKRINSSQYCLARKG

SEQ ID NO: 237679 - protein, 94 aa, Glycine max
  Clone ID: PAT_MRT3847_5664C.1.pep
MKLKNPPPPCSPDYCVLSYLLAAHKKTLGAPLCPCRHYDDKAAEVAQGFWNCPCVPLKKRKEGPSMLFFPPDNDFSGNEQTFPLDGIKKSPPPL

SEQ ID NO: 237680 - protein, 88 aa, Glycine max
  unsure (1)..(88): unsure at all Xaa locations
  Clone ID: PAT_MRT3847_56650C.1.pep
PGCIAPTGXFKEPIPLFRTLFPPFPKYITKGFVSEDXAGKSLAQVVSDPSLTKFGVFWRWNKASVFFXNPLFQEARYTKKVCKIWEIS

SEQ ID NO: 237681 - protein, 69 aa, Glycine max
  Clone ID: PAT_MRT3847_56651C.1.pep
GALFVMVIMDGASYLRKVDLKSYTSYHVLSTAFEKMFLTCPTLSQSGSHGAPRGLLLRDRMLMDLLPGP

SEQ ID NO: 237682 - protein, 48 aa, Glycine max
  unsure (1)..(48): unsure at all Xaa locations
  Clone ID: PAT_MRT3847_56652C.1.pep
YATSFFTXITVFPLTFHLYFLAQLKGNIILRLLNELNTLNQHDVTYLG

SEQ ID NO: 237683 - protein, 124 aa, Glycine max
  unsure (1)..(124): unsure at all Xaa locations
  Clone ID: PAT_MRT3847_56653C.1.pep
ATVMNVAAIEIIMDGTGRAECNIVGAVLTRDTYDTNTENACGSIFDAPFKSGRAIQMVTYANTIEQIEPYMNSRLXLSNTTTNGDLDERKELSQDKDNVLCDVYVLPSTYTTTRLTGWRLQKDR

SEQ ID NO: 237684 - protein, 64 aa, Glycine max
  Clone ID: PAT_MRT3847_56654C.1.pep
GFCEFGLGLLLDFTEVGLSSSLVALPNFPLKFPTILPSIWDLVTFSRNCAIFSNFGITKIRHSN

SEQ ID NO: 237685 - protein, 160 aa, Glycine max
  unsure (1)..(160): unsure at all Xaa locations
  Clone ID: PAT_MRT3847_56655C.1.pep
DGSLPGXYAFHPLRLXRTPHVLKCNKKAEFILGTCAMAASLGIVVGQPWSVVSCFEPGTDPXAIAPFSFGTLLRTQMILMEWXVEIKRWKDFFKPYSQTAQCSTPWSRTSEKFANATGETRYSXRKFSAPLMLAGTIKDGLHIPHTNKLKKMKLTEINDA

SEQ ID NO: 237686 - protein, 71 aa, Glycine max
  Clone ID: PAT_MRT3847_56656C.1.pep
SKVRLRGASSFSSCPSPPWLCSWVSLLSGSALVLCFYGPFFARCLWPPWFRGLFSSSHDKQVTHIKSKHLI

SEQ ID NO: 237687 - protein, 74 aa, Glycine max
  Clone ID: PAT_MRT3847_56657C.1.pep
PHSKVLIPLQLQQQFHKHLVQVYLIHIMITLGMDSQQEREGNITHEEGNSDVTNKPTEEGRPKRKITMPVRYKD

SEQ ID NO: 237688 - protein, 91 aa, Glycine max
  unsure (1)..(91): unsure at all Xaa locations
  Clone ID: PAT_MRT3847_56658C.1.pep
KRGNSLTDSKRADPSLAVYKMGAATKAMKPFGXGKALIDPXKPKRPSRAFFLXVEEFKMVFNREHSVHXAMFGVGIAAEAKWKTMSDAEKA

SEQ ID NO: 237689 - protein, 53 aa, Glycine max
  unsure (1)..(53): unsure at all Xaa locations
  Clone ID: PAT_MRT3847_56659C.1.pep
SSGXQXXSFTQGXXXVXYLVGSLGPALXRHXCHIVXLXXQXXAFXKSXHSNTR

SEQ ID NO: 237690 - protein, 243 aa, Glycine max
  Clone ID: PAT_MRT3847_5665C.1.pep
MACHCASYNAFSFSPTREFFATNHIMSKPSSTTTRCRPFLLSITNATPSYNTLVSEAVRLLVPSARFEPSKLKVVLLEDQINKHASFTPRTYILSHCDFTANLTLAVSNVINLEQLRGWYEKDDVVAEWKKVQNDMCLHVHCFISGPNYFLDLAVELRYHIFSKEMPLVLIVHFGHPELLDSIVRVYFHSCSEKYNRMECWGPLKDAMEGKQADQFQGSIRRDSPEKLRSPKSIFQALFAFLL

SEQ ID NO: 237691 - protein, 70 aa, Glycine max
  unsure (1)..(70): unsure at all Xaa locations
  Clone ID: PAT_MRT3847_56660C.1.pep
IVLQIWKLFARRXVGXIXESLYXXXMRXNSVYVTFVIAGSFXXERAVXYGVHNLWEXKNGXXRYEXIPVX

SEQ ID NO: 237692 - protein, 31 aa, Glycine max
  Clone ID: PAT_MRT3847_56661C.1.pep
EYICSPLMLLYKIISSKNRLNNFIKNMIGPS

SEQ ID NO: 237693 - protein, 231 aa, Glycine max
  Clone ID: PAT_MRT3847_56662C.1.pep
LRYEMDMLAFSGCAHGCDIKEEEELTRMRYAYPGWKEKVINSELKRKEGLCPITPEETALVLSALGIDRNVQIYIASGEIYGGEKRMASLLGEFPNLIRKEILLGPSELMYFQNHSSQMAAVDYLVSLESDIFIPTYDGNMAKVVEGHRRFLGFKKTILLDRRLLVHLIDQYYNGLLSWDEFSTAMKEAHAYRMGSPKRRVIIPDKPKEEDYFYANPQECLQLLDEPLEST

SEQ ID NO: 237694 - protein, 162 aa, Glycine max
  unsure (1)..(162): unsure at all Xaa locations
  Clone ID: PAT_MRT3847_56663C.1.pep
MATLGARMGAAAPTGTPTASLDFETSAGKRGKSNLAGHDQHIGKGGRDXIPLVQGASKGIKQIGAMGWGAQGPAQAQNLRDSLAEAKPDIGGKXGLRKGARSFNEARAAGPSEEKGTEGDIWGNYPRQPPRAALEGGGGAGRGPRTHRVPTGNQRGNGGGGP

SEQ ID NO: 237695 - protein, 54 aa, Glycine max
  Clone ID: PAT_MRT3847_56664C.1.pep
VRLSLKDFATGLNNVCYFTMCLSILCLSTIIFLYQNLDVKLVVFSVVTSVQFAQ

SEQ ID NO: 237696 - protein, 305 aa, Glycine max
  Clone ID: PAT_MRT3847_56665C.1.pep
MVADSKSNSDLSFGKIFASSAFSACFAEVCTIPLDTAKVRLQLQKQAVAGDVVSLPKYKGMLGTVGTIAREEGLSALWKGIVPGLHRQCLYGGLRIGLYEPVKTFYVGKDHVGDVPLSKKILAAFTTGAFAIAVANPTDLVKVRLQAEGKLPPGVPRRYSGSLNAYSTIVRQEGVGALWTGLGPNIARNGIINAAELASYDQVKQTILKIPGFTDNVVTHLLAGLGAGFFAVCIGSPVDVVKSRMMGDSSYKNTLDCFIKTLKNDGPLAFYKGFLPNFGRLGSWNVIMFLTLEQTKKFVKSLESS

SEQ ID NO: 237697 - protein, 164 aa, Glycine max
  unsure (1)..(164): unsure at all Xaa locations
  Clone ID: PAT_MRT3847_56666C.1.pep
LQTGDPHVSXVTDQHRIDYPFIGIEGEDEDEDEYGDVDHDDESHDENDDGELSFDYAQNECEQDVSTFENSMKENLDRLRRNSFSFKVRSASQSAPLFVDNKGDSSEKLRHMRQTLSRKFNSYVLPPPVDGKSSISLRSSNQVPSKIKANLNEPVKNLWHSSPL

SEQ ID NO: 237698 - protein, 32 aa, Glycine max
  Clone ID: PAT_MRT3847_56667C.1.pep
IFIYSQFNTSYITLFINFYTLYCLMSYLTYIN

SEQ ID NO: 237699 - protein, 46 aa, Glycine max
  Clone ID: PAT_MRT3847_56668C.1.pep
ATKNGLKLIFRTTTNKQSLRGTTNEHPQKQRDQKVYKPYLVAHYLM

SEQ ID NO: 237700 - protein, 50 aa, Glycine max
  unsure (1)..(50): unsure at all Xaa locations
  Clone ID: PAT_MRT3847_56669C.1.pep
SKGKENSHSVWXXVQKNSSDDGSGDLKKVNTTSSQFASTLEKDPSVMQRM

SEQ ID NO: 237701 - protein, 91 aa, Glycine max
  unsure (1)..(91): unsure at all Xaa locations
  Clone ID: PAT_MRT3847_5666C.1.pep
LFXRXISHFQQFPFQXFXILPPSXTKNPSAXNRLXLXXQXRSXXXPLMGALLXXLXLXTSSTFTSTLXRPSTXXSLFPLFSVTIHLXQTXL

SEQ ID NO: 237702 - protein, 54 aa, Glycine max
  Clone ID: PAT_MRT3847_56670C.1.pep
CDGLVSKRTIITFRIHPLKNGALENVFPPLWKNERKRMRPKTMPQAYVGFPCRG

SEQ ID NO: 237703 - protein, 64 aa, Glycine max
  Clone ID: PAT_MRT3847_56671C.1.pep
GLHVYRLLVSIHKGFEQISEKILATDRIRREVAEYETKLAATASRSLDVSELKANLDAIIREKE

SEQ ID NO: 237704 - protein, 83 aa, Glycine max
  Clone ID: PAT_MRT3847_56672C.1.pep
KRGLNQGLHITGEKFERVSILSEVTPLISKSQSLGIPIRGLTKIHGSCLTRPFKSWNPLGRISIIKIPTRTERGLHVWWPRGF

SEQ ID NO: 237705 - protein, 31 aa, Glycine max
  Clone ID: PAT_MRT3847_56673C.1.pep
ALCNLVCAEHIEVKLVYDYIIRLLIFTSFFE

SEQ ID NO: 237706 - protein, 110 aa, Glycine max
  Clone ID: PAT_MRT3847_56674C.1.pep
IPPPLGAKGLNLGGPTGSLFFQIFRVREIFFPIVPPGGPFSRLKRGFFFCPPQFFLFSARGGKKNLRGGKFFGNWGPVKGGGGLGYFGDPKGVRGFFPLKGPLIKNGVFP

SEQ ID NO: 237707 - protein, 154 aa, Glycine max
  unsure (1)..(154): unsure at all Xaa locations
  Clone ID: PAT_MRT3847_56675C.1.pep
MLMMFCSSIPAYTVLYSLVFFQSQAISVFEMARMKQTARKSTRGKASRKQLATKAAHKSAPATGGVKKPHRFRPSTVALREIRKYQKNTELLIRKLPFQRLVREIALDFKTNLYFHSSAVSTLQEVAEAYLVVLFEDTNLCTIHXKRVAIMPKD

SEQ ID NO: 237708 - protein, 83 aa, Glycine max
  Clone ID: PAT_MRT3847_56676C.1.pep
QPCRDCGTIQENSVCLSCYQVYCRRYINGHMLQHHGNSGHPLVLSYFDLSAWCYYCQAYVHHQALLDVKNIAHQNKFGEDMPH

SEQ ID NO: 237709 - protein, 35 aa, Glycine max
  Clone ID: PAT_MRT3847_56677C.1.pep
HIFSIPAYLCYTPDHQLHLGSLIPAAVPFIASWVR

SEQ ID NO: 237710 - protein, 107 aa, Glycine max
  Clone ID: PAT_MRT3847_56678C.1.pep
CLFNLNIAINRWFFIQGWIFLFSVKNSFPIQTSYPELCYTSFSFTPSNISTLCCTKRRIQRFHNYIDYPVLRFSKEGNLLRLVCGYRNRSYPVCNLFQIGGCCGGVM

SEQ ID NO: 237711 - protein, 103 aa, Glycine max
  unsure (1)..(103): unsure at all Xaa locations
  Clone ID: PAT_MRT3847_56679C.1.pep
MMASHWQSYEAGQTXALTWEXTYHSMVSIGEMAQAAKEKTXEMAQAAMEMTHLTAQAATDMTCDTSQVAKEKTHQNTXAAHLKTLEMGQSTNESVPSGKDNTQ

SEQ ID NO: 237712 - protein, 97 aa, Glycine max
  Clone ID: PAT_MRT3847_5667C.1.pep
DVLKMVIDLVVVCISIVQSSHQVSVEVNDRVTVPFIPFGSSNQTARRRRLAIATAAMEPELIAPPLFSYDRYDKSPSSSSSAISETHERRARVTCEV

SEQ ID NO: 237713 - protein, 75 aa, Glycine max
  Clone ID: PAT_MRT3847_56680C.1.pep
DPIIMLQRRILHFDGKPYQSLRKTNNHGPTYRLSTMQALLYHTMGTLSRIASQVIHSTCPRLRRETITITVCRLS

SEQ ID NO: 237714 - protein, 113 aa, Glycine max
  Clone ID: PAT_MRT3847_56681C.1.pep
FVFAPEPSEQAGGLFPVFVAGAELFSCWVCGLKILGGVYAPVPPRVRFFFRGAPACLILPPGRRTLSPGVKFVFLFGGGVSLHSHHQITKKKKTKKKNQKKKKKKNKKKHPTP

SEQ ID NO: 237715 - protein, 57 aa, Glycine max
  Clone ID: PAT_MRT3847_56682C.1.pep
DSVLQIYTRGYSKQLLVIQGGGSGGDTTAAVVLADIVDIQDLFPRREILVSHPNYRM

SEQ ID NO: 237716 - protein, 103 aa, Glycine max
  Clone ID: PAT_MRT3847_56683C.1.pep
CFFPPKKLGREALFLPWRFFKSLNLVRCPQINNKGLQLVSQFPRLCILRLSKCLGISDDGLKPLVGSLKLDFLAIEDCPQISERGVQRAAKSVSFRQDLSWMY

SEQ ID NO: 237717 - protein, 211 aa, Glycine max
  Clone ID: PAT_MRT3847_56684C.1.pep
FFLSTSEEDGFFLQETHSWTLGGLIGAFIDLVLAYFLLCGSAFAFFVSKWFRFFGLCLPCPCKGSFGFRSSRFCVHRLLFEWPSRKICSIQVMAVKRFPFDLVWVKGHSCCANDKVVTERTHDNRVVELEDEASCSSCSGPCLLPFVDWENVYDAKGKRVMSMKRRSGVRCHRRASYDCAKVSSAVPSENLSDVLIPCSPCDGSIIRDKTN

SEQ ID NO: 237718 - protein, 43 aa, Glycine max
  Clone ID: PAT_MRT3847_56685C.1.pep
VNMYSSVSRIAVVFSITRERCMYMRSMSLAPLRTFVHIAFPMR

SEQ ID NO: 237719 - protein, 422 aa, Glycine max
  unsure (1)..(422): unsure at all Xaa locations
  Clone ID: PAT_MRT3847_56686C.1.pep
MGVSGKWIKALVGLKKSEKPGSSEKDGNVGKFHHQRRHGVEFDNGKFPNELDNAATPPVEYDNGHANLDAHYSSSSSQQAHDAAHNQQMREELAAIRIQTAFRLFLARNKLRLVKACGKXLRAIVRGHAVRKQAAKTLRCMQALVRVQARVRARHVRMALETQASQQKHQQNLANEARVRETEEGWCDSVGSVEEIQAKILKRQEAAAKRERAMAYALSHQWQAGSRQQPVSSGGFEPDKSSWGWNWLERWMAVRPWENRFVDINMKDGVTVHEDGTKDDKNETPPQLSSAYKKPFSSNTHPNLTSQGTGPTISDGCDSSSSMPAGLPESSNTHPVKPTSKANAENTVGEFNSKPRIGSRSHSNPKERTSQADKQAKKRLSLPNNGAGAGCQIVKHPVSTTNVIRDKPKLNGRRDANTKPVP

SEQ ID NO: 237720 - protein, 91 aa, Glycine max
  Clone ID: PAT_MRT3847_56687C.1.pep
MNVEEEVQRLSQEIKRLGKVQADGSYKVTFGTLFNDDECANIFEALVGTLRAAKKRKVLTYEGELLLQGVHDNVEITLNPAPAEAAAAAAN

SEQ ID NO: 237721 - protein, 87 aa, Glycine max
  unsure (1)..(87): unsure at all Xaa locations
  Clone ID: PAT_MRT3847_56688C.1.pep
QTKRISRGEHGRYNRAADAFANIDWYHTNATSLFQVKNIRKILVSRTHGTIIAVQXLTHQVFEVSLADLQRDXXHSFNNIRLRSDDF

SEQ ID NO: 237722 - protein, 48 aa, Glycine max
  Clone ID: PAT_MRT3847_56689C.1.pep
LTPNLSYGPFKPSTLPYIYNKGNNISSRYSHTMDQAHPMKHEAGILRY

SEQ ID NO: 237723 - protein, 67 aa, Glycine max
  Clone ID: PAT_MRT3847_5668C.1.pep
DEGVLVKTGGEVLVCVRDAIGNMDLAQLRQVIEREFLSRHEQEQSVRSALAKLESSFIRRFAALHHE

SEQ ID NO: 237724 - protein, 50 aa, Glycine max
  Clone ID: PAT_MRT3847_56690C.1.pep
HKTIKFIKLKPHLNLRGLSLTLIHRHQPLVSPASITTVTTTRVTTVTTTT

SEQ ID NO: 237725 - protein, 33 aa, Glycine max
  Clone ID: PAT_MRT3847_56691C.1.pep
SFIEHRRGKKKCIFRLRFLKVPDNYFFQTELLG

SEQ ID NO: 237726 - protein, 52 aa, Glycine max
  Clone ID: PAT_MRT3847_56692C.1.pep
VFSCGCRIYHWSRIFSSILRDFLLFSMCGWETPLKGTRSYLFFPHAIAQNAL

SEQ ID NO: 237727 - protein, 95 aa, Glycine max
  Clone ID: PAT_MRT3847_56693C.1.pep
YVVNQVTAGDYDCPRKVLKFLTDLHAAFRMLNLRNDFLRKKFDGMLLLVPCLCIIFFFPIVTALPSSDNGTDVAFPMLSQIFIILKQDWSTNYSE

SEQ ID NO: 237728 - protein, 88 aa, Glycine max
  Clone ID: PAT_MRT3847_56694C.1.pep
FYFFVNCHQGKKKWDYFTSTLTIFGGKLYWAYPLSLRGETELIEELNPSKYKITLPEQNQYLLFDALRQELRVQKYWNATQGHTKDFY

SEQ ID NO: 237729 - protein, 86 aa, Glycine max
  Clone ID: PAT_MRT3847_56695C.1.pep
VFLANPYVPKGQWDRFAKVRKGMRERNVKRIPEYSQIQIPGKNQVLVVGERSHPQIKEISRLWHQTLHPLMREMGSTPKNLWLVLS

SEQ ID NO: 237730 - protein, 103 aa, Glycine max
  Clone ID: PAT_MRT3847_56696C.1.pep
SLLVSNAIACTYTAMSVLLGVRNRSTSKFLRSLIRWIDTFIEALLFIRNWARDALCITYYKGNSHVNWNTVCTDFGKCCDQTAASTDVSLIGSLSLLLLVVIP

SEQ ID NO: 237731 - protein, 177 aa, Glycine max
  Clone ID: PAT_MRT3847_56697C.1.pep
VFKRQRLTEKSDVYSFGVVLLEVLSGRQPLLRMVEKQQVSLVDWAKHLYQKGSLGAIVDAKLKGQIATQCLNRFGEVALSCLHEDGTQRPSMNDVVGVLEFVLQLQDSAVNGVVPLVVSGGDYEDSEDMFSSTHSSIQLSDYSNSTGLNTTSYGSKESDRLIVPENVFSEINDPKGR

SEQ ID NO: 237732 - protein, 119 aa, Glycine max
  Clone ID: PAT_MRT3847_56698C.1.pep
MNMLAGSSKVDGQTDSTGVRGPPRVVLPCPSECPSGENIVCPSQKVVVLDEEKIWKAMNIIRKIVGYEGRMQGSCSDELKALYIFTGVEPPTGTLDDPAEIKEKLHFLMSIVGIKSNDA

SEQ ID NO: 237733 - protein, 93 aa, Glycine max
  unsure (1)..(93): unsure at all Xaa locations
  Clone ID: PAT_MRT3847_56699C.1.pep
HQHHHHQHHEHHHHQHHEHHHHQKHELQHQHPLPHSNYWSPNPYYLRQAYQFLHHKHLYHXSSPKLSLHSHPHPSNPTCSEAPWRVPLPPPRD

SEQ ID NO: 237734 - protein, 63 aa, Glycine max
  Clone ID: PAT_MRT3847_5669C.1.pep
FVLLLDTTEGGSQQKKKARLRSLFSPKTNDNVATPPLYASPFGATFFLTPETYPNKACLALTS

SEQ ID NO: 237735 - protein, 70 aa, Glycine max
  Clone ID: PAT_MRT3847_566C.1.pep
KSNQLPMDHTTIHDRILILAQKSFYSPLCIPFSVLVPTNKSVCFWFSLFDSSSHKYTIWSIIHDELILAK

SEQ ID NO: 237736 - protein, 76 aa, Glycine max
  Clone ID: PAT_MRT3847_56700C.1.pep
ASQLLVKWLPSYVALITLYYRDRSYFICYLEMLFVHRVPYVSDDGLYHMSIINPLPKEQVHLVSDMHLKKKKKGRP

SEQ ID NO: 237737 - protein, 385 aa, Glycine max
  Clone ID: PAT_MRT3847_56701C.1.pep
ETWKEQNCDSKKELPSPACKDEPVPPPRAIGLSVLTCPWSQDEHNRDELAEKSPERKLSGLTSPAEVPLNSSSSTVLKKVPDTSMPIDNTSLFSRFYLSKLDISVDLVLPELYDQCMCALNIDKNATGDAVANTELLLKNGSRTRQKYAATFSRHSPFPEIDNSIFQRAIDLYKKHSMNLLNKGEVDDIAVSNQMQVDESFPIPSLENGHVFVSASNGIKDVPMPTLESGKVETTSPAKEQLEEINQTYGQMEEDHNKTGLSSPSSGCANQEAAVAGLQEKEPKITYDKVNSGDAKEDYSLAAKNEAQLAHTLHREGENIDSEAKTTGFAHCADEKLGFGDTKVNPNPLIVEDGSPKACDALMPGSNESESLILSRIHHSPESTH

SEQ ID NO: 237738 - protein, 42 aa, Glycine max
  Clone ID: PAT_MRT3847_56702C.1.pep
IFIPCAGGSQFLTTGKGRGNVLICIRASNADKRWFNRCMTMM

SEQ ID NO: 237739 - protein, 77 aa, Glycine max
  unsure (1)..(77): unsure at all Xaa locations
  Clone ID: PAT_MRT3847_56703C.1.pep
FLKGPSSSFGCVEVLKPSCDFCLCARSMPPQNRCEDIWLNSCPSDCXKCLWPRFQPGQGCCFFPHVFFFKPFKARDG

SEQ ID NO: 237740 - protein, 111 aa, Glycine max
  Clone ID: PAT_MRT3847_56704C.1.pep
CSFWRLRTARNCRKNFKKSKHNLLGLKPTTKLLEIFFKLQPPWDHPSTTTFKCILYTFQAEYITISPTIITPVSKFWPPIAIFTNTQDKNPRTSIKKNSGRVGDPEFRTGP

SEQ ID NO: 237741 - protein, 167 aa, Glycine max
  unsure (1)..(167): unsure at all Xaa locations
  Clone ID: PAT_MRT3847_56705C.1.pep
DKVAFQIKTYYNIHTCIKTTRNNDANCKWIAKKLERLIMVDPNISYPAMKQTLLEKYGVKPGSKMQFYRAKRKVQQTTKGVHVVSYNDLPPWIVAVENENKGSIVKLNVELVPNPNMNTQFKRLFFCLDAQKKGFVXGICRPWLGIDGCQLKGPYGGIPFCRLLAAV

SEQ ID NO: 237742 - protein, 65 aa, Glycine max
  unsure (1)..(65): unsure at all Xaa locations
  Clone ID: PAT_MRT3847_56706C.1.pep
LLNKSDGHTRSCIPQIRPTPKLGDSLGLLNHAHCSTFSMPIPDLSTVLMNQEXNKKQKCYXNCID

SEQ ID NO: 237743 - protein, 106 aa, Glycine max
  Clone ID: PAT_MRT3847_56707C.1.pep
ILFSISYPFYLNFFLCLSFFIYISFIILYLLFLLYCFFYYKFIFLYLISFINLIIFFLIIYYYIYLIILFYFFIFIFLSFFYYYFFNLILIFLFLILIYIFFNLFI

SEQ ID NO: 237744 - protein, 55 aa, Glycine max
  Clone ID: PAT_MRT3847_56708C.1.pep
VILILYLICHFSSEDTGEAVRKENSAACSILRLASSCFMYRCIYKMQHPKTNVNT

SEQ ID NO: 237745 - protein, 47 aa, Glycine max
  unsure (1)..(47): unsure at all Xaa locations
  Clone ID: PAT_MRT3847_56709C.1.pep
VXMYMNHEDVGCITDFTKEGCNTQQIHHITYCRDLVPNNTYFGTNKA

SEQ ID NO: 237746 - protein, 57 aa, Glycine max
  Clone ID: PAT_MRT3847_5670C.1.pep
SAMPLESLRKTHELVHIMRLRRLLEGYLGFQTFCASNLTRTSWARSGVLNSRTPPSG

SEQ ID NO: 237747 - protein, 63 aa, Glycine max
  Clone ID: PAT_MRT3847_56710C.1.pep
ILLTYVFFFMYMNIRIKCLITTCLKNKTICQSYYTVLLFDYLLLRTTCIVYENGKFGSGERNG

SEQ ID NO: 237748 - protein, 69 aa, Glycine max
  unsure (1)..(69): unsure at all Xaa locations
  Clone ID: PAT_MRT3847_56711C.1.pep
RANVKYTETEIXCGYNYENTKHVYENRNGTYQRYGXPKVRNYQFKTNTHGLKMGGMLAGWGGNQLLYPH

SEQ ID NO: 237749 - protein, 75 aa, Glycine max
  Clone ID: PAT_MRT3847_56712C.1.pep
GSDNLYGSWKRSNTFLSHIIPLFLYPYVNTLSHLSLSSRLNGLFCPVVPFSICLTFFPTPTPKDGGSSYSDDGKP

SEQ ID NO: 237750 - protein, 61 aa, Glycine max
  Clone ID: PAT_MRT3847_56713C.1.pep
VIQIPLGHCWVEEDTPASSLDSNSYGPIPLALIRGRVTHVVWPPQRIGAVKSTPPQRLSSF

SEQ ID NO: 237751 - protein, 104 aa, Glycine max
  Clone ID: PAT_MRT3847_56714C.1.pep
AVFCSSSGVWCRSVLLRLLPWRVFSLAFVAVSGAACWFARSLCSSLPGLLRCFPSFVCCWGGRVFLRRCGWVCFSPCLCAGASSFCARCCLWVGRLLLVVLSPL

SEQ ID NO: 237752 - protein, 67 aa, Glycine max
  Clone ID: PAT_MRT3847_56715C.1.pep
IPIPGKKLWRASIGSYKLLGGTPAFEERSTLGDLTQGLAGAPNEVASPGSTFGPTTRGHQYNPNSFP

SEQ ID NO: 237753 - protein, 90 aa, Glycine max
  Clone ID: PAT_MRT3847_56716C.1.pep
FLTLLFFFFFLFFLSGVLFKVFYFFFTQPHMKFTITFHFFKKLLYLGFLEGIFPLPHFGTFNNLSKLNFFSKKKITLNDWNNVASLQVKH

SEQ ID NO: 237754 - protein, 605 aa, Glycine max
  Clone ID: PAT_MRT3847_56717C.1.pep
PVPSRWKGTCMKSQDFNSSNCNRQLIGARFYTDPTGNDDDEGDNTPRDSVGHGTHVASTAVGATVTNASYYGLAAGSATGGSSESRLAVYRVCSNFGCRGSAILGAFDDAISDGVDVLSLSLGASPGFQPDLTTDPIALGAFHAVERGILVVCSAGNSGPSSSTVVNDAPWILTVAASTIDRDFQSDVVLGVDKTVKGRAINFSLISNSVKYPMIYGESAKAASTSLAEARQCHPDSLDANKVKGKIVVCDGKNDGYSTSEKIGTVKEAGGIGLVHITDQNGAIASYYGDFPATVISSKDGVTILQYINSTSNPVATILPTATVLDYKPAPVVPNFSSRGPSSLSSNILKPDIAAPGVNILAAWIGNNADDVPKGRKPSLYNIISGTSMACPHVSGLASSVKTRNPTWSASAIKSAIMTSAIQINNLKAPITTDSGRVATPYDYGAGEMTTSESLQPGLVYETNTIDYLNYLCYIGLNITTVKVISRTVPANFSCPKDSSSDLISNINYPSIAVNFTGKAAVNVSRTVTNVGEEDETAYSPVVEAPSGVKVTVTPDKLQFTKSSKKLGYQVIFSSTLTSLKEDLFGSITWSNGKYMVRSPFVLTK

SEQ ID NO: 237755 - protein, 125 aa, Glycine max
  Clone ID: PAT_MRT3847_56718C.1.pep
NHNGTQNTFTSNQPTVCRITLSSPFFFSSLISSVSTGHKYCICAGTKEKIMISSSCLKEKKLISQFTDFSLYNFYPIYKKQAGHDGRAITQITCFHRTQVFSSATPAIPFMQNDSHIFPTNLTRA

SEQ ID NO: 237756 - protein, 66 aa, Glycine max
  Clone ID: PAT_MRT3847_56719C.1.pep
SILSLRECKELEEVRNSNVIKNDSLKMLRFFFYILFCFFVLFFIYFLWPFFFFFILNFKIDEFCML

SEQ ID NO: 237757 - protein, 83 aa, Glycine max
  Clone ID: PAT_MRT3847_5671C.1.pep
LEYSGVCVEDEAATGTEQLSFDGVGFSFSPVPSISVLSSEEVVLGALCIEDTLLYRGGSGECGSMQHGISPYQFLQVGWNMAP

SEQ ID NO: 237758 - protein, 104 aa, Glycine max
  unsure (1)..(104): unsure at all Xaa locations
  Clone ID: PAT_MRT3847_56720C.1.pep
PNSDASLITYTESVLSTHTSCIIRSTMHLVEATERSLSMILAHNTDHKRGSNHGKRLQHLIKAIQAHYRSGQVSLQSMTTISXMSTMHDDICHAADEKRVTMTI

SEQ ID NO: 237759 - protein, 161 aa, Glycine max
  Clone ID: PAT_MRT3847_56721C.1.pep
RCNSSGNGNAFMMGFGPKHSRLNKDQQSTKYLNDEIEDPAPHKEHTKQQLKMHVAHAQNYEVACNAIINHCFTSYAFWHCFFQAAAVSYAKQVVKLMDSLLMAGKATVEMNKELNTQKMRAPLLHKTVIIFTDMLLCQHTDLIDGFYILKLLKDDGHNQIN

SEQ ID NO: 237760 - protein, 30 aa, Glycine max
  Clone ID: PAT_MRT3847_56722C.1.pep
FRPPFRFHLTRVSNYRQPYPFSMDHHLMFL

SEQ ID NO: 237761 - protein, 34 aa, Glycine max
  Clone ID: PAT_MRT3847_56723C.1.pep
GLFVFFICQTKERAVILIPRHTCCKQAKKTTYYF

SEQ ID NO: 237762 - protein, 58 aa, Glycine max
  unsure (1)..(58): unsure at all Xaa locations
  Clone ID: PAT_MRT3847_56724C.1.pep
SHXXHMSHXXRILAQRXXXPQXSLXRTXXXKSXKPWXGXXCXVXIXVEARAAWVAMXA

SEQ ID NO: 237763 - protein, 32 aa, Glycine max
  Clone ID: PAT_MRT3847_56725C.1.pep
GLSNSNHLDFQARLRSVDRDLCLRQQHCPLKY

SEQ ID NO: 237764 - protein, 49 aa, Glycine max
  unsure (1)..(49): unsure at all Xaa locations
  Clone ID: PAT_MRT3847_56726C.1.pep
QTECAMHISPALLVVTFEFESTPPLPYPYPTXQLVEAQAQXQGELXAXT

SEQ ID NO: 237765 - protein, 129 aa, Glycine max
  unsure (1)..(129): unsure at all Xaa locations
  Clone ID: PAT_MRT3847_56727C.1.pep
MSCHAYLYEHLLSDIDGYHLTHAYIVGHDGRLGSSDXPYLTQFKDDDITAVMNDLNKPGSIGPTEFVSRCAHITRSSSSHPVAAILGTMGAGGDTDMKNDADLIIGVDQQTMAADQRLLVVQRLRNYSI

SEQ ID NO: 237766 - protein, 58 aa, Glycine max
  Clone ID: PAT_MRT3847_56728C.1.pep
FVRRTTLIPFACSRVEDCKRGTCCIISGRVQSLMLLNRKDLNQSSRHVIIDLFEAFIM

SEQ ID NO: 237767 - protein, 43 aa, Glycine max
  unsure (1)..(43): unsure at all Xaa locations
  Clone ID: PAT_MRT3847_56729C.1.pep
SGLTCTLSFPQIQDRNEREARXPSXPVLHRRAFIKTLLSVLSP

SEQ ID NO: 237768 - protein, 71 aa, Glycine max
  Clone ID: PAT_MRT3847_5672C.1.pep
DFILSNNLFFQGFALCFNFFFFFRLYHFLYCFLFFSIFGFFFLPLTMDAGSLSSSLTLTSRFTVSFQELFI

SEQ ID NO: 237769 - protein, 68 aa, Glycine max
  Clone ID: PAT_MRT3847_56730C.1.pep
IVLAKSVHFGALGRDFSTMAFPPLVIRCGYPMRSNALSLHVRKWPARFGIPTSSQWGDAPIVCTPLMR

SEQ ID NO: 237770 - protein, 48 aa, Glycine max
  Clone ID: PAT_MRT3847_56731C.1.pep
PTPPKESMATNKPDYVKTASGTLLDPKRSTLSFPLIMLLQFTPTMISA

SEQ ID NO: 237771 - protein, 33 aa, Glycine max
  Clone ID: PAT_MRT3847_56732C.1.pep
RTLSIVLGGKFEVKKGVWSFPPPYPWKPHSHVE

SEQ ID NO: 237772 - protein, 91 aa, Glycine max
  Clone ID: PAT_MRT3847_56733C.1.pep
PQSLFPPQFFVGPKRELKWGPGKSPPPGVGVKKTPKKNLAVCYHGPKRVGPPQFFLFLNMARGPPQVGGPSPNGPLFFGNSPPAVKNISGF

SEQ ID NO: 237773 - protein, 26 aa, Glycine max
  Clone ID: PAT_MRT3847_56734C.1.pep
CKGIILFFSLNIISYYDLTDVQKSRG

SEQ ID NO: 237774 - protein, 98 aa, Glycine max
  unsure (1)..(98): unsure at all Xaa locations
  Clone ID: PAT_MRT3847_56735C.1.pep
MRTPMRGPYARIDTALDAQHMDSIACEAEHTLAYSESHNEXYSGRWSDSITMCNGNIRNLLIPKPTITLQALKIMKTDCGDSHWLANTKARQDHTLGR

SEQ ID NO: 237775 - protein, 164 aa, Glycine max
  unsure (1)..(164): unsure at all Xaa locations
  Clone ID: PAT_MRT3847_56736C.1.pep
IERIISPGFVLTTGYYMPSXCVRLVYCILTDMSCYPESFHDVSCDRNEXSGSHGSPSYMCTNLAPMYDRSGXVDARSCYMTQISFLTIPNDDFTLSTCYLTGYISDGHIYVTRQSCNNHIYASFSELILSCSQMKSAIVDGMTLSVYSDVFYHLYAYNAIVIDV

SEQ ID NO: 237776 - protein, 41 aa, Glycine max
  Clone ID: PAT_MRT3847_56737C.1.pep
MAKEKAQINIVVVGHVDPEEATTIYELKKPVVDKYATWHAI

SEQ ID NO: 237777 - protein, 307 aa, Glycine max
  Clone ID: PAT_MRT3847_56738C.1.pep
MFSGSQTLNARKKRGGPGGSQHKNTHPLPSTNTSNSLSFSLSMLSKMFSGSQFDATTAFSGGGFTSSQPSTLNDSSPAPSNSRETPGLVPVTVKQISEASQSGDEKSNFVINGVDLNNVTLVGMMFEKVERNTDVSFVLDDGTGRIKCRRWINEAFDTKEMEAVMNDMYVRVYGHLKSFQGVKQLVAFSVRPVTNFDEIPFHFIDCIHNHLRSKIKVEGITSANPSSGSSLETPVKSAPNGSQALSSNPVCAQHSVDGLKGIDKLIMDYLEQHSDMSDGRGIHVDELSRELKLPMEKIKVPLYAFFP

SEQ ID NO: 237778 - protein, 73 aa, Glycine max
  Clone ID: PAT_MRT3847_56739C.1.pep
SPMASQLKSTFTKTLVAPKGLSDSLPLHLLPYNRQCSCTARDIQSKKPTYQVIHPINRDAFMESLRTSIPTNP

SEQ ID NO: 237779 - protein, 59 aa, Glycine max
  unsure (1)..(59): unsure at all Xaa locations
  Clone ID: PAT_MRT3847_5673C.1.pep
EKRVIMTRDAKGLIHDYVTRNQLYRVKTLLRNEQLLKGIEALXMEINDDQLRSRCTYCS

SEQ ID NO: 237780 - protein, 99 aa, Glycine max
  Clone ID: PAT_MRT3847_56740C.1.pep
TPKRNNNFLGRKKKNPPRGEEKNKAPLGQVKRKSPLFPNTQGPFPTNKKDYHFTNPGGGVTFRGAKDRANSRKGCCPGRQVPEFQSLAPFSLNSNSGSS

SEQ ID NO: 237781 - protein, 112 aa, Glycine max
  unsure (1)..(112): unsure at all Xaa locations
  Clone ID: PAT_MRT3847_56741C.1.pep
MQKLVVVKKMKVLVFFVAIVLAAWHCHGSDHDHDHGHTYQIFPLRMKTGHGGHYIPEVSCQSWRLGVEAHNVIDWKHRSYKISEGYIGXHYMLGEQNKSDSQLVYNYEFFSS

SEQ ID NO: 237782 - protein, 52 aa, Glycine max
  Clone ID: PAT_MRT3847_56742C.1.pep
HFPYLFRIRGVAVVCGFSQSLPRFSSILLIGLPFIKVYKFAAFKRLYGELCV

SEQ ID NO: 237783 - protein, 82 aa, Glycine max
  Clone ID: PAT_MRT3847_56743C.1.pep
PSNLGHVINLNGLFLCIKESVVAVDSVIHFRSNPLEFFSFNFSPFILSKILGWLSFQCVNCPCTSVDVKAVIKVKCIMFINF

SEQ ID NO: 237784 - protein, 105 aa, Glycine max
  unsure (1)..(105): unsure at all Xaa locations
  Clone ID: PAT_MRT3847_56744C.1.pep
MGSCVSKNKARDNDSDHNVDFAAGNVKLITTKEAWDQYLEEARRDGKIVIANFSAAWCGPCKMIAPYYXFSTSWDIKATPTFFFLKDGQQLDKLVGANKPELQKK

SEQ ID NO: 237785 - protein, 139 aa, Glycine max
  Clone ID: PAT_MRT3847_56745C.1.pep
MGSCVSKNKARDNDSDHNVDFAAGNVKLITTKEAWDQYLEEARRDGKIVIANFSAAWCGPCKMIAPYYCELSEKYTSMMFLVVDVDELTDFSTSWDIKATPTFFFLKDGQQLDKLVGANKPELQKKIVAINDSLPEYKQ

SEQ ID NO: 237786 - protein, 475 aa, Glycine max
  unsure (1)..(475): unsure at all Xaa locations
  Clone ID: PAT_MRT3847_56746C.1.pep
MVSNGRMLCSSLITAPPSSSLSRTTPSYFCSFPSRRIIFTPRIGSSPAPAQAQAQPKEAKLWGGRFEEGVTDVVERFTESISFDKKLYKQDITGSRAHASMLAHQGLISEIDRDSILQGLDEIERRIENGEFNWRADREDVHMNIEAALTDLIGEPAKKLHTARSRNDQVLTDFRLWCRDAIDKILLSMKQLQVSLITLALNNQGLIVPGYTHLQRAQPVLLQHLLLAYVEEIERDAGRLVDCRARMNFCPLGACALAGTGLPIDRFMTSEALGFTAPLRNSIDAVSDRDFVLEFLSANAITAVHLSRLGEEWVLWASEEFGFITPSDSVSTGSSIMPQKKNPDPMELVRGKSARVIGDLVTLLTLCKGLPHAYNRDLQEDKEPVVDSLVNKGVPFRTSHNIAGKFCXLYETLKNCQLLDLSLDELRSINPVFEEDVYEFLGVENAIKKFVSYGSTGSACVASQLDYWLKKLEMK

SEQ ID NO: 237787 - protein, 97 aa, Glycine max
  unsure (1)..(97): unsure at all Xaa locations
  Clone ID: PAT_MRT3847_56747C.1.pep
MTKFTILLIGLNLWVTQTCRASKWQLQQDXCRRLVHVVIADVXENHIMDKIHATRXLHHDDHDDNNXILMTMRGRLNYLRWNCRQDDDVTQEGHMPK

SEQ ID NO: 237788 - protein, 47 aa, Glycine max
  Clone ID: PAT_MRT3847_56748C.1.pep
RASRAGLMHLDIFLLLFTLMKLNLFHSLSVQSPYQRPFCNLNDSSSK

SEQ ID NO: 237789 - protein, 134 aa, Glycine max
  unsure (1)..(134): unsure at all Xaa locations
  Clone ID: PAT_MRT3847_56749C.1.pep
CLNHAKDNDSDHDVDFAAGNVKLITTKEAWDQSLEEARRGGKIVIANFSATWCGPCKMIAPXYSELSEKYTSMMFLLVDVDDLTDFSTSWDIKATPTFFFLKDGQQLDKLVGANKPELLKKIVVINDSLPEYKQ

SEQ ID NO: 237790 - protein, 112 aa, Glycine max
  unsure (1)..(112): unsure at all Xaa locations
  Clone ID: PAT_MRT3847_5674C.1.pep
DGRHQTGTKHEKNLAXTEEEKTEATRNRGTPADAPAKRAHESEKHGXHESPKDQXPAADKAHPTKVNKFAKIMNLRQSVGGDLKLLTDGKLYEGKXIPVLILGRGNHVLNPL

SEQ ID NO: 237791 - protein, 207 aa, Glycine max
  Clone ID: PAT_MRT3847_56750C.1.pep
LSSLSKGASEEFGFITPSDSASTGSTLMPQKKNPDPMELVRGKSARVIGDLVTLLTLCKGLPHAYNRDLQEDKEPVFDSVKTILGMLEVSAEFALKITFNRERIQKALPAGHLDATTLADYLVNKGVPFRTSHDIAGKSVALCTLKNCQLLDLSLDELRSINPVFEEDVYEFLGVENAIKKFVSYGSTGSACVASQLDYWLKKLEMK

SEQ ID NO: 237792 - protein, 105 aa, Glycine max
  Clone ID: PAT_MRT3847_56751C.1.pep
PRVRPRVRTAARRRQKGDYLVNKGVPFRTSHDIAGKSVALCTSKNCQLLDLSLDELRSINPVFEEDVYEFLGVENAIKKFVSYGSTGSACVASQLDYWLRKLEMK

SEQ ID NO: 237793 - protein, 37 aa, Glycine max
  unsure (1)..(37): unsure at all Xaa locations
  Clone ID: PAT_MRT3847_56752C.1.pep
RQSWNSCKEFFVMEPKXXFXCRFXKIPRXPSTTTRFP

SEQ ID NO: 237794 - protein, 56 aa, Glycine max
  Clone ID: PAT_MRT3847_56753C.1.pep
QASILHQREHQKPTVSSPNTIQILSLLQSPLLPLTELLPYHTFSITLLHQLTRASF

SEQ ID NO: 237795 - protein, 54 aa, Glycine max
  unsure (1)..(54): unsure at all Xaa locations
  Clone ID: PAT_MRT3847_56754C.1.pep
NIYKAIVGNRLYNFFCFIIRLFRVGFDSIYVWWGSVDLLKKADXVDFGVMLLKG

SEQ ID NO: 237796 - protein, 84 aa, Glycine max
  Clone ID: PAT_MRT3847_56755C.1.pep
VFVHPSLHTRAHSSLCGTYSSLSVSPQRFPELLSPVPALTHQSAGTLFSQTFQELRSRPIVSFPCDFDPHSRCATVCSFFFVNL

SEQ ID NO: 237797 - protein, 82 aa, Glycine max
  Clone ID: PAT_MRT3847_56756C.1.pep
FRIVVLRLSQLQMHATCVPASEHQVLPSAVAIHVIVTGDLVCFTDLSAFMTIDVLCVATPDRSVTSGLPRMQAVMVNEAVFA

SEQ ID NO: 237798 - protein, 41 aa, Glycine max
  unsure (1)..(41): unsure at all Xaa locations
  Clone ID: PAT_MRT3847_56757C.1.pep
FRVXXLMXCXKLRXRVSXRXRXXSXRPSXARAXXRAXVRVL

SEQ ID NO: 237799 - protein, 58 aa, Glycine max
  Clone ID: PAT_MRT3847_56758C.1.pep
QPLPTEAEWLLNKAPNLLDEREWPITVLCGGGQTAYNLIFFKQCLGFHLSKIMGERPP

SEQ ID NO: 237800 - protein, 136 aa, Glycine max
  unsure (1)..(136): unsure at all Xaa locations
  Clone ID: PAT_MRT3847_56759C.1.pep
ALYNHVRSRISLFTKCTFLTSQQSTLQRSLITPFIGLTCRNYTDMPKQKETKFKVPLTLVRGSENYTSTLYMRSGKANTVKKVNTKLRQFSHTGNNNPIWGQFIRDXSITTNIRLKVVHDICNKAKFWNMTKNFLL

SEQ ID NO: 237801 - protein, 65 aa, Glycine max
  unsure (1)..(65): unsure at all Xaa locations
  Clone ID: PAT_MRT3847_5675C.1.pep
DHXXXXXXXXXXXPPPLXXXXTXXNXSXLLIXTDFVXSXLLXICERXVSXQXLEPNSELTYXCXR

SEQ ID NO: 237802 - protein, 58 aa, Glycine max
  Clone ID: PAT_MRT3847_56760C.1.pep
SRHVRVVYMRMSLIRIGLMVVGYDMVVVRPRSMYISVEGQIIRQDFFGFKRVNDEALS

SEQ ID NO: 237803 - protein, 95 aa, Glycine max
  Clone ID: PAT_MRT3847_56761C.1.pep
SPSHVQFTMFSLPADNSILELITPGVLISSQWEGFPAAALSVPSVFLLGASMPGSHLLLPVLPSTSSHIISMASWVTMSYPTGSLNTVTWFVPRA

SEQ ID NO: 237804 - protein, 68 aa, Glycine max
  Clone ID: PAT_MRT3847_56762C.1.pep
IILAILCIIICIIVPVKESCCEFQEKGFRCYTIRYISCCRFIDRSDICLISGLECCFAKCYFTFNVAV

SEQ ID NO: 237805 - protein, 82 aa, Glycine max
  Clone ID: PAT_MRT3847_56763C.1.pep
ASDRPFFFFFSICLGRKKKAGLSKKTTTTKDTHFPPNTQYILLLTLSHYLTHPLIINYHISSHLPPFIIFIITLTSSLTFLS

SEQ ID NO: 237806 - protein, 68 aa, Glycine max
  Clone ID: PAT_MRT3847_56764C.1.pep
ICYDEHGDACDCSNFLDVDWLSSSGNSCEEELLERSTSISSENIANELITTETSASESGSSIKVSICC

SEQ ID NO: 237807 - protein, 150 aa, Glycine max
  Clone ID: PAT_MRT3847_56765C.1.pep
GQTQLGHLVLKPKQPWHLTGWPAMNLTWIHSTPICNPPLSSQGSASGHSPIGTGASIGVILVLQKGGQPFTHFAPGTPVPPTPLSPVVPGDLKKLPGEEPRCHSLPVTLPSDWSCILCPPVLPTTDREMTKGHPEPQMTSHPPVAPDPQP

SEQ ID NO: 237808 - protein, 68 aa, Glycine max
  unsure (1)..(68): unsure at all Xaa locations
  Clone ID: PAT_MRT3847_56766C.1.pep
GWNPASPLVQQQGXNRREDPPDXDSSSCRRGKHMRPSILFLFPHERDKLLPAMRQQSLQGRIQCPTAT

SEQ ID NO: 237809 - protein, 36 aa, Glycine max
  Clone ID: PAT_MRT3847_56767C.1.pep
IHFKKELIFTNHLNHSETPTSMTLITSWAFGMAKDN

SEQ ID NO: 237810 - protein, 66 aa, Glycine max
  Clone ID: PAT_MRT3847_56768C.1.pep
PEKFLSVFPKGVQYGPAIGPGVYAIPSPRIPPFEEFVAGIPKLLAVLQKFFLWVTPVCGLMTRKFF

SEQ ID NO: 237811 - protein, 569 aa, Glycine max
  Clone ID: PAT_MRT3847_56769C.1.pep
MTTVAASLDAKEVSTSKTDQNQVCDCDPQTSHVFKSKLPDIPISNHLPLHAYCFQKLSQFSDRPCLIVGPAAKTYTYSETHLISRKIAAGLSNLGIRKGDVVMILLQNSAEFVFSFLAASMIGAVATTANPFYTAPEIFKQFTVSKTKLIITQAMYVDKLRNHDGAKLGEDFKVVTVDDPPENCLHFSVLSEANESDVPEVEIHPDDAVAMPFSSGTTGLPKGVILTHKSLTTSVAQQVDGENPNLYLTTEDVLLCVLPLFHIFSLNSVLLCALRAGSAVLLMQKFEIGTLLELIQRHRVSVAMVVPPLVLALAKNPMVADFDLSSIRLVLSGAAPLGKELEEALRNRMPQAVLGQGYGMTEAGPVLSMCLGFAKQPFQTKSGSCGTVVRNAELKVVDPETGRSLGYNQPGEICIRGQQIMKGYLNDEAATASTIDSEGWLHTGDVGYVDDDDEIFIVDRVKELIKYKGFQVPPAELEGLLVSHPSIADAAVVPQKDVAAGEVPVAFVVRSNGFDLTEEAVKEFIAKQVVFYKRLHKVYFVHAIPKSPSGKILRKDLRAKLETAATQTP

SEQ ID NO: 237812 - protein, 116 aa, Glycine max
  Clone ID: PAT_MRT3847_5676C.1.pep
AAVSDGGRETATCDVTVTSSPGDSSGSAEPVEREPMADRKRKGREHEESEFQSEVSESLSRLSSYFIYFWFHAMYHTHNTFHMSWCWLSCTGGVTCLHEHTPLHSIQRLCVNFSII

SEQ ID NO: 237813 - protein, 48 aa, Glycine max
  Clone ID: PAT_MRT3847_56770C.1.pep
PSFHPFGPSSSCLTKAPLVPRRRPGVNAPSKHQVMLETPPRAWVGLAP

SEQ ID NO: 237814 - protein, 59 aa, Glycine max
  Clone ID: PAT_MRT3847_56771C.1.pep
IQCIHMQSHFRIAVDFYLDLFLTSFFNFFQFYSLKDNIVFKFFIKILNHNINNYFLIIS

SEQ ID NO: 237815 - protein, 57 aa, Glycine max
  Clone ID: PAT_MRT3847_56772C.1.pep
SSDVRSSDEVVKKICTTMPMPNGPITKDKRILRFLYGDIGIMLLACIALGMSIYRAR

SEQ ID NO: 237816 - protein, 161 aa, Glycine max
  unsure (1)..(161): unsure at all Xaa locations
  Clone ID: PAT_MRT3847_56773C.1.pep
FLAVLFLAISTFFELVCIILYAIYFTKLPIVKYYHSKAALEGXKTVAANLAVVGIQTKTDDQGGYDSKKEEQLSNKQLFVENHDYVVGLFYIFVVTLSIFPGFLYENTGTHQLGTXAKYGDQGWMILLASFLGLTNGYLTVCVLTVAPRGYKLKPFGEAEG

SEQ ID NO: 237817 - protein, 55 aa, Glycine max
  Clone ID: PAT_MRT3847_56774C.1.pep
SEGLRLSRLMSNPWQNHVPPVALTWEEGLDFHPWTLTFFHYDAFSLKILEPNRLE

SEQ ID NO: 237818 - protein, 67 aa, Glycine max
  Clone ID: PAT_MRT3847_56775C.1.pep
SLTSMHPFLSFGFRLRPKPLVLYSPREGPKFLSLQLKSSPSPLFFFFFNPSGPGRFFQGPPKWGAFG

SEQ ID NO: 237819 - protein, 200 aa, Glycine max
  unsure (1)..(200): unsure at all Xaa locations
  Clone ID: PAT_MRT3847_56776C.1.pep
ARGVAKNVKWTAEITGKGEKSGSSRKYTFQVQSGDAEKKKEKEKEKEKKKGNGSRIVEIHEPSGHRDXGFETGWVAFTSLAFAKRFGAVQNERGKKKDLSPQDAALLIQISFRAYLIRRSKALRALRELAIAKSKLKEIRAQFNNFSYRRHVARDAEERQRFSEKIIVLLLTVDAIEVVISIFGSFFVEQIELFPQFLNC

SEQ ID NO: 237820 - protein, 77 aa, Glycine max
  unsure (1)..(77): unsure at all Xaa locations
  Clone ID: PAT_MRT3847_56777C.1.pep
LHRRKRSSATNPEQTAGAAALADTMTXSTVRTTRVIGWYHSHPHITVLPYHVYVPTHAMHQLLDAGVIGLIVCMDTE

SEQ ID NO: 237821 - protein, 281 aa, Glycine max
  Clone ID: PAT_MRT3847_56778C.1.pep
MRGRNRKYKAVEEGSLFCVCSRRKETLSLAIAMDRYQKVEKPRAETPIDENEIRITSQGRMRNYITYAMSLLQEKGSNEIVFKAMGRAINKTVTIVELIKRRIVGLHQNTAIGSTDITDTWEPLEEGLLPLETTRHVSMITVTLSKKELDTSSVGYQPPLPADQVKAATDFDYEGEGSPNGRAHGRGGRGRGRGRGNGFISADYEDGGWDRNRGNARGRGRGRGRGFRGRGRGGYNGPHVDMQDGGYNQDVPQGRGRGRGRGGYRGRGRGFRSNGPIQAAA

SEQ ID NO: 237822 - protein, 55 aa, Glycine max
  Clone ID: PAT_MRT3847_56779C.1.pep
HVYIMINSSFLEVYLPDDFGHFLYGEDQQPSFLWFQVHHAVGQPSVSSCVAKRVG

SEQ ID NO: 237823 - protein, 48 aa, Glycine max
  Clone ID: PAT_MRT3847_5677C.1.pep
FLFPSPNPKVSKILFFFFKSRLSYNTISIPMSSFPKISSFPLGLTSVL

SEQ ID NO: 237824 - protein, 42 aa, Glycine max
  Clone ID: PAT_MRT3847_56780C.1.pep
FKLKSGAFNSKHSRNAIVLIQNTKQAYNFNLIIFKKFDSHCM

SEQ ID NO: 237825 - protein, 402 aa, Glycine max
  Clone ID: PAT_MRT3847_56781C.1.pep
MSRFRRFELIEQPPFFHSCYSFPSFVLQDSLSLDLDLLPLPSHFDAFADLVHAPSFAYRRVERHLENELRLQSLSDRVAELESRFDRVLGGDRKYTWTAEIKGAEKNGFDRKYKWVAEVAEEEDKKKKKNKKKQVKVLKDKSARWTLQLENEDAEEEEEKKKKLLKGVARNVKWTAEITGKGENSGSSRKYTFQVQSGDAEKKEKKNKGNGNGLRIVEIQEPIGHRDVVLRQAFAKRFGAVQNERGKKKDLSPQDAALLIQISFRAYLIRRSKALRALRELAIAKSKLKEIRAQFNNFSYRRHVARDAEERQRFSEKIIVLLLTVDAIEGSDIMVRSAKRSMVDELEAMLDVVDPQPGGRSASLYFKRRTFDMPDGVIRKEIEEGVAQVVQMLEEAENSSEA

SEQ ID NO: 237826 - protein, 105 aa, Glycine max
  Clone ID: PAT_MRT3847_56782C.1.pep
MGKDLSDEQVSSMKEAFSLFDFPRFLDLMAKHMKPEPFDRQLRDAFKVLDKDSTGFVAVSELRHILTNIGEKLEPSEFDEWIREVDVGSDGKIRYEDFISRMVAK

SEQ ID NO: 237827 - protein, 121 aa, Glycine max
  Clone ID: PAT_MRT3847_56783C.1.pep
EKIIDSFPFVVHDMDAKKKNIVLLAVENRQTYLYIFLLKKKNLKKSNIFGKVDNKGNSALHLAAKLGDYKPWLIPGEALQMHWEIKWYLMHVPQGSMPKSSMSPSCLKFHSHLKIRHTQLN

SEQ ID NO: 237828 - protein, 81 aa, Glycine max
  Clone ID: PAT_MRT3847_56784C.1.pep
GEESIFIFQLERRREGEKEKKARSATRISSPEWSPSNADSILSFQCSFLFLRYYCFLVFAFSVDQPIDWLIVLCFKFMVRG

SEQ ID NO: 237829 - protein, 60 aa, Glycine max
  Clone ID: PAT_MRT3847_56785C.1.pep
RQDPLRGFHRQNGRQVTPIPFSLSSVIFSLSFAFGCLLFSGPINRLINCLVFTFYFMVCG

SEQ ID NO: 237830 - protein, 147 aa, Glycine max
  Clone ID: PAT_MRT3847_56786C.1.pep
MGKDLSDEQVSSMKEAFSLFDTDGDGRIAPSELGILMRSLGGNPTQAQLKAIVAEENLTAPFDFPRFLDLMAKHMKPEPFDRQLRDAFKVLDKDSTGFVAVSELRHILTNIGEKLEPSEFDEWIREVDVGSDGKIRYEDFISRMVAK

SEQ ID NO: 237831 - protein, 48 aa, Glycine max
  Clone ID: PAT_MRT3847_56787C.1.pep
HLRILCAIDTTGTYSLDNAKIFHFGIYTYNTNVITLTFCTYIHIYPDH

SEQ ID NO: 237832 - protein, 373 aa, Glycine max
  Clone ID: PAT_MRT3847_56788C.1.pep
CYAGSDCSQFLSDCPANADGGDPYFMEPFWMQHAASSAILVSGWHRMSYSYSDGSVISQLLVEYIKKVHGIVGNAITEGKYIVFGSGSTQLLNAAVYALSPDPSMSPAKVVATAPYYPLYREQTQFFNSRDFSYEGDTSLWKNNTNSSFRFIEFVTSPNNPDGKLNKGILEGSDVKSIYDRAYYWPHFTAIPSPADDDLMIFTISKLTGHAGSRFGWAIVKDEAVYEKMLTYMDMNTMGVSREAQLRALKLLDVALEGDGKEIFQFAYSTMRDRWIRLKEIISKTKRFSLQKISSQYCTFFKRDRDASPAYAWLKCERQQDNNCYEILEAAGINGREGSLYSADNRYVRLSLIRSQDDFEILINKLKILVSKE

SEQ ID NO: 237833 - protein, 147 aa, Glycine max
  Clone ID: PAT_MRT3847_56789C.1.pep
MGKDLSEEQVSSMKEAFSLFDTDGDGRIAPSELGILMRSLGGNPTQAQLKAIVAEENLTAPFDFPRFLDLMAKHIKPEPFDRQLRDAFKVLDKDSTGFVAVSELRHILTNIGEKLEPSEFDEWIREVDVGSDGKIRYEDFIARMVAK

SEQ ID NO: 237834 - protein, 64 aa, Glycine max
  Clone ID: PAT_MRT3847_5678C.1.pep
PLDFLSNYLAKVLILAIYLRQLLSFIHPNSFPTFGKLPRLKQGTEGSIWLEEKLNIMTCLVLTK

SEQ ID NO: 237835 - protein, 61 aa, Glycine max
  Clone ID: PAT_MRT3847_56790C.1.pep
GVRPALPWLYILCLVIIISGLATLDSTMLHFHSWLQGQCLIALGATLALGLVSPLVLDPAS

SEQ ID NO: 237836 - protein, 107 aa, Glycine max
  Clone ID: PAT_MRT3847_56791C.1.pep
HDELKRFDHEVSQSMLQQIINPGKLNLCSLQSGLTPNLPALQMASCTQKLNSMQTRPFAYQEPKNYGDFVKPSPDFQGDGNINPALVDSFIEEKLRSSPWHPHVQGF

SEQ ID NO: 237837 - protein, 81 aa, Glycine max
  unsure (1)..(81): unsure at all Xaa locations
  Clone ID: PAT_MRT3847_56792C.1.pep
VKANDLPAKDFTVFYDPYTEFXRGNCEGGIHHSXNNXNPSWYQVFAYSKDRIXQAFILLVTINYNDVLKDYYIHHNFHDLN

SEQ ID NO: 237838 - protein, 321 aa, Glycine max
  Clone ID: PAT_MRT3847_56793C.1.pep
MAQVVKPHEPKTQSFKLLSGHTIPAVGLGTWKSGSQAANSVITAIVEAGYRHIDTASQYGVQEEVGHALQSAMQAGVERKDLFVTSKLWCTDLTPERVRPAINNTLQELQLDYLDLYLIHWPFRLKDGASRPPKEGEVLELDMEGVWREMEKLVKENLVRDIGICNFTLTKLDKLMSIAQIMPSVCQMEMHPGWRNDKMLQACKKNAIHVTAYSPLGSSDGGRDLINDQKVDRIANKMNKNPGQVLVKWAIQRGTSVIPKSTKPDRIMENVSVFNWELPERDFKTLSNMPDQRRVLDGEDLFVNKSAGPFRSVEDIWDHED

SEQ ID NO: 237839 - protein, 61 aa, Glycine max
  Clone ID: PAT_MRT3847_56794C.1.pep
LSVKILLNRRVMHDLSLSNQCQLPAASYYTHLPLSYPSSTCINSCAGQTPRVTDIFARATR

SEQ ID NO: 237840 - protein, 87 aa, Glycine max
  unsure (1)..(87): unsure at all Xaa locations
  Clone ID: PAT_MRT3847_56795C.1.pep
XHSCCSLSFTGCLCVSSLVRINITMWPLLALDRTEAKVQDVFPLLQQHRAGNHSYLPPNFRRVTLYVIVSYRALYFRXAPPFSCIAL

SEQ ID NO: 237841 - protein, 52 aa, Glycine max
  Clone ID: PAT_MRT3847_56796C.1.pep
KQKAPLLLAPEFLFFQNLKGGPGGVPLLLLEQNKNFTWKIRKTPMGGGKLHL

SEQ ID NO: 237842 - protein, 46 aa, Glycine max
  Clone ID: PAT_MRT3847_56797C.1.pep
TYEPLIVSTSALISVSRIRSSSSRIPMIVPLRHVYFLSPRIVQLLR

SEQ ID NO: 237843 - protein, 63 aa, Glycine max
  Clone ID: PAT_MRT3847_56798C.1.pep
TIHTCRQVALSHLYVYLRPIIHLTYPILIFPMLLTDNLYIQLPFASPHATIILRSPDPVSRIA

SEQ ID NO: 237844 - protein, 71 aa, Glycine max
  Clone ID: PAT_MRT3847_56799C.1.pep
SPPIQLGRDLEKQIMCNVSVCSRLQAFFLSHPLGGGLSSSFLFPPQGVSLSKPPFFFIKGSLFYPFSFFPY

SEQ ID NO: 237845 - protein, 58 aa, Glycine max
  unsure (1)..(58): unsure at all Xaa locations
  Clone ID: PAT_MRT3847_5679C.1.pep
SHLIFLNFNSAPEGIPCVCKRFPSIKNVTFXIDLEINEEDRVIPGLGEFGDPNFGTQE

SEQ ID NO: 237846 - protein, 70 aa, Glycine max
  Clone ID: PAT_MRT3847_567C.1.pep
YISCLGSDSDFETFTMKPDDNMGWAFSRQLPDNQRGISSTNKRDLLDPSISHLTLSPKIRALNTITYPNQ

SEQ ID NO: 237847 - protein, 96 aa, Glycine max
  Clone ID: PAT_MRT3847_56800C.1.pep
ELIWIGHGYEQVEDAERGCGRQGPELLGSGREIATRVHTLVAFSVGQHLSNSDPIRPKRDFCVFNSVKRIDKKSLSVIDCYRTDLSAELGTSMALC

SEQ ID NO: 237848 - protein, 121 aa, Glycine max
  Clone ID: PAT_MRT3847_56801C.1.pep
PNPLVVIFKNIWAVQTQNRNITKNKSSQTRPNPNSPTPWKKNTTRTCNQKKKSHQKNFQKKTNPQKFPQKRFYRTTHKNIKEKKLIPPQKNKHKNPLHQTSQNPQHPPVTPIKLKGNINNT

SEQ ID NO: 237849 - protein, 51 aa, Glycine max
  Clone ID: PAT_MRT3847_56802C.1.pep
HVNIGVSGMWEASGLLAIFDRHIHSVRPDSNSFLPFPNKLKRKKKTNFIGI

SEQ ID NO: 237850 - protein, 126 aa, Glycine max
  Clone ID: PAT_MRT3847_56803C.1.pep
KEEEKKKENEERNLLRRGASPHVMDKDGAAPLHYAVQVGAKMTVKLLIKYKADVNVEDNEGWPPLHIAIQSRNRDIAKILLVNGADKTRKNKDGKTALDLSLCYGKDFKSYDLAKLLKTVPADSYL

SEQ ID NO: 237851 - protein, 103 aa, Glycine max
  unsure (1)..(103): unsure at all Xaa locations
  Clone ID: PAT_MRT3847_56804C.1.pep
NSXPXXXTXXXXYXQXXXXHHXXXHTXAXSXXPFXLXXCXSXXMXXKSXVKLYIXXQXXXWTVRXQEXXXXQXFPPLXXXTXXXLXXISTRAEXRAYXXXXHX

SEQ ID NO: 237852 - protein, 55 aa, Glycine max
  Clone ID: PAT_MRT3847_56805C.1.pep
PDQLGKRGATWPSLFMNGLKPHYLCHRGCKQKTAQGGPPKRLNGQKPRFFKRGGG

SEQ ID NO: 237853 - protein, 113 aa, Glycine max
  unsure (1)..(113): unsure at all Xaa locations
  Clone ID: PAT_MRT3847_56806C.1.pep
VVXGEGGGRGKIVFFFLRERGKEYGGIGVGRIDERKEKIGGGDXVIVGDIRDGERIVGEIEGIDGXIXLEGEVXKKKGGFDXXKRKRXEFXFEDGGICEKVXWIGEKNEINVG

SEQ ID NO: 237854 - protein, 107 aa, Glycine max
  unsure (1)..(107): unsure at all Xaa locations
  Clone ID: PAT_MRT3847_56807C.1.pep
FIPSLAXXFPGLDRHXLGQNXXIMTFXDCXATVILEDPXLTRFLPTRESTRVFPTXXFIFPFQLPLDYVLLGKLXKIDFXXSIFLTSGHTQRKIHYLSRCYDILPXK

SEQ ID NO: 237855 - protein, 49 aa, Glycine max
  Clone ID: PAT_MRT3847_56808C.1.pep
GSQQNTHNPKGKLPKIMTHKWKYGDLLEAPNLLPMKGLFVTKFESNESK

SEQ ID NO: 237856 - protein, 55 aa, Glycine max
  Clone ID: PAT_MRT3847_56809C.1.pep
HSVQRIASECPSSWFPKSVVSSKSSFLSLNKSYSIKYSHINRLWESSNGRVCYRF

SEQ ID NO: 237857 - protein, 57 aa, Glycine max
  unsure (1)..(57): unsure at all Xaa locations
  Clone ID: PAT_MRT3847_5680C.1.pep
QQLLLGYFTTSIEILITLNYIFGKDVIXIFYNFKSGILIFLFLNYMNVMLMRIEDME

SEQ ID NO: 237858 - protein, 64 aa, Glycine max
  Clone ID: PAT_MRT3847_56810C.1.pep
FTQFGVLLSSIVLKVVFPLLLDSNSSKDDTNPLFQFPIWQLTNKETKRQAITNDQKNEMKAKTI

SEQ ID NO: 237859 - protein, 59 aa, Glycine max
  Clone ID: PAT_MRT3847_56811C.1.pep
ASIIYKFTGHDLLLHHRIVYYIGLHQQPCVQDLHVLASWVNLEFFLTNSPRIFPNSYFP

SEQ ID NO: 237860 - protein, 93 aa, Glycine max
  Clone ID: PAT_MRT3847_56812C.1.pep
KAFLLQNLKAKQIANYKITKTKSPQLWWLFSLYCFTQFGVLLSPIALMVVGPLLLDSNSSRYGTNPPFQFPIWQLTSKETKRQAIIKDQKKMK

SEQ ID NO: 237861 - protein, 97 aa, Glycine max
  unsure (1)..(97): unsure at all Xaa locations
  Clone ID: PAT_MRT3847_56813C.1.pep
YTCENTTERLHVNEDGSLLRTGSXGEXXXVDWVLIHNTNGSSSKPFNWDHVKLPNIKINYALALTXGIHPQNVYDALSTSTPEWVDVNILHLCITLY

SEQ ID NO: 237862 - protein, 94 aa, Glycine max
  Clone ID: PAT_MRT3847_56814C.1.pep
KEKILKITQFGRKKVKGKCACCFWLEICSIIGVYFIPILVMKFQLKSSVKTSVKTRGFLSFCFFFIVFLLYSRAILSFSLSPSLLLCAFHCFNC

SEQ ID NO: 237863 - protein, 580 aa, Glycine max
  unsure (1)..(580): unsure at all Xaa locations
  Clone ID: PAT_MRT3847_56815C.1.pep
MCGILAVLGCSDSSQAKRVRVLELSRRLKHRGPDWSGLHQYGDNYLAHQRLAIVDPASGDQPLFNEDKTVVVTVNGEIYNHEELRKQLPNHTFRTGSDCDVIAHLYEEHGENFVDMLDGIFSFVLLDTRDNSFIVARDAIGVTSLYIGWGLDGSVWISSELKGLNDDCEHFESFPPGHLYSSKERAFRRWYNPPWFSEAIPSAPYDPLALRHAFEKAVVKRLMTDVPFGVLLSGGLDSSLVAAVTARYLAGTNAAKQWGTKLHSFCVGLEGAPDLKAAKEVADYIGTVHHEFHYTVQDGIDAIEDVIYHIETYDVTTIRASIPMFLMSRKIKSLGVKWVISGEGSDEIFGGYLYFHKAPNKEEFHQETCRKIKALHKYDCLRANKSTFAWGLEARVPFXLDKDFIRVAMNIDPEYKMIKKEEGRIEKWVLRRAFDDEEHPYLPKHILYRQKEQFSDGVGYGWIDGLKAHAEKHVTDRMMLNAANIFPFNTPTTKEAYYYRMIFERFFPQNSARLSVPGGPSVACSTAKAVEWDAAWSNNLDPSGRAALGVHASAYGNQVKAVEPEKIIPKMEVSPLGVAI

SEQ ID NO: 237864 - protein, 96 aa, Glycine max
  Clone ID: PAT_MRT3847_56816C.1.pep
GDLLEAPNIHPMKDLFVTKFESKANFQLQKSQKKVLNCGGYSLFGVSLNFECFLVQYLLRWLAPCFLTQILQGMTPILLSNSLYGNSQARKQRDKQ

SEQ ID NO: 237865 - protein, 309 aa, Glycine max
  Clone ID: PAT_MRT3847_56817C.1.pep
PDLKAAKEVADYIGTVHHEFHYTVQDGIDAIEDVIYHIETYDVTTIRASIPMFLMSRKIKSLGVKMVISGEGSDEIFGGYLYFHKAPNKEEFHQETCRKIKALHKYDCLRANKSTFAWGLEARVPFLDKEFIRVAMNIDPECKMIKKEEGRIEKWALRRAFDDEEHPYLPKHILYRQKEQFSDGVGYGWIDGLKAHAEKHVTDRMMLNAANIFPFNTPTTKEAYHYRMIFERFFPQNSARLTVPGGPSVACSTAKAVEWDAAWSNNLDPSGRAALGVHISAYENQNNKGVEIEKIIPMDAAPLGVAIQG

SEQ ID NO: 237866 - protein, 69 aa, Glycine max
  Clone ID: PAT_MRT3847_56818C.1.pep
FATKLGVWNIAFLGSGILLVKYIVSVLAAIYMPQVNINFQALVTRTGSYNFCNKLDLPGLFCMYRHWLL

SEQ ID NO: 237867 - protein, 582 aa, Glycine max
  Clone ID: PAT_MRT3847_56819C.1.pep
MCGILAVLGCSDDSRAKRVRVLELSRRLKHRGPDWSGLHQHGDCFLAHQRLAIVDPASGDQPLFNEDKSVIVTVNGEIYNHEELRKQLPNHKFRTGCDCDVIAHLYEEHGEDFVDMLDGIFSFVLLDTRDNSFIVARDAIGVTSLYIGWGLDGSVWISSEMKGLNDDCEHFECFPPGHLYSSKERGFRRWYNPPWFSEATPSTPYDPLVLRHTFEQAVIKRLMTDVPFGVLLSGGLDSSLVASVTSRYLANTKAAEQWGSKLHSFCVGLEGSPDLKAAKEVADYLGTVHHEFTFTVQDGIDAIEDVIYHVETYDVTTIRASTPMFLMSRKIKSLGVKWVISGEGSDEIFGGYLYFHKAPNKEEFHRETCRKIKALHQYDCLRANKSTFAWGLEARVPFLDKAFINTAMSIDPESKMIKRDEGRIEKWILRRAFDDEEHPYLPKHILYRQKEQFSDGVGYSWIDGLKAHAAKHVTDKMMLNAGNIYPHNTPTTKEAYYYRMIFERFFPQNSARLTVPGGASVACSTAKAVEWDAAWSNNLDPSGRAALGVHISAYENQNNNKGVEIEKIIPMDAAPLGVAIQG

SEQ ID NO: 237868 - protein, 202 aa, Glycine max
  Clone ID: PAT_MRT3847_5681C.1.pep
RSLLVMQGKSTDFAKHALPSIHKQRIIITFTKSQPKCSLPNDSQRLAPPAASHWAPPQSRSPNHVRHQLGPKHYPTVPATVVLPAPSIHAPPNSMQPLFVPVPVPVAPPMSFPTPVPIPPGSIGWTSAPPRHPPPRIPVPGTGVFLPPPGSGTIHEVNPSVETWTVSGKENGKSNHSKTNSEAEEAGVEKEHESNDMTAASH

SEQ ID NO: 237869 - protein, 349 aa, Glycine max
  Clone ID: PAT_MRT3847_56820C.1.pep
MIMRGQDIYSSQDEPTTSPSSSESEEAKGEESSEEIYPQEDGQPLVVKEKCKEVSVSSKRLAKKERHFEIKTNIKVISLLRQPPHFLLCKKTLVSIATPLRLEFIPQVKELLDEGLVCKSLNPCALLVPKIGIIRHQIPKIGGMMNVLSGATLFCKITRAPNIFMICVHRDSLGRFVLIFSFNTNLGTHMGHLRFFILFGRNNQHENTEKGMFYCITFLNFLNSDQGVPMNPKRIKVIPEWPTPPSIRKIWGFHDLTNFYKRFVPYFFILVAPLIELVRNHVPSWEDAQDMGFQTLPYFNIPNTTNAYIFVLFTSVKEKCQEYEEPRDLRSNPFQGGGNDAILSRKGIG

SEQ ID NO: 237870 - protein, 582 aa, Glycine max
  unsure (1)..(582): unsure at all Xaa locations
  Clone ID: PAT_MRT3847_56821C.1.pep
MCGILAVLGCSDDSRAKRVRVLELSRRLKHRGPDWSGLHQHGDCFLAHQRLAIVDPASGDQPLFNEDKSVIVTVNGEIYNHEELRKQLPNHNFRTGSDCDVIAHLYEEHGEDFVDMLDGIFSFVLLDTRDNSFIVARDAIGVTSLYIGWGLDGSVWISSEMKGLNDDCEHFECFPPGHLYSSKERGFRRWYNPPWFSEAIPSAPYDPLVLRHAFEQAVIKRLMTDVPFGVLLSGGLDSSLVASITSRYLANTKAAEQWGSKLHSFCVGLEGSPDLKAAKEVADYLGTVHHEFTFTVQDGIDAIEDVIYHIETYDVTTIRASTPMFLMSRKIKSLGVKWVISGEGSDEIFGGYLYFHKAPNKEEFHRETCRKIKALHQYDCLRANKSTFAWGLEARVPFLDKAFINAAMSIDPEWKMIKRDEGRIEKWILRRAFDDEEHPYLPKHILYRQKEQFSDGVGYSWIDGLKAHAAKHVTEKMMLNAGNIYPHNTPKTKEAYYYRMIFERFFPQNSARLTVPGGASVACSTAKAVEWDAAWSNNLDPSGRAALGVHISAYENQNNKGVEIEKIXKPMDAAPLGVAIQG

SEQ ID NO: 237871 - protein, 103 aa, Glycine max
  unsure (1)..(103): unsure at all Xaa locations
  Clone ID: PAT_MRT3847_56822C.1.pep
MHVFVSPPPGSIALVAFYQKYVDPGSKSXIKNTLVRCARTLLVSDPRHNEPXKFFGRGARARFQKSSLEVFWRCSRVFFFWFGPFFFLGFFENKEGGIGRLKI

SEQ ID NO: 237872 - protein, 43 aa, Glycine max
  Clone ID: PAT_MRT3847_56823C.1.pep
MASGATCVQRLDGSRDSAIHTKYRISLRSSSIQEPRYPLPRVM

SEQ ID NO: 237873 - protein, 579 aa, Glycine max
  Clone ID: PAT_MRT3847_56824C.1.pep
MCGILAVLGCSDSSQAKRVRVLELSRRLKHRGPDWSGLHQYGDNYLAHQRLAIVDPASGDQPLFNEDKTVVVTVNGEIYNHEELRKQLPNHTFRTGSDCDVIAHLYEEHGENFMDMLDGIFSFVLLDTRDNSFIVARDAIGVTSLYIGWGLDGSVWISSELKGLNDDCEHFESFPPGHLYSSKERAFRRWYNPPWFSEAIPSAPYDPLALRHAFEKAVVKRLMTDVPFGVLLSGGLDSSLVAAVTARYLAGTKAAKQWGTKLHSFCVGLEGAPDLKAAKEVAEYIGTVHHEFHYTVQDGIDAIEDVIYHIETYDVTTIRASIPMFLMSRKIKSLGVKMVISGEGSDEIFGGYLYFHKAPNKEEFHQETCRKIKALHKYDCLRANKSTFAWGLEARVPFLDKEFIRVAMNIDPECKMIKKEEGRIEKWALRRAFDDEEHPYLPKHILYRQKEQFSDGVGYGWIDGLKAHAEKHVTDRMMLNAANIFPFNTPTTKEAYHYRMIFERFFPQNSARLTVPGGPSVACSTAKAVEWDAAWSNNLDPSGRAALGVHASAYGNQVKAVEPEKIIPKMEVSPLGVAI

SEQ ID NO: 237874 - protein, 159 aa, Glycine max
  unsure (1)..(159): unsure at all Xaa locations
  Clone ID: PAT_MRT3847_56825C.1.pep
NECPAVEVTLQTVSHVGGFSNFESSSKSNEKNQPRGKYHLPGLLDDQSWTDIEYNSFLLGLYVFGKNLKFLKRFVGGRTMGDILFLYYGKXKFFKSKEYCRWSECRKLRTKRCIYGQKIFTGWRQQELLSRLFPRVPGESQTTLVEISRKFVEGKMPFE

SEQ ID NO: 237875 - protein, 59 aa, Glycine max
  Clone ID: PAT_MRT3847_56826C.1.pep
GRYFNYKLAEIDDARAHVRKSTKLSMGASTPPGNYPMNPASVTRVYAEHTRVLMLLALG

SEQ ID NO: 237876 - protein, 83 aa, Glycine max
  unsure (1)..(83): unsure at all Xaa locations
  Clone ID: PAT_MRT3847_56827C.1.pep
VVDQIATQGERIHALIXWRDPRATSIFMVFCLVTAIVLYVTPPQMLFILSGFYLMRHPMLRGKTPGAPINFFRRLPALTDSML

SEQ ID NO: 237877 - protein, 109 aa, Glycine max
  unsure (1)..(109): unsure at all Xaa locations
  Clone ID: PAT_MRT3847_56828C.1.pep
MLKHGATQSKQGLTKPELALEKSLMLLXLSLMLGSLCRLSRLLWLYLRVMCLHIVLMFALTIFVFAVTNKGSGDTNTNTGYNESKLGDYANWLEDNSNNTQTRDKITNT

SEQ ID NO: 237878 - protein, 68 aa, Glycine max
  Clone ID: PAT_MRT3847_56829C.1.pep
SQILFIDTPVDGDEAHGKGLSIDTPTLILIKTALIQIFSLAIFSSFSCDFLKTSCKYIVTYIHACRQK

SEQ ID NO: 237879 - protein, 152 aa, Glycine max
  Clone ID: PAT_MRT3847_5682C.1.pep
MANIDIEGILKQQQPYDGRVPKTKIVCTLGPASRSVEMTEKLLRAGMNVARFNFSHGTHDYHQETLNNLKTAMHNTGILCAVMLDTKGPEIRTGFLKDGKPIQLKEGQEVTITTDYDIKGDPEMISMSYKKLPVHLKPANTILCSDGTITLT

SEQ ID NO: 237880 - protein, 64 aa, Glycine max
  Clone ID: PAT_MRT3847_56830C.1.pep
TNNPIQSIDGFPVNLQEDSTAILINILSVSLFFLFFLFFFFFVFSFFFLFFFFFFFYIFFFIIY

SEQ ID NO: 237881 - protein, 84 aa, Glycine max
  Clone ID: PAT_MRT3847_56831C.1.pep
NYEVGAMARASYITTPCSSGYCTWAKHSALWCKISSINCRECLGGRIYCRTMVVGLCADPRIRQKLSGSSEQNACTFSPTVSTI

SEQ ID NO: 237882 - protein, 47 aa, Glycine max
  unsure (1)..(47): unsure at all Xaa locations
  Clone ID: PAT_MRT3847_56832C.1.pep
MGILGAILIHPDDSYPLLKLKMAAMNAXKLILSEPYWAFCYTMLYKV

SEQ ID NO: 237883 - protein, 68 aa, Glycine max
  Clone ID: PAT_MRT3847_56833C.1.pep
KKNLLHKKSKGDQNYIILNPKLSISNKRYKILMPSFLTQKNSFVKPYSNFTNNIHRCCRFTQNLPSLY

SEQ ID NO: 237884 - protein, 77 aa, Glycine max
  Clone ID: PAT_MRT3847_56834C.1.pep
ETVATPPAADTKAAVAEDDDDDDVDLFGEETEEEKKGVEERAVAVKVSAKKKDSGKSSALLDVKPWDDETVFITPAQ

SEQ ID NO: 237885 - protein, 192 aa, Glycine max
  Clone ID: PAT_MRT3847_56835C.1.pep
MGLLDLEKHFAFYGAYHNNAFNVAIHMLFVWPILFTGQMILYFTPPLLTSVGFLPSVLLLNWGFFSTLFYALFYVALDYKAGSLAAFLTFFCWVASSFVASSLGLSLAWKVVLAAQLFCWTGQFIGHGVFEKRAPALLDNLAQAFLMAPFFVLLEVLQFVGYEPYPGFKTRVKARIDADIKQWQAKKQKKHS

SEQ ID NO: 237886 - protein, 192 aa, Glycine max
  Clone ID: PAT_MRT3847_56836C.1.pep
MGLLDLEKHFAFYGAYHSNPMNVAIHTLFVWPILFTGQMILYFTPPLLTTVGFLPTVLVLNWGFFSTLFYALFYVALDYKAGSLAAFLTFFCWLTSSFIANSLAWTLSWKVVLAAQLFCWTGQFIGHGVFEKRAPALLDNLAQAFLMAPFFVLLEVLQFVGYEPYPGFNTRVKARIDADIKQWQAKKQKKHS

SEQ ID NO: 237887 - protein, 139 aa, Glycine max
  unsure (1)..(139): unsure at all Xaa locations
  Clone ID: PAT_MRT3847_56837C.1.pep
VAAPIDLSEMLGNHITYSDATLPPLSAYSPAFFTTDVLSYKKNASPAPPKIAADVAPAYDELSMWYGPDXRSFLPEGLXDRSEIPEYLTGKVSGDYGYDPFVLIMKTDHFPXYMALEXIHAIWAMLGAAAFIIPDALTN

SEQ ID NO: 237888 - protein, 66 aa, Glycine max
  Clone ID: PAT_MRT3847_56838C.1.pep
PPTVSQPLSIYYHFITNNLSALIPASLLPPLAPASFLQPSNSSVKVPSFHHGAFPAAAIFLMGVKC

SEQ ID NO: 237889 - protein, 130 aa, Glycine max
  unsure (1)..(130): unsure at all Xaa locations
  Clone ID: PAT_MRT3847_56839C.1.pep
PAENIIAAFQRSQKIVFAISNNTSGSSVATLGCCRHFSLVGMVMKVEDVEPVLELKEYFDRRMEESNLLSLTXATVTHIQAAGMGDRVCVDLCSLMRPGGGLLVGSFARGLFLVHSECLESNYIASRPFR

SEQ ID NO: 237890 - protein, 97 aa, Glycine max
  unsure (1)..(97): unsure at all Xaa locations
  Clone ID: PAT_MRT3847_5683C.1.pep
XHARVRKLGIRLEVLDRERPXXSXLVXXGINXGPVSXXVXXFPIVXXIKXWRNHXHXCFXXPIXIRXKLPXKIRXNXKXGKKGNXNGXXKNXXCXXX

SEQ ID NO: 237891 - protein, 77 aa, Glycine max
  Clone ID: PAT_MRT3847_56840C.1.pep
TTRRQYGKNHTIWCTFYYRLTGSQYDPLVLSLVPNQTRVDSMEGYLLVELSGYPIGCYFPLLANLHFVVYKNLCFIS

SEQ ID NO: 237892 - protein, 361 aa, Glycine max
  Clone ID: PAT_MRT3847_56841C.1.pep
PTRPPTRPPTRPPTRPPTRPPTRPKYFIVIYRGKDFVPTSVAAVLAEREELTKQVQDVEDKVRCRAVDAIPSGQGEATAQAGTLAEFYEAQARWGREISPDEREKMMEEAAKAKTAKLVRQIEHKIFIAQTKKLRAEKLLAKIEASMVPAGPDYDQETITDEERVMFRKVGLRMKPYLPLGIRGVFDGVVENMHLHWKHRELVKLMTKQKTLAFVEDTARLLEYESGGILVAIEKVSKEFALIYYRGKNYKRPITLRPRNLLTKGKALKRHVAMQPTRPLSQHITELEKTIEQMKKELGMTQDSDVEDGGSIEEDDHNQIDISELALSEDEDSDGYDDEEDSDWDDGEASEFSEFINDEHP

SEQ ID NO: 237893 - protein, 114 aa, Glycine max
  Clone ID: PAT_MRT3847_56842C.1.pep
TRPLTRTATRRVTKSERKELKKEARETAKRKPRMREALKKGRMETGRKDAHLTIDRGMIAIQGHALHTEIHRHQQNGGGATHPKRTHTHRQRVGRPYRRRGARHTTIRKWDERT

SEQ ID NO: 237894 - protein, 155 aa, Glycine max
  Clone ID: PAT_MRT3847_56843C.1.pep
PSARSQLLEKAKNYVAEKVTNMPKPEASVTDVDFKRVSRDSVEYLAKVSVQNPYSTSIPICEIKYSLKSAGREIAAGPIPDPGSLKASDTPMLDVPVKVPHSILLSLAKDIGADWDIDYQLDIGLVIDLPVIGNFTIPLSQKGEIKLPTLTDMFA

SEQ ID NO: 237895 - protein, 152 aa, Glycine max
  unsure (1)..(152): unsure at all Xaa locations
  Clone ID: PAT_MRT3847_56844C.1.pep
MSQLLEKAKNYVAEKVTNMPKPEASVTDVDFKRVSRDSVEYLAKVSVXNPYSTSIPICEIKYSLKSAGREIAAGTIPDPGSLKASDTTMLDVPVKVPHSILLSLAKDIGADWDIDYQLDIGLVIDLPVIGNFTIPLSQKGEIKLPTLTDMFA

SEQ ID NO: 237896 - protein, 81 aa, Glycine max
  unsure (1)..(81): unsure at all Xaa locations
  Clone ID: PAT_MRT3847_56845C.1.pep
ALISVLPNISSGHVFHALSFGAFVGGHIHLLRSILYLIDQLPXSVDACLLLKCIRLVQLRRISNGNSRNRHFLLLLTIRTQ

SEQ ID NO: 237897 - protein, 130 aa, Glycine max
  Clone ID: PAT_MRT3847_56846C.1.pep
GHGELLLSLIPFVIGSYKCEKRPSYPTLFPFTFFSPHPTPHLLINVVSHTTSVQIQTATHHNNHVNHLCLAQPPHRTTNSPTKSERNSTNTLRPRQPVQTPPRLNNSFPTSYFIVYIFSPPLNPTKTRFH

SEQ ID NO: 237898 - protein, 195 aa, Glycine max
  unsure (1)..(195): unsure at all Xaa locations
  Clone ID: PAT_MRT3847_56847C.1.pep
MPKFKRKLVMGANGRTNPLVWLVAIICTIIAVAVVVVGIVVFIGYIVIHPRVPVISVTNAHLDLLRNDYAGLLQTQLTIVVTAKNGNAKAHASFSAITFNISYQGQDIAVLVADPFEVPKNSSKDLSYVVQSSSIPLTPDQMEEVNDAWKRNEIEXDFKGAARTQWRVGPLGSVKVLCHFXCDLKFRPVNGTYIP

SEQ ID NO: 237899 - protein, 401 aa, Glycine max
  unsure (1)..(401): unsure at all Xaa locations
  Clone ID: PAT_MRT3847_56848C.1.pep
IEMKSGTLVLRWVNSQLGRILGWVERVIQQEHWDPISPQQRHAGSIVEVYRIVEETVDQFFGLKVPMRFTELNSLFRGIDNALQVYANNVVNELASKEELIPPVPILTRYKKEAGIKAFVKKELFDARVPEPDETRPSQISVLATPTLCVQLNTLYYAISHLNKLEDNIWERWTSKRSQEKLIKKSFDDKSKSFSQKDTFEGSRKVINAAMDRICEYTGTKIVFCDLRVPFMDNLYKPXVSGCRLDALIEPLDMELSQLCDIVVEPLRDRIVTSLLQASLDGLLRVILDGGPSRVFFTGDAKLLEEDLEVLKEFFISGGDGLPRGVVENQVARVRHVIKLHGYETRELIEDLKSASGMEMQGSKSKLGTDSKTLLRILCHRSDSEASQFLKKQYKIPSSSA

SEQ ID NO: 237900 - protein, 316 aa, Glycine max
  unsure (1)..(316): unsure at all Xaa locations
  Clone ID: PAT_MRT3847_56849C.1.pep
CPCNSTLCVQLNTLYYAINHLNKLEDNIWERWTSKRSQEKLIKKSLDDKSKSFSQKDTFEGSRKVINAAMDRICEYTGTKIVFCDLRVPFMDNLYKPSVSGCRLDALIEPLDMGLNSLPRPGWADXIHLLASLCWCPKXSSLSHFVALSKLCDSSASHPSSLGGISVTHELSQLCDIVVEPLRDRIVTSLLQASLDGLLRVILDGGPSRVFFPGDVKLLEEDLEVLKEFFISGGDGLPRGVVENQVARVRNVINLHGYETRELIEDLKSASGMEMQGGKSKLGTDSKTLLRILCHRSDSEASQFLKKQYKIPSSSA

SEQ ID NO: 237901 - protein, 173 aa, Glycine max
  unsure (1)..(173): unsure at all Xaa locations
  Clone ID: PAT_MRT3847_5684C.1.pep
GAYPELAVKIMARICXEAESSLDYGAIFKEMIRSTPXPMSPLQSLASTAVRTANKAKAKLIVVLTRGGSTAKLVAKYRPAVPILSVVVPVLSTDSFDWTCSDETPARHSLIYRGLIPILGEGSAKATDAESTEVILEAALKSATQRGLCKPGDAVVALHRIGTASVIKICIVK

SEQ ID NO: 237902 - protein, 219 aa, Glycine max
  unsure (1)..(219): unsure at all Xaa locations
  Clone ID: PAT_MRT3847_56850C.1.pep
DTININGLARQSLINADGIIEKSFLPGKYSIEMSSSVYKNWVFTDQALPADXLVKRGLAIEDPSAPHGLRLVIEDYPYAVDGLEIWDAIKTWVHEYVSLYYPTDAAVQQDTELQAWWKEAVEKGHGDLKEKPWWPKMQTTEDLIQSCSIIVWTASALHAAVNFGQYPYGGLIXNRPTLAXRRFIPAERTPEYDEMVKNPQKAYLRTITPKFETLIDLSN

SEQ ID NO: 237903 - protein, 292 aa, Glycine max
  Clone ID: PAT_MRT3847_56851C.1.pep
MTDEEFAREVIAGVNPNVIRRLQEFPPKSTLDPTLYGDQTSTITKEQLEINMGGVTVEEALSTQRLFILDYQDAIKTWVHEYVSLYYPTDAAVQQDTELQAWWKEAVEKGHGDLKEKPWWPKMQTTEDLIQSCSIIVWTASALHAAVNFGQYPYGGLILNRPTLARRFIPAEGTPEYDEMVKNPQKAYLRTITPKFETLIDLSVIEILSRHASDEIYLGERETPNWTTDKKALEAFKRFGSKLTGIEGKINARNSDPSLRNRTGPVQLPYTLLHRSSEEGLTFKGIPNSISI

SEQ ID NO: 237904 - protein, 46 aa, Glycine max
  Clone ID: PAT_MRT3847_56852C.1.pep
TSYLNLQIFVSIFLQSTYNLSSFESCWLRIKMILKFSFISLKTIVK

SEQ ID NO: 237905 - protein, 163 aa, Glycine max
  unsure (1)..(163): unsure at all Xaa locations
  Clone ID: PAT_MRT3847_56853C.1.pep
PYAVDGLEIWDAIKTWVHEYVSLYYPTDAAVQQDTELQAWWKEAVEKGHGDLKEKPWWPKMQTTEDLIQSCSIIVWTASALHAAVNFGQYPYGGLILNRPTLARRFIPAEGTPEYDEMVKNPQKAYLRTITPKFETLIDXFKRFGSKLTGIEGKINARNSDPS

SEQ ID NO: 237906 - protein, 139 aa, Glycine max
  unsure (1)..(139): unsure at all Xaa locations
  Clone ID: PAT_MRT3847_56854C.1.pep
MRGLILTCPLLARRLILAEXTLEYDEMVKNXTKAYLRIIIIKSEIFIDFLVIEILLRYVSDEIYFGEREILNWXTDKKALEAFKRFGSKLTGIEGKINARNSDPSLRNRTGPVQLPYTLLHRSSEEGLTFKGIPNSISI

SEQ ID NO: 237907 - protein, 41 aa, Glycine max
  Clone ID: PAT_MRT3847_56855C.1.pep
FTLQFLPIKKPPPGPFFWPEPGVKMATTGIAKEGPTETNEG

SEQ ID NO: 237908 - protein, 93 aa, Glycine max
  unsure (1)..(93): unsure at all Xaa locations
  Clone ID: PAT_MRT3847_56856C.1.pep
GPFKDLKSGQKLFRYAAQATPEVFGPKARGLGFKSVVMKVNGFSPFRRKRNAIISWKEGFSAGFKGDKNPIVYIXDTPRKPPNGCRLPKKRRI

SEQ ID NO: 237909 - protein, 864 aa, Glycine max
  Clone ID: PAT_MRT3847_56857C.1.pep
MFGIFDKGQKIKGTVVLMPKNVLDFNAITSIGKGGVIDTATGILGQGVSLVGGVIDTATSFLGRNISMQLISATQTDGSGNGKVGKEVYLEKHLPTLPTLGARQDAFSIFFEWDASFGIPGAFYIKNFMTDEFFLVSVKLEDIPNHGTIEFVCNSWVYNFRSYKKNRIFFVNDTYLPSATPAPLLKYRKEELEVLRGDGTGKRKDFDRIYDYDVYNDLGNPDGGDPRPILGGSSIYPYPRRVRTGRERTRTDPNSEKPGEVYVPRDENFGHLKSSDFLTYGIKSLSHDVIPLFKSAIFQLRVTSSEFESFEDVRSLYEGGIKLPTDILSQISPLPALKEIFRTDGENVLQFPPPHVAKVSKSGWMTDEEFAREVIAGVNPNVIRRLQEFPPKSTLDPTLYGDQTSTITKEQLEINMGGVTVEEALSTQRLFILDYQDAFIPYLTRINSLPTAKAYATRTILFLKDDGTLKPLAIELSKPHPDGDNLGPESIVVLPATEGVDSTIWLLAKAHVIVNDSGYHQLVSHWLNTHAVMEPFAIATNRHLSVLHPIYKLLYPHYRDTININGLARQSLINADGIIEKSFLPGKYSIEMSSSVYKNWVFTDQALPADLVKRGLAIEDPSAPHGLRLVIEDYPYAVDGLEIWDAIKTWVHEYVSLYYPTDAAVQQDTELQAWWKEAVEKGHGDLKEKPWWPKMQTTEDLIQSCSIIVWTASALHAAVNFGQYPYGGLILNRPTLARRFIPAEGTPEYDEMVKNPQKAYLRTITPKFETLIDLSVIEILSRHASDEIYLGERETPNWTTDKKALEAFKRFGSKLTGIEGKINARNSDPSLRNRTGPVQLPYTLLHRSSEEGLTFKGIPNSISI

SEQ ID NO: 237910 - protein, 52 aa, Glycine max
  unsure (1)..(52): unsure at all Xaa locations
  Clone ID: PAT_MRT3847_56858C.1.pep
IKEQGIIKFYNIIFILFSPFLLKQTISHTTFXFSFLNYYFSSIYHXVLFSXK

SEQ ID NO: 237911 - protein, 301 aa, Glycine max
  unsure (1)..(301): unsure at all Xaa locations
  Clone ID: PAT_MRT3847_56859C.1.pep
PHMKKDVHKHCTRCVACLQAKFRVMRHGLYTPLPIPCARWVDISMDFVLGLPRTQRGVDSIFVVVDRFSKMAHFIPCHKVDDASHISKVFFKEVVRLHGLPRTIVSDRDAKFLSHFWKTLWAKLGTKLLFSTTCHPQTNGQTEVVNRSLSTLLRALLKGNHKSWDEYLPHVEFAYNRGVHRTTKQSPFEVVYGFNPLTPLDLIPLPLDTSFIHKEGESRSEFVKKMHERVKNQIENQTKVYSTKGNRGRKELVLNEGDWVWLHLRKDRFPTXRKSKLSPRGDGPFQVLERINNNAYRLDLP

SEQ ID NO: 237912 - protein, 71 aa, Glycine max
  unsure (1)..(71): unsure at all Xaa locations
  Clone ID: PAT_MRT3847_5685C.1.pep
SALLLLASSPRSPPLSLLVACSAFAVLFWVAFFAPAPPPFGGGFLLSLRAVPWGSGRFPLPPPFAXXVFVG

SEQ ID NO: 237913 - protein, 99 aa, Glycine max
  Clone ID: PAT_MRT3847_56860C.1.pep
FIINAPQPVNDRIFDAFAFTTFLQQGIKVEGLTGNLGEKIKVTNLGDGRIEVVAPQEFSGRYIKDLTKKFLKKQQLRDWLRVVAPHKGEDTPKFFNLVG

SEQ ID NO: 237914 - protein, 91 aa, Glycine max
  unsure (1)..(91): unsure at all Xaa locations
  Clone ID: PAT_MRT3847_56861C.1.pep
GGVAVANCNTQXALHLFXXXXSXXTXTSPXRFHKTTPTXHQGGAPKRTXXKTXTQXXREREREKXXKKPKRTXPEXXRRGPXPXSRNRHRX

SEQ ID NO: 237915 - protein, 43 aa, Glycine max
  Clone ID: PAT_MRT3847_56862C.1.pep
NFIKIKKKLINLYLTAHSFLYYFGPLIFFGGIIIRMYGNQTWE

SEQ ID NO: 237916 - protein, 54 aa, Glycine max
  Clone ID: PAT_MRT3847_56863C.1.pep
YCLSNLISQVHDSRYGSTRPVYTHVNGAVSYFESCCTIISMISVKMTLSEKMPT

SEQ ID NO: 237917 - protein, 77 aa, Glycine max
  Clone ID: PAT_MRT3847_56864C.1.pep
YRIDARVRPLVCTDTTNYTMFVPATPYSGFAAIICGWEYSLPPPSSLKNDIYIIVHHMVTNIQRPIPNTAGPSLTTL

SEQ ID NO: 237918 - protein, 54 aa, Glycine max
  Clone ID: PAT_MRT3847_56865C.1.pep
KNHVITELKGTWTKLLFVAVGVFGRRRLLKGLIKKARFVGKMKFTLKLAINLGG

SEQ ID NO: 237919 - protein, 75 aa, Glycine max
  unsure (1)..(75): unsure at all Xaa locations
  Clone ID: PAT_MRT3847_56866C.1.pep
ASSMISSPAXTTVNRAGAGMVAPFTGLKSMACFPTQKTXHDITFIASNRGRMQXLQVLQPICKKNFETFSYFQTL

SEQ ID NO: 237920 - protein, 61 aa, Glycine max
  Clone ID: PAT_MRT3847_56867C.1.pep
FMYKNLRNGICCLISILWEDKPPPAERFRVRSQIQIKPKILCQGFREQVFLIKLMFIFINF

SEQ ID NO: 237921 - protein, 242 aa, Glycine max
  Clone ID: PAT_MRT3847_56868C.1.pep
STEQRERKMVLEQAVSSSSTLRNVFTNPKTLISKPQFQVAASPSWKPQQPRWEGWLGINLKCSMTTTTTPSSYPKPSEIPWQKELCNSVNLIGNVAAPVEIKYLPSGKVVAWTRLYVKKSATQSSPINLTFWDDLAHVASQHLQKGHQIHVSGRLITDTVETEEGKSQTYYRFVVQQLNFLESNYSSVSSSQGQEFDFAMAGSGRKVSNAANSTGSVVETWNAFFANPGEWWDNRTVERVLC

SEQ ID NO: 237922 - protein, 406 aa, Glycine max
  unsure (1)..(406): unsure at all Xaa locations
  Clone ID: PAT_MRT3847_56869C.1.pep
MATTSVVPANRRRAANPAEEMDFETTEGVKAIASFEEMGIKDDLLRGIYQYGFEKPSAIQQRAVTPIIQGRDVIAQAQSGTGKTSMIALTVCQVVDTSVREVQALILSPTRELASQTEKVILAIGDFINIQAHACVGGKSVGEDIRKLEYGVHVVSGTPGRVCDMIKRRTLRTRAIKMLVLDESDEMLSRGFKDQIYDVYRYLPPDLQVCLISATLPHEILEMTNKFMTDPVRILVKRDELTLEGIKQFFVAVEREEWKFDTLCXFMIPSLSLKLLYSXNTKRKVDWLTEKMRNNNFTVSSMHGDMPQKERDAIMGEFRAGTTRVLITTDVWARGLDVQQVSLVINYDLPNNRELYIHRIGRSGRFGRKGVAINFVKSDDIKILRDIEQYYSTQIDEMPMNVADLI

SEQ ID NO: 237923 - protein, 216 aa, Glycine max
  Clone ID: PAT_MRT3847_56870C.1.pep
LVLLFECCPVRLREDGRWKERAHREGNMALEQAVSSSSSTLRNVLTFPKTLISKPQFQVAASPSWKTQRRWGNLKCSMTTTPSYPKPSEIPWQKELCNSVNLIGNVAAPVEIKHLPSGKVVAWTRLCVKKSATQSSSISLTFWDDLAHVASQHLQKGYQIHVSGRLIIDTVETEEGKTQTYYKVVAQQLNFIERNFSSASSSQGQEFDFAMAGGGK

SEQ ID NO: 237924 - protein, 280 aa, Glycine max
  unsure (1)..(280): unsure at all Xaa locations
  Clone ID: PAT_MRT3847_56871C.1.pep
GKKNKGANKKRKMMRRRQKREKREEKKRXKKRGNKSQRKGRNNTQKKQKYKGXKRGAAKSTKKGTPKREHNRVEKIKGEKPEKKGGKKGKGKKTQKGTGKDKGDKKKGKTGKKRGGEKKGRNPARGKKLGGRKKRGGRVKRXEPKQRESRPKKNEKNRGGDGDRGGTRIRAKNNRHKQWGTKKGQGKKHKGDKKGVDKKLRGIFTRETTGREKKGGTRRNHNKKGLLKKKKIQDGRPGESRRETLQSGRPYYSIIVNNLKPFLFVCFFFFFVKKKKIFFC

SEQ ID NO: 237925 - protein, 97 aa, Glycine max
  unsure (1)..(97): unsure at all Xaa locations
  Clone ID: PAT_MRT3847_56872C.1.pep
NSAIVVLPTKQDRPNAMKTAETTDRLGSRTPRQGHWYIHSTCATSGGGLYXGLDWLSDHMANEAIRFCKLNARKVGFIGPLWSPVFTFSCRCQIFIT

SEQ ID NO: 237926 - protein, 68 aa, Glycine max
  Clone ID: PAT_MRT3847_56873C.1.pep
MNDWAPPFIAAALFWLLSPGMIFQLPGKNAPFEFMNMKTTVASMFVHTVIYGLFLMLFFVVLSIHLYI

SEQ ID NO: 237927 - protein, 63 aa, Glycine max
  Clone ID: PAT_MRT3847_56874C.1.pep
NNNPAIAILCKGENKNYRGFFFFGKRIIESLKILYIGLGRKKNMVFVSLGFLDRGGGFSYNPA

SEQ ID NO: 237928 - protein, 146 aa, Glycine max
  unsure (1)..(146): unsure at all Xaa locations
  Clone ID: PAT_MRT3847_56875C.1.pep
TKKDRGGKPXRTPTPKPPENKAPGEPHKGHPKKTKKKPKTAEATKKKNPTKAQNRGDARRGNPPPTPRPQSGEPNSQKKGKEGAQKTPAKEGRPAKPQRAKGGPAPPREATPRSKNPKAEKAQAPTRKEGAPKNSNGEPRAASPPK

SEQ ID NO: 237929 - protein, 239 aa, Glycine max
  unsure (1)..(239): unsure at all Xaa locations
  Clone ID: PAT_MRT3847_56876C.1.pep
HRINVLTSHFFFSLFSVFMNVERYTLPAPPNIIPEEEENIAIAMGAPLIPSFKSMLQQHPQQLDSYFNSSISSTTIPFVPNMDSFLSLDPFSPSFFNNSSSSSNMALDPGFDLGLDTGLHSSAPAPHLFSQAQMMGFEFSELEALAGPGNVNVPFADGAKAAALLRSPHFEPPQQQPTLYRKRRGTAAEIPGLEMVRRKGRKWQEERREGEEXXIADVGRSGFDYESDEQNESNGLKLS

SEQ ID NO: 237930 - protein, 123 aa, Glycine max
  Clone ID: PAT_MRT3847_56877C.1.pep
MAGCSQQRLVVMFLCLIGIVSATDLTSSAVSLADYELSTTFYLLKCPLGLFTINNLVTAAVRNESRMGASLLRLHFHDCFVQGCDASVLLKNTATFTGEQGAFPSANSLKGVRIIDNDRSKIE

SEQ ID NO: 237931 - protein, 105 aa, Glycine max
  Clone ID: PAT_MRT3847_56878C.1.pep
MGAGGQTGVPPADRKPWGDPLKGVPFYKPSCRLSRVEKVIPPHCLQRAEQRSFSYVAYDLTISLGLYYEATHYLHLPPSPFSLLDWPIYCADQGCILTGVWALAH

SEQ ID NO: 237932 - protein, 56 aa, Glycine max
  Clone ID: PAT_MRT3847_56879C.1.pep
LLVKVDSRPSQHSLRHFNRFIQTGLNELMESKGGKKKSSTSSIKSLDYEASPLIQY

SEQ ID NO: 237933 - protein, 217 aa, Glycine max
  unsure (1)..(217): unsure at all Xaa locations
  Clone ID: PAT_MRT3847_5687C.1.pep
MANIDIEGILKQQPDDGRVPKTKIVCTLGPASRSVEMTEKLLRAGMNVARFNFSHGTHDYHQETLNNLKTAMHNTGILCAVMLDTKGPEIRTGFLKDGKPIQLKEGQEITITTDYDIKGDQEMISMSYKKLPVHLKPGNTILCSDGTITLTVLSCDPDAGTVRCRGENTATLGERKNVNLPXXVVVDLPTLTEKDKEDILQWGXVPNKIDMIALLFV

SEQ ID NO: 237934 - protein, 527 aa, Glycine max
  unsure (1)..(527): unsure at all Xaa locations
  Clone ID: PAT_MRT3847_56880C.1.pep
MEKPSSSLSSSRRKSSTKVKASTDANTNLSMLNEDLLQNILARLPSLHFASAACVSKSWNSLCNRILTRPKLSSAISLNPSLPDAVNEVVHKVLSEPIRPHFAIANIGTGFNTAKTLCLMRKSLGLHIPVIFTVANMIMAWDAVTGEFEGASPISCCLHVYSTVYLAMSYTPPSVEDXAGHIYIFFSRCKFLISLGCLFILCRGHGSDYLLAYQIVYTSCDMKLVLEKLDHAMPMDMVIVGDERGSFDFVHKSGNDSRIICSKKGNIEAVALVFAQDRDRSLGTIRFHVALSNGVSTVGPRYKAASVKSNSADCSTWLTARREGQQENLDGQSILLDINNLLDNHIESPDLYIGVIKHRKLSTGAEKPMPRTCIAYHGVVGGDEEYLYVDGIGIKTGDIFQFYYSDPNTALASLTKVHDALKSIHLEKNSKSSKGDGDNATNVFGGIVFACYGRGESFFGRHNVDSSPFLENFPGVPVSGIFCGGEMVRPCTTVIGQCEGASPISCCLHVYSTVYLAMSYTPPSVED

SEQ ID NO: 237935 - protein, 163 aa, Glycine max
  Clone ID: PAT_MRT3847_56881C.1.pep
LNIVKLSTGAEKPMPRTCISYHGVVGGDEEYLYVDGIGIKTGDFFQFYYSDPNIALASLTKVQFNTLEGIMDLDNATNVFGGIIFACYSRGESFFGRQNVDSSPFLENFPGVPVSGIFCGGEMVRPCTTVIGQCEGASPISCCLHVYSTVYLAMSYTPPSVED

SEQ ID NO: 237936 - protein, 250 aa, Glycine max
  unsure (1)..(250): unsure at all Xaa locations
  Clone ID: PAT_MRT3847_56882C.1.pep
TRPAMEKPSSSSSSRRKSSTKVKASTDANTNLSMLNEDLLQNILARLPALHFASAACVSKSWNSLCNRILTRPKLSSAISLNPSLPDAVNEVVHKVLSEPIRPHFAIANIGTGFSTAKTLCLIRQSLGSNIPVIVTVASGIMGRDAVTDEFKEVKWGALFSGFGEESYTRFINEGLVLTVGYLPGLKVEAVPLRRPTKTQAIWVDNFIKDIKEYSASVSSSPFPVGIILFGEASSDMKXXLEKLDHAMPM

SEQ ID NO: 237937 - protein, 45 aa, Glycine max
  Clone ID: PAT_MRT3847_56883C.1.pep
QKIIILDRGTKLSAREQITLSGEGTSKWILRKFKRVSKKILTRAH

SEQ ID NO: 237938 - protein, 52 aa, Glycine max
  Clone ID: PAT_MRT3847_56884C.1.pep
NLAFSNLLGNTPWFAIVRTQQHTQYSLVVAYTACIPRKPFRLPNTHMRINWT

SEQ ID NO: 237939 - protein, 77 aa, Glycine max
  unsure (1)..(77): unsure at all Xaa locations
  Clone ID: PAT_MRT3847_56885C.1.pep
DKRLQSTLYRIGVNAIQTIKEVNISKNTIDIQFLNHKVRASSADNTXVVSGSPLANKLQDKLPSIIHQLGPDNLENL

SEQ ID NO: 237940 - protein, 144 aa, Glycine max
  Clone ID: PAT_MRT3847_56886C.1.pep
MLSMASAYVEYRCFVGGLAWATDDHALEKAFSHYGNIVESKIINDRETGRSRGFGFVTFASENSMKDAIEGMNGQNLDGRNITVNEAQSRGSRGGYGGRREGGYNRRGGGYGGGWLWGGDRDCGYGDGGSRYSRGGDVNGSRRN

SEQ ID NO: 237941 - protein, 213 aa, Glycine max
  unsure (1)..(213): unsure at all Xaa locations
  Clone ID: PAT_MRT3847_56887C.1.pep
MAQVKILEQSEVGPPPCSLPSTTLPLTFFDIPWFYCHPIQRIFFYDFPHPTHHFLQTALPILKHSLSLTLQHFFPFSSNLIVPPQQPHLSHIRYLDGDSLSFTVAESTADFTLLTSDSPQDVPNWHPLVPAFPTPRVDQDGARVFPLMAIQVTIFPKSGFTICLTFNHLASDGKSLHHFIKFWASLCXAXGNMAXLSTSXSLSSHERDKVKDP

SEQ ID NO: 237942 - protein, 152 aa, Glycine max
  Clone ID: PAT_MRT3847_56888C.1.pep
SLHFLPLGFIERTKGQGLVMCGWAPQVEVLGHKSIGAFLTHCGWNSVLESVVHGVPMMAWPLFAEQRTNAALVTDGLKVAVRPNVDTSGNSVVVKEEIVKLIKSLMEGLVGEEIRRRMKELQKFAECAVMKDGSSTRTICKLAHKWKSLGRP

SEQ ID NO: 237943 - protein, 111 aa, Glycine max
  Clone ID: PAT_MRT3847_56889C.1.pep
MAVAAARPIVSVQTLEGDATPTVPLPDVMKASIRPDIVNFVHSNISRNSRQPYAVSKRAGHQTSAESWGTGRAVSRIPRVPGGGTHRAGQGAFGNMCRPNLMNTNALTLKK

SEQ ID NO: 237944 - protein, 76 aa, Glycine max
  Clone ID: PAT_MRT3847_5688C.1.pep
RCMKQFRTCRKQLPLVGHCLSPSKLNWVCGQLFWSNYIKLYIYTHKNHNIKVLGVVISPISNGGKIDFSPLCQGKE

SEQ ID NO: 237945 - protein, 69 aa, Glycine max
  Clone ID: PAT_MRT3847_56890C.1.pep
GENHSNGYTTIDRRTHMQTNLDHPKKSFNVEEYTSDDSPVALDCYECDNLSLVWGKPVQLRIGSGEWIT

SEQ ID NO: 237946 - protein, 186 aa, Glycine max
  unsure (1)..(186): unsure at all Xaa locations
  Clone ID: PAT_MRT3847_56891C.1.pep
MADPTSSNPDKDQSSTEPKSEKKDYSTAILERKKSPNRLVVDEAINDENSVVTLHPETMEKLQFFRGDTVLIKGKKRRDTICVVLADEQCDEPKIRMNKVVRANLRVRLGDVVSVHQCPDVKYGKRVHILPIDDTIEGVTGNLFDAYLKPYFMESYRPVRKGDLFPCRXGMRSIEFKLIETDPGEY

SEQ ID NO: 237947 - protein, 107 aa, Glycine max
  unsure (1)..(107): unsure at all Xaa locations
  Clone ID: PAT_MRT3847_56892C.1.pep
KENSDGTVNKYKAKLVAKGFHQQYGTDYIETFSLVIKPITMRLLLTLAVTXTYHWPIQQLDVNNAFLNGILQEEVYMQQPPGFDSTTKSLVCKLHKAIYALKQAPRA

SEQ ID NO: 237948 - protein, 346 aa, Glycine max
  unsure (1)..(346): unsure at all Xaa locations
  Clone ID: PAT_MRT3847_56893C.1.pep
MHLLLSKSPLLLIHNSSMLLHRFSPLLLPPFLFRQPPFPSSNFKPLTLKVLSMASSHSSHHIHTNRLASEQSPYLLQHAHNPVDWYPWGEEAFAEARRRDAPIFLSIGYSTCHWCHVMEVESFEDEAVAKLLNDWFVSIKVDREERPDVDKVYMSYVQALYGGGGWPLSVFLSPDLKPLMGGTYFPPDDKYGRPGFKTILRKVKEAWDSKRDMLIKSGSYAIEQLSEAMSASSDSDKLPDGVPADALRLCSEQLSGSYDSKFGGFGSAPKFPRPVEINLMXLYHSKKLEDTGKLGGANGSQQMVFFSLQCMAKGGXHDHIGGGFHRYSVXECWHVPHNIRILPTIL

SEQ ID NO: 237949 - protein, 57 aa, Glycine max
  Clone ID: PAT_MRT3847_56894C.1.pep
TRKTLISTVLHHHHYFCLGLLVTRLKTLLLLLLINLDEYVVSVMKIEQGDDKKNEHF

SEQ ID NO: 237950 - protein, 76 aa, Glycine max
  Clone ID: PAT_MRT3847_56895C.1.pep
ATATSSAATATHPFTLRHSTRPTLTLLLVYKISYLHIPAQPSPVSSRSIRRHNSPTTSASSHTLFGPAHAHDTYPY

SEQ ID NO: 237951 - protein, 47 aa, Glycine max
  Clone ID: PAT_MRT3847_56896C.1.pep
LEQLMFEIGNKRAGLKLKPDFQKRDMAAKLTMKKASKFGGESDEKEI

SEQ ID NO: 237952 - protein, 94 aa, Glycine max
  Clone ID: PAT_MRT3847_56897C.1.pep
KNPRWQIMFLLRQWKFVFVFWCCIKNVQCRSARFFCASSTDVLFRPKLARSHLQCTSAKFFRASSTDVLFRPKLACSHLFGQENISPPRQKNIC

SEQ ID NO: 237953 - protein, 101 aa, Glycine max
  unsure (1)..(101): unsure at all Xaa locations
  Clone ID: PAT_MRT3847_56898C.1.pep
TRPTGCKRPPKGGGWDIINLNLSDAMVRAKAFDIHLHKQLRTYMESIVPLCGIYDPYFIAANXGDRSNNLIKGTWYEHEQQMINDIKEFKESTRVDMVEPM

SEQ ID NO: 237954 - protein, 67 aa, Glycine max
  unsure (1)..(67): unsure at all Xaa locations
  Clone ID: PAT_MRT3847_56899C.1.pep
MYGYNGLNIRNRGXDEPATSFKSHPGLQLMSFMPLKPLIVGLNVAVFAGSKWAFHHRDIVGMPHATY

SEQ ID NO: 237955 - protein, 44 aa, Glycine max
  Clone ID: PAT_MRT3847_5689C.1.pep
LVYLGCLSSDSLFPLIKLISCSSFRSVSVVSAAKFCRFSSAVGC

SEQ ID NO: 237956 - protein, 90 aa, Glycine max
  Clone ID: PAT_MRT3847_568C.1.pep
TSTKQKHAFFKSPHLKHCPFFHCHSDHRRLRGANIPLSDKDHDGDADRETPTTKCFSARRVAASLLAPMRPTKGVRLQQRRQNQTGDLEE

SEQ ID NO: 237957 - protein, 38 aa, Glycine max
  Clone ID: PAT_MRT3847_56900C.1.pep
RASATRHKSYTQRQRNYGLKCKLMEGILVADCMESRSA

SEQ ID NO: 237958 - protein, 88 aa, Glycine max
  Clone ID: PAT_MRT3847_56901C.1.pep
SLKLKHLNHFIHIHIQTHLRLKGYLYSVKLSKKLIEEKDPTVVFVTSKEATQRKRCDNGVCCSFVVFTLLYFISKKSKKRCFTLRKLL

SEQ ID NO: 237959 - protein, 66 aa, Glycine max
  Clone ID: PAT_MRT3847_56903C.1.pep
MKRGLIEDDDGGGDEDEVIKGQLKSLRRLIPGGEEMCSEQMVTELQSYVSCLQMQVNILQCLAETH

SEQ ID NO: 237960 - protein, 250 aa, Glycine max
  unsure (1)..(250): unsure at all Xaa locations
  Clone ID: PAT_MRT3847_56904C.1.pep
PRVRKIKTHLPRHLLFAFLFLAALPAYSPLVSPAPNDPPQGTCVLKFNTSQYVPFDECGDVNEEIDKWGDDGFPTTLCCRNALTVLSNALASQALNSGGQVFISQDQLQSCAQSFNPQQGVSLNSCGFQSLYLGSSKCSNLVLQDVRKLQQYQDALDKCSHFDHPFGESCADCTGAILSLRDGLHNQVANNNNNHTELAICEVAAIVAVAAGKPNDPVVDKVLRCLPPSASGSDKSSHXHHFYFLFFFKF

SEQ ID NO: 237961 - protein, 92 aa, Glycine max
  Clone ID: PAT_MRT3847_56905C.1.pep
ARVRLREDDIRGQHIATQRALSLFSLDSETLSFYAESPILAMLKANSDAKSADSTVKRKGAGANGSNRSQLSRILTSHSDLQALSTFPCPSS

SEQ ID NO: 237962 - protein, 75 aa, Glycine max
  Clone ID: PAT_MRT3847_56906C.1.pep
KHTVLEDLHDPKSFSILSSFCELMVPIGGASLTKNQTSTFLHIKYAKHYHSNALYAAALHSIILPFRMDPFGPTS

SEQ ID NO: 237963 - protein, 272 aa, Glycine max
  Clone ID: PAT_MRT3847_56907C.1.pep
MAEFGNNNNNGANTTSSRFSFFNRSLTTLRNEKPPQLDRSVTKLVESSRGGGGGGSVVKRLCSFFESAKSSSSEHQKLKPSKSIENSDPSVKSLDSPAKSIDSSPAIRLPGTEDRIVLYFTSLRGIRRTYEDCYAVRMIFRGFRVWVDERDISMDANYRKELMSVLFGENNNNNNKKKGHVALPQVFIRGRHVGGADVIKHMWEVGELEKVLEGLPRTKGGFVCESCGDVRFAPCGNCSGSRKVFDEDEEVLKRCLECNENGLIRCPNCCSS

SEQ ID NO: 237964 - protein, 66 aa, Glycine max
  Clone ID: PAT_MRT3847_56908C.1.pep
GELEKVLEGLPRTKGGFVCESCGDVRFVPCGNCSGSRKVFDEDEGVLKRCLECNENGLIRCPNCCS

SEQ ID NO: 237965 - protein, 100 aa, Glycine max
  unsure (1)..(100): unsure at all Xaa locations
  Clone ID: PAT_MRT3847_56909C.1.pep
SEEEDFADSKKLQRRLTTLPPPPPPXEDSTSFVTERSSCGGFSLRSVVRERLKKENLDDVVLAPLLLLFPNSAIDPVFFVTKRFKFSSFQASSWEFKTGK

SEQ ID NO: 237966 - protein, 164 aa, Glycine max
  Clone ID: PAT_MRT3847_5690C.1.pep
MDREGGSNGGSCYYSVLGIRRDASFSDIRTAYRKLAMRWHPDKWAQNPATAGEAKRRFQQIQEAYSAVLSDQSKRSMYDAGLYDPLEEEDQDFCDFMQEMISMMNNVKDEGDSLEDLQRMFVEMVGEDHGHGIGFDLNQDQTAGKRGRVNGSKGNAPKRSNSRS

SEQ ID NO: 237967 - protein, 38 aa, Glycine max
  Clone ID: PAT_MRT3847_56910C.1.pep
FIVSSLTLPQSNFNLQFHHLHYHNLILIYSFITYTTTI

SEQ ID NO: 237968 - protein, 51 aa, Glycine max
  Clone ID: PAT_MRT3847_56911C.1.pep
LQYYKTIYMYLTLYIFSPKNTFSIIYIGQRTLVELLLSIKDILVILHKKFK

SEQ ID NO: 237969 - protein, 131 aa, Glycine max
  unsure (1)..(131): unsure at all Xaa locations
  Clone ID: PAT_MRT3847_56912C.1.pep
MEGCNPHTKTSLTQMPLVTTKAGPRDGAGWTQRLKDEYMAWRACTRMHKCNDHERLRICRGNPRSTRXTAYCWHVHNLLKYEXHLQIDGRDTYRFTGPELELPQLDGPTPKKKRGGKICLTWHFTPVWAKH

SEQ ID NO: 237970 - protein, 30 aa, Glycine max
  Clone ID: PAT_MRT3847_56913C.1.pep
VFYYKESYQKEFINMERFKILVKREDKKHI

SEQ ID NO: 237971 - protein, 49 aa, Glycine max
  Clone ID: PAT_MRT3847_56914C.1.pep
LKNLEFLVMMLTKCFNCWIFIAGPNSSTSSSEMDFFMMVDCCTYLGYLA

SEQ ID NO: 237972 - protein, 61 aa, Glycine max
  Clone ID: PAT_MRT3847_56915C.1.pep
SHPTHLHCIKMFVPGLGEASPEAKATQNLHRRLNLCAMKIVAGQLESYNHQSYNALPIYLE

SEQ ID NO: 237973 - protein, 36 aa, Glycine max
  Clone ID: PAT_MRT3847_56916C.1.pep
IPLALSRFSEGGFYLARPGDRVQLMHVPRTRLIHIF

SEQ ID NO: 237974 - protein, 52 aa, Glycine max
  unsure (1)..(52): unsure at all Xaa locations
  Clone ID: PAT_MRT3847_56917C.1.pep
NFVSLCVVEXVDPVASXHXGFMHFLWTCTCHLELEKNVFVEPDLCMSVQTIF

SEQ ID NO: 237975 - protein, 153 aa, Glycine max
  Clone ID: PAT_MRT3847_56918C.1.pep
MGEESQGIKLFGALITLKGGEVKKGEKGSEYERVEKRAEKIIPCPRCKSMETKFCYFNNYNVNQPRHFCKSCQRYWTAGGALRNVAVGAGRRKAKSPCHGAGDFMDGRAYETSEDENRFEMNQGHVAMPNTHFRQIFQAKRQRITSGAQHQGQ

SEQ ID NO: 237976 - protein, 56 aa, Glycine max
  Clone ID: PAT_MRT3847_56919C.1.pep
VTRGPPPVAKRPFCIWLLLLEPHGLLTKGKSTKRYSINQVKKRSGRVGGRVGGRVG

SEQ ID NO: 237977 - protein, 187 aa, Glycine max
  unsure (1)..(187): unsure at all Xaa locations
  Clone ID: PAT_MRT3847_5691C.1.pep
SYPDFRYLDRRKRLIIAMDAAFGMEYLHSKNIVHFDLKCDNLLVNLKDPIRPICKVGDFGLSKIKRNTLVSGGVRGTLPWMAPELLNGSSNKVSEKVDVFSFGIVLWEILTGEEPYANMHYGAIIGGIVNNTLRPTIPDHCDSEWRTLMEQXWAPNPAARPSFTEIASRLRLMSAAASQTKTLKPTK

SEQ ID NO: 237978 - protein, 58 aa, Glycine max
  Clone ID: PAT_MRT3847_56920C.1.pep
TTSTATVMSFVEHSTLPQHCLHRFDFSHKTCWGPLGLSHSLSVLYQKRHPTTMSAQKW

SEQ ID NO: 237979 - protein, 71 aa, Glycine max
  Clone ID: PAT_MRT3847_56921C.1.pep
CTPAFENLISFTFYFYQVTLILFELSATCTSVQRLVLVEIHENTRYNWSQLIYESVSFEGFGGSIPFSSTK

SEQ ID NO: 237980 - protein, 193 aa, Glycine max
  Clone ID: PAT_MRT3847_56922C.1.pep
PRVRSLGFPLCFQRRPYIAAPIHFFTTLLCPEPIPSMQMAQLEPLMNKVDSSGRQVEMGLLGPVSSDVIVSQSQGTSNEHVGLLRAVPGEASNPGMHQILSANKHSMLMDILPNSSGPQQQPTTPKRKAPMELLSSSSFNKRVAQMGSRPWLQQVPNVSNKGSLQMQSPSHASRTQHLAASSKRKTQLDNTSQ

SEQ ID NO: 237981 - protein, 1143 aa, Glycine max
  Clone ID: PAT_MRT3847_56923C.1.pep
MSNNLVSEPIPSMQMAQLEPLMNKVDSSGRQIEMGLLGPVSSDIVAQSQGTSNEHVGLLRAVPGEPMSQGLPLLSMHSERVEVQASNPGMHQILSANKQSMQMGMLLKSSGPQQQTTTPKRKAPMELSSSISFNKRVAAMGNRPWLQQVPNASNKGSLQMQSPSNASRTQHLAASSKRKTQLDNTPSKSGTPRAMSSKSQNTQMKQSSKVQTESSDSVRSKMRESLAAALALVSQQGKPQPPNNNTPNDAANTRVKLENSSQCAGSAPASIDASLEQRQDISQSVNSSFAVADSVGHAAGEHMQSTTYEDFPEKYKDFEAGSTNASDNENILSSMHVLNCDKQDFQSSYTLTTDDVPFSDGFFMKDDLLQGNGLSWVLSDMVDVGNQRESQPNIEQRSEPEETGGGCREEVPLPELLASRIEAELFKLFQGVNKKYKEKGRSLLFNLKDRNNPELRERVMFGKIPPEQLCSMTAEELASKELSQWRIAKAEELAQMVVLPDSDGDFRRLVKKTHKGEFQVEVEHEDNVPVEEVSGGTTSVARSQTIKKDVEDASPSKPDVKTDAEKGNLQKDDTFSITISSNDGADPMQGLITDDALKDSDFLEPIVSLDDFMYSLTYAPPFENLPVESGKVVPTSDKDDSGVGTKSKPADLTPNEQADITGDNKSEKFQSTHVNSDSLKEKKVNAESGAISSDVGYSGSQADMKSTDGRTKERSTDDVKSASSDAELRGNLFRAEERYDNDNRYSKDAIPTKGECLWEGMLQPNISSTHSVISIFKSGEKTAAKDWPGFLEIKGRVRLDAFEKFLQDLRQSRSRAIMVSHFVSKESDDQSTLREVADSYILDERVGFAEPVPGVELYFCPPHKKTVEMLSNILPKEQIEPVNSIDNGLIGIIVWRKTNLTSSISPTTASHHKHSSKRQYFSRRQQDINVNANSTHKAVPSMGVKTTENDDDDVPPGFGPPAARVEDDLPEFNFSGSSNPSHLGQKSMGPPNMVPLHSANPAPPRPAEQMRELVHKYGQNKPNVPSVNWQDKFGGTIQPWNDDDDDIPEWQPQNSQNQFPPQQTMHNFHLRPHILNQSFPGSQQQPIMTPQYLQPPMNVTHGQRNFDPQWVPSPQGSNLQPGGGPPYAQGTTWPQDASRSRGY

SEQ ID NO: 237982 - protein, 231 aa, Glycine max
  unsure (1)..(231): unsure at all Xaa locations
  Clone ID: PAT_MRT3847_56924C.1.pep
MRSTCDEWKPFIVMIAIDFSFAAVNILLKKVLEEGMNHLVFITYRLSIATIFIAPICYFRERNDRPRLTFRILCYLFCSAIVGASVTQYFFLMGIQYTSATFSCAFINMVPVVTFMMALPFGLETVKIKCKSGRAKILGSLVCIGGALMLTLYKGKPLFNFSHYESVSPVANSSAVNLASTRTKGKWTIGVIALVLGTIFWSSWFIXQSKISKRYPCQYSSTAIMSFLWGH

SEQ ID NO: 237983 - protein, 43 aa, Glycine max
  Clone ID: PAT_MRT3847_56925C.1.pep
HSSDKLRNKDWYLALTTQHRVWAQIAPCQPHQRLNSVFYTKSR

SEQ ID NO: 237984 - protein, 43 aa, Glycine max
  Clone ID: PAT_MRT3847_56926C.1.pep
ACCDSSKGSFVSRFEGGIKRDSLFHGVIERWPEYWRFLFHQDL

SEQ ID NO: 237985 - protein, 165 aa, Glycine max
  unsure (1)..(165): unsure at all Xaa locations
  Clone ID: PAT_MRT3847_56927C.1.pep
QRKQLVKDNFDCFVSCKTTIDDIESKLRQIEDDPEGSGTSHLFNIIQDVSLQANRALKPLFERQAQAEKIRTVQGMLQRFRTLFNLPSTIRGSISKGEYDLAVREYKKAKSIVLPSHIQVGIXKRVLEEVEKVMNDFKTMXFKSMEDPQIDPTNLENTVRVLLDL

SEQ ID NO: 237986 - protein, 67 aa, Glycine max
  Clone ID: PAT_MRT3847_56928C.1.pep
KRKSQDFEEKNPNSFFFSLQGLRERSKTEGSMNQKMNIHIILGWHYCLWLNSFLYLWGLHKRMKEGI

SEQ ID NO: 237987 - protein, 131 aa, Glycine max
  unsure (1)..(131): unsure at all Xaa locations
  Clone ID: PAT_MRT3847_56929C.1.pep
VEEGLDYIKRIAVATFEGFPYVLSRINGEKGKRXFVSGDGDEMSLIPGTSDEEAFNKLIVALEKCEPALAGIEXPKDDKLPWGRILDKPKTRCLTILPMEFNLEVRQKSLNFQRCIMKKRYKLSCQVGINP

SEQ ID NO: 237988 - protein, 163 aa, Glycine max
  Clone ID: PAT_MRT3847_5692C.1.pep
MDREGGSNAGSCYYSVLGIRRDASFSDIRTAYRKLAMRWHPDKWALNPATAGEAKRRFQQIQEAYSVLSDQSKRSMYDAGLYDPLEEEDQDFCDFMQEMISMMNNVKDEGDSLEDLQRMFVDMVGGDHGHGIGVDLNQDRTAGKRGRVYGSKGNAPKRSNSRS

SEQ ID NO: 237989 - protein, 51 aa, Glycine max
  Clone ID: PAT_MRT3847_56930C.1.pep
SINNINNTSSCLLIYFSLFPSWFTFQHLIRDHPISLPIFFQGKVWMVCGKK

SEQ ID NO: 237990 - protein, 80 aa, Glycine max
  Clone ID: PAT_MRT3847_56931C.1.pep
SFPQLNPRLDQIDVLHVAVNEHAGVSTLTKALMLDHVPLPICLPLLKFTLMRYYHGVMVKLLIRYINIVTMQFSSAHACF

SEQ ID NO: 237991 - protein, 62 aa, Glycine max
  Clone ID: PAT_MRT3847_56932C.1.pep
GGRVFQVRRRHSFNTLISVRTQSDLPSRIKKRVGKGTLIATSDYSIPFRLLQHVINILSFGC

SEQ ID NO: 237992 - protein, 70 aa, Glycine max
  Clone ID: PAT_MRT3847_56933C.1.pep
IALALRSVDFWILFVSFLCGVGTGLAVMNNMGQIGLALGYPDISLFLSLTSIFGFFGRIISGTVSEFIIK

SEQ ID NO: 237993 - protein, 202 aa, Glycine max
  Clone ID: PAT_MRT3847_56934C.1.pep
MSNTSNNVAGVDNTFRRKFDREEYLERARERERQEEEGRAKPKAKGPPVQRKPLKHRDYEVDLESRLGKTQVVTPVAPLSQQAGYYCSVCECVVKDSANYLDHINGKKHQRALGMSMRVERASLQQVQERFEVLKKRKDVGSFTEQDLDERILKQQQEEEERKRLRREKKKEKKEKAVEEPEIDPDVAAMMGFGGFRSSNKK

SEQ ID NO: 237994 - protein, 69 aa, Glycine max
  Clone ID: PAT_MRT3847_56935C.1.pep
LKLFFDKHPILLGSCLFKAKIIGWGKFKKGLLRYLMFFPRIFFFPFKKLNQVGGVFKKKKKKKKKKKKR

SEQ ID NO: 237995 - protein, 349 aa, Glycine max
  Clone ID: PAT_MRT3847_56936C.1.pep
MADRFFPNELPRFVAETTDQTPSPDSLTALLSLPYQTLSTKFQASAFHLKQSVVRDTWGSRGKRVKDYSLYTGALGTAYLLFKAYQVTKDGNELNLCSEIVKACDSASADSGKVTFICGRAGVCALGAVIAKHTGDERLLDYYLRQFKEIAIPRESPYELLYGRAGYLWACSFLNKHIGNNTIPTTHMRSIVDEVIMAGRHLGRKGRCPLMYEWHGKKYWGAAHGLAGIMHALMDMELKPDEVEDVKGMLRYVINNRFPWGNYPSSEGSENDRLVHCCHGAPGLTLTLVKATEKLYYRQFSWYLSNSFLKQLYFPQKSYIPFTPGHKHETKFYFWFSCVLNSRNYAIIF

SEQ ID NO: 237996 - protein, 184 aa, Glycine max
  unsure (1)..(184): unsure at all Xaa locations
  Clone ID: PAT_MRT3847_56937C.1.pep
MAKSSKRSVGTSSTDSKKKKKNKRSKKFGPEGVAMKVKANNNNNGTASNPFESIWSRRKFEVLGQKRKGEARRMGLARSLAIQKRNDTLLKEYHQSAKSSLFVDKRIGEKDEALDDFGKAILRSQRERQLNMKLSKKSKFHLSDGEEDDFEGIDSLGRDDFEDEMXPDDVDAETDEKNLVQRNM

SEQ ID NO: 237997 - protein, 94 aa, Glycine max
  Clone ID: PAT_MRT3847_56938C.1.pep
MDQNTAEDKMDVTKDTKGGTIMNLDQWADVELKLITEARVDEVNPIPVNGMNAGENTVVLTPNTALEATRSSNTCDLRSAMTSKKTMCYANCMR

SEQ ID NO: 237998 - protein, 141 aa, Glycine max
  unsure (1)..(141): unsure at all Xaa locations
  Clone ID: PAT_MRT3847_56939C.1.pep
DVKTVGKYLLDLPASIYMRNSPSSAPDSGYRAASAASPLYHGMGIYDMRASPPXFEDLCSNLHEIPRHMXIIKEYGQAIHDLASHVSQKMDESLGIPHNDFKDWAFILTTIKFTLTPDVICSMAAQLHSHTGIITLLRDDE

SEQ ID NO: 237999 - protein, 69 aa, Glycine max
  Clone ID: PAT_MRT3847_5693C.1.pep
TAIAVVVYECAFCTGLGVMPNIMCAEMLQTRARGACVCMTTLTYGGRTQIATWVLPYLLQLLSLTGGSG

SEQ ID NO: 238000 - protein, 67 aa, Glycine max
  Clone ID: PAT_MRT3847_56940C.1.pep
SEEYPHIYRGQHYGHRSLRKFLLLSSAEFLPKEFLVIVEFTILSAWVVCQHSYVKLRMSVAPWYISE

SEQ ID NO: 238001 - protein, 54 aa, Glycine max
  Clone ID: PAT_MRT3847_56941C.1.pep
AQAVYSASYKLWLKVQVPKFLENKLLQKIKNVDLKILLDKSCPKRSSLFNSFMN

SEQ ID NO: 238002 - protein, 79 aa, Glycine max
  Clone ID: PAT_MRT3847_56942C.1.pep
HPITTLSLIILVYYTSLFILYIILLSYIHYYYIYIFILYFISSYTIQLSHILLSKNIDYSYSSSLLLSKRHLQNILITH

SEQ ID NO: 238003 - protein, 135 aa, Glycine max
  unsure (1)..(135): unsure at all Xaa locations
  Clone ID: PAT_MRT3847_56943C.1.pep
KIKFIKKKKIKERKKKKKKKKKEKKKLRGLGKKKKKGKKKKRGKKEKKPKEEKKKRGEKKKRGNEKKRQNEKKRLEQKKNKELXKKKGKGGKKKKKPAGPLKREEGKIWKKGKIKKKGKGKKNREGETKRDEGPG

SEQ ID NO: 238004 - protein, 137 aa, Glycine max
  Clone ID: PAT_MRT3847_56944C.1.pep
MGVVVIDGSTVRDFVNDETAFTKSVDEQFSALDLNNDGVLSRSELRTAFESMRLIETHFGIDVSTPPEQLAKLYDSIFDKFDGDRSGAVDRREFRDEMRKIMLAIADGLGSFPIRMVLEDDPNSLLQKAADLEASKT

SEQ ID NO: 238005 - protein, 53 aa, Glycine max
  Clone ID: PAT_MRT3847_56945C.1.pep
ISESYFKGNDLGRPSYTDGSQMFYVHTGNGMMSLILLMGTSTYQEPTECLLPR

SEQ ID NO: 238006 - protein, 319 aa, Glycine max
  unsure (1)..(319): unsure at all Xaa locations
  Clone ID: PAT_MRT3847_56946C.1.pep
GSRADAKSNPNAQLLEELEALSESLYKQHTSTTTRRTASLVLPRTSAPPIEDAKDDDGSSNKARRRMSMSPWRSRPKNDDATAKAETKKLDGTSTISSGDSDRKGIWKWKPIRALSHIGMQKLSCLFSVEVVAAQGLPSSMNGLRLSVCVRKKETKDGAVKTMPSRVSQGAADFEETLFIRCHVYHTFNQGTAKQIKFEPRPFWIYLFAVDAKELDFGRSSVDLTELIRESIEKNQQGTRVRQWDTSFGLSGKAKGGELXLKLGFQIMEKDGGVDIYNNQVENSKSSSGKLSSFSSSXARKQSKTSFSMSSPRMTSRND

SEQ ID NO: 238007 - protein, 47 aa, Glycine max
  Clone ID: PAT_MRT3847_56947C.1.pep
QKEGRGGEMGKPIKTLKANMQCIKVSNFAKSNLNYLRFYWDHNSELL

SEQ ID NO: 238008 - protein, 164 aa, Glycine max
  unsure (1)..(164): unsure at all Xaa locations
  Clone ID: PAT_MRT3847_56948C.1.pep
MEEPLEIPIINDLTMILGSISQSKAAGVVVDFTDPSSVYDNVKQGVLVAPTLSIGSILLQQAAISASFHYSNVEIVESRANANDLPSADANQIANNLSNLGQIYNREDPSTDVLARGQVLGDGIRVHSMVLPGIPSSTTVHFSGPGEVYSIKHDITDVKXLMPG

SEQ ID NO: 238009 - protein, 156 aa, Glycine max
  Clone ID: PAT_MRT3847_56949C.1.pep
ACHSSACFMYFPHVGSQDMKDGFYEKLESELQGSRNTYYVGGLMAFELTERNSSYAMALICKNFAYRNDFPIFPYTKNLFPLQALCQKKNRRELGELPEVQFPNLPTLNSYLTHWGTHPITQNRALYTWINEEGTPVCQRTYGELYFNSSCIAHKL

SEQ ID NO: 238010 - protein, 79 aa, Glycine max
  Clone ID: PAT_MRT3847_5694C.1.pep
GIPGSTTRPTECVSLHPGNRAHTYTFRFDFAGWFLRFVWFPITVISWNPHNHVVPPFNTHVLGDAEKYRSDLLSNAIEA

SEQ ID NO: 238011 - protein, 309 aa, Glycine max
  unsure (1)..(309): unsure at all Xaa locations
  Clone ID: PAT_MRT3847_56950C.1.pep
MASLSCQFHSTNLLNSKNVNRRRKRFIFCSAQPTQNNIKVVINGATKEIGRAAVVAVTKARGMEVAGAVDTCHVGEDIGKICGMEEPLEIPIINDLTMILGSISQSKAAGVVVDFTDPSSVYDNVKQATAFGMKSVVYVPQIKLDTVAALSAFCDKASMVSMGXLVAPTLSIGSILSQLAMILTVFHATSFHYSNVEIVESRANANDLPSADANQIANNLSNLGQIYNREDPSTDVLARGQVLGDGIRVHSMVLPGLPSSTTVHFSGPGEVYSIKHDITDVKCLMPGLLLAIRKVVRLKNLVYGLEKFI

SEQ ID NO: 238012 - protein, 82 aa, Glycine max
  unsure (1)..(82): unsure at all Xaa locations
  Clone ID: PAT_MRT3847_56951C.1.pep
VRDLRAAVSNLYTSCKGMLDLDADWIDSDSFXLTYVREVEELGQRKVDELCPGGKNLVVNSENRDKNVDPFIQERFITFIFE

SEQ ID NO: 238013 - protein, 133 aa, Glycine max
  unsure (1)..(133): unsure at all Xaa locations
  Clone ID: PAT_MRT3847_56952C.1.pep
GCEKTTEGDLSLSQLFFIGSVPLTESRTRLDSYGLRSPPSHTQPAPPPDPTMSRASSAASGEIMLFGVRVVVDSMRKSVSMNNLSQYEHPLDATTTNNNKDAVAAGYAXADDAAPQNSGRHRERERKRGVPWT

SEQ ID NO: 238014 - protein, 93 aa, Glycine max
  Clone ID: PAT_MRT3847_56953C.1.pep
DLKFSQTLCEPIFASVGKIVSQIGEALILTLAQIIETVLFLSSLTEYVYSQSSVSAKEFPIFCCSLISRPFFMVNYCSTEDTGCSTSKCTHSL

SEQ ID NO: 238015 - protein, 62 aa, Glycine max
  unsure (1)..(62): unsure at all Xaa locations
  Clone ID: PAT_MRT3847_56954C.1.pep
GLVLGSFLSASRPIVCTLGHVSLFKELSSCASERVCSIXSAQRRAAFTVKXLLFFXRVRPKV

SEQ ID NO: 238016 - protein, 119 aa, Glycine max
  Clone ID: PAT_MRT3847_56955C.1.pep
PLGKVSPNFYSSPSPLRIEREPESSFKKKVFLPFLSKKRPPPQEQHGKFIFPPVSIKKLPHPGGKKFGAPNPPKVFSPKNGEINDFSVLKNGVLLFFFCSESENLGSYSSQIPVTVWKI

SEQ ID NO: 238017 - protein, 97 aa, Glycine max
  Clone ID: PAT_MRT3847_56956C.1.pep
ALASLVTCTPISTSVASLAVLAAIPPSYALCTTWTLHYTQGACVTCWGCCFSPVACVSSVYGVSACATMCCFGLTIASVSATYPMSLCCFLSAVVIG

SEQ ID NO: 238018 - protein, 50 aa, Glycine max
  unsure (1)..(50): unsure at all Xaa locations
  Clone ID: PAT_MRT3847_56957C.1.pep
XXFKXIXXEKLSLSLVLMWLLMVCQYILFLFLMKNISNIKIINIKNIIKK

SEQ ID NO: 238019 - protein, 149 aa, Glycine max
  Clone ID: PAT_MRT3847_56958C.1.pep
PTRPYGCEKTTEGDRIIQTIGHAIETQDNNDVLAYWLSNASTLLLLLQRTLKASGAAGMAPQRHRSSATLFGRMTQSFRGAPAGVNVSLINGNTSRGVDTLRQVEAKYPALLFKQQLTAYVEKIYGMIRDNLKKEISPLLGLCIQAPRT

SEQ ID NO: 238020 - protein, 62 aa, Glycine max
  Clone ID: PAT_MRT3847_56959C.1.pep
MSLLYCRFVSNHILIIIPRSAPMPFLERVKFVFLLWELQNQSFKKRRKSTFTWLMTREKHNL

SEQ ID NO: 238021 - protein, 54 aa, Glycine max
  Clone ID: PAT_MRT3847_5695C.1.pep
MRKPSCDIKKLNKGAWSKQEDQKLVDYIKKHGEVCWRTLPQAVRIYEFFFINKY

SEQ ID NO: 238022 - protein, 84 aa, Glycine max
  Clone ID: PAT_MRT3847_56960C.1.pep
VIPNCPWVSSKMASVFYLTHAFALKCLATEASCSSNITPLWINDPTTSNLYFQCSLYPFLDWTGQYLLLSHYHCTTFLELIQGY

SEQ ID NO: 238023 - protein, 66 aa, Glycine max
  Clone ID: PAT_MRT3847_56961C.1.pep
VLCITAELCTYVKNKIKCCCCKKKKKKKKKKKKKKKKKPKKKKKKKKKKKKKKKKKKKKKKKGPPF

SEQ ID NO: 238024 - protein, 91 aa, Glycine max
  unsure (1)..(91): unsure at all Xaa locations
  Clone ID: PAT_MRT3847_56962C.1.pep
THAKPGSPPSESHSDXVTPCSMHRQCKQQLATWHVNRGNKSFLRAXIPTWYTPPTEEATTKNPFKLLGMVGPMGWALFFSGWFAWTCDGYV

SEQ ID NO: 238025 - protein, 35 aa, Glycine max
  Clone ID: PAT_MRT3847_56963C.1.pep
NVNPAGPGPVFNTVSLRHLTWGAPYFLYLRSFYIL

SEQ ID NO: 238026 - protein, 95 aa, Glycine max
  Clone ID: PAT_MRT3847_56964C.1.pep
AKTLLISLFHTMSQGSASDDTTEPSPESDSRKEQTTVSTTTTVVYRCRRCWCSYRPHSESPLPRLRYSRGGAPTLGVAAGEAEGRHDGAPTRGVV

SEQ ID NO: 238027 - protein, 50 aa, Glycine max
  Clone ID: PAT_MRT3847_56965C.1.pep
QLRNSCLFHYTPKIAFFTLRPNKVCTRPAYSVFSMILHILSVTILYPLGL

SEQ ID NO: 238028 - protein, 55 aa, Glycine max
  Clone ID: PAT_MRT3847_56966C.1.pep
MRYWMAQPGRTKPNLFQHHSSNRNTIQTFKTHKLKNNLKLLLHKNKTNWSKTMKW

SEQ ID NO: 238029 - protein, 69 aa, Glycine max
  Clone ID: PAT_MRT3847_56967C.1.pep
SIYQSLFIRICDIFQLTELQLFIILCPRVRQGMQRFFQRMPVSLTPIFSIMGYCHRSLPYPPPLTLKVV

SEQ ID NO: 238030 - protein, 105 aa, Glycine max
  Clone ID: PAT_MRT3847_56968C.1.pep
SMKIFEKEKKGETFFFFFLNEMEALNERSLARMVSHRVLQMGISFPCQICVVGFLCEVCLASFILAALTSFGTLQLDRFSFSTMSMLNLSWNSDLNTTSTGILNP

SEQ ID NO: 238031 - protein, 105 aa, Glycine max
  unsure (1)..(105): unsure at all Xaa locations
  Clone ID: PAT_MRT3847_56969C.1.pep
ETLNPYQSERSLLSPTALAGXMTMLQASLDMKAIVLGKYHYGVYXLGXGRHRRMXLTRGESXKPLAGPXXAGQAXNXVGQRRWPKNNAGCEXNAAGGARPAGDQG

SEQ ID NO: 238032 - protein, 62 aa, Glycine max
  Clone ID: PAT_MRT3847_5696C.1.pep
ATFRRLLKRLGPHNISLKNGMAMVFKTNAGSPNFRNLFNDFSRTLKHLERWAAVSLVGLKFG

SEQ ID NO: 238033 - protein, 79 aa, Glycine max
  Clone ID: PAT_MRT3847_56970C.1.pep
MIPCVSGSSTTPLMTLILYFFTYFLLNCTHAFSHAPPAIVHGLSWDLYKTSSPMLEMILNNHLHNVFKKDNGQAPGLLM

SEQ ID NO: 238034 - protein, 222 aa, Glycine max
  Clone ID: PAT_MRT3847_56971C.1.pep
KNRSKLDECSYAETSDRPGTSSVLTERPFLLNSFGTSTLGSLGLNCSGSIDAHQKEDDQGSSKRGKLPVLLDGSSNDVRHNPINVGNGESTSSGLLSNPTRPDLLHSKGEEVGGSSTLKDKLPHWLREAVSSPAKLPDPELPPTVSAIAQSVRLLYGEDKPTIPPFVIPGPPPSLPKDPRSCVKKKKKRRSQRISRREIPSVESCLYFLIDHHVDSVIIGSL

SEQ ID NO: 238035 - protein, 62 aa, Glycine max
  Clone ID: PAT_MRT3847_56972C.1.pep
REGIEYDSENPLRGNKGHPFMMIFGFMHLIGEAKLSYQTEPGPHETKKNIHLTLHCIAIILG

SEQ ID NO: 238036 - protein, 37 aa, Glycine max
  Clone ID: PAT_MRT3847_56973C.1.pep
IASPAYLLTYEIHENNSIVLADNIYDTMQHGYHGTNI

SEQ ID NO: 238037 - protein, 79 aa, Glycine max
  Clone ID: PAT_MRT3847_56974C.1.pep
PPGKEFGIPILISRAGRDKGVQTPRAFYLAIFGTRGRCPPPPEEIARAKGGGGGKKRKERSLLLGDTSFPQKLAQKRPP

SEQ ID NO: 238038 - protein, 87 aa, Glycine max
  Clone ID: PAT_MRT3847_56975C.1.pep
KSFTRQQPKLKIEILIQGGPASFWGIMPTSRGSVLIRGATKITTKIPGGEGIIGFLLDTTSTLNFNLTLGSSTRPGKAPPIYYVWNF

SEQ ID NO: 238039 - protein, 237 aa, Glycine max
  Clone ID: PAT_MRT3847_56976C.1.pep
SYGTIFVSPCASQCLNLILEEFSKVDWISRCILQAQTISKLIYNNASLLDLTKKYTGGQELIRTGITKSVSTFLSLQSMLKLRTRLKNMFHSHEYASNTSYANKPQSLSCITIAEDGDFWRTVEECVAISEPFLKVLREISEGKPTVGSIYELMTRAKESIRTYYIMDENKCKKFLDIVDKKWRDQLHSPLHAAAAFLNPSIQYNPEIKFISSIKEDFFNVLEKLLPVPDMRRDITN

SEQ ID NO: 238040 - protein, 251 aa, Glycine max
  Clone ID: PAT_MRT3847_56977C.1.pep
TGWNQRKMNVVKQLYILQERINKEGADSAVQKLLSLLTSLKNLEKQECYLKSNRDAKHSELQDDISELERKITNDSDNENLPDELHHSFGELVEKVNLMKKQLAARLRDIVVLRRQIDDLPCQSEVIQYERRLSELYAQTQGKHRQTRKYYATYNALLEIKELMLKETSLLNSIISQFQEAFSSTDGRIKLVHSMEGIVKGSQQKLERVHVGLQEEERIRNDLKDRYAAATGEHKHCYSLLKAFQAQCAKN

SEQ ID NO: 238041 - protein, 89 aa, Glycine max
  Clone ID: PAT_MRT3847_56978C.1.pep
MLRLWKWYQNCLAVHPVKTQVISSGLIWGAGDIAAQAVTHYTAKKRVTFDADDTKEFKINWRRVSTTSLFGLGFVGPVGHFWYESLDRL

SEQ ID NO: 238042 - protein, 63 aa, Glycine max
  Clone ID: PAT_MRT3847_56979C.1.pep
REAGSVKMIPPKPMVVWSFSQDPPLGRFTVTYMRPNVTVEVIKIVQKKDPAGSQVPQAAHNKK

SEQ ID NO: 238043 - protein, 72 aa, Glycine max
  unsure (1)..(72): unsure at all Xaa locations
  Clone ID: PAT_MRT3847_5697C.1.pep
MASKRIVKELKDLQKDPPTSCSAGPVAEDMFHWQATIMGPPDSPYTXXVTQVSIHFPPDYPFKPPKAISYPS

SEQ ID NO: 238044 - protein, 170 aa, Glycine max
  unsure (1)..(170): unsure at all Xaa locations
  Clone ID: PAT_MRT3847_56980C.1.pep
ILLFFFALLFFQDITMKVISFSQQGPRAICILSASGVISNVTLRQPDSSGGTLTYEGRFEILSLSGSFMPTDNQGTRSRSGGMSVSLSSPDGRIVGGGVAGLLVAAGPVQVNXLSQLSCLCDHDCRLVQVVLRSFLPINQQDQKPKKPKSDYAPANVTPSITVSSAPPPY

SEQ ID NO: 238045 - protein, 124 aa, Glycine max
  unsure (1)..(124): unsure at all Xaa locations
  Clone ID: PAT_MRT3847_56981C.1.pep
GPAGSARPTCFWTRGTRDDGETPTGVVVPLNRYQTQTALANKTVAGTIXRWEPMAKGKADGSLCGRDALRITHCINGMIXAEHSAGISETTGLXXACAVNSSVRGRSQXDSYTICCQECALWYP

SEQ ID NO: 238046 - protein, 76 aa, Glycine max
  Clone ID: PAT_MRT3847_56982C.1.pep
KGNVPQSKMMKENVPPDDLSTKSIGELKRMLIQLTLNNKSKSKTNDVKDVENKRTALQVLPQNQMKASEAQILMAE

SEQ ID NO: 238047 - protein, 54 aa, Glycine max
  Clone ID: PAT_MRT3847_56983C.1.pep
EGRGQAIYYDAHIVEIKKRMHDIRGFRCLLLIRYDHDNSEERVRLRRLCRRPRS

SEQ ID NO: 238048 - protein, 70 aa, Glycine max
  unsure (1)..(70): unsure at all Xaa locations
  Clone ID: PAT_MRT3847_56984C.1.pep
LLPMAXXXDRHCXFXPXCLGXPSXCXXVVITAMXXXXTTXGXTXXXXLXMAPRAEFGSSSSXXPXXRTRX

SEQ ID NO: 238049 - protein, 66 aa, Glycine max
  unsure (1)..(66): unsure at all Xaa locations
  Clone ID: PAT_MRT3847_56985C.1.pep
EVKTDEANIXWVVHTSSLTTFIHILILGSTNQGKKCIVMIGFPSKYSFAGTICCTFLLCKAQGETA

SEQ ID NO: 238050 - protein, 147 aa, Glycine max
  Clone ID: PAT_MRT3847_56986C.1.pep
MAEESQGIKLFGAMITLNRGEVNKGEKGSEYERVEKRAEKIIPCPRCKSMETKFCYFNNYNVNQPRHFCKSCQRYWTAGGALRNVAVGAGRRKVKSPCHGAGVYESTSEDENKFEMGQGHVAMPNTGFRQIFQAKRQRITSAQHQGQ

SEQ ID NO: 238051 - protein, 97 aa, Glycine max
  Clone ID: PAT_MRT3847_56987C.1.pep
QTESSSFFLPKIYLFLFPIQNLIFVRVRALVFIRFGDPFAAHDRNQRVVVSGERSAIKFSYPCSGGVFSLRIAFTCFNPGYLILSLNLIFPCAYCML

SEQ ID NO: 238052 - protein, 464 aa, Glycine max
  Clone ID: PAT_MRT3847_56988C.1.pep
MMKSSDAANEKLLENGTSSSQIKKGGLRTMPFIIVNECLEKVASYGIMPNMILYLRDDYLMPIAKGTSVIYTWTAASDVLSLFGAFLSDSYLGRFLVIAIGSFSSLLEHEMELLRLHQNEENDKKKKGIALKASSSIQEESDQDNDADDDDDLSFFVKRFNKFLKVRGNQRRPNFKSKRRTKNSSSTLKCFECNQPGHLRVDCPIFKKKMEKSEKKNHSEKKLKKAYITWDENDLESSDDSENEEINLCLMAKSYESDEEVTSSNNLSISFDELQDAFADLHKESIKLAKLVSSSKKTISNLENEISKLNKELDLLRNEVSISKTNEKVNISTISDKKISDSCSCCDKYVKEIKELKNSLAKFSYSKNNLDVILSKQRYVSNKNGLGYKSEKQQKFHKNFSTSTQKCNSNSITCFYCGRRGHGISTCYFKKNYSNIKMIWVPKGSSVYTNMQGPNKVWVPKSKT

SEQ ID NO: 238053 - protein, 281 aa, Glycine max
  unsure (1)..(281): unsure at all Xaa locations
  Clone ID: PAT_MRT3847_56989C.1.pep
SFAKMRGINVMGEVDVPGHAXSWRPGYPDLWPSPYCREPLDVSKNFTFDVISGILADMRKLFPFELFHLGGDEVNTDCWSSTSHVKEWLQSHNMTTRDAYQYFVLKAQEMAVSKNWSPVNWEETFNTFPSKLHPKTIVHNWLGPGVCPKVVAKGFRCIYSNQGVWYLDHLDVPWDEVYTAEPLQGIHTASEQELVIGGEVCMWGETADTSNVQQTIWPRAAAAAERLWSQRDSTSQNITLIALPRLQNFRCLLNRRGVPAAPVTNYYARRAPVGPGSCYDQ

SEQ ID NO: 238054 - protein, 40 aa, Glycine max
  Clone ID: PAT_MRT3847_5698C.1.pep
YVVIMEICLSCLIYLHCRFFDFIALEFSYIMTPPSVVFSQ

SEQ ID NO: 238055 - protein, 60 aa, Glycine max
  Clone ID: PAT_MRT3847_56990C.1.pep
FLCITLKWFALCTQYYVVRATTMICTWLAPPTQINNLIDNIKIKNNKHLSQSKIRTQKTT

SEQ ID NO: 238056 - protein, 96 aa, Glycine max
  Clone ID: PAT_MRT3847_56991C.1.pep
HASEDDNRGWFEFLIDWSNGGWGSNYCSETVFAPSPTHKMYCCGGNCYYPSSYNVNYFLFQLQHIHTHGGSLAYSVSLSFFLIYWTELELGFIWLD

SEQ ID NO: 238057 - protein, 349 aa, Glycine max
  unsure (1)..(349): unsure at all Xaa locations
  Clone ID: PAT_MRT3847_56992C.1.pep
ANNLSGQLSEQLSKLSNLKTLVVSGNRFSGEFPNVFGNLLQLEELEAHANSFFGPLPSTLALCSKLRVLNLRNNSLSGQIGLNFTGLSNLQTLDLATNHFFGPLPTSLSNCRKLKVLSLARNGLNGSVPESYANLTSLLFVSFSKARVQNLSVAVSVLQQCKNLTTLVLTKNFRGEVISESVTVEFESLMILALGNCGLKGHIPSWLSNCRKLAVLDLSWNHLNGSVPSWIGQMDSLFYLDFSNNSLTGEIPKGLAELKGLMCANCNRENLAAFAFIPLFVKRNTSVSGLQYNQASSFPPSILLSNNILSGNIWPEIGQLKALHVLDLSRNNIXGTIPSTISEMENXES

SEQ ID NO: 238058 - protein, 67 aa, Glycine max
  Clone ID: PAT_MRT3847_56993C.1.pep
SIKGTCALKIPHKASPRIVTSKRGYCLHWTNDMIENDGLMQYRTHATGKTCYTRIIFNHANWSAAHH

SEQ ID NO: 238059 - protein, 149 aa, Glycine max
  unsure (1)..(149): unsure at all Xaa locations
  Clone ID: PAT_MRT3847_56994C.1.pep
MPHAPLDHCSSVSMEPLVLQALITAFLDRVNADRTQRVVLVTSGGTRVKLEKNAVRAIENFSMGTRGAVSAEYFLRQGYNVIFFYRDESLKPFSRKYSHIFEHLETTDDGHVKVVGFPGLVDDLADFKRYADRLLFVPFTDVXQYLHDL

SEQ ID NO: 238060 - protein, 91 aa, Glycine max
  unsure (1)..(91): unsure at all Xaa locations
  Clone ID: PAT_MRT3847_56995C.1.pep
GPRNQYNPSTQPNNTHPKASPKXAXXAAVLCMVVVSAPMAHATITCGQVTSSLANCIRYLQKGGTPSSGCCNGVKSLNAAAKTTADRQTAC

SEQ ID NO: 238061 - protein, 149 aa, Glycine max
  unsure (1)..(149): unsure at all Xaa locations
  Clone ID: PAT_MRT3847_56996C.1.pep
SSLANTFVNKPKATYYDKASLLLWTQRLILALYQQKLEAVIEAENQAARDSIHAKKKDRPLLALTEEXTPEDLLKQVDARIINADHQLADLELASKQKAAFDSLKAGNDAMNAIQSEMNIEYVHTLMDDTAEATAYQHEPNEIMAEKLS

SEQ ID NO: 238062 - protein, 100 aa, Glycine max
  Clone ID: PAT_MRT3847_56997C.1.pep
ERGATPPLTNFFHPFFPGHPSQSKKKKTHSNRPGAIPRKYAPAPWGNPSFPKGAAIKPDSKKGTATARRENVLGSKRHPLTMPDSKKEKPGAPKTGPTPQ

SEQ ID NO: 238063 - protein, 113 aa, Glycine max
  Clone ID: PAT_MRT3847_56998C.1.pep
VFRPPSRRQGHRCRCPAWANCPRVPIAHNTTDTDPTHTGMLGCLETPPAGSGPVTVTPLPQRSSYIQEHLREPYVDLPSPYGPERDLRPALLAQCSPRRHQKSMAVSPHGETA

SEQ ID NO: 238064 - protein, 46 aa, Glycine max
  Clone ID: PAT_MRT3847_56999C.1.pep
LSVLFLPHLFLVNLTPLGHSLESSLFSSSTTLPYSVQNWSSIPPYQ

SEQ ID NO: 238065 - protein, 79 aa, Glycine max
  unsure (1)..(79): unsure at all Xaa locations
  Clone ID: PAT_MRT3847_5699C.1.pep
KRNGLHFPVGNGKVIDVDLPIQIKLAVVDWIPGLKGAPXQGHEKPATLDTGAVVNVPLFVNVGDEILVDSRTGQYMSRA

SEQ ID NO: 238066 - protein, 112 aa, Glycine max
  unsure (1)..(112): unsure at all Xaa locations
  Clone ID: PAT_MRT3847_569C.1.pep
HGAICSFGRVDGVEHLSGSVXRQAHTDGVPXTAVDNKMDSLEATVYLHRYITVPHLVVXPHVIQSPFGPGDHIKPVIPPDGNKSIVLAGQIPAAPFDGADKLYVFRSCIRRQ

SEQ ID NO: 238067 - protein, 83 aa, Glycine max
  Clone ID: PAT_MRT3847_56C.1.pep
IKKKKKKKKKKKKKKKGKNNGNPKKPSYPAIVGGPLMWTLFDLYFPGCHHAFSSSPIMTVPALVLENRFLDHPLGWMKRLNPA

SEQ ID NO: 238068 - protein, 86 aa, Glycine max
  Clone ID: PAT_MRT3847_57000C.1.pep
TKSRVLQQVYNNSKTSFPYTKKTTKKSLWLLTGNQHRFPNPIYSYFQFLPEQKNIKSQLNPSTYGLTKLLFFQNNLKKTFWHRIQA

SEQ ID NO: 238069 - protein, 147 aa, Glycine max
  Clone ID: PAT_MRT3847_57001C.1.pep
AATRGISIFSEHIHYSAQQSISIFSELLSSQFSPFFFPSPIREKLRNLRYGRCKSQWHDQWWKKLPKEILWASNSKAWTSESWNSCGACKLCCFHFLSQQSHQRVRYTYSPCSLGSNSMRPKQRVTKVLIFFLFLFLYKLGLFDSLL

SEQ ID NO: 238070 - protein, 275 aa, Glycine max
  unsure (1)..(275): unsure at all Xaa locations
  Clone ID: PAT_MRT3847_57002C.1.pep
FGTRAELHLDPKDSLFLIGGFDGNSWLATMDLYCTSQNVIKSLKPMSSVRSYASVVWLNGEIYVFGGGNGYVWXDTXXSYNPVHDNWTLCPSLNQKKGSLPGAALNDKIFAVGGGNGVDCFSDVEMLDLDIGRWIPTRSMLEKRFALSAVELNGAIYAIGGFDGNDYLRSAERFDPREHSWTKIPNMNVKRGCHSLVVLNEKLYALGGFDGDKMVPSIEVFDPRLVAWTMGEPMNHCRGYSAAVVVNESIYMIGGVKVGENIVDTVENYNECQGW

SEQ ID NO: 238071 - protein, 119 aa, Glycine max
  Clone ID: PAT_MRT3847_57003C.1.pep
MSGAKGKKKGASFVIDCAKPVEDKIMDIASLEKFLQERIKVGGKAGALGDSITVTRDKSKITVTSDSNFSKRYLKYLTKKYLKKHNVRDWLRVIASNKERSVYELRYFNIAENEGEEED

SEQ ID NO: 238072 - protein, 266 aa, Glycine max
  Clone ID: PAT_MRT3847_57004C.1.pep
MDPNHSPPDFTPHLTTLININSNNNNNAVPSSPSNFNFSDPHHYIPASDATTFKQHNINHNNNHTPDFTSSHVEKSVEASKPVPPPRSSSKRSRAAEFHNLSEKRRRSRINEKMKALQNLIPNSNKTDKASMLDEAIEYLKQLQLQVQMLMMRNGLSLHPMSLPGGLRPMIMPQTGLNLDGSNGFQNSTCAIASSSNDESLVRHAFSFPKQCSISNKSIGVPSVKNIATSDTSSTFHPSIKDALYGNMPQPFMDTTKIGKPSPDVS

SEQ ID NO: 238073 - protein, 182 aa, Glycine max
  unsure (1)..(182): unsure at all Xaa locations
  Clone ID: PAT_MRT3847_57005C.1.pep
MSEDEEMKDQATPSHLLSSVPPSTLHHLKGIASIIETGSYSKEVRRIARALRLTFAFRRKLTTPVLSSFLDYVLTPASEPHTRLSSYLPNPKEGDREMEVDSATSTIQTLAAKHLVPELEIYCYLLVLLFLIDPERYDAAKACSSASIVRLKSXDRRTXHXIASRLYFYYSYSYELTGNLAE

SEQ ID NO: 238074 - protein, 440 aa, Glycine max
  Clone ID: PAT_MRT3847_57006C.1.pep
MGVCGSRPKVNEEDLSSKKKNNNNNNHRRRRRRILRRRVSSRKIEANNVSHSNSALQASNRASDAAWFDSTSALDSECDDEFYSVYDGEVSTGHADEIGEDRKLSLDHCGILPNNCLPCLTSNAIAVEKRRPMSPDTPSSRRKSLSKLSFKWREGSSDMTLLSPKAFKQKHLAGSSVPFCPLEKQTPGSWSQIEPSSFRVRGKNYLRDKKKEFASSSAAFYPLGADLFLSSRKIDHIARFIQIPSINIPGDAPSILIVNIQIPLYPAAIFQSENDGEGMNVVLYFKLSEKYSKDLPDQFRESISKLINDEVERVKGFPLDTIAPFRERLKILGRVANLENLSLSTTEKKLMNAYNEKPVLSRPQHEFFLGENYLEIDLDVHRFSYIARKGFEGFIERLKLCNLDFGLTIQGNKAEDLPEHLLCAIRLNKLDYSNFNQFGF

SEQ ID NO: 238075 - protein, 120 aa, Glycine max
  Clone ID: PAT_MRT3847_57007C.1.pep
TAARRRQKGPYDTDVINQFLEEGQRCEYIERKIQFAGFDGETIGKLLCSPGHDFVRSVAGKRVQIMHNSMTTLTQIWMTLLLSNILPNDHNSDLELPKFQLVYNIMMHISVHVAQLISDA

SEQ ID NO: 238076 - protein, 57 aa, Glycine max
  Clone ID: PAT_MRT3847_57008C.1.pep
IAMDPYIMKLLYFYEGGCVHSRLDVEKKTGSPKSRYRWNWVYFTVIWIKCSEIRRNQ

SEQ ID NO: 238077 - protein, 348 aa, Glycine max
  Clone ID: PAT_MRT3847_57009C.1.pep
MSWQQVFLSKKRKNKKTQKSHHQVLPIAEVEKKVMADSSVSFLLDKLSSLLEAEVKLQRGVREDVQHIKYELEGYKGILRVADALEDKNPELKAWVKRVRDVAHDMEDAIDEFSLGLVDQHGQGNNSSFHMNFFTRHKIASNIQGIKSRLDIISQKRPDIPWIGSGSSQRLSSRLDSQGDGLELEEADLVGIDKPKKQLSDLLFNEEAGRAVIPVYGMGGLGKTTLAKQVYDDPKVKKRFRIHAWINVSQSFKLDELLKDLVQQLHTVIGKPAPEAVGQMKSDQLKEVIKNLLQRSRYLVVLDDVWQVKVWDSVKLALPNNNRGSRVMLTTRKKDIALHSCAGLGKGF

SEQ ID NO: 238078 - protein, 89 aa, Glycine max
  unsure (1)..(89): unsure at all Xaa locations
  Clone ID: PAT_MRT3847_5700C.1.pep
SMQNVKTIKSIXRAFEMASGLKINYAKSCFGAMGQSEQWKMQAASYLNCRILPLPFTYLGIPIGANPRHSELWDPILRKSDRKLARWKQ

SEQ ID NO: 238079 - protein, 211 aa, Glycine max
  Clone ID: PAT_MRT3847_57010C.1.pep
MGVCGSRPKVNEDLSAKKKNNHHRRRRRRILRRRVSSRKIEANNVSHCNSALQASNRASDAAWFDSTSALDSECDDEFYSVYDDGMSLNEYEIGSRPNDSSPKGVDSVFVDHQQQKQRVHPYNYFRSNSSLKVAKNQGKPKDSTLKSDGSRVELDSVSTGEVSTGQADEIGEYRKLSLDHCGILPNTCLPCLTSNALAVEKRRPMSPDTPS

SEQ ID NO: 238080 - protein, 88 aa, Glycine max
  Clone ID: PAT_MRT3847_57011C.1.pep
SCLQSILVLRIVGYWAIPVSIGSLLALAILSALTLRFHTCKPCYPGSGWGRQLWPARYPGLGDCWVLVEAGESLYIEAVLRYCAFTCA

SEQ ID NO: 238081 - protein, 55 aa, Glycine max
  Clone ID: PAT_MRT3847_57012C.1.pep
MLSHQRRLCLSLIMSILSMKRGRFKTTLLVWLQSTLSKSVLSRVLGSNHSYQNSC

SEQ ID NO: 238082 - protein, 124 aa, Glycine max
  unsure (1)..(124): unsure at all Xaa locations
  Clone ID: PAT_MRT3847_57013C.1.pep
LGRRKLTGLRTLRECVEKVGRLRLTQEGLGQEREEKWVDELLDGAVRRLDVCAVAKESLLHMRECARELQSIXRRKRGGEMEVAXXVXKFLGSRKVIKKAILKALENLQATVKKAKFPPSNKDN

SEQ ID NO: 238083 - protein, 100 aa, Glycine max
  Clone ID: PAT_MRT3847_57014C.1.pep
VVGALDREGHVVIMSASFSNAAYERLPLEDEDPSMALQGGGSIGSPEGAAGGWGGVGQQQPSQQLMGDSTAPLFHGLNPNLLNSVQMPSETFWATGRSPY

SEQ ID NO: 238084 - protein, 98 aa, Glycine max
  unsure (1)..(98): unsure at all Xaa locations
  Clone ID: PAT_MRT3847_57015C.1.pep
HDPPSPTKEHAELRETAPRTQPKAEEKKQRQAHPGNEKPKEAKDGAEGHQNTQQTKQPEPAKTSTDQGAXTPEKGHNTREPPPQPPTNRRSKRTDREP

SEQ ID NO: 238085 - protein, 119 aa, Glycine max
  Clone ID: PAT_MRT3847_57016C.1.pep
SVFLPFFKERYYHPKDSPPATDDPAQDLETQLRKIADGLLSGRYSKPDSDVIASEDTPEVPHQKGLAPAMLKHLIGRGHPEFSTMRQQDSFELLLHLLKLVTRTPYPAPFKDPVDAFRF

SEQ ID NO: 238086 - protein, 160 aa, Glycine max
  Clone ID: PAT_MRT3847_57017C.1.pep
GDSRESRSSASSLPSSPGTPRSVPARTTNDPIELEAVISCASDGLVVCLRKARPMIPHPTHRPSQPTHPNGVFAAPWATQPVLPPLEARPRAGFASGFAPSLGPMAARHDSASPPRAHGPDSQDFMSVIREQAVFAWALTGINGSLADHAKGKPSGYSVP

SEQ ID NO: 238087 - protein, 49 aa, Glycine max
  Clone ID: PAT_MRT3847_57018C.1.pep
RSQVLLHCYHTGRDSRVATALTMLKKHLVNYKGHVSAALVRWNRTGDLA

SEQ ID NO: 238088 - protein, 86 aa, Glycine max
  Clone ID: PAT_MRT3847_57019C.1.pep
ALGLHQETFAPVAKLNTLRMLLSITTNQNWPLLQFDIKNVFLHEDLKVLSNSLDKLGMCDIVHQLERGCYNPLIIGIIYDSNLNCN

SEQ ID NO: 238089 - protein, 35 aa, Glycine max
  Clone ID: PAT_MRT3847_5701C.1.pep
AQQILSSSTSLFGWIFGNYLKGHGTRLNCSSNYFQ

SEQ ID NO: 238090 - protein, 85 aa, Glycine max
  Clone ID: PAT_MRT3847_57020C.1.pep
EPKTGQRVPNFTFTGRRGEKQTLVPIIIHQIPREQKFTFQGPRLVISFYKFDEALPPSRKLLTTLLEFYHLPAKICQIGHKMYKN

SEQ ID NO: 238091 - protein, 86 aa, Glycine max
  Clone ID: PAT_MRT3847_57021C.1.pep
FIDFVRNVSLEDSNPTLLFLSPPFTLHHFPITSPTLGEISVLVLFTGFCGPAIAHCLLQLLSSKLCVVLFFCQRRIMEFHSLKIEL

SEQ ID NO: 238092 - protein, 73 aa, Glycine max
  Clone ID: PAT_MRT3847_57022C.1.pep
KRGEEVGLCSHLRSLSTSALTVLAVLHAALVDSRQDSADFAFPLCTISCRRICWRHENNVSSIVVEDRHSAIG

SEQ ID NO: 238093 - protein, 30 aa, Glycine max
  Clone ID: PAT_MRT3847_57023C.1.pep
TMIRKVPMTLTTSVRQLSRLGNMHPLVQLL

SEQ ID NO: 238094 - protein, 79 aa, Glycine max
  unsure (1)..(79): unsure at all Xaa locations
  Clone ID: PAT_MRT3847_57024C.1.pep
MQLRTLQFLNYQTLSKLPCSPRKAQQRHLLPAINGADSRAPFQARKGHSMPPEEIADFKSXEGWASEWVLPLLKLVEQC

SEQ ID NO: 238095 - protein, 53 aa, Glycine max
  Clone ID: PAT_MRT3847_57025C.1.pep
TSSHYHPPPQIYPSIKNYYLYLEFKFLDPFLTFSPPQKEKGGRFGSFLFRKNI

SEQ ID NO: 238096 - protein, 64 aa, Glycine max
  Clone ID: PAT_MRT3847_57026C.1.pep
HPSTSSNSFQISIVEEQPLTINHPPYYPTHISISHKHENPLTLNSKGSMPRMGICGFRKRIDGI

SEQ ID NO: 238097 - protein, 150 aa, Glycine max
  unsure (1)..(150): unsure at all Xaa locations
  Clone ID: PAT_MRT3847_57027C.1.pep
NXXXIXNXSTRKXTQXQFXSXXXXVHTXXHTHPXXRAVXDXXXXHXEXXSQXXRXXHXXSXXXTXXLXXXXATKXXXDRXXDHXXXXTRXTXXKXXPXXNTXXXTTXXXQXXXNXXXXAPXXHXXTQDXKXSXXQXXQXSXXXDXRXXPX

SEQ ID NO: 238098 - protein, 144 aa, Glycine max
  Clone ID: PAT_MRT3847_57028C.1.pep
MRKCTVQALGLAIAFFLLLILLTPSIPQPQRYHDFADKREFFGIPNALNVISNFLFMVIGLIGLVLCHRMNYFNISLQGELWGWTCFYVAVTSVAFGSSYYHFGPNDAGLVWDRLPMSVAFASLLAILVIERIDAKKGTISIVS

SEQ ID NO: 238099 - protein, 53 aa, Glycine max
  Clone ID: PAT_MRT3847_57029C.1.pep
VITPPPIPRFRQQSSFSSSLISTSYLHYLPFFFNFYFLPSHSQQFPHTPIFLL

SEQ ID NO: 238100 - protein, 399 aa, Glycine max
  Clone ID: PAT_MRT3847_5702C.1.pep
MKVMSPEQFLEFAWGLANSKKPFLWIIRPDLVFGGSEILSSEFVNETSNRGLIARDFSRKVSDRHWEDPSREMWVFYLISLPLTVGMVLFTLRYYAAPHVPRYVLLTVGYTWLSSLSIIILVPADIWTDLEFEFDALLHLVNYYTVCYNGVGAVVPLIQGFEDAGDFTVSERLKTSVHVNLIFYLIVGSIGLFGLILLILTHKRWRGSLLGFAMACSNTFGLVTGAFLLGFGLSEIPKSIWRNADWTTRQKVLSHKIAQMAVRLDDAHQELSNAIVVAQATSKQMSKRDSLRPYMNVIDDMLTQMFREDPSFKPQGGRLGENDMDYDTDEKSMATLRRHLRGAREEYYRYKSEYMTYVLEALELEDTIKNYERRNSTGWFASNFIFFSLPLQHPSTIHY

SEQ ID NO: 238101 - protein, 213 aa, Glycine max
  Clone ID: PAT_MRT3847_57030C.1.pep
YTERSRNDILEDCKKLVSEILREHPEGYNIGAFGRLFVARYGYHLDIQKLGYQKLAALLQIMPGVKLESTYIFPSVPAVCPVSINNSDKSGLELKPSQKTIELDTSKSKHPDYEPVASDDEFSASEGDDSCLTQSAQQRKPKCNEHDSSFWQAMDLRHSSKEEENSGKKSNTVDSLDISLAEILDSSTESTRDTLSQIPSSKYRENNGKKSDN

SEQ ID NO: 238102 - protein, 74 aa, Glycine max
  Clone ID: PAT_MRT3847_57031C.1.pep
LLCSAHCSTTPSVSARKLKVCNHKAHISSKSYSRLESRTAHVQLPGYGYDDEDNRISLLFTELRLPQSSLIAFR

SEQ ID NO: 238103 - protein, 122 aa, Glycine max
  unsure (1)..(122): unsure at all Xaa locations
  Clone ID: PAT_MRT3847_57032C.1.pep
MSTYRDEDPRLHDIKTKIRVVPNFPKPGIEARGFIFGSPIALAIGAKFVPLRKPKKXLPGKVISQEYILEYGRDCLEMHVGAVDXGERALVVDDLXIATGGTLCAAMDLLERVGAEVVGCGV

SEQ ID NO: 238104 - protein, 43 aa, Glycine max
  Clone ID: PAT_MRT3847_57033C.1.pep
PNGTFEHKQPKLQNMERFVRLTVVLAMAMVHGCTSLRSDQQHA

SEQ ID NO: 238105 - protein, 172 aa, Glycine max
  Clone ID: PAT_MRT3847_57034C.1.pep
MSAYRDEDPRLHGIKTKIRVVPNFPKPGIMFQDITTLLLDPRVFKDTIDLFVERYKGKNISVVAGIEARGFIFGSPIALAIGAKFVPLRKPKKLPGKVISQEYILEYGRDCLEMHVGAVEPGERALVVDDLIATGGTLCAAMDLLERVGAEVVECGCVLEFFFLIGTLCNFL

SEQ ID NO: 238106 - protein, 233 aa, Glycine max
  unsure (1)..(233): unsure at all Xaa locations
  Clone ID: PAT_MRT3847_57035C.1.pep
TGPSGSTQRPFFALSFFPLALVTSALQLSLLFKQLEEDLKRGDLSDDDGEDEISEEDMALLERELENALGDFDGELLNSDVIDIETGGDPENDDDIEDGGDERSLNLRNWQMKKLARALKAGRRKTSIKNLAADLCLDRALVLQLLRDPPPNLLMMSLSIPDEPTTTVVSLETKPSEIVHKETSIDHAEIESEPKAKVPVHTLXRNWHAQKRLKXAHVDTLXRVYRDQTTHYA

SEQ ID NO: 238107 - protein, 443 aa, Glycine max
  Clone ID: PAT_MRT3847_57036C.1.pep
MSSNMPAKLLLTTLYILLVFLSIHMSPHDVKIDTHSFKSSSSTSGHRSKIGGGGSAKGCNNNNSNSNQLDTNTTPCQKSTTIQAVPAASSPPLVFADQRLEVVYPTVQKFKSTITSDPLGVTKTWVGSDICSYKGFYCDTPPDNSSATALASIDLNGFQLSASTLDGFIDNLPDIALFHANSNNFGGTISPQIAKLPYLYELDVSNNQLSGPFPTAVLGMNSLTFLDLRFNSFSGEVPPQIFTQNLQVLFINNNILTQGLPDNLASTHILLLTLANNKFMGPIPRSLPKALSTLSEVLLLNNQLTGCLPYEIGFLEEATVFDAGNNQLTGPLPLSLSCLEKVEVLNFGGNLLYGMVPEVVCVGLVNLVNFSLSDNYFTHVGPFCRMLIQRGVLDVRNNCIPDLPFQRSVMECAEFFATPRMCPFMWFHGLIPCKLPFQHSIHN

SEQ ID NO: 238108 - protein, 83 aa, Glycine max
  unsure (1)..(83): unsure at all Xaa locations
  Clone ID: PAT_MRT3847_57037C.1.pep
KYLYLHLLGLILYSGSIFQTFWKKIIHSCLRFFPTKQXLVGFYLHNTLKRQQNTGGGALDRFIPVIVIYGVMPWNLPTLFVDL

SEQ ID NO: 238109 - protein, 233 aa, Glycine max
  unsure (1)..(233): unsure at all Xaa locations
  Clone ID: PAT_MRT3847_57038C.1.pep
MAVAFQCLSCARSDPFLTASQSLTLPFQRKPLFCSVPLSSRARNLSSSIVAASSKKKNKKKKSHDHVTKDDDDGVDAFELLFKQLEEDLKRGDLPEDDDEITEEDMALLERELENALGDFDAELLNSDVIDMETGTDSENDDDDDDDDDGDGDDVENDDGGGDERSLNLKSWQMKKLARALKAGRRXTSIKNLAADLCLDRALVLQMLRDPXXNLLMMSLTIPDEPATTVVSL

SEQ ID NO: 238110 - protein, 331 aa, Glycine max
  unsure (1)..(331): unsure at all Xaa locations
  Clone ID: PAT_MRT3847_57039C.1.pep
MFHASGMAVVFQCLWCARSDPFLTLPFQRKPLLCSVFLSSRPRNLCSSIVAAASKNKNKQKKSRDHVTKDDEDGVDAFELLFKQLEEDLKRGDLSDDDGEDEISEEDMALLERELENALGDFDGELLNSDVIDIETGGDPENDDDIEDGGDERSLNLRNWQMKKLARALKAGRRKTRIKNLAADLCLDRALFFGXLQLLRDPPPNLLMMSLSIPDEPTTTVVSLETKPSEIVHKETSIDHAEIESEPKAKVPVHTLQRNWHAQKRLKKAHVDTLERVYRRSKRPTNAMISSIVHVTNIPRKKVVKWFEDKRAEEGVPDRRVPYQRSVPETA

SEQ ID NO: 238111 - protein, 105 aa, Glycine max
  Clone ID: PAT_MRT3847_5703C.1.pep
QFSGSLISRICVSKTQHGGFSPNTGVQSLRIFRMFSPWRQRCVIPFQYLSQVLEAVEMSSVAMLPLELLAQLTAAGSRMASVRSQAVQGTQSRVHVMTESLCERK

SEQ ID NO: 238112 - protein, 76 aa, Glycine max
  unsure (1)..(76): unsure at all Xaa locations
  Clone ID: PAT_MRT3847_57040C.1.pep
YDVFINKLATHNMALLPMXXKTGVLPGSTHLISDLRDLYIIHAXXMDEAGNSQACTPLWAFEIEEGIPHDSLXXXV

SEQ ID NO: 238113 - protein, 47 aa, Glycine max
  Clone ID: PAT_MRT3847_57041C.1.pep
IARLWTRKGPGFIPYQFYILGPFFHNQVNHIYHTKGGAINQKFHFGL

SEQ ID NO: 238114 - protein, 81 aa, Glycine max
  Clone ID: PAT_MRT3847_57042C.1.pep
QVCNWHSVRKSELTSSGYRIGLMIQLIMPVRTCPLWPLLVLKMCSCSCLSRLDRISFGFRRGLIRFLIIPIPISPVSPRYF

SEQ ID NO: 238115 - protein, 64 aa, Glycine max
  Clone ID: PAT_MRT3847_57043C.1.pep
LNSYFYGANFSWKKIIFSLLFILIISIFIMHVFQMLQKMKHTLVLKKDYNNQQRMSHPHGFHLF

SEQ ID NO: 238116 - protein, 65 aa, Glycine max
  Clone ID: PAT_MRT3847_57044C.1.pep
PHVLQIINYHGIIEIKYGRHSVFANSKKFRALEAMGRKKCITQCVDSLFKWATLTARYNANANSF

SEQ ID NO: 238117 - protein, 167 aa, Glycine max
  unsure (1)..(167): unsure at all Xaa locations
  Clone ID: PAT_MRT3847_57045C.1.pep
MTTKAEPNIQGSVNSTYQGTTANSMSKMDPESSQATADHLSGTSESEEVGDHETEVDEKNDEPDPKTRAVIILXKAEVSHTDPACSHRTVTEPRIIAHTTSEDDLLDDGYRRRKSGQTVVKGNPYTRSYYKRSAKGCKERKHVERAPTDSRAVITTYDGKHTDEALA

SEQ ID NO: 238118 - protein, 190 aa, Glycine max
  Clone ID: PAT_MRT3847_57046C.1.pep
MSGRHRPTDTFAGGHWHYGRWGRMLLSSNDIYICSRVIASLSGCACTVGPPPISGGGPGTVWMWSTLKMRTRSPLKVRAWSPLKARMCSPLEVRACSPLLARTCSPLKVRACSPLLARTCSPLKARTCSPLKVRTCSPLKARMCSPLKAIGTSTQGSTLMRKQEIDSSRGPVIPNPQDLDIRCRKSMQLT

SEQ ID NO: 238119 - protein, 85 aa, Glycine max
  Clone ID: PAT_MRT3847_57047C.1.pep
KKELFLCFFSKFQDLVKKGFSGAQIVLDPPGLKLSLNRGFFFFPAKKKRVFILGFALFLKEGKRFLFKAGAPKFLPSLYRGPKGP

SEQ ID NO: 238120 - protein, 49 aa, Glycine max
  Clone ID: PAT_MRT3847_57048C.1.pep
TVTALDRDDTLGQRSNLLGTCQIPLISTGSIKVVTAVKCALHNHTDFFC

SEQ ID NO: 238121 - protein, 44 aa, Glycine max
  Clone ID: PAT_MRT3847_57049C.1.pep
PTNITLFTLFILQAQDNIMNLPLANGWGEKHRLFVKWKYIEAKV

SEQ ID NO: 238122 - protein, 43 aa, Glycine max
  Clone ID: PAT_MRT3847_5704C.1.pep
TSCARTHTLKIALAAHLSYGSVFFLCRGAEARGSEGGREVLFC

SEQ ID NO: 238123 - protein, 326 aa, Glycine max
  unsure (1)..(326): unsure at all Xaa locations
  Clone ID: PAT_MRT3847_57050C.1.pep
MGCFVSTPKDSGGNRRRPGSIGEVSVYVPGLRIPKPVDFAQSLGDYLSKNIVERLSALRTRIVVMAGQEGPTITRTKRKSATQHVRSTLADLQQALEDYLPVLLGLVENGSHLQYKVQFDWVNQEDDTEANLLLLPRTSTDSHQPKVSEESRRASVDIFLKAAGYLDCAVRHVLPQLPGELRRNLPVDLTEGVLRALCLQALGQGVDIQLGMAIDSTKATLAVKRRLACEMVKYWQQAQDNIMNLPLANGWGEKHRLFVKWKYIEAKAAAYYYHGLILDEGNTEKSHGMAVASLQAADEXFQESRSCVKHSCSTXIVKNPPLWGTM

SEQ ID NO: 238124 - protein, 198 aa, Glycine max
  unsure (1)..(198): unsure at all Xaa locations
  Clone ID: PAT_MRT3847_57051C.1.pep
MAPLVLNWIGLQLGASPCFAQLLPLYLFIELQNFDLTSELPEQTTRYSTQDMGCFVSTPKDSGGNRRRPGSIGEVSVYVPGLRIPKPVDFAQSLGDYLSKNIVERLSALRTRIVVMAGQEGPTITRTKRKSATQHGGSTLADLQQALEDYLLVLLGLVENGSHLQYKVQFAWVNQXDEAEETTMSNAWYEVLXVLHLM

SEQ ID NO: 238125 - protein, 54 aa, Glycine max
  unsure (1)..(54): unsure at all Xaa locations
  Clone ID: PAT_MRT3847_57052C.1.pep
FTVTRTLNKNPFVAKHSLRIIHKRNTYSDXDITITWSKTSTIIPTXIAHTMSIH

SEQ ID NO: 238126 - protein, 134 aa, Glycine max
  Clone ID: PAT_MRT3847_57053C.1.pep
AAAYYYHGLILDEGNTEKSHGMAVASLQAADEYFKESKKLCEAFNAVPPLSRNPPLWGTMKYLYEKIPKDTSSKVRINRDLYSYERIMETAPTLPDFSLALKPDEYQLPQVDSSWRTENIKVGQTDPNHLKGDK

SEQ ID NO: 238127 - protein, 63 aa, Glycine max
  Clone ID: PAT_MRT3847_57054C.1.pep
FLMSRDISQTIRTSFAESSPQQSKVFPKTLAHDLNLRDTKSQPLTISYITKVKDDTHFTRYSS

SEQ ID NO: 238128 - protein, 425 aa, Glycine max
  unsure (1)..(425): unsure at all Xaa locations
  Clone ID: PAT_MRT3847_57055C.1.pep
MGCFVSTPKDSGGNRKKRGSIVEVSMYVPGVRIRKTVDFAQSFGDYLFKNIVERLSALRTRIVVMAGXEGPTITRTKRKSATQHGGSTLADLQQALEDYLLVLLGLVENGSHLQYKVQFAWVNQEDEAEETTMSNAWYEVLSVLHLMAMLLLSQSDLLLLPRTSTDGHQPKVSEESRRASVDIFLKAAGYLDCAVRHVXPQLPGELRRNLPVDLAEGVLRALCLQALGQGVDIQLGMAIDSTKATLAVKRRLACEMVKYWQQAQDNIMNLPLANGWGEKHCLFVKWKYIEAKAAAYYYHGLILDEGNTEKSQGMAVAALQAADEYFKESKKLCEAFNAAPPLSRNPPLWGTMKYLYEKIPKDTSSKVRINRDLYSYERIMETAPTLPDFALALKPDEYQLPQVDPSWRTENVKGGQSGATNHVNG

SEQ ID NO: 238129 - protein, 58 aa, Glycine max
  Clone ID: PAT_MRT3847_57056C.1.pep
KKKYLLKKILLARQTDITRTSPHHHIELISKVPNPFIVEYKNSCVQNVCSVSIIISYC

SEQ ID NO: 238130 - protein, 48 aa, Glycine max
  Clone ID: PAT_MRT3847_57057C.1.pep
AHLPHLCKTDFESVSICAASYNIIEICHPPQSASMQFQKCAATIRDLP

SEQ ID NO: 238131 - protein, 61 aa, Glycine max
  Clone ID: PAT_MRT3847_57058C.1.pep
LTPTPNPNNSNRFSFLTRSLSSPRSWHCSQVLVHRDGPAQELYTMTLDLARLRARSHLRQF

SEQ ID NO: 238132 - protein, 77 aa, Glycine max
  Clone ID: PAT_MRT3847_57059C.1.pep
VAIERETDVMDGSQRSEVSFMRHGSSRLVWDYRLLSGELNIVNNNEHQKGGGSGGDLNLKVITTPPNTTIQRSPSNG

SEQ ID NO: 238133 - protein, 83 aa, Glycine max
  Clone ID: PAT_MRT3847_5705C.1.pep
RKTKPASKIFRNEVSFLKVNLKTGNEPLLGPGLFLPKIFQGIAAPQAKYLLDTHILIIFPSLGEFKITGGLIKRGPKRGAQKH

SEQ ID NO: 238134 - protein, 69 aa, Glycine max
  Clone ID: PAT_MRT3847_57060C.1.pep
GAFWDLSGVMRSAVISSVKPGGTTLLRSCQPGGKMDDSGRLYNIVYDLGIRQVRCIPGAVANGSVGPYG

SEQ ID NO: 238135 - protein, 61 aa, Glycine max
  Clone ID: PAT_MRT3847_57061C.1.pep
EITIHYYFLNLKILTLRNQGGIKRLPNQPNPEFGLKPGPKITIHYYLVNLQILTLRNQGGL

SEQ ID NO: 238136 - protein, 35 aa, Glycine max
  Clone ID: PAT_MRT3847_57062C.1.pep
VALLNMVWYRCLLLSRVFVDQHSYSNAWLIGYSTP

SEQ ID NO: 238137 - protein, 56 aa, Glycine max
  Clone ID: PAT_MRT3847_57063C.1.pep
IFFSCKYAMVSIRFFLDGHRVFHIFFVPAHCSFLPCHYFLFFFLLVSKINYNRAFI

SEQ ID NO: 238138 - protein, 63 aa, Glycine max
  Clone ID: PAT_MRT3847_57064C.1.pep
GEHTFSAGLFSFKPLQKPNVCNQNQNEFSPNTYPSKPTPDKTTVFKPIQQPKVQTTLNQLTKI

SEQ ID NO: 238139 - protein, 42 aa, Glycine max
  Clone ID: PAT_MRT3847_57065C.1.pep
ELIGTVLKLQVYQTILDPRNLNQRLTYQFATAGQHSRCIKNS

SEQ ID NO: 238140 - protein, 190 aa, Glycine max
  Clone ID: PAT_MRT3847_57066C.1.pep
DDSSTSELNSIKAIIKCVEDHKLESEFNLDNLRKWATLLEKAKAEKKKSSTSGSKPQNKRGSGSSSSRPAKSAKFSSAHSSSFSRRNLAPSLQPSPGARFSVPFNYPSQTIYDGATANLYTATYGTSHTQSPAGITQQHYSIPVDNLGPSGYRSSGSYSAQTSYGLYDYRNGAPPTYPPPYTVDQTTYRG

SEQ ID NO: 238141 - protein, 92 aa, Glycine max
  Clone ID: PAT_MRT3847_57067C.1.pep
AASRPCDVSWGSKVKFWGVASVYHCSSDVKPPFLCLVEDGALVEFGQPWEAKGLFACDGSVVVVPCVSPCSLLFHGLLAVDAESLDKASTNS

SEQ ID NO: 238142 - protein, 65 aa, Glycine max
  Clone ID: PAT_MRT3847_57068C.1.pep
DKAIIMAAASPMASQLKSTFTRTLVAPKGLSASSPLHLVPSRRQFSFTVKAIQSEKVHHFLQFMF

SEQ ID NO: 238143 - protein, 60 aa, Glycine max
  Clone ID: PAT_MRT3847_57069C.1.pep
FAQRCFFSQVSSLNPYTSDRYPSISSIFCWFVFVVPLSRCTNSWWKNCSLLSGLTRQAHI

SEQ ID NO: 238144 - protein, 152 aa, Glycine max
  Clone ID: PAT_MRT3847_5706C.1.pep
MAADLSGKDVERAQFVFSIYDSDGTGAVDCCELGGVLRALNLNPTCATIEKLGGTKKKGEKKLTLDEFLPIFSACKKDKDQGVYEDFLECLKLYDKAENGTMLGAELSHTLLSLGERLEDKEVDEVLKDCLDPEDDEGMVQYVPFLKKLMAA

SEQ ID NO: 238145 - protein, 62 aa, Glycine max
  Clone ID: PAT_MRT3847_57070C.1.pep
SGVDTPSDGYIPSEEALVVMVVSCDGICGSDESKDIGFPNAVPTYFKYQSHLCPFLCCCRSG

SEQ ID NO: 238146 - protein, 53 aa, Glycine max
  Clone ID: PAT_MRT3847_57071C.1.pep
SIVLKKVRRGREKRCCLPPPGKLRYKTQSLNGTFSQQNNRERLRDEKFKGPKK

SEQ ID NO: 238147 - protein, 338 aa, Glycine max
  Clone ID: PAT_MRT3847_57072C.1.pep
QNGPTQFVSGSKLPLPDEKHNEEMHSTHDAPNKEQPDSDSGSDTLEFPEVPKVSVQPNANVATAPEMVTPLTMEPLEVDLDSPRHSGDFADAKQEQVEDRSSVHKDEPHTSICKTENKQFLPFISPPSVSSGSFSARHSDSPPSFSSTKSEGNVDLQDVLAAAHAAAETAERAAAAARSAASLAQLRINELTKKKSSEHVPDSSSSENPFYAGRSNESPTIIEKHFTEQNTAGNSDVHNGNDVEHHQDHYASPDSHSSSFPSFETLKEDFASSLPNDHRVLDDKSSSHQPKRLPSMDDDSYFSYPNLFTSQNSNVGSQAHSDNSRSPHSDNSRSPHDL

SEQ ID NO: 238148 - protein, 34 aa, Glycine max
  Clone ID: PAT_MRT3847_57073C.1.pep
REQKESVRRENNIKVLFLRFLCCHLITKVMLEYF

SEQ ID NO: 238149 - protein, 77 aa, Glycine max
  Clone ID: PAT_MRT3847_57074C.1.pep
FKRKKKKKKKKKKKKKKKKKKKKKKKKKKKKKKKKKKKKKKKKKKKKKKNKKKKKKKKKRGGGFKRKKIDKPGVGPN

SEQ ID NO: 238150 - protein, 59 aa, Glycine max
  Clone ID: PAT_MRT3847_57075C.1.pep
TPSIDTQRHPQSPHHHHLLLLLQLTHYGTTNVIFSCRYLNIFFIYMKFQSQFMKEEICR

SEQ ID NO: 238151 - protein, 42 aa, Glycine max
  Clone ID: PAT_MRT3847_57076C.1.pep
SPVSRLSNWHALEQGHFVYSQSASYDFSATVSWVLLIVVCTT

SEQ ID NO: 238152 - protein, 141 aa, Glycine max
  unsure (1)..(141): unsure at all Xaa locations
  Clone ID: PAT_MRT3847_57077C.1.pep
ECFLFSPPPCVGQRKYLPPFPPPPPPPPGGPRPAGRGAPPPRRAAPAPPPXPPPGPPPGPAAAPPPPPPAPPPPGRPPPPPPPPPPRAPPPPRPPARPPAAGPARPPPPAPRPRAGPAPRPPPGGGGAPPPPPPRPPPPAP

SEQ ID NO: 238153 - protein, 40 aa, Glycine max
  Clone ID: PAT_MRT3847_57078C.1.pep
LEPRLERLETAARRRQKGVLRPGISPTWERTFFFLGSKSY

SEQ ID NO: 238154 - protein, 84 aa, Glycine max
  Clone ID: PAT_MRT3847_57079C.1.pep
LFFFLPPNKRRMFCNAIKLGWARLVPFQSLYCNAQGIELRLRYRRKKSCHARVGKLSLGFGSSLVLEREPLSFVLYKQSPFPFL

SEQ ID NO: 238155 - protein, 97 aa, Glycine max
  unsure (1)..(97): unsure at all Xaa locations
  Clone ID: PAT_MRT3847_5707C.1.pep
ARNSARXPISSSLXXXFXFXXXSLSDXXLSHXXLSXRAXPKDXXHXPXIXVAXRSXXXRFXXXRXIXMXXXXLNMPNWGYXEPSEGDILAFSSAWYD

SEQ ID NO: 238156 - protein, 74 aa, Glycine max
  unsure (1)..(74): unsure at all Xaa locations
  Clone ID: PAT_MRT3847_57080C.1.pep
FIVLFFKTLIKPYYISKHRNLPLPPDSIRLPYIEKTFQMYSQDPNIFFTSKIKKFNSIFXSHILNYPYIIISSP

SEQ ID NO: 238157 - protein, 59 aa, Glycine max
  Clone ID: PAT_MRT3847_57081C.1.pep
APISLTISCSMHQRRPFNGNVQTGDLRYKYHGKNVTRFQKFLFNMWRGCVEHSSLRLKL

SEQ ID NO: 238158 - protein, 69 aa, Glycine max
  Clone ID: PAT_MRT3847_57082C.1.pep
VSQHSRICLWVRSKKKPPVACETRCTSPMRFPRKWAVLPILVVTECSDIQDRRIASSMHFGILPMRPLV

SEQ ID NO: 238159 - protein, 209 aa, Glycine max
  Clone ID: PAT_MRT3847_57083C.1.pep
MAGREVREYTNLSDPKDKKWCKGKDKIDDEDITFQRMVAKMREVAGERGGYLHGRGALDSDDLLYLKEQMEAEEDAERLLRRTEKRAFAAFKRAASLADSSPASVPLAFRVEPKPKSGIRQQDLLKKVVEIKPKRPRSDANRKPDHDPSKEKEQSLPRTKKVEEQPLSGSKKAEEHAPLGSQEAEAKPKVESSSGGLLGLAYDSSDDDE

SEQ ID NO: 238160 - protein, 218 aa, Glycine max
  Clone ID: PAT_MRT3847_57084C.1.pep
GRFVREYTNLSDPKEKKWGKGKDKIDDEDITFQRMVAKMQEVAGERGGYLHGRGALDSDDLLYLKEQMEAEEDAERLLRRTEKRAFAAFKRAASLADSSPTSVPLAFRVEPKPKSGIRQQDLLKKVVEIKPKRPRCDSNQSTPASNAPVTNRKPYHDSSKEKEQSLPGTKEVEEQSLPGSKKAKEHASLGSQEAEAKPKVESSGGGLLGLAYDSSDDE

SEQ ID NO: 238161 - protein, 68 aa, Glycine max
  unsure (1)..(68): unsure at all Xaa locations
  Clone ID: PAT_MRT3847_57085C.1.pep
MALSDAXVQKQIKHMMAFIEQEANEXAXEIDAKAEEEFNIEXGRLVQTQRLKIMEYYEKKEKXIEQQK

SEQ ID NO: 238162 - protein, 165 aa, Glycine max
  Clone ID: PAT_MRT3847_57086C.1.pep
MATRPESEKDPPQPPSRGFLATVQEITRIYSSLPPRPSIEEVEAATSTVDTLNNEEQIKLNEISMQQQPPHDDVPQDLFSVLQQLKKTMVLFHTHQQRRDALYLLELENMFQTFGDLIQRASELVSGDTQKQKLPTIPEEHAVITEESETLVKEEKGRHKNVFHV

SEQ ID NO: 238163 - protein, 67 aa, Glycine max
  Clone ID: PAT_MRT3847_57087C.1.pep
LLCSFVFGIVIVILDANYYLPCILEFDFGLPVIFVFVGVNLILDLGVQFHYSDDFLDFISICVTTII

SEQ ID NO: 238164 - protein, 44 aa, Glycine max
  Clone ID: PAT_MRT3847_57088C.1.pep
CILPPPLVAPFFTHYAPPFYIFKVAVRNMFAPSNRLLPFLVPFV

SEQ ID NO: 238165 - protein, 64 aa, Glycine max
  Clone ID: PAT_MRT3847_57089C.1.pep
VIPSRVINALIASQSKDLKLVAGDVSQNTENEQCAEFYNQPWVEDAVVRYLTRKNARSDAPGNI

SEQ ID NO: 238166 - protein, 58 aa, Glycine max
  Clone ID: PAT_MRT3847_5708C.1.pep
KGLPHVNTGNKRKVLLHCKSIACSKDEKLYDLLREGKPLTGWVTDFPMEFNFEAQQMC

SEQ ID NO: 238167 - protein, 159 aa, Glycine max
  Clone ID: PAT_MRT3847_57090C.1.pep
MGFLTLTNYLIFLLIFSSFYMGVISVNDTITSTRFIRDPETIISSNGDFKLGFFSPEKSTHRYVAIWYLAETYIIWIANRDQPLSDLSGPGVFKIHKDGNLVVLNAQNRVIWSTNVSITATNTTAQLDDSGNLILRDVTNGKTLWDSFTHPADAAVPSM

SEQ ID NO: 238168 - protein, 84 aa, Glycine max
  Clone ID: PAT_MRT3847_57091C.1.pep
MIDALEKDIIITWPGASIIGGLTGDALDRGLIIPTKIGPTVGVLNRKERLPIFLTDRMGGHTLGEFSPTLNFLGHAKKADRSRR

SEQ ID NO: 238169 - protein, 154 aa, Glycine max
  Clone ID: PAT_MRT3847_57092C.1.pep
EFNLGALPFPASSRLNIPTTLNTGLFSNQFSSSPLSFGGDVNSVSVTNNALSGFQLDATPATVLSNSLMSLASNNNTQNNNNFWALQDRSQGSTLLLSDSFNSSAMQSMQQSLNVHSSLASSIESLSCVNQDLHLKMQQQRYATMMFGGDSYHH

SEQ ID NO: 238170 - protein, 78 aa, Glycine max
  Clone ID: PAT_MRT3847_57093C.1.pep
LDSCLVPFTLVPCPPSYIIYLPVAQSISLAADKYLPQSPLAQRPLLTVRSSSSQRPPSCSAQLLHACGQRAIYRGLIC

SEQ ID NO: 238171 - protein, 120 aa, Glycine max
  unsure (1)..(120): unsure at all Xaa locations
  Clone ID: PAT_MRT3847_57094C.1.pep
SFYGNSAEDSWLPVFVNRLYPESQVPAEACFVNVXCGIGRAGLPTSACISTAVITRSSYMTMRRPAALGIGLKIVLLTRVDAFPGAVHAVVHGVKTENVRSDASNPMLTRLHENCKSLKY

SEQ ID NO: 238172 - protein, 171 aa, Glycine max
  unsure (1)..(171): unsure at all Xaa locations
  Clone ID: PAT_MRT3847_57095C.1.pep
MEHGGKLPRVSSSPLLKTLGSQMGAQENKNSAIHQEQEKMEGANSQEESTISEQTPNGEIGVKTSQDIMNSRKRKASSKGKAKETSNTTNPTKGVEGSEYSNSKRSKPNEGNENGQVKVEEESKAEEEKQSKSNSKPPEPPKDYIHVRARRGQATXDSHSLPXRVRREKIS

SEQ ID NO: 238173 - protein, 106 aa, Glycine max
  unsure (1)..(106): unsure at all Xaa locations
  Clone ID: PAT_MRT3847_57096C.1.pep
FGASWVSKDPLVGAFLEGGAKEEYXSHSPGPLVKAGNLRLDLTXKQGFRFSVPVSEKPMASPPIEVRASALLLEKPFFAWPAPAGVFFSASIAGFAYFFGKKPPRW

SEQ ID NO: 238174 - protein, 151 aa, Glycine max
  Clone ID: PAT_MRT3847_57097C.1.pep
LIVLKNKRMYSSLIKFGKMKQLFSFNHVLSLTRDFRNTACSNDVSKDTAWGDDGISCLNISICFSFLLIHTHIHTLWRVRNICLHNWNCLHMNVCCNQLLRHCFSSSGPYGINICCCFSSSSPYGINICCWIHPSFLLIHRCCLIHSMKLL

SEQ ID NO: 238175 - protein, 88 aa, Glycine max
  Clone ID: PAT_MRT3847_57098C.1.pep
FFMMIYSNVFRAATGSRFYYVMTANTFYSCSWDLWLSCSRVSYSWKPNLTFFCSECLLFHIQKTGYDKEFLLKLKDEKTGIREYENHN

SEQ ID NO: 238176 - protein, 67 aa, Glycine max
  Clone ID: PAT_MRT3847_57099C.1.pep
AVLNATMMLSGFLDNARASPVTLYMYGLSTETSHKGTNTAESCGTVVHAAELADVAAIGHGIGVRLS

SEQ ID NO: 238177 - protein, 50 aa, Glycine max
  Clone ID: PAT_MRT3847_5709C.1.pep
PAYKMVQETALNHIFSCGGSQNDFGATQEMDLRNLDHLGCYSFSGSSKEI

SEQ ID NO: 238178 - protein, 95 aa, Glycine max
  unsure (1)..(95): unsure at all Xaa locations
  Clone ID: PAT_MRT3847_570C.1.pep
GIGGCRRLALWTVCNLNAVILIRVFMSNVNKPLLSLSRLIRYTNGKEDKIAVVVCAVTDYIRVYEVPVLKXTVLKFTDTAIIRIDKAVVEFFTFD

SEQ ID NO: 238179 - protein, 140 aa, Glycine max
  unsure (1)..(140): unsure at all Xaa locations
  Clone ID: PAT_MRT3847_57100C.1.pep
KYYKETNNPTTSRKDRGTEHKIQIKKKKETVFFLRKPTLDKNKTYIKDDLTNKQDIPYPFLXGGVGRTTLAKNRHTNEEGRWPDQPNKFNIYXIKNAEMNNKKKGMDMEGKYIPYTQSNQGKKEKPRTYINERKSNTYLA

SEQ ID NO: 238180 - protein, 78 aa, Glycine max
  Clone ID: PAT_MRT3847_57101C.1.pep
TYVSSEFGSRGMYFVSSVLLIRMSMPPEYRTIITEVLGELQFNFYHRWFDVIFLVSALSSILFLYLAHKQAPEKHMAP

SEQ ID NO: 238181 - protein, 42 aa, Glycine max
  unsure (1)..(42): unsure at all Xaa locations
  Clone ID: PAT_MRT3847_57102C.1.pep
RCRPXXLHSPSPNQTLRXSXSXXIPNPIRXXPXXXDNXALXV

SEQ ID NO: 238182 - protein, 146 aa, Glycine max
  Clone ID: PAT_MRT3847_57103C.1.pep
MPKVRRTKKTPPEGWELIAPTIDELDKKMRDAENEPHEGKRRNESTWPIIRIHHQRSRYIYDMYYKKKAISKELYEYCLAEKIGDANLIAKWKKPGFEKLCCLQCIQPKNTNFGTACVCRVPKTERSEGKVVECISCGCTGCCSGD

SEQ ID NO: 238183 - protein, 63 aa, Glycine max
  Clone ID: PAT_MRT3847_57104C.1.pep
IRSISAEGNGTTRGHKSNSHSAQVVHGATVVRSPLRFRVCLLQPLDGDSLLFQVLVLACQIVL

SEQ ID NO: 238184 - protein, 81 aa, Glycine max
  unsure (1)..(81): unsure at all Xaa locations
  Clone ID: PAT_MRT3847_57105C.1.pep
ACRTPPQFPGRPTPARKHSTHHYYFTPSEGTPIPLTQPLSRVTRVERLKQPPFFHSWDSFPSFVLQDSLSLXLDLLPLGRH

SEQ ID NO: 238185 - protein, 91 aa, Glycine max
  Clone ID: PAT_MRT3847_57106C.1.pep
MALHANKIFKWQQHLHSRNHSNVPKGHIVVYVGEAQKKRFVVPISYLNHPSFVDLLNRVVEEFGYNHPMGGLTIPCKEEAFITLTSQLRAS

SEQ ID NO: 238186 - protein, 70 aa, Glycine max
  unsure (1)..(70): unsure at all Xaa locations
  Clone ID: PAT_MRT3847_57107C.1.pep
TTPIIINLXNSXXPINSIPLIIKNIRRPPKHHINLLKKNNKQILLLTHQLQSKIILINSIIKKTTNKFNI

SEQ ID NO: 238187 - protein, 238 aa, Glycine max
  Clone ID: PAT_MRT3847_57108C.1.pep
MSSGGGGGKPFFCHVCSQRITCSDESEPFCPMCMESFVEECNPNNPNPNLFPDSDESSDPELPFHRFSLLPLLLSSVSRSRSEPDVFDPMVFLQNHLQDLRADGANIQVDFDHPSNENQGFRLANIGDYFMGPGLEQFIQQLADNDPNRYGTPPAAKDAVENLPTVTVDDDLLNSELNQCAVCQDEFEKGSKVTQMPCKHAYHGDCLIPWLRLHNSCPVCRYELPTDDADYENEVSRW

SEQ ID NO: 238188 - protein, 37 aa, Glycine max
  Clone ID: PAT_MRT3847_57109C.1.pep
IGEAGAPAGTGLGISGQTYAFAYEFLDAWVRSNRPDY

SEQ ID NO: 238189 - protein, 63 aa, Glycine max
  Clone ID: PAT_MRT3847_5710C.1.pep
VCLYMDVPTQIHIQQLPSFPLCLPCQELEIHNVIHFHLFAVASGAHIDPWPPMFRMFSLDSVL

SEQ ID NO: 238190 - protein, 194 aa, Glycine max
  Clone ID: PAT_MRT3847_57110C.1.pep
MCLPEGERGMALEAVVYPQPQDPFGYGIKDPSYNYNNLLEGGGGNWGFEKEEQGFVTFLENQTENYPYGEWNCSPSPPSMLPHLNASNPQSSETSNIHNNLDSSISTPARPKRRRTKSRKNKEEIENQRMTHIAVERNRRKQMNEYLSVLRSLMPESYVQRGDQASIIGGAINFVKELEQRLQLGWSERERGEI

SEQ ID NO: 238191 - protein, 122 aa, Glycine max
  Clone ID: PAT_MRT3847_57111C.1.pep
RTQGSLRLILNTKLWAQMQMDKASEKSIRITATDAEDQGVKVFLISASSKDTGQLYAALHHRILALRSRAEQEQEAKAPPPEPGATRAAEEEDSDEDAVLAPSGVTGAGAGDDGDGQATGST

SEQ ID NO: 238192 - protein, 75 aa, Glycine max
  Clone ID: PAT_MRT3847_57112C.1.pep
PRKATYLVRYLASLCCYKLALKNSSMPKKKSLLVLLNQVIGYDHLQNCVTLRIFNCTSLRIKFRQTPVLFAGHNT

SEQ ID NO: 238193 - protein, 328 aa, Glycine max
  Clone ID: PAT_MRT3847_57113C.1.pep
MCLPEGERGMALEAVVYPQPQDPFGHGIKDPSYNYNNLLEGGGGNWGYADFNLEKEDRTCVPFLANQTENYPYGEWNCSPSPPSMLPQLNIASNPQSSETSNTQNNLDSSVSTPARPKRRRTKSRKNKEEIENQRMTHIAVERNRRKQMNEYLSVLRSLMPESYVQRGDQASIIGGAINFVKELEQRLQFLGAQKEKEAKSDVLFSEFFSFPQYSTSASGGCDNSTAMSEQKSEAQSGIADIEVTMVESHANLKIRSKKRPKQLLKIVSSLHGMRLTILHLNVTTTGEIVLYSLSVKVEEDCKLGSVDEIAAAVYQILDRIQQETISN

SEQ ID NO: 238194 - protein, 100 aa, Glycine max
  Clone ID: PAT_MRT3847_57114C.1.pep
GSRRYTEEATFISNGSTHIHAGSSRSQWLDSSPGDVSATKKKKPSESLSLRAAVQDIEMPLPPLALAPWQHGIRSCNVSEESTDLVDSVRPLAQGQKLVV

SEQ ID NO: 238195 - protein, 128 aa, Glycine max
  Clone ID: PAT_MRT3847_57115C.1.pep
GVMTLWRLLLLLAGACTATFAEKRALFFEDFTFKDIQGNTVSYLETDFSKLDPSTFENCKDDSDSDVELCRRWKDGTELSIRNMEYCVTSTLTKSTLIWRSCVPSNTSHWYGGGEEWEQLWPLEKYQN

SEQ ID NO: 238196 - protein, 76 aa, Glycine max
  Clone ID: PAT_MRT3847_57116C.1.pep
LFLFSFHVSLINNLPIQQPHPHTHTYTHLNSYHPYHLFKSHPQLTQLLSQKPTNFFHLLSNTLLQVPFSSNQYFTC

SEQ ID NO: 238197 - protein, 124 aa, Glycine max
  Clone ID: PAT_MRT3847_57117C.1.pep
GKVDGAFYSGLLMTAAVNGRVFRGVLFAPGAGVFSTSVEPKCSVSCSFPSTQPFMNSNHHVRDSQQVANCSRAEPCHGISQPVLAQPTPIMRGTTVSLAKEHKVRSDLQGLVLTLGGPASGNHA

SEQ ID NO: 238198 - protein, 41 aa, Glycine max
  Clone ID: PAT_MRT3847_57118C.1.pep
KELYLVGKKISDVEGLQRLLKITVLDLSYNKITTAKVLGQL

SEQ ID NO: 238199 - protein, 178 aa, Glycine max
  Clone ID: PAT_MRT3847_57119C.1.pep
GDPVLKILMQKVRYLDLNLSVLEQYMEDLNSRYINIFKEYSKDMGEKDLLLEKIKEEISRFLERQDVMMKEFSDLDSWRSHFSVQLDHVLRDNAVLRSEVEKVRENQVSLENKVVVVFSVCVIFSLLAIFRLSLDMIMNLYRVLSFDRTITSRRFWQGSSSWFFLLLSCSIIIFTLTL

SEQ ID NO: 238200 - protein, 44 aa, Glycine max
  Clone ID: PAT_MRT3847_5711C.1.pep
TSLDPCWVHIEVAQKFIFRVNISISSNYVLVAQKFIVCRGLFPF

SEQ ID NO: 238201 - protein, 93 aa, Glycine max
  Clone ID: PAT_MRT3847_57120C.1.pep
PRVRTAARRRQKGRRRKGRGKLNGDTTFSFTLTQQRQCKLFFWRQHAPAGLRQFLWQPSSLASLHFLKHFLVRISFPHSFSIGLGHIPLLISS

SEQ ID NO: 238202 - protein, 89 aa, Glycine max
  Clone ID: PAT_MRT3847_57121C.1.pep
ENIVGPTSNTPPSMSPISNASSNGSIPMKVKRPSLGSASRATAGTAASVARATAKLTARGQSISRSASPGPTKKRARSHMSSSGPGWQK

SEQ ID NO: 238203 - protein, 183 aa, Glycine max
  Clone ID: PAT_MRT3847_57122C.1.pep
QKQELVEVEEARTTDPLTCTTIRGKERETVVINMFPVSMSNYDRISELIWENGQLSIHGLGGLQPTNPTQEKPISSGAHDTLESIVQHATFQRYQPSKFTREEGHAPTSNSKNNNSIGAPYYGGEVQGVLSSTRKRTWSNANNSMLEECDILSGCASAGATFCRDNDTTMMTWVSLDQSGRSL

SEQ ID NO: 238204 - protein, 94 aa, Glycine max
  unsure (1)..(94): unsure at all Xaa locations
  Clone ID: PAT_MRT3847_57123C.1.pep
PRSPSHFFARSLTVCRYSGFRHRCFCLHPVCGXKPSSFEWYSLLVCLFFSVWGFLVRPPLLSGWPAGLPLLPSAWLGRPRQRTGGSARPSVRSA

SEQ ID NO: 238205 - protein, 86 aa, Glycine max
  Clone ID: PAT_MRT3847_57124C.1.pep
RFILFGCGSDLLQQASKAVHGGGILYLASKEATLAKTTSSMVSAGTEPHTSPHLGPAPAATSPFTSTLSPLSLQNEQNTAPDHAPI

SEQ ID NO: 238206 - protein, 56 aa, Glycine max
  Clone ID: PAT_MRT3847_57125C.1.pep
LCPSIEFNCLVDGGILIRGNHPLLPPHRKCVQCFVPCIKKKKKKRKGARPTGSKRT

SEQ ID NO: 238207 - protein, 60 aa, Glycine max
  unsure (1)..(60): unsure at all Xaa locations
  Clone ID: PAT_MRT3847_57126C.1.pep
MPRSSSFSMVWNAETSSSXSRRIYVCSKDRFTRELHGSQVXLRATDPTEMLLDVCRSRLT

SEQ ID NO: 238208 - protein, 48 aa, Glycine max
  Clone ID: PAT_MRT3847_57127C.1.pep
STISSNTVDSVDIQHIMMHIHHSHHYLLTLLPERKHPCYIKPTNIRRL

SEQ ID NO: 238209 - protein, 105 aa, Glycine max
  Clone ID: PAT_MRT3847_57128C.1.pep
APRFPLSYLAIRLPLVILACYVLFCLLVLFLLGVCSARVLCLGLSLFPYVCGLLSALFSFPFRSRSLVCCSVFTCSCLPLPFAFVSGFMVPLPLLAVCLSRSRNQ

SEQ ID NO: 238210 - protein, 313 aa, Glycine max
  Clone ID: PAT_MRT3847_57129C.1.pep
MKIKQQSLFSASILLVIALITFFHTTSAQLTPIQAPVSSPPSPPPPQPQPPAFTPPSPPATAPAPGFNTVPLVPVTPSGAPTPTIPKAPSIDIVQILRKAKRFSVLIRHLKTTQLINQLNSQLLTSGSGGLTLFAPEDSAFSKLKAGFLNSLSDRQKVELLQFHTLSSFISISNFDTLTNPVQTQAGDDPKRLQLNVTTFGGSQVSMATGAVNASVTGTVYTDNKLAIYQVDKVLLPLDLVLPSEAPAPAPGKAKGASPKTDKTKSGAAGDDSDNGDNKDLPAEASSAGSSVSFKFGVVAFVLGVGLMGEAMV

SEQ ID NO: 238211 - protein, 73 aa, Glycine max
  Clone ID: PAT_MRT3847_5712C.1.pep
TYEKGTTPKSHTITTISVTVVMYILILLYAVVSVIKLGCQPWLGATATRIVTRCSSAISDHNKVQQMMSGRLG

SEQ ID NO: 238212 - protein, 57 aa, Glycine max
  Clone ID: PAT_MRT3847_57130C.1.pep
VNSCGYTYDHNSFTNYNHFFDPWSKWIFSIFLSKIDCLSCSSVLIFTILRYLPVINE

SEQ ID NO: 238213 - protein, 71 aa, Glycine max
  Clone ID: PAT_MRT3847_57131C.1.pep
NPLKPGFFFLPPKPWKFLKFSPPRPHKFFTLGPNHPLGTKIFPCPICFPPHLKLGKNPPVKNPPFRLFQGP

SEQ ID NO: 238214 - protein, 55 aa, Glycine max
  unsure (1)..(55): unsure at all Xaa locations
  Clone ID: PAT_MRT3847_57132C.1.pep
SSSXSLCIHISFLFTSMLILLARTSFFFIQKSWCPSEGKRGGLDTSHLGLWGMVI

SEQ ID NO: 238215 - protein, 51 aa, Glycine max
  Clone ID: PAT_MRT3847_57133C.1.pep
QSIIKSNWVHKYQIVLLQQEYTWQKSFLCRLDKLHGLNDVIVQCLNMKIHA

SEQ ID NO: 238216 - protein, 42 aa, Glycine max
  Clone ID: PAT_MRT3847_57134C.1.pep
YFTCATEQFFFVSPITTRIFFRRQSCLIHCCQSTLNVYICPS

SEQ ID NO: 238217 - protein, 543 aa, Glycine max
  Clone ID: PAT_MRT3847_57135C.1.pep
MSVNNNNPSKGIGASSSSFGNAGVPSNSIPSNPGFSQSQGQAQIPVGYQGQFPLSQAHAIVQAQSKAQAQAQAQAAAAAHAQLQAHLQAQGLSLNQNQAGGLGVSSPLISTPGNASGKRIPLKPPMRPVGFSPPNSFSPLRPVELTPAARRKKQKLPEKQLQDKVAAILPESALYTQLLEFESRVDAALARKKADIQEALKNPPCIQKTLRIYVFNTFANQIRTIPKKPNAELPTWTLKIVGRILEDGVDPDQPGVVQKSSPLYPKFSAFFKRVTISLDQRLYPDNHIILWENARSPAPHEGFEVKRKGDKEFTVNIRLEMNYVPEKFKLSPALTEVLGIEVDTRPRIVAAIWHYVKARKLQNPNDPSYFHCDPPLQKVFGEENMKFTMVSQKISSHLFPPQPILLEHKIKLSGNSPAGTACYDVMVDVPFPIQRELSALLANVEKNKEIETCDEAICGIIRKIHEHRRRRAFFLGFSQSPVEFINALIESQSKDLKLVSGEPSRNAEKERRSDFFNQPWVEDAVIRYLNRKPAVGSDAPGST

SEQ ID NO: 238218 - protein, 113 aa, Glycine max
  unsure (1)..(113): unsure at all Xaa locations
  Clone ID: PAT_MRT3847_57136C.1.pep
XXXGXXGAXXXXCXXXXVXAXGXAAXGXXXWXLXFCXXXXXXVXXXXRXXRXXQXXRVXXLXWXXXXXXXWCXSXWXXSXXXVXXXSXPXXXXXXXXXXXXSXVVXALXAXXV

SEQ ID NO: 238219 - protein, 67 aa, Glycine max
  Clone ID: PAT_MRT3847_57137C.1.pep
GCSCTFTCWSKLKHLHTILSEWIPLINVDVAHSHPNCGFLSFVITQLKSKSRTHYDDNDDRRGRLLL

SEQ ID NO: 238220 - protein, 50 aa, Glycine max
  unsure (1)..(50): unsure at all Xaa locations
  Clone ID: PAT_MRT3847_57138C.1.pep
MSRCPGNCGCRSSCTCCNCCRGCEMYPDLSYTDLTTTXTSVMGEAPVQAQ

SEQ ID NO: 238221 - protein, 51 aa, Glycine max
  Clone ID: PAT_MRT3847_57139C.1.pep
LLFFLYAEEFNKMTPLPTTLAIVSTHYLVSLACANFQSHLNVANTYLCKIC

SEQ ID NO: 238222 - protein, 97 aa, Glycine max
  Clone ID: PAT_MRT3847_5713C.1.pep
ALDSQPHRDPFCYNDGFSIHMQSHIYSLHIGCRRQFIHLQPTQIQLRLSREAHSHQQGLRDTPRPAAPPRRTSRTPTFGPMRSNWPMSVEIPPAARS

SEQ ID NO: 238223 - protein, 74 aa, Glycine max
  Clone ID: PAT_MRT3847_57140C.1.pep
VGGKCGRKTISPREPLWPRFPPGFKGPPIRKNGAPPGARPEFPGGPPGPPPGPGPLTGGPQRWVPKGPGPPGFS

SEQ ID NO: 238224 - protein, 154 aa, Glycine max
  Clone ID: PAT_MRT3847_57141C.1.pep
TVFTIANRYGDYIRTGWRNILDCILKFHKLGLLPARMASDAAEESELSTETEDGGKQNTNSLSLSRLPSVNTPKRPSGLMSRFSQLLYLGAEEPRSEPTEEQLAAQQCTLQTIQKCHIDSIFTESKFLQAESLLQLAKALTSAGVWPKKGNSTS

SEQ ID NO: 238225 - protein, 260 aa, Glycine max
  unsure (1)..(260): unsure at all Xaa locations
  Clone ID: PAT_MRT3847_57142C.1.pep
GIPGSTHASGLILTILDLYKKDQDIAFLATCSLHNLLNASLLSESGPPMLDFEDLTLVLSTLLPVVSFNNDSKDQSDFPVGLKMYNEVQHCFLTVGLVYPDDLFLFLVNKCRLREEPLTFGSLCILKHLLPRLSEAWHSKIPLLVEAVKSLLEEQNLGVRKALSELIVVMASHCYLVGSSGELFIEYLVRHCAITDQNRSDLESTPNKRIEMKIGAVTPGELRAVCEKGSLFXTITIPEMEHILWPFLLRDDIPLTYTGA

SEQ ID NO: 238226 - protein, 47 aa, Glycine max
  unsure (1)..(47): unsure at all Xaa locations
  Clone ID: PAT_MRT3847_57143C.1.pep
MAPKPPITGLXXGXNKGHXXTNFELPPGPSDRKGKTSMRVHFVRNLI

SEQ ID NO: 238227 - protein, 64 aa, Glycine max
  Clone ID: PAT_MRT3847_57144C.1.pep
KLFLFQFFRKLIYYSECVRRKIVKQSYFVERKVSLCDSVINYCNYRVRYLNCKVIYYLGCVIIL

SEQ ID NO: 238228 - protein, 89 aa, Glycine max
  Clone ID: PAT_MRT3847_57145C.1.pep
MAPKFSRSMHYVSATDRLGLNSSVCRLSLHVRTCMDLRPLSQPLTFFFFPLFFSIVTLIGPLYHSSHDHVLYHLSHDHQAHKSAQRFQA

SEQ ID NO: 238229 - protein, 70 aa, Glycine max
  Clone ID: PAT_MRT3847_57146C.1.pep
ALLFMIAFYICGENYLEGSYTSFQTRESSRYVGLAFFWKFGSVLNWEKARRCGYAPKIISFLQAGKFMAW

SEQ ID NO: 238230 - protein, 57 aa, Glycine max
  Clone ID: PAT_MRT3847_57147C.1.pep
PYYNNAFCFNTTYLLCADVLYIPVDSPKFGANCLEPSALLESKQGIWRYSFKFKVQF

SEQ ID NO: 238231 - protein, 53 aa, Glycine max
  Clone ID: PAT_MRT3847_57148C.1.pep
TTPPPPPTPIQGARPFPLSSPYPSDSLFDVWFTHPYKSPPRTGSYSGYSSHHR

SEQ ID NO: 238232 - protein, 56 aa, Glycine max
  unsure (1)..(56): unsure at all Xaa locations
  Clone ID: PAT_MRT3847_57149C.1.pep
APRPYASXRRKPLADGLSDRIQYLVGARSRCRRNISDPGKSCNCARTWLGLINQPH

SEQ ID NO: 238233 - protein, 67 aa, Glycine max
  Clone ID: PAT_MRT3847_5714C.1.pep
SLQGVPQGHMRCLPSSRPNVSKESPDTYISEKLETPKYHDCGIDSTRHASSHQEHAQQRLARPTALC

SEQ ID NO: 238234 - protein, 50 aa, Glycine max
  Clone ID: PAT_MRT3847_57150C.1.pep
YLSINMIIYSKSSLKFAELSNGNITTPTSCITRKETLHHHGTVFRKAQEY

SEQ ID NO: 238235 - protein, 48 aa, Glycine max
  Clone ID: PAT_MRT3847_57151C.1.pep
KDGKSWLIDCSFGLLFCQVTSQDKAPSVISRVLKKNNRDSAVASEYEL

SEQ ID NO: 238236 - protein, 91 aa, Glycine max
  Clone ID: PAT_MRT3847_57152C.1.pep
MLFLPLHIPILRRPHHQHALWRPNSGSRRRLLIFRLIAAMANFLCYDVYDLELTKVSDNSELRSLLIQTTNRSIIVIEDIDCSVDITADRT

SEQ ID NO: 238237 - protein, 44 aa, Glycine max
  Clone ID: PAT_MRT3847_57153C.1.pep
RVTHNPNKPCFLIEINIHILYYQTPSFFSPRKTDTKLLYNIFTR

SEQ ID NO: 238238 - protein, 363 aa, Glycine max
  Clone ID: PAT_MRT3847_57154C.1.pep
MVGGGVSRISHHFRDCDFHFHFHFTFTYSAFQTFHLSSPPLPLKPRWGGISQTTVPSNYRCFGTPPKSPGEIPLLFDCFSQQEEDREILSDGTSAVAGGIVALGKFDALHIGHRELAIQASRAGPPFLLSFVGMAKVLGWEPRAPIVAKCDRKRILSSWVPYCCNMVPEEFEVEFSSVRHLNPRQFVEKLSKELRVRGVVAAAGDALELVKLCEEYGMEAYIIKSVMDKNRFSADMNSVTNSKERGQVSSTRVREALAVGDLKYVSELLGRPHRLILMATDQERFSTGQYKVSAPRSCLLNLAPKEGLYEKCSLLLDQENVVQCSVVIDSKFVHIETDYGGLSDIFCSQNLKFLFIEFGDSCT

SEQ ID NO: 238239 - protein, 81 aa, Glycine max
  unsure (1)..(81): unsure at all Xaa locations
  Clone ID: PAT_MRT3847_57155C.1.pep
DNFISDNEYVRPYFSGCKXKSSVGWRRMTITEGIVTTRGTWQFIKXGDRDFIKINFKHKSXNGLWVALVDTVSLWTHLLYG

SEQ ID NO: 238240 - protein, 58 aa, Glycine max
  Clone ID: PAT_MRT3847_57156C.1.pep
IRKSWHTSSFQQSQNLERFPREYQSLYIVWDGQSGSSLAFNYDFIYSFFFYYFFFIYF

SEQ ID NO: 238241 - protein, 101 aa, Glycine max
  unsure (1)..(101): unsure at all Xaa locations
  Clone ID: PAT_MRT3847_57157C.1.pep
QNQKTPQKKKGGISFSCGPGDSPLQAFRAFXIGLTSFATKPACQRKHDHGSSIPVADNKPRQVTPPPYKMFVFSEGRRESGLPRSPLWNENPLFAGQVPFV

SEQ ID NO: 238242 - protein, 187 aa, Glycine max
  unsure (1)..(187): unsure at all Xaa locations
  Clone ID: PAT_MRT3847_57158C.1.pep
FDYVIFSGGQWFFRPLTFYENXXVVGCQKCHNLMEDPLNLYGYRHAFRTAFRTVINLKGFKGVVFMVTHSPNHFENGEWNKGGGCNRTLPVTREESAFLRPYGLDEFYQTQVEEFTAAEKEAREKGLRFGLMNITGVMLMRPDGHPHKYGHNLDRNVSVNDCVHWCMPGPVDTWNEFLLHMMKKERL

SEQ ID NO: 238243 - protein, 389 aa, Glycine max
  unsure (1)..(389): unsure at all Xaa locations
  Clone ID: PAT_MRT3847_57159C.1.pep
MADSASASASSSRMWCSIPERVQLHAAMLALQFGYAGFHVVSRAALNMGISKLVFPVYRNIIAFLLLLPFAYFLEKKERPAITLNFLLQFFLLALVGITANQGFYLLGLDNTSPTFASAIQNSVPAITFLMAVILRIEQVRLNRKDGIAKVAGTIFCVAGATVITLYKGPTIYSPTPPLQSERLSSSXFGTLSLGDAKXKNWTLGCLYLIGHCLSWSAWLVLQAPVLKKYPARLSVTSYTCFFGLIQFLVIALIVERDAQAWIFQSGGEVFTILYAGVVASGIAFAVQIWCIDRGGPVFVAVYQPVQTLVVAIMASIALGEEFYLGGIIGAVLIVVGLYFVLWGKSEERKFAKEHAAITSTPEHSGIRSSSHAKTSLTQPLLPSSTENV

SEQ ID NO: 238244 - protein, 283 aa, Glycine max
  Clone ID: PAT_MRT3847_5715C.1.pep
MLLRNRSRAVTKPGLMADHGTQNSPNQNYAKTIPSLFGSPKFRDFTNKCLSSGTEALRSPTSILDARALSPFAFGNPFSTLPNKTSSPNRTSWDKPDSKGIGLALVGALKDDDNPICHNSEPKKGNVLLRVRIPFESQFQTCVDDFGIAKTNGSKNSSGSGICSKDCCDSPRSGGVLSWSAMELSEEYTCVISHGPIPKATHIFNNCIMVETYYSLPPKQNSHSAATSGNFLSFCYTCKKHLDQTKDIFIYRGEKAFCSRECRHREMMLDGIENLEFESNGYS

SEQ ID NO: 238245 - protein, 50 aa, Glycine max
  Clone ID: PAT_MRT3847_57160C.1.pep
GIYKKHEHKSNKEFTRNIIQLICHIVRNNPKPWSSYSAFPFLEQNKLKEA

SEQ ID NO: 238246 - protein, 325 aa, Glycine max
  unsure (1)..(325): unsure at all Xaa locations
  Clone ID: PAT_MRT3847_57161C.1.pep
MDVPNSPEISVDVPPYLRVHKDSTVERIAGTQVVPAGLDSDTNVVSKDILVVPETGVTGRLYRPNSTPPTANKLPLLVYFHGGAFCISSASDPLYHTSLNNLVAEANVVALSVNYRLAPEHPLPTAYQDSWSAIQWVADASRAKQHHQEDWIRDNVDFDRVFLAGDSAGANLGHYMALKLNNNFPTNDGFDFKVAGLIMVNPYFWGKEAIGXITDPERKKMVDKWWSFVCPSDKGNDDPLINPFVEEAPGIEGVACDRVLVTVAEKDILRERGKLYHKMLSNSDWRGTAEFHETPGEDHVFHIFNPNCEQAKSLIKRIAHFINEH

SEQ ID NO: 238247 - protein, 59 aa, Glycine max
  Clone ID: PAT_MRT3847_57162C.1.pep
RVLLLITTFSILTGQCFFCVGVLARILTTGFYRSPLKTLPWGSVSRRPPRRSQTDKIHC

SEQ ID NO: 238248 - protein, 315 aa, Glycine max
  Clone ID: PAT_MRT3847_57163C.1.pep
MEAPSNLEISVDVPPYLRVHKDGTQVVPAGLDSDTDVVSKDILIVPETGVTARLYRPNSTPKTAKLPLLLYFHGGAFCISSASDPLYHTSLNNLVAEANVVALSVNYRLAPEHPLPTAYQDSWSAIQWAASNAKHHQEDWIRDNVDFDRVFLAGDSAGANMGHYTALKLNNNVPTNDDFDFKVAGLIMVNPYFWGKEAIGVEITDPERKKMVDKWWSFVCPSDKGNDDPLINPFVEEAPGIEGVAGDRVLVTVAEKDILRERGELYHKRLSNCGWKGIAEFYETPGEDHVFHIFNPDCDKAKSLIKRIADFINEH

SEQ ID NO: 238249 - protein, 107 aa, Glycine max
  Clone ID: PAT_MRT3847_57164C.1.pep
WLIQQSSLWKFFFSTIDVPSNKFKFLRVFVPHAGGFFFPCRAGFSQNFQGPIFSRGGDENTIPGSFPPRFCWASSICSSLTQFQGDKVGTVFPMASKKMRIHVGRGA

SEQ ID NO: 238250 - protein, 60 aa, Glycine max
  Clone ID: PAT_MRT3847_57165C.1.pep
LSNESFDPLTQNPLHALGRIGRTKTQLGPPYSCDDPTLNKLYKILTRWSSTNQNMVEEEE

SEQ ID NO: 238251 - protein, 47 aa, Glycine max
  Clone ID: PAT_MRT3847_57166C.1.pep
ATRTNRLGITQMQEQSILHIGYNSLITRAAITYLTWDVGTESGLADK

SEQ ID NO: 238252 - protein, 74 aa, Glycine max
  Clone ID: PAT_MRT3847_57167C.1.pep
RPKRQPTRPPTRPLLVRFVLASSLSLFCLARTELFTGLMSLDSRSSNLYIYPLLLNKGGCGLEKKKKKKKKKKK

SEQ ID NO: 238253 - protein, 130 aa, Glycine max
  Clone ID: PAT_MRT3847_57168C.1.pep
YYSAAAFLPFFFKQQILVYTPALPTMGIGMFAKSTTLFHQKIPHITFMPISTIEIHLCTNTHKRHRPMDCTFYKLKSHQLHCLCRGCTCPTLEHNKIQTGHYVHLRVEPSFPRILTLSLIDYTFRLFLPP

SEQ ID NO: 238254 - protein, 56 aa, Glycine max
  Clone ID: PAT_MRT3847_57169C.1.pep
GSRRVFELTTFLSGPRIIATTRVLFSNVLRYPSAQTESTTGRDRRVSPPTAEPENG

SEQ ID NO: 238255 - protein, 119 aa, Glycine max
  Clone ID: PAT_MRT3847_5716C.1.pep
QTTTTGGEQEILDDKEPMFEKPLTPSDVGKLNRLVIPKQHAEKYFPLSGDSGGSECKGLLLSFEDESGKCWRFRYSYWNSSQSYVLTKGWSRYVKDKRLDAGDVVLFERHRVDAQRLFI

SEQ ID NO: 238256 - protein, 40 aa, Glycine max
  Clone ID: PAT_MRT3847_57170C.1.pep
GSSQNSLILCLFTYYNLLSATGNETISHSRFHLSYPDVRI

SEQ ID NO: 238257 - protein, 179 aa, Glycine max
  Clone ID: PAT_MRT3847_57171C.1.pep
MSHETCPSVKNVLLLDSDGKRVAVKYFSEDWPTNSAKENFEKVVFNKTQKTNARTEAEIAMFENNIVLYKFVQDLHFFVTGGDYENELILATVLQAFFDSVGLLLRGNVDKKEALENLDLILLCIDEIVDGGIILETDPNVIAGKVASNSIDSGAPLSEQTLSQALATAREHLARSLLK

SEQ ID NO: 238258 - protein, 65 aa, Glycine max
  unsure (1)..(65): unsure at all Xaa locations
  Clone ID: PAT_MRT3847_57172C.1.pep
MGRKLFVGXNWKCXGXTEEVKKIVTTLXEXKVPGXDVVEVVXRPPFVXLXXVKSLLRPDFHVSAQ

SEQ ID NO: 238259 - protein, 82 aa, Glycine max
  Clone ID: PAT_MRT3847_57173C.1.pep
RVSMDNASCHDCTLIKVDSVNKPGILLEVVQILTDLDFIITKAYISSDGGWFMDGMFETELNFYLKCIKNYNDVSCSCFLLA

SEQ ID NO: 238260 - protein, 82 aa, Glycine max
  unsure (1)..(82): unsure at all Xaa locations
  Clone ID: PAT_MRT3847_57174C.1.pep
MPRGDEMAAWTYTYPDYPLSKANPLPKFKLSKPVLCIAGLLQIDLLGXILRQKMAGVLYTSASHVQILGGLSLPSNNDYILK

SEQ ID NO: 238261 - protein, 43 aa, Glycine max
  Clone ID: PAT_MRT3847_57175C.1.pep
NVSFLRYLARVSTYLACSLQKYLIVFFVLNWPCSKNETFGTFL

SEQ ID NO: 238262 - protein, 94 aa, Glycine max
  Clone ID: PAT_MRT3847_57176C.1.pep
CSALGCELCVNVSGVASSKLTGLRFRLAGKAVLSPPVGNYFIEPAEGVKCLAVQPVRPDSGFSVIGNLMQQGYLFEFDLDRSRIGFTRHGCAVR

SEQ ID NO: 238263 - protein, 37 aa, Glycine max
  Clone ID: PAT_MRT3847_57177C.1.pep
NLKGFFFPFFLLIKNYFLVKEWFRFDAMGILLEFWAN

SEQ ID NO: 238264 - protein, 68 aa, Glycine max
  Clone ID: PAT_MRT3847_57178C.1.pep
NNCPARGPRRTQVPTPGPRELELPCLWLPSIIVVFYKKSLGPPPQNIPYRICPNPSPIIWRSRKSRIR

SEQ ID NO: 238265 - protein, 112 aa, Glycine max
  unsure (1)..(112): unsure at all Xaa locations
  Clone ID: PAT_MRT3847_57179C.1.pep
FYGDGGGPPPCYDAYYGRPVYXSYGGSRPCYVNRCDENFCEKNPSACPIMWSIALLLTYFIQRISLSCAAHACKLLQRGVFPFYWWSGHPPHQSKEKWSLFFWGWEDKMFRP

SEQ ID NO: 238266 - protein, 70 aa, Glycine max
  Clone ID: PAT_MRT3847_5717C.1.pep
PFLKKMGGGLPPKPFPKFPLGIPQKGPPGGVTQKRGRGNSQRDQSQKIFFFPPRLLRELPRGDYFPPPPF

SEQ ID NO: 238267 - protein, 98 aa, Glycine max
  Clone ID: PAT_MRT3847_57180C.1.pep
TCYVGDGDVEGVGNHNSILLLSLSSPPPFLWLFLSIPTKDRIFTPPPVHHRFSLLSSPLPSHFSAFLWILLFHFRQLILSLLQLLYGEHGLSETGEIR

SEQ ID NO: 238268 - protein, 84 aa, Glycine max
  Clone ID: PAT_MRT3847_57181C.1.pep
MNIYILFKKKKKKKKKKKKKKKKKKKKKKKKKKKKKKKKKKKKKKKRGRPFKKTKFYGPGPKKKNFFKKPPKIKKPGRYQKKSQ

SEQ ID NO: 238269 - protein, 142 aa, Glycine max
  unsure (1)..(142): unsure at all Xaa locations
  Clone ID: PAT_MRT3847_57182C.1.pep
KKSNDKKGDEFKEIDEDKTDDHISANDIPEEDADITETMEGEPXNAKHESEKPVPHAMELEGGIKEKEDSTENDKVEVVMEDDETDEDEDNDNIDKSNEEKAAYSSGEKGSQKRRRGKINGEIVKDQLEELAKTEPRTPTID

SEQ ID NO: 238270 - protein, 86 aa, Glycine max
  unsure (1)..(86): unsure at all Xaa locations
  Clone ID: PAT_MRT3847_57183C.1.pep
FKLELQPPTALDTNADKQALTAAQKAVGPQRCKVEEXQRKEEAKLPQKTPLAAAKKVEGKXKAAPERAEAQQRTAEQEAHKRIKAR

SEQ ID NO: 238271 - protein, 69 aa, Glycine max
  Clone ID: PAT_MRT3847_57184C.1.pep
TNSSIIFVPAHHMLFTEQTITYVGKKKSQLPDVSLNAGTFRFILKKPDRYFLDFETYYFLRRMDSRLKR

SEQ ID NO: 238272 - protein, 54 aa, Glycine max
  Clone ID: PAT_MRT3847_57185C.1.pep
SHTTCKTNMNNSTRHKEQSQKSSQKSRLKPIDLNSGALRKIKGGYYEDGHNEQK

SEQ ID NO: 238273 - protein, 668 aa, Glycine max
  Clone ID: PAT_MRT3847_57186C.1.pep
MGVPSAVASKLSLLAKTIPVTACGLLKHESKVSVLHFSVKKHEAYDAPIKSKEELIFHVGFRQFVGWPIFSSEFINTDKNKMERFLHAGRFSVASIYAPISFPPLPTIILKRDGENAAPAVAAVGSLKTVDADRIILKRVILTGYPQRVSKRKASVRHMVNHPDDVSGAGDFQLSKIEVLKDPCPLNSRKNQDLMDADEMHDTGVIGSLCPDSQNQEALVVEIIPDPLAGEQTWPTEAEIAKADEDKKKKKIKKRSLPHGTSEYQAAWIVDDSDEEESDCDNENDDGMVLDEGEDGFPGQENRYSDFDGDGASLRLGDSDEETDIDSVMMEVDNLTREKIEDELKELKEAHAADEEFPDEVDTPLDVPARKRFAKYRGLKSFRTSSWDPKESLPQDYARIFEFDNFKRTQKHVLAKALELDQENREDCIPVGSYARLHIMGVPSAVASKLSLLAKTIPVTACGLLKHESKVSVLHFSVKKHETYDAPIKSKEELIFHVGFRQFVGRPIFSSEFINTDKNKMERFLHAGRFSVASIYAPISFPPLPTIILKRAGEDAAPAVAAVGSLKTVDADRIILKRVILTGYPQRVSKRKASVRHMFYNPEDVKWFKPVELYTKRGLRGRIKEPVGTHGTMKCLLNGVLEQRDTVCMNLFKRAYPKWPTHHFPLSE

SEQ ID NO: 238274 - protein, 134 aa, Glycine max
  unsure (1)..(134): unsure at all Xaa locations
  Clone ID: PAT_MRT3847_57187C.1.pep
GKFNXYKXXXVHGXFGKGVQALLLNXGLKIVLELFXXGXSRVKKCXDKGQPFMSXXLQVWINGXKHFGALNVKPKIQMVKPFTKVYSFPERNYVPWARAHPESSKTQIVGLFTFVPFMKGXKRKPSLXILKKIK

SEQ ID NO: 238275 - protein, 323 aa, Glycine max
  unsure (1)..(323): unsure at all Xaa locations
  Clone ID: PAT_MRT3847_57188C.1.pep
MGLSKENLKGLILALVSSGFIGASFIIKKQGLRRAAAVSGVRAGVGGYYYLLEPLWWVGMIXLFLLSAVLADIILKEKLHNLGILGCIMCIAGSIIIVIHAPKEQPITSVLEIWNMATQPAFLAYVGSVIVLVFILVFHFAPRCGHTNVLVFTGICSLMGSLSVMSVKALGTSLKLTFEGKNQLIYPETWFFMLVVAICVIMQMNYLNKALDTFNTAIVSPIYYVMFTTLTILASVIMFKDWDGQSGXTIVSEICGFIIVLSGTIMLHATKDFERSSSFRGSDPLSPTLSARLFTGNGDSLLKQDEENGSPESNMRSRRQELY

SEQ ID NO: 238276 - protein, 135 aa, Glycine max
  unsure (1)..(135): unsure at all Xaa locations
  Clone ID: PAT_MRT3847_57189C.1.pep
MGDMVVEXLATLKPTYELTLSPSGNNGGSLISVITEGVGELSVIDLEVAQKACQEVLEKVKLLHGGVAISSKGSPLELVNGDGVDNEIRCLDDPPTEIREEEDEMEPGVVSGTAKGTRRRETSSRIPSLRTRACD

SEQ ID NO: 238277 - protein, 63 aa, Glycine max
  Clone ID: PAT_MRT3847_5718C.1.pep
HGPFCRHFSDCWTFGFNDLHHSVQRGLWAYPTLSMPSVNGCYRKVMAPSRESRPSDFHLFTEE

SEQ ID NO: 238278 - protein, 150 aa, Glycine max
  Clone ID: PAT_MRT3847_57190C.1.pep
LKLTFEGKNQLIYPETWFFMLVVAICVIMQMNYLNKALDTFNTAIVSPIYYVMFTTLTILASVIMFKDWDGQSGGTIVSEICGFIVVLSGTIMLHATKDFERSSSFRGSAPSSPTLSARLFTGNGDSLLKQDEENGSPESNMCSRRQELY

SEQ ID NO: 238279 - protein, 66 aa, Glycine max
  Clone ID: PAT_MRT3847_57191C.1.pep
HHGIFGKSVICDSRYHMLQMLASIVANELLNGHNVMMILCNEICIYSCLCTHNMNYLRLLRKRMNT

SEQ ID NO: 238280 - protein, 261 aa, Glycine max
  Clone ID: PAT_MRT3847_57192C.1.pep
MVSSSAVLADIILKEKLHNLGILGCIMCIAGSIIIVIHAPKEQPITSVLEIWNMATQPAFLAYVGSVIVLVFILVFHFAPRCGHTNVLVFTGICSLMGSLSVMSVKALGTSLKLTFEGKNQLIYPETWFFMLVVAICVIMQMNYLNKALDTFNTAIVSPIYYVMFTTLTILASVIMFKDWDGQSGGTIVSEICGFIIVLSGTIMLHATKDFERSSSFRGSDPLSPTLSARLFTGNGDSLLKQDEENGSPESNMRSRRQELY

SEQ ID NO: 238281 - protein, 52 aa, Glycine max
  Clone ID: PAT_MRT3847_57193C.1.pep
QSAGITSMSHRAWPVYFIGFKEKIHLIFLLCFAYKVASPNISRNSNYINMIN

SEQ ID NO: 238282 - protein, 38 aa, Glycine max
  unsure (1)..(38): unsure at all Xaa locations
  Clone ID: PAT_MRT3847_57194C.1.pep
XKKAVLFXGHAYFIVCVPTEXMCKYYSEIITSRKDAKN

SEQ ID NO: 238283 - protein, 114 aa, Glycine max
  unsure (1)..(114): unsure at all Xaa locations
  Clone ID: PAT_MRT3847_57195C.1.pep
SDIKCLPKDNAILEGDLFGXIYGVAYGLFTVLLKKISGEERERVHVHMLLGYVGLWTLVALWWLMWTLSAFGIVPKFTIPHSXGVDEGALANGFXLCVVWTTPPVANLGMSLTI

SEQ ID NO: 238284 - protein, 111 aa, Glycine max
  Clone ID: PAT_MRT3847_57196C.1.pep
INGLGRSLQKDGFIWRSLGHTLTTHGLYYAGNCKQSTGAKDTTTWLMGVLIQTMAIKIQVTCAQQVFIAGQIQFPPMGLKMHLPSGRYVMDQHDTYTIRCNGSDSWRDWRG

SEQ ID NO: 238285 - protein, 173 aa, Glycine max
  Clone ID: PAT_MRT3847_57197C.1.pep
MEPIEQGSQPEKEKWKGKATTEVKGAKAEQVWPLLEDFFGLDKWFPTLSTCIPVEGISGQPGCVRFCAGFKTPVDDGKQTVNWTKQKLLSIDPTQRVFSYSIVDGNVGFHSYVSTLKVLPMAEGCEIEWLYEVEPVEGWKLEHLDSFIDTGLQVMAQRMQAALKTMEEAVFMA

SEQ ID NO: 238286 - protein, 92 aa, Glycine max
  Clone ID: PAT_MRT3847_57198C.1.pep
FSSLFAAFFQLSKIYPTSSLPPVFFLLPKPELLHDLSSFCWLFLPVDCHAYHIILQIFSFIDVEKSGTITFRQVTICNNLPCFCAILIRSSN

SEQ ID NO: 238287 - protein, 137 aa, Glycine max
  unsure (1)..(137): unsure at all Xaa locations
  Clone ID: PAT_MRT3847_57199C.1.pep
MLLCISLMFSYLAKHYAYGGWLTRQRMHVDCMDAEWTAAYNKSGIAADAAAEYIVNILTHAALLFSNTXMMHGCEGQHEPXGNTSLSIESIIELXSCEATIKATDHGTASQPLTHGPKNERRIYTILAAAYGAMAPN

SEQ ID NO: 238288 - protein, 86 aa, Glycine max
  Clone ID: PAT_MRT3847_5719C.1.pep
FLGPGPAPLSSLPVVLRLSSSLSFWCRVSSGVLAVSGRGGRPPRSCSRGGFLALGRVVGAPRGPLGFAACGARCSSGYYGRVGRPG

SEQ ID NO: 238289 - protein, 126 aa, Glycine max
  unsure (1)..(126): unsure at all Xaa locations
  Clone ID: PAT_MRT3847_571C.1.pep
TKRALDRVWYGVIDDRIVGAVWKYVXXVDQKERHKNVQEPYEPVQHGESEVKGKQFLGGEEFGLVCTSSVFIASWIPFSLXEIXRVXHVILXXXXLPLLSKWSLXVCIQQFVPVVLPPRDPXGAHF

SEQ ID NO: 238290 - protein, 86 aa, Glycine max
  Clone ID: PAT_MRT3847_57200C.1.pep
RSGIALECLIDAAQSRKMALRSMRDLAISVILTNITRTQHFDSVVFIQKAQILPLPMTLYGSISASMYSHLATPRSAREPTLVLQG

SEQ ID NO: 238291 - protein, 174 aa, Glycine max
  Clone ID: PAT_MRT3847_57201C.1.pep
MKINVKTLKGTHFVLQVNPQDTVAVVKKNIETAQGADVYPAAQQMLIHQGKNKVSSGASSAPSNLGTQPQSSLPPTSSTSQPPASAVGQGESNSEQSPVITPPTIAVPSIYDHAASNLMAGSNLETTIQQILEMGGGNWDRDTGTGALHAAFNNPERAIEYLYSGNPERADVPA

SEQ ID NO: 238292 - protein, 375 aa, Glycine max
  Clone ID: PAT_MRT3847_57202C.1.pep
MKINVKTLKGTHFVLQVNPQDTVAVVKKNIETAQGADVYPAAQQMLIHQGKVLNDATTLEENKVVENNFVVIMLSKNKVSSGASSAPSNLGTQPQSSLPPTSSTSQPPASAVGQGESNSEQSPVITPPTIAVPSIYDHAASNLMAGSNLETTIQQILEMGGGNWDRDTVTGALHAAFNNPERAIEYLYSGIPERADVPAAVRSLITGQAENSSIQSTQPAVPTGGPNTNPLNLFPQGLPNMSAIDNRGDLDSLRNREEFQALRETMRENPQILQPMIQELGQQNPQLMQIIQDHQEDILDLMNEPEGDENLQSQLDSMISGTVTITPEENEAIQRLEAMGFHRDIVVEAFFACNKNEDLAANYLLDHPDEFMPTD

SEQ ID NO: 238293 - protein, 78 aa, Glycine max
  Clone ID: PAT_MRT3847_57203C.1.pep
RRAGLALTTWGLTFKGHRGDTACPVTNHYTFWHLQYRLKPTDQTWGTCMISKRACPETNDTSMTILGTVQRRQCETEW

SEQ ID NO: 238294 - protein, 32 aa, Glycine max
  Clone ID: PAT_MRT3847_57204C.1.pep
INGSYLHIVLRETPRHVEMGCSKSGEWSCSIA

SEQ ID NO: 238295 - protein, 239 aa, Glycine max
  Clone ID: PAT_MRT3847_57205C.1.pep
MSMKQKHASGFFKSPNLNFCPFSHSHSVHRRLRVADILLADEDHDGDAVRETPSTKCFSPRRLVASLLAPLRPTKGLRLQQRRQNETGDLEAPSPSSPTNELKGSDESTGQLHESDTSFKLGVGCGLLYLIAASKNELSKMIELQKEMEMLLQNAKGELQSKDSLLKPLKQSDTLALSITDIQEVSSSSSHLSIHSNIQYVQPESKSDTVPNRFLGIYTSEQDECAEEINELRAEFENE

SEQ ID NO: 238296 - protein, 54 aa, Glycine max
  Clone ID: PAT_MRT3847_57206C.1.pep
TFKQFLHGRKQLACSLLLYNVEMQKFSCYGCKGTFIIRHTFCLKNWIKQDFASP

SEQ ID NO: 238297 - protein, 112 aa, Glycine max
  Clone ID: PAT_MRT3847_57207C.1.pep
TLSHITNGLYLCSNKNTLFTHSTKRFFRPFKPSSSPFPLQCTTKTTCSTLQQQQQPRRNNNYNVIGILEERGLVESITSDALRSACLTPAPLKVYCGFDPPRESLQPRNLLA

SEQ ID NO: 238298 - protein, 50 aa, Glycine max
  Clone ID: PAT_MRT3847_57208C.1.pep
WPGPSSAIDKTEDAKITDVDKALDSMTPVDSWKATLLLRVKYKLKTQELK

SEQ ID NO: 238299 - protein, 92 aa, Glycine max
  unsure (1)..(92): unsure at all Xaa locations
  Clone ID: PAT_MRT3847_57209C.1.pep
MAPRLCIISAAARRLLRKPGPCXGDLAAARAVRFYSKDSEGXWFRSLFVHKVDPRKDXHSTLLSKKETSNLYKIQFHNVKPECLXXYNSLTE

SEQ ID NO: 238300 - protein, 96 aa, Glycine max
  Clone ID: PAT_MRT3847_5720C.1.pep
GVAIGGGIEKGGGIGGGIGKGGGFGGGVGGGSGGGIGGGIGKGGGIGGGIGKGGGFGGGVGGGSGGGIGGGIGKGGGIGGGIGKGGGFGGGGIGHH

SEQ ID NO: 238301 - protein, 98 aa, Glycine max
  Clone ID: PAT_MRT3847_57210C.1.pep
QNVTASVLKDSLNVSSTFLVYYWQIWEIVYAKDGSVKEVLNVMQLKGHKSAVTWLCFTPNSEQIITASKDGSMRIWNINGKQILKDDYFLLTEFYFFF

SEQ ID NO: 238302 - protein, 487 aa, Glycine max
  Clone ID: PAT_MRT3847_57211C.1.pep
MEESPGGRRKRAHPSSSSSSPSPISKKPQTFPSFQDIPNLPSNIKSLCHLIATTSAASVEHSLQSAAISVTPHDVEEVLKLSYGFPGQAVKFFRWSGRHLNDNHTPYSWNLVVDILGKNRFFDAMWDAIKSMRLEGLLSLATFASVFSSYVAADRIREAIMAFEIMDNYCVVRDVVALNSLLSAICSNGRTLDACDYLQVAKKLVRPDTDTYAILMEGWEGENGVVGAKETFAEMVIEIGWDPLNVPAYDSFLCTLVRGPDGLLEAIKFVDSMRDRRCFPGVRFLKAALDECLKSHDVRTAEFFWEVLVVGKVVQPTAEMYNLMIGLCCYRGDTDAARRMLDEMVYQGAFPDVETYNLLFKFLIKGRKLREASVVFAEMVKNECVPEQDNCDAAVKAYVDCGEPVMAIKVWKYLVENYKKDLERTANFLVVGLRDLNRLPEAVKYAEDMIDREIRLSSNTMSKLRQSLIKERREFVYEDLLRKSKSH

SEQ ID NO: 238303 - protein, 52 aa, Glycine max
  unsure (1)..(52): unsure at all Xaa locations
  Clone ID: PAT_MRT3847_57212C.1.pep
SQIRLQRVGVSRLFRPSAHDVSDRPILQLTLIIMTRSSQPRSIXAITGRVGA

SEQ ID NO: 238304 - protein, 183 aa, Glycine max
  Clone ID: PAT_MRT3847_57213C.1.pep
MEKLLLVYSLLFSVVIITCSATTYTVGDSSGWDISTNLDAWIADKNFRVGDALVFQYSSGQSVEEVTKENFNTCNTTNVLATHGNGNTTVPLTRAGDRYFVSGNKLYCLGGMKLHAHVQGDDKSLAPTLAPKAVAGSDQNTATLPQSPSSKKNTHLSAGAANPARDALHLVYIAPMAAIYGMM

SEQ ID NO: 238305 - protein, 463 aa, Glycine max
  Clone ID: PAT_MRT3847_57214C.1.pep
MNPDKFTHKTNEALVSAHEIATSNGHAQFTPLHLASSLISDKDGIFSQALSNAAGEESARAAERVINNALKKLPSQSPLPDEVPASNALVKAIRRAQTLQKKRGDTHLAVDQLILGLLEDSQIAELLNEAGVAASKVKSEVERLRGKEGKKVESATGDSTFQALKTYGRDLVEQAGKLDPVIGRDEEIRRVVRILSRRTKNNPVLIGEPGVGKTAVVEGLAQRIVKGDVPSNLCDVKLIALDMGALVAGAKYRGEFEERLKAVLKEVEDAEGKVILFIDEIHLVLGAGKGEGSMDAANLFKPMLARGQLRCIGATTLEEYRKYVEKDAAFERRFQQVYVAEPSVVDTISILRGLKERYEGHHGVRILDRALVVAAQLSSRYITGRHLPDKAIDLVDEACANVRVQLDSHPEEIDNLERKRMQLEVELHALEKEKDKASKARLVEVRKELDDLRDKLQPLMMKY

SEQ ID NO: 238306 - protein, 247 aa, Glycine max
  Clone ID: PAT_MRT3847_57215C.1.pep
MDQGRDSALTQMRKSVEKLGSSAEGYGDPTLMRFLIARSMEVDKAAKMFLQWKKWRSAMVPNGFISESEIPDELEARKIFLQGLSQDKFPVMIVQTNRHFASKDQIQFKKFVVYLLDKTIASAFKGREIGTEKLIGIIDLQNISYKNIDARGLITGFQFLQAYYPERLAKCYMLHMPWFFVSVWKLVSRFLEKATLEKIVIVSNEDETREFVREVGEEVLPEMYGGRAKLEAIQDVELPPLENGTTN

SEQ ID NO: 238307 - protein, 185 aa, Glycine max
  unsure (1)..(185): unsure at all Xaa locations
  Clone ID: PAT_MRT3847_57216C.1.pep
LHENHGIRGLSHLAVSHLPSPSVSQSNSFGLKASRVLRQYGNSTRIMASGDLSHSVAAASPENVLEXGKRDKRRMLHVVYRVGDLDRTIKFYTECLGMKLLRKRDIPEEKYTNAFLGYGPEDSHFVIELTYNYGVDKYDIGTGFGHFGIAVDDVAKAVELIRAKGGKITREPGPVKGGRSVIAFI

SEQ ID NO: 238308 - protein, 146 aa, Glycine max
  unsure (1)..(146): unsure at all Xaa locations
  Clone ID: PAT_MRT3847_57217C.1.pep
MVLVRVVPMASSSSIRPTLSSLRFLTPSSLSLSNPSSRISFSHLPSPSVSQSNSFGLKASRELRQHGNSTRIMASGHVSQSISAASPENVLEWVKQDKRRMLHVVYRVGDLDRTIKFYTECLGMKLLRKRDIPXEKYTNAFLGYGP

SEQ ID NO: 238309 - protein, 36 aa, Glycine max
  Clone ID: PAT_MRT3847_57218C.1.pep
NIPTNRLIWKICKSVLTSSIFYINTVSIHIIYRSII

SEQ ID NO: 238310 - protein, 61 aa, Glycine max
  Clone ID: PAT_MRT3847_57219C.1.pep
ALIVCSDVRGNFLNVAGPSITVLPVGRKSKVFLLGAGLWVGGLEIGLWGGFGGNFLEDIGL

SEQ ID NO: 238311 - protein, 51 aa, Glycine max
  Clone ID: PAT_MRT3847_5721C.1.pep
VCAVESPRSARHAYYAATQCARKSTPPCMRSHRLMTTVIVHHVRTVPMWML

SEQ ID NO: 238312 - protein, 76 aa, Glycine max
  Clone ID: PAT_MRT3847_57220C.1.pep
RLESPTKIFLLTKISFTAGSINKIAHLLVLKNLGELKIFRADLTVEGDFEAPISGCELVFQFATPMNFGSEDPEVY

SEQ ID NO: 238313 - protein, 75 aa, Glycine max
  unsure (1)..(75): unsure at all Xaa locations
  Clone ID: PAT_MRT3847_57221C.1.pep
MTALTQEELLAQHLEQQKIHDDEPVDEDDDDEEVDDDDDDEDDDHDEGLXRDASGTSKHTRSEKKSRKAMLILGM

SEQ ID NO: 238314 - protein, 69 aa, Glycine max
  unsure (1)..(69): unsure at all Xaa locations
  Clone ID: PAT_MRT3847_57222C.1.pep
NTRALVQTFAMIIFSGDNRLTERAILTCRDLDISAADYTFATEFTKLLPHYIRWHVCTXLIYILPSFLT

SEQ ID NO: 238315 - protein, 78 aa, Glycine max
  unsure (1)..(78): unsure at all Xaa locations
  Clone ID: PAT_MRT3847_57223C.1.pep
GLTHHAMGCLLTHXGWNSTLQALSLGLTVIAMPLWTDQITDAQLLKDVWNIGVKTGADQKQILRRETLTHCIKEILDD

SEQ ID NO: 238316 - protein, 216 aa, Glycine max
  unsure (1)..(216): unsure at all Xaa locations
  Clone ID: PAT_MRT3847_57224C.1.pep
MEHGFPKGKFKSLCVFCGSNSGNRQVFCDAAIXLANELVKRNIDLVYGGGSVGLMGLISQRMYDGGCHVLGVIPKALMPLEISGEPVGEVRIVSDMHERKAAMAQEADAFIALPGGYGTMEELLEMITWAQLGIHKKPVGLLNVDGYYNCLLALFDNGVEEGFIKHGARNILVTASSAKELMMKMEHYSPSHEHVAPHDSWQTRQLGNYAEQENAE

SEQ ID NO: 238317 - protein, 82 aa, Glycine max
  unsure (1)..(82): unsure at all Xaa locations
  Clone ID: PAT_MRT3847_57225C.1.pep
GVSNLVNGVLQFGLLEGANAPIGFKTDPSWIFKYSLGXNFGQNGYFKLCIVGNVCGVDSRVPPVAAISPSAHLIQKYARLCS

SEQ ID NO: 238318 - protein, 56 aa, Glycine max
  Clone ID: PAT_MRT3847_57226C.1.pep
FLDLKNIFLRGLFYFQNIKMMHHLQKLSGKLLLQLTFMFCVRACVFFPMKINGPLP

SEQ ID NO: 238319 - protein, 42 aa, Glycine max
  Clone ID: PAT_MRT3847_57227C.1.pep
TPPWYHKALYRVPFPIKKIKFVPNELKPRLRGVQRKKKEWAN

SEQ ID NO: 238320 - protein, 64 aa, Glycine max
  Clone ID: PAT_MRT3847_57228C.1.pep
CRNHLMGFCIEGQANQGRAPNEECPVAWGVCNHAFSFPCISRWVKTRQVCPLDNSEWGFQKYGP

SEQ ID NO: 238321 - protein, 651 aa, Glycine max
  Clone ID: PAT_MRT3847_57229C.1.pep
CQYSSSYSSFRSACVDPLPPPATPSSPPPATPSSPPPATPSSPPPSTPSSPPPATPSASPPSTPSASPPPSTPTTPSTSPPSTSPPSPPSHSPPSPPSGGGGGSTPSPPSRSSPSPPSGSRPTTPSPPSSSSSSISTGVVVGIAVGAVAVLLVLSILCICCRKKKRRRDEEYYAPPPQPPRGPKDDAYGGPPRQWQHNVPPPQDHVVSMMPPKPSPPPAPPAYAGQPPPPPPPFISSSGGSGSNYSGGEFLPPPSPGISLGFSKSTFTYEELARATDGFSDANLLGQGGFGYVHRGILPNGKEVAVKQLKAGSGQGEREFQAEVEIISRVHHKHLVSLVGYCITGSQRLLVYEFVPNNTLEFHLHGKGRPTMDWPTRLRIALGSAKGLAYLHEDCHPKIIHRDIKAANILLDFKFEAKVADFGLAKFSSDVNTHVSTRVMGTFGYLAPEYASSGKLTDKSDVFSYGVMLLELITGRRPVDKNQTFMEDSLVDWARPLLTRALEEDDFDSIIDPRLQNDYDPNEMARMVASAAACIRHSAKRRPRMSQVVRALEGDVSLADLNEGIRPGHSTMYSSHESSDYDTAQYKEDMKKFRKMALGTQEYGASSEYSAATSEYGLNPSGSSSEAQSRQTTREMEMRKMKNNQGFSGSS

SEQ ID NO: 238322 - protein, 252 aa, Glycine max
  Clone ID: PAT_MRT3847_5722C.1.pep
LYPLLADAKDVLAAIQNVEGARFPVLTPNLKGFEAAVAAGAKEVAVFPAASESFSKANLNSSIEDNLARCHDIASAARSLSIPVRGYISCVVGCPLEGNIAPAKVAYVAKSLYEMGCSEISLGDTIGVGTPGTVISMLEAVLDVVPTDMLAVHFHDTYGQALSNILISLQMGISTVDSSVSGLGGCPYAKGATGNVATEDVVYMLNGLGVKTNVDLGKLMLAGDFICKHLGRASGSKAATALSKVTSHASKL

SEQ ID NO: 238323 - protein, 196 aa, Glycine max
  unsure (1)..(196): unsure at all Xaa locations
  Clone ID: PAT_MRT3847_57230C.1.pep
MSTAPAPSSPPANNGTAPPPSTPATPSAPPPATPSAPPPSTPSSPPPATPSSPPPATPSSPPPATPSSPPPATPSSPPPSTPSASPPPSTPTTPSTSPPSPPSTSPPSPPSGGSTPSPPSRSSPSPPSGSSPTTPSPPSSSSSSISTGVVVGIAVGAGAVLLVLSILXHMLSEEERRRDEEYHAPPPQQQQPPRGP

SEQ ID NO: 238324 - protein, 78 aa, Glycine max
  Clone ID: PAT_MRT3847_57231C.1.pep
KIRKRGINDLFLSPHSLSHYEFDLQFANLHVIAFTSEWGHMSCQTHVQHDTLQQVVPLDKSVRFLQCTDGSIPLAPLT

SEQ ID NO: 238325 - protein, 49 aa, Glycine max
  Clone ID: PAT_MRT3847_57232C.1.pep
LRGRTSMPSYGMHWSFCLHNKLVQIVNVGDLLKVHMPNQHNIDLRLNLK

SEQ ID NO: 238326 - protein, 271 aa, Glycine max
  Clone ID: PAT_MRT3847_57233C.1.pep
MVYSFYDKTSSSSGSDISGLFNPTLHNLGACNDLSSSPHSLVFESDKGELVKCLAAAKVGKSEICEAKALAALKNHSEAERRRRERINGHLATLRGLVPSTEKMDKATLLAEVISQVKELKKNAAEVSKGFLIPKDADEVKVEPYNDHEGGEGSMSYCATICCDFRPEILSDLRQTLDSLPLHLVKAEISTLAGRMKNVFVFTCCKENINNIDFEKCQALASTVHQALCSVMEKASASLDFSPRTSHASKRRRLCFIETSNSTCNHGSCLC

SEQ ID NO: 238327 - protein, 93 aa, Glycine max
  Clone ID: PAT_MRT3847_57234C.1.pep
PALVNKGKNKGLWTLIAVLDTFMVALLFSGNGPPSAVGILGSKGNFLVNWTKVCNVFGKFCDQKAASIGGSLIGSLAFLLVGVIPGGGVPRRT

SEQ ID NO: 238328 - protein, 46 aa, Glycine max
  Clone ID: PAT_MRT3847_57235C.1.pep
SRILKTVLSLTECEFRRHKSKMCLVIKGVNAHGVVVYGSQLRTRGR

SEQ ID NO: 238329 - protein, 132 aa, Glycine max
  Clone ID: PAT_MRT3847_57236C.1.pep
LKLELAQFAELEAFAPFASGLDKAPQNQLARGPRLRGLLKQSQSAPLSVEDQIITFFSGTNGFFDSLEIGQVRKFLVGLRAFLNPNNPPFKEIIFSPQPFPGEAEVLLKEAFQDPMGLFFLPGRVEKNCLNI

SEQ ID NO: 238330 - protein, 78 aa, Glycine max
  Clone ID: PAT_MRT3847_57237C.1.pep
AMLVAGCPSIFFLVIKVIIVGKYWHKLLKRGKYIIIYYEVKDHRSGGKVTSFKIEKFGAWYTKIKIMGFDTLQPVLEV

SEQ ID NO: 238331 - protein, 60 aa, Glycine max
  Clone ID: PAT_MRT3847_57238C.1.pep
MEKIIIVYHKHGGCCLFFAILLFSSFPSMRVKVYQLFIGLGHKITRQYVVEGNSKKNYFP

SEQ ID NO: 238332 - protein, 94 aa, Glycine max
  Clone ID: PAT_MRT3847_57239C.1.pep
CRIRITESMMLVRSAQCISMSPFARSGRGQRSSSLSIFYIIFVISFSTPLTWRAIWRSTLREVLYMSMGVSEASKKDIATYFTQVLGKCIWRVV

SEQ ID NO: 238333 - protein, 65 aa, Glycine max
  Clone ID: PAT_MRT3847_5723C.1.pep
QSVTPYNFGRTYRNLRGHPQTSLDLADMRVHAGGNLLNRLPTALAADPERSARITFSRKLRYTRR

SEQ ID NO: 238334 - protein, 38 aa, Glycine max
  Clone ID: PAT_MRT3847_57240C.1.pep
SKLHELTTTLQTPTPYFQYIIHQKYSYITRNYLYFLLT

SEQ ID NO: 238335 - protein, 58 aa, Glycine max
  Clone ID: PAT_MRT3847_57241C.1.pep
QVRQGIRVNKRDPFPLSLSHSKCPTEQDLVHLKYVCQIVASVPSSGTGHGRCSICDSR

SEQ ID NO: 238336 - protein, 59 aa, Glycine max
  unsure (1)..(59): unsure at all Xaa locations
  Clone ID: PAT_MRT3847_57242C.1.pep
LHLSXIXLAXIXLXVIXCVANRGTSFTLCCFSCXSTSHXRXXLCCFXFRXFNKLCGXVP

SEQ ID NO: 238337 - protein, 66 aa, Glycine max
  Clone ID: PAT_MRT3847_57243C.1.pep
PENCRRYCNYVISCNYPNQHKLGSYNLVYICAFDNQYTHKYFPLRIPTSGPIYKQYSTNHQDLQKF

SEQ ID NO: 238338 - protein, 73 aa, Glycine max
  Clone ID: PAT_MRT3847_57244C.1.pep
PTSDKDITKANEQSINSSIKKVKVKWEKAGCDAELKLQAVNFIHHPKFLMQIITFCSSFQWVYVLFFWLHFFC

SEQ ID NO: 238339 - protein, 89 aa, Glycine max
  unsure (1)..(89): unsure at all Xaa locations
  Clone ID: PAT_MRT3847_57245C.1.pep
TSPFKMQIFVKTLNWKTINLEVESXDTIDNVKAKIQDKEGXPPDQQRLIFAGKQSRTAYLADYNIQKESTFTCLRLVVDAIFVKISWQT

SEQ ID NO: 238340 - protein, 142 aa, Glycine max
  Clone ID: PAT_MRT3847_57246C.1.pep
ACTHSIPAFVLLFAALVSSSHQPAYLILFHTRMVSNETEGEGGYNKKSSRWIATKSSSCLFILFSSLLISIAGGSMLGFWLHKYHPSNTQLWMVPFGFLLFLTPLFICLSVIIPDLCVPRTRIDQDQAFKIQDHPLTLPSIQ

SEQ ID NO: 238341 - protein, 121 aa, Glycine max
  Clone ID: PAT_MRT3847_57247C.1.pep
PFANSFLFCFRMVSNETEGEGGYNKKSSRWIATKSSSCLFILFSSLLISIAGGSMLGFWLHKYHPSNTQLWMVPFGFLLFLTPLFICLSVIIPDLCVPRTRIDQDQAFKIQDHPLTLPSIQ

SEQ ID NO: 238342 - protein, 38 aa, Glycine max
  unsure (1)..(38): unsure at all Xaa locations
  Clone ID: PAT_MRT3847_57248C.1.pep
YRELWKLKVPSKMAIFAXRLLKDKLPTRDNLRKKQIEF

SEQ ID NO: 238343 - protein, 68 aa, Glycine max
  Clone ID: PAT_MRT3847_57249C.1.pep
PGSSRLAAYRSLDRCFLVTELAFSFCILCLGFFSCYDEPCCSFVPPIAFGIARYHLSVLACYHKAPRP

SEQ ID NO: 238344 - protein, 63 aa, Glycine max
  Clone ID: PAT_MRT3847_5724C.1.pep
IFFFFHGCFELPQVLEKRQHDHNLRNPPRGRIRHRIRRRRLILRLGAYATRVSQHRKHDHNQN

SEQ ID NO: 238345 - protein, 67 aa, Glycine max
  Clone ID: PAT_MRT3847_57250C.1.pep
VRGGPNPLPHVWVFFKQRHFRVGRQVGTLPSFLVRVVSQKPIVFFLSSPLGGGPPGKVKKKTPRAFF

SEQ ID NO: 238346 - protein, 65 aa, Glycine max
  Clone ID: PAT_MRT3847_57251C.1.pep
HCFPVPFMCRSVHQHLGTVCCHSKASIQLRLSARVPESPSYFCLVRQHRCIGKIGHSPRCISHWR

SEQ ID NO: 238347 - protein, 79 aa, Glycine max
  Clone ID: PAT_MRT3847_57252C.1.pep
NGFYRTTNSRHRLLAILSLEGIKNNVTFIYIDSSLSCLTATQHLGFLLEESKSEGDLWLLLSGLNLTLKKNLLYMLITG

SEQ ID NO: 238348 - protein, 79 aa, Glycine max
  Clone ID: PAT_MRT3847_57253C.1.pep
FMQNRPRAGFVSQNLICDGDFPALFWASMFSHSPLFWCNQICICGGVFSQLCFGSQHSLSFSSVLVRPDFAFVVVFLIF

SEQ ID NO: 238349 - protein, 80 aa, Glycine max
  Clone ID: PAT_MRT3847_57254C.1.pep
YLFHFFFGVCPSFLACCCRVECPCVHVMGFPVKPRGGPLAISVLLQMGLWKFGSEVLESSGHVCGGFPPPSLLFAPFVFL

SEQ ID NO: 238350 - protein, 53 aa, Glycine max
  unsure (1)..(53): unsure at all Xaa locations
  Clone ID: PAT_MRT3847_57255C.1.pep
XSRTDXKXVELXXERXEXREXXKPYYFSRDALXHXXXXXVKXLCSXLTXIXSP

SEQ ID NO: 238351 - protein, 72 aa, Glycine max
  Clone ID: PAT_MRT3847_57256C.1.pep
GKVQGSVDFIRGHKTGKKEPSFVVAPKSAQLSWDWKGCETCIMLVRSLVIKYNCWQHDLIEWLCHCQASNAG

SEQ ID NO: 238352 - protein, 469 aa, Glycine max
  Clone ID: PAT_MRT3847_57257C.1.pep
MDKVNRVCAKDEERPLRITRARARALRGITPYSRPSLKNEQKNVLRAHSKRAASSGNKTFAVVPAVVQQKGRAVLSDISNMCAKPHDKCTKASKFQAKGVCTKKNTKLAASSVSTDVSSSHDDVRAKLAEELSTIKMVESNDTLREGVTADTSLSMQNSVKSDELRNSPNKDIDIICEKLGASDSLTIVDIDSELKDPQLWSFYAPDIYSNIRVTELQRKPLTNYMDKLQKDINPSMRGILVDWLVEVSEEYKLVPDTLYLTVNLIDRYLSTRLIQKQKLQLLGVTCMLIASKYEEMCAPRVEEFCFITDNTYTKEEVLKMEREVLNLVHFQLSVPTIKTFLRRFIQAAQSSYKAPYVELEFLANYLAELALVECSFFQFLPSLIAASAVFLAKWTLNESEHPWNPTLEHYTKYKASDLKTVVLALQDLQLNTKGCFLNAVREKYKQQKFNCVANLSPKSVQSLFQNQV

SEQ ID NO: 238353 - protein, 100 aa, Glycine max
  Clone ID: PAT_MRT3847_57258C.1.pep
YVYPSKGYGPVYPVVCLECPCLSYLLHQRHLSAPFPCSDIHAPRITGTLDLHTLAHCVSMSPGDMPPFLAASAAYTISSPCSRTTPCSGLTMHTVPCADV

SEQ ID NO: 238354 - protein, 77 aa, Glycine max
  unsure (1)..(77): unsure at all Xaa locations
  Clone ID: PAT_MRT3847_57259C.1.pep
FVGLGRVPPPGXRFFFFCCLFSSLALXVFFSPRGGGFXXPPPPCLFPLXXLLIHXSCLAPLSLSVILCIWECSLSSS

SEQ ID NO: 238355 - protein, 63 aa, Glycine max
  Clone ID: PAT_MRT3847_5725C.1.pep
MARCFGLGSVLVLAALAESMVVLPLMRPPLAPPPLVLLFLPVGIMAALMLLVFSPSDQNGVVY

SEQ ID NO: 238356 - protein, 66 aa, Glycine max
  Clone ID: PAT_MRT3847_57260C.1.pep
QKKKNSVKHRVIHLISDWDCRIKFYTIGHSQMTKDDFINWSSNNLLLMDTTFMLENSFYLGPILNT

SEQ ID NO: 238357 - protein, 89 aa, Glycine max
  Clone ID: PAT_MRT3847_57261C.1.pep
SREGRLGHSFFKLCWRFLFPLRVLSVFRLRSLVLRLSRIFIVVLGSLIFLHIFHNLGAHLSLTFLIKISRPHRCRRLHLFLRVDSRRFS

SEQ ID NO: 238358 - protein, 49 aa, Glycine max
  Clone ID: PAT_MRT3847_57262C.1.pep
EVFQNLHIPNENMKFGTSKFLLLHKYYLLERLRTTNRSGCSDYLIVSQA

SEQ ID NO: 238359 - protein, 92 aa, Glycine max
  unsure (1)..(92): unsure at all Xaa locations
  Clone ID: PAT_MRT3847_57263C.1.pep
TDVFLRFVGSNTWEKLILRDPSEYSGQLIITNTYQLRKNXLEKEGYRIIGNAGDQWKDLLGSNKGTRTLKLANPLYYKEALKSSLSGAPYFL

SEQ ID NO: 238360 - protein, 47 aa, Glycine max
  Clone ID: PAT_MRT3847_57264C.1.pep
GDSRFRWVCCLIVFLGYKECKLMGWESRIISPVYSRDRFRKTSIRCF

SEQ ID NO: 238361 - protein, 47 aa, Glycine max
  Clone ID: PAT_MRT3847_57265C.1.pep
HASLSNSPAVGLKTLPNQFQIHLQGSVLCYNRCLILRVGFSRPDHVG

SEQ ID NO: 238362 - protein, 51 aa, Glycine max
  unsure (1)..(51): unsure at all Xaa locations
  Clone ID: PAT_MRT3847_57266C.1.pep
LXARVRKLRNSARGYXGSGSGIRLSTSFTDNGAGQPLXRLXILPACHRPCI

SEQ ID NO: 238363 - protein, 50 aa, Glycine max
  Clone ID: PAT_MRT3847_57267C.1.pep
YKVGKPNCLIILGPFPPSEAYFNQFLEAQILPLLELLSRTGSPLMKNLYP

SEQ ID NO: 238364 - protein, 138 aa, Glycine max
  Clone ID: PAT_MRT3847_57268C.1.pep
GRLFFCSISTNSDPSIPTEKKIMKLKTYAGLSIIATLAIIYHAFNSRGQFYPAMVYLSTSKIGLVLLLNMGLVFMCILWQLTKKLFLGSLREAEVERLNEQSWREVMEILFAITIFRQDFSVTFLAMVAALLLINALH

SEQ ID NO: 238365 - protein, 50 aa, Glycine max
  Clone ID: PAT_MRT3847_57269C.1.pep
RFLMELTMSTGSIMFKTINLNLNVSLIYLFIHRHNTLATWYMIHIQQHSC

SEQ ID NO: 238366 - protein, 103 aa, Glycine max
  unsure (1)..(103): unsure at all Xaa locations
  Clone ID: PAT_MRT3847_5726C.1.pep
XIXXTXLXIXXXXXXXTXLXLXXXCXXXXVXCSSXXXXAXXXXXXXXXXXXIXYXXXHXCLXXXTXXSXLXXYXXIXXXXXXTXXXXFFXXFXXXXXDXXXFA

SEQ ID NO: 238367 - protein, 85 aa, Glycine max
  Clone ID: PAT_MRT3847_57270C.1.pep
SGSSKNTESPVAKQRSDCFLSVLAAMIFGTGCGALTAFIVLYLWTIFGNNKRAVVPEESLVEPVDVDYRKKVKIVVDKTIEDGKK

SEQ ID NO: 238368 - protein, 68 aa, Glycine max
  Clone ID: PAT_MRT3847_57271C.1.pep
FLQQDANGSSMVHFTQMFCSESHSHSERMANIIMSRHKHRDGIEPSITPFTKIQAVSESSGGYYIKRE

SEQ ID NO: 238369 - protein, 64 aa, Glycine max
  Clone ID: PAT_MRT3847_57272C.1.pep
PPTGVLLKGLLTGPKTSPRAFLSHILNLIGHPQLPNYFVVCCKPPPPPPPPPPPPPPPPPPPPP

SEQ ID NO: 238370 - protein, 54 aa, Glycine max
  Clone ID: PAT_MRT3847_57273C.1.pep
VIGYTVKCHGTYSAFKLTSEWYGRLKGQHRLPGSKHHERSYVHSAHLRGNRTRG

SEQ ID NO: 238371 - protein, 45 aa, Glycine max
  Clone ID: PAT_MRT3847_57274C.1.pep
HNMILDASLSLVKRSTYVYRINLVSLGTCIEKYIHSCSFHLTIHA

SEQ ID NO: 238372 - protein, 69 aa, Glycine max
  Clone ID: PAT_MRT3847_57275C.1.pep
GREPFERSMFLRLNPKNGCFYKRALLLGGGNNFIGVEGKPPPGSVWGSPRGAGPKPGQNPFLGTTPNLF

SEQ ID NO: 238373 - protein, 56 aa, Glycine max
  Clone ID: PAT_MRT3847_57276C.1.pep
YGCQKTAEGNGVFSGLVVGSEFANNFMHGVAALTLDPTFLALLKILSWVYTISTSN

SEQ ID NO: 238374 - protein, 71 aa, Glycine max
  Clone ID: PAT_MRT3847_57277C.1.pep
QTFIGSYFIPRQPYTNKGLLIYDMLLLLATIRTSRHFLHTVTFHTAASFSLILETTLRTETSYYSDEKKAN

SEQ ID NO: 238375 - protein, 268 aa, Glycine max
  unsure (1)..(268): unsure at all Xaa locations
  Clone ID: PAT_MRT3847_57278C.1.pep
MSNLRTLCRPQTVFSFISFQHQFRSRVSFRNPNCKPRLPSPFLYSTIGSWVSNPWFRVNQRRTVAKATNWAEQKSPYETLELEGDADDEQIKNAYRRLAKFYHPDVYDGRGTLEEGETAEARFIKIQSAYELLIDRERRRQYDMDSWVNPMKASQAWMEWLIKKRKAFDQRGDMAIAAWAEQQQRELNLRVRRLSCSKIDPDEARRILAREKKASAEYYSNTLKSXTLILKKRDFMRRKAEEKKKKTFSRLLAAEGLELNDSDSDEAL

SEQ ID NO: 238376 - protein, 39 aa, Glycine max
  Clone ID: PAT_MRT3847_57279C.1.pep
KRAKKPKVVSQSQKPGGKGNVFKGVLPKGPKLGGGGGNP

SEQ ID NO: 238377 - protein, 102 aa, Glycine max
  Clone ID: PAT_MRT3847_5727C.1.pep
RYAAHFLQDEKNYHIILEVTTNPKAFRELLRTQRQEESKGNAPKQSILDTGASPFTLFLLSQYQTKTNLAERNTIKDKYKEPFHQKALLLAHLTYYPSLKRA

SEQ ID NO: 238378 - protein, 105 aa, Glycine max
  Clone ID: PAT_MRT3847_57280C.1.pep
CRGTMYEAKGLYKEAIKAFRDALSIDPGHVPSLISTAVVLRRCSNQSNPAIRSFLMDALRHDRFNASAWYNLGIFNKDEGTILEAADCFETANFLEESAPVEPFR

SEQ ID NO: 238379 - protein, 188 aa, Glycine max
  unsure (1)..(188): unsure at all Xaa locations
  Clone ID: PAT_MRT3847_57281C.1.pep
SVRKLMHKLTHNMRNNVCACAWAYTEHMSTRLNAEDVREDTRMMTNNTVDHPGEPLSTVLXAGISVWLPMLFDMLFDXLLQEQLQIQWNILSIRETIHNMDELDHAHYHAICISLVIDANLNANQIMLETFTDXAPTLVVYVAVDTPANLAAMNGGNNAYESVYLALLAIGLDILPDEHGEEQGDTSQ

SEQ ID NO: 238380 - protein, 107 aa, Glycine max
  Clone ID: PAT_MRT3847_57282C.1.pep
CHAIGTMHEAKGLYKEALKAFRDALNIDPGHVPSLISAAVVLRWCSNRSNPAIRSFLMDALRHDRFNASAWYNLGIFHKDEGTILEAAECFETANSLEESAPVEPFR

SEQ ID NO: 238381 - protein, 242 aa, Glycine max
  unsure (1)..(242): unsure at all Xaa locations
  Clone ID: PAT_MRT3847_57283C.1.pep
GPSNGQAFIGFFYLLVEEKAGSAVIKLLKKFIRRFYGENPMESKVIARIINMQHFERLCNLGXDTIVEVDLFNSAISSNLFLFIEPTILLDPPLDSEIMAEEIFGPLLPIITLDKIQESIEFINAKPKPLAIYAFTKDETFKRKILSETSSGSVVFNDTMVQFLCDTLPFGGVGQSGFGRYHGKYSFDTFSHEKAVMHRKLFLEIEPRYPPWSKFKLEFIRLAYRLNYFGLLLHMLGLKRYK

SEQ ID NO: 238382 - protein, 59 aa, Glycine max
  unsure (1)..(59): unsure at all Xaa locations
  Clone ID: PAT_MRT3847_57284C.1.pep
ALNVCSLLARQAYVVCLGHAARTMSMAPLMLFASFXCILPWLGQAIPDHSLVVLYIIGR

SEQ ID NO: 238383 - protein, 29 aa, Glycine max
  Clone ID: PAT_MRT3847_57285C.1.pep
PVEKNEYFVLDEEEEEAAEIALRDEEFEL

SEQ ID NO: 238384 - protein, 166 aa, Glycine max
  Clone ID: PAT_MRT3847_57286C.1.pep
MNMYQLQQFHIQPMMMKMDNTMRKRERSKAMEKERLHVMDLSGMSLEFLPKPSLDLATICKLDLSNNNLQEIPESLTARLLNVEVLDVRSNQLNSLPNSIGCLSKLKVLNVSGNFIESLPKTIENCRALEELNANFNKLSKLPDTIGFELIYLKKLFALTNILGSR

SEQ ID NO: 238385 - protein, 82 aa, Glycine max
  Clone ID: PAT_MRT3847_57287C.1.pep
SSYGSYAVLNCSWISLTLGLYLSLFFCQTYNCHKILKVYPYLRCWSLLYRENTSTVVGAIPICNRPAVSYRYGYYMYLLPSR

SEQ ID NO: 238386 - protein, 64 aa, Glycine max
  Clone ID: PAT_MRT3847_57288C.1.pep
IKDYVSLEILGHICLESILNYRLCCYILEDFTPYYVVASAKRFLYSTYEVPFIIICCIYAIRSL

SEQ ID NO: 238387 - protein, 69 aa, Glycine max
  Clone ID: PAT_MRT3847_57289C.1.pep
MIVKASRYMITQRIHTSRNDHPQYVRHIVRRDILYASPPSLDGAEAGVSESTSVAPSSMQTIDTQHEIH

SEQ ID NO: 238388 - protein, 85 aa, Glycine max
  unsure (1)..(85): unsure at all Xaa locations
  Clone ID: PAT_MRT3847_5728C.1.pep
VXAGIGXALVAXGPSLSLVVSXXSKKPXLIRTXLXITXGWXIILIXXSGIWRGVLPLXTXTAWTFGILMXSXXXVSRXLXLFFWK

SEQ ID NO: 238389 - protein, 89 aa, Glycine max
  Clone ID: PAT_MRT3847_57290C.1.pep
LVCASLAVLRISWVLCLLLTPLFLRVYSLVCFSRGWLFFSALAPLGFWLSLLRWIRPVWFALVLRLLLVLGRFVGAFRLALLLVPGLFC

SEQ ID NO: 238390 - protein, 73 aa, Glycine max
  Clone ID: PAT_MRT3847_57291C.1.pep
ETKIEISIILLAQKGKKFNPISGLFKATFIETEKFFYLNLREGKDFYGNNKARAGGLMFLLGTFLAPLPFGLN

SEQ ID NO: 238391 - protein, 105 aa, Glycine max
  Clone ID: PAT_MRT3847_57292C.1.pep
RPQPGRNNGGRKEAFPTTRFETGAGRAGGAKRKTKAEAEKAPDAAKTEKRKVEHEKNMRAQSKKQAEGATGGDEEEDEKAAPEVKEEDEQEEGRGEEEKHEQRMD

SEQ ID NO: 238392 - protein, 197 aa, Glycine max
  Clone ID: PAT_MRT3847_57293C.1.pep
MENDDVDMHAADTSEELDDMKKRLKEMEDEAAALREMQAKVEKEMGSAQDPANASASQANKEEIDSRSVFVGNVDYSCTPEEVQQHFQSCGTVNRVTIRTDKFGQPKGYAYVEFLEVEAVQEALLLNESELHGRQLKVTAKRTNIPGMKQYRPRRTINPYMGGFRGRTPYAPPFIYSPYGYGKVPRFRMAMRYSPYY

SEQ ID NO: 238393 - protein, 63 aa, Glycine max
  Clone ID: PAT_MRT3847_57294C.1.pep
HCVRTARTRPQKRLHSVFKGSSSPTNARRTTSFREGIPIRRVHNRVARMTYPVNVGSSSIPYE

SEQ ID NO: 238394 - protein, 105 aa, Glycine max
  unsure (1)..(105): unsure at all Xaa locations
  Clone ID: PAT_MRT3847_57295C.1.pep
AYAYFHQWRPNCSQXLGHGTSSLGKESWGXSXKERWVPARLWEIRVCFQGPMPKKTNGQPQRSKVAKKAPNYNNNNNNNNNNRKVPLFKPELSNGKENTNIPELF

SEQ ID NO: 238395 - protein, 38 aa, Glycine max
  Clone ID: PAT_MRT3847_57296C.1.pep
GLVGIYIGKRFQNIIHFYNMKGNPLLICRRIMLLDVSY

SEQ ID NO: 238396 - protein, 83 aa, Glycine max
  Clone ID: PAT_MRT3847_57297C.1.pep
GLLPGIYQSPSTSTTMLRVAICTSPSFNQRIPLCACIEYGSDYSVKNGPSVMALLMTLVAVCGAFTAGTCVGYSARTQAAIRV

SEQ ID NO: 238397 - protein, 140 aa, Glycine max
  Clone ID: PAT_MRT3847_57298C.1.pep
KGPRGARFPPKILWMRKMGVFKPLFCKTRGFKKFSRPLFLSMSIKVKGTVFKTKRVFMGGFFKSKPQKAKKKPLSVQFGAQRAKNKAPKKKKIVRRGERLAQGFGKKVSPAPSVPVVSAFQPGRAPKNFKKWPPFFDIGL

SEQ ID NO: 238398 - protein, 99 aa, Glycine max
  Clone ID: PAT_MRT3847_57299C.1.pep
KPNHIFFIEFSSLKKKIGVHSKHPFVLKKFGPPPLLEALKKGPEEVAFFLVNAGAIFTIDDGGNFLCMTGAKKELDLLKRVLGWGVNPNAKNFDQRTPF

SEQ ID NO: 238399 - protein, 262 aa, Glycine max
  unsure (1)..(262): unsure at all Xaa locations
  Clone ID: PAT_MRT3847_5729C.1.pep
FRSGIPGSTRPSAPHTETLKMELSELRKAVEEVELVDAHAHNIVSLDSNFAFIHAFSEAYGDAVTFSPHTLSFKRNLREIAELYGSELSLQGVEEHRRVSGMQSICSTCFKAARISAILIDDGLQLDKKHDIEWHRSFTPLVGRILRIERLAEEILDEDLPDGSSWTVDSFTKAFVSKLKSVSGEIFGLKSIAAYRSGLEINTNVTKKDAEEGLRQVLXCWKPVRIANKNLIDYIFLQSLEVAQFYDLPMQIHTGFGIKIGH

SEQ ID NO: 238400 - protein, 73 aa, Glycine max
  Clone ID: PAT_MRT3847_572C.1.pep
VSRHTIQVFPKSWSAIMLTFDRSEMWTFRSEMAEHRYVVQQLYVSVLSPNRSITNEFNLPKTQFVCGMVKYML

SEQ ID NO: 238401 - protein, 60 aa, Glycine max
  unsure (1)..(60): unsure at all Xaa locations
  Clone ID: PAT_MRT3847_57300C.1.pep
GPPGSNGNQYHPPPFFPGGYFSKVXKGRGQISQSPXGVGVFFRLXPKFSPIFAKKGFVSW

SEQ ID NO: 238402 - protein, 82 aa, Glycine max
  Clone ID: PAT_MRT3847_57301C.1.pep
CEKTTEGDRRNKCQRSVLLSSVISSLWLCFWLLGQLQVQLLEVQWEATLCRRSWRVLLLPLLSLELGLLLTTPIEQQVYMAE

SEQ ID NO: 238403 - protein, 70 aa, Glycine max
  Clone ID: PAT_MRT3847_57302C.1.pep
KIVSSVNQIYNYIFYSFFFLKKSWTAFLKKSKKRKTLFGRKESNTKIKIPSKCLLRRCKSNHLSWANMNT

SEQ ID NO: 238404 - protein, 48 aa, Glycine max
  Clone ID: PAT_MRT3847_57303C.1.pep
VMVGEHHFTQKSKHYVDSIISFFYVFFFPGYIIYFYLYLSFFLFLAII

SEQ ID NO: 238405 - protein, 202 aa, Glycine max
  unsure (1)..(202): unsure at all Xaa locations
  Clone ID: PAT_MRT3847_57304C.1.pep
MVVLAASIVSKSGKVLVSRQFVDMSRIRIEGLLAAFPKLIGTGKQHTYVETENVRYVYQPMEALYLLLVTNKHSNILEDLTTLRLLSKLVPEYSYSLDEEDICQNAFELIFAFDEVISLGHAENVSVAQVKQYCEMESHEEKLHKLVMQSKINDTKDVMKRKANEIDKSKIEKNRGDKGGFGPLQSLGSGKIEKXFSDLSIS

SEQ ID NO: 238406 - protein, 110 aa, Glycine max
  Clone ID: PAT_MRT3847_57305C.1.pep
GCKWPRHNGRVSLELESLGELMLGISAPAAACFLLTLFQTVFYSCFMSWILLLSPLFCLWVTFLYFFLSVVSCLWLDMPCFRFPSSVCNNLSGWCLGLFIFLLYVIDLIV

SEQ ID NO: 238407 - protein, 113 aa, Glycine max
  Clone ID: PAT_MRT3847_57306C.1.pep
KIVPNPGVTDHTKIIIGAHIFIQVKPKLQNLKGGKLVLNQKREFLGQILPDWGGFDEKPGNNRSHSPHFLKGGLNAAKLICFWLWSLLGSPFRGGVFHAIEKQFSPEKSHILW

SEQ ID NO: 238408 - protein, 56 aa, Glycine max
  Clone ID: PAT_MRT3847_57307C.1.pep
KIKKNSIEFKFIYFFIFLFIFFFIFIFLFIFFFFFFFFFFFFFFFFFFFFFFFGRV

SEQ ID NO: 238409 - protein, 96 aa, Glycine max
  Clone ID: PAT_MRT3847_57308C.1.pep
FFFFFFFFGFWDNPNMSGKFKTFVGRERNKNHTLFVEKRPSVIAWELDIYSPKILCKWFATKSPKRTGYLLSLTGLYTYWNKKGGHFEVILKKYGG

SEQ ID NO: 238410 - protein, 83 aa, Glycine max
  unsure (1)..(83): unsure at all Xaa locations
  Clone ID: PAT_MRT3847_57309C.1.pep
ANSDLNFFAFHINAENNQRNFLAGSQDNVIXQLPSQVQELTLPGXLKILDKLLKSQSESYFMDTQSQQTAVGNTGRKGPIVFN

SEQ ID NO: 238411 - protein, 56 aa, Glycine max
  Clone ID: PAT_MRT3847_5730C.1.pep
IVPECSYRYTALEVAINDGAVVVGSAVIVVHVVGVEVVMITESGITSEECLPDDTC

SEQ ID NO: 238412 - protein, 77 aa, Glycine max
  Clone ID: PAT_MRT3847_57310C.1.pep
FAPGFCFTLVNMGTDQTGKRFYQVKIKGLDITSIKELGRLMGPLQMQAFRKAYEKILDLTIAEISTEAIASLTQYYD

SEQ ID NO: 238413 - protein, 61 aa, Glycine max
  Clone ID: PAT_MRT3847_57311C.1.pep
KFSSFITKHLIAGYLYSISASTVSPLWEKLGPFLDKAVNSFRLLSPTENYVPPYKDPWRFW

SEQ ID NO: 238414 - protein, 141 aa, Glycine max
  Clone ID: PAT_MRT3847_57312C.1.pep
MRVSAEFERVLKYFDEDGDGKISPSELRNRLCMMGGELLFKDAEKLIEELDSDGDGFLSLEDFVKIMEAAGEDEKLKDLAEAFEMYHDTEMFGFITPKSLQRMLNRLGESKSMEQCRAMIGHFDLNGDGVLSFDEFGVMMQ

SEQ ID NO: 238415 - protein, 67 aa, Glycine max
  Clone ID: PAT_MRT3847_57313C.1.pep
ISPLDVIEEHSVYTLVFTNDWTLVYNNALDARYNLMKTRSCDHWMITHTSNNVEYCYHALLSSSRSR

SEQ ID NO: 238416 - protein, 110 aa, Glycine max
  unsure (1)..(110): unsure at all Xaa locations
  Clone ID: PAT_MRT3847_57314C.1.pep
MAALLSTDGAANGALVNLNGSGAGASVPSSXFFGTNLNKAIGXRVPISKVSGGSFKIAVVQQKNETDETQQTVRDRWKGLAYEISTDRLDIPRGKGXAGSVFKAPQDAAT

SEQ ID NO: 238417 - protein, 67 aa, Glycine max
  Clone ID: PAT_MRT3847_57315C.1.pep
TLSVSDLFAQVSKCFCSFVLRHFMVSILECFASVVMYWFCTLPTLANLAGTLESRGTVSVLFSFVLF

SEQ ID NO: 238418 - protein, 38 aa, Glycine max
  Clone ID: PAT_MRT3847_57316C.1.pep
DDAIFLLWTWLTNLEKGFNMHYNYWSSNIRAGFLNRTG

SEQ ID NO: 238419 - protein, 96 aa, Glycine max
  Clone ID: PAT_MRT3847_57317C.1.pep
IRRNLVLSKKGGFRFLSILSLHQWLYRFPALISLCPAVLQGGLRAAFFHRVHLNEPKWVILGSVVLGRQMRKSQGSSLSPPTICQVYDGSPQRTRG

SEQ ID NO: 238420 - protein, 36 aa, Glycine max
  Clone ID: PAT_MRT3847_57318C.1.pep
ISTVLQIHRKNKLNFQLFWLVYFSVELLTFYGLYVL

SEQ ID NO: 238421 - protein, 108 aa, Glycine max
  Clone ID: PAT_MRT3847_57319C.1.pep
KNGFRKWPAISPGIKKKFWPLFKKVSFYSPFFLTIFVPFPSQPPVLKKVIWGTRGPFSRIKGTPQFGPLNLLLPLFPLKKRTFLYLVKNSLQKILEPKGSKICSWLVN

SEQ ID NO: 238422 - protein, 140 aa, Glycine max
  unsure (1)..(140): unsure at all Xaa locations
  Clone ID: PAT_MRT3847_5731C.1.pep
GSLASFLYDRPGQEDPPLTWALRLKIAVDIARGLNYLHFDRAVPHGNLKATNVLLDTCDLHARVADYCLHKLMTQAGTFEQMLDAGVLGYRAPELSASKKPMPSFKSDVYAFGIILLELLTGRXAGDVVSGEKEGVDLAX

SEQ ID NO: 238423 - protein, 133 aa, Glycine max
  unsure (1)..(133): unsure at all Xaa locations
  Clone ID: PAT_MRT3847_57320C.1.pep
KVKVKEDDGEDEGRKEKKKKEKKDKDEETDTLKGKEKNGDGEEKKEKKENEKKKEKKDKDEETDTLKEKGKNDEGEDAEEKKEKKKKEKNDKDDKTDVXKVKGKEDKEKKQKIKKEKDDKIDVEKVKGKEDDG

SEQ ID NO: 238424 - protein, 42 aa, Glycine max
  Clone ID: PAT_MRT3847_57321C.1.pep
PSYFLFFLITHTRRNSVISQGYPEVKIIIIFMLTAHNSPYYT

SEQ ID NO: 238425 - protein, 39 aa, Glycine max
  Clone ID: PAT_MRT3847_57322C.1.pep
IQGSNQNTCLALSSTADQGEIFYTFNIILEKMSKLYLST

SEQ ID NO: 238426 - protein, 126 aa, Glycine max
  Clone ID: PAT_MRT3847_57323C.1.pep
NCPSPPKYWGHPGTPPCIDQYPPPFFPFPFSNKPFSQPGRDPPPKRPVPPKQQQHPPQKLGGPVYPPKFGHNNQSPPPKVLTPHNRGGFPTTRTPNTPPTDFPPTKNQANDYFPLGQQNLNPLENP

SEQ ID NO: 238427 - protein, 286 aa, Glycine max
  unsure (1)..(286): unsure at all Xaa locations
  Clone ID: PAT_MRT3847_57324C.1.pep
MGRPSSTIEIPHERYRHNGRRTPDPDVSDDYRRRRSPSYDSYDRHPERHRRRSESPEHRNPRHTNGTHNDNALPKKFGRRNGAYLDRDRGDWQRSDSESDEELKGLNFEEFRRLKRQKMRKSLKHCIWNVTPSPPRRDNEDPEDYSKPDEISDRDDGAGKIDKEIKAKAKAKSESESDSDSESEKSVSSESDDSRSRKKKRKSSAGSSRRSYSESESESESESESESESEFRRRXRRRRKSRRNRRKRSNRSRKKRRYSDSDEREDSESDDSDSSGRKQKKRSSSS

SEQ ID NO: 238428 - protein, 63 aa, Glycine max
  Clone ID: PAT_MRT3847_57325C.1.pep
LPALRGPTCKGVGSKNPYPDKIRGARVVVFPLKRQEFPLDSSALERGKKEKKTTLFKASKLKP

SEQ ID NO: 238429 - protein, 85 aa, Glycine max
  Clone ID: PAT_MRT3847_57326C.1.pep
LQTCVWKLGLAKSIHHARVLIRQRHIRVGKQIVNVPSFIVRLDSQKHIDFALTSPFGGGRPGRVRRKKAAAAAGGEGGDDEEDEE

SEQ ID NO: 238430 - protein, 139 aa, Glycine max
  Clone ID: PAT_MRT3847_57327C.1.pep
INLVRPALSMPEHHTRQVTSDRLKEAVNRLSQGQASLTQSHTALNTKMNSIHSFLNTKINSLIDQIAAITTNPSSPSPSSQPSPSPIHRPHMKLDAPRFNGHDPLGWIFKISQFFDYQTILEQEPLTVASFYMDGSALH

SEQ ID NO: 238431 - protein, 58 aa, Glycine max
  Clone ID: PAT_MRT3847_57328C.1.pep
YPLFFSSWLGKRGNNTTQYNQNQKFNCFLISRRTLPQLQWEAPLSPLKYSDAGSTIPP

SEQ ID NO: 238432 - protein, 49 aa, Glycine max
  Clone ID: PAT_MRT3847_57329C.1.pep
ITVPTHAYAHAFAHAFLNYHFKKNISWVGSILRKSETMLPSYLYYTTPS

SEQ ID NO: 238433 - protein, 116 aa, Glycine max
  Clone ID: PAT_MRT3847_5732C.1.pep
YNYTPVVHLYLSNIMARFEQITCFIISMILICLLASSVSEGSDDIFTSTEKTENWLNHGGNIYNRRYASMEHKISVETVSNLSLKWKFYAGKDITATPVFSMAHSTFHVGMGIFSQ

SEQ ID NO: 238434 - protein, 57 aa, Glycine max
  Clone ID: PAT_MRT3847_57330C.1.pep
QKTEPNYQSISSNIRVCRILHLRGTRITNARSLQNTATSPKPSKWRNISTIPREWNP

SEQ ID NO: 238435 - protein, 86 aa, Glycine max
  Clone ID: PAT_MRT3847_57331C.1.pep
AYVREHGLWRVVMELGRPYRTNAFEHGIRVSSHVNNPCIAILDTWHQQRRSIIHVVLCSLAQSTSGEKAKHSEESLLTDTLLSRWR

SEQ ID NO: 238436 - protein, 76 aa, Glycine max
  unsure (1)..(76): unsure at all Xaa locations
  Clone ID: PAT_MRT3847_57332C.1.pep
MASFVXFLVLLLAALILMPQGLGXYXKXIKKPXVXXKPPVYKPPVYKPPVYKPKPPVYKPKPPVYKPPYKRPPYKE

SEQ ID NO: 238437 - protein, 55 aa, Glycine max
  unsure (1)..(55): unsure at all Xaa locations
  Clone ID: PAT_MRT3847_57333C.1.pep
FGSMYEDLRXRVKRERMTNYNGLRSHTRLPLPVSDDVSATATITTIARAVLKKRD

SEQ ID NO: 238438 - protein, 64 aa, Glycine max
  Clone ID: PAT_MRT3847_57334C.1.pep
SVSISYSDSRVQNMHAFIASAMGIIMSTFTFNAWIPIRVYIAQIYLIPIIMKLAETALLHAMHS

SEQ ID NO: 238439 - protein, 162 aa, Glycine max
  Clone ID: PAT_MRT3847_57335C.1.pep
QASASVASGQDNSPHEASPRLSPTGISSWAKNLKISQPFSGSQDDSSSGNVGKSTFARITSNFGLRLSPKSPVEDDSSSETAGQSNLFGTITKGLVDSSKNAVKAVQVKARHVVSQNKRRYQVLFLFKLIYFVCILVKLIFTKSCSFKKFIVFSTGNSALIP

SEQ ID NO: 238440 - protein, 66 aa, Glycine max
  Clone ID: PAT_MRT3847_57336C.1.pep
VFPPKEQRRKEDGRNLEKEKEHLKPALGSHLTTIHEPLRVMDQTQTDSSCGFFIGDYIIYMAERAS

SEQ ID NO: 238441 - protein, 246 aa, Glycine max
  unsure (1)..(246): unsure at all Xaa locations
  Clone ID: PAT_MRT3847_57337C.1.pep
MDCFCCFNNQVVGGRTSCGSGKGKSHQGSVKYGFSLVKGKANHPMEDYHVAKIVKLGGQELGLFAIYDGHLGDSVPAYLQKHLFXSNILKEEDXWTVPASSIIKAYETTDQAILSDSSDLGRGGSTAVTAILIDNQKLWVANVGDSRAVLSRKGVAEQMTIDHEPNTERGIIENKGGFVSNMPGDVARVNGQLAVSRAFGDKNLKSHLRSDPDIRHVDIDPDAELLILASDGLWKVMANQEAVDIA

SEQ ID NO: 238442 - protein, 623 aa, Glycine max
  unsure (1)..(623): unsure at all Xaa locations
  Clone ID: PAT_MRT3847_57338C.1.pep
MDSVPADVSNSHTINDPSKSPPAKETDRQASASVASGQDNSPHEASPRLSPTGISSWAKNLKISQPFSGSQDDSSSGNVGKSTFARITSNFGLRLSPKSPVEDDSSSETAGQSNLFGTITKGLVDSSKNAVKAVQVKARHVVSQNKRRYQEGGFDLDMTYITENIIAMGFPAGDMSSGFFGYVEGFYRNHMEEVIKFFETHHKDKYKVYNLCSERLYDASLFEGKVASFPFDDHNCPPIQLIISFCQSAYSWLKEDIENVVVVHCKAGMARTGLMISRLLXFLKYFPTAEESMDYYNQKRCVDGKGLVXLPSQIRYVKYFERVLTYFNGENPPARRCMLRGFRLLRCPYWIRPSITVSDHSGVLFSTKKHLRTKELLPEDFWFSAPKKGVMVFALPGEPGLTELAGDFKIHFHDRQGDFYCWLNTTMTENRKVLNTSDLDGFDKRKLPSPGFMVEVVLVDYNGNDVTSKTETTTKKSDESSSNNPASSAPVERSTPAQNADKESDSHDKDDVFSDGEAEQSASSRSKQTKAPSQAVEKVKNDTRISESSRVSNEIANLSHATEQVSLGNKSSTPIRHASEPRTNVDGKTVSSLEVPSTESEFKAMAADASVFTFGDDEDYESD

SEQ ID NO: 238443 - protein, 89 aa, Glycine max
  Clone ID: PAT_MRT3847_57339C.1.pep
AEKQHSLLFQQQIMLQNSEEFKILKIQASHSSKSKSNEHSSDLTARNQREARILTPASAKRITSEEPNQSDRRVSELRRNIEKEINIKR

SEQ ID NO: 238444 - protein, 55 aa, Glycine max
  Clone ID: PAT_MRT3847_5733C.1.pep
MDPKTGAIGGLVAASKKVHEKVMNSLFEKRPKQIGIRSTMPSKRDMTRFVKWTLN

SEQ ID NO: 238445 - protein, 61 aa, Glycine max
  unsure (1)..(61): unsure at all Xaa locations
  Clone ID: PAT_MRT3847_57340C.1.pep
SXXXXXNXHPLFAGLFKXSFSSIHSXXXXIXILXYXICXTVXAXSEFVXXSSXVLRSWCWK

SEQ ID NO: 238446 - protein, 139 aa, Glycine max
  Clone ID: PAT_MRT3847_57341C.1.pep
FFSQGGLFFKAPNPRLGGGPPPQNSCTWGGGGQFLERPALVRNLLGGLERGGTPKNWPPPPKIPSPWGWGALAPISSFPPPGKKIKTFFWGPPNLIYWAGFYNRGKGKTPGLPKLICLEKNPLFPSGVKTKKPPPGALS

SEQ ID NO: 238447 - protein, 63 aa, Glycine max
  Clone ID: PAT_MRT3847_57342C.1.pep
FSRKEKYNVPADGLNGCYVEEHPHIGLAAKECKLAHARAATLALNKEEITHWLQGNGGQVNNC

SEQ ID NO: 238448 - protein, 84 aa, Glycine max
  unsure (1)..(84): unsure at all Xaa locations
  Clone ID: PAT_MRT3847_57343C.1.pep
SPQLNFLFIHPSPSIFNPLLFTLTNNNSYMFSYIFSFPILSPSNTTFLFTTLIIFIHTQSLIIISPSHNIIQCIKIEXXIHQHT

SEQ ID NO: 238449 - protein, 58 aa, Glycine max
  Clone ID: PAT_MRT3847_57344C.1.pep
PTRPPTRPVRSYKSPSYARDHMIAERKRREKLSQSLIALAALIPGLKNVLFSSLYTKH

SEQ ID NO: 238450 - protein, 223 aa, Glycine max
  Clone ID: PAT_MRT3847_57345C.1.pep
IASAGTCCLAGIMSNGMLYVANAGDSRAVLGRVERATRETTAIQLSAEHNVNIQTERDEVRTKHPYDPQIVVMKHNVWRVKGIIQVSRSIGDAYLKKDEFNREPLPNKFRLPEPFFKPILSYEPAISVHKLRPEDQFIIFASDGLWEQLSNQEVVNIVSNSPRNGIARRLVKAALRVAARKREMRVSDLQKIEQGVRRHFHDDITVIVVFLNHKLIDNSSLFN

SEQ ID NO: 238451 - protein, 45 aa, Glycine max
  unsure (1)..(45): unsure at all Xaa locations
  Clone ID: PAT_MRT3847_57346C.1.pep
EDHRAGKIVDELNGRLNKCGVISPRFDLGVNXIEGWTAKLHTIAQ

SEQ ID NO: 238452 - protein, 79 aa, Glycine max
  Clone ID: PAT_MRT3847_57347C.1.pep
PAAPCCGRSCPTTSPAWSMTISTYSMTFCARFTRSTTPSWAPCRLLDHHETYLDVTLQKDLRTLDTRLTDALWGLLDVA

SEQ ID NO: 238453 - protein, 96 aa, Glycine max
  Clone ID: PAT_MRT3847_57348C.1.pep
PIFYHYLIKVLYEESLCACCYIILLIPDYAVDWMTLVGGLAKSSILGKCVKSPEIFSVFWVMPKGLLVIKSRFFGKSFSLCIHLLIWIGFSRFCNL

SEQ ID NO: 238454 - protein, 161 aa, Glycine max
  Clone ID: PAT_MRT3847_57349C.1.pep
MIEQQLDENSEKYEENSGRLEKHGGKTIQTSYDQIVNGCNGSAVEEGIENSAVEEGKKKEKEKEKEEKNGNEKSKENGNETENEKVKNIKLVHIDYILEKAETGIHFVGNVMHSSNQIRRAHCWFPCVDTATQRCPFDLEFTVSTDFIAVSNGDLLYQVLS

SEQ ID NO: 238455 - protein, 176 aa, Glycine max
  unsure (1)..(176): unsure at all Xaa locations
  Clone ID: PAT_MRT3847_5734C.1.pep
MAFGSSEDVSGVKLLVLLAVMYGLFSALTYSVIHMKFVKPLGNDAPLDRFSEARTVQHVRMLSQEIDGRQEGRPGLKKAAQYIKGQLEVIKERASSNVRIEIEETTVSGSFNMLFLGHNIALGYRNHTNILMRISSVDSKETDPSGFSXNGHFDSPLGSPWAVDTGGSWGGIPGWK

SEQ ID NO: 238456 - protein, 199 aa, Glycine max
  unsure (1)..(199): unsure at all Xaa locations
  Clone ID: PAT_MRT3847_57350C.1.pep
ARGTNQRFMPPPPDXATIATIVEMGFSRARAEEALRRVETNSVEMAMEWLFSHADDPVQEDDELARALALSLGSSSESTKAESAEKTIDVLTEEGHVKKPPVDDILAASVKLFQSSDSVPFQLTDLLVTLCSQSKGDDRPKVTSYLLQQLILCPLDFSQDNCALSVLAHILALLLSEDGSTREXAAQNGIISTIIDILT

SEQ ID NO: 238457 - protein, 38 aa, Glycine max
  Clone ID: PAT_MRT3847_57351C.1.pep
PRQTKFFCPFCHHPCTQRSLYQHLATIPSILCLLSIIK

SEQ ID NO: 238458 - protein, 39 aa, Glycine max
  Clone ID: PAT_MRT3847_57352C.1.pep
CYIKIGNLKKGNPFFFPKNKTPLIISGQPKKLKFVASTA

SEQ ID NO: 238459 - protein, 206 aa, Glycine max
  Clone ID: PAT_MRT3847_57353C.1.pep
MKSTLFALFLLCALTSYLPSATAGDVVDTDGNPVENGGTYFVLPTIILNGGGIEYATFGNETCPVTVAQSRDQFCKGFPITISSPARIRHISEGLSLNIGFTFASPCSPASEWTIVKDQPEGLAVKLTGFKNTVPGVFTLKRVPADEIIGYNILFCPLDNNPCGYVAVHFDQFRNRRLVVSEVQEDGLWVMFQKLSYASGLTLSSA

SEQ ID NO: 238460 - protein, 166 aa, Glycine max
  Clone ID: PAT_MRT3847_57354C.1.pep
SVWGLGTVGLAVVMGAKKAGASKIVGIDLETAKFEKAKHFGATEFVNPKEVPAEQTLQASLMDKFDGGFDYTFECCGNVQTMRQALEAAHKGWGVSCVIGVAGAGEEIKTRPFQLVTGRTWKGSSFGGWKSRDQIPSLVKEHLDGKLDLDKFITHKFAFSDINKHS

SEQ ID NO: 238461 - protein, 57 aa, Glycine max
  unsure (1)..(57): unsure at all Xaa locations
  Clone ID: PAT_MRT3847_57355C.1.pep
IVNMCIFSLTRTRXXPTLEVLSTCRRXHMTNFWPILTDLSNTPXXTTCIRIRKFQRL

SEQ ID NO: 238462 - protein, 437 aa, Glycine max
  Clone ID: PAT_MRT3847_57356C.1.pep
MPMAGEQGDRFSSITIPLLDDEKLHQVNGSDEALVAKTCDLHTPHVDNTSFFKTCFHLINALSGVGIISMPYALASGGWLSISLLFVIAIACCYTGILVKRCMDMDPDIKNFPDIGQRAFGDKGRIIVSIAMNSELFLVVTGFLILEGDNLNKLVPNMQLELAGLTIGGTTIFTMIAALVILPTVLLEELSMLSYVSASGALASSIFLLSIFWNGTIDGTGFHAKGTIFRLSGIPAAVSLYAFCYSAHPILPTLYNSMRDKSQFSKVLSACFTVCTLGYAAAGVLGYLMFGQEVESQVTLNLPTGKFSSHVAIFTTLVNPITKYALMLTPVINAVKNKVSWHYNKRFTHMFVSTSMLISTLIVAVAIPLFGYLMSLIGALLSVSTSILMPSVCYLKISGAYKRFGSEMIINYSIIIMGVTIAVVGTYTSLVDIVHNL

SEQ ID NO: 238463 - protein, 69 aa, Glycine max
  Clone ID: PAT_MRT3847_57357C.1.pep
SHRIFSTIARVGRLGSFQLALHVSFPITPISTPLLLHRLPVTCSRVGPLIKKDCYMTSMKSSATLNLLF

SEQ ID NO: 238464 - protein, 109 aa, Glycine max
  unsure (1)..(109): unsure at all Xaa locations
  Clone ID: PAT_MRT3847_57358C.1.pep
HVESMKDKIVHIYMAXESWDGNIVDHVGLKAMESGIEVFGSILLNPLLGGQQRTDYDKRLYGKYYGGEKDRDWYWMAFLKGGEDRYHHACSLAGLKDKNLEGIIFTKSL

SEQ ID NO: 238465 - protein, 65 aa, Glycine max
  unsure (1)..(65): unsure at all Xaa locations
  Clone ID: PAT_MRT3847_57359C.1.pep
MTLLNSDTAVSDKKIKTDKPYGNNGXWLLRTKLLHLSGKEXEKVDYQFVYKYGTNKNGYRPIYNT

SEQ ID NO: 238466 - protein, 59 aa, Glycine max
  Clone ID: PAT_MRT3847_5735C.1.pep
ILGPLLTSVFQCRVDSSTGSQLILKRWIYVGDGKSAEVEAIRHFRLLLRTSFYLDLKDT

SEQ ID NO: 238467 - protein, 61 aa, Glycine max
  Clone ID: PAT_MRT3847_57360C.1.pep
LEFKTFFIGCIKGFCFKRNFIFLSCKVLIVYSNIYSEGFFVLDIFIFIFLGFVLYKPSPNI

SEQ ID NO: 238468 - protein, 75 aa, Glycine max
  Clone ID: PAT_MRT3847_57361C.1.pep
PPRRLHRHLRASPLQELTLLRPVEAHVCRGCIVASRWTAFNTMCRRRFEDQEWTASQMPSQFTGRFQWFFRMRCP

SEQ ID NO: 238469 - protein, 64 aa, Glycine max
  Clone ID: PAT_MRT3847_57362C.1.pep
LSGHRCPREYDVSTTQHEVLVIKGFSGISTYQAFNSYQMPKASPLPKTFHYDRTSERTRDRMPE

SEQ ID NO: 238470 - protein, 139 aa, Glycine max
  Clone ID: PAT_MRT3847_57363C.1.pep
GKKYPLIGFFGIKTLFYRFWPPHFLVLNLLGGPRLNKWVSFFPPPKKAPQDKVLFEIFGPKKTRGFFLKGELFWEKTFTFFGLLCFLGKPKPKFGIFLGRLEKNQSQFPLGFQRGFVFFKKKPRVTGGWFSPFLIGKDL

SEQ ID NO: 238471 - protein, 561 aa, Glycine max
  Clone ID: PAT_MRT3847_57364C.1.pep
MKESFKVCFCCVRNFKVKSSEPPEEIKNLFHDYSQDDRMSADEMLRFVIQVQGETHADINYVKDIFHRLKHHGVFHPRGIHLEGFYRYLLSDFNSPLPLTREVWQDMNQPLSHYFLYTGHNSYLTGNQLNSNSSIEPIVKALRNGVRVIELDLWPNSSGKEAEVRHGGTLTSREDLQKCLNVVKENAFQVSAYPVVLTLEDHLTPILQKKVAKMVSKTFGGSLFQCTDETTECFPSPESLKNKILISTKPPKEYLQTQISKGSTTDESTRAKKISDAEEQVQEEDEESVAIEYRDLISIHAGNRKGGLKNCLNGDPNRVIRLSMSEQWLETLAKTRGPDLVKFTQRNLLRIFPKTTRFDSSNYDPLVGWIHGAQMVAFNMQSHGRYLWMMQGMFKANGGCGYVKKPDVLLSNGPEGEIFDPCSQNLPIKTTLKVKIYTGEGWNMDFPLDHFDRYSPPDFYAKVGIAGVPLDTASYRTEIDKDEWFPIWDKEFEFPLRVPELSLLCITVKDYDSNTQNDFAGQTCFPLSEVRPGIRAVRLHDRAGEVYKHVRLLMRFVLEPR

SEQ ID NO: 238472 - protein, 56 aa, Glycine max
  Clone ID: PAT_MRT3847_57365C.1.pep
VPHMMDMSLPQFSHVYDPESHGSKCVILRSASIWFFCHSCPYQTRVVFCSSQKTTQ

SEQ ID NO: 238473 - protein, 74 aa, Glycine max
  unsure (1)..(74): unsure at all Xaa locations
  Clone ID: PAT_MRT3847_57366C.1.pep
CTTRLRNQQAYFKRYQVKFKSRREGXTDYRARTRLXINQDKNKYNTXKYRFAVRFSNKDIDAQIISASIAGDLV

SEQ ID NO: 238474 - protein, 106 aa, Glycine max
  Clone ID: PAT_MRT3847_57367C.1.pep
MARRSATTTRGRTPPVVFGRCHAAEVAATGDTDLVHKHEGHGFHTILFFIDGVPKDYNGARTKEAIVSWVNKKLAPGVQNITTVDEAEKILTGEDKAILAVLDSLS

SEQ ID NO: 238475 - protein, 42 aa, Glycine max
  Clone ID: PAT_MRT3847_57368C.1.pep
NYPIPSLLIKNGRIRVCPPVCLIGCPCRFAKCISILPTCSCY

SEQ ID NO: 238476 - protein, 238 aa, Glycine max
  Clone ID: PAT_MRT3847_57369C.1.pep
MISSRQDQTGAPLSSSTTTTTPVVAPISVVDHGLPYDTHNLYDVSFNNTHTIYTLLTSDPSLVDSWISTVLRDHQHQHQQRVLTVGLDIEWRPNTQRNMQNPVATLQLCVAERCLVFQILHSPSIPPSLVSFLADPNITFVGVGIQEDVEKLLEDYNLNVANVRDLRSFAAERLGDLELKRAGLKSLGLRVLGLEVAKPKRVTRSRWDNPWLTAQQVQYAAVDAFLSYEIDRRLSSYN

SEQ ID NO: 238477 - protein, 29 aa, Glycine max
  Clone ID: PAT_MRT3847_5736C.1.pep
PKVWMDQFKLVIGHSTMLCAPEAPYDALS

SEQ ID NO: 238478 - protein, 131 aa, Glycine max
  unsure (1)..(131): unsure at all Xaa locations
  Clone ID: PAT_MRT3847_57370C.1.pep
VEAITRGLTTFATCKAVPARNIVHXGSTSAFHIDXPYHGDRTADLLAVFXEKCKLDPTDWHTISKAELQRIEXEKHTWQTYSHRLVILTGVYGFWNHCVNLDRXRESRQYLKMFYVLKXRKLADSAPLADD

SEQ ID NO: 238479 - protein, 59 aa, Glycine max
  Clone ID: PAT_MRT3847_57371C.1.pep
DQAYDHAYGFGKTDPIRLHVTGTHLRLIHQLCGLNRDSANLYIAHDNLKPRQIVLSLSL

SEQ ID NO: 238480 - protein, 164 aa, Glycine max
  unsure (1)..(164): unsure at all Xaa locations
  Clone ID: PAT_MRT3847_57372C.1.pep
FYITAGGTILRRDLLANFLTEGNYRASVDLLLTHRIKGYXIKMVAHSLVFPDNTGIALFCAMNNSFKGXVPFADIYTICSQDCELWNPACTKAMTMSFNPNPCADAXWSLEFLKRTGDHCDIICVTGWTVTPMQDVQVTIDWYISSQECVPRTYLXLNPQNSFV

SEQ ID NO: 238481 - protein, 125 aa, Glycine max
  unsure (1)..(125): unsure at all Xaa locations
  Clone ID: PAT_MRT3847_57373C.1.pep
MEGGFTLHGGHRLCGGLQIXVKTLTGKTFTLEVASSDTIDNDKDQITYRGGFLPGQHTFIYAGKQLEDGLTLADYTIKKEATLPLVLTLCGVMPILVXTLTGKTITLEVESSDTIDNVQAKIDDK

SEQ ID NO: 238482 - protein, 82 aa, Glycine max
  unsure (1)..(82): unsure at all Xaa locations
  Clone ID: PAT_MRT3847_57374C.1.pep
GEHTQNHPFXPRISYTQKTLSNQQRTIKNNNGRNKKLXSYTTTQQHNYPMAPAATTPPPKHRSQHNKPPPQKRGQQAHLPYE

SEQ ID NO: 238483 - protein, 115 aa, Glycine max
  unsure (1)..(115): unsure at all Xaa locations
  Clone ID: PAT_MRT3847_57375C.1.pep
MVLLAGVQNLPGLHALIKKEGPKVNAMIELKPTPYTLNGLEPVRSHHTLAVYRGKHHKTCVENMKKLLAGTERDGRSRXDDIETSCRNGDILAALNTATQVWHHHXLWERMLPGG

SEQ ID NO: 238484 - protein, 119 aa, Glycine max
  Clone ID: PAT_MRT3847_57376C.1.pep
RLELSHCDPVVWNIVLSGFSGSNKCDDDVMRVFRMMHLSGEAMPNSVTVACVLPVCAHLGDLDAGKCVHGYIIKSGFGQDMLGGNALVSMYAKCGLVSHDAYAVFDNIAHKDVVSWNAM

SEQ ID NO: 238485 - protein, 127 aa, Glycine max
  Clone ID: PAT_MRT3847_57377C.1.pep
LDLILLTLLHGSFVIFVLLLVILTILLVLLIAFSLGLFSVFLFDLHHFSSIIFEYFRMVKDDLQLGVVLALISLTHQAVDFVMGSKTWQKRKLGEFGAKAQQYSKRHHYVHHGLKTVNKIQIRHGFS

SEQ ID NO: 238486 - protein, 239 aa, Glycine max
  unsure (1)..(239): unsure at all Xaa locations
  Clone ID: PAT_MRT3847_57378C.1.pep
RVRWLLPPVRTYTVLVCALCESGRELEALSLFGEMRERGCEPNVYTYTVLIDYLCKEGRMDEALKMLNEMVEKGVAPSVVPFNALIDSYCKRGMMEDAVGVLGLMESKKVCPNVRTYNELICGFCRGKSMDRAMALLNKMFESKLSPDVATYNTLIHGLCEVGVVDSASRLFHLMIRDGFSPDQWTFNAFMDCLCRMSRDGEAHRILESLRDNMSKQMNMHIQPLIDGYCKXAGKIDHA

SEQ ID NO: 238487 - protein, 395 aa, Glycine max
  Clone ID: PAT_MRT3847_57379C.1.pep
MGSFVKLSRRALETEMPVMVQMQELLRGAKNAVSLAQGVVYWQPPKQALEKVKELVSEPLISRYGNDEGIPELRAALVKKLRDENNLHKSSVMVTSGANQAFVNLVLTLCDPGDSVVMFAPYYFNAYMSFQMTGITNILVGPGSSDTLHPDADWLERILSENKPAPKLVTVVNPGNPSGTYIPEPLLKRISDLCKNAGSWLVVDNTYEYFMYDGLKHSCVEGNHIVNVFSFSKAYGMMGWRVGYIAYPSEVKDFAEQLLKVQDNIPICSSILKEFRVMYWRVGGTAWVLDEKKTLEKNRKVQDKALSPLGEGSAKGGEGAIYLWAKLPDLDAHDDFDVVRWLANKHGVAVIPGKACGCPSNLRISFGGLTENDCRAAAERLKKGLEELVRDGLRE

SEQ ID NO: 238488 - protein, 65 aa, Glycine max
  unsure (1)..(65): unsure at all Xaa locations
  Clone ID: PAT_MRT3847_5737C.1.pep
VWSPLYSSEHGRHCTCIRISRGYCLPGNLQLKLFTVSGVSWLXEFQPPDDFVIRRGIYKGPVIRT

SEQ ID NO: 238489 - protein, 86 aa, Glycine max
  Clone ID: PAT_MRT3847_57380C.1.pep
RQKGWNQRMTQLSLILIRLRKMLFKLVMTPILNLRRSLDKIPLKRVYMMYSMKFENGYILSGSYIPESDISIRCSVYMCGLFPRSA

SEQ ID NO: 238490 - protein, 180 aa, Glycine max
  unsure (1)..(180): unsure at all Xaa locations
  Clone ID: PAT_MRT3847_57381C.1.pep
KHSCVEGNHIVNVFSFSKAFGMMGWRVGYIAYPSEVKDFAEQLLKVQDNIPXCASILSQYLALYSLEVGPQWVVDQVKTLEKNREIVLEALSPLGEGSVKGGEGAIYLWAKLPHGNAHDDFDVVRWLANKHGVAVIPGKACGCPGNLRISFGGLTENDCRAAAERLKKGLEELVRDGLRE

SEQ ID NO: 238491 - protein, 531 aa, Glycine max
  Clone ID: PAT_MRT3847_57382C.1.pep
MASAYRNEPNWPRHRSGGAGFMGKVPFSNPNPNPNSNPKLANGKKTQSASDDASSINRRSNDAATHSQYVTFNVASCTKKELNDFKNRLVSELEQIQKLRNQIGSSEFQPGQSLNGHPKKPLGKKISGNKRPLPSNSAKDLKRSHSEVGNLMKCCSQVLQKLIKHKHGWVFNAPVDVVGLKLTDYCDVIKQPMDLGTVKSNLSMNVYATPSDFASDVRLTFNNALAYNPKGHDVYTVAEQLLARFEELYRPVHEKFEGSIGHDRESEEELQASSWSQVEPERVKKKENPIPPAKLHKEPPPQHPASSSNPPLVQSPVRTPSPMRAPPVKPLKQPKPKAKDPNKRDMSLEEKHKLGLGLQSLPPEKMEQVVQIIRRRNGHLKQDGDEIELDIEAVDTETLWELDRLVTNYKKMVSKIKRQALMGNIDNNNNDVQSNKGNGELPSSEKVDGGPVEVKKPKKVEAGDEDIDIGDEMPTSMFPPVEIEKDKDVVGGHASSSSSSSGSSSSDSSSSSDSDSGSSSGSDSEADNGHS

SEQ ID NO: 238492 - protein, 149 aa, Glycine max
  Clone ID: PAT_MRT3847_57383C.1.pep
ITMRHTPKIGVHGVFVCYNILVLLLSSFHESTSSSSHCKAWLVQSIPTDMPHLSHVPGTLSTGDVLRWLAANSTTRLHIIAQYWQLLPSPNDPRSGDYGYTQHQMHEFGADQGVSLYQALDAAADRNVSIRLLSHSGVYPTFASEPSKL

SEQ ID NO: 238493 - protein, 60 aa, Glycine max
  Clone ID: PAT_MRT3847_57384C.1.pep
CRSRASIGLLLCFHIMTSYSVTQYDGSALITSSNAEVLRGYQFSFRNAQHQCSHRQNCLD

SEQ ID NO: 238494 - protein, 336 aa, Glycine max
  unsure (1)..(336): unsure at all Xaa locations
  Clone ID: PAT_MRT3847_57385C.1.pep
MVLIYFNFKSHSRKGRKINQLTQLKHHKYKQPKGHDVYTMAEQLLARFEELYRPVHEKFEGSIVHDRESEEELQASSWSQVEPQRVKKKENPIPPAKLHKEPPPQHPASSSNPPLVQSPVRTPSPMRAPPVKPXSNASAKPKAKDPNKRDMSLEEKHKLGLGLQSLPPEKMEQVVQIIRRRNGHLKQDGDEIELDIEAVDTETLWELDRLVTNYKKMVSKIKRQALMGNIDNNNNDVQSNKGNGELPSSEKVDGAPAEVKKPKKVEAGDEDVDIGDEIPTSMFPPVEIEKDKDVAGGHASSSSCSSGSSSSDSSSSSDSDSGSSSGSDSEADNGQS

SEQ ID NO: 238495 - protein, 77 aa, Glycine max
  Clone ID: PAT_MRT3847_57386C.1.pep
QVTRALRARMRTVDAQPNVPTALRRCVDIYHATFPLFATFFSFTVHDLSFVLYRLVVSLSFVFILFIILGYLLSYIL

SEQ ID NO: 238496 - protein, 71 aa, Glycine max
  Clone ID: PAT_MRT3847_57387C.1.pep
MKTSDDSEDESRRKRRREERKEEKREKREKHHSREDRKQEKREKHERGHSRDSDGRKRHKKDKERRRHDSD

SEQ ID NO: 238497 - protein, 57 aa, Glycine max
  Clone ID: PAT_MRT3847_57388C.1.pep
KNAVSINQPPTSLSNVQMFVRSVPGARVRFLQKSRDPFGFSVTFKLFSAEASCSLDL

SEQ ID NO: 238498 - protein, 63 aa, Glycine max
  Clone ID: PAT_MRT3847_57389C.1.pep
LITYSSKQSNYSRKKTIFEMIGFLFFQLYLVKKQRLEHKLHPETSQSRSKHKVNNTSYHITLL

SEQ ID NO: 238499 - protein, 88 aa, Glycine max
  Clone ID: PAT_MRT3847_5738C.1.pep
LIFTFIRVGSVNFSIMKKARGTIVLMRGLPNSKASPKSKPPIFIYKSLLATTNLLNFYLIKQLVPTFQIILEKKKKPLNGEREKKDRL

SEQ ID NO: 238500 - protein, 80 aa, Glycine max
  Clone ID: PAT_MRT3847_57390C.1.pep
HYYYVVLLPYSFFLIRTIMQLWSFGLFNTALCGLTPLATALGFNTWHFLLSRPFCIPGFKVLHSCVFLRFRTAKTADIFI

SEQ ID NO: 238501 - protein, 44 aa, Glycine max
  Clone ID: PAT_MRT3847_57391C.1.pep
LIISYDLNQANYADHYILMHYPSGLNDENDASGEEEEEDDEEEE

SEQ ID NO: 238502 - protein, 223 aa, Glycine max
  unsure (1)..(223): unsure at all Xaa locations
  Clone ID: PAT_MRT3847_57392C.1.pep
RRCRVVAISLEPELGEPWVLPCVRKTELLMAQNDSLNHEYLPVLGFEPFCKAAVTLLLGDVETSTPLAEGRAFGVQTLSGTGALRVAAEFLSKILKYTTFYVSNPTWENHRLVFFNGGFKQCMEYRYWNEEKRGLDIEGMIEDLRAALTYXLIILHDSAHNPTGCDPTKDQWKIIADIGQEKKLFPLFDYVYQGFATGDAENDAWAVRYXANERNIELICCPS

SEQ ID NO: 238503 - protein, 85 aa, Glycine max
  unsure (1)..(85): unsure at all Xaa locations
  Clone ID: PAT_MRT3847_57393C.1.pep
QIFVKTLTGKTITLEVESSDTIDNGKAQIQDKXGIPPDQHTLIFAGKQLEDGRTLAEYNISRESTTNLVLRSERVVCRVGARTLN

SEQ ID NO: 238504 - protein, 78 aa, Glycine max
  unsure (1)..(78): unsure at all Xaa locations
  Clone ID: PAT_MRT3847_57394C.1.pep
GRTGQILQQTLSWNRYGPKPENADQSIXVAPFTAAWPIVVATYPEPIEPIEPDMNSRLKNLRTTTNGDFRQRKDLPMR

SEQ ID NO: 238505 - protein, 96 aa, Glycine max
  Clone ID: PAT_MRT3847_57395C.1.pep
LQISAPFLSTTSNKNGWGAYQSGGFTKKKGPAYNPFFWWGNYRAGKQHFSSSPSQFPIFKISGDKPPNKKPWLRLFPQHHDLLGDPLGFLPLRQLW

SEQ ID NO: 238506 - protein, 113 aa, Glycine max
  Clone ID: PAT_MRT3847_57396C.1.pep
MIRTKKGSKEKNNPNGRCGKHMQSRNKRSLSRPSKRVGVFPVRLAVHTDVSCRQGSVLFSRRRKTLSKRLNCSRMNNSPFKHVIRSNVNLSPWNLLHQYMQKSCKKQLKKGVK

SEQ ID NO: 238507 - protein, 69 aa, Glycine max
  Clone ID: PAT_MRT3847_57397C.1.pep
ARPYPFLSCIFILSFSFRIMFKLLMANTNLRIACVLLLFFILHHQDLYVEGKRHLRLRLNNRCSKDGEK

SEQ ID NO: 238508 - protein, 46 aa, Glycine max
  Clone ID: PAT_MRT3847_57398C.1.pep
ACKKKKRLVVVCGTLKKKKQVLLLPSRGVVQRATSQVRSLGGYTPT

SEQ ID NO: 238509 - protein, 68 aa, Glycine max
  Clone ID: PAT_MRT3847_57399C.1.pep
SLQLKDKVPIQMSNLPPHATCAINNIDEIFVIHFNHFFPSPRPLHHNLRSIHPYIFIYIYSLFILQFL

SEQ ID NO: 238510 - protein, 51 aa, Glycine max; identical to SEQ ID NO: 156028
  Clone ID: PAT_MRT3847_5739C.1.pep

SEQ ID NO: 238511 - protein, 229 aa, Glycine max
  Clone ID: PAT_MRT3847_573C.1.pep
KKPVFAYRLLAHGTMAARRRQKEGLAARVVDRQQVHRTISKEEMLHLFELGDDDNPETLADLSQENEHQDNPILVGHSLKHTAPHSNGSSYSDKLMESLLSKHHPRWIANFHEHESLLQENEEEKLSKEEQDMAWEVYQKSLEWEEVQRVPLGESIMPEQKPEMPNAMPQNVSESCSILPTKLSRRFTTRKCTNLAHMLTLRSQGTKFGCSTVCGECAQEIRWEDLKKR

SEQ ID NO: 238512 - protein, 415 aa, Glycine max
  unsure (1)..(415): unsure at all Xaa locations
  Clone ID: PAT_MRT3847_57400C.1.pep
IPAVRPHDVPPTTTTKKPSPLSLLALHTLHFLVLCTWFSTSSAKATSYNVVDFGAKPDGATDATAAFLSAWNKACSSNKPAGIHVPQGRFLIARAVTFHGQCANRAISITIRGTLVAPSQYTFVGNSLYWLTFDQVSGVSIHGGVLDARGSFLWDCKYKATPNCPIGAATLGFTNSEHIVITGLTSLNSQLVHILINACHNVKMHGVKLMADGNSPNTDGIHVKFSTDVTILAPRIRTGDDCISVGPGCRNLWVEDVACGPGHGISIGSLGWDLDEPGVKNVTVRKATFSXTQNGFRIKSWGRPSSGFVEDVHFEHATMFDVQNPIIIDQHYCPFRNGCPSQASGVKISDISYKDIHGTFATQVAVKFDCSFEQPCERITLEDIRFTYKINKAPQALCNHAGGTTLGIVQPGSCF

SEQ ID NO: 238513 - protein, 150 aa, Glycine max
  unsure (1)..(150): unsure at all Xaa locations
  Clone ID: PAT_MRT3847_57401C.1.pep
MVATGGIPENTGIALACAMNSSITGRAQFDTTHLCAPKDWGKKNPACTKAMTMXLIQTPCADAWSLEFLKRTGFHCDIKRVTGWTDTPVQDEEAAGESLDYCSHCATRTXRVSGKHQNTFVANRRMGKLTIPQGTSRSVKRKPLSIGGGA

SEQ ID NO: 238514 - protein, 127 aa, Glycine max
  Clone ID: PAT_MRT3847_57402C.1.pep
AKAPIAAQSAKAPVTAQEAKTPMPSSQGVNAKAPVQAQVAKSPVPAQSAKAPTPLENAASPSPASESVAESPEVAAEAPATSPVGAEAPGPLADDVAPADVTASSASTTKMGLVGAVMAFASLFIVL

SEQ ID NO: 238515 - protein, 52 aa, Glycine max
  Clone ID: PAT_MRT3847_57403C.1.pep
FLLYPSWSPFTPFYIAKSRSLFPEWPLGVANNLHCFSLILSLIGTEPISSCI

SEQ ID NO: 238516 - protein, 129 aa, Glycine max
  Clone ID: PAT_MRT3847_57404C.1.pep
EVVSILLSSILGIPDGFNSIQLLWVNLVTDGFPATALSFNPPDPQIMKKPPRKHDEPIITSWVFVRYLIIGTYVGLATVGIFTYWYTAYDWSGDGHSLGKFSELDNWSECTDCGSACYANNNGNYTQSK

SEQ ID NO: 238517 - protein, 76 aa, Glycine max
  Clone ID: PAT_MRT3847_57405C.1.pep
HGLLHVLYGLQEDNAGNYAKAFPLYMNALEYFKIKGAITQKFTEYLRRAEEIRAVLDDGVPGPAYNGDTAVAARPK

SEQ ID NO: 238518 - protein, 72 aa, Glycine max
  Clone ID: PAT_MRT3847_57406C.1.pep
DFDLITLTTGPRITATTILFSPNLLSITMAPREPPTRKDLRERPLAGAPDNGRRMPRPKHPVSIVDYDSCPI

SEQ ID NO: 238519 - protein, 60 aa, Glycine max
  Clone ID: PAT_MRT3847_57407C.1.pep
HQLYIVKRVWLAVEDINRSFNCQKHGKDDRKHLRDMCLWLLQLGLRLAKKQQHRCVCKPI

SEQ ID NO: 238520 - protein, 226 aa, Glycine max
  Clone ID: PAT_MRT3847_57408C.1.pep
MYSNFKEQAIEYVKQAVQEDNAGNYAKAFPLYMNALEYFKTHLKYEKNPKIKEAITQKFTEYLRRAEEIRAVLDDGGPGPASNGDAAVAARPKTKPKDGESGGGGDGEDPEQAKLRAGLNSAIIREKPNVKWNDVAGLESAKQALQEAVILPVKFPQFFTGKRRPWRAFLLYGPPGTGKSYLAKAVATEAESTFFSVSSSDLVSKWMGESEKLVSNLFEMARESAP

SEQ ID NO: 238521 - protein, 428 aa, Glycine max
  unsure (1)..(428): unsure at all Xaa locations
  Clone ID: PAT_MRT3847_57409C.1.pep
MYSNFKEQAIEYVKQAVQEDNAGNYAKAFPLYMNALEYFKTHLKYEKNPKIKEAITQKFTEYLRRAEEIRAVLDDGGPGPASNGDAAVAARPKTKPKDGEGGGDGEDPEQAKLRAGLNSGIIREKPNVKWNDVAGLESAKQALQEAVILPVKFPQFFTGKRRPWRAFLLYGPPGTGKSYLAKAVATEAEXTRFCSVSSSDLVSKWMGESEKLVSNLFEMARESAPSIIFIDEIDSLCGQCREGNEREASRRIKTELLVQMQGVGHNDQKVLVLAQTSKPYAFCQKIMCLFVNQIXVFRLPVLKARRHNFKLLLGNTXHNLTDSELEFSATETDVCSGADLSVCFSDILXDMFLITHDANMFIKSGEDMWIPVETKKQGVAPKGLAEKIVPPPISKTLSAKVLGRQSPTVRNSDLDVHRRFTQEFGQEI

SEQ ID NO: 238522 - protein, 51 aa, Glycine max
  Clone ID: PAT_MRT3847_5740C.1.pep
MPSHKTFRIRKKLAKKMRQNRPIPYWIRMRTDNTIRYNAKRRHWRRTKLGF

SEQ ID NO: 238523 - protein, 55 aa, Glycine max
  Clone ID: PAT_MRT3847_57410C.1.pep
YTYGLDILIYLRGRLLRTRWQAMTPNLQYSTLRSPSSEPIHLIYLHNHSPKPTLS

SEQ ID NO: 238524 - protein, 58 aa, Glycine max
  Clone ID: PAT_MRT3847_57411C.1.pep
PGAGAGRQQSTKAAKDPNKPESPPSAFFVFMYGFSFAFDTESVFVSFRFDFVYWRLQP

SEQ ID NO: 238525 - protein, 59 aa, Glycine max
  Clone ID: PAT_MRT3847_57412C.1.pep
TFCILFFSFKEGFPWINSRYLSCTSPSTVFYYSYESICHKFELNFTSHSPTKDNNKKKK

SEQ ID NO: 238526 - protein, 99 aa, Glycine max
  Clone ID: PAT_MRT3847_57414C.1.pep
RLEFCKKCGKHQPHKVTQYKKGKDSLYAQGKRRYDRKQSGYGGQTKPIFRKKAKTTKKIVLRLECVEPNCRSKRMLAIKRCKHFELGGDKKRKGQVIQF

SEQ ID NO: 238527 - protein, 60 aa, Glycine max
  Clone ID: PAT_MRT3847_57415C.1.pep
SIISDLCCIVTGATKVGAHRLTEMTTPVLTIGQEDGKSNVTLKAYATTTTESEWLPSSEV

SEQ ID NO: 238528 - protein, 183 aa, Glycine max
  Clone ID: PAT_MRT3847_57416C.1.pep
MQRRERHVAELSIEWVVRGEVREVVMLEKLKHMEESDKIGLLEAQKEHLKGRRGFMMKMLSNYIRALGGKVCGSGRNAEREVTINIYAPCERMQKRRWETYSLKEKLKELKKGLIMKVWNLEHFGNIETRQSQIEKEMRMKAPILAHSSLRIENSKLEDRDFPNYLSYRWTMSYYMRKLDTTF

SEQ ID NO: 238529 - protein, 102 aa, Glycine max
  Clone ID: PAT_MRT3847_57417C.1.pep
FSLGGHLDQTEEGILSNPYHLLGELASDVLTDSSTDMMWARKHYLLHDMQKHGNVEMAGQMLHLPSHNNEGEHDHSHHTGLEDSPSTDDDWDCFSPLLFNAT

SEQ ID NO: 238530 - protein, 472 aa, Glycine max
  Clone ID: PAT_MRT3847_57418C.1.pep
MDSVALNGKSNDKPLHVAMLPWLAMGHIYPYFEVAKILAQKGHFVTFINSPKNIDRMPKTPKHLEPFIKLVKLPLPKIEHLPEGAESTMDIPSKKNCFLKKAYEGLQYAVSKLLKTSNPDWVLYDFAAAWVIPIAKSYNIPCAHYNITPAFNKVFFDPPKDKMKDYSLASICGPPTWLPFTTTIHIRPYEFLRAYEGTKDEETGERASFDLNKAYSSCDLFLLRTSRELEGDWLDYLAGNYKVPVVPVGLLPPSMQIRDVEEEDNNPDWVRIKDWLDTQESSSVVYIGFGSELKLSQEDLTELAHGIELSNLPFFWALKNLKEGVLELPEGFEERTKERGIVWKTWAPQLKILAHGAIGGCMSHCGSGSVIEKVHFGHVLVTLPYLLDQCLFSRVLEEKQVAVEVPRSEKDGSFTRVDVAKTLRFAIVDEEGSALRENAKEMGKVFSSEELHNKYIQDFIDALQKYRIPSAS

SEQ ID NO: 238531 - protein, 75 aa, Glycine max
  unsure (1)..(75): unsure at all Xaa locations
  Clone ID: PAT_MRT3847_57419C.1.pep
SIAQPCFLSLANPEEGHQSGKQNRLLEDPARACSTWRFFSYLKQTQVMIRSHIPEFPSLTYGRAMRRXIAIXIVS

SEQ ID NO: 238532 - protein, 77 aa, Glycine max
  Clone ID: PAT_MRT3847_5741C.1.pep
PPPHSFRHRMICVGHMFGNHFVQVYLKDHCPLPPPALLWSSNCYSQTKRWTTPYISGMQQYTSLMSFKRHYVNLNED

SEQ ID NO: 238533 - protein, 257 aa, Glycine max
  Clone ID: PAT_MRT3847_57420C.1.pep
MKNDVTIIGMEEEPMERVMGKKVGKIFRGLLEKNGVRFKMGASVEKATASKSDSSKVGAVHLKDGTTLEADLVIEGVGVKPATEYLKDNSSVSLEKDGSLKTDESFAVTGLKDVYAIGDIATYPYHGPGGNGAPVRIEHWNVAQNAGRSVANSINNPSAKPKPFIPVFWSALGSQLRYCGNTVGGYDDLILQGKPEEPSFVAYYTQGETVVAVASMMKDPYMTQSAELMRRNKMPSKSELQKGVDILEVGLPNEIKI

SEQ ID NO: 238534 - protein, 64 aa, Glycine max
  unsure (1)..(64): unsure at all Xaa locations
  Clone ID: PAT_MRT3847_57421C.1.pep
AVTGCRGCTMDPDSSYTEXTTSATLAMGVAPVKANSEGAEMGVPTENDGCECGPHXCCDPCTCK

SEQ ID NO: 238535 - protein, 370 aa, Glycine max
  unsure (1)..(370): unsure at all Xaa locations
  Clone ID: PAT_MRT3847_57422C.1.pep
RFSLFESARDEGLRLQQCRFPQDGTLLPLRGTFFFVGKHFSDSSSQQLIFFSATTAATPPPRPXEVTISPNFNQFFNVNALIEAXPPKQTPPNNLPPPPELLDTIKRFGILNDNGTMSDDFEIGHFEEGLPEDWGNDTVVEDSVSAPRIAVSKFGMCPRGMSEHIPCLDNAGAIRRLKSTQRGENFERHCPEEGKRLNCLVPPPKGYRPPIPWPRSRDEVWYNNVPHTRLVEDKGGQNWITRGKDKFRPRVRRFPGGGTQFIHGADQYLDHISEMVPDIKFGQNIRVALDVDCGVASFGAYLLSRNVITMSVAPKDVHENQIQFALERGVPAMVAAYATKRLLYPSQAFDLIHCSRCRINWTRDGMISSS

SEQ ID NO: 238536 - protein, 188 aa, Glycine max
  unsure (1)..(188): unsure at all Xaa locations
  Clone ID: PAT_MRT3847_57423C.1.pep
LEVQHWRHSYQDLLHGTTCPIPAAKNFTYTLQVTDHIVSLFYFSCIAFHMVAAAXGAIKILSRPRIPVXPFPDPAGDLYLLIXDRYQMSHTTLQTVLDLGHKLPFAXAVLINGRSRVATFTAIQGTSFTLTISKVELXNTLNFMIEGHDMKLVAVEGTHTIHTTYASIDVHVXQSYSDLITADQAPLT

SEQ ID NO: 238537 - protein, 53 aa, Glycine max
  Clone ID: PAT_MRT3847_57424C.1.pep
RKYIFERVGNKKSSIIPKSHNMFFQIMTMALLQNKVFADHQMITFQKYPTFLC

SEQ ID NO: 238538 - protein, 57 aa, Glycine max
  Clone ID: PAT_MRT3847_57425C.1.pep
KIQAAAPRGNGTRPKKERAPEGRPKYRQRGGNSVPPGNGTAQKRKGAAPQPVETRGK

SEQ ID NO: 238539 - protein, 44 aa, Glycine max
  Clone ID: PAT_MRT3847_57426C.1.pep
RKFASNPGKAKDIPIPNLPPLDFPSPELPLMELYEDILKGFMNN

SEQ ID NO: 238540 - protein, 63 aa, Glycine max
  Clone ID: PAT_MRT3847_57427C.1.pep
SLKRYLLAAIAIHKKLADKYTYIHLRTINLFRKVNLAYTIIYAKTDNVGTLPFKCNIDKITHI

SEQ ID NO: 238541 - protein, 63 aa, Glycine max
  Clone ID: PAT_MRT3847_57428C.1.pep
VSAAMALHVLLVLMLLLMSSLRYATSDPYIEYDILEAYEDLKFSDIEPLIMRVSYRRLMQDMD

SEQ ID NO: 238542 - protein, 35 aa, Glycine max
  Clone ID: PAT_MRT3847_57429C.1.pep
HTRTFRPTGISALHLHDLADWDRIASYRKDAPNWE

SEQ ID NO: 238543 - protein, 80 aa, Glycine max
  Clone ID: PAT_MRT3847_5742C.1.pep
QTLNYLHVYVWLIRVSVDKWMDITEMGYVIASWYNVILVSLSRQPSMTFFPLRSQPSPDSSGHRMICVGHVFENHFVHVH

SEQ ID NO: 238544 - protein, 33 aa, Glycine max
  Clone ID: PAT_MRT3847_57430C.1.pep
GGMLLPRPIVHHQVIAGSKESHPLSCPLVAPHA

SEQ ID NO: 238545 - protein, 175 aa, Glycine max
  Clone ID: PAT_MRT3847_57431C.1.pep
RKPSTMVQKMQNIKRLRVGRNAVYCAIFDRAGRYVITGSDDRLVKIWSMETAYCLASCRGHDGDITDLAVSSNNALVASSSNDCVIRVWRLPDGLPISVLRGHTGAVTAIAFSPRPNAVYQLLSSSDDGTCMIWDARYTQSSPRLYVPRPLDSVIGKSNGPSSRSVPHNHQIFCL

SEQ ID NO: 238546 - protein, 119 aa, Glycine max
  Clone ID: PAT_MRT3847_57432C.1.pep
APKRTQAKLKGAPTTAKAKNKGGEKPGREKPRGGGFTPNSGAKKNRKPIFQRGKNPTADPYKTEPNSQRKAPPAKNQPAETPPVVEKKRGSEKKKPRPGRPNNAQCPTPDSRAPTRKPF

SEQ ID NO: 238547 - protein, 122 aa, Glycine max
  unsure (1)..(122): unsure at all Xaa locations
  Clone ID: PAT_MRT3847_57433C.1.pep
MPPTETAPKKRRTTQPSSSEVEXXXKGGEEKRHQXREXGGGDQPEEEEEPDGDPEHEPNPQPKHPPDEGEGEGEQEGEEEGQGEEETESDGDGEPDRESEGEREQSPQEAEXXEREEESEGR

SEQ ID NO: 238548 - protein, 67 aa, Glycine max
  unsure (1)..(67): unsure at all Xaa locations
  Clone ID: PAT_MRT3847_57434C.1.pep
IGTLVALISRCRCNGYDRYSCEGRKTRCLDRLLVKNNMVRIFGDTAYXTVTVERVKLYRCRGLVVEV

SEQ ID NO: 238549 - protein, 336 aa, Glycine max
  Clone ID: PAT_MRT3847_57435C.1.pep
MSGMGDGYVGTAQDAVRIRRLEKQREAERRKIQELKTKSASAKGQPGLLQFGSSTSEILETAFKKETVGLVTREQYVEKRVNIQSKIEEEEKEKLQKQQQEEEELQLKKRKKRKIRGNSRLSFAEDIDNEPQEDEPHHSKDNLEANRFGVVSLDKAVETSFLPDSEREAEEQAERERLRKQWLREQEQIRNEPLEITYSYWDGTGHRRVIQVRKGDSIGEFLRAVQQQLAPEFREIRTTTVENLLYVKEDLIIPHQHSFYELIVNKARGKSGPLFHFDVHEDVRTIADATIEKDESHAGKVVERHWYEKNKHIFPASRWEIYDPTKKWERYTIHGD

SEQ ID NO: 238550 - protein, 50 aa, Glycine max
  Clone ID: PAT_MRT3847_57436C.1.pep
EKSDEPRDLPWHHWRLRLLGILCFSTEKVQLIIFDNFYRRIGETDKMREK

SEQ ID NO: 238551 - protein, 210 aa, Glycine max
  unsure (1)..(210): unsure at all Xaa locations
  Clone ID: PAT_MRT3847_57437C.1.pep
MLLADNLEANRLRCGKLGKDPTVETSFLPDRSAEDSCXSEREAEEQAERERLRKQWLREQEQIRNEPLEITYSYWDGTGHRRVIQVRKGDSIGEFLRAVQQQLAPEFREIRTTSVENLLYVKEDLIIPHQHSFYELIVNKARGKSGPLFHFDVHEDVRTIADATIEKDESHAGKVVERHWYEKNKHIFPASRWEIYDPTKKWERYTIHGD

SEQ ID NO: 238552 - protein, 160 aa, Glycine max
  Clone ID: PAT_MRT3847_57438C.1.pep
MASPEEAKLETFMQWLQANGVELRGCKIKWCGSKRGFGIFSDKDVSDGVMLVVPLDLAITPMRVLQDPLLGPACRAMFEEGDVDDRLLMMLLLTVERLRKNSLWKPYLDMLPTTFGNPLWFSDDELQELRGTTLYRATELQKKSLLSLYESKVKDIVKKL

SEQ ID NO: 238553 - protein, 65 aa, Glycine max
  Clone ID: PAT_MRT3847_57439C.1.pep
LHQILFFMKGPSTLKWTVILLYRKSSQVTSSLDLFIHVIMADVFTKSLRGPWVNYICIIALGTNK

SEQ ID NO: 238554 - protein, 54 aa, Glycine max
  Clone ID: PAT_MRT3847_5743C.1.pep
SKLISPVTSQSDGQIQISDTALEHTGGQAKRCQDSIQYKHNTTHHLFVFGCSVT

SEQ ID NO: 238555 - protein, 67 aa, Glycine max
  Clone ID: PAT_MRT3847_57440C.1.pep
TFSLTSVPHYPSVWTLSSETMSYNKHISTINITYPYTYNIHDLLKLHTLPNLYLISSHSTFSTFLYT

SEQ ID NO: 238556 - protein, 345 aa, Glycine max
  Clone ID: PAT_MRT3847_57441C.1.pep
MASSSPSPPSYLTHLPLHPSHQGESEKRVEDDESRVPIHIVTAATQLPVEFLEPSPQSKLVIGFDCEGVDLCRKGTLCVMQLAFPDAVYLVDAIEGGEELIIACKPALESNYITKVIHDCKRDSEALYFQFGIKLNNVVDTQIAYSLIEEQEGRKRLRDDYISFVGLLADPRYCGISYDEKEEVRVLLRQDPKFWTHRPLSEQMIRAAADDVRFLLYIYRQMMEKLNERSLWYLAVHGALYCRCFCLNSNNFADWPSLPSIPVDNLNADGNDLEEEILSVLDIPQGKMGLVIGKRGATILSIKRSCNAEILTGGPKGPPDKVFIIGPVKEVRKAEAMIRGRILDI

SEQ ID NO: 238557 - protein, 117 aa, Glycine max
  unsure (1)..(117): unsure at all Xaa locations
  Clone ID: PAT_MRT3847_57442C.1.pep
GVLTGKYKKGVIPPXDSRFALENYKNLASRSLVDDVLKKVDGLKPIAEELGVPLSQLAIAWCAANPNVSSVICGATKESQIQENMKAIDVIPLLTPVVMEKIEAVVQSKPKRPESYR

SEQ ID NO: 238558 - protein, 344 aa, Glycine max
  Clone ID: PAT_MRT3847_57443C.1.pep
MASSSPSHSYLTHLPLHPSHQGDSEKRVEDDESRVPIHIVTAASQLPVEFLEPSPQSKLVIGFDCEGVDLCRKGTLCVMQLAFPDAVYLVDAIEGGEELIIACKPALESNYITKVIHDCKRDSEALYFQFGIKLNNVVDTQIAYSLIEEQEGRKRLRDDYISFVGLLADPRYCGKSYDEKEEVRVLLRQDPKFWRHRPLSEQMVRAAADDVRFLLYIYHQMMEKLNERSLWYLAVRGVLYCRCFCLNSNNFADWPSLPPIPVDNLNADGSDPKEEILSVLDIPQGKMGLVIGKRGATILSIKQSCNAEILTGGPKGPPDKVFIIGPVKEVRKAEAMIRGRILDI

SEQ ID NO: 238559 - protein, 160 aa, Glycine max
  Clone ID: PAT_MRT3847_57444C.1.pep
MATDQMKPIATLLLGLNFCMYVIVLGIGGWAMNRAIDHGFVIGPGFDLPAHFSPIYFPMGNAATGFFVTFALIAGVAGVGSIISGVNHVRSWTSESLPSAASVASIAWALTVLAMGFACKEIQLTGRNARLKTMEAFMIILSATQLFYIAAIHGAAAYRR

SEQ ID NO: 238560 - protein, 50 aa, Glycine max
  Clone ID: PAT_MRT3847_57445C.1.pep
AQVDPSAMSCVLTPRPRIALQHVRMLTGMRQVVAAIETDSRRSTSHRFLS

SEQ ID NO: 238561 - protein, 581 aa, Glycine max
  Clone ID: PAT_MRT3847_57446C.1.pep
IRKNNPSRTNEKASTTAGEEFYDGIPRFPEDSLPNKPKSKVSEVSLRLGKAVTTGIAIGLEKAVEVLDTLGSSLTNLNVSSGFSSGAAIKGNKISILAFEVANTIVKGFNLLQSLSAKSIRHLKEEVLLSVAVQNLVSKDMDELLRIVAADKRQELEVFSNEVIRFGNRSKDPQWRNLDCYFEKQTHMLKDGNPSRISKELNGQRLSRDEAEAIMQQLMTLVQFTAELYHELHALDRFEQDIQRKGEEEEGDQRGDGLAFLRAEIKSQKKQIRHLKKKSLWCRSLEEVVRKLVAIVLFLHLEISNALGNADDHGPLTGHMSNCQRLGPAGLALHHANIVLQIDTLVDKSTMPANTKDALYQSLPPNIKLALRSKLPSLRVVEEISVAYITYEMHKKLHWLSPMAINTSKAHKRFGWLGEWAYSGYEVKKKTGVMWIETFYHADREKVEHCILELLLWLHRLAIRSKAHSDAGKVRPAIKSPVGTALQNTNEQISLLTIDEQNMLLDLNKKIPIRRISKSLDFDSLNIRFRENCRLAKSRSHSSSRSKEISFNRIFSKLPVIDFDIDKERALNVIDRLDVVR

SEQ ID NO: 238562 - protein, 80 aa, Glycine max
  Clone ID: PAT_MRT3847_57447C.1.pep
MASQGHGNKLIVSTSPKSDSGGGGGGTGSLPKGQCLCSPTTHEGSFRCRLHRGHTASPANWMKRSKSMPANKPVVSDSTC

SEQ ID NO: 238563 - protein, 66 aa, Glycine max
  Clone ID: PAT_MRT3847_57448C.1.pep
SHKTLGQISRSVFSDHLRLQLSHYTVGLLACGSRKSLCSLRDLFPCDSVIKLLRCSPIRLQSNSWH

SEQ ID NO: 238564 - protein, 112 aa, Glycine max
  Clone ID: PAT_MRT3847_57449C.1.pep
SKSENHEQTNHALDIQREKKLASLAVQNSDPKKTSQLGFLTGKTGKEKGRKKKRKSLGVKLTTLGEVSSSQGKRGSTIPKRGGTSFPYSRVSKSLKATFNNSYFWELQWYLG

SEQ ID NO: 238565 - protein, 75 aa, Glycine max
  Clone ID: PAT_MRT3847_5744C.1.pep
NKSLHAILVLAQPMRAYTIIYFLVHEDQARHTCQERLMWNCFKCLLSNRLISVLDNSYKSEKVIIIVYMHASTTT

SEQ ID NO: 238566 - protein, 91 aa, Glycine max
  Clone ID: PAT_MRT3847_57450C.1.pep
FGERIASHDDRFLLHLADKTGGIIVTNDNFREFVNESVSWREIITKRLLQYTFVGDIFMVPDDPLGRSGPRLEEFLQKEVCLRDMQPLLSA

SEQ ID NO: 238567 - protein, 48 aa, Glycine max
  Clone ID: PAT_MRT3847_57451C.1.pep
SRFANPRRRMEVFLCMSPLCCAVALLVRCAQTFLLDHHPKVPAFDIHE

SEQ ID NO: 238568 - protein, 145 aa, Glycine max
  unsure (1)..(145): unsure at all Xaa locations
  Clone ID: PAT_MRT3847_57452C.1.pep
MMMMMKKKDAAYSSILTLLLIATLLSLTVSASSLSDAEAMYVKQRQLLYYRDEFGDRGENVIVDPSLAFENDRLRNAYIALQAWKQAILSDPRNQTADWVGSDVCSYTGVYCAPALDIPKIXTGAGIDLXHXDIGGYLPEELELV

SEQ ID NO: 238569 - protein, 55 aa, Glycine max
  Clone ID: PAT_MRT3847_57453C.1.pep
RPDVSVHGTRFLCNHAPCSLFDAIFTDLVSRNRCLSSIVFSRAKPIATEIEREIE

SEQ ID NO: 238570 - protein, 95 aa, Glycine max
  Clone ID: PAT_MRT3847_57454C.1.pep
IQHTHILSMGSPQTDLRKIALEGFDLIDKLYGRRGPANNDAFPGRREGFWVVHQVPNGDMDQKPRKNKDVVNYGVPVANLPRGKPQNRWGRPIKF

SEQ ID NO: 238571 - protein, 125 aa, Glycine max
  Clone ID: PAT_MRT3847_57455C.1.pep
MASLGKLPYQRLRNEEELDEEALELQREVKKARAWLKLRALAGRRRPRLRVAALRRFLRKRTKFLSRFRVSWRKALKKLNNGQSHVNDLFGGNFLLMQGNLTPFGCGKKPYYMGYGLQGLSTTIA

SEQ ID NO: 238572 - protein, 69 aa, Glycine max
  Clone ID: PAT_MRT3847_57456C.1.pep
THIFSENITVKHDGLQDQRPYNQAIIMPTQRMPDNDQTCPTTEKKPHRSCSTGCFYGSRSPKITRLQTP

SEQ ID NO: 238573 - protein, 92 aa, Glycine max
  Clone ID: PAT_MRT3847_57457C.1.pep
DIVILRHDVDILGPDGPRELRGINLVTYGDPHGHSAMARTVGFPAAIAAKMVLDGEIQSHGMVLPFSREIYRPILSRLKSEGIEPFVRSKWL

SEQ ID NO: 238574 - protein, 147 aa, Glycine max
  Clone ID: PAT_MRT3847_57458C.1.pep
TEFTPAVRDYNREAHRRRLSTESIRSDLSSLRNTETSNLTTTTLVQDASHNLAGSHEVSRNSDLFLTFPLDERHKLNKILNTQKQRLVTAKADVEDLIARLNQEMAARQYLVTNVKDLEVELETTRLNCRENMQHAVLTEKERVTQM

SEQ ID NO: 238575 - protein, 48 aa, Glycine max
  Clone ID: PAT_MRT3847_57459C.1.pep
MVADGGASNDKQETCDSWAPLGECIGNPTYRVGSPGLSGCCIKSCKAC

SEQ ID NO: 238576 - protein, 161 aa, Glycine max
  Clone ID: PAT_MRT3847_5745C.1.pep
TEGRRGIDGTLCGNGNNGWDTYFLTRLPKITTPLFRARYQDLTAFSSQSLPFFYQPCRYANAKTLRAKNFFKPIFLSHLNAFFEQGDQTYIMGEAGRVQRGLVGKNISKVGKKGFKVTGFEPFQRSKNCREHTRPKQSIFLADAIYSVCGDARSVSMIAQL

SEQ ID NO: 238577 - protein, 212 aa, Glycine max
  Clone ID: PAT_MRT3847_57460C.1.pep
MMNASKFIKCVTVGDGAVGKTCMLICYTSNKFPTDYIPTVFDNFSANVAVDGSIVNLGLWDTAGQEDYSRLRPLSYRGADIFVLAFSLISRASYENVLKKWMPELRRFAPNVPIVLVGTKLDLREDRGYVADHMGSNVITSAEGEELRKQIGAAAYIECSSKTQQNVKAVFDTAIKVVLQPQPPRRKEMARKKRHRRSGCSFVSIMCGGCAA

SEQ ID NO: 238578 - protein, 207 aa, Glycine max
  Clone ID: PAT_MRT3847_57461C.1.pep
MLLLSIKLPCFHFLKFGGISSEWYFSVQTHTDYIPTVFDNFSANVAVDGSIVNLGLWDTAGQEDYSRLRPLSYRGADIFVLAFSLISRASYENVLKKWMPELRRFAPNVPIVLVGTKLDLREDRGYVADHMGSSVITSAEGEELRKQIGAAAYIECSSKTQQNVKAVFDTAIKVVLQPPRRKEMARKKRHRRSGCSFVSIMCGGCAA

SEQ ID NO: 238579 - protein, 102 aa, Glycine max
  Clone ID: PAT_MRT3847_57462C.1.pep
SLGSLVAPARTPGCCFSRGPSVPRGGTSGVFLSAGWLLFLLHPCFRHSHPPSSGLGATRPSRLVSSFWLCFAASSSPLGGLFSCCGRAPQPAFSLGSHFYER

SEQ ID NO: 238580 - protein, 176 aa, Glycine max
  Clone ID: PAT_MRT3847_57463C.1.pep
MAATLSHLVAVFHFLILLLLLLMVQGFSNPDFDALLSFKTASDTSQKLTTWNINSTNPCSWKGVSCIRDRVSRLVLENLDLEGSIHPLTSLTQLRVLSLKGNRFSGPVPNLSNLTALKLLFLSRNAFSGEFPATVKSLFRLYRLDLSNNNFSGEIPATVSHLTHLLTLRLDGNKFP

SEQ ID NO: 238581 - protein, 71 aa, Glycine max
  Clone ID: PAT_MRT3847_57464C.1.pep
KKLVKLAPLNPVFGCFGHNGSKRLPLLLAIINSVLWLFFKMFLRVKFSPGEILVSPCYKCLYFIKRFFVWV

SEQ ID NO: 238582 - protein, 102 aa, Glycine max
  Clone ID: PAT_MRT3847_57465C.1.pep
QLHSMPPQVQIEFQFPSENASLLSISWFKPHCLRRHHMMRKGRARLLWVSLYIETILDTSVPEVNTFSFVSRSNEPRTVRKYLSRNPRWELLQIPTDRSPIS

SEQ ID NO: 238583 - protein, 309 aa, Glycine max
  Clone ID: PAT_MRT3847_57466C.1.pep
ARKAGRVLGKGRFWTAYRAVLDDGNVVAVKRLKDAQITGKREFEQHMELLGRLRHPNVVSLRAYYFAREEKLLVYDYMPNATLFWLLHGNRGPGRTPLDWTTRLKIAVGAARGVAFIHNSCKSLKLTHGNIKSTNVLLDKQGNARVSDFGLSVFAGPGPVGGRSNGYRAPEASEGRKQTQKSDVYSFGVLLLELLTGKCPSVVESGGSAYGGVVDLPRWVQSVVREEWTAEVFDLELMRYKDIEEEMVGLLQIAMTCTAPAPDQRPRMTHVLKMIEELRGVEVSPCHDSLDSVSESPSLSEDACGTTSQ

SEQ ID NO: 238584 - protein, 60 aa, Glycine max
  unsure (1)..(60): unsure at all Xaa locations
  Clone ID: PAT_MRT3847_57467C.1.pep
AGXXVHXXPTIXTTFXRSXXXHETTEIQVQSSXSTYRLRKPXQPQPKGXXIXAXHXSYRX

SEQ ID NO: 238585 - protein, 116 aa, Glycine max
  unsure (1)..(116): unsure at all Xaa locations
  Clone ID: PAT_MRT3847_57468C.1.pep
AGPARAVPDLPTRPLSPFSYCDRELYLHRPNVARLXRRNAVFHIVXMGKADEPTITQVCEFHARQRMVIAPASKDQVDLLRSIDRVGLPGAGSGFTKTNASAEHVVATNTLNFCDG

SEQ ID NO: 238586 - protein, 250 aa, Glycine max
  Clone ID: PAT_MRT3847_57469C.1.pep
MPIVATSLLFFLLNLCLRGTYADYGGGWQGGHATFYGGGDASGTMGGACGYGNLYSQGYGTNTAALSTALFNNGMSCGSCYEMKCDTDPKWCLPGSIIVTATNFCPPNFALANNNGGWCNPPLQHFDLAEPAFLQIAQYKAGIVPVSFRRVSCVKKGGIRFTINGHSYFNLVLITNVGGAGDVHSVSIKGSRTGWQTMSRNWGQNWQSNSYLNGQSLSFQVTTSDGRTLTSNNIVPANWQFGQTFEGAQF

SEQ ID NO: 238587 - protein, 117 aa, Glycine max
  Clone ID: PAT_MRT3847_5746C.1.pep
EPPHGFAPLKTFGGVFPGVLSPLGPFAMLCKKVPFFLWGPLFKKTFLLRSAGFFAPPFFCPRCFFPAYYGSAPSMRLLFPTFSLTPLGFYSFSFQRDGIFAYVYISVLLFFFIKKKH

SEQ ID NO: 238588 - protein, 39 aa, Glycine max
  Clone ID: PAT_MRT3847_57470C.1.pep
CNPILEGCRTAGSLCFYAWMGFFLKKNLKIKYSNLKLIN

SEQ ID NO: 238589 - protein, 97 aa, Glycine max
  unsure (1)..(97): unsure at all Xaa locations
  Clone ID: PAT_MRT3847_57471C.1.pep
PQSPDEQLVVVLQVRVADIDIGDQDIVHTQVRAFNGQPVXSVKSLGSMVERCHEEYLKFDLDYDEIEVLGMKTAKPGYLDSPATGCIPSAMSDDLKS

SEQ ID NO: 238590 - protein, 41 aa, Glycine max
  Clone ID: PAT_MRT3847_57472C.1.pep
NNIKPNSCKKASKVVKLPKPPSKERIHFFHSIKHEPLTVVF

SEQ ID NO: 238591 - protein, 272 aa, Glycine max
  unsure (1)..(272): unsure at all Xaa locations
  Clone ID: PAT_MRT3847_57473C.1.pep
MGACWSSRIKAVSPSNTGFTSRSVSRDGHDIQSSSRNSSASIPMTPRSEGEILQFSNLKSYSYNELKMATKNFCPDSVLGEGGFGSVFKGWIDEHSLAVTRPGTGMVIAVKKLNQDSFQGHKEWLAEINYLGQLQNPNLVKLIGYCLEDQHRLLVYEYMPKGSVENHLFSFLSHXQQLSWTLRLKISLGAARGLAFLHSTETKVIYRDFKTSNILLDTNXYAKLSDFGLGQXDDXPGDKSHVSTXGHGEPMGYAAXPEYLATGHLTAKSDVY

SEQ ID NO: 238592 - protein, 136 aa, Glycine max
  Clone ID: PAT_MRT3847_57474C.1.pep
QTIRWRIQAAMPVLPPSIRCSFSCQLPTVPASALASLQPSTTNSGFNSSCSTVPQRNLVSSSRTTASGRSKLQDNDSDVDPWTLLEDGAGSCSSASNTAIIGSGDRVNIRAASWLKGAVRVRRTDLSYVGAVDEDS

SEQ ID NO: 238593 - protein, 701 aa, Glycine max
  Clone ID: PAT_MRT3847_57475C.1.pep
DHKGPDTLLSIHLGTANVLLHHLWPLLETGKVDSCLHELLHWPFRDVCLRECQGLYDLMAADTSDAEFATLLELNGSDMHSKSLAFVPLRARHILNAMIDCKMPQSIYTKDEGSRNYGHGESKIDFTDSESTLQDKLVDVLDALQPAKFHWQWVELRLLLNEQALIEKLKTHDMSLADAIQLSSPSSEKGAASENENNFIEIILTRLLVRPDAAPLFSELVHLFGKSLEDSMLLQAKWFLAGQDVLFGRKTIKQRLINIAETKRFSVKTQFSEPWGWCSPCKNPVALKGDKMKVDPMPLEEGEVAEEGMDAKRSIKGFSQVFDSESSTSKQQHGTERALLELILPCIDQSSDESRNSFASDLIKQLNYIEQQITLVTRGPSKPTASTPVTEGQTNKVNSRKTIRGGSPGLARRPTPAPDSSPLSPAALRASISLRVQLLMRFLPILCSDGESSARSMRYMLASVLLRLLGSRVVHEDATVNPMHYTPLRREAESHAEASFVDSSAEGLFDHLLLILHGLLSSSPPSWLRSKPVSKTTNEPTREFSGFEREPLEALQNHLDNMQLPDTIRRRIQAAMPLLPPSIRCSFSCQLPTVPASALVSLQPNTTNSGFNSGSSTVPQRNLVPSSRTTTSGKSKQHDNDLDVDPWTLLEDGAGSCPSASNTDIIGSGDRVNIRAASWLKGAVRVRRTDLTYVGAVDEDN

SEQ ID NO: 238594 - protein, 65 aa, Glycine max
  Clone ID: PAT_MRT3847_57476C.1.pep
FFAGSRKFSRPIKKLTYPRGWLALGPFIKNAVPVITKGFTFGKTPKKCFIPANFLSPIPFFFLGY

SEQ ID NO: 238595 - protein, 70 aa, Glycine max
  Clone ID: PAT_MRT3847_57477C.1.pep
MSSECKGKSSWPELVGVEGTVAVATIERENPLVDANTVLKGTIVTPDFRCDRVWVWVTKDGIVYQVPTIG

SEQ ID NO: 238596 - protein, 208 aa, Glycine max
  Clone ID: PAT_MRT3847_57478C.1.pep
MATIGIGVGVTKLQQPHRPKSKSLFLGQRLRISPFWGEPQCSERRLFGVSNPPRVVQVFALGGGEWLDTVHNLFVGVGVGLPCSVMQCGDVIYRSTLPKSNGLTLTSNGLTLTVPGVILALGTLSYLWATPGVAPGFFDMFVLAFVERLFRPTYKKDDFVLGKMLGEGSFGVVYRVSLANKPSSKEGDLVLKKATDYGAEEIWMNERV

SEQ ID NO: 238597 - protein, 89 aa, Glycine max
  Clone ID: PAT_MRT3847_57479C.1.pep
DELEETAYDSADKIVVVGAYEYDDDENWGRAPQISRKKLWLYTGPGFLRSIEFLDHGNIEGDLQAGAIAWYSLSRLEMRATRMGLLIQL

SEQ ID NO: 238598 - protein, 44 aa, Glycine max
  Clone ID: PAT_MRT3847_5747C.1.pep
FVINCTTSFHGLLNSKPFGISVESTRSLYTWPTSPCMLLGSSRY

SEQ ID NO: 238599 - protein, 70 aa, Glycine max
  Clone ID: PAT_MRT3847_57480C.1.pep
RWCDHRGRLINRGGAIKEFMGYKPVHRSWTSLEGPALSKFFVFYIISVIYPLFCFLFSPFFFSDAWAEEW

SEQ ID NO: 238600 - protein, 91 aa, Glycine max
  Clone ID: PAT_MRT3847_57481C.1.pep
IVLFSAEFCYKHSLTMWFIVESQLRVVMKCKVSRLWKHFGIHGHVSTIGIILVSHSVSFGISSCFLHVLMSIHHLSEHYACGWVPPKGTCS

SEQ ID NO: 238601 - protein, 143 aa, Glycine max
  Clone ID: PAT_MRT3847_57482C.1.pep
PRFILSRHNGPGPKNPPPVGGGNKGGPNKGGKVSKKFFISAPQPVKDRILYASALAPFLQKRFKGGGLSGNLGEKINVTNLGNGRIQVVAPQEFSGWYIKYLPKKFLKNQQPRGGVRVVAPNKGEDPPKFFNVVGEEGEEEED

SEQ ID NO: 238602 - protein, 51 aa, Glycine max
  Clone ID: PAT_MRT3847_57483C.1.pep
PNSYPVMSTRFQALGYFKLFKVKKNHKTCTKSNCRPPLRTKCSILRLHKIK

SEQ ID NO: 238603 - protein, 139 aa, Glycine max
  unsure (1)..(139): unsure at all Xaa locations
  Clone ID: PAT_MRT3847_57484C.1.pep
RLKTENGNVGYAFINMINPGLIILFYQVFNGKKWEKFNSEKVASLAYARIQGKAALIAHFQNSSLMNEDKRCRPIXLFNADGPNAGDQVPFPVGINIRNKAGRVRNNTQEDNLQGSRSLPNLGISKLSSDGDSHSLESD

SEQ ID NO: 238604 - protein, 331 aa, Glycine max
  unsure (1)..(331): unsure at all Xaa locations
  Clone ID: PAT_MRT3847_57485C.1.pep
MRTSRKAEPSNNDVVSSEHRNWSNIFKSLVQMVCSQQNQLHSFASRHKFLEDRLRMQHEGWVSDVRCHKDQISQMNGMLTFEEKKQSLEAAKADFALSLKHREAAMLKWILEHTEDELADFKAWFEILSRNKPTRNNTAEKEKYSSEIKDEFSRLKGEYDKLALEKYSEVTALLAEKKFVWNQYNVMENDXADKLRTKKDSKISEFQSKMAEMEAEAKRLIKEISGLSVELESLRKFRNNQVTPPVLNHCSQGTKAPESGVVKSNRSRRNMTSKKEICTPNAPVPAKSSETGTKTKSMKRKEAPVIPTSDTPKLFSSGFKVPKLKSSVRVT

SEQ ID NO: 238605 - protein, 35 aa, Glycine max
  unsure (1)..(35): unsure at all Xaa locations
  Clone ID: PAT_MRT3847_57486C.1.pep
IXXKXGLEHKVYPTKKSVFRNXHIKSYCXPXTAFQ

SEQ ID NO: 238606 - protein, 58 aa, Glycine max
  Clone ID: PAT_MRT3847_57487C.1.pep
NDLDKYRSSNHNVLQRYANEDVSLGSWIMGLDVDHINDIRLCCSSPPDCHWKAQAWNI

SEQ ID NO: 238607 - protein, 71 aa, Glycine max
  Clone ID: PAT_MRT3847_57488C.1.pep
LLSFLSSISGKSFTLSLSSLCLVLLSRACVAISSSKLDVCQLNNVIALELDHRVESEGGFIHTWDSHHAEL

SEQ ID NO: 238608 - protein, 69 aa, Glycine max
  Clone ID: PAT_MRT3847_57489C.1.pep
PSQQLRGPLHATGGIQVLTSRPSSPLCMVTYAIQLACMWWVLYSWFAWPCAMSWCDQGPLGSCCDARID

SEQ ID NO: 238609 - protein, 72 aa, Glycine max
  Clone ID: PAT_MRT3847_5748C.1.pep
LNNLILSILFLFPPENQTTDLNKEHLQSHSSSYGLRSNRKIQLNPIKPYKKKETHFHSFINPQELKKSLRLD

SEQ ID NO: 238610 - protein, 265 aa, Glycine max
  Clone ID: PAT_MRT3847_57490C.1.pep
MELMCHCSSFLLPPENPNTTCSLSLKYALVVLNQSLPRFAPLLWDHAQVRVCADGGANRVYDEMPLFFPHQQPSHVRTRYKPDVIKGDMDSIRTEVLDFYAKLGTKIIDESHDQDTTDLHKCVAYIRDLTPNVDGSELCILVAGALGGRFDHEIGNINVLCRFSNTRIILLSDDCLIHLLPKNHCHQIFIESSVEGPHCGLIPIGMPSGSSTSTGLKWDLNDTAMSFGGLVSTSNIVKGEIVTVQSDSDLLWTISIKKLEVLHGA

SEQ ID NO: 238611 - protein, 174 aa, Glycine max
  Clone ID: PAT_MRT3847_57491C.1.pep
MNALAATNRNFQRAARILGLDSKLEKSLLIPFREIKVECTIPKDDGTLVSYVGFRIQHDNARGPMKGGIRYHPEVDPDEVNALAQLMTWKTAVADIPYGGAKGGIGCNPRDLSISELERLTRVFTQKIHDLIGIQRDVPAPDMGTNAQTMAWILDEYSKFHGHAPAVVTGKPID

SEQ ID NO: 238612 - protein, 117 aa, Glycine max
  unsure (1)..(117): unsure at all Xaa locations
  Clone ID: PAT_MRT3847_57492C.1.pep
NPGSKLLKKETCEPVSIIETPPMVIVGVAGDVTTPRGVRTLNTRWARLWLDERNRELYXEXSHSSKQACTRYTQHRQTYDGKTIVSAPPEKLTRIPSAAHVLATTQDMIFTGLHPKR

SEQ ID NO: 238613 - protein, 64 aa, Glycine max
  Clone ID: PAT_MRT3847_57493C.1.pep
ITTNEKILLLIMPYKVCLLVQNSHSWPPMYLRRLKIMYKPPSQEHFFKIKYPPFCASTYFYPFL

SEQ ID NO: 238614 - protein, 59 aa, Glycine max
  Clone ID: PAT_MRT3847_57494C.1.pep
RMLCHVAKEEMDAKIHINSAFDLFNKIKNMLCKSLNLINKFQSAGVLGAKASDGEGREG

SEQ ID NO: 238615 - protein, 65 aa, Glycine max
  Clone ID: PAT_MRT3847_57495C.1.pep
GLAKSGFKQTSPIIVCVSKQRKCSAPSFHKICELLFSKCINSPIFVQYNKVVICCQLASSSVLHM

SEQ ID NO: 238616 - protein, 135 aa, Glycine max
  Clone ID: PAT_MRT3847_57496C.1.pep
ANQVTLFKKNSGEKNVASMKSEGFLTNHYDPVRDEASNATNENVKEIIHRKSGQISSPRDQEFERAKRSGIKTLMDEKHINKLASKKIKNTRKQKVDMSGKIDQMLTGRNGAKLITEQGKQQIPTPDKFQVLNEA

SEQ ID NO: 238617 - protein, 66 aa, Glycine max
  Clone ID: PAT_MRT3847_57497C.1.pep
ERIHKHEGQILEFHFMPFSLLLKPNYNPSILLLLATTCYTLSLSLTSSLSSFLIIIYFCNAFSVVA

SEQ ID NO: 238618 - protein, 83 aa, Glycine max
  Clone ID: PAT_MRT3847_57498C.1.pep
SVGGKGAYQCYSLWCPLSCRFLYSLIHPSRVGTFNCFFSLRDRSIIGFGRRLALIVSIRALLRCFVLLKDVFSIQDINGWIAL

SEQ ID NO: 238619 - protein, 48 aa, Glycine max
  unsure (1)..(48): unsure at all Xaa locations
  Clone ID: PAT_MRT3847_57499C.1.pep
PPISYXLLNXPINLLCYRTFXFDFKNFPEXIXNLXXXANQSYTSGXEV

SEQ ID NO: 238620 - protein, 166 aa, Glycine max
  Clone ID: PAT_MRT3847_5749C.1.pep
SLFGSRASAVAFVAERHSRAWAVGWDYRLYAPFYTGVVSSGIAYYVQGLVMKLRGPVFATAFNPLCMIIVAALGSLILGELLHLGSIIGGIVIAVGLYSVVWGKAKDYSEPKLPSTDAEDTESLPITATSKIDIISGNLEKQPSTDQKLEETNKVGEEKELNVVKV

SEQ ID NO: 238621 - protein, 41 aa, Glycine max
  Clone ID: PAT_MRT3847_574C.1.pep
YHFSACCRCFMTHNGAICWTRSDPGLGAYSRDNGAIFQRNS

SEQ ID NO: 238622 - protein, 146 aa, Glycine max
  unsure (1)..(146): unsure at all Xaa locations
  Clone ID: PAT_MRT3847_57500C.1.pep
GIENWIIGLLQPVIDNLKKPDYVQRVEIKQFSLGDEPLSVRNVERRTSRRVNDLQYQIGLRYTGGARMLLMLSLKFGIIPIDVPCGVRDFDIDGELWVKLRLIPTEPWVGAVSWAFGSLPKIKFELXSIATRPGMFNLMAIPVLSM

SEQ ID NO: 238623 - protein, 58 aa, Glycine max
  Clone ID: PAT_MRT3847_57501C.1.pep
QGLSIVYGENVVREREIGTHISTIETTSSGLATAACSFNLSASFALKKKLQHNHNHNE

SEQ ID NO: 238624 - protein, 360 aa, Glycine max
  Clone ID: PAT_MRT3847_57502C.1.pep
MATKQLPQIAILGAGIFVKTQYLPRLSEISHLFILKSIWSRTQESATAAVDIARKHFPQVETKWGDNGFDDIIHDGSIDAVAVVLAGQNQVDISLRLLKAGKHVLQEKPAASCTSELEAALSSYKSISSDAPGQLIWSVAENYRFEPGLVECKKLIAGIGKMMSVQVIIEGSMNSSNPYFSSSWRRNFTGGFILDMGVHFIAGLRMLVGCEIVSVSAMTSHVDLTLPPPDNISSVFHLENGCSGVFVMVVSSRSPKTLWRVVGLNGTLQVERGFQGQHGYLVSFYGTDGQNKSSFFPFSGVTEELKAFINDVSEITLKKRNQFVTEPRLSYVEGARDVAVLEAMLESGARQGELVRLKKF

SEQ ID NO: 238625 - protein, 144 aa, Glycine max
  Clone ID: PAT_MRT3847_57503C.1.pep
DLQTVYVGKTFYSNLNPPYCTHSLNLSHSCLSFFFRTFHNLSHYSSSLRQTPPLPLQLTPSPSTATCQAGLHHHSHRHHYHTKTLSSNLTSVLKQLQRRLCASFLPQCSPCLDPLFRCSTFLRSTLARLIFFYSKERELISEID

SEQ ID NO: 238626 - protein, 48 aa, Glycine max
  Clone ID: PAT_MRT3847_57504C.1.pep
QQINNGLWHKCWKKLYTFRLCDSHNSVINITLGCSVQIAFMTVTPNIE

SEQ ID NO: 238627 - protein, 189 aa, Glycine max
  Clone ID: PAT_MRT3847_57505C.1.pep
KPGQYETHTAFTMPGLCRAVSGINVFDPKFNIAAPGADQSVYFPSTAKEQRLTSFHPAIEELLYSKDDNEEHIGLLEDMKKPIIFSMARLDKVKNLSGLVEWYARNKRLRSLVNLVVVGGFFNPAKSKDREETEEIKKMHFLMKEYNLKGQFRWIAAQTDRYRNSELYRCISDTKGAVVQPALYEAFGL

SEQ ID NO: 238628 - protein, 60 aa, Glycine max
  Clone ID: PAT_MRT3847_57506C.1.pep
IIKTDIVHKLISAGICYLLIYYTHATEIGYQFNIKKIGYELLFKTGILITVYLGIKLRKQ

SEQ ID NO: 238629 - protein, 85 aa, Glycine max
  unsure (1)..(85): unsure at all Xaa locations
  Clone ID: PAT_MRT3847_57507C.1.pep
TVYGNYLLDFQYDPIYRSQPPGPPASATTRRHRXKKPFSEDFVLQANYKFTVLGSGHYSPESMDPGYNVEWEDIIFVTYLTPFSI

SEQ ID NO: 238630 - protein, 36 aa, Glycine max
  Clone ID: PAT_MRT3847_57508C.1.pep
PWVVLALFLRTISIWNYQTMTVENVFKISLFSLRST

SEQ ID NO: 238631 - protein, 110 aa, Glycine max
  Clone ID: PAT_MRT3847_57509C.1.pep
MASSKSLITAFLLALTLSSMSMSQATRHLMQTTAPNLPKTTLPPLPSLPTLPQANVPTLPTIPTLPQPSLPTIPTVPQVTLPPLAATSLPNFPTIPSFPFFSPPPSATAP

SEQ ID NO: 238632 - protein, 695 aa, Glycine max
  Clone ID: PAT_MRT3847_5750C.1.pep
MDTPPASPPPPLPPPPADADASPSTLKRTRKATRLRSLATRPPGAERPVVNVDPATGKADGPYKKKLRTYLGIVARDKVDVTYDTWKEVPTAQKDLIWEDIQAEFQIPEASDNRTKKKILQIVGERWRQFKSDLTRKWPLAVDKDGADDIVCEKYGISKEKWTQFCQTRRDPSWEDVRKKAQASQKQNTAPHVLSRGGYEYLEEKLMAEKAKKRLEEAAQSGSTEDIIDPPSPIRRHVKWKIARTKKTGQMTSEAAKEIADRIDSLDEQASQGSFVPHGRQDILTAAIGRPEHPGRVRAVGAGVTIKQYFGSASRTSRSSSSMPLEDLEQLTQQIRDQLEESITEKSQMQSQGIALPPEPEVGPSGPRVSTKESCVAPSGNNPGMGDSDKCGLYIEENPSRLVALGRLYEGSTTVHNIPLLHGQVKVGVEEVKDTEALVPIPTDEVTLVGQTLNTFLAWPTHLVKCLSEQAVVSPAKPPESPDEEVDDPLYLMTLTIPQLFLKPLQVMWDATIFGVFNQNFPLYIKHEDLSEIAHGGQCLSISVIQLWILHLTETSVRAGNSDVYGFLEPQSIQRSGQSQFESESYIKSWIQSSKRDVYLEAYLNSGHWQMVVILPKENLVVWFCSLHNRPDNYLKGIINSALKGLDDTPQPKSKAAARWIVVKYFNEVRPLEAERFKALRIQWAQYYLKVRNQT

SEQ ID NO: 238633 - protein, 61 aa, Glycine max
  Clone ID: PAT_MRT3847_57510C.1.pep
CNNGNDSRCVPLTTSGRNSTFSTSFIHFIVNTNLLNVIMCSPDIYKLSDSHSITWLHSVTV

SEQ ID NO: 238634 - protein, 112 aa, Glycine max
  unsure (1)..(112): unsure at all Xaa locations
  Clone ID: PAT_MRT3847_57511C.1.pep
GNWASVETARLNAEGLSCKVLDKEAFKKQMLKTLIWICSVKLVVTLYEGVTVSVVVNEFRTELSILITELASVSTNEKGLKFEESMEXRLCAYSRAVSHFPTEVKEFKCANG

SEQ ID NO: 238635 - protein, 114 aa, Glycine max
  Clone ID: PAT_MRT3847_57512C.1.pep
MAMIIRFQHPLSFILWLFLFLVLFQYVWFGSKSNNDNNAVFTNNQLQFSLSRNRRILTTGRGFDFTPFLHHHHRGHHRRHHHRSRVPESKETEIDPRYGVEKRLVPTGPNPLHH

SEQ ID NO: 238636 - protein, 58 aa, Glycine max
  Clone ID: PAT_MRT3847_57513C.1.pep
GRMTMAICDKEKVPLKRKGTFYPIAIRLAVLCGMLGSKKPREQTRYRDDNAVLDKWTY

SEQ ID NO: 238637 - protein, 38 aa, Glycine max
  Clone ID: PAT_MRT3847_57514C.1.pep
RAIFILIQFIEKALLGTSRKISHGAQNPYKLVIIIREG

SEQ ID NO: 238638 - protein, 55 aa, Glycine max
  Clone ID: PAT_MRT3847_57515C.1.pep
IIGNTFYFFIRFKSNNHDLIYLEDRTKTPLYQEGSGPFLHRRGSFKTSIISSPKG

SEQ ID NO: 238639 - protein, 104 aa, Glycine max
  Clone ID: PAT_MRT3847_57516C.1.pep
PRIYLFHLYIFILALYSLSYRNSPPFTVIVRAPMRLRHNSIVSDRACIIRKFFYSCTACCFPYLFATFYLSYLMFLPSLVHCCPPPPPPPSRRHCNSVERQIGR

SEQ ID NO: 238640 - protein, 46 aa, Glycine max
  Clone ID: PAT_MRT3847_57517C.1.pep
KKFRIKKKLAKNIRKNRPIPYWIGMRTDNTIRYNAKGCYWGCIKFG

SEQ ID NO: 238641 - protein, 93 aa, Glycine max
  Clone ID: PAT_MRT3847_57518C.1.pep
NLKLHSILQERAAKEFQFDIHTKNVTDTTRWHQSREFSSQLYIELQAITFIDYKRNCKTRFKSNLINHTLNCSIISIKQILTQKSSCNTKFQK

SEQ ID NO: 238642 - protein, 84 aa, Glycine max
  unsure (1)..(84): unsure at all Xaa locations
  Clone ID: PAT_MRT3847_57519C.1.pep
XSATVYYALFIRPLGNRTGKQRTALRGHSVGNPCTPDGLADQDTFTGSVLCCFAHQAFYLINLHRPFDLIMELIGNAQTLYRRT

SEQ ID NO: 238643 - protein, 98 aa, Glycine max
  Clone ID: PAT_MRT3847_5751C.1.pep
PASGLRLLATRPPGAERPAVNVDSATGKADSPHMKKLRTYLGIFAHDKVDVTYDNWKEVPTAYKDLIWEDIQAEFEIPEASDSRTKKKILQTVGERWR

SEQ ID NO: 238644 - protein, 183 aa, Glycine max
  Clone ID: PAT_MRT3847_57520C.1.pep
RDDAKRKLKSIGVKVTEDKDNFNVLVLGRFIRSVKFLLAVSRGISIVSYDWVTDCVEDGKALSPDDYLIDDETTKSNFDFQLSKTLEKVRKSDGDLLKDYTFWIPNNIKPSYGDIKALIESMQGTVIRTKPGRFKENHLIILNEGDDKQADHFTELGFKAYTTELIYSGILQQKLKLTQNLVK

SEQ ID NO: 238645 - protein, 77 aa, Glycine max
  Clone ID: PAT_MRT3847_57521C.1.pep
HVATLPRYNFFFFFFFFVTARTLVFVVFFFFFFFFVSLFGELLLTARMFVYVCCKELVCGSRAPARIRFLLTRCHFE

SEQ ID NO: 238646 - protein, 48 aa, Glycine max
  Clone ID: PAT_MRT3847_57522C.1.pep
DLMEAAEKSNHIDIVNHHVQNFSDGTFPSAPVIQTISVFSKNIAIFIT

SEQ ID NO: 238647 - protein, 248 aa, Glycine max
  Clone ID: PAT_MRT3847_57523C.1.pep
MTVIKEEQQPNQIAGHKELGHKSLLQSDALYQYILETSVYPREHESLKELRELTEKHPWNLMATPPDEGQLLGMLLKLINAKNTMEIGVFTGYSLLSTALALPSDGKILAMDVNREYYELGLPVIEKAGVAHKIDFREGPALPLLDVLIKDEKNKGAFDFIYVDADKDNYLNYHKRVIELVKLGGLIGYDNTLWNGSVVAPPDAPLMDYVKYYRDFVMELNKALALDSRVEICQLPVGDGITLCRRII

SEQ ID NO: 238648 - protein, 187 aa, Glycine max
  Clone ID: PAT_MRT3847_57524C.1.pep
LSVGACECEVKKKRVYFRFDSFYQALYQTPIRSLHLSVYSDKIPVHCAESLVPGSFADLNMQSIRKSILTRVNLRRSTERWFLAGDEGAHKQLRCWCSSTAVSSDQILDRVIALAKKYDKIDGSKVTETADFQKDLNLDSLDRVELIMALEEEFSIEIPDEKADKLACCADIAKYIAEVDQKNLEKP

SEQ ID NO: 238649 - protein, 65 aa, Glycine max
  Clone ID: PAT_MRT3847_57525C.1.pep
GKKPREILFFTLKGNFKTLNLHTQQVYLVITPSLSYSFPFTPFYYFTPTTFSQHGPHRFILPHTY

SEQ ID NO: 238650 - protein, 150 aa, Glycine max
  unsure (1)..(150): unsure at all Xaa locations
  Clone ID: PAT_MRT3847_57526C.1.pep
PENIRTLFEKHGKVLEVELFMYKKNPNRGWAFVEKGSPKKALEALKNLEWNKFKGGVKKNKXARPKKKKKAPPPVKPKGGRFKLLGDNFSYKASSKNFKEFFYLGTGKVVFPKVGYCNNPKRPFGKEFVSFKFKKKTEAVLFKFQKKVFF

SEQ ID NO: 238651 - protein, 706 aa, Glycine max
  unsure (1)..(706): unsure at all Xaa locations
  Clone ID: PAT_MRT3847_57527C.1.pep
MRNSEAPTHGGMEIEATRPSAGNGSTITLPGLSPLSETLWREKANTAEIIGDVSARLTWKDLTVMVTLSNGETQNVLEGLTEDAEPGTFTALMGPSGSRKSTLLDALSNRLAANPSLSRSILLNTRKAKRHLGTAAXVTHAYSRSDTLTMIETLSYLAXLRYMVSMPWAGQIPLVESTIVAMGLQDCADTVIGNWHLRGISGGEKRRVSIALEILMRPRLLFLDEPTSGLDSASAFFVTQTLRALARDGRTVIASIHQPSSEVFELFDQLYLLSSGKTVYFGQASEAYEFFAQAGFPCPALRNPSDHFLRCINSDFDKVKATLKGSMKLRFEGSDDPLDRITTAEAIRTLIDFYRTSQHSYAARQKVDEISKVKGTVLEAGGSEASFLMQSYTLTKRSFINMSRDFGYYWLRLVIYIVVTVCIGTIYLNVGTGYNSILARGSCASFVFGFVTFMSIGGFPSFVEDMKVFQRERLNGHYGVTSFVISNTLSAMPFLILITFLSGTICYFMVRLHPGFWHYLFFVLCLYASVTVVESLMMAIASIVPNFLMGIIIGAGIQGIFMLVSGYFRLPHDIPKPVWRYPMSYISFHFWALQGQYQNDLRGLIFDNQTPDLPKIPGEYILEKVFQIDVNRSKWINLSVIFSMIVIYRIIFFIMIKVNEDVTPWIRGYLARRRMQQKSGAQNTTIAPDVLTQSPSLRTYVSTQTK

SEQ ID NO: 238652 - protein, 59 aa, Glycine max
  Clone ID: PAT_MRT3847_57528C.1.pep
SIRVQATGDHTPAHQTTALRDFFGFAVAAMPRRPVSPFHNQIDAGQLRRISALHPAQRE

SEQ ID NO: 238653 - protein, 46 aa, Glycine max
  Clone ID: PAT_MRT3847_57529C.1.pep
RVRSRTGRRMRVPPQRFIMLKDDAPRPGQPSQGPRPAGTAAARVRT

SEQ ID NO: 238654 - protein, 47 aa, Glycine max
  unsure (1)..(47): unsure at all Xaa locations
  Clone ID: PAT_MRT3847_5752C.1.pep
SIRESLSNIHGQAATCLFQWSRILFCIARKIIDRITKMIGRKKXRXR

SEQ ID NO: 238655 - protein, 569 aa, Glycine max
  unsure (1)..(569): unsure at all Xaa locations
  Clone ID: PAT_MRT3847_57530C.1.pep
MEAVTGSHHFSTLSLSFSHNKTLRSSSAKSIKLSSPSTNASLTSTNWFAKEVWGWVNSNSKGVAVRRYTRGVVVRAEMFGQLTSGLETAWNKLKGEEVLSKENIVEPMRDIRRALLEADVSLPVVRRFVQSVSDQAVGVGVIRGVRPDQQLVKIVHDELVRLMGGEVSELVFAKSGPTVILLAGLQGVGKTTVCAKLANYLKKQGKSCMLVAGDVYRPAAIDQLAILGKQVDVPVYTAGTDVKPSEIAKQGLEEAKKKKIDVVIVDTAGRLQIDKTMMDELKEVKKALNPTEVLLVVDAMTGQEAAALVTTFNLEIGITGAILTKLDGDSRGGAALSVKEVSGKPIKLVGRGERMEDLEPFYPDRMAGRILGMGDVLSFVEKAQQVMRQEDAEELQKKIMSAKFDFNDFLKQTRTVAKMGSVSRVIGMIPGMGKVTPAQIRDAEKNLLNMEAMIEAMTPEEREKPELLAESPVRRKRVAQDSGKTEQQVSQLVAQLFQMRVRMKNLMGVMESGSLPTLSNLEEALKAEEKVNXKAPPGTARRRKRSESRSVFGDSTPARPSPRGFGSKN

SEQ ID NO: 238656 - protein, 36 aa, Glycine max
  Clone ID: PAT_MRT3847_57531C.1.pep
IHCLWDLTGKPLPTMLSHPFQCVYKGRPRLHVPLMQ

SEQ ID NO: 238657 - protein, 51 aa, Glycine max
  Clone ID: PAT_MRT3847_57532C.1.pep
CLKSNPTFHPWFPIQWPSCRVPGRQRSTVRGTGQGPVGPRNCSSIKTMRLC

SEQ ID NO: 238658 - protein, 54 aa, Glycine max
  Clone ID: PAT_MRT3847_57533C.1.pep
HFLPHSLHQQKNSTTWVPRFLHQPTPKAITIGITTRELGLGSLAKQCCNLHDPV

SEQ ID NO: 238659 - protein, 96 aa, Glycine max
  unsure (1)..(96): unsure at all Xaa locations
  Clone ID: PAT_MRT3847_57534C.1.pep
KQVGHQILKKRNYGGFEXVSPPRGIKKSPLRRTKNVRFRVRAKPKVKKFSPKSHPQGPKPGFMVKGATLKPVTPIPYNVVNNLKEGYKFHSRGWSG

SEQ ID NO: 238660 - protein, 156 aa, Glycine max
  unsure (1)..(156): unsure at all Xaa locations
  Clone ID: PAT_MRT3847_57535C.1.pep
YRPKTIDARLRQTIDPQYNEVQAQMDTDLLKLSVDDVEPTIGSMLDLEIAQSETALPKYTVGGTILRSDLLADLLTEGYFRASVDLQRTHRIKGMIQMVATVGIPENTGISLACAMNSSFRGRARSDTYTICSHDCELWNSACTXAMTMRFNSNSC

SEQ ID NO: 238661 - protein, 43 aa, Glycine max
  unsure (1)..(43): unsure at all Xaa locations
  Clone ID: PAT_MRT3847_57536C.1.pep
RRGQCGLEIRLHVQMRPWLXREGGKETERAPSFVFPPAXLERP

SEQ ID NO: 238662 - protein, 63 aa, Glycine max
  Clone ID: PAT_MRT3847_57537C.1.pep
FTYFIYPSYVSCNKIPSRIRFFYHIPVCEMVPHSDLYTCHDRSSHHSIGYTSWTIGLSSGHNV

SEQ ID NO: 238663 - protein, 90 aa, Glycine max
  Clone ID: PAT_MRT3847_57538C.1.pep
MGFHLPGIRKALFAVNQASSKAIHVPKGYLAVYVGENMKRFVIPVSYLNQPSFQDLLSQAEEEFGYDHPMGGLAIPCSEDVFQCITSCLN

SEQ ID NO: 238664 - protein, 63 aa, Glycine max
  Clone ID: PAT_MRT3847_57539C.1.pep
MSDYKVCSICLSNDRDLAFGCGHMTCRDCGSKLSKYCICMFGITNHIKLFTEILCVDPHILCT

SEQ ID NO: 238665 - protein, 133 aa, Glycine max
  unsure (1)..(133): unsure at all Xaa locations
  Clone ID: PAT_MRT3847_5753C.1.pep
LEEKTQRIVVFNEMEQLMHGRLDGNGLKRHGLYNGKGSVMXKVHAFLFFDHNGGSKIFVLHKYXWRAIPPIVRCYGDIIAPSFFRKCNCLTTKEDGFLPIHALXVDRAFLEAHDMGALLRWTLFMSAQDTFND

SEQ ID NO: 238666 - protein, 426 aa, Glycine max
  unsure (1)..(426): unsure at all Xaa locations
  Clone ID: PAT_MRT3847_57540C.1.pep
MEFLKIKKFRKSQKANGEKDLADKAVPEPEEPKLNTDGPDQCKSENADSAGEAEDDDDFITNEVKRRLKELRRNSFMVLIPEEDSCPEEGEDEEEEEAGETCSNEWRDVEAEGQQWWRXFDAVFEKYCERMLFFDRMSTQQLSEVGKGSQYTSTPSPRSASKKLASPLRCLSLKKFEEPDDETEHLQQPEHDPYQDIETAYVGQICLTWEALHCQYSHMSQKISWQHDNPTCYNHSAQEFQQFQVLLQRFIENEPFEQGRRAEIYARTRNNLPKLLQVPNIRGSDHELTDDSEMRVLAPDLIGIIESSILTFHLFMKRDKKKSSGATNQNQLDTPLQQIQSTLEKKVVKLKELRRKKKNWKKNSWPQKHEDIQVLLGLIDVKILSRVLRMTRMTREQLFWCEEKMKKLDLSNSRLERDPCPILFPC

SEQ ID NO: 238667 - protein, 48 aa, Glycine max
  Clone ID: PAT_MRT3847_57541C.1.pep
KNQVIFLSQLLWTEESCKLSYCRNSLGTIGLASSILTFCSTGYITHTL

SEQ ID NO: 238668 - protein, 160 aa, Glycine max
  unsure (1)..(160): unsure at all Xaa locations
  Clone ID: PAT_MRT3847_57542C.1.pep
MEFLKIKKFRKSQKADGEKDLADKAVPEPEEPKLNTDCPDQCKSENADSAGEAEDDDDFITNEVKRRLKELRRNSFMVLIPEEDSCPEEGEEEEEGETSSNEWRDVEAVSNGGVVMLCEKYCERILRFDXRLPQQLTALGTDIQYTSTXSPRSASKKLVS

SEQ ID NO: 238669 - protein, 118 aa, Glycine max
  unsure (1)..(118): unsure at all Xaa locations
  Clone ID: PAT_MRT3847_57543C.1.pep
MEFLKIKKFRKSQKADGEKDLADKAVPEPEEPKLNTDCPDQCKSENADSAGEAEDDDDFITNEVKRRLKELRRNSFMVVIPEEIPAXEEGEEEEEEGETSSNEWRDVEAEGQQWGGGF

SEQ ID NO: 238670 - protein, 45 aa, Glycine max
  Clone ID: PAT_MRT3847_57544C.1.pep
FNYSMQLDIMSSVEMFSAPRRTPLDTSHNNRVSKFKVPCISKVSN

SEQ ID NO: 238671 - protein, 137 aa, Glycine max
  unsure (1)..(137): unsure at all Xaa locations
  Clone ID: PAT_MRT3847_57545C.1.pep
MEFLKIKKFRKSQKANGEKDLADKAVPEPEEPKLNTDGPDQCKSENADSAGEAEDDDDFITNEVKRRLKELRRNSFMVLIPEEDSCPEEGEDEEEEESRETCSNEWRGCEAEGQQWWRXFDAVFEKYCERMLFFDRM

SEQ ID NO: 238672 - protein, 56 aa, Glycine max
  Clone ID: PAT_MRT3847_57546C.1.pep
GIPPTRMILSLQLREANSADCRIHIITFDSPVNYTIIFAIIGLKICLITMLTILHL

SEQ ID NO: 238673 - protein, 242 aa, Glycine max
  Clone ID: PAT_MRT3847_57547C.1.pep
MATLSFGIATTCLSAAADYRRRSNWKWSRPRIVCVGWDPEGVLGPPQTGHLARFEFKRRLERDADAREAFQRQVREEKERRQSLRQSRPLPDTPQDLIEYFLDTEAQEIEFEIARMRPRLNEEFFAQLKFELGQLRFAVNKTQLMEDRQIELEALEKAILEGLEAYDKMQGELVKARASLTKILTSKDAKATLLEMVEKNEINRSLLALLDENIASAQKGNQKQAAEYMEKLRGAVLRYITV

SEQ ID NO: 238674 - protein, 245 aa, Glycine max
  unsure (1)..(245): unsure at all Xaa locations
  Clone ID: PAT_MRT3847_57548C.1.pep
MSHTLQFSFVSSAFNYSMKMEKMKRVRPRGFQFLCSSEHSSFKDEDGADNGGGQVSSRVILVERYSNGTAKRYVLGDDSQLQAFLVEEDRSTPNRFQDLHSSDESLSWLPEIIKDFVLPAGFPGSVSDDYLDYMLLQFPTNVTGWICHTLVTSSLLKAVGIGSFTGTTAAASAAXIRWVSKDGIGAVGRLFIGGRFGSLFDDDPXRMYADFIGSAGSIFDLTTQLYPAYFLPLASLGNLTKAVAR

SEQ ID NO: 238675 - protein, 35 aa, Glycine max
  Clone ID: PAT_MRT3847_57549C.1.pep
VKMEEPNFFSADKACNFFSDEQAPTFQWYCSKEWS

SEQ ID NO: 238676 - protein, 92 aa, Glycine max
  Clone ID: PAT_MRT3847_5754C.1.pep
RWFEAALSVSPGNSFVPWGAPYSHLVTGCLDCACHLPFLVAAGIRQSRKSFPLVGSLVALGSDSTVCVNSPVLVLIRGPVVHVMRSKFHLEP

SEQ ID NO: 238677 - protein, 84 aa, Glycine max
  Clone ID: PAT_MRT3847_57550C.1.pep
APLPIMMELGYLNQGQPSRGTTPLVTLPLLLSTLVFFSTFTHAFSSSVFPELNPIKPRHSRLLRSAVQRETPTSQLSELWSPLE

SEQ ID NO: 238678 - protein, 82 aa, Glycine max
  Clone ID: PAT_MRT3847_57551C.1.pep
YLAAAAAMPAMPQPPERAPVNPQPLRVRAPLLDRLVNLAGEVSITRSRLESELAQIRGSLGDLTDNLERLGRQLHDVTLQAD

SEQ ID NO: 238679 - protein, 409 aa, Glycine max
  Clone ID: PAT_MRT3847_57552C.1.pep
SRAAEIEHIASNRTHLTCVESSSASTSAPPHMHDEITGSSGSSALIESNRTGQSGISILQSLIDRARRTVRGSADDIGWLQRDPGMPSVEDGTVRFLEILDNIKHGVHRLPNSVVYLLIPGLFSNHGPLYFVSTKVSFSKMGLACHIAKIHSEASVEKNAKELKEYIEEIYWGSNKRVMLLGHSKGGVDAAAALSLYWSDLKDKVAGLALAQSPYGGTPIASDLLREGQLGDYVNLRKLTEILICKVIKGDMRALEDLTYERRREFLKEHHLPKEVPIVSFRTEAGISPAVLATLSHVAHAELPLVAPAGESRKLPVVMPLGAAMAACAQLLQVRYGEKSDGLVTCRDAEVPGSVVVRPKRKLDHAWMVYSSLNDDLSEGDAFQVCEALLTLLVEIGQKKMHELAMKDE

SEQ ID NO: 238680 - protein, 369 aa, Glycine max
  unsure (1)..(369): unsure at all Xaa locations
  Clone ID: PAT_MRT3847_57553C.1.pep
SHFVISRDLTNTNMIGAKGLMGNSWPVLHLLPFGWLTDPGSNEGPHRYSYLNLEEKKTQMTLWSGEKSPLLXEGEVRRIDPRTCNVITNPTLLEINSFSSNNMEFPYITSVNSEDQDLGRPMRRSSMEIKTSYTHSLGLTSCTESKASGWASESLNQYLERICWKRSLGNKHLSPFCVHKRELYFPFDEASMYQEYHQRKHHLVATNRIKFCLDASPKRKLTSKEFKRGTFSPCSWDSNQMWELNPNGTLVNSYSGLCATVESSEDTINSGGLHSWIATGRKGEVYVAFFNLSEQKRVISAKTSDLAKVLPGRDFSSCQGSEVWSGDAIEITRGTLSTAVEVHGSALIVLNCNESPLLSPKIERKKENK

SEQ ID NO: 238681 - protein, 68 aa, Glycine max
  unsure (1)..(68): unsure at all Xaa locations
  Clone ID: PAT_MRT3847_57554C.1.pep
AYSTQANSSLPGRIIEETHGLVSXEPAPEISACPSEENMRYFNGMILGPTXSSYEGXVVHIELFVPEE

SEQ ID NO: 238682 - protein, 56 aa, Glycine max
  unsure (1)..(56): unsure at all Xaa locations
  Clone ID: PAT_MRT3847_57555C.1.pep
YQQRYXRDXXCXKGNAHXLPTXFTXGMASXPXPXLNKFXAXEXLLXYGXFIESVNX

SEQ ID NO: 238683 - protein, 120 aa, Glycine max
  Clone ID: PAT_MRT3847_57556C.1.pep
SPWSSRRIVRSGDMPTIGVLPCCHAFHAECLEQATPKTRKSDPPCPVCVKLEENSPDQRSHLRLRTGFPKLKSSRDNGPSRPWGCVQVSDCVERALHAPPSNTMLLLNQNRIKNPSLKRI

SEQ ID NO: 238684 - protein, 44 aa, Glycine max
  Clone ID: PAT_MRT3847_57557C.1.pep
SLPLMPLTVGWSLNYSDLLEYIVPLLIINRFLNLWCRLLNFLTS

SEQ ID NO: 238685 - protein, 186 aa, Glycine max
  Clone ID: PAT_MRT3847_57558C.1.pep
MAKSTFFVCLNISLLFSLDSATYYSSFSPTLLGFREEQFTHLHFFFHDVVTGPKPSMVFIAEPNGKAKDALPFGTVVAMDDPLTVGPEQDSKLVGKAQGIYTSISQEEMGLMMVMTMAFTDGDFNGSTISVLGRNMIMSEPVREMAIVGGTGAFRFARGYAQARFYSVDFTKGDAIVEYDVFVNHY

SEQ ID NO: 238686 - protein, 186 aa, Glycine max
  Clone ID: PAT_MRT3847_57559C.1.pep
MAKSTFFVCLNLSLLFSLVTATYYSSLTPTLLGFREEKFTHLHFFFHDVVSGPKPSMVFIAEPNGKAKDALPFGTVVAMDDPLTVGPEQDSKLVGKAQGIYTSISQEEMGLMMVMTMAFTNGDFNGSTISVLGRNMIMSEPVREMAIVGGTGAFRFARGYAQARFYSVDFTKGDAIVEYDVFVNHY

SEQ ID NO: 238687 - protein, 53 aa, Glycine max
  Clone ID: PAT_MRT3847_5755C.1.pep
GLAQFLPSQVSSHSCLHNHPRQVNTRSYTAPWFIWAARHIFQDLTYKVSKAVA

SEQ ID NO: 238688 - protein, 61 aa, Glycine max
  unsure (1)..(61): unsure at all Xaa locations
  Clone ID: PAT_MRT3847_57560C.1.pep
SXQGXXXVGXRXXXPLSXXXPXXXXXXXXTXTPXFXXFFXSXCEGEXRARIPEXTYACXAT

SEQ ID NO: 238689 - protein, 60 aa, Glycine max
  Clone ID: PAT_MRT3847_57561C.1.pep
SHLIKFVSVTAYRPMVTSATREGLTFINQCITLHCMVYNHTHTHTHLHQFKLRGNGIVHG

SEQ ID NO: 238690 - protein, 50 aa, Glycine max
  Clone ID: PAT_MRT3847_57562C.1.pep
DSLINFDNHIFGYDAIYVNLLSKPVIMMWKTFGGYLIFVAIVGKSLDTIG

SEQ ID NO: 238691 - protein, 50 aa, Glycine max
  Clone ID: PAT_MRT3847_57563C.1.pep
LQHFIVYLAYNACLCCTGVAIKSMSPVSIKEVDMVRCGLGRGSGESGREE

SEQ ID NO: 238692 - protein, 115 aa, Glycine max
  unsure (1)..(115): unsure at all Xaa locations
  Clone ID: PAT_MRT3847_57564C.1.pep
MYGKVVLSFIFVLLLVFSYSIFIGTLDIRSYFFPRLKLPAAAPAPCAPEPPLRVFMYDLPRRFNVGMIDRRSASETPVTVEDWAAWPXTGGSKKQHSVEYWMMGSLLTPARAEKS

SEQ ID NO: 238693 - protein, 181 aa, Glycine max
  Clone ID: PAT_MRT3847_57565C.1.pep
RGDFLESLGKELGIEVPPDMPYAMQKSRNVAPQKDIFNEDARTDILKSENNGVISSEEERSQKRSNREKYDESRKDKTPVTQGRDYSSSSSLEEERSRKRSRHQRHKRHDAGSHSSSDDDRRDRHSSRSKGRRKGSSREKSRSEKHSKRHKHRKHESPNRSSRYSNEKDSSHSRKEKRRRE

SEQ ID NO: 238694 - protein, 125 aa, Glycine max
  unsure (1)..(125): unsure at all Xaa locations
  Clone ID: PAT_MRT3847_57566C.1.pep
MLGRAPARSNXAKCYKMLGVCKNASQGDLKTCFNKAVITNHPDQGGDPDKFKELAQAHEVLRDPAKRERYAQYGEDTLKDGMAGGSGHDPFDIFASFFGGGSPYGSCGSSPGRRHRRRDDMAHPL

SEQ ID NO: 238695 - protein, 117 aa, Glycine max
  unsure (1)..(117): unsure at all Xaa locations
  Clone ID: PAT_MRT3847_57567C.1.pep
KKLKQNPAPRGPTLGGTPPTGGPKNIPPLRLXKKKGGDLTGGGGSKNPGGPKAWKGGPKKTPGGVDPWPKKKNPPPQLVSWGGTRGGNHRHLEKNPLRFRGGGLQIFLGSKKSPPPT

SEQ ID NO: 238696 - protein, 84 aa, Glycine max
  unsure (1)..(84): unsure at all Xaa locations
  Clone ID: PAT_MRT3847_57568C.1.pep
XXLSXRNLLSFSRSFAAVVAVLASPINFTLLNMLXPPPXHXLXXTXFPFXNLTXXSXLXFXKXHCXSSAIKXRLALLRDXXARH

SEQ ID NO: 238697 - protein, 57 aa, Glycine max
  Clone ID: PAT_MRT3847_57569C.1.pep
VVSAYSKDAYVASVSVLSTVERVLEILEIEFNVCDLRYRVYAESCCAANTSCELLVL

SEQ ID NO: 238698 - protein, 49 aa, Glycine max
  Clone ID: PAT_MRT3847_5756C.1.pep
WKKGDQVFFTLLNKKIKKCLKPTLKLEIDPYEDTSKANPCDDPPNKKSI

SEQ ID NO: 238699 - protein, 49 aa, Glycine max
  Clone ID: PAT_MRT3847_57570C.1.pep
ASNSADPVLISDKISQDLMLKFCGSDDSAFADLGERIDLIKNLDELTLA

SEQ ID NO: 238700 - protein, 79 aa, Glycine max
  unsure (1)..(79): unsure at all Xaa locations
  Clone ID: PAT_MRT3847_57571C.1.pep
ENIFCIKSPVILLDCRGPKICVSLNGSGPISCISFKSMLAALSIHCPVFMATLSLVLNQYPRPRSLVRKKKKKKXKRPR

SEQ ID NO: 238701 - protein, 364 aa, Glycine max
  Clone ID: PAT_MRT3847_57572C.1.pep
TDTMVRLLIMAVYYIGDEAGSEGTDKKKSSGLMQKKGKWKSVSRAMMEKGFYVSPQQCEDKFNDLNKRYKRVNDILGKGTSCRVVENQSLLDSMDLSPKMKEEVKKLLNSKHLFFREMCAYHNSCGHGNNNAPQQGESGGEVSQPQAQPHHHQQQQQQPQQRCFHSSEVGNLGGSGVEGLRMLKVGNGEEGDDDSEDDDDSEDDSDEDEDDSGEGGSRGHVGHGHEDIEDENDGRSMRKRARKVGGVSMSPQLMQQLSAEVSGVFQDVGKSAWDKKQWMRSRIMQLEEQQISYHTQAFELEKQRLKWARFSSKKEREMETAKLENERRRLENERMVLLIRQKEFELMSLQHQQQQQHQQQHSST

SEQ ID NO: 238702 - protein, 44 aa, Glycine max
  Clone ID: PAT_MRT3847_57573C.1.pep
GKSANVIAGVDHSHCNVLGEMFPFLEKIEYITRERIKEIIKGFP

SEQ ID NO: 238703 - protein, 101 aa, Glycine max
  Clone ID: PAT_MRT3847_57574C.1.pep
WSQHILARCLPHGEAWLLHVIQAHMMRRSSFMLGPSQCSLQGSWKNHMQPGDSGYKIVPFKFGLSLQHTGVYVMRHFLPLLIRVFDKGYVVLSRVPTMMVL

SEQ ID NO: 238704 - protein, 58 aa, Glycine max
  Clone ID: PAT_MRT3847_57575C.1.pep
TLFRSRCDAAICCSHSECRTHSLTRPIPLSPLHHTLSDPCLVLLLCTIEPTSTRNLPW

SEQ ID NO: 238705 - protein, 35 aa, Glycine max
  Clone ID: PAT_MRT3847_57576C.1.pep
HFIGYELRTFVPRKDFMPDAEFSGSVVVALTKLTL

SEQ ID NO: 238706 - protein, 57 aa, Glycine max
  Clone ID: PAT_MRT3847_57577C.1.pep
NAPCFFYLSEISLLMQPTLGAPFIIPFRTMAPLKKKKNGSPFLFNLPARTPKIYLFS

SEQ ID NO: 238707 - protein, 44 aa, Glycine max
  Clone ID: PAT_MRT3847_57578C.1.pep
SKHAVRDKNQLLFLVLKFAEGIAVVDLKDSYPNVMEDLQVNYFF

SEQ ID NO: 238708 - protein, 144 aa, Glycine max
  unsure (1)..(144): unsure at all Xaa locations
  Clone ID: PAT_MRT3847_57579C.1.pep
QXTSKXXXAAXAXXXXXTXKXXEPXXKAAXXQXKXXQXXPNXRGRXQXPXXXGXXXAXXTELSXNGXGXXRXRXXNXXXTNRSTXXKKARTXXDXTXXEANXXXXXPXXXXPPAXXXEGXTRXKHGXKXAXXKGGXXKXXTEPF

SEQ ID NO: 238709 - protein, 51 aa, Glycine max
  unsure (1)..(51): unsure at all Xaa locations
  Clone ID: PAT_MRT3847_5757C.1.pep
LLHLLHLPTITILICKYSLYKEARILLLIFSGGKXVILCFFNTPPFLFIFD

SEQ ID NO: 238710 - protein, 103 aa, Glycine max
  unsure (1)..(103): unsure at all Xaa locations
  Clone ID: PAT_MRT3847_57580C.1.pep
QTQIIKNKGGAKATKRISKELKDHQKDPPTSSNAGPEGEDKENWQATIMGPTDRTKAGGENRDTNHSPPEXDAKPTKDGNKTKEYDQKIKSKGSICPDTKKEQ

SEQ ID NO: 238711 - protein, 37 aa, Glycine max
  Clone ID: PAT_MRT3847_57581C.1.pep
VFQASTHVIMLSPSLYMSEFEYNYSNILYPPFILIFA

SEQ ID NO: 238712 - protein, 69 aa, Glycine max
  Clone ID: PAT_MRT3847_57582C.1.pep
QPPAKIIITRTISKSYPVYGIEITRSSMTKIPNITNNSMKLSSVNIIFAKCQVSFHKSSKLEIHPPTNT

SEQ ID NO: 238713 - protein, 36 aa, Glycine max
  Clone ID: PAT_MRT3847_57583C.1.pep
VKRRLSLERLRFDDNASSDDRKRTVRLRSKHGRLAI

SEQ ID NO: 238714 - protein, 83 aa, Glycine max
  unsure (1)..(83): unsure at all Xaa locations
  Clone ID: PAT_MRT3847_57584C.1.pep
SRIFSSEDVAAAGAEVSFXSARXVPGVTGLGRLGSRVGGEGKGKRETPLKRRREAMDEVLFQLKRREWGICCLILVGVVCRVS

SEQ ID NO: 238715 - protein, 61 aa, Glycine max
  Clone ID: PAT_MRT3847_57585C.1.pep
PVTKERVLFSLRTQIFTFRSLRVSSLSCFRLLLIGGGMNTSSVPHPHPHLLHPFSGFSPGP

SEQ ID NO: 238716 - protein, 285 aa, Glycine max
  unsure (1)..(285): unsure at all Xaa locations
  Clone ID: PAT_MRT3847_57586C.1.pep
MKLFSFSLACVFVFALLASSLASAAIVEHIFKVQNTTIKRFCKEQVIVTVNGLFPGPTINVHEGGTVIVHVLNEGPYDITLHWHGVFQLFSAWADGPEYVTQCTISPGTKYTYKFNVTQQEGTLWWHAHASFLRATVHGAFIIHPRSGQFPFPKPFKQVPIILGDWYDANVVDVETQALASGGPPNVSNAFTINGLPGDLFNCSRTQTFKMKVKQGKTYMLRMINAALNNHLFFKIANHTFTFVALDAAYTDHYITEIIVIAPGQTIDALFTANQPLXSYYMSCI

SEQ ID NO: 238717 - protein, 94 aa, Glycine max
  Clone ID: PAT_MRT3847_57587C.1.pep
MAHVIFSIGGFQQQSQEQVQSPEIHRCVSFIQSFKLPIQCGKFAICRHKGSWSRSHDNGSTWSFFIIPLRPSLSCSRLLLFRHNLIVCTRFSSF

SEQ ID NO: 238718 - protein, 61 aa, Glycine max
  unsure (1)..(61): unsure at all Xaa locations
  Clone ID: PAT_MRT3847_57588C.1.pep
HASDXNCVCVTNVKRTFFYEGELTLLFIIYYAAEKLNLAYLSAYLNSLGTQYRHGAKFGTG

SEQ ID NO: 238719 - protein, 81 aa, Glycine max
  unsure (1)..(81): unsure at all Xaa locations
  Clone ID: PAT_MRT3847_57589C.1.pep
HRKHHXFSIMVLYYYIXHFLXXLTLSLLTXTFXVSNYIXRMTKKIMNNIKTAYHDFFCSTXLPQILGGXSKCXKXHSCRLN

SEQ ID NO: 238720 - protein, 82 aa, Glycine max
  Clone ID: PAT_MRT3847_5758C.1.pep
SFSNNSIVNVSIVGCIIQNTAKNVLVESQMQFLVHICFLHVNAASLLSNSNDRFELVGTGFRFFWLLSVRCPHIKVASLQNK

SEQ ID NO: 238721 - protein, 107 aa, Glycine max
  unsure (1)..(107): unsure at all Xaa locations
  Clone ID: PAT_MRT3847_57590C.1.pep
HIIRDPXSNQQKYETKNRKPKSKIQVVGAKDGSDIEGVAGLCKPQRSHNHHYCRAFYHLVLEAWIFLCYGLVLKEIGREFHMYGGVGRGWKGFKSVIRIMRRLRLLA

SEQ ID NO: 238722 - protein, 612 aa, Glycine max
  Clone ID: PAT_MRT3847_57591C.1.pep
TKSHFSPSCTKAFFILLLQSHPNITTAKFISNNSNFFSSEDECYNQLVKNYPPLVPIETNLKDGINFSSSNFTGFSNIRNMYITGHSNGAINFWDATCPFFTPILQLKQQSENDFSLSGIPLTELYFDSNSPLLFSGDQSGMVRIYRFKPEPYASNSFMSLTGGTKKGTDHVIHSMKLIKTSGTVICMNIDHSSRHLAVGSDQGNVSVINIDGPSLLYRKHIASEISTGIISLQFKTCSLHGFEKNILAVGTKDSSVLTLDGETGNTLSIGTIHPKKPSKAIFMQVLDGQGEQTAGSVTKDGLELKEGIHIEDATAKQLYILLCSEKALYVYSFAHAVQGVKKVLYKKKFHSSSCCWASTIYSLSDIRLILLFASGKVELRSFPELTLIVETSVRGFNYSPPKLKSFSDSQICCSSKGDLVLVNGDQEIFVVSLLAQRNIFRLLDSVSCIYRKERMLSQEELVPGPVIHKEKKRGIFSSVIKDFTSSKEKHAPLLEKKDPKESIRELSAIFSNANFACNDNVDKPTMDENQLELNIDDIDLEDHVEKRKEQSILGALNKKKLAGTFQSLKGRLKEMKGNNQKTSDKEGQQDQKDGALDQIKKKYGFSSSSNV

SEQ ID NO: 238723 - protein, 193 aa, Glycine max
  Clone ID: PAT_MRT3847_57592C.1.pep
MMKKRVASTSNESSKLDRKTIERNRRTHMKSLCHQLSSLIPPNLKPVKPKLMLGLQDQLDLAARYIRQMTERVEKLKRQKEQAMSNQSNDGRKMFNNNVESKLPILELRDLGSGIEVILVTGLNKTFMLYEVISVLEREGAEVVTASFSTVGDKIFYVVHAQAKISRVGVETTRVYNRLQEFIVPPEIWPEDV

SEQ ID NO: 238724 - protein, 48 aa, Glycine max
  Clone ID: PAT_MRT3847_57593C.1.pep
MFCNTTVASTITLMLLFLFSSGNSNVSGSVTLSDTCQLDTTVPLCEWW

SEQ ID NO: 238725 - protein, 67 aa, Glycine max
  Clone ID: PAT_MRT3847_57594C.1.pep
ICQKLFKKCGHIMRGNHASEDNKITSPYIKRTVSCFKHLEKMLQTKSIFRLIPTRLRTMNRCWKKFN

SEQ ID NO: 238726 - protein, 108 aa, Glycine max
  Clone ID: PAT_MRT3847_57595C.1.pep
PKAEQYLERAILADPGDANVLSLYADLIWQTEKNADRAEGYFDQAIKSAPDDCYVMASYARFLWDVEEDEDKDCQHKTDHGHAYPPDLFQETKGSPHVTAAFQSYVSE

SEQ ID NO: 238727 - protein, 66 aa, Glycine max
  Clone ID: PAT_MRT3847_57596C.1.pep
FLEQIIMRVFRFPKGFRSRIRSCLMIKSIRCLYCVPHHGAFNLFLEYHENRVISFLLIFGIVGRGS

SEQ ID NO: 238728 - protein, 506 aa, Glycine max
  unsure (1)..(506): unsure at all Xaa locations
  Clone ID: PAT_MRT3847_57597C.1.pep
ERASRRAQRREKLRNQRQSSHSKLEDTDKKVSELESVLEAEMKYSQNSLNQISTLEEKRGASEGQANKYLDDVSNLTSELEAIQARASTLETTLQAANERGKELEDSLNAVTEEKKNLEDASISLNEKLAEKENLLEILRDDLNLTQDKLQSTESDLREAELRESEIIEKLKASEENLVVRGRDIEETAARHSELQLLHESLTRDSEQKFQEAIEKFNNKDSEVQSLLEKIKILEEQIAKAGEQSTSLKNEFEESLSKLASLESENEDLKRKILEAESKSSQSFSENELLVGTNIQLKTKIDELEESLNHALSEKEAAAQELVSHKNSITELNDLQSKSSEIQCANEALILKVESQLQEALQRHTEKESETKELNEKLNTLEGQIKLFEEHAREAVATSGTHKAELEQSLIKLKHLEIVIEELQNKSLHHEKETAGLNEENSKLNQEIASYESKLSDLQEKLSAALVEKEETDKELLTLKDAMEKLXQSIXAEVQTLNSQISSLGG

SEQ ID NO: 238729 - protein, 252 aa, Glycine max
  Clone ID: PAT_MRT3847_57598C.1.pep
MTDGFWNRQQQQPLQPSSAMLKRPRTEYDMSPSGLTGGNEMHNYIARNDDHTGHRMLKDTKTLGSAYDRYLQSAGLTSFNSGEASAIGGVGLGRGVGGLPHHSLTDPAVMGHPGGGPDLAPNGRGVNYGGQLPVDAVSRPGPETGSLPPDASSTLYVEGLPSDSTRREVAHIFRPFVGYREVRLVSKESKHRGGDPHYLCFVDFANPACAATAMSALQGYKVDELNPESSHLRLQFSRYPGPRSGPAFRSKR

SEQ ID NO: 238730 - protein, 114 aa, Glycine max
  unsure (1)..(114): unsure at all Xaa locations
  Clone ID: PAT_MRT3847_57599C.1.pep
VLKLCFLLLPSQRAGAAPSPVGDFGGWPFNPVAWPKGKFFWGGGPLAFNFSPGAPNLVAVTKAGFYSCKTPKGAQVFXLGAVQFRLSKGQNFFFCNFFGPSEFGIKIALPPAWV

SEQ ID NO: 238731 - protein, 57 aa, Glycine max
  Clone ID: PAT_MRT3847_5759C.1.pep
KSRCWPFSKRSALLISIIMYRRSIQKLRKPLGLDSYQQFLREISIVRPRGRTLLRNE

SEQ ID NO: 238732 - protein, 45 aa, Glycine max
  Clone ID: PAT_MRT3847_575C.1.pep
HLRRDPGTRTVRLVLRKYPKVRRTICTSLSLRASTGISVCYAPLR

SEQ ID NO: 238733 - protein, 424 aa, Glycine max
  unsure (1)..(424): unsure at all Xaa locations
  Clone ID: PAT_MRT3847_57600C.1.pep
MQKDTSTTAPSTTSGRVRHRKRSNEVIPEVSKANGTQLLVNDKSKYKSMLIRAYSSVWMIGGFVLIIYMGHLYITAMVVVIQIFMARELFNLLRRAHEDRQLPGFRLLNWHFFFTAMLFVYGRILSQCLVNTVTSDMVLXWLVSNLIKYHMFICYSLYIAFNLWWLVVLKIFNYHKQIWQYAWTHMILIVVFGNYFFSVASISEGIFWFLLPATLIVINDIAAYIFGFFFGRTPLIKLSPKKTWEGFIGASVTTIISAFMLANIMGRSQWLTCPRKDLSTGWLHCDPGPLFKPESYPLPGCISHWFSWKEISILPIQWHSLCLGLFASIIAPFGGFFASGFKRAFKIKDFGDSIPGHGGITDRMDCQMVMAVFAYIYHQSFVVPQTLSVEMILDQISMNLTFDEQQALYWRLGEILQQGFARMS

SEQ ID NO: 238734 - protein, 251 aa, Glycine max
  Clone ID: PAT_MRT3847_57601C.1.pep
MEGREGISSGVTVIGAEAPSAYHMAPRSEAPSQVPPPVPEATAGAIGVSPASVGLDGTAAKKKRGRPRKYGPDGLNSMALSPIPISSSAPFANEFSSGKQRGKSRGMEYKLLKKVGVDLFGDSVGTNFMPHIITVNTGEDITMKVISFSQQGPRAICILSASGVISNVTLRQPDSSGGTLTYEGRFEILSLSGSFMPTDNQGSRSRSGGMSVSLSSPDGRVVGGGVAGLLVAASPVQVSDLLLFSFSICSK

SEQ ID NO: 238735 - protein, 93 aa, Glycine max
  Clone ID: PAT_MRT3847_57602C.1.pep
MQKDTSTTAPSTTSGRVRHRKRSNEVIPEVSKANGTQLLVNDKSKYKSMLIRAYSSVWMIGGFVLIIYMGHLYITAMGGVIPIFMARELLIYS

SEQ ID NO: 238736 - protein, 59 aa, Glycine max
  Clone ID: PAT_MRT3847_57603C.1.pep
NTAPHVFNFGATKKILIRRKRGGKKVPPKKAPPRFFLEGVSQRFIIYNGEHPECQEVEK

SEQ ID NO: 238737 - protein, 58 aa, Glycine max
  Clone ID: PAT_MRT3847_57604C.1.pep
ACWLELVFSVEKGNWVVNQLFVVSISGRVEWSVTLIRNGYFGFLSVGYRLWHIDLSSV

SEQ ID NO: 238738 - protein, 52 aa, Glycine max
  Clone ID: PAT_MRT3847_57605C.1.pep
MRPSMVSSSTLKCVDQLKGPLRVHRATLFPCPTYNVIDDRTHQSSSLNCSNA

SEQ ID NO: 238739 - protein, 64 aa, Glycine max
  Clone ID: PAT_MRT3847_57606C.1.pep
LRTRPSHYIRPHYQRSYNTTLLTTPKRFQTDHHHAHDQKTTDHDHDHDHENISLFDLKHTFSLD

SEQ ID NO: 238740 - protein, 250 aa, Glycine max
  Clone ID: PAT_MRT3847_57607C.1.pep
MNLKKSDIALDCADWEGSERIEVPGDASCSPNCHNDAVLRDRASTIDEEMGQPSVSSELLPCEAAVEPPDSEFEELYGPDKEPLIKKFPVSESRSLLGDGKTENLSVANDCHNDETEVLDDAVNASELENENLTEKVSVTTITDKSSNVSEGGENSQKKEEKSNVIAKQTDSVNHVTKRVEAYIKEHIRPLCKSGVITADQYKWAVAKTTEKVMKYHSKAKNANFLIKEGEKVKKLAEQYAEAAQQNRKN

SEQ ID NO: 238741 - protein, 91 aa, Glycine max
  unsure (1)..(91): unsure at all Xaa locations
  Clone ID: PAT_MRT3847_57608C.1.pep
VKCFFRWRGGCYIHTMGSQNLEFSNSNSTTALSLPLRTNMCAGVQSLXILNGTIMYVEMICVTVCTATXIKKKEGTIELGISSQEWVPRTY

SEQ ID NO: 238742 - protein, 80 aa, Glycine max
  unsure (1)..(80): unsure at all Xaa locations
  Clone ID: PAT_MRT3847_57609C.1.pep
GXXSTRWIVXEADXIQXNXGKPXLXYGNIGXXRXLXXXXTXGLXLXXECKXXVARXGLXXXLXNSRXXGXEEADQXPVPX

SEQ ID NO: 238743 - protein, 82 aa, Glycine max
  Clone ID: PAT_MRT3847_5760C.1.pep
QNLFKPVGEPFGVPLGSQGTPRFSCFPPQGPGKGGKVPLNSPLIVSSVLVSLRFFSPRSPIHLFFLGLWGASPIKPPFVVLF

SEQ ID NO: 238744 - protein, 29 aa, Glycine max
  Clone ID: PAT_MRT3847_57610C.1.pep
DSLCITLEPGTWNLPGPHFILIFGNFNLI

SEQ ID NO: 238745 - protein, 97 aa, Glycine max
  unsure (1)..(97): unsure at all Xaa locations
  Clone ID: PAT_MRT3847_57611C.1.pep
SGLKVKKYXLPRRNISERGCYGYGIPGQIVLGTKXILQNGIYGMEFLVATERPGYRAGRPRRWKSRVGSQHRVAKEEAMKRFQVEKKGVILPTSHGY

SEQ ID NO: 238746 - protein, 50 aa, Glycine max
  Clone ID: PAT_MRT3847_57612C.1.pep
IKWVNWLSCHEFGKVLLDYLINYILCILLCCNGMEAQLLLFSVMKCNSKS

SEQ ID NO: 238747 - protein, 86 aa, Glycine max
  unsure (1)..(86): unsure at all Xaa locations
  Clone ID: PAT_MRT3847_57613C.1.pep
XXXAYVSXVIRLEREXXFXXXTXXXKGXQXXVGYKDXLRISTKFXVXTKXGTPXXSSANRAXASXXSNTLXRXXHXPXSXXVGXXX

SEQ ID NO: 238748 - protein, 96 aa, Glycine max
  Clone ID: PAT_MRT3847_57614C.1.pep
IVFSVKPVVSRVNYRSKHLRPRPSVFLIRPLERQSASVEEESEGKKSNSKVYPRSPIPDRRVGALIQDFTSLNLTLNRELIKQHQKSKSDTMSYIK

SEQ ID NO: 238749 - protein, 42 aa, Glycine max
  Clone ID: PAT_MRT3847_57615C.1.pep
SMWSRASTITIWACIPDRQTSFYVGLCHWMSVFCPLGRVRTP

SEQ ID NO: 238750 - protein, 85 aa, Glycine max
  Clone ID: PAT_MRT3847_57616C.1.pep
TSSTLRLFSLRLISNRSFEPLIKNHKKMVQLKVVALTLLVLWSWWSFEGAVGDPQLFLLTLKCSGFTVPNLSNFYQNLNASLEDH

SEQ ID NO: 238751 - protein, 56 aa, Glycine max
  Clone ID: PAT_MRT3847_57617C.1.pep
NALVHHKKGTLNNLEFGQEISKVWPRIVSTKNRTRVVLKRFNLNFSILTTCVQSLG

SEQ ID NO: 238752 - protein, 64 aa, Glycine max
  Clone ID: PAT_MRT3847_57618C.1.pep
LLLILTHIPYLHLMVQTILLNFKINEPLDYTYLSCRNNQLSFYIELEIHLEDQRQNFPIKTYLN

SEQ ID NO: 238753 - protein, 61 aa, Glycine max
  Clone ID: PAT_MRT3847_57619C.1.pep
NGSLPGSLRFSKSTSPPQLRGVLWNSTPQAVVKVNFLLKHPGVPPLDLLDGEHPHKKGEPH

SEQ ID NO: 238754 - protein, 145 aa, Glycine max
  Clone ID: PAT_MRT3847_5761C.1.pep
MGTRMVPIPRDRVILHFDYDCFYASVFESEDPSLRSLPFAVQQKQICVTANYVARSRGIYKLQLVKDAKRMCPDLIIKLGEDISKFRDAAQELYSFIKSFSWHYKVGRLRFDEVWPDVGDMGGYNQEVLDKHGVEHSFSRLRRYD

SEQ ID NO: 238755 - protein, 35 aa, Glycine max
  Clone ID: PAT_MRT3847_57620C.1.pep
KKGKKGLILHPDPNSQTLKLLKEFQLPNIKELLPY

SEQ ID NO: 238756 - protein, 111 aa, Glycine max
  Clone ID: PAT_MRT3847_57621C.1.pep
PPPFRGVIWRGVPPMKKSPPFAHNPFFGPWKPPQNVSMGIRFPGFGPPKTIFYGDGVFGQGNVDSINKIVSPYPNYFALLGVGRKQGGPPEILTWGGRVPFNPFFKPGFFF

SEQ ID NO: 238757 - protein, 49 aa, Glycine max
  Clone ID: PAT_MRT3847_57622C.1.pep
VLIDSTPYRWWGRFFTWKGGLLPLYSSSHIFRHPCKIYFSLSTLTHFPS

SEQ ID NO: 238758 - protein, 157 aa, Glycine max
  Clone ID: PAT_MRT3847_57623C.1.pep
MTLTFSVVTNLPLFGGSLTLNSELRLRACRIALSTHDAFNRSQRVSNFCVSEGRRRNLAHDPRTWMHPMSDDDDDEDRTLDLLVRFFQNVFKKVSKRARKAVRSVLPLPISSHLVGFSVNGILLLAFLWILKAFLQVLCTLGSVVFVSILLIRGIWS

SEQ ID NO: 238759 - protein, 113 aa, Glycine max
  Clone ID: PAT_MRT3847_57624C.1.pep
GAHRLEASSQSFLVLTLHSFLQQIREKHRNLRNGRCKSQWHDEWWKKLPKEVLWASNSKAWTSQSWNSCRACKLCCFHFLSQQSHPRMCYTYSPRSLASNSFGLQKFLIFLFL

SEQ ID NO: 238760 - protein, 63 aa, Glycine max
  Clone ID: PAT_MRT3847_57625C.1.pep
VDYKISDDLRNQCNHDATKDNESNEDRTKTFVRPNVRIVKREFQSQDALFSHLTALLMHGRPG

SEQ ID NO: 238761 - protein, 166 aa, Glycine max
  Clone ID: PAT_MRT3847_57626C.1.pep
HASGEIWTFSVRAFDSALPQHTINVNYEGFAEDVKVGDELLVDGGMVRFEVIQKIGPDVKCRCTDPGLLLPRANLTFWRNGSLVRERNAMLPTISSKVVNSSFAFCFLALHLFIAIFFRQRIKSIFVINFALSEEMKLVDAIVLLLLYYSILFLGHSWELLVCIGP

SEQ ID NO: 238762 - protein, 258 aa, Glycine max
  Clone ID: PAT_MRT3847_57627C.1.pep
MAMIPYHLCRLPYQDSLKALEADIQHANALAAAIPRAKGETLLQMKLVYNHLAPLFLLFLQWMDCSCAGFLHRYLDLFHILIYKVHNDGRSIMPTHGRKATIGDFYAVILPSLQRLHGSLEKLEVVKEEGQSSIEGPSYGKKVIEEGVKLTANVDLQREDECGICLEPCTKMVLPGCCHAMCIKCYRKWNRKSESCPFCRGSLRRVNSEDLWVLTCNDDVVDAETVSKEDLLRFYLYVSKLPKDHPDALFLMYYEYLI

SEQ ID NO: 238763 - protein, 75 aa, Glycine max
  Clone ID: PAT_MRT3847_57628C.1.pep
IFPTCRNTRSESCPFCRGSLRRVNSEDLWVLTCNEDVVDAETVSKEDLLRFYLYINSLPKDHPDALFLMYYEYLI

SEQ ID NO: 238764 - protein, 106 aa, Glycine max
  Clone ID: PAT_MRT3847_57629C.1.pep
EFAYPPVINLIIFYFCPHSEFGLCVVPSSRAAAIPRAKGGTLLQLKLVYNHLAPLFLLFLQWMDCSCAGFLHRYLNLFHILVYRVLMDGRSIMSTHGRKATIGDFY

SEQ ID NO: 238765 - protein, 75 aa, Glycine max
  Clone ID: PAT_MRT3847_5762C.1.pep
RPSSQLATAMSATNSKKLSSPSPTIHQRRLTRQRKLRYLTDKDAGLHSTSSLPASPLPSFKSASSSDHWSSSAVS

SEQ ID NO: 238766 - protein, 497 aa, Glycine max
  Clone ID: PAT_MRT3847_57630C.1.pep
MAFTALSLVLLLQLSTIFGSELVLRSKDCGSDWVAHSYSSHGQDLFYINGNVVNKVAFCEALKLYIAKGCDVKDYFGSVKCVMDDSFVTLPLKAGRKLLKDLSSESTPQRDSKPMSSNVVVIGAGGALLVCCAVLCPCFYAKRRKATSHAVLSKDPNSMDSVSSEASVNDKIPASPLRVPPSPSRFSMSPKLTRLQSLHLNLNQVTRATQNFSETLQIGEGGFGTVYKAKLEDGLVVAVKRAKKEHFDSLRTEFSSEIELLAKIDHRNLVKLLGYIDKGNERLLITEFVPNGTLREHLDGMRGKILDFNQRLEIAIDVAHGLTYLHLYAEKQIIHRDVKSSNILLTESMRAKVADFGFARLGPVNTDQTHISTKVKGTVGYLDPEYMKTYQLTPKSDVYSFGILLLEIVTARRPVELKKTVAERVTLRWAFRKYNEGSVVELVDPLMEEAVNGDVLMKMLDLAFQCAAPIRTDRPDMKSVGEQLWAIRADYLKSARR

SEQ ID NO: 238767 - protein, 53 aa, Glycine max
  unsure (1)..(53): unsure at all Xaa locations
  Clone ID: PAT_MRT3847_57631C.1.pep
VNSEDLWVLTCNDNVVDAETFXKEDLLRFYLYINSLPKDHPDALFLMYYEYLI

SEQ ID NO: 238768 - protein, 198 aa, Glycine max
  Clone ID: PAT_MRT3847_57632C.1.pep
MDDILKSFSPKSVDDVWNDIVTGATVHDAVSATATDYADAAMTLEDFLTKAVTEEDVRGAPPPPPPPPPSSFLPFPADGSSSSVEPFANGVSAAPSNSVQKGKRRAVEEPVDKATLQKQRRMIKNRESAARSRERKQAYTSELEYLVHQLEQENVQLLNEEAEMRRQRKKQLFECIIPIEVMPKPKKKLRRVNSAQSL

SEQ ID NO: 238769 - protein, 160 aa, Glycine max
  Clone ID: PAT_MRT3847_57633C.1.pep
SLNVSVTIDCIFGNKQLTVTFVAENGGEVYGEEYFSEVQVEHQETFLGHTSPISRCRFSASGNNIASASLDGTVRIWTYDTSTPVSRNATIYCGTEILSLDWECKSDRLLLIGTSDGCIKAWNVDAKRVVWDLNTTEAFPSVLDIKCSPVEPIFVSAAAS

SEQ ID NO: 238770 - protein, 43 aa, Glycine max
  Clone ID: PAT_MRT3847_57634C.1.pep
PRVRHNKILAIYTLIFSRIIRQDCQIQITFRLNKDLKRRISKA

SEQ ID NO: 238771 - protein, 109 aa, Glycine max
  unsure (1)..(109): unsure at all Xaa locations
  Clone ID: PAT_MRT3847_57635C.1.pep
DKMAEFPLASCEDSLFPVRGTSSTSAQCSSGSPKSADCLITKDKCTIQVVDKASVPSSGSDACPAAPVSHGNECSEHAVSSHSSAESSRHRFDTSSYQQRAXALEGLLE

SEQ ID NO: 238772 - protein, 81 aa, Glycine max
  Clone ID: PAT_MRT3847_57636C.1.pep
NCDPYFLRKKKFFRGFLKNNKVGKAAGNIWFCFNPVIPPKNWNLFSVNISKAGAGIYPLSPKFGHDFSSKAEGKAVPKKKC

SEQ ID NO: 238773 - protein, 54 aa, Glycine max
  Clone ID: PAT_MRT3847_57637C.1.pep
WCEAMTRPFGVKGGRKRGRAVPKYDSHDEEEEEETQLKKTVVEVELIYLVEDKA

SEQ ID NO: 238774 - protein, 674 aa, Glycine max
  Clone ID: PAT_MRT3847_57638C.1.pep
FFLDQKVVEIINPEDDYIWIHDYHLMVLPTFIRRRFNRVKMGFFLHSPFPSSEIYRTLPVREEILKALLNSDIIGFHTFDYARHFLSCCSRMLGLEYQSKRGYLGLEYYGRTISIKIMPVGIHMGRIESVMRMADEECKVKELKQKFEGKTILLGIDDMDIFKGINLKILAMEQMLRQHPKWQGRAVLVQIVNPARGKGIHLEEIHAEIQESCNRINRVFGRPGYEPIVFIDRAVPIAEKVAYYCIAECVIVTAVRDGMNLTPYEYIACRQGISGSESCSNVNDPKKSMLVISEFIGCSPSLSGAIRVNPWNVEATSEAMNEAISTGDGEKQLRHEKHYRYVSTHDVAYWSRSFLQDMERACTDLLRKRCWGIGLSFGFRVVALDPNFKKLSIDAMVSAYKRAKNRAILLDYDGTVMPQNSINKSPSKEVLSILESLSEDPKNVVFIVSGRGRNSLSDWFNSCEKLGIAAEHGYFLRWSHNREWENCGKSSDFGWMQIAEPVMKLYTEATDGSSIERKESALVWQYRDADLGFGSAQAKEMLDHLESVLANEPVAVKSGQFIVEVKPQDVSKGLVAEKIFSSMDGKGKQADFVLCVGDDRSDEDMFEIVSSAISRNILATNASVFACTVGQKPSKAKYYLDDTTEVTSMLESLAEESDASPYIEETGDSSRRQV

SEQ ID NO: 238775 - protein, 26 aa, Glycine max
  Clone ID: PAT_MRT3847_57639C.1.pep
TLLNKIFFLLQCIMKITFRLIDTINY

SEQ ID NO: 238776 - protein, 46 aa, Glycine max
  Clone ID: PAT_MRT3847_5763C.1.pep
NKSRAINNSCYGSLNDRDDRKDIGSRVMGLCSTVPRGANDDMMLKL

SEQ ID NO: 238777 - protein, 90 aa, Glycine max
  Clone ID: PAT_MRT3847_57640C.1.pep
SRHGLSELHHFGFVHRYFFLLKHGHSICSTPSLAEYSRATRFLYTPHLATFNNPKCTMQWIHIHILTHLMSTIFKHQYYYPLRLHLEFDT

SEQ ID NO: 238778 - protein, 107 aa, Glycine max
  Clone ID: PAT_MRT3847_57641C.1.pep
VVKNLCASLSSLKDTLPENPNIYHFSEISAATANFSAPRLSSSSWRCVIRHREVVVSRRDFRRQIDIPELSRRLALICRSHHSSLLKLLGASVSGAVIFLGNEVGPG

SEQ ID NO: 238779 - protein, 57 aa, Glycine max
  unsure (1)..(57): unsure at all Xaa locations
  Clone ID: PAT_MRT3847_57642C.1.pep
XXXXKATXXKGXDSGXPLXXLAYGFXPWXVSCKHXTHEIGRXXXNXNDRPQLGXFLL

SEQ ID NO: 238780 - protein, 197 aa, Glycine max
  Clone ID: PAT_MRT3847_57643C.1.pep
MGQHKDHRWEWHFTWRRNLFDSEIELAVNFLGEVEGKIIQHQGEDGWVWIGHPSGIYSSHSAYHMLREGGSVASKEQVFVELWKLKIPSKIAIFAWRLFQDRLPTKSNLQRRQVQIMDASCPFCGGMDEEVSHLFFHLHKDSADLVGDYILVEYQQWCSPSNLIQQFSSALFSASGRYKKRQVAKLVECWCFGLYGR

SEQ ID NO: 238781 - protein, 161 aa, Glycine max
  Clone ID: PAT_MRT3847_57644C.1.pep
FSSSTAARRRQKGGDFLCSHGDGICIPASYDLSRNSRKLAEPVGFTGQRAIIDTVRGPEIGPRNMTCHQRCEFSPTRTEREDYLNYKLQVRATQDERLYQYDDLPRRIAPHGRLDYEQSVTEYDNREFSRPYIPHPDLHRTGKSEDSYGNQKKAIVHNHSA

SEQ ID NO: 238782 - protein, 67 aa, Glycine max
  unsure (1)..(67): unsure at all Xaa locations
  Clone ID: PAT_MRT3847_57645C.1.pep
QPKGRKQQRSQSEEKGPKEQKHPNNQPEAPKRRXRDTEKRERKRRRKKDTEASERIPPGRQLAARRT

SEQ ID NO: 238783 - protein, 61 aa, Glycine max
  Clone ID: PAT_MRT3847_57646C.1.pep
ARRLMARNAPVLPSSGYIDTRDLKLDALHKGPALNKRSVASHKGCSFKNCINCLGPHSHNE

SEQ ID NO: 238784 - protein, 237 aa, Glycine max
  unsure (1)..(237): unsure at all Xaa locations
  Clone ID: PAT_MRT3847_57647C.1.pep
MAPNFLHQVAFLLVLSTAVSSGYAWVGVNWGTMATHQLQPEKVVKMLKENGFRKLKLFDADEFIMTALMGTDIEVMVAIPNNMLDKISNSPKAADSWVNDNVTSYFTGVKIKYVAVGNEPFLKAYNGSFAKKTLPALKNIQTSLNKAGLGSKIKITVPFNADIYYSPDSNPVPSTGDFRPXEVRDLTVEIIQFLYANNAPFTVNIYPFLSLYGTQDFPXDFAFFDGNNKPLGDGKAL

SEQ ID NO: 238785 - protein, 130 aa, Glycine max
  unsure (1)..(130): unsure at all Xaa locations
  Clone ID: PAT_MRT3847_57648C.1.pep
SLFMGDAYGSLLLRERSGKELAWRNCTAVRKGRNVIGGQPWDGLPGQERKVTTEDTLFFVSKTGRLMKLMVSLKKLKWKDCRNPPDAKVACIVDQELFRKNIVFVIGINGRLYQYNKVTDXGMSIPFSAF

SEQ ID NO: 238786 - protein, 93 aa, Glycine max
  Clone ID: PAT_MRT3847_57649C.1.pep
FAVRKKQTTLSLSLHHPLFLSHTQVGICQRYKGARRGHCKSFLQTWSLHIQHNQRSKLATTVTHAKPNLIVIVASFFLFCSLSLHGLPSEAME

SEQ ID NO: 238787 - protein, 54 aa, Glycine max
  unsure (1)..(54): unsure at all Xaa locations
  Clone ID: PAT_MRT3847_5764C.1.pep
MRECISIHIGQAGIQVGNACWELYCLEHGXSPTXQKPXDKTDCGGDDAINTNFC

SEQ ID NO: 238788 - protein, 94 aa, Glycine max
  Clone ID: PAT_MRT3847_57650C.1.pep
GVKKEGNNVFIFKTLLKTKGWGIKKKNKNVGLVYVNLKCVVLWGFRMVKKSLTRCEFLRKSWGNVQFLLPGPKWGVVKPYFSKPPKFLVFFPPP

SEQ ID NO: 238789 - protein, 78 aa, Glycine max
  unsure (1)..(78): unsure at all Xaa locations
  Clone ID: PAT_MRT3847_57651C.1.pep
MSCCGGNCGCGSACXCGNSCRGWEMYPDLSYTESTTTETLVMGVAPVKAQFESAEMGVPAENDGCQCGANCTLLPCTR

SEQ ID NO: 238790 - protein, 95 aa, Glycine max
  Clone ID: PAT_MRT3847_57652C.1.pep
PRVRDVNEFNPGRFSDGVARAGKHPLAFIPFGLGVRTCIGQNLAVLQTKLALAIILQRFSFRLAPSYQHAPTVLMLLYPQYGAPIIFQQFSQSSS

SEQ ID NO: 238791 - protein, 39 aa, Glycine max
  Clone ID: PAT_MRT3847_57653C.1.pep
FSDYLEDGVRSSVSCRNMHWYLWVVLKWRKWPLPVLVSR

SEQ ID NO: 238792 - protein, 40 aa, Glycine max
  Clone ID: PAT_MRT3847_57654C.1.pep
GWAHKWRRHQTYLIYLTLQLDNLFPLTISTNTAKINTTSS

SEQ ID NO: 238793 - protein, 54 aa, Glycine max
  Clone ID: PAT_MRT3847_57655C.1.pep
NSARALIFSLWDVHCHRGTFIVAVDSLIDWAVPKNPVYLWTLPMFHANGWSFPY

SEQ ID NO: 238794 - protein, 67 aa, Glycine max
  Clone ID: PAT_MRT3847_57656C.1.pep
SLINTQRNLTVVTNNWFNDLPQPNHLLPYGTFVFSSDGERRNCLLIWYIGDHNHALCFKPIRFPIIP

SEQ ID NO: 238795 - protein, 190 aa, Glycine max
  unsure (1)..(190): unsure at all Xaa locations
  Clone ID: PAT_MRT3847_57657C.1.pep
MEAYKRWVRQNKEFVHSMESLANGLTWLLPERFSESEIGPEAVTTILGIITALNEHIIDTAPKQNITGSVKPYSFPYPLCLSALKDLETLVEVVAQQYYGDDKKWNFLAVTEATKXSRIMVRRLSLFRKSGYKMLLQGGETPNDEEHSDSFTSQHHMGLKPDVHHRPGYMKNNLGANPMNQEGRALSAFG

SEQ ID NO: 238796 - protein, 68 aa, Glycine max
  Clone ID: PAT_MRT3847_57658C.1.pep
RVTLPLHCVCIDLILNSQHCEYSVGEILKPYTLLLIVINNQGKKDRACTIHCTCRPLSDTLSQPESCH

SEQ ID NO: 238797 - protein, 126 aa, Glycine max
  Clone ID: PAT_MRT3847_57659C.1.pep
MASNKVIATIMVLSLLAYSTSFTNACGTCHPKPTPSPPPPSGKCPKDTLKLGVCADILGLVTVVVGSPVSSKCCALLEGLADLEAALCLCTAIKANVLGINLNVPITLSVLLSACQKTVPSGFQCA

SEQ ID NO: 238798 - protein, 130 aa, Glycine max
  unsure (1)..(130): unsure at all Xaa locations
  Clone ID: PAT_MRT3847_5765C.1.pep
AEMIFCLWGGDEKLMRERTHLLLACCSRMAICXKDVWRVXSGISCGFAVTGICSRIFNEMLIRYSYEKFLRQAKASSMFLQRFKKYAYLSVYGDDNLIMVHQYVKPYFSGSKLKSSLAGHNITITDGIDN

SEQ ID NO: 238799 - protein, 41 aa, Glycine max
  Clone ID: PAT_MRT3847_57660C.1.pep
SFLGRNITLRKVLYGVQSCAMISLQWETLKAADLHWVICSG

SEQ ID NO: 238800 - protein, 132 aa, Glycine max
  Clone ID: PAT_MRT3847_57661C.1.pep
MLSYIFKDMGETRFLKNCTFLMAILTLLSSFLLNHVMASVYTVGDQEEWSSQTNYASWAERYNFSQGDVLVFKYVKGQHNVYEVTEDTFRSCDASSGGVLAKYESGENQVALSEVKRHWFICNIAGHCLGGM

SEQ ID NO: 238801 - protein, 67 aa, Glycine max
  unsure (1)..(67): unsure at all Xaa locations
  Clone ID: PAT_MRT3847_57662C.1.pep
IQXRLXIALIVSHXRYSDKILPRPNIDGSSKIKHSQXHSVXFHTHVYSISCRDTISXIIXXRSLSXG

SEQ ID NO: 238802 - protein, 91 aa, Glycine max
  unsure (1)..(91): unsure at all Xaa locations
  Clone ID: PAT_MRT3847_57663C.1.pep
YAWVVQFGEIQYNFFLNLYKLNQDGEIYEKFVTIFTQEEFNYSLETXVRATTTLLFDGSAYSYAVGHDSLLSTIPAEYVIGDKLTTINNIC

SEQ ID NO: 238803 - protein, 54 aa, Glycine max
  Clone ID: PAT_MRT3847_57664C.1.pep
MVFGRAYSLVELKFIRQMNKKNGFYNFITLCIHLHHGNLVLPCYLVKKRMFISQ

SEQ ID NO: 238804 - protein, 84 aa, Glycine max
  unsure (1)..(84): unsure at all Xaa locations
  Clone ID: PAT_MRT3847_57665C.1.pep
FILYCHFATGSFKIHIFFKTLTVKTITLDVESSDTIYNLNSNIHHXNEFPSIINLSSFSXNHLYYFRTLSYYNIHNDSTLHLFL

SEQ ID NO: 238805 - protein, 101 aa, Glycine max
  Clone ID: PAT_MRT3847_57666C.1.pep
SVRSWSPLTPPSSLPSLSHHQRWHHSLLSVVTDAAQRPSAPSHPTASTPEQASSGIWKWKDNKPTHSKKKTLTKQTSGGRALNDLTTHSLCMNSIWWKDLK

SEQ ID NO: 238806 - protein, 120 aa, Glycine max
  Clone ID: PAT_MRT3847_57667C.1.pep
MRENISESWLVMITVILATAIFAKLFQFKLRKEDKSKCRLPPGRRGWPLIGDSINWYNAVASSHPPQFVEEMVKRYGKIFSCSLFGKWAVVSADPSFNRFVMQNEGKLFKSSYPKSFRDL

SEQ ID NO: 238807 - protein, 59 aa, Glycine max
  Clone ID: PAT_MRT3847_57668C.1.pep
FNTFFYNHVFLKSRKKAKIRRLSGATKHTCEKRTHPNLFLSKTNTPKKEHSKNPRLRPL

SEQ ID NO: 238808 - protein, 73 aa, Glycine max
  Clone ID: PAT_MRT3847_57669C.1.pep
RHPDTICVHMMRNRGMGWPRSSGTIPNNISLQTDRNKMATLNTLRIFILASIGYGRLRLAFLEEESYLTKLEI

SEQ ID NO: 238809 - protein, 51 aa, Glycine max
  unsure (1)..(51): unsure at all Xaa locations
  Clone ID: PAT_MRT3847_5766C.1.pep
QKIMFAMTSIKGDXRRFANIACKKADVDMNQMAWELSAAELDSVMTGVAEP

SEQ ID NO: 238810 - protein, 49 aa, Glycine max
  Clone ID: PAT_MRT3847_57670C.1.pep
ARRLREDDRRVCSSHMVLGATHFSSTSYSPSCLCSHLIEARVSLDAFKI

SEQ ID NO: 238811 - protein, 518 aa, Glycine max
  Clone ID: PAT_MRT3847_57671C.1.pep
ETSKTISAALKLFDAKKEILKKAYYDLQSHSSLLAPSFSLSWSHLDAHFTSLHTSLSHRFHLLQSLESQQQYPPSSPSKYLSFPPSPTDPSSQNGTALPKNPSEQILTLCNNMDGKGLRDYVGDHLKDKAAIEDTLRSALKSASDAAASMLLDSLDGVVGANVVKDDTEFGSRKRTCSFLFKQLRAAASVSLSFKEKLRANRLCVDWKRSLMRDGCVDGVGAMAFLHFVAAYGLLSELTVHEILTFSVIAASNDELAELYWSAGLTDKAPGLVQKLIDRSKHILAVKFVFEFNLAHKIPPVPILEAHVNESQKLVKRLSEEGKSLSEITAREIHALKSAIKVIESHNLQSEYPPESLQQRIEQLMKHKANVKYAASAFSAKPPPHQQQQSGIKRPRMSEPVGSASVLNSASGASSTVHYQQPHFQSSGLLLEHLNPYMNLPTMPYGMKAQTPSIPPYTGASTGPYGPDGVPMGPSGNRGQGGSLPISSEPLMPSGYYDSGSAYGGYGLQHYYQTSYPQ

SEQ ID NO: 238812 - protein, 125 aa, Glycine max
  unsure (1)..(125): unsure at all Xaa locations
  Clone ID: PAT_MRT3847_57672C.1.pep
ELATLRENKSKRRKQQKQKLLSCSFSLVMMASSKTTNPITTTTQLEPLPPPQHRHHPHHLHQLQQQQHQHHYHQQIHDHQISFGLMQSSSSSSSIPRTTLESRIPGLMTXVNWIKPFSSTLMDKL

SEQ ID NO: 238813 - protein, 127 aa, Glycine max
  unsure (1)..(127): unsure at all Xaa locations
  Clone ID: PAT_MRT3847_57673C.1.pep
RKLQAQSMAAKKAVILGGGVVGANLAKTIQHXADVTLMDPDEYYQIXMTKCVGIXEPTFAEGMTLNRTEYXPRAHLAESNADDITYTAGVTVDTPXIGYYYLDIATGHTLPICKTRSVRLVHIQREN

SEQ ID NO: 238814 - protein, 108 aa, Glycine max
  unsure (1)..(108): unsure at all Xaa locations
  Clone ID: PAT_MRT3847_57674C.1.pep
HFSSSSCFAKLAGLSRNDASIACDGDASXMRVSTWGRNVNLGETVYMFITINYRLYWSLIAIRHTGGVMACYRDEEPKGSPKEACMLHMDSRKGIHVHLQNVFERYLC

SEQ ID NO: 238815 - protein, 51 aa, Glycine max
  Clone ID: PAT_MRT3847_57675C.1.pep
TYKDPKADRRTQSGSSYEATENREHCINQTIQRLMAMVANQECLKADNMWW

SEQ ID NO: 238816 - protein, 57 aa, Glycine max
  Clone ID: PAT_MRT3847_57676C.1.pep
ERAMRLARKPDLLLVILRAPQPVSPTECASQSALRILREKEETDTNTSASTIRPWNQ

SEQ ID NO: 238817 - protein, 41 aa, Glycine max
  Clone ID: PAT_MRT3847_57677C.1.pep
NASTESSSGLCRVVPLLAAISCRLILQTCLKGEAACTSQLV

SEQ ID NO: 238818 - protein, 86 aa, Glycine max
  unsure (1)..(86): unsure at all Xaa locations
  Clone ID: PAT_MRT3847_57678C.1.pep
SSPRASYGKTSAGLSKDWKVSEKXSRRAVFPWCGDRKDVLQCQDRSKKDSPVLHIVYTLIGRAILFLLMAQVNTYQKGLIDRAFIN

SEQ ID NO: 238819 - protein, 67 aa, Glycine max
  Clone ID: PAT_MRT3847_57679C.1.pep
TPTHSFLNHDVNKRGLRSECKAQILQGGGWSICHIYTGPPMGDRMHIYLVDFFIDTRIHQVQTFSQG

SEQ ID NO: 238820 - protein, 100 aa, Glycine max
  unsure (1)..(100): unsure at all Xaa locations
  Clone ID: PAT_MRT3847_5767C.1.pep
KCRKLSTHEKLALKKNLSRLNGGNLLKAMSIIHEIDPTFQHDAPQVDLDLDRQSDFILWKLNLFTKEALEDQDKAAAEEMAVNHNVNTEDQXNTNKRRKL

SEQ ID NO: 238821 - protein, 101 aa, Glycine max
  Clone ID: PAT_MRT3847_57680C.1.pep
IVNRPFPVGFPPVGGVFFFKGKCPGFPSKIPVFFFRAQSNFGVFLGGGPPKNSNWACFKNLFYFFGVNYIVLFETNFFLKGVKALLNFFFLIKGRFPRPVF

SEQ ID NO: 238822 - protein, 47 aa, Glycine max
  Clone ID: PAT_MRT3847_57681C.1.pep
VSTLLVTVYDRECVWSVTLAVCFSRISSSAPPHRIYTLTRASNNRSS

SEQ ID NO: 238823 - protein, 65 aa, Glycine max
  Clone ID: PAT_MRT3847_57682C.1.pep
RLREDDRRDGYDTSYVQPRVLLFCLSILRRKCTRKQAFGCFSVVTDSNMIEGLLKRKYFPKLKLV

SEQ ID NO: 238824 - protein, 59 aa, Glycine max
  unsure (1)..(59): unsure at all Xaa locations
  Clone ID: PAT_MRT3847_57683C.1.pep
FSFIYSHSQCLXSCLDLXLNLYYILFINFXQFAQPPLFKTIXMVKRHLSSYEVSIGFFI

SEQ ID NO: 238825 - protein, 73 aa, Glycine max
  Clone ID: PAT_MRT3847_57684C.1.pep
HLKVSLMEVTRLLHLDISILPPSPKYRSFVHVIGHHQEACVLCVLLQSNYTQVFSSIPYFSSLRVVYFIHTAS

SEQ ID NO: 238826 - protein, 48 aa, Glycine max
  Clone ID: PAT_MRT3847_57685C.1.pep
ITAKVPLNVEDNRNNKKYIIKWHLNQKTNMYCFFSAADIWLDDIFFSF

SEQ ID NO: 238827 - protein, 40 aa, Glycine max
  Clone ID: PAT_MRT3847_57686C.1.pep
KKKKKKKKKKKKKKKFKKKKKKTKKKKKKKKKKKKKKINK

SEQ ID NO: 238828 - protein, 73 aa, Glycine max
  Clone ID: PAT_MRT3847_57687C.1.pep
NNRQKWRIRTTSHEAPSRLSSGFIGEDNQWSQSAPKFQGGERLKPLMLGESQLLSLLFSSKKNVSEDSNQIWS

SEQ ID NO: 238829 - protein, 45 aa, Glycine max
  Clone ID: PAT_MRT3847_57688C.1.pep
FKGVFSSLLPSYFYSISNLFLSFFSQLNDNNFNYIVILLWARLTI

SEQ ID NO: 238830 - protein, 74 aa, Glycine max
  Clone ID: PAT_MRT3847_57689C.1.pep
YSNLLLLRLQISNLASIWFISLFLSIFATGILEMRWSGVGIDEWWRNEQFWVIGGVSAHLFAVFQGLLKVLAGI

SEQ ID NO: 238831 - protein, 116 aa, Glycine max
  unsure (1)..(116): unsure at all Xaa locations
  Clone ID: PAT_MRT3847_5768C.1.pep
QLLNHDIYLIVKVYIYENNSFRVEKVCLLSILICPRHATAYRHVEYKINFCTRNEKKKKKKKKKKKKKKKKKKNPPXKKKKKKKKKKKKKKKKKKKKKKKXXKKKXGGGAFKGTKF

SEQ ID NO: 238832 - protein, 847 aa, Glycine max
  unsure (1)..(847): unsure at all Xaa locations
  Clone ID: PAT_MRT3847_57690C.1.pep
MIIKLAVVLWRHNIPTYFYFAWPSSRINPYRMVIALRLVILCIFLHYRITNPVPNAYALWLISVICEIWFAISWIFDQFPKWLPVNRETYLDRLALRYDREGEPSQLAAVDIFVSTVDPLKEPPLVTANTVLSILSVDYPVDKVSCYVSDDGAAMLTFEALAETSEFARKWVPFSKKYNIEPRAPEWYFAQKIDYLKDKVQPSFVKDRRAMKREYEEFKIRVNGLVAKAQKVPEEGWVMQDGTPWPGNNTRDHPGMIQVFLGQSGGLDTEGNELPRLVYVSREKRPGFQHHKKAGAMNALVRVSAVLTNGPFLLNLDCDHYINNSKALREAMCFMMDPNLGKNVCYVQFPQRFDGIDRNDRYANRNTVFFDINLRGLDGIQGPVYVGTGCVFNRTALYGYEPPLKPKHKKPGLLSSLCGGNRKKSSKSSKKGSDKKKSSKHVDPTVPIFNFEDIEEGVEGTGFDDEKSLLMSQMSLEKRFGQSAVFVASTLMENGGVPQSATPETLLKEAIHVISCGYEDKTDWGSEIGWIYGSVTEDILTGFKMHARGWRSIYCMPKRPAFKGSAPINLSDRLNQVLRWALGSVEILFSRHCPIWYGYSGRLKWLXERFAYVNTTIYPVTAIPLLIYCILPAVCLLXTNKFIIXPRLATLTSIWFISLFLSIFATGILEMRWXGVGIDEWWRNEHFWVXGGVSAHLFAVFQGLXLKVLVGIDTXFTVTSKASDEDGDFAEXLYMFKWTTLPIPPTTLXLIINXLVGVVAGISYAINSGYQSWGPXLFGKLFFAFWVXIIHLXPFLKGLMGRQNRTPTIVVVWSVLLASIFSLLWVRIDPFTTRVTGPDVEECGINC

SEQ ID NO: 238833 - protein, 83 aa, Glycine max
  Clone ID: PAT_MRT3847_57691C.1.pep
SILGIVGRVLQCVWVVWVASPSGVSFGNAVRGSFCGRSATNAPPHTEVASQSNQRDCIVVADLEGHQVALRTAPGCVETTSNQ

SEQ ID NO: 238834 - protein, 179 aa, Glycine max
  Clone ID: PAT_MRT3847_57692C.1.pep
MSIFKAFNVLYRYSESLRKHPVYTKMMTIGGIYFTADVLCQLLKERKSLQTYSTGRTLRHLVNGTFFVAPTLHVWHSKVIPALTYAFKNKYKKILCAYLFGEIVFAPLFLGSLLFLYEWDRSGSVDSGAQNVNEKLKPTLIAYYKRWALVDLLTYSVVPIPYRPIFSSLYGINWQMYIS

SEQ ID NO: 238835 - protein, 45 aa, Glycine max
  Clone ID: PAT_MRT3847_57693C.1.pep
SQYVSYINVHYEKQSQRQEEAHLASTALMIFPCHGGQSQATMSRS

SEQ ID NO: 238836 - protein, 101 aa, Glycine max
  unsure (1)..(101): unsure at all Xaa locations
  Clone ID: PAT_MRT3847_57694C.1.pep
NTPRKKREKPVLQKGVGWTVVLHHKGRKKTRDSESGIAVVSVAQAPVENKMAKKKHIGFGLDFYVLIKXVLRNEIMTLHCKFEEDKWRLHHLRSSMKFRPY

SEQ ID NO: 238837 - protein, 188 aa, Glycine max
  Clone ID: PAT_MRT3847_57695C.1.pep
MAGAASALFLLDIKGRVLIWRDYRGDVSALDAERFFTKLIEKQADPQAQDPVVHDNGVTYMFIQHSNVYLMIATRHNCNAASLLFFLHRIVDVFKHYFEELEEESLRDNFVVVYELLDEIMDFGYPQYTEAQILSEFIKTDAYRMEVTQRPPMAVTNAVSWRSEGINYKKNEVFLDVVESVNILVNSN

SEQ ID NO: 238838 - protein, 76 aa, Glycine max
  unsure (1)..(76): unsure at all Xaa locations
  Clone ID: PAT_MRT3847_57696C.1.pep
HKQMPVITHCYLNTDVVTTIXCSLDIITTYHLHWNPIKVMKHYXSXRLVTNFMSFNKMLLDFLVDIVDRALYCKLF

SEQ ID NO: 238839 - protein, 63 aa, Glycine max
  unsure (1)..(63): unsure at all Xaa locations
  Clone ID: PAT_MRT3847_57697C.1.pep
YFPTFAFAEFSVSYTVLVPLILIXYLLNMHTLLSEALTHPPLLSHPPRTRSSTKXXSXXLLXS

SEQ ID NO: 238840 - protein, 89 aa, Glycine max
  Clone ID: PAT_MRT3847_57698C.1.pep
KQKQMTSYADDFLLRDLVHPKIMDFDYFVTSGLQCQELLSVQGLDTFVSLEGTYYLNLIKVFYANLTILDNGDLCSEICKVKIRVKSRD

SEQ ID NO: 238841 - protein, 48 aa, Glycine max
  Clone ID: PAT_MRT3847_57699C.1.pep
FGIGNVMLPFSFTITMHACCNLLKPFPCHHNEALTRTTLVMSHAVLVI

SEQ ID NO: 238842 - protein, 68 aa, Glycine max
  unsure (1)..(68): unsure at all Xaa locations
  Clone ID: PAT_MRT3847_5769C.1.pep
MSTQNRRSSFSSSTTSSLAKRHVSASTTSPSLAAPANMAKKRPPLSNFTTFAXSSPSSSLVPCAAIFV

SEQ ID NO: 238843 - protein, 206 aa, Glycine max
  Clone ID: PAT_MRT3847_576C.1.pep
MNSDWDSGGGGGGATLIPGLPNDVAASILSKVPYSHHGRLKATCKSWKLLLSSKSFLASLNKRNHLLCIFPQDPSLASPFLFDPNSLAWCPLPPMPCSPHVYGLCNFAAVSVGSHLYVLGGSLFDTRSFPIDRPSPSSATFRFNFHDFSWEPRASMLSPRGSFACAVVPAGGSIYVAGGGSRHTMFGAAGSRIRSAERYEVGKKRW

SEQ ID NO: 238844 - protein, 436 aa, Glycine max
  Clone ID: PAT_MRT3847_57700C.1.pep
MGIWRNEISEEAKKQLWLSGPMVFVNVTGFSVLLGMSSALDTFCGQSYGAQQYHMVGIHMQRAIVIIMLATIPMSFIWAYLRPILVVLHQDKTIAAQAQLYATYLIPSLSANALLRCITKFLQTQNIVLPMMLASGFTTLAHALLCWLLVLKFGLGIKGAAIAFCISNWLNTVLLALYIRFSSSCKSTWTGFSRESLQNIPQFLSLAFPSALMVCLEQWTFQIMVLLSGALPNPKLQTSVLSICFNTTGLFWMIPFGVSVAASTRISNELGAGCPKAAYLAVKVTLLMSFVVGALGFILLMVTRNIWGHIFTNIPEVIRYVASMTPILASSVFVDSIQTALSGIVRGCGWQKLGAFVNLGSYYLVGLPFAIVLAFVLHIKGEGLLLGIVIALTMQVVGFLVITLRTNWEKEANKAAKRIRSNGVPTDANALPSDQN

SEQ ID NO: 238845 - protein, 248 aa, Glycine max
  unsure (1)..(248): unsure at all Xaa locations
  Clone ID: PAT_MRT3847_57701C.1.pep
MGIWRNEISEEAKKQLWLSGPMVFVSVFQYSLQMISLMFVGHLDELLLAGVSLATSFVNVTGFSVLLGMSSALDTFCGQSYGAQQYHMVGIHMQRAIVIIMLATIPMSFIWAYLRPILVVLHQDKTIAAQAQLYATYLIPSLSANALLRCITKFLQTQNIVLPMMLASGFTTLAHALLCWLLVLKFGLGIKGAAIAFCISNWLNTVLLALYIKFSSSCKXTWTGFSRDPCRHSSISQSCFSSALMVCL

SEQ ID NO: 238846 - protein, 81 aa, Glycine max
  Clone ID: PAT_MRT3847_57702C.1.pep
GSEYIFRFRRYVGEQVCRRRTEPFCYSLFCVWWWFASQALDRVVVSNVCMCERFLFRVGLVPLRFSKRPPLNSCVGRGHIR

SEQ ID NO: 238847 - protein, 102 aa, Glycine max
  Clone ID: PAT_MRT3847_57703C.1.pep
SRPADNCIKTMLRNCKAARVLPRIADCAKNDRNAVLRARCCDYALLILEHWPDAAEVQRSADLYEDMIRCCVSDAMSEVTFIVLGYLMFLINIDRASYFYLD

SEQ ID NO: 238848 - protein, 84 aa, Glycine max
  Clone ID: PAT_MRT3847_57704C.1.pep
NGSGSISGGGGPNPKGVKPGGPTGGLTYLYLGGVTCPFSYAENPSFASGYVIAHPWRKGVSPIVLTVGYGFTSHDGPKICCPRP

SEQ ID NO: 238849 - protein, 118 aa, Glycine max
  Clone ID: PAT_MRT3847_57705C.1.pep
ISVTYGFDSCIMGRVRYIVPRLIIGVFIQLLCSYSTLPLYAIVTQMGTHFKKAIFDEQVQARLVGWAQKAKKKGQRGDNSLSGQESSRAGAGIQLGSVFRRESASEDNVIVPRNDGSE

SEQ ID NO: 238850 - protein, 61 aa, Glycine max
  unsure (1)..(61): unsure at all Xaa locations
  Clone ID: PAT_MRT3847_57706C.1.pep
HSHQNLLKKXSXXHYIKXQNXXXQISXLISLXLKQFHHSKXLKTQIKIXFSFKFLIKTILT

SEQ ID NO: 238851 - protein, 102 aa, Glycine max
  unsure (1)..(102): unsure at all Xaa locations
  Clone ID: PAT_MRT3847_57707C.1.pep
YSLSKLSFVPSLFMNTTLSPSVLLSQTFFMTFLSLSLHVLYVPVPHLLSIIITYYKFITPLTPPSPLHNSCSSSTLSSHLPSYIQILFLGPTNXHYILLLFL

SEQ ID NO: 238852 - protein, 47 aa, Glycine max
  Clone ID: PAT_MRT3847_57708C.1.pep
IESTYERALIGTPLQNHVGELFSLIRFLLFTPYSYYLCMDCDCLIFD

SEQ ID NO: 238853 - protein, 70 aa, Glycine max
  Clone ID: PAT_MRT3847_57709C.1.pep
HWLGKKQGLERWCLNWACSKQTCDGSLSNYFSCRIKFWLRELYVLNICFWAAIRGPFNLILQWFRFWFRP

SEQ ID NO: 238854 - protein, 59 aa, Glycine max
  Clone ID: PAT_MRT3847_5770C.1.pep
MKGLIPYVIDGIRKQKPGHKSHSLSNSLERSYHFLLGFNSFNHSRIQNQKNKDTRFNHP

SEQ ID NO: 238855 - protein, 69 aa, Glycine max
  Clone ID: PAT_MRT3847_57710C.1.pep
CGMEVLNLSHQFVLNLIAEVKWKVFKFCNIVKCRIKGYTNIYYSYCFYQLNAMLNIFLLCCTVSHSGYT

SEQ ID NO: 238856 - protein, 205 aa, Glycine max
  unsure (1)..(205): unsure at all Xaa locations
  Clone ID: PAT_MRT3847_57711C.1.pep
MWMLPRFRFPSIPFQFQTAPSPSLFLSATSYKFRSATASAASGSAGDSDSDGEPKLNFSGVRLEEAVDSRIGSGKXRLDNWXISSRINGISQGTSSNQVSKSRNFVHVSLGRVRXIKVSXSMSKSWGLRIKCTSPQLLHLRAVPQNIPLDIVYEDEHVLVINKPAHMVVHPAPGNTSGTLVNGILHHCNLPNVEFSKDEALSDTE

SEQ ID NO: 238857 - protein, 97 aa, Glycine max
  Clone ID: PAT_MRT3847_57712C.1.pep
VNHMARCITILFFVIYVLLFTVVGGRSLFMINTNISPDSVPHRPVSSSHVTTAPLEKTRFNDDGGACKGLDRTECVAKTTMVAHTDYVYTQDINNGP

SEQ ID NO: 238858 - protein, 49 aa, Glycine max
  Clone ID: PAT_MRT3847_57713C.1.pep
SLPASVFLLAPPVSVADVALAVTNGVADDAFFGVFPIVQIKAAADRVRV

SEQ ID NO: 238859 - protein, 51 aa, Glycine max
  Clone ID: PAT_MRT3847_57714C.1.pep
FYYENQGLRAQQITYGYIEREPGNPNLSYKEHFLSFLAVGTISKRNLTRSF

SEQ ID NO: 238860 - protein, 181 aa, Glycine max
  Clone ID: PAT_MRT3847_57715C.1.pep
MSLRGFRIYQKIDLNGVGYIVESVHANAHLQLHSGAALQLDGEEAEELKKSHTKLADGYGVLGILRISDEQEYLILVTSTFPVGQLHGSDIYKITGVQFIQLRQATEFIDHRIAELQRLMSSGIFYFAYTANLRNAYDLTVSLSKQKNVTNEAGTYAEFARTDDYRFFLKSDLCFPLSVMG

SEQ ID NO: 238861 - protein, 65 aa, Glycine max
  unsure (1)..(65): unsure at all Xaa locations
  Clone ID: PAT_MRT3847_57716C.1.pep
SCGTQCYSQSDTIPNPAHFASFAGVSCSSVVYDKLDDAGXYTIGTLAHETIMLGRTVIRNSAIRC

SEQ ID NO: 238862 - protein, 43 aa, Glycine max
  Clone ID: PAT_MRT3847_57717C.1.pep
YDNKISLCSFKERTKSPSCKLIEKILCGILKIPVVKYNQWALQ

SEQ ID NO: 238863 - protein, 60 aa, Glycine max
  Clone ID: PAT_MRT3847_57718C.1.pep
LLDPHPILSFTILELKVHSLEHIESVEVTSESLSRCVNITLCFSQMHILFFLFACFLECK

SEQ ID NO: 238864 - protein, 102 aa, Glycine max
  Clone ID: PAT_MRT3847_57719C.1.pep
ITSFCLHDASTTLFVFRPPVPFLLLPLDKFQSHKRRHRGRDQEILLPSTWPSTSLDKDCFLMMHEKVYHCVIVRPPAPRGRGGHAQCCCPGHHLGFQGWLTQ

SEQ ID NO: 238865 - protein, 59 aa, Glycine max
  unsure (1)..(59): unsure at all Xaa locations
  Clone ID: PAT_MRT3847_5771C.1.pep
XXXXPDHMXPHLXTGHSSNGXLVAXNFSXXCLFPCVRFLSGXXXXXLCWXQXYVXXFLS

SEQ ID NO: 238866 - protein, 70 aa, Glycine max
  Clone ID: PAT_MRT3847_57720C.1.pep
YTSQFQLAGPFFNIDNCDTISKCLTIMLLSRCFYFLLLLNTHPNSLDRRTMMFGVSVPLVQPKGMQDMDC

SEQ ID NO: 238867 - protein, 78 aa, Glycine max
  Clone ID: PAT_MRT3847_57721C.1.pep
RTTHFLGFPTWFWQASLPKIPFLKKHRGLNSFLILYGENFPRPKGKRSQQKFLYKPPLGQFHITTPIGPFFGFKGGSS

SEQ ID NO: 238868 - protein, 185 aa, Glycine max
  Clone ID: PAT_MRT3847_57722C.1.pep
LPFSPPPPPPKWPTPGAVFSSPLGVKMKKSGGAFPRGFPVLSRPFFFFGPENPRAGFSGFLKKGVLVPFPGPMGLWLRFWFMGPKVLGEGVFPGNFGGDPKLGLFFFFSPHLTPWGFCPGGKTLFFFFFLNSPWGPPKKKRVGGPFFLPLFFSMFCFPGSRSLFFFWGGLGFFFPHLFGPVFVFP

SEQ ID NO: 238869 - protein, 119 aa, Glycine max
  Clone ID: PAT_MRT3847_57723C.1.pep
FGAVRASFPSFSPLFLFFSRLWPGFFHLGFCPSTYVAPRFRVPLNVFPSSSGAREFFCSLLCLLGDVHFPPFSFPLSGFIFSPSLGLCLLAPLSGRMVGPVVRARVSGPVPPGVPAFPI

SEQ ID NO: 238870 - protein, 70 aa, Glycine max
  Clone ID: PAT_MRT3847_57724C.1.pep
QASMLWINRFLAIAHEYTDGDHSHMYRHNAEIQLITSPLHLDTMVTNNICGDILSDEASIVTEIMAMLTS

SEQ ID NO: 238871 - protein, 422 aa, Glycine max
  Clone ID: PAT_MRT3847_57725C.1.pep
MGQDTKNYNNIASSPLLEPLPSSNSKRASKLQTLGNIIVTVVGTGVLGLPFAFRIAGWVAGSLGVAIVGISTYYCMLLLVMCREKLASEEPLGESNTYGDLGYRSFGTPGRYLTEVIIVVAQCAGSVAYFVFIGQNLYSVFQGQGLSMASYIFMLVPVEIGLSWIGSLSALAPFSIFADVCNVVAMGIVVKEDIQRAFGKGFSFGQRTMITSNIGGLPFAAGMAVFCFEGFGMTLALENSMQDRRKFPILLAQTFGGITLVYILFGFCGYMAFGEETRDIVTLNLPRNWSSLAVQVGLCVGLAFTLPIMLHPINEIFEGKLKIILRNNNDSTGLENICMYISRAIVVVGLAVLASFVPEFGVYASFVGSTLCAMLSFVMPATFHLKLFGSSLPIWQKALDSIVLLSGLFFAFYGTYNTIVGV

SEQ ID NO: 238872 - protein, 191 aa, Glycine max
  Clone ID: PAT_MRT3847_57726C.1.pep
MISNISTNNPKMAPSFSSATKLFSFSLLLLTTTMVYEANSQLPLQTTLVFYLQDIATGPNATVSPITGLTGRDWTYEQFGTIFAVDDPVMMSPSPVSAQVGRAQGLLVVSAHDGANVNAVLSIVFTNLQYSGSSIEIQGISRQRESYKELSVVSGTGRFRFAKGYAAFETVFYDPGTAHSVIRLTINLRQS

SEQ ID NO: 238873 - protein, 83 aa, Glycine max
  unsure (1)..(83): unsure at all Xaa locations
  Clone ID: PAT_MRT3847_57727C.1.pep
MCQEVNNPPKKGVINVADHDDEKGVMESEENGVYGPDFRVCQDCGNXAKKDCVFRRCMTCCMGRGYDCNTHVKSTWIRYVRRL

SEQ ID NO: 238874 - protein, 45 aa, Glycine max
  unsure (1)..(45): unsure at all Xaa locations
  Clone ID: PAT_MRT3847_57728C.1.pep
KKPDMFSNYSKPTGFLCCIKLCTSFPNLTXLPSTWMIRCLEKKRS

SEQ ID NO: 238875 - protein, 137 aa, Glycine max
  Clone ID: PAT_MRT3847_57729C.1.pep
VAIHGIDVQFAGIKFLESLVSEFSPSTSSAMGLPREFHEQCRRSLEQDYLKTFYHWTQEAASSVTNRIIESDSVVPEVKVCSAALDLMLQILNWDFCSNTIETKINVNVFSAGVRQDGDSLKKSECHLVQVISWFAY

SEQ ID NO: 238876 - protein, 110 aa, Glycine max
  unsure (1)..(110): unsure at all Xaa locations
  Clone ID: PAT_MRT3847_5772C.1.pep
FPFCSPPGGRAVFYXLEKTPPLFSWHVGGFRMPPPRFGAPSPTPLWVGWAPLEPQGGVQKGSRFWPIGFGRGFQGTRPVWPAFRNLRPFPYGPWEDCLLKFPVGKVPKGS

SEQ ID NO: 238877 - protein, 56 aa, Glycine max
  Clone ID: PAT_MRT3847_57730C.1.pep
VLNPQHSIYSTQDETLNYISFVVSVFLIAGLVMNGFHACYRILITIKCNENDHVAV

SEQ ID NO: 238878 - protein, 43 aa, Glycine max
  Clone ID: PAT_MRT3847_57731C.1.pep
LTESRRDIQFYETLAIYMMTIETIFLLFDSFTSVRLKLTNLFD

SEQ ID NO: 238879 - protein, 76 aa, Glycine max
  Clone ID: PAT_MRT3847_57732C.1.pep
IESSLAHWSIAVSCRRDIFSGLTNVHDQRLPMLSCTEASFSIVTISMRLCLLCCFTPFLQVGLALGSAVVVASHRW

SEQ ID NO: 238880 - protein, 127 aa, Glycine max
  Clone ID: PAT_MRT3847_57733C.1.pep
MASSSSLSSSKRHPLYHGIRCRGGKWVTEIREPRKTNRIWLGTFLTPEMAAAAYDVAALALKGGEAVLNFPDSVGGYPVPASKSPADIRTAAIAAAELMKPEASHNNNNVNASTTNEAEVVQYDNNN

SEQ ID NO: 238881 - protein, 46 aa, Glycine max
  Clone ID: PAT_MRT3847_57734C.1.pep
IAITRAQDRASIGTLGGPAAYVLFAHSLRLGDCECRSWERIVLLAS

SEQ ID NO: 238882 - protein, 77 aa, Glycine max
  Clone ID: PAT_MRT3847_57735C.1.pep
HHIDEHQFVILRDADSAMITNFKVDGGSSYYRMMKNSEFVKGYCGDRVSETRRVVVVVVIVTVTEAVKGGRNREENT

SEQ ID NO: 238883 - protein, 80 aa, Glycine max
  unsure (1)..(80): unsure at all Xaa locations
  Clone ID: PAT_MRT3847_57736C.1.pep
MLVDQDLLTGDXLLSDSFRYKEIANGMLWAADGKSVVEXAADVYIGANPSALGGGDDQGVDDAXFEVLXIVDTFRLRDQT

SEQ ID NO: 238884 - protein, 97 aa, Glycine max
  Clone ID: PAT_MRT3847_57737C.1.pep
LLILKFRFYLKLTGLKNVVPQSQQNLQFAYIVIYRGTHLKLITYETSSTNWCTTTTMLCSFEAIEKHYPTKASSYLVAIQGKLFHLIIGHLNHPTSL

SEQ ID NO: 238885 - protein, 76 aa, Glycine max
  Clone ID: PAT_MRT3847_57738C.1.pep
FHTLFKVWSDCETNITLFFYRYTLYLEIVIFFLLLRFWWLIILAEHRNVMQMACVLNLLGCSCGTCASRAACWESI

SEQ ID NO: 238886 - protein, 49 aa, Glycine max
  Clone ID: PAT_MRT3847_57739C.1.pep
CVPRSFRFRIPQPPAPRGRRDRVCNERRAHQGFGCKTGFAAPTAESNCP

SEQ ID NO: 238887 - protein, 81 aa, Glycine max
  Clone ID: PAT_MRT3847_5773C.1.pep
QKKVHAEDRHVALFEDRADTYDKPMDSEMEGHPTNNILWSAQKDEHISFSTPKEKNSLLGLQTKVGLDGNQWQVYSRKKRS

SEQ ID NO: 238888 - protein, 62 aa, Glycine max
  Clone ID: PAT_MRT3847_57740C.1.pep
QNTLKPRRTKYANMKWVYKKKKQTHNQNNGFPTVKDKARRNSHGSTFTISEGPCFIRMDPQT

SEQ ID NO: 238889 - protein, 104 aa, Glycine max
  unsure (1)..(104): unsure at all Xaa locations
  Clone ID: PAT_MRT3847_57741C.1.pep
CFHNGGSIPSGNALTPIRHIIYDEMLIKYTFVKXLRQAXATSMFLQTIKNFGSFCAYCVDHLIIAPEFFXPYFNSSILKNVFAWHNNPITEGIGQTIATFQFIK

SEQ ID NO: 238890 - protein, 47 aa, Glycine max
  unsure (1)..(47): unsure at all Xaa locations
  Clone ID: PAT_MRT3847_57742C.1.pep
GYGRXIKKKMEXLGGKXRLXYXXDHCVXXXAXXCDLXREXXXVRERX

SEQ ID NO: 238891 - protein, 173 aa, Glycine max
  unsure (1)..(173): unsure at all Xaa locations
  Clone ID: PAT_MRT3847_57743C.1.pep
PPPKKKKPPTSGGGGWGGPPPPPAQGGGREKDGGGFPSPPPVKKKGPPLKRAPQKRPPRGGPPPKNSPQKSPPXGAPQKEGPPPPFFSPLKTPKKPPSPPKKGKAPLVGQTPPKNPQTPKESFFWVPPKPGVIGQVFWALATTARAKNPQRSCTHLAIFLTQHCFLPFLTHYA

SEQ ID NO: 238892 - protein, 154 aa, Glycine max
  Clone ID: PAT_MRT3847_57744C.1.pep
MHVLLMENAAEGGSEAGWSGAGPDGPGAGPDGPGAGGEEVVGPGAWDGAVVGVGDEGAGVGVGVAGAGAAAGGGVFAVGDGAGADVDGDGVVDGGCVGAGPGACGGYGGGAAGGGGGGSGGGGGAGSGGGGAHGGGYGGGAGGGEGGGHGGYYP

SEQ ID NO: 238893 - protein, 61 aa, Glycine max
  Clone ID: PAT_MRT3847_57745C.1.pep
TTPPQAGYQLNVSTGDSRLFVSPRHRCKGRGRGGDGDHDDDDAAFQFQRSPMRSATSGRSS

SEQ ID NO: 238894 - protein, 120 aa, Glycine max
  unsure (1)..(120): unsure at all Xaa locations
  Clone ID: PAT_MRT3847_57746C.1.pep
GVKAFTQDLIXSGTXNSTVTMEXWAITKLLKKPKIFKKATKELNQVISKKKLVXKKDILNLPYVNSIAKETMKLHPLAPMVVPRLSKKDCQIXRYYIPKRTQMLVNVLTIGRNPSIWDNP

SEQ ID NO: 238895 - protein, 64 aa, Glycine max
  Clone ID: PAT_MRT3847_57747C.1.pep
GGTLSKAPGSQPLKEPRGWGAVNFMWQFKVNCFIQETNIICQNLYFEALLRSYLNHFGWDPTHK

SEQ ID NO: 238896 - protein, 125 aa, Glycine max
  unsure (1)..(125): unsure at all Xaa locations
  Clone ID: PAT_MRT3847_57748C.1.pep
ESHARIKIVGIDQDVSFVPNKFPERQPIGTAAQIQDDGKDYHDPSPAPFVDPTEFTSWSFYRAXGYAEFVATILFLYITVLTDMGVALAKSKCSIRLIXGIPCAFCGMIFILVYCTYVISRGHIN

SEQ ID NO: 238897 - protein, 67 aa, Glycine max
  unsure (1)..(67): unsure at all Xaa locations
  Clone ID: PAT_MRT3847_57749C.1.pep
AWLGSVTGTIAGLFTSLNLTTFIKGLEKLLGHQFLSGXISVTDFLPSELHAMDIFYVLLTGSRVSVL

SEQ ID NO: 238898 - protein, 179 aa, Glycine max
  Clone ID: PAT_MRT3847_5774C.1.pep
MSTASQPKAKKTASSKKPLSHPPFAVMIAEAIASLKERTGSSQYAITKYIEGKHKELPATYKKLVLVHLKKSVAAGKLVKVKNSFKLAPTKSAPVKAAAAPKKPASKPKAAAPKKKAVAKPKAKAAATKPKAKPAKAAPKKVGAKPAKKTPVKAVKKPKSVVKKPKSVKSPAKKAKAKK

SEQ ID NO: 238899 - protein, 820 aa, Glycine max
  unsure (1)..(820): unsure at all Xaa locations
  Clone ID: PAT_MRT3847_57750C.1.pep
HASAHASAHASAHASAHASADAWVISIKLGDIIPADARLLEGDPLSVDQSALTGESLPVTKSPSDEVFSGSTVKKGEIEAVVIATGVHTFFGKAAHLVDSTNQVGHLQKVLTAIGNFCICSIAXGIVIELIVMYPIQHRRYREGIDNLLVLLIGGIPIAMPTVLSVTMAXGSHRLSQQGAITKRMTAIEEMAGMDVLCSDKTGTLTLNKLSVDRNLIEVFAKGVEKEYVILLAARASRTENQDAIDAAIVGMLADPKEARAGIREVHFLPFNPVDKRTALTYIDSDGNWHRSSKGAPEQIMNLCNCKEDVRRKVHATIDKFAERGLRSLGVARQEVPEKSKDSPGGPWQFVGLLPLFDPPRHDSAETIRRALNLGVNVKMITGDQLAIGKETGRRLGMGTNMYPSSALLGQDKDASISALPVDELIEKADGFAGVFPEHKYEIVKRLQERKHICGMTGDGVNDAPALKKADIGIAVADATDAARSASDIVLTEPGLSVIISAVLTSRAIFQRMKNYTIYAVSITIRIVFGFLFIALIWKFDFAPFMVLIIAILNDGTIMTISKDRVKPSPLPDSWKLREIFATGVVLGSYMALMTVVFFWAMKDTNFFSNKFGVRPLRDSPDEMMAALYLQVSIISQALIFVTRSRSWSFVERPGLLLLGAFFIAQLVATFIAVYANWGFARIKGMGWGWAGVIWLYSVVTYIPLDLLKFAIRYILSGKAWDNLLENKTAFTTKKDYGKEEREAQWAAAQRTLHGLQPPETSNLFNDKNSYRELSEIAEQAKRRAEVARLRELHTLKGHVESVVKLKGLDIDTIQQHYTV

SEQ ID NO: 238900 - protein, 47 aa, Glycine max
  unsure (1)..(47): unsure at all Xaa locations
  Clone ID: PAT_MRT3847_57751C.1.pep
LWHHVSDYTILIYCSPVGSYXKGALNLKVEIKLYIAISGCXGXGGXK

SEQ ID NO: 238901 - protein, 143 aa, Glycine max
  Clone ID: PAT_MRT3847_57752C.1.pep
LKLARIKGMEWGWPGVIWLYSVVTYIPLDLLKFAIRYILSGKAWDNLLENKTAFTTKKDYGKEEREAQWAAAQRTLHGLQPPETSNLFNDKNSYRELSEIAEQAKRRAEVARLRELHTLKGHVESVVKLKGLDIDTIQQHYTV

SEQ ID NO: 238902 - protein, 41 aa, Glycine max
  Clone ID: PAT_MRT3847_57753C.1.pep
YQSHVDCDHMVILVMRGSCIQIAIPNGHLNRLLFKKKRKGG

SEQ ID NO: 238903 - protein, 82 aa, Glycine max
  Clone ID: PAT_MRT3847_57754C.1.pep
GEREAQWATAQRTLHGLNQSSTSSDLFNDKTGYRELSEIAEQAAKRAEVARLRELHTLKGHVESVVKLKGLDIDTIQQSYTV

SEQ ID NO: 238904 - protein, 108 aa, Glycine max
  Clone ID: PAT_MRT3847_57755C.1.pep
ISFDVYLFCWCFLSASLSCFSCSVVAFLPYVLAVPHLLSTRQFPHPLMHFPPASSNTWSPCLHCFFVHIYTQFPQSLSSSLRFPLPLSIYTITVPYKSLLVDTCIAIH

SEQ ID NO: 238905 - protein, 70 aa, Glycine max
  unsure (1)..(70): unsure at all Xaa locations
  Clone ID: PAT_MRT3847_57756C.1.pep
SXXRXXXXXXXXEANASXSYXGMVGXIWIVHVXXXGKLXXSYHPCXXXVXVXXXXVXXXXGXLSITXXXX

SEQ ID NO: 238906 - protein, 85 aa, Glycine max
  Clone ID: PAT_MRT3847_57757C.1.pep
AISIEHVQGPCHPWLHSRNLAAGQLTTNGPANQPLMFGLQACHGALPWDVQRYQLMVTRSVHTIAKRQFASALWQCRRQREGGPT

SEQ ID NO: 238907 - protein, 38 aa, Glycine max
  Clone ID: PAT_MRT3847_57758C.1.pep
EHNSHIIAGLRTICFKQDYLPVIYPSHRGDFLYLPLGA

SEQ ID NO: 238908 - protein, 90 aa, Glycine max
  Clone ID: PAT_MRT3847_57759C.1.pep
SSRSSRFGSSKNTGGGTILRSDLLANFLTEGSIRASVDVLRTHRIRGMIKMVATVGIPENTGISLACAMNNYYMGRITYTVYINLFAGAN

SEQ ID NO: 238909 - protein, 190 aa, Glycine max
  Clone ID: PAT_MRT3847_5775C.1.pep
MSTASQPKAKKTASSKKPLSHPPFAVMIAEAIASLKERTGSSQYAITKYIEGKHKELPATYKKLVLVHLKKSVAAGKLVKVKNSFKLAPTKPAPVKAAAPKKPTKAATKPASKPKAATPKKKAVAKPKAKAAATTAKPKSKPAKVAAKKVAAKPAKKKTPVKAVKKPKSVVKKPKSVKSPAKKTKAKAKK

SEQ ID NO: 238910 - protein, 586 aa, Glycine max
  unsure (1)..(586): unsure at all Xaa locations
  Clone ID: PAT_MRT3847_57760C.1.pep
ILSKISEIYTFGGFSASLEALKPIMIVALTMVLLVRFTLSRRPKNFRKWDLWQGIDFSRSKADARVDGSTGVKFXDVAGIDEAAEELLELVSSLKRPDLVGYFAILPPLGVPLVGPPRRRGPLQAPAIAGHAGLPRCLMAGSHYVGACVGVGSARVLESFFCAIVSKPSVVFIDEIDALATRRQGIFKENTDHLYNAATQERETTLNQLLIELDGFDTGKGVIFLAATNRIDLLDPALLRPGRFDRKIRIRPPSAKGRHDILKIHSSKVKMSESVDLSSYAQNLPGWSGARLAQLVQEAALVAVRKQHNSILQSDMDDAVDRLTVGPKRVGIELGYQGQCRRATTELGLALTSHLLRRYEHAKVECCDRISIVPRGQTLSQLVFHRLDDESYMFERRPQLLHRLQVLLGGRAAEEVIYGRDTSKASVDYLADASWLARKILTIWNLENPMVIHGEPPPWRKSVKFVGPRLDFEGSLYDDYNLIEPPLNFKMDDQVAQRTEELIRDMYRKTGSLLRRPHAALLKTIKVLLDQKEISGEEIEFILNKYPPQTPXNLLEKEYAGNLPFPREQVHDLEYALKIQSNEETM

SEQ ID NO: 238911 - protein, 111 aa, Glycine max
  unsure (1)..(111): unsure at all Xaa locations
  Clone ID: PAT_MRT3847_57761C.1.pep
MAGKGEGSALGIHLGTTYSCVCVWQHDRVXIMINDQGNRTTPAYVGFTHTARIICDAGKNQDIMNPINTAXHAKRRIDRTCSESCAQRDIXLWSIKDICGAADKSMIVVNY

SEQ ID NO: 238912 - protein, 89 aa, Glycine max
  Clone ID: PAT_MRT3847_57762C.1.pep
MEICRNIIFPLRRLCLALSARLKPRKNGAGLLKLQDDVQTCGYQDVQVMWEMLQRTEGEVIENHHHKRKQLPFWRIFVWSNHTESANHA

SEQ ID NO: 238913 - protein, 202 aa, Glycine max
  Clone ID: PAT_MRT3847_57763C.1.pep
MSTFEPVIVIDGKGHLLGRLASTVAKQLLNGQKIVVVRCEALNISGEFFRAKLKYSAFLRKQTRYNPTRGGPFHFRAPSKMFWRTVRGMIPHKTARGAAAMERLKTFEGVPQPYDHMKRVVVPQALRVLRLKPGRKYCTVGRLGHEFGWKYQDVVSRLEERRKVKGAAYYERKKALRRSLAEAQKTAKVDEKVKTQLAEYGY

SEQ ID NO: 238914 - protein, 39 aa, Glycine max
  Clone ID: PAT_MRT3847_57764C.1.pep
ERQCLWIIGHCSHIKERKHNLLFLSCAFMCNKLRVTVCV

SEQ ID NO: 238915 - protein, 50 aa, Glycine max
  Clone ID: PAT_MRT3847_57765C.1.pep
MMGKMEDVKGGDSGVVGGGGGEVSWWHSQAVKSEEDTVEDDAAQIFRVER

SEQ ID NO: 238916 - protein, 52 aa, Glycine max
  Clone ID: PAT_MRT3847_57766C.1.pep
FLNDTSNFYTAAKLYYIRGGSLIINIYKWLYKYKFLPIFNVNPIQHFFSIFL

SEQ ID NO: 238917 - protein, 89 aa, Glycine max
  Clone ID: PAT_MRT3847_57767C.1.pep
KKNTWGALKENPLFPGGGGKKKKTGAPGFSLGKGGGRAPPINWGGFLIWAPRVLHLSFRLESWLGFLLGNYFFTEKEKAMDIPRFKNPL

SEQ ID NO: 238918 - protein, 83 aa, Glycine max
  Clone ID: PAT_MRT3847_57768C.1.pep
QRTRFKAIVVIGDSEGHIGLGIKTSMEVATAIRAAIIIAMLSVVPIRRGCWGTNLGEPHSLPTKESGKCGSVTVRLIPAPRGT

SEQ ID NO: 238919 - protein, 85 aa, Glycine max
  Clone ID: PAT_MRT3847_57769C.1.pep
RTLPLYSVVDPRETENIKDPLIHRNPIILQIEDLTNYILETDVYPTEPAPLKELKEATNNHPCCSIATLPQARQLMPLLLKLLNP

SEQ ID NO: 238920 - protein, 164 aa, Glycine max
  Clone ID: PAT_MRT3847_5776C.1.pep
MIAEAIASLKERTGSSQYAITKYIEGKHKELPATYKKLVLVHLKKSVAAGKLVKVKNSFKLAPTKPAPVKAAAPKKPTKAATKPASKPKAATPKKKAVAKPKAKAAATTAKPKSKPAKVAAKKVAAKPAKKKTPVKAVKKPKSVVKKPKSVKSPAKKTKAKAKK

SEQ ID NO: 238921 - protein, 65 aa, Glycine max
  Clone ID: PAT_MRT3847_57770C.1.pep
LLLFLSIIVVNICCFVFSTCLLWRLLIYIYLFFLLLAILQLSSISLTCIRFIISISAINESNLTF

SEQ ID NO: 238922 - protein, 50 aa, Glycine max
  Clone ID: PAT_MRT3847_57771C.1.pep
RSSILIKNDLSVHINKHQNAVTNHIPSSSASSSPTGTRVETTNKIAISPG

SEQ ID NO: 238923 - protein, 69 aa, Glycine max
  unsure (1)..(69): unsure at all Xaa locations
  Clone ID: PAT_MRT3847_57772C.1.pep
TVIQLVSKPIPTNPIIPTNKSQLFTTYHNQHTTISILIFXLYIILTNYFLLLYKSNLSLIPPSPNFTPK

SEQ ID NO: 238924 - protein, 56 aa, Glycine max
  Clone ID: PAT_MRT3847_57773C.1.pep
YTISESGSHGAPGGEMLSESKVRDVVHGSEYVLSYEDKDGDGMPCGDVRWEMCLDI

SEQ ID NO: 238925 - protein, 173 aa, Glycine max
  Clone ID: PAT_MRT3847_57774C.1.pep
MKKVVLKVEVHEDKIKQKAMKVVSGISGVESVSVDMKDKKLTVIGDIDPVKVAAKLRKLCHAEIVSVGPAKEEKKEEPKKDDKKEDDKKKNPPSEILCHAEIVSVGPAKEEKKEEPKKDDKKEDDKRKNPPSDIVADQLKFYQTHAYYYQMKPQYNAYYSAISVEEDPDSCVI

SEQ ID NO: 238926 - protein, 51 aa, Glycine max
  Clone ID: PAT_MRT3847_57775C.1.pep
RRTPVSLTYNDYDMRFTYHRFRSITLPRDYTSPDKYHFKRVYSREMGNLNK

SEQ ID NO: 238927 - protein, 71 aa, Glycine max
  Clone ID: PAT_MRT3847_57776C.1.pep
IPEMPETTFIAFCLILSSCTSTFNTTFCYSKIKYLLELYNTFQVHLVQKRSKTKAHVKTTTLNYESQSMNI

SEQ ID NO: 238928 - protein, 151 aa, Glycine max
  unsure (1)..(151): unsure at all Xaa locations
  Clone ID: PAT_MRT3847_57777C.1.pep
TALVYNVDDLKEVVAANKXDRLPQAXEARGIILEELNKVVASKVSLETVPTIKKFRAYVERIRASEMEKCLSKMGPDVSKQQKDAIYALSMGIVNKLLHGPMQHLRCDGKNDSSLSEVLENMRALNRMYDLETEISLIEEKIRVKMERVQK

SEQ ID NO: 238929 - protein, 125 aa, Glycine max
  Clone ID: PAT_MRT3847_57778C.1.pep
MLEGVWMEEMQRVVVANIYAPCEIESKRQLWEKLYSRKSQSQIQSWCLVGDFNCIRHPVERLGSRLSNSEANLIAKFNDWLAEMEIDDIPCVGKPFTWVRPNGSCKSKLDRVLVFDDWLSKWPDS

SEQ ID NO: 238930 - protein, 82 aa, Glycine max
  unsure (1)..(82): unsure at all Xaa locations
  Clone ID: PAT_MRT3847_57779C.1.pep
CCRKMGXDVSKQHKDAIYALSISSRNKLLHGPMQHLRCDGKNDSSLSEVLENMRALNRMYDLETETSLIEEKIRVKMERVQK

SEQ ID NO: 238931 - protein, 147 aa, Glycine max
  Clone ID: PAT_MRT3847_5777C.1.pep
MFFLIVLGVSAPYSSFSVVTTVQCLSGTGSLRVGGEFLAKHYHQRTIYLPTPTWGNHPKVFNLAGLSVKTYRYYAPATRGLDFQGLLEDLGSAPSGSIVLLHACAHNPTGVDPTLEQWEQIRQLIRSKALLPFFDSAYQGFASGSLN

SEQ ID NO: 238932 - protein, 162 aa, Glycine max
  Clone ID: PAT_MRT3847_57780C.1.pep
RCAKALEPSSSLCLFSVWTIDCANELIQERVCDRWENRRAKSDWKTDDNVAGERPHTYELWNGNTNDKGIGTRADDIFYAITPRDPEFNDKGTTLRSQYAVKDEQKHDCGGGYMKELREDVDHMKYGLATPYRVLIGPDICGYSARQVHSDLTYNNTNHLVK

SEQ ID NO: 238933 - protein, 332 aa, Glycine max
  unsure (1)..(332): unsure at all Xaa locations
  Clone ID: PAT_MRT3847_57781C.1.pep
TQYVHGASQLMAIQIDAAINPGNSGGPAMTGRAAGGAALRKLXVARNQASXLPAAEIGHRIPGEGDNGECTGFCGLGKSWQGPGGVPPGHQFRTLADQTGVLVSRIKPRPAAYRALTKDDTREAYDGVPIANDGTVRFRNREGKTFDHLVSMKKTNEKALVRILRDGQEQELSIILQPIQPLVPVHQFDKLPSYYIFAGLVFIPLTQPYLHEYGEDWYNTSPRRLCERALRELPKKANQQLVILSQVLMDDINAGYERLAELQVLKVNETEIDNLEHLRQLVESCNTEFLRLDLEDDRVIVLNYGTAKIATSRILKRHRIPSSMSVDLLDTE

SEQ ID NO: 238934 - protein, 52 aa, Glycine max
  Clone ID: PAT_MRT3847_57782C.1.pep
WVLNQIFFSSWLVMKYINTRSDGEAVPGSYKDFSFFTKQLSSNHSFFFYMQF

SEQ ID NO: 238935 - protein, 202 aa, Glycine max
  Clone ID: PAT_MRT3847_57783C.1.pep
MAFAVTPKIITVSFDKQNQRRSFEGLFGKRYRVRVKRSQDHSVKCGIERSSSDGKKGGGGGGVSNSNYVVPLDNMANSSCITRPLAEILRDLNKRIPDTIVKHDRFIPWYHANRMLSFYAPGWCGEIRDVIFSDNGSVTVVYRLTVRGSDGEAYRESTGTISPSDGSIGDPVSAAEEIAFCKSCARFGLGLYLYHEDQMSNF

SEQ ID NO: 238936 - protein, 67 aa, Glycine max
  Clone ID: PAT_MRT3847_57784C.1.pep
SLLSRSVEFIFFLSLNSILPPSPLQMRKCPIKNCLCAYNSDLVYNLWLCARIDVSTLCFFGNHDYLV

SEQ ID NO: 238937 - protein, 62 aa, Glycine max
  unsure (1)..(62): unsure at all Xaa locations
  Clone ID: PAT_MRT3847_57785C.1.pep
MSVISRNIWPVCGSLCCFCPALRERSRHPIKRYKKFLADIFPRTPDEEPNERMIGEXCEYAS

SEQ ID NO: 238938 - protein, 323 aa, Glycine max
  Clone ID: PAT_MRT3847_57786C.1.pep
MGGRGHMGWFLFCCCSSSLLFFVASSSSVSPRRNLPIIAFEDGYTPLFGDHNLAIHRDGKSVHLSLDERTGSGFVSHDLYLHGYFSASIKLPADYTAGVVVAFYMSNGDMFQNNHDEIDFEFLGNIRGKDWRIQTNVYGNGSTSIGREERYGLWFDPAEDFHQYSILWTDSKIIFYVDDVPIREVTRTESMGGDFPSKPMTLYATIWDASDWATNGGKYRVNYKYAPYVAEFSDLVLHGCAVDPIEQHVAKCDNAPQSSEATTTIPSSGVTPAQRIKMENFRKKHMTYSYCYDKVRYKVPPSECVISSQEAERLRRFDPVTFG

SEQ ID NO: 238939 - protein, 195 aa, Glycine max
  unsure (1)..(195): unsure at all Xaa locations
  Clone ID: PAT_MRT3847_57787C.1.pep
FVLWXXXPXXFXQXXXVXPXSXIIFYVXXVXIXXXXXPXSMXXYFFSXPMTLYAPIWDASDWATDGGKYRVNYKYAPYVAEFSDLVLHGCAVDPIEQHVATCDNAQSSEATIPPSGVTPAQRIKMENFRKKHMTYSYCYDKVRYKVPPSECVINSQEAERLRRFDPVTFGGGRRHHGKRHRRSRGSQTETSASSF

SEQ ID NO: 238940 - protein, 106 aa, Glycine max
  unsure (1)..(106): unsure at all Xaa locations
  Clone ID: PAT_MRT3847_57788C.1.pep
TKVNISAVNVDSFGDXFFAKAPQKKKKKGGGFFFEAKKEKNSVFPQQKKDHQTAVAAAVLTANKGAPPLPSYWGAWFFKKAGVPPHPLLEEGKGGVPLVFDMVFVY

SEQ ID NO: 238941 - protein, 76 aa, Glycine max
  Clone ID: PAT_MRT3847_57789C.1.pep
GEGIIRVISFSQHLIYLSYLRVFIQVDERGKRKEFSINLLRSNTPLHTHFRSLTLEESCLIASSDGEGGKEGKGIF

SEQ ID NO: 238942 - protein, 58 aa, Glycine max
  Clone ID: PAT_MRT3847_5778C.1.pep
FYTNALLSVPSGPAKHYRVSIPLFYFHRNDGLSIGPKFFLSSSLVVRRKSPKVQVGPP

SEQ ID NO: 238943 - protein, 92 aa, Glycine max
  unsure (1)..(92): unsure at all Xaa locations
  Clone ID: PAT_MRT3847_57790C.1.pep
MDDAMGKYEKXELNLDAPEWQLXEPASDEPAKRSIVRSYKTTSTEARKEECIGTGNMNANGSDITSDDQNNLGPPAXAQIAGMAPVRSYKKN

SEQ ID NO: 238944 - protein, 58 aa, Glycine max
  Clone ID: PAT_MRT3847_57791C.1.pep
VQHHTQIRDARVWIIHPALWQCLTMRSARLEITEVSIWLSFAGVLYLDSKFKHACVCS

SEQ ID NO: 238945 - protein, 69 aa, Glycine max
  Clone ID: PAT_MRT3847_57792C.1.pep
NMGTAVVHILRRVTSLYKSKRHTNFTTAYTQILNSVVSYERTLFWNASCSSLSLILFPYPIQFARSFKP

SEQ ID NO: 238946 - protein, 94 aa, Glycine max
  Clone ID: PAT_MRT3847_57793C.1.pep
IHEVKINVSPGSSFHCTEPGWFRVCYANMDDMAVQIALQRIRTFVLQNKEVMVPNKKHCWHSNLRLSLKTRRFDDIMMSPHSPIPQSPLVKATI

SEQ ID NO: 238947 - protein, 64 aa, Glycine max
  Clone ID: PAT_MRT3847_57794C.1.pep
MGSLTVPPCIEGVIWTINKKIRTVSRAQVNLLREAVHDHAEKNARPIQPLNRRGIQLYAQKRKD

SEQ ID NO: 238948 - protein, 95 aa, Glycine max
  Clone ID: PAT_MRT3847_57795C.1.pep
MGSTKMESYFVFMNYDPEYGRLRADRTERGTHELDLYLDRKHDELLASALEPGTYKKTSSLVIVDAFAVEITEDQANVLRSAKGVRVVEKNEVPV

SEQ ID NO: 238949 - protein, 140 aa, Glycine max
  Clone ID: PAT_MRT3847_57796C.1.pep
RIPAATHASAAIRLFLGLGLKFPACHALSEMSDQSFFQFFKWIYQERYYVGRGLYERMSDYCRYVAFWLGVLGVKFTFAYFLQIKPLGEPTNIIIDLPSLTYSWHDLISKNNNNALAIGSLWAPGVAIYVMGIVIFCAVV

SEQ ID NO: 238950 - protein, 104 aa, Glycine max
  Clone ID: PAT_MRT3847_57797C.1.pep
KNPYLITSPKKWTPPSLFPPIQLKKSPRILFFTPALILPKKTGKMGAPPVRSNLIAPRAGEGGNSHPQENCLTYWGPVQPGRNHFFDTPPEHIPDSPHPSHSAG

SEQ ID NO: 238951 - protein, 111 aa, Glycine max
  unsure (1)..(111): unsure at all Xaa locations
  Clone ID: PAT_MRT3847_57798C.1.pep
ARGSNEAVVWCLANLARTAVGLGAXQNLLTCDVYTADGGQXAELYNRMLGILDETGGEGTHFLIHRGQKPYVVDRRTHPDTCYCRCGRRDHRRDNLTLRVLCMSRQRQALP

SEQ ID NO: 238952 - protein, 51 aa, Glycine max
  Clone ID: PAT_MRT3847_57799C.1.pep
FDLKFLNEIGCLSWTLQEIYINFLYTKKFDTPYFRNKLLRNLTDFPNLSDY

SEQ ID NO: 238953 - protein, 166 aa, Glycine max
  Clone ID: PAT_MRT3847_5779C.1.pep
MVVKVGINGFGRIGRIVMRNAIEHGDIEVTAVNDPFIDLDYMVYMFKYDSTHGRFKGSVEVKDGKLYINDKAVTVYNERDPAAIQWGAAGAEYIVESTGVFTTVDKASAHLKGGAKKVIISAPSADAPMFVCGVNLDAYKSEYQVVSNASCTTNCLAPLAKVIHDN

SEQ ID NO: 238954 - protein, 646 aa, Glycine max
  unsure (1)..(646): unsure at all Xaa locations
  Clone ID: PAT_MRT3847_577C.1.pep
TGLSLHPVLPLRQATFYILRSSGTIKYNPKNPFWFNRDRFVLSAGHGCMLQYALLHLAGFDSVKEEDLREFRXQWGSRTPGHHEIFETAGIVVTTGXPLGQGIDRAVVLARRSCTLCWTFLQASXRFFNLQTIAMFGDKTLRKADNNEAELLDSRRGLGNLIVLYDDIHMFIDWTIEIEFPESVDSRFEGLGWHVIWVKNGNNGYDDIRAAIKEAKAVKDKPTFIKVTTTIGYGSPNKANSYSVHGSALGAKEVDATRQNLGWSYEPFHVPEDVKKHWSRHTPEGATLEAEWNAKFAEYEKKYKEEAAELKSIINGEFPAGWEKALPTYTPESPADATRNLSQTNLNALVKVLPGLLGGSADLASSNMTLLKMFGDFQKDTPEERNVRFGVREQGMGAICNGIALQSPGLIPYCAXFFVFTDYMRGAIRLSALSEAGVIYVMTHDSIGLGEDGPTHQPIEHLASFRAMPNILMLRPADGNETAGSYKVAVLNRKRPSILALSRQKLPQLPGTSIEGVEKGGYTISDNSTGNKPDVILIGTGSELEIAAKAADDLRKEGKAVRVVSLVSWELFDEQSEAYKESVFPAAVSARVSIEAGSTFGWEKIVGAKGKAIGIDRFGASAPAGRIYKEFGITKEAVVAAAKELI

SEQ ID NO: 238955 - protein, 115 aa, Glycine max
  Clone ID: PAT_MRT3847_57800C.1.pep
VMSAEAGPLAISLAGPGRPQQGCLHCCRELRWVLCGPPDANFAAVCRRAPDVAGGTFCSRLSLHLMVAWCVMRRRRPLLAVSGRPFTSDFTTSLKIGALPPRLLDHTTHIYPASL

SEQ ID NO: 238956 - protein, 42 aa, Glycine max
  Clone ID: PAT_MRT3847_57801C.1.pep
QVKFSSNWKPRVISNVSIDLAKMKYEYVARDIDYFDFILASI

SEQ ID NO: 238957 - protein, 384 aa, Glycine max
  Clone ID: PAT_MRT3847_57802C.1.pep
MGKFALANILLVLLLNLSTLLNVLACPYCPYPSPKPPKKPPVVKPPVHKPPKPCPPPKSSPKPPHVHPPYVPKPPHYPKPPVHPHPPHVPKPHPKPPVHPHPPYVPKPPVVPVTPPYVPKPPIVNPPYVPKPPVVPVTPPYIPKPPVVTPPYVPKPPVVPVTPPYVPKPPVVPVTPPYVPKPPIVKPPIVYPPVVPKPPIVTPPYVPKPPIVKPPIVYPPVVPKPPIVTPPYVPKPPIVKPPIVYPPVVPTPPIVYPPVVPTPPVVTPPVVTPPSPPSETPCPPPPPPVVPYPPPAQPTCPIDTLKLGACVDVLGGLIHIGIGSSAQQTCCPVLAGLVDLDAAVCLCTTIRAKILNINIIIPIALQLLIDCGKTPPDGFKCADS

SEQ ID NO: 238958 - protein, 68 aa, Glycine max
  Clone ID: PAT_MRT3847_57803C.1.pep
MEEAKGVVKHVFLAKFKDDVTPERIEELIKDYANLVNLIPPMKSFHWYHLLYVFSFLSHACNAIQQPT

SEQ ID NO: 238959 - protein, 328 aa, Glycine max
  Clone ID: PAT_MRT3847_57804C.1.pep
MGKIALANVLLVLLLNLSTLLNVLACPYCPYPSPKPPPKKPPIVKPPVHKQPKPCPPPKSSPKPPHVHPPYVPKPPHYPKPPVHPHPPHVPKPHPKPPLHPHPPYVPKPPVVKPPYVPKPPVVNPPYVPKPPVVPVTPPYVPKPPIVNPPYVPKPPVVPVRPPYIPKPPVVPVTPPYVPKPPIVYPPVVPTPPIVTPPIVYPPVVPVPPLPPIVTPPNPPSETPCPPPPPPPVVPYPPPAQPTCPIDSLKLGACVDVLGGLIHIGIGSSAKQTCCPVLAGLVDLDAAVCLCTTIRAKILNINIIIPIALQLLIDCGKTPPDGFKCADS

SEQ ID NO: 238960 - protein, 43 aa, Glycine max
  Clone ID: PAT_MRT3847_57805C.1.pep
NPSPPPRGGGNLLSQLKPFIQNNKCRGTVLRYLDFGQTLSAVP

SEQ ID NO: 238961 - protein, 60 aa, Glycine max
  Clone ID: PAT_MRT3847_57806C.1.pep
KAKCLVSSKAKGLVSSKANLQSSYRVGVLRTMTNNNKKKKEFWKSYGNTQEFSSLCCNDF

SEQ ID NO: 238962 - protein, 66 aa, Glycine max
  Clone ID: PAT_MRT3847_57807C.1.pep
RRSFVLWHPLFHAVIFFHRSVLLFLSFWSVWHYSSGPGGSINELCLDHYTFTQDDVDCVCLLFNTR

SEQ ID NO: 238963 - protein, 154 aa, Glycine max
  Clone ID: PAT_MRT3847_57808C.1.pep
MDSLLANYASSDEEEDQQPSPPKTTTFSSLPQPKLSLFQSLPQPKSSLFQSLPPPKQPSTESSSLPNPNPNPDPKPQIEKTQPKRVVQFRPPIIPLPHPSQHDDDDDDDDDDEEEERNRRKKKLESSTQTSSVKSFLASIPAPRNTDTLGVKQV

SEQ ID NO: 238964 - protein, 172 aa, Glycine max
  Clone ID: PAT_MRT3847_57809C.1.pep
YCSWLAAGPVPIRSKFYFARTGWLAIALVPTPVAFILLAVSDSAAALKTGTALIGLSSGFIFAAAVAVTSELFGPNSVSVNHNILITNIPIGSLLYGFLAALIYNSARDNVPGELMADTLVCMGRKCYFWTFVWWGGMSVLGLTSSVLLFLRTKHAYDRFERHRISAQSVVS

SEQ ID NO: 238965 - protein, 52 aa, Glycine max
  Clone ID: PAT_MRT3847_5780C.1.pep
RLMHTVSELGSSFKRSDYLSLNIIFCVWDSVIGARFPLIICKLDRNLNSTRV

SEQ ID NO: 238966 - protein, 726 aa, Glycine max
  unsure (1)..(726): unsure at all Xaa locations
  Clone ID: PAT_MRT3847_57810C.1.pep
MATAPLTLHLCCLGRSLCKTLFLTPSPAALGSSPHVTFRGKFRRRISLSRRFSAGSTSREVEYELGFGGGVDEKYDVIVVGGGHAGCEAALASARLGARTLLLTLNIDRIAWQPCNPAVGGPAKSQLVHEVDALGGQIGKIADRCYLQKRVLNVSRGPAVRALRAQTDKRDYAIQMKSVVESTPNLSIREAMVTDILLGKNDNVEGVCTFFGMKFYAPSVILTTGTFMSGKIWVGRTSMPAGRAGESASLGLTENLQRLGFETDRLKTGTPARVDIRTVNFSGLEPQHGDEEVGWFSFDPEVHIEREQMCCYLTRTTSTTHQIIRENLHETPTYGGWVEAKGPRYCPSIEDKIVRFQDKESHQIFLEPEGRSVPELYVQGFSTGLPERLQLPLLRTLPGLENCSMLRPAYAVEYDYLPAHQCGRSLMTKKIQGLFFSGQINGTTGYEEAAAQGIISGINAARHADSKPVIVLERESSYIGTLIDDLVTKDLREPYRMLTSRSEHRLLXLRSDNADSRLTPLGREIGLIDDRRWKLYQDKQARISEEKKRLKSVRISGGDLAAEVTNLSGQPVKDFSTLESLLKKPHIQYEILDKHDFGDKSLSRMEKECVEIDIKYEGFILRQQSQLQQLVAKQHRPLPEDLDYYAMTTLSLEAREKLPKVRPQTIGQASRVGGVSPADITALVLVLEARRRKAQELRKYKMMNAVRANTQDDVPEVSLTEKVSSG

SEQ ID NO: 238967 - protein, 75 aa, Glycine max
  unsure (1)..(75): unsure at all Xaa locations
  Clone ID: PAT_MRT3847_57811C.1.pep
VSEQLLTAGVGTEHGELRAATAGGLTEAXVTGSNVVFPAVDKLMRMLILMRKMLPGNHQAVNGEWTVAGLAQRAD

SEQ ID NO: 238968 - protein, 133 aa, Glycine max
  Clone ID: PAT_MRT3847_57812C.1.pep
YRGFNVSCVGIIVYRGLYFGMYDSLKPVLLVGTLQDSFLASFALGWMVTIGASIASYPLDTVRRRMMMTSGEAVKYKSSFNAFSQIVKNEGSKSLFKGAGANILRAVAGAGVLSGYDKLQVLVLGKKYGSGGA

SEQ ID NO: 238969 - protein, 64 aa, Glycine max
  Clone ID: PAT_MRT3847_57813C.1.pep
IKYTLCQLIRCVLGFLTQNSCLINHQVLSEWHVTLYRSIPVTWTSLCIMYFSFNAPSMLELFLL

SEQ ID NO: 238970 - protein, 97 aa, Glycine max
  unsure (1)..(97): unsure at all Xaa locations
  Clone ID: PAT_MRT3847_57814C.1.pep
FSRPSERSEXYPLSVIAERTKLSIENVEHLLMKSLSVHLIEGIIDQVEGTVHVSWVQPRVLGIQQIKSLRDRLDSWTGKVHTALLSIEAETPDLIGS

SEQ ID NO: 238971 - protein, 71 aa, Glycine max
  Clone ID: PAT_MRT3847_57815C.1.pep
KPDHHPKRLENVSSLGENTKHNPHAKETTGTKKNYIGTEVTKTQRKVTHWQNCEPSQLGTANKGLKTQQTL

SEQ ID NO: 238972 - protein, 123 aa, Glycine max
  unsure (1)..(123): unsure at all Xaa locations
  Clone ID: PAT_MRT3847_57816C.1.pep
CQHLALTLIPSSGLDCQEIDIQVPVGMSMLEAAHENDIELVGAWERSLTTSIXKELVKDGEQYNKFKDQTDKXNDMLNRAIRLTETTPLGCQVIGXPEHDASRSAICDATTKLAVFSYVSYPS

SEQ ID NO: 238973 - protein, 129 aa, Glycine max
  Clone ID: PAT_MRT3847_57817C.1.pep
EPGGPAQPPDAHAPVDPPPGTTGGARARNTRTNTRNATPRRHDKPKKQPHTARRPQPPERHDNTDTQTKQRAAQTRHPPQRQPRTNQQAPKQSPTTQCGINNQRPKRSKAYQASRKRSQKNRNRRDPNP

SEQ ID NO: 238974 - protein, 175 aa, Glycine max
  Clone ID: PAT_MRT3847_57818C.1.pep
MFNQSQKAIRVPNRFLEYNTSEQDECAEEINELRAEFEIELQRLQLYLDGEAGFDDAQQEGVKVTLEDSSSKSHSSSFGEIIMEPQGATYDVSFGVPPIELERRLHELLEARLEERISELESALECKTQKLIKKEIEVTWWKDTAQLISQHVPETSRFTFPLDPDISLKLSQLVG

SEQ ID NO: 238975 - protein, 85 aa, Glycine max
  Clone ID: PAT_MRT3847_57819C.1.pep
STAASLFFFFSEFFFPLYILYSRRRGFFSTINPGPIAIQRHNARGIPTITHCCTVHASTSWLKSAHYRITHFTTSHLNRWISRRL

SEQ ID NO: 238976 - protein, 74 aa, Glycine max
  Clone ID: PAT_MRT3847_5781C.1.pep
LLHLAKRMQRSILQQKQDSPIWSYTSLLKPQINCFSMRLKSEEKIIDSNKQQKCKTYSSFLILRNIFKTDKSYG

SEQ ID NO: 238977 - protein, 138 aa, Glycine max
  unsure (1)..(138): unsure at all Xaa locations
  Clone ID: PAT_MRT3847_57820C.1.pep
MEEAPSMEMDTDSQEDQNIAPDVLPFARSYQLEALYKAIHENTIVYLETGSGKTLIAIMLLRSYAHQLRKPSPYIAVFLDPQVVLVSQQAEAVKRITDLKVGMYXRDMGVDFWDAATWKQEMEKHEVLVMTPAILLSC

SEQ ID NO: 238978 - protein, 73 aa, Glycine max
  Clone ID: PAT_MRT3847_57821C.1.pep
HPVAHVLQALPVLAASLASVALAIPSSAPCMPMLQQVSVSQLSIPIMLLPFLSLAWSAQETHRLKFCYLMSAR

SEQ ID NO: 238979 - protein, 94 aa, Glycine max
  unsure (1)..(94): unsure at all Xaa locations
  Clone ID: PAT_MRT3847_57822C.1.pep
STFLTPLYIIRTSNLQTQTPYXPAINERYCFSNGEHTFSIYSTDKPHMHSTHTNPRTDIHISGYDYTFRVXHFQSFLYVPTSTNKLCIQQVFHT

SEQ ID NO: 238980 - protein, 43 aa, Glycine max
  unsure (1)..(43): unsure at all Xaa locations
  Clone ID: PAT_MRT3847_57823C.1.pep
VLCENHGXXXLQLXVKRCXEIDXXRTTXLAXMDLTDCMXLWFX

SEQ ID NO: 238981 - protein, 168 aa, Glycine max
  Clone ID: PAT_MRT3847_57824C.1.pep
NHIILNPLKIGLDRKALREDDRRGIERRGGPSGVARSRHQHSLCEKEHKESTTMDSQGQTTSLQRLQNVEKRIVKVLELAGGVMDELASPVGPRKDVVQNHCLEFMQLIKDIQVALRDEIKSACEYRPFEKCDYGSRIANEICHKKVEFIMSQLDAMKQTIDEYHAAV

SEQ ID NO: 238982 - protein, 184 aa, Glycine max
  Clone ID: PAT_MRT3847_57825C.1.pep
MATGQVINKPPSLPPYPEMIREAIEALNEENGSNKSSISKYIESTYGGLPQAHKVLLNVHLAKMRESGVLVFWKNNYTKRDPNAPPRRGRGRPPKPKEPLPPGTVLSPPRPRGRPSKDPNDLQKPLKASVVGSGRPRGRPRKMAWPTGGLGEVSQASKAKPVTSNGRPRGRPPKVKAVFTEISV

SEQ ID NO: 238983 - protein, 157 aa, Glycine max
  Clone ID: PAT_MRT3847_57826C.1.pep
MAFSSFLGRVLFASVFILSAYQEFNSYGVDGGPAAKALRPKFDAFAHQVHSKVGFQLPDIDMKFLVAGAIALKGLGGILFILSSSFGAFLLLLHQVITTPILYDFYNYHSEDKEFIQLFIKFTQNMALFGALLFFIGMKNSIPRRQPKKKAAKTKTY

SEQ ID NO: 238984 - protein, 166 aa, Glycine max
  Clone ID: PAT_MRT3847_57827C.1.pep
HASAPRNTIKTPTLERKKSKSFKERSYDALGLSASTEASLSYSSNLITESPGSIAAVRREQMALQHAQRKMKIAHYGRSKSAKFERVVPLDPSSNLTSKTSEEEKRCSFITANSGYLRVQICIQILTPTFLYFVQCANLNVFFGYIDPIYIAYHDEEWGVPVHDDK

SEQ ID NO: 238985 - protein, 120 aa, Glycine max
  Clone ID: PAT_MRT3847_57828C.1.pep
PRVRRLREDDRRDSKAGFQLPDIDMKILVAGAIALKGLGGILFILGSSFGAFLLLLHQMIATPILYDFYYYDSEDKEFIQLFIKFTQNMALFGALLFFIGMKNSIPRRQPKKKVPKTKTY

SEQ ID NO: 238986 - protein, 63 aa, Glycine max
  Clone ID: PAT_MRT3847_57829C.1.pep
QVITTPILYDFYNYHSEDKEFIQLFIKFTQNMALFGALLFFIGMKNSIPRRQPKKKAAKTKTY

SEQ ID NO: 238987 - protein, 207 aa, Glycine max
  Clone ID: PAT_MRT3847_5782C.1.pep
MSSSMMTLSRRLYCSLLRTPNAYRHFSTDHLFDSDEADSAPDPPAPDAVQEEEKFVIDRPLENGLDVGIYRAILVGKAGQAPLQKKLKSGTSVTLLSVGTGGIHNNRRPRVDENPKDYANRSAIQWHRVSVYPQKLGDLVTKHVVPGSMLYVEGNLETKCFTDPITGIARRIREIAVRRNGRIVFLGEGGDAELQTLPKDLRAVGYY

SEQ ID NO: 238988 - protein, 77 aa, Glycine max
  Clone ID: PAT_MRT3847_57830C.1.pep
SWVLTPKSPSFPPGLKRKRMGEFQLPKGLKKKFSKPERGLMPIIGALEGPMLEKTLIFLFPRVQMAFFQPIKGGGLS

SEQ ID NO: 238989 - protein, 86 aa, Glycine max
  Clone ID: PAT_MRT3847_57831C.1.pep
MLWFKGCLSLIYIETFECETSFKIFEGKCNPPRGNRKTTNKENRLSPKIPSPSVNSGCPLVCVECKIQYSVFSGVFLDISYSSPSV

SEQ ID NO: 238990 - protein, 36 aa, Glycine max
  Clone ID: PAT_MRT3847_57832C.1.pep
ILTVMNGFQNMTSVLDERRGHRTLYPLQTVAFDLYP

SEQ ID NO: 238991 - protein, 83 aa, Glycine max
  Clone ID: PAT_MRT3847_57833C.1.pep
PRVRELTKCLTDQRNACKEARDNIEDAYNLIMKLVTEREILGTKGLNFQEELASAKGEISRLKSRINASEVAANNDHSADRWM

SEQ ID NO: 238992 - protein, 50 aa, Glycine max
  unsure (1)..(50): unsure at all Xaa locations
  Clone ID: PAT_MRT3847_57834C.1.pep
LPKKQLFTFSKHWYMQLTSPCYLFYNEKLYQSHXVWQLFILPKNTALINA

SEQ ID NO: 238993 - protein, 41 aa, Glycine max
  unsure (1)..(41): unsure at all Xaa locations
  Clone ID: PAT_MRT3847_57835C.1.pep
RNGGLNKKXREQGKVIRXCNCGKCXQREKGIERNVVRNIVE

SEQ ID NO: 238994 - protein, 176 aa, Glycine max
  unsure (1)..(176): unsure at all Xaa locations
  Clone ID: PAT_MRT3847_57836C.1.pep
MSAEKERETQVYLAKLAEQAERYEEMVECMKKVAKLDLDLTVEERNLLSVGASWRIMSSIEQKEESKGNEHNVKLIKSYCQKVEEELSKICGDILTIIDQHLIPSSASAEAXVFYYKMKGDYXRYLAEFQTDQERKEAAEQSLKXYEAASATANTDLPSTXHPSGLGLALNFSGFY

SEQ ID NO: 238995 - protein, 72 aa, Glycine max
  Clone ID: PAT_MRT3847_57837C.1.pep
RSWVFELRSFHRAQPVFSEALPDLFVGDRASQSFRTRCDGQVFRVRIWSRKLHLGLLPMGFLPVSLNRNRST

SEQ ID NO: 238996 - protein, 53 aa, Glycine max
  Clone ID: PAT_MRT3847_57839C.1.pep
VSKQVITLAAMTQSPNPLDSPLAYSGSTHLFTVSKSNSISINPQHHERYQAQD

SEQ ID NO: 238997 - protein, 157 aa, Glycine max
  unsure (1)..(157): unsure at all Xaa locations
  Clone ID: PAT_MRT3847_5783C.1.pep
MTSVYGVTYNGARXQIKRRLGEKGLITDDRLLYAASCYAAKVTLAALGEVFEAARGIMGWLGDCAKVIACENQAVRWTTPLGLPVVQPYCKTERYQIRTSLQLLALQREGSAVSVKKQRSAFPPNFVHSLDSSHMMMTALACNDAGLCFAGLKTTFY

SEQ ID NO: 238998 - protein, 35 aa, Glycine max
  Clone ID: PAT_MRT3847_57840C.1.pep
NLNFLGITYTRTITCGLTAFETRYHDWTSYTFKLK

SEQ ID NO: 238999 - protein, 42 aa, Glycine max
  Clone ID: PAT_MRT3847_57841C.1.pep
IMLFSYKSMTVAQSRNDLRFRLLFNHFLPVRMFIRVKHKLLS

SEQ ID NO: 239000 - protein, 314 aa, Glycine max
  Clone ID: PAT_MRT3847_57842C.1.pep
MDSEDFRSILESAGVDVWALMDAAIAVASADHAHELKRRRDGIVERLYAASSPPPLCRNCDAGDGGEIRTQSSPSAEEEKDPYGGLFDDEQRKILDIKEQLEDPHQSEDSLVELLQNLADMDITFQALEETDIGRHVNRLRKHSSNDVKRLVKLLVRKWKEIVDEWVKLKAPGEPGTAVMADEDSPQQRILQNGHRQIPDFAYSPNPHYGSFGSERNNIEAERKPKAIPRKEAPSKPSPSVTTPAPPTQNRQRESNFDPDRFASARKRLQENYKDAANAKKQRTIQVMDLHELPKPKNAFLGKNKGGTGQGRHW

SEQ ID NO: 239001 - protein, 28 aa, Glycine max
  Clone ID: PAT_MRT3847_57843C.1.pep
RCHVVLILKKNDIKKDILLFFKRAKSLS

SEQ ID NO: 239002 - protein, 74 aa, Glycine max
  Clone ID: PAT_MRT3847_57844C.1.pep
FSSNNFQFEKKNKVLSRVSLSSIIKKMRIIPGEVLLSLGLHFTGLRAVMKMNQNQKVVKLHPYPSSRASVLLLA

SEQ ID NO: 239003 - protein, 58 aa, Glycine max
  Clone ID: PAT_MRT3847_57845C.1.pep
PEHPALKWQALQLLKLAHITSVSASAVPCRHVIRSRGLDYIPYPLFLCKRCSKINRSG

SEQ ID NO: 239004 - protein, 34 aa, Glycine max
  Clone ID: PAT_MRT3847_57846C.1.pep
VLIHKKCVRLSRFPLKKNSPLNQFLRVKIYFLSL

SEQ ID NO: 239005 - protein, 55 aa, Glycine max
  Clone ID: PAT_MRT3847_57847C.1.pep
RKGIFIHILVLIIFRTFLLSTCDLCSEILFDTSFSNWLKLYKYYKYVACRLTSSS

SEQ ID NO: 239006 - protein, 91 aa, Glycine max
  Clone ID: PAT_MRT3847_57848C.1.pep
TCTPTIITWIFATPCPHIAVRVRRIPRQPAFHFTSIIRSNLDTECVITMRYMISRFKRTCGPFVHHQQPRLVYHRFLVCVCFFFLSLSFFY

SEQ ID NO: 239007 - protein, 138 aa, Glycine max
  Clone ID: PAT_MRT3847_57849C.1.pep
LLVRASLEPLPLVPQGNRLLNYCGTLRCARYPLTTTVGWRLCPPDIIRALILLLVLSTACYNGFTGITLRARGYLFPVYALFNLYWLNRTRPFRFLPPLITPKVLLGPTRFDSPTPPPPHPPPPQRQEDRHTVMTGNL

SEQ ID NO: 239008 - protein, 45 aa, Glycine max
  Clone ID: PAT_MRT3847_5784C.1.pep
CLIIPNYRLGLGYVTIRFNKIQSIFKASPNRWLGLRSSCKNQKEV

SEQ ID NO: 239009 - protein, 176 aa, Glycine max
  unsure (1)..(176): unsure at all Xaa locations
  Clone ID: PAT_MRT3847_57850C.1.pep
ASLALPYLHILNTLWICEKIANTGLISVQHPTIMDKVSXHLHLRSETPCDLRSYDGAYRHPAMYQRHCLRNNSITALHPPAMPTCKATTXDLPADRTSASPVFVSAPSDKGHCVXDFLIERVXAAVSKTASAPIEXVKPGTHNQDEMINTERLYKPYKCIGDRFKRTMADEGAISL

SEQ ID NO: 239010 - protein, 313 aa, Glycine max
  Clone ID: PAT_MRT3847_57851C.1.pep
MLQTTCIILFSVVAIFLPHGTAMLNLTLPGQHPDPEAVAREVHRKVNASMARREMLGVSEKEVASCLTGNPIDDCWKCDPDWANNRQRLADCAIGFGQNAKGGKGGQFYIVTDSSDEDPVNPKPGTLRYAVIQNEPLWIVFPSNMMIKLSQELIFNSYKTIDGRGADVHIVGGGCITLQYISNVIIHNIHIHHCHPSGNANVRSSPEHYGYRTESDGDGISIFGSRDIWIDHCTLSRCKDGLIDAVMGSSAITISNNHFSHHNDVMLLCHSDHYLPDSSMQVTIGFNHFREGLVQRMPRCRRGYIHVENNDFT

SEQ ID NO: 239011 - protein, 80 aa, Glycine max
  Clone ID: PAT_MRT3847_57852C.1.pep
TFLKKKKKLWSWWGTKTWWKLGKGLALSFWTKKQGGRLLKSLPGAKSPSLKKKPNCSRLRANASPSRGALFTIPKCKFLC

SEQ ID NO: 239012 - protein, 40 aa, Glycine max
  Clone ID: PAT_MRT3847_57853C.1.pep
KKNSPLSPPFRSLLGKCPQNKCENLMSFIGKFINKIFPSN

SEQ ID NO: 239013 - protein, 60 aa, Glycine max
  Clone ID: PAT_MRT3847_57854C.1.pep
LDKSVGKILFLNQILNKKYQASIKQVSKCVDFKNMFDTTTLQTKKYSYFVESSLLLLYLF

SEQ ID NO: 239014 - protein, 215 aa, Glycine max
  Clone ID: PAT_MRT3847_57855C.1.pep
MISNPELIHYACIARSETILGQHQSEKEPNMEALAAQCVAQTPPNHSLFSHTVNHRTYTFLIDPPFVFFSISHHSLLKSQTLPFLHRIRSSFRQTLPPTNNHHFAPLSFQSQFHTIFQNALHDNNRSQQQQQPSPPLNPPAQGLKKKKRPNDAPATLDVSDDAVSLKPQLHNHSNKAKHVWKKHVWVLLLLDLFVCAVLFVIWLWVCSGFKCMAY

SEQ ID NO: 239015 - protein, 122 aa, Glycine max
  Clone ID: PAT_MRT3847_57856C.1.pep
PRVRGRVGGRVGGRVGSNPNSTPSSKTRFTTTTDRSNNNPSPPLNPPAQGLKKKKRPNDAPATLDVSDDAVSLKPQLHNHSNKAKHVWKKHVWVLLLLDLFVCAVLFVIWLWVCSGFKCMAY

SEQ ID NO: 239016 - protein, 76 aa, Glycine max
  Clone ID: PAT_MRT3847_57857C.1.pep
YSHRYFSCLEKPLFVVYIIHSRALLGRAASDYYQFTPIASGLEKNKKKKFKGRPPFFFFFLIQTQLLSFKFARFGL

SEQ ID NO: 239017 - protein, 59 aa, Glycine max
  unsure (1)..(59): unsure at all Xaa locations
  Clone ID: PAT_MRT3847_57858C.1.pep
LVVSTMWMLEGVFLWVLLLMLWMXVLHCKYLXELQSRSNQVRRSLVCLDTRAQACNVRM

SEQ ID NO: 239018 - protein, 52 aa, Glycine max
  unsure (1)..(52): unsure at all Xaa locations
  Clone ID: PAT_MRT3847_57859C.1.pep
XXXSGXKXLLLNXETWWXXTALPGXALAAXXTSQKDSXXREKDXGXKHFGFS

SEQ ID NO: 239019 - protein, 65 aa, Glycine max
  Clone ID: PAT_MRT3847_5785C.1.pep
IQVEIKSFPISLSVNYSPPCTHRNSVWGLKIKFLNRFPLKKPNFWWYFIYHYYAKMFPIIFKEPD

SEQ ID NO: 239020 - protein, 75 aa, Glycine max
  Clone ID: PAT_MRT3847_57860C.1.pep
ILKKFQIIKKNIKNCVIHPGKLNGETLYAVCETKKTFFFFFSKEGLQSNIKDRLAGNPMAPIWCNASGNHPMVIP

SEQ ID NO: 239021 - protein, 42 aa, Glycine max
  unsure (1)..(42): unsure at all Xaa locations
  Clone ID: PAT_MRT3847_57861C.1.pep
XICXGSXSWTEAGNGEXTLRVGXXXLXSDLSXGLXFXRLVXA

SEQ ID NO: 239022 - protein, 64 aa, Glycine max
  Clone ID: PAT_MRT3847_57862C.1.pep
LPISMAFCMVLKFLFLVLKKKKTAPSLRYMKCIFLLFVLCLCIRMEALFELHRYSPSAVMSALI

SEQ ID NO: 239023 - protein, 107 aa, Glycine max
  unsure (1)..(107): unsure at all Xaa locations
  Clone ID: PAT_MRT3847_57863C.1.pep
LKNASRPLSHALLPLLCVCPLITLTHHLLTLRSALPNVLQPRLSLWHPPGLSRVXLICTHVPLFGDRPESPVVVDPPIILHPSAFLIVLVEFQTVVEVTGPWTVRSR

SEQ ID NO: 239024 - protein, 66 aa, Glycine max
  Clone ID: PAT_MRT3847_57864C.1.pep
LGPWEKNLSLPNFRDHPGPRSCFRIVWVPLTAKNFGKTLLGFPPWGEFLAPKKALKGPLFGGFTPF

SEQ ID NO: 239025 - protein, 65 aa, Glycine max
  Clone ID: PAT_MRT3847_57865C.1.pep
EHRLQESVIVESLKEQIRALSKLAKSSSRKTISSEDSPFHLRSRYLLFCYKSCILFYIILENNSQ

SEQ ID NO: 239026 - protein, 126 aa, Glycine max
  Clone ID: PAT_MRT3847_57866C.1.pep
SCLQFQWRRQEIEACTSGCPFGEGCHFLHYVPGGFKAVSQLINVGSNPVTPQVGRNPVPPSFPDGSSPPVVKTRLCNKFNTAEGCKFGDKCHFAHGEWELGRPTAPSYEDPRVLGQMPSSRVGGRV

SEQ ID NO: 239027 - protein, 297 aa, Glycine max
  Clone ID: PAT_MRT3847_57867C.1.pep
MDRKRGRPEAAFNFNGGAKKSRPETDSFPTGLGSKSKPCTKFFSTSGCPFGEGCHFLHYVPGGFKAVSQLINVGSNPVTPQVGRNPVPPSFPDGSSPPVVKTRLCNKFNTAEGCKFGDKCHFAHGEWELGRPTAPSYEDPRVLGQMPSSRVGGRVEPPHPAHGAAASFGASATAKISINASLAGAVIGKNGVNSKQICRVTGAKLSIRDHDTDPNLRNIELEGSFDQIKQASAMVHEVILNVSSASGPPMKSFTSQTSAPTSNFKTKLCENFAKGSCTFGERCHFAHGNDELRKSGM

SEQ ID NO: 239028 - protein, 70 aa, Glycine max
  Clone ID: PAT_MRT3847_57868C.1.pep
ELVVKCNHGADSVHKWKRAIYGVHAHEEAHIGFTWVLGVGVLDARDGVVVSIIAWMLKRQEKERVTERID

SEQ ID NO: 239029 - protein, 64 aa, Glycine max
  Clone ID: PAT_MRT3847_57869C.1.pep
SLFFHIKKLFFIATMNDDESFLLLHGKEKLSSCSKPPITVFVLCYSAVARTEDMIISIKIEGIE

SEQ ID NO: 239030 - protein, 55 aa, Glycine max
  Clone ID: PAT_MRT3847_5786C.1.pep
RKQLYFLLIHAHISIIIFDIVIGKINSEVAFIRTVSFLFFICHHMDTSTTRITFQ

SEQ ID NO: 239031 - protein, 51 aa, Glycine max
  Clone ID: PAT_MRT3847_57870C.1.pep
RHTDVPDTGVLCDVLWSDPSKDVQGWGMNDRVVFITHLVADKGLTHFIQKQ

SEQ ID NO: 239032 - protein, 71 aa, Glycine max
  unsure (1)..(71): unsure at all Xaa locations
  Clone ID: PAT_MRT3847_57871C.1.pep
WINLGVIFSKIGIHRIILFYMIEVNEDLSPWITGYLVSRRIXPKSGAXKTTLALDVLTQAPSLRSNVFSPP

SEQ ID NO: 239033 - protein, 80 aa, Glycine max
  Clone ID: PAT_MRT3847_57872C.1.pep
PLSSDGDDGCDDTHSHTAEMVVASNSSFLFPPNASTAERCVLQSTVLPCKTTCIELLIWIVFCRFGNVQKWWCLWEQLGF

SEQ ID NO: 239034 - protein, 85 aa, Glycine max
  Clone ID: PAT_MRT3847_57873C.1.pep
QRRRLDHAGKDGGLNNLRGCAGGLSPVWFPSDTTRFTPGRVGRKAAEDMGQLQQPSPQRAGLLLSLHSFASFNLWTIWCSQVLEG

SEQ ID NO: 239035 - protein, 54 aa, Glycine max
  Clone ID: PAT_MRT3847_57874C.1.pep
RGFGKKGVRIILFPPLLPPNIDIPLLPLYILENICRVYFSAYLSDVVKNGECIN

SEQ ID NO: 239036 - protein, 101 aa, Glycine max
  unsure (1)..(101): unsure at all Xaa locations
  Clone ID: PAT_MRT3847_57875C.1.pep
INARXAXXXGXRSXXGPDXPGXARESXARDEEXRXADXPNXPXPRXXREXXKPGPARXEXXDHPXQTEETQXPKTXXXKEDRHPGKTRKXQXSKXXXPQPR

SEQ ID NO: 239037 - protein, 46 aa, Glycine max
  Clone ID: PAT_MRT3847_57876C.1.pep
FPQKFVSPSKWLCALKGCTLKSSGPHKVNRSISSYGESLFFPIHKD

SEQ ID NO: 239038 - protein, 146 aa, Glycine max
  unsure (1)..(146): unsure at all Xaa locations
  Clone ID: PAT_MRT3847_57877C.1.pep
GGGGNPKKNPIKKTEGGCGGNGKRKPKXXDLGVTTAPPMGEKKKKVLGKTKSKQGGGTKWKAPPGQCRHLCLGPKGEGPRFVIPRGVKTASKKVSLLPPPGRKKAPPLFLPHFSPPRRKRLRVFKNNFFFKVPRQAQIFFFFFPAC

SEQ ID NO: 239039 - protein, 109 aa, Glycine max
  Clone ID: PAT_MRT3847_57878C.1.pep
ALSSLKKAFMVAGGSKSWRPKPPNLFAFLELCQEQNHMESAEVLIGLLGRPKFSKIKVYASTIGPPDCPLANGELPSKIDITDKTDDAVASENMDDAPQMLLTHLKRRF

SEQ ID NO: 239040 - protein, 73 aa, Glycine max
  Clone ID: PAT_MRT3847_57879C.1.pep
TLHGDRNRPMPNRCSLVMSSFNSVEHLRRTHIMTTHAPLCSSRLWVKLFYLVKLSRFHMKLVVLYEQDCFVAS

SEQ ID NO: 239041 - protein, 57 aa, Glycine max
  Clone ID: PAT_MRT3847_5787C.1.pep
RQKMCSQRFSPQPIVQQRLFRVPLPSPYVVMPAPVPRITSCADLAQKKTNSSFLARS

SEQ ID NO: 239042 - protein, 158 aa, Glycine max
  Clone ID: PAT_MRT3847_57880C.1.pep
ELHLPITILFYFSPLCCEFLIYQGFKKLSTIAIVATTSRFWRFRDYNCSHISHICLQLPQHQGLQRNRDYDCNSKPCNLFFSKCSFDLLAICIMVSSINCECTAAAMIIRFHGYFFMQVQNEVIPCQILLCLKDFPKKERATFLPLIVCCNIFCLFSQ

SEQ ID NO: 239043 - protein, 56 aa, Glycine max
  Clone ID: PAT_MRT3847_57881C.1.pep
ARVVIKRKAGRSRGIGFVPMFCKTKKNKAVAAFNGESLAARAIKGSGAKARPRGGS

SEQ ID NO: 239044 - protein, 94 aa, Glycine max
  Clone ID: PAT_MRT3847_57882C.1.pep
GTMKASRVSSRMKRKKLGLKRKRKRGFFKRIQATFFDKSGKDGLVEVTLHFMNNSSRRETPFTREQRIPSRFLKNLTRNGGSNRKNLKKMVHYP

SEQ ID NO: 239045 - protein, 124 aa, Glycine max
  unsure (1)..(124): unsure at all Xaa locations
  Clone ID: PAT_MRT3847_57883C.1.pep
SIILTTGSYLNVREHDRFEIISNDHGNRTTPSYVXFTVTERLISDAAXNQVYMNPINTIFYANRMIGRRFSDSSDHSDIKLXPFKVIPVAADNPMIVDNYNDVKKLFVAEEISFMLLIKIREIA

SEQ ID NO: 239046 - protein, 75 aa, Glycine max
  Clone ID: PAT_MRT3847_57884C.1.pep
ATDHKKIPTIPNRTKNHAPPQKGAVVSHDLSPSISVRNPTLSSQRYSNLTYRLPPHNHHIRKISMPFNPNSSLIY

SEQ ID NO: 239047 - protein, 495 aa, Glycine max
  Clone ID: PAT_MRT3847_57885C.1.pep
RLSNNILNTLNGPIPTTLGKLAKLRFLRLNNNSLTGGIPISLTNVSSLQVLDLSNNHLKGEIPVNGSFSLFTPISYQNNLGLIQPKYTPSPVSPTPPPASSGNSNTGAIAGGVAAGAALLFAAPAIALAYWRRRKPQDHFFDVPAEEDPEVHLGQLKRFSLRELQVATDNFSNKHILGRGGFGKVYKGRLADGSLVAVKRLKEERTQGGELQFQTEVEMISMAVHRNLLRLRGFCMTPTERWLVYPYMAFGCVASCLRERQQSQPPLGWPERKRIALGSARGLAYLHDHCDPKIIHRDVKAANILLDEEFEAVVGDFGLAKLMDYKDTHVTTAVRGTIGHIAPEYLSTGKSSEKTDVFGYGVMLLELITGQRAFDLARLANDDDVMLLDWVKGLLKDRKLETLVDADLQGSYNDEEVEQLIQVALLCTQGSPVERPKMSEVVRMLEGDGLAEKWEQWQKDETFRQDFNNNIHHPNANWIVDSTSHIQADELSGPR

SEQ ID NO: 239048 - protein, 208 aa, Glycine max
  Clone ID: PAT_MRT3847_57886C.1.pep
MALCSSLSLVSPIKLTSKSFLSPTPVSWHGILIKNNTSTRFLLKAGFNEIEPDLSEDPRDQFATNGVDADDFVYGIYDDHHTYHEGEQKGTFWGSIKEEMAEAEPPTGFQGLISWLFPPAIALGVYFNVPGEYLYIGAGIFTIIFCIIEMDKPDKPHHFEPHIYNMERGARDKLINDYNTMSIWEFNEKYGDLWDTTIPIKKDDIMKR

SEQ ID NO: 239049 - protein, 57 aa, Glycine max
  Clone ID: PAT_MRT3847_57887C.1.pep
KRHSNIPAHTSPCFRVKKGDLFFFGQSGPFFKTVGFNFFKVFPPGSSTGAKKAFFGM

SEQ ID NO: 239050 - protein, 50 aa, Glycine max
  unsure (1)..(50): unsure at all Xaa locations
  Clone ID: PAT_MRT3847_57888C.1.pep
XXRXXXTXXEXQLSXTARGNKIGWTHPXRGELSKPGAPRAXFRAYVRVXC

SEQ ID NO: 239051 - protein, 328 aa, Glycine max
  Clone ID: PAT_MRT3847_57889C.1.pep
LGVSRLCLRLPPRLATPDADLMVPFQLAALKTIGEEDKYFSKVSLRMPSFGITVKPSLLDLPKPTSSVDGSSGASLSNALSEMSVDGWDGIALEYSVDWPLHLFFTQEVLSVFRRVCLCLLPLARTQMELEKLWASVMHQYHSDFPKHRNDQEKCSEAQQKRQRFRPMWRVREHMAFLVRNLQFYIQVDVIESQWNILQSHIQESHDFTELVGFHQEYLSALISQTFLDIGSVSRILDSIMKLCLQFCWNIENQDNCSNTSELEHIAEEFNKKSNSLYTILRSSRLAGSQRAPFLRRFLLRLNLNSFFEATAARGVLNVVRPRPTLPV

SEQ ID NO: 239052 - protein, 529 aa, Glycine max
  Clone ID: PAT_MRT3847_5788C.1.pep
FGFSSKRTLNDASDLAVKLPSFSTGISDDDLRETAYEIILGCAGATGGLIVPSKEKKKDKKSSLIRKLGRSKSGSVVSQSQNAPGLVGLLETMRVQMEISESMDIRTRQGLLNALVGKVGKRMDTLLIPLELLCCISRSEFSDKKAFIRWQKRQLKVLEEGLVNHPAVGFGESGRKTNELNSRFRPTRPAEFLPSSTGELQRTECLRSLREIAIPLAERPARGDLTGEICHWADGYHLNVRLYEKLLLSVFDMLDEGKLTEEVEEILELLKSTWRVLGITETIHHTCYAWVLFRQYVITREHRVLLHALEQLNKIPLMEQRGQQERLHLKSLRSKVEGERDMSFLQSFLTPIQRWTDKQLGDYHLHFNEGSATMEKIVAVAMITRRLLLEEPETSTQSLPISDRDQIEIYISSSIKNAFSRTVQVVDRVDMSHEHPLALLAEELKKFLKKESASFLPILSQRHPQATVVSASLVHKLYGHRLKPFMDSAEHLSEDVISVFPAAESLEQLIMALITSVCHEEDAEILLKN

SEQ ID NO: 239053 - protein, 61 aa, Glycine max
  Clone ID: PAT_MRT3847_57890C.1.pep
LSIHSFAHSYFYWHKSLTCPTYIWIKNTCLAPYPSLPSMTGDTAPNYPNSIPQTSIDKILF

SEQ ID NO: 239054 - protein, 434 aa, Glycine max
  unsure (1)..(434): unsure at all Xaa locations
  Clone ID: PAT_MRT3847_57891C.1.pep
MDIVSRALLFPLAILVMILGTPYSSASGKSESNVKTAVFLSPKFELGPGSVANKYDYDIDFPRGHIALKSFNAEVVDEAGNPVPLHETYLHHWVVGRYYQPKYVTTHTNYDGHRILHNSDHIFVRNSGLCQRDTLGQYYGLGSETRGTATDVPDPFXIAVGDPAEIPEGYEEKWMVNIHAIDTXGVVDRTGFTEXVSILYSVIKEAHGEPLSSXYKGGYYXCYDQTQCRLREGFDGPKRSLYLRYIVEWIEWNKYIQPVKIYILDVTDTLKISDDSSGMIPEHDCKTEYEVESCSTGQKNGNGCLDVKRTSLPMQKGGYVIYGVAHQHSGATGSTLYAQDGRVICSSIPRYGKGKXAGNEVDYIVGMSTCYPQPGSVKIIDGETITLESNYSSSRGHTGVMGLFYLLVAEQLPHQHFRYSSRSSFFMNINSIIH

SEQ ID NO: 239055 - protein, 282 aa, Glycine max
  Clone ID: PAT_MRT3847_57892C.1.pep
MNERSRDEASPQLLDLISNEREWQMNKRNEGKSSEERKLELRLGPPGEDWSLGGKMKNNNTEREDQSLLSLGCFSPNINMFSPSSANTAVSQPNTSQKRTAPAPVVGWPPIRSFRKNLSSSSSASKPPPPPESQAEQQHNKVAGKKPVDNYANNKGLFVKINMDGVPIGRKVDLNAYDSYENLSSAVDELFRGLLAAQRDSSAGGVHNKQEEEKAITGLLDGSGEYTLVYEDNEGDRMLVGDVPWHMFVSTVKRLRVLKSSELSAFTLGSKQDKIPLDSAMK

SEQ ID NO: 239056 - protein, 222 aa, Glycine max
  unsure (1)..(222): unsure at all Xaa locations
  Clone ID: PAT_MRT3847_57893C.1.pep
MDERSRNEASPQLLDLISNEREWQMNKRNEGKSSEERKLELRLGPPGEDWSLGGKMKNTEREESLLSLGCFSPNNGXFSPSSANTAVSQPNTSQKRTAPAPVVGWPPIRSFRKNLASSSSASKPPPESQAEQHNKVAGKKPVDNYANNKGLFVKINMDGVPIGRKVDLNAYDSYENLSSAVDELFRGLLAAQRDSSAGGVHNKXEEEKAITXLLDGSGEYTL

SEQ ID NO: 239057 - protein, 136 aa, Glycine max
  Clone ID: PAT_MRT3847_57894C.1.pep
VWCEQKMNERSRDEASPQLLDLISNEREWQMNKRNEGKSSEERKLELRLGPPGEDWSLGGKMKNNNTEREDQSLLSLGCFSPNINSNAFQSKASHPWPNYHHHGQGNNKKALFFIISSVPIINPTCDDGEKMLLAL

SEQ ID NO: 239058 - protein, 77 aa, Glycine max
  Clone ID: PAT_MRT3847_57895C.1.pep
EGKCESSNLSKKLTEIFRSFASVYRHFKSSFRKKKKKKTHSSHYLVVMYATSFIPCSFHQTIEPKRQIRKSLQVFSR

SEQ ID NO: 239059 - protein, 36 aa, Glycine max
  unsure (1)..(36): unsure at all Xaa locations
  Clone ID: PAT_MRT3847_57896C.1.pep
RGLRWRIRIIXINKNYXYRLLNHILMVNILKXKYTQ

SEQ ID NO: 239060 - protein, 95 aa, Glycine max
  Clone ID: PAT_MRT3847_57897C.1.pep
PFLFPQSLLAYNLSSGNVPITLSSENQITNECYAANLHVPALHQILQARHTESNIGECNMPSNGYPLTKLAFRPWRTSTTLDYQPKLMATVILSS

SEQ ID NO: 239061 - protein, 90 aa, Glycine max
  Clone ID: PAT_MRT3847_57898C.1.pep
GCEKTTEGDEVYTQVTLLPQAELEGMYLEGKELEELGAEEEGDDRSPTKSTPHMFCKTLTASDTSTHGGFSVPRRAAEDCFPPLDYKQQR

SEQ ID NO: 239062 - protein, 47 aa, Glycine max
  Clone ID: PAT_MRT3847_57899C.1.pep
AHGIAIIEPRLTVKKILLILDDGYKREPSQAIAGRPGWPDSCCRMII

SEQ ID NO: 239063 - protein, 166 aa, Glycine max
  Clone ID: PAT_MRT3847_5789C.1.pep
VEANNSGRIIPREGVDTEYDSACKAVKEIESSLLKHLKEQMKLLGSTSITYVNVGKDTYLLEVPENLSKNIPRDYELRSSRKGFFRYWSPDIKVFLRELSHAESEKESLLKSTLQRLIGRFCEHHAKWKQLVSTTAELDVLISLAIAGDYYEGPTCRPIFVGTLCT

SEQ ID NO: 239064 - protein, 66 aa, Glycine max
  Clone ID: PAT_MRT3847_578C.1.pep
YRPLLLDSIFIMTQQSFSLSLFIYLQNPCQVRLILSKLPYIVPILSSKVQLSCIGYRVRIKSCSHN

SEQ ID NO: 239065 - protein, 88 aa, Glycine max
  Clone ID: PAT_MRT3847_57900C.1.pep
LQRSRPSMENNLNRETEGHGLPKIPSLVQHISSNDEGNFDNGDLKNLSSSFKENETILAGSQGDEHAAINHRNKHSVSINIPFSCVEF

SEQ ID NO: 239066 - protein, 120 aa, Glycine max
  Clone ID: PAT_MRT3847_57901C.1.pep
NHRLAGSILIPIKPFQRFFWKLKFVVEEMLIGHADHISESRSLKDQILAYSGSELSDDEQEGCLEQILYSASFEEHARNCVKYDTVIWLAISLLLVLAWGIGLLMLLYLPIRRYVLQKDL

SEQ ID NO: 239067 - protein, 88 aa, Glycine max
  Clone ID: PAT_MRT3847_57902C.1.pep
RPVIHKTYCFMLYTMRTELGPYLILQLHLSLIMRHEYWTQQIPIDSEGRHGSSRQRPYGDANYAALGCDARAATAHGRLPNPSKGRHF

SEQ ID NO: 239068 - protein, 34 aa, Glycine max
  Clone ID: PAT_MRT3847_57903C.1.pep
APVDLGSELESLATEAHYSKSASLLWIAWVAIGR

SEQ ID NO: 239069 - protein, 54 aa, Glycine max
  Clone ID: PAT_MRT3847_57904C.1.pep
APLIGVPPPGFFKVLGKGVLPPNHPFVVKAQLFSQIPQKKIKEAGGAVFFPAWV

SEQ ID NO: 239070 - protein, 48 aa, Glycine max
  Clone ID: PAT_MRT3847_57905C.1.pep
LYRVGKLGKDPFDPPLRTSIPSSILKLEILLQRHEIIGKKSLPSPFNL

SEQ ID NO: 239071 - protein, 88 aa, Glycine max
  unsure (1)..(88): unsure at all Xaa locations
  Clone ID: PAT_MRT3847_57906C.1.pep
KTIVAQKGGGIYAYIKLSHGWPLFGSPLQLICIKGSDAVNRPSLGFHCTVEKLANSLDTPVRXQNISIFVDAVQQVLMDHVAARSSGR

SEQ ID NO: 239072 - protein, 358 aa, Glycine max
  unsure (1)..(358): unsure at all Xaa locations
  Clone ID: PAT_MRT3847_57907C.1.pep
MKNSQSTQELQSPAQASRESQSEQPKNHTTDAPVTDSVSASASSNDSKKISRQDIDLVQNLIERCLQLYMNKDEVVKTLFARAKIDPGFTTLXWQKLEEENTDFFRAYYIRLKLKRQILLFNHLLEHQYHMMKYPLPTKIPLAPIQNGVHPMPVNNLPMGYPVLQKSSIPAAGQPHLDSMGSGISSCHVVNGVLASSNSHPIRISGNGMVMDHSAPVIPPNSAMSSLSEMPVSPTSVASNGHFPFTPSEISGMGTDTSILDTAFTSDVASSVGLQLAPDNGTGISRSLDQIQWNFSLSDLTADLSNLGDLGALGNYPGSPFMQSDSDILLESSDQKDIVDDFFANTEPPGSPSDEEKS

SEQ ID NO: 239073 - protein, 216 aa, Glycine max
  Clone ID: PAT_MRT3847_57908C.1.pep
AREDDRRALFEEMEASSIKLDTIACAALMRSFNKGGQPGRVLSLAESMREKEIPFSDTIFFEMVSACSILQDWRTAVDMIKYIEPSLPVISSGCLNQFLHSLGKSGKIETMLKLFFKMLASGADVNLNTYSILLKNLLSSGNWRKYLEVLQWMEDAGIHPSKEMYHDISSFSQKCCGNENAAVIRERLESLKREFGDQISTSQPCESLVMESHSFA

SEQ ID NO: 239074 - protein, 206 aa, Glycine max
  Clone ID: PAT_MRT3847_57909C.1.pep
KNSIGVLEHATRGKSGLPSGFVGVDVLGYSLTILRDICAQDGVRGNTEDSNDVVDALLSYGLIELLLYLLEALEPPAIIRKGLKQCENQDGASCSFKPCPYKGFRRDIVALIGNCVYRRKHAQDEIRHRNGILLLLRQCVTDEDNPFLREWGIWSVRNMLEGNDENQKVVAELEIQGSADVPEITSLGLRVEVDQRTRRAKLVNIP

SEQ ID NO: 239075 - protein, 215 aa, Glycine max
  Clone ID: PAT_MRT3847_5790C.1.pep
AAVATVTEYMVNGSLRNALQKNGRNLDKRKRLLIAMDVAFGMEYLHGKNIVHFDLKSDNLLVNLRDPHRPICKVGDLGLSKVKCQTLISGGVRGTLPWMAPELLNGSSSLVSEKVDVFSFGIVMWELFTGEEPYADSRAESARGGIVNNTLRPPVPEFCDPEWRLLMERCWSSEPSERPSFTEIANGLRSMATKISPKGQNQQQQPAVPQSQVQK

SEQ ID NO: 239076 - protein, 77 aa, Glycine max
  Clone ID: PAT_MRT3847_57910C.1.pep
NILKEQNLSTHDIDHMLAYVPLTKLIVILIILLLKHFGSSKQCPVLCRSSSALFQHILYVAVSLTHCDQFPFPTHFG

SEQ ID NO: 239077 - protein, 102 aa, Glycine max
  Clone ID: PAT_MRT3847_57911C.1.pep
VVLVGAKEHHFLKDLVKNVRNRPSQGGNCFPAGPTELSNQSTASGDDDRADQLVLVDNQNILKLGPSKPSTKRTVNMGVYHSNTQGDLYSIEPTRQRMISGT

SEQ ID NO: 239078 - protein, 139 aa, Glycine max
  Clone ID: PAT_MRT3847_57912C.1.pep
LLLPSPTHVRILPSMPHLRVPDGPVSAPGFANLYFIAWLWARADPEGLGRRFRLQGATRAARSRPPRIGIGGSRQAAAGWGGLARQASQHLHFPTATVGRQPPTQRFKGPGFSERPQDAVVSGSLRGKEGETASLSPDR

SEQ ID NO: 239079 - protein, 172 aa, Glycine max
  Clone ID: PAT_MRT3847_57913C.1.pep
KRRALMARSLILPVENFRATVFPVVYSVKAVASGGVEVIRKLSKASSTSASNADAEVDSHAEKLVGVSDVLTHLAPFLVSSLEPALIYEVGINMLYLADVPGGKPEWASQSIIAILTLWDRQEFASARESIVRAVVTNLHLLDLHMQVSLFKRLLLMVKNLRAESDRMYALA

SEQ ID NO: 239080 - protein, 135 aa, Glycine max
  Clone ID: PAT_MRT3847_57914C.1.pep
PVSVAIALACIVPPLSQSLTLSSRDFCVCFRPLILIFVYLVRSHPFGKRLDVHLAITTFPICELNALVGILFHLLFHVYGLHTCRAAPYLWLFLGFYFYPSNCLCRHAMLGRIMYPAVPCSDRSDRTLDSSIDIA

SEQ ID NO: 239081 - protein, 456 aa, Glycine max
  Clone ID: PAT_MRT3847_57915C.1.pep
MRPPVILKTTTSLLDSSSSSPPCDRRLNTLARHFLPQMASHDSISASPTSASDSVFNHLVRAPEDPILGVTVAYNKDPSPVKLNLGVGAYRTEEGKPLVLNVVRRVEQQLINDVSRNKEYIPIVGLADFNKLSAKLIFGADSPAIQDNRVTTVQCLSGTGSLRVGGEFLAKHYHQRTIYLPTPTWGNHPKVFNLAGLSVKTYRYYAPATRGLDFQGLLEDLGSAPSGSIVLLHACAHNPTGVDPTLEQWEQIRQLIRSKALLPFFDSAYQGFASGSLDADAQPVRLFVADGGELLVAQSYAKNLGLYGERVGALSIVCKSADVASRVESQLKLVIRPMYSSPPIHGASIVAAILKDRNLFNDWTIELKAMADRIISMRQELFDALCSRGTPGDWSHIIKQIGMFTFTGLNAEQVSFMTKEFHIYMTSDGRISMAGLSSKTVPLLADAIHAAVTRVV

SEQ ID NO: 239082 - protein, 88 aa, Glycine max
  unsure (1)..(88): unsure at all Xaa locations
  Clone ID: PAT_MRT3847_57916C.1.pep
RQHCTLVQKIFSDIIINDGPGEQRDSQVIYIGLVPAXAAVTWSVLFWVIYLRGRRLRVYTKQFIQGSMCWDLLYIRSIMFLRCSCGME

SEQ ID NO: 239083 - protein, 42 aa, Glycine max
  Clone ID: PAT_MRT3847_57917C.1.pep
EICILNVEIKLRACSNFNNSCQLLCLKRILSCLAWMHTSSKI

SEQ ID NO: 239084 - protein, 66 aa, Glycine max
  Clone ID: PAT_MRT3847_57918C.1.pep
NRSVAPDPSFSLYTSVIIYVVSTSFLLFTTTITISQSSVISVTQSSKPSTLSLHVSKLQLRSSTHF

SEQ ID NO: 239085 - protein, 137 aa, Glycine max
  Clone ID: PAT_MRT3847_57919C.1.pep
LSGQHICPFMKNSRQVHNSLLRCSLESTTIKPGCCCIIPYIHRKWGELKGFKINNNHYVTLYNSYKWIAYIQDVCRFYLNFLLLGPHNQSNPIQHTVLRLLIAMSVSTCQVKLVFFKMITSKVTGEIHKNVSSTLLL

SEQ ID NO: 239086 - protein, 67 aa, Glycine max
  Clone ID: PAT_MRT3847_5791C.1.pep
GVWGPPFFFFSFLEKPGVVLVILGKPTCFFLGMWGGFFFPWGVSPKGSFFLMFNFLFYCNWAFIFFF

SEQ ID NO: 239087 - protein, 42 aa, Glycine max
  Clone ID: PAT_MRT3847_57920C.1.pep
QVSSWRDFMKGGKKNKKGEIRPPKLKTEDPNKSYVQRPVKRG

SEQ ID NO: 239088 - protein, 91 aa, Glycine max
  unsure (1)..(91): unsure at all Xaa locations
  Clone ID: PAT_MRT3847_57921C.1.pep
RRQKGELISFDIYCADFEFCHSYKDNSEALKLVFLIPNNIQYMXCVSVPSNAIKAPRKIRRRITKPRLKFSNFXPGEIIKKRNSNAGARVT

SEQ ID NO: 239089 - protein, 68 aa, Glycine max
  unsure (1)..(68): unsure at all Xaa locations
  Clone ID: PAT_MRT3847_57922C.1.pep
LKGCRXARTLXQNQPYWPSKXLIYLLLFLLPLWWHHFAIICLLLSPSSGLXTTCKYPKSTXIPWEVNS

SEQ ID NO: 239090 - protein, 101 aa, Glycine max
  Clone ID: PAT_MRT3847_57923C.1.pep
MSSSTPDSDKTTTSSKKSAFDALAASRLVTELRGNFASGKTRSYEWRLLQLNAIAKLVVDHEQEIVDALRNDLGKPPLETVAYEVSSFTLLLVCVLVYIYI

SEQ ID NO: 239091 - protein, 101 aa, Glycine max
  unsure (1)..(101): unsure at all Xaa locations
  Clone ID: PAT_MRT3847_57924C.1.pep
MDNDSCGVGFMAELSNESSCKTVIDVLEMLVRMDPSDIGIRLLEPLKAEFPILSYADFYPLAGVXAVEVTGGPEVPFHPXRESTQIGNQINITTMGEGTCF

SEQ ID NO: 239092 - protein, 167 aa, Glycine max
  Clone ID: PAT_MRT3847_57925C.1.pep
FARDKKKNENLQISMAESNPHFSDDTPSPASSVDSPSPPPTFNGIVMVSQPDTQDVFHTPPEDSSLHSSDNGGVERCAVNLAVDVDAVSQGFVNFCDGSKFVDSGKDSGFLGFSGVQPAAGENVGESFLGSSRGRAGVWGGRFFRGELLFGGRGRAPAAGVWGSSPG

SEQ ID NO: 239093 - protein, 129 aa, Glycine max
  unsure (1)..(129): unsure at all Xaa locations
  Clone ID: PAT_MRT3847_57926C.1.pep
KGRVADWTIGKVMIGEFSELGNDYYKKGLTXNQSGRRNPRLDYGFKGGEIAMGSYCSEVQYLENFLKRQVQSGEQQNXDVNSLGVNVXGKXNEDMEILKMMXYTLRIAIWQGIELRNWEEKYENSEKKV

SEQ ID NO: 239094 - protein, 83 aa, Glycine max
  Clone ID: PAT_MRT3847_57927C.1.pep
GVLANCTPGNTKAVGSTNRVLKNYVTRVAKHCATPRERSVAYVANIHGVKHNTTNYNAGLPNDAAADVPATWGARIFSEHVMG

SEQ ID NO: 239095 - protein, 58 aa, Glycine max
  unsure (1)..(58): unsure at all Xaa locations
  Clone ID: PAT_MRT3847_57928C.1.pep
ARNSARGGIISEPLNKSLRRXRPLSHYSSFGSSGGAGSMMGXESADKAAAAAASLLAX

SEQ ID NO: 239096 - protein, 95 aa, Glycine max
  Clone ID: PAT_MRT3847_57929C.1.pep
EIPPLLEGDGKIEVWRINGNAKNALPKEEIGKFYSGDCYIVLYTYHSGERKEDYFLCCWFGKDSVEVIYVLSDLRSIDIYAHYIHFLVPTLLGLI

SEQ ID NO: 239097 - protein, 47 aa, Glycine max
  Clone ID: PAT_MRT3847_5792C.1.pep
PPYKIQLLPTKTPRFSKKMCSLQLHNLLTFFHTQFPYKHFFILHQIT

SEQ ID NO: 239098 - protein, 114 aa, Glycine max
  Clone ID: PAT_MRT3847_57930C.1.pep
IVSDPYQQVGHSSRSQAPNYEKPKRDKPAQVAVSSVQNSHRYERPGSSSSSRSHHESSGNSSSTCSSNISSKIVDRYIDGEQHPEESRPKNNSQRSNSRHGNYGVKRPPKVQLT

SEQ ID NO: 239099 - protein, 66 aa, Glycine max
  Clone ID: PAT_MRT3847_57931C.1.pep
GFESDLYVSNAVIDMYCKCGDPLEAHRVFSHMVYSDVVSWSTLIAGYSQNCLYQESYKLYIGMINV

SEQ ID NO: 239100 - protein, 237 aa, Glycine max
  Clone ID: PAT_MRT3847_57932C.1.pep
KAHVEKDIEKENSKCQVLLFSATFNDTVKNFVSRTVRMDHNKLFVKKEELSLDAVKQYKVYCPDELAKIDVVKDYIFEIGENVGQTIIFMRSKISARLLHEALVNLGYEVTSIQGSLSNEERDKVVKEFKDGLTQVLISTDILARGFDQQQVNLVINYNLPNKHSLRDEPDYEVYLHRVGRAGRFGRKGAVFNLICDENDERLMSKIENHFGTCVTEVRAQSVEEYKAALKEAGLLQ

SEQ ID NO: 239101 - protein, 69 aa, Glycine max
  Clone ID: PAT_MRT3847_57933C.1.pep
LEPILLRVIYSFRKTIAVTHSLIVSYCYTKQWGPLWQDWTLPTSILNQPYLKGTAHSPRLKLMLTGNQR

SEQ ID NO: 239102 - protein, 438 aa, Glycine max
  unsure (1)..(438): unsure at all Xaa locations
  Clone ID: PAT_MRT3847_57934C.1.pep
MAEPSSTAATIATADPPVPATKSWADEADEETNASTAEAETSSVNLEALTIDDKEKNSSKLLDDPDDSNIQAVTSGDTPYTSAARFEDLSLSPELLKGLYVEMKFEKPSKIQAISLPMILSPPNRDLIAQAHNGSGKTTCFVLGMLSRVDPKVQAPQALCICPTRELAIQNIEVLRRMGKYTGIASECLVPLDRDAVHVSKRAPIMAQVVIGTPGTVKKFISFKKLGTTRLRILVFDEADQMLAEDGFRDDSLRIMKDIEKENSKCQVLLFSATFNDTVKNFVSRTVRMDHNKLFVKKEELSLDAVKQYKVYCPDELAKIDVVKDYIFEIGENVGQTIIFVRSKITARLTHEALVKLGYEVTSIQGSLSNDGRDXYLSRVGKAGRFGRKGAVFNLICDENDERLMSKIENHFGTCVTEVRAQSVEEYKAALKEAGLLQ

SEQ ID NO: 239103 - protein, 45 aa, Glycine max
  Clone ID: PAT_MRT3847_57935C.1.pep
KNTRIMNLFRSITDKRFQEYAIYMALHYSTLLMINTFTLDSSTFF

SEQ ID NO: 239104 - protein, 132 aa, Glycine max
  Clone ID: PAT_MRT3847_57936C.1.pep
LGYEVTSIQGSLSNEERAKVVKEFKDGLTQVLISTDIFARGFDQQQVNLVINYDLPKKYGVRDEPDYEVYLHRVGRAGRFGRKGAVFNLICGELDERLMSKIENHFGTRVTEVRAQSVEEYKAALKEAGLLQ

SEQ ID NO: 239105 - protein, 267 aa, Glycine max
  unsure (1)..(267): unsure at all Xaa locations
  Clone ID: PAT_MRT3847_57937C.1.pep
MDDRKVSEELVRGLEFANQLRQVMINGKDNESSATTTTPFVQSLVKNVFRSFTNTLFLLDKYPSYEVSHTTKSEDSQESCKGFTTRNKRGYXRNTQEWEEVSKTPKVDGHQWRKYGQKEILKAKYSRNYYRCTHKYDQNCQATKQVQRIQEDPPLYKTTYLSHHTCNDLLNYEIIPDSNNNSPSDTSILLSFNNTFPTPTKQECPFLSSFPSPTSVKKLEEVIPASSSRHNNNVTLPLPDPWDVMSNSAMCDSVGLDDVNLFLDFDD

SEQ ID NO: 239106 - protein, 128 aa, Glycine max
  unsure (1)..(128): unsure at all Xaa locations
  Clone ID: PAT_MRT3847_57938C.1.pep
KLLDDPDDFNIQAVTFGDTPYTSVARFEDLSLSPELLKGLYVEMKFEKPSKIQAISLPMILSPPNRDLIAQAHNGSGKTTCLELGMLSRVVPKVQASQALCICPTRRLAXQNIEGLPQMGKYTVIAFE

SEQ ID NO: 239107 - protein, 192 aa, Glycine max
  Clone ID: PAT_MRT3847_57939C.1.pep
KKEELSLDAVKQYKVYCPDELAKIDVVKDYIFEIGENVGQTIIFVRSKITARLTHEALVKLGYEVTSIQGSLSNEERDKVVKEFKDGLTQVLISTDILARGFDQQQVNLVINYDLPKKYGVRDEPDYEVYLHRVGRAGRFGRKGAVFNLICGELDERLMSKIENHFGTRVTEVRAQSVEEYKAALKEAGLLQ

SEQ ID NO: 239108 - protein, 37 aa, Glycine max
  Clone ID: PAT_MRT3847_5793C.1.pep
PEYSRCSSISVSQQLTNKDDINKHKLRSKIDQDANPM

SEQ ID NO: 239109 - protein, 102 aa, Glycine max
  unsure (1)..(102): unsure at all Xaa locations
  Clone ID: PAT_MRT3847_57940C.1.pep
YFRIFFNRQPDETIIHNVKISSIICNVHAMLQYXASIPPDQQHMIFALKQLAHGMTLDDYNIQKESTLHHVLMLRGGIIEPSLTALAPTYNHDSMIMPQVLS

SEQ ID NO: 239110 - protein, 139 aa, Glycine max
  Clone ID: PAT_MRT3847_57941C.1.pep
MGMRMRVPGFMLLLIIGIFELDAVYGYVRPPPRKTLFVPHADQDSHSPQQVHISQVGQNKMRISWITDSPTPAKVMYAPSPSGNTVSATGTTSSYRYLVYESGEIHNVVIGPLNPNTFYYYRWVTHLFANIHFKTPPPT

SEQ ID NO: 239111 - protein, 74 aa, Glycine max
  Clone ID: PAT_MRT3847_57942C.1.pep
MFFLAVHAMAPLILHGGKYNSSSYKRLSAAEYAGVQVDFAPTFDMGVSTRTREFRKISPSGRVPVLVTSEGPVV

SEQ ID NO: 239112 - protein, 146 aa, Glycine max
  Clone ID: PAT_MRT3847_57943C.1.pep
MKNWKIDQSTINQKDCDGNTPLHLASKNLFPKVLYFITQDRRTNMNLLNNNGLTARDIVNNNQLAIRKFLANRVLKAAGVPLKVKDMLRSQHKQSPRTELSLKDLLTTFLVVATLMVTVTFAAAFTMPRRVYGPDDPNPKNRGTAI

SEQ ID NO: 239113 - protein, 77 aa, Glycine max
  Clone ID: PAT_MRT3847_57944C.1.pep
GKENDCYVLATYFVNQFSFPLLECWLNISPIMIVGRSMCKLKTLPRLFERTLVNYKLMLAKTRMRAPTLLSGIGLPG

SEQ ID NO: 239114 - protein, 81 aa, Glycine max
  Clone ID: PAT_MRT3847_57945C.1.pep
SQRTFLRCCLSWKNLRESGSHCSEYVGQSNKQNGWLYLHIRTWLPLVFISQVPLIEALSRIRVWHVNHRVRTWCLFVSKAI

SEQ ID NO: 239115 - protein, 65 aa, Glycine max
  Clone ID: PAT_MRT3847_57946C.1.pep
CQTWSAQLSVVDIAIGARTAQEQRASHSSSSFSGLSDWVFKSGWSRVGPVQKEACGSSSSIPSSG

SEQ ID NO: 239116 - protein, 96 aa, Glycine max
  unsure (1)..(96): unsure at all Xaa locations
  Clone ID: PAT_MRT3847_57947C.1.pep
MRLPFFLLVLLGTVCLASVRVSLNVTEDENNPFYLRSSNSFQTLFVNQNSCIRLLPKINXRSPQPENPXDYRNCPFQSKPNTILLPHHADPDFLPF

SEQ ID NO: 239117 - protein, 162 aa, Glycine max
  Clone ID: PAT_MRT3847_57948C.1.pep
CVLVFVKNTVGGTMGRLDLLANFLTEGNYRASVDLQRTHCIKGMIKMVATEGFPENTGILLVCAMNLTCRGLTNTDIDTISFQDGELWNPVCTKAMTMSFNPNPCSDAWSLEFLKRTGFHCDIICVNGWTATPMQDDEVTIEWFISFQECDPRTYCVVNPQN

SEQ ID NO: 239118 - protein, 58 aa, Glycine max
  unsure (1)..(58): unsure at all Xaa locations
  Clone ID: PAT_MRT3847_57949C.1.pep
WQWPLCHPSLAVAALCATLVRCNWSSFXTSLVAXESFNLEPNCERYVSRAARVMSGTG

SEQ ID NO: 239119 - protein, 62 aa, Glycine max
  Clone ID: PAT_MRT3847_5794C.1.pep
PGVTTDEIDRVVHEATIAAGGYTSPFKYHFFPKSCCTSVNEVICHGIPDARKLEDGDMENVD

SEQ ID NO: 239120 - protein, 70 aa, Glycine max
  unsure (1)..(70): unsure at all Xaa locations
  Clone ID: PAT_MRT3847_57950C.1.pep
GXXGXPPLXRYLXPGDXSPAXCPXVIAACAMGVTLMATTMHIIATTHATLKLVIINXEXSKRQNKLKLVI

SEQ ID NO: 239121 - protein, 378 aa, Glycine max
  Clone ID: PAT_MRT3847_57951C.1.pep
MSSVETEMEPLTSGASNRIIPLLKALRASLIFVYTFFLSFLLFVLPRRRRLSPAAGPPSPKKHLRRRWLVREEEDTCRRRALAQDVGMGRDEGWYRWSTSIFYGVRNNALFCRSWFPVAGDVKGILIIIHGLNEHSGRYADFARQLTSCNFGVYAMDWIGHGGSDGLHGYVPSLDHVVVDTGAFLEKIRSENPGIPCFLFGHSTGGAVVLKAASHPHIEVMVEGIILTSPALRVKPAHPIVGAVAPIFSLVAPRFQFKGANKRGIPVSRDPAALLAKYSDPLVYTGPIRVRTGHEILRISSYLMRNFNSVTVPFFVLHGTADKVTDPLASQDLYDKAASKFKDIKLYDGFLHDLLFEPEREEIAQDIINWMEKRLFTI

SEQ ID NO: 239122 - protein, 76 aa, Glycine max
  Clone ID: PAT_MRT3847_57952C.1.pep
FYFFFFFFFFFLSTREKVSFLFFSGNKLSSFFRYRNPHHLTQLMQAFLSSKIGVPRSLPPKECFYGNSQIKIVGSP

SEQ ID NO: 239123 - protein, 151 aa, Glycine max
  Clone ID: PAT_MRT3847_57953C.1.pep
MSSVETEIEPLTSGASNRIIPLLKALRASLIFVYTFFLSFLLFILPRRRRLSTAAEPPPSPKKHLRRRWLVREEEDTCRRRALAQDVGMGRDGGWYRWSTSIFYGVRNNALFCRSWFPVAGDVKGILIIIHGLNEHGGRYADFAGYNIMQL

SEQ ID NO: 239124 - protein, 54 aa, Glycine max
  Clone ID: PAT_MRT3847_57954C.1.pep
PTLPGTLPPLSIELSRPHPHVEEFGPVGKFYFLATKGVEAIFCLLSKVFVVFYV

SEQ ID NO: 239125 - protein, 126 aa, Glycine max
  unsure (1)..(126): unsure at all Xaa locations
  Clone ID: PAT_MRT3847_57955C.1.pep
KKKRGPSHGEKKNPPGAKKKNPPPPGVFQFLKPRGNQVISFEKTPVSAPPIKWGRPPPRPPRVYPFLFRPDIFWGIFARKPFPPGNPLSPVIPPPLKAPPXGKRGPPPGPAPNFPVNPPGPPRGRF

SEQ ID NO: 239126 - protein, 57 aa, Glycine max
  Clone ID: PAT_MRT3847_57956C.1.pep
FLVSVLCYCCLMYPLFVIVRCCTSSPYHGIVHEGLSITSSTICIQKKKKRAHVAQSS

SEQ ID NO: 239127 - protein, 103 aa, Glycine max
  Clone ID: PAT_MRT3847_57957C.1.pep
VSWVHFDLLAKFETEGNVRASADLQRTHWIKGMIKLVATVGIPETTGIALASAMNSVFRGRATSEIYTICSQDWELCNPACTKSMTMPFNPNPYTKCRSVGIS

SEQ ID NO: 239128 - protein, 45 aa, Glycine max
  unsure (1)..(45): unsure at all Xaa locations
  Clone ID: PAT_MRT3847_57958C.1.pep
VXXXFWXCXWCXLCNXNAXHLERDXEXDSNKTXKRKXKVGEMCXR

SEQ ID NO: 239129 - protein, 36 aa, Glycine max
  unsure (1)..(36): unsure at all Xaa locations
  Clone ID: PAT_MRT3847_57959C.1.pep
KVIPAHCLQRSVLRSFSYDGYDLTIEFCLXYVATHY

SEQ ID NO: 239130 - protein, 94 aa, Glycine max
  Clone ID: PAT_MRT3847_5795C.1.pep
KLYGKIEVALEVNDEIEIAIVTNYNTYEFGGKKKLVLSTTTVMGGKNPFLGTAYLFVGGLSLLCAIGFILLYVIKPRPLGDPSYLPWNRNPGSI

SEQ ID NO: 239131 - protein, 109 aa, Glycine max
  unsure (1)..(109): unsure at all Xaa locations
  Clone ID: PAT_MRT3847_57960C.1.pep
MGKAKKGPKFADMKKIVTCKALYSYKEEVLNPEKNTLMNDKLPTNVSTYSSTLLFQYNTALGPPYGELADTNLINXSIQNKSDLDKGTMDCLYAKSTPCITDXVMAELE

SEQ ID NO: 239132 - protein, 62 aa, Glycine max
  Clone ID: PAT_MRT3847_57961C.1.pep
GPTEQIPSVVYEMSDPHEHVYDVVSASPVDEIIMLESDMGAKDMEQNNLENSYEHDRIFLLV

SEQ ID NO: 239133 - protein, 145 aa, Glycine max
  Clone ID: PAT_MRT3847_57962C.1.pep
IKEITKNGLYFSHLLGIYISNLSFLFGFVRHLNTIRSGWCRIRHEENISQPRQKNMIHGTDRKEFQPTSARKDDRSRFRKEASPDDADRTFPNRRHPNIIQGLKRKKNNSRRRWLNSPRLLFFGRHWASVFFFFFFLRTLADNIW

SEQ ID NO: 239134 - protein, 224 aa, Glycine max
  Clone ID: PAT_MRT3847_57963C.1.pep
LDLVIKKLEEAGFSQDRFYIHCDGALFGLMLPFVKRAPKISFKKPIGSDQVSGHKFVGCPMPCGVQITRLEHVNALSRNVEYLASRDATIMGSRNGHAPIFLWYSLNMKGYRGFQKEVQKCLRNAHYFKDRLVDAGIGAMLNELSSTVVFERPHDEGFVHKWQLACQGNVAHVVVMPNVTIEKLDDFLNELVQKRAVWFRDGNCQPYCIASDVGQENCLCALHR

SEQ ID NO: 239135 - protein, 73 aa, Glycine max
  Clone ID: PAT_MRT3847_57964C.1.pep
WRRYYDFLHIASKFFSQGILRAVLLLVALRLTTSVNVGSPAQDLSWMHCFRGPPYHSPCIAKGFPLSLSPKNF

SEQ ID NO: 239136 - protein, 74 aa, Glycine max
  unsure (1)..(74): unsure at all Xaa locations
  Clone ID: PAT_MRT3847_57965C.1.pep
LARTTPKSKACDNTEYLRGHLTADNQIYHTSCYGXYRCDVTLLETNHYSFEGDLYXNPRFDHLFPRTARLDKRY

SEQ ID NO: 239137 - protein, 80 aa, Glycine max
  Clone ID: PAT_MRT3847_57966C.1.pep
KYDACPLIRVQNDTHAYASYTRLAFWSALRGNSNDCYFQRVNFSSILRVGVTYHCNKNNTFLWHLGQNHIKQTILSQCTS

SEQ ID NO: 239138 - protein, 66 aa, Glycine max
  unsure (1)..(66): unsure at all Xaa locations
  Clone ID: PAT_MRT3847_57967C.1.pep
KNKQKKKGNXKKEDKXKNRXRXEKXXKXXRNEXXSTLSDXWTLKESPLGQAKSIVHKRXKXESLCN

SEQ ID NO: 239139 - protein, 73 aa, Glycine max
  unsure (1)..(73): unsure at all Xaa locations
  Clone ID: PAT_MRT3847_57968C.1.pep
MDDRVLHAWAAHKPAAHGFVGQVARVARSVLRSLVDXNHIPCRHLLVTADESGQPFSINADTVTSELATALGA

SEQ ID NO: 239140 - protein, 73 aa, Glycine max
  Clone ID: PAT_MRT3847_57969C.1.pep
LKNIIQEERIFQHSPILGHLLPFFFLPKKHIIIIIIVTSIGQLRNHTPLECHYPNPLTRLPPQWYLLPHPLVF

SEQ ID NO: 239141 - protein, 97 aa, Glycine max
  unsure (1)..(97): unsure at all Xaa locations
  Clone ID: PAT_MRT3847_5796C.1.pep
RKRPSRIFELESQNSQLKEDLKVVRNQLGVSESCKKQAQQDAEESKKQVASLSLKLEDSQQQLVKFSATEQSRVXELQKTIEEHDKTWQSELMNAQQ

SEQ ID NO: 239142 - protein, 59 aa, Glycine max
  unsure (1)..(59): unsure at all Xaa locations
  Clone ID: PAT_MRT3847_57970C.1.pep
GLPQKSRLSFIPKVQTNSAPISYSIFSIQIIPHHIWLXPLKYRKRQNHTPHWRISFEVT

SEQ ID NO: 239143 - protein, 77 aa, Glycine max
  Clone ID: PAT_MRT3847_57971C.1.pep
KRRRAPGGARRGGQISKQRIQRRGSEGRREPQEGANLEVEGEGKKRKRTNIRKIGVERAKNILELGQTDTRGPFPPT

SEQ ID NO: 239144 - protein, 131 aa, Glycine max
  Clone ID: PAT_MRT3847_57972C.1.pep
MGILSDHHNQKHHHHHHHLMSFHLHIPHLQYFHHHQQQEKKEDLKDIPKGCLAILVGQGEEQQRFVIPVMYMNHPLFMQLLKKAEEEYGFDQKGPITIPCHVEHFRSVQGLIDKDKSLHHGHHHHAWCFKV

SEQ ID NO: 239145 - protein, 55 aa, Glycine max
  unsure (1)..(55): unsure at all Xaa locations
  Clone ID: PAT_MRT3847_57973C.1.pep
HRAKTQHTTLLQSXNGGNFLLEXRRSSXEXRXXHXDXXDXETXLXXRXXGPFLXP

SEQ ID NO: 239146 - protein, 92 aa, Glycine max
  Clone ID: PAT_MRT3847_57974C.1.pep
CNKSTFGYRYDNTTGVFGASFPYRGYGATHRPEALAMCSVITVWIFRSSQYHAVITACALSQMPPHLSCDDITLISYDANYIQFYGTRSTTS

SEQ ID NO: 239147 - protein, 51 aa, Glycine max
  unsure (1)..(51): unsure at all Xaa locations
  Clone ID: PAT_MRT3847_57975C.1.pep
LLXPILAPETIFRRKRYXXSYILNYISLTHNTLTTSMILLMYVSXKPNTNI

SEQ ID NO: 239148 - protein, 61 aa, Glycine max
  unsure (1)..(61): unsure at all Xaa locations
  Clone ID: PAT_MRT3847_57976C.1.pep
MFPCNRSQLVYLRIKDGTVPVXFFQKYLLKKLNIASGAEVEIMCRGQPVLPSVQLHNLVDL

SEQ ID NO: 239149 - protein, 57 aa, Glycine max
  Clone ID: PAT_MRT3847_57977C.1.pep
TPYMTRHRRCAEDDETYMVRYATLHDRILTSPNAPPEYALGFYSSYHSSITSCGSLR

SEQ ID NO: 239150 - protein, 88 aa, Glycine max
  unsure (1)..(88): unsure at all Xaa locations
  Clone ID: PAT_MRT3847_57978C.1.pep
PKVXAXXCARXXSADFAXWDDXPETXVGSXALRTVCXVXEXXGRIAPLDTPIPAMFAADLXAXXPPIFXXFAXANRLXEXXTKGYGMA

SEQ ID NO: 239151 - protein, 147 aa, Glycine max
  Clone ID: PAT_MRT3847_57979C.1.pep
AEDENWGGNGGGHQRNGALDHRSWATDFAILASLPCKTEEERVVRDRKAFLLHSQFVDTSIFKAVAAIQHVMESKSNIKSELNSSPGSVLHEDLTGDLSIIVKRDIQDGNTKYDSILDESSMHEGDAQKNLIKGLTADESVIVHVSK

SEQ ID NO: 239152 - protein, 78 aa, Glycine max
  Clone ID: PAT_MRT3847_5797C.1.pep
KGKVSWPGPQVTEWFHPVQPMNLLNPLGVWKSGKEESASKEHKRAQVSLKFVLPGIPLYSHTFFITIKGICPACCISP

SEQ ID NO: 239153 - protein, 80 aa, Glycine max
  Clone ID: PAT_MRT3847_57980C.1.pep
FFIFILFFIFNIFIYRAPRAIFYKNIPILLINYNPSNDYRTLLLPMLQMVLKLDYCNIQYTLYICYIVMNACISIFLLGN

SEQ ID NO: 239154 - protein, 153 aa, Glycine max
  Clone ID: PAT_MRT3847_57981C.1.pep
MSMSMASSSGNSSISTKSQSSGSEGDLQVVITDERKNKRKQSNRESARRSRMRKRNHLDQLTKQLSQLAKNNGEILATIDITTQHYLNVEAENSILRAQMGELSQRLQSLNDIVHDIIINTTTTYERDCYLTSAQNFTTTTYTLCLNQPVFQW

SEQ ID NO: 239155 - protein, 48 aa, Glycine max
  Clone ID: PAT_MRT3847_57982C.1.pep
NYQRHPTTTTSLNSRRTTISTNSPPATKLRPLSPRRIVSDAKQKHLIQ

SEQ ID NO: 239156 - protein, 39 aa, Glycine max
  Clone ID: PAT_MRT3847_57983C.1.pep
GLAILCHRSAPSVLPQLMSMGLGVSSGGGLYSVGYLFGI

SEQ ID NO: 239157 - protein, 80 aa, Glycine max
  Clone ID: PAT_MRT3847_57984C.1.pep
LFPPPPPPPPVNRRSINKVRINNKLVLDPKKSDLFSYLLQIPEKFMISNERQKSKFSCQSTNFLGNPLFCRSDDINWGRE

SEQ ID NO: 239158 - protein, 80 aa, Glycine max
  Clone ID: PAT_MRT3847_57985C.1.pep
SCQSNTIITYITELSDLKSLNKTVGGNLLQGPSPTRGANRGLRGGPWNRGTFPYGEPDYTLGNPLTEGRPVGNRCSLRKT

SEQ ID NO: 239159 - protein, 68 aa, Glycine max
  unsure (1)..(68): unsure at all Xaa locations
  Clone ID: PAT_MRT3847_57986C.1.pep
PQPELMFXTLKPRAQEYFIPDNPAGFLVAGLARPFDKKPYVRSLSSFGADNVPPAVPVAQNLGEQGFY

SEQ ID NO: 239160 - protein, 39 aa, Glycine max
  Clone ID: PAT_MRT3847_57987C.1.pep
NWEGSLTHFFLEPPFFPSLVSARTFFGDLWDKTSNTKWL

SEQ ID NO: 239161 - protein, 61 aa, Glycine max
  Clone ID: PAT_MRT3847_57988C.1.pep
EGGVFPKNGLVKSFRLVLVEEKGKKIKENAIKVKKTVVDAPGPQRKTAPNFNPLLEKGFRS

SEQ ID NO: 239162 - protein, 69 aa, Glycine max
  Clone ID: PAT_MRT3847_57989C.1.pep
EIKLENIKDGPTTFEQSKMTLEKLLTYGNMLVQEQESDERDRLADKDLNEAALANANDDAIHRGTFLRS

SEQ ID NO: 239163 - protein, 89 aa, Glycine max
  unsure (1)..(89): unsure at all Xaa locations
  Clone ID: PAT_MRT3847_5798C.1.pep
IMREGPNLLKLARKEQCLALGTKLKSNYKIKYQVYKIFPNREVQYLHPRNNIYPXKINPERQRFGQNLRSINNNINPIQLKGTSKQPYD

SEQ ID NO: 239164 - protein, 94 aa, Glycine max
  Clone ID: PAT_MRT3847_57990C.1.pep
IAVIVGTVTDDIRVYEVPALKITALKFTERARARIEKAGGECLTFDELALRAPLGQNTVWVANNIDLCNFLDGIVKPYYCGCVSKSNIGSCSHC

SEQ ID NO: 239165 - protein, 103 aa, Glycine max
  unsure (1)..(103): unsure at all Xaa locations
  Clone ID: PAT_MRT3847_57991C.1.pep
MADGESDKNIEIWKITKLIRALESARGNGTIMITLIMPPRDQISHVTKMLXDEFGTASNIKSRVNXTVSDAAITSAQQRLKLYNKVPPNVLVLYTGTIVTEDG

SEQ ID NO: 239166 - protein, 76 aa, Glycine max
  unsure (1)..(76): unsure at all Xaa locations
  Clone ID: PAT_MRT3847_57992C.1.pep
GLARACAKSGGFPXPKIIHYAGAPFTVGKNKSFHFRXQHFAASIETLXSAGWHPVFGLVQGLAVWPTFIWYRKNRQ

SEQ ID NO: 239167 - protein, 94 aa, Glycine max
  Clone ID: PAT_MRT3847_57993C.1.pep
LGSFGPTPPPYVNWEGQFFLREQQTANWGIKMKRFFLKPSIEAIPGWGVYFFGQKNYFWGREGALPLLERYQNFGCERRIYGSHTMSAQCQRRP

SEQ ID NO: 239168 - protein, 156 aa, Glycine max
  Clone ID: PAT_MRT3847_57994C.1.pep
LLNRPSTLQVDRRISNVLGSDSEDKDKDEEKEEEREKEEEEEDIEKTLSVILGKFKEICANNSKKAIGKKSISFLLKKMFVCRSGFAPAPSLRDTLQLQESRMEKLLRTILHKKINSQHSSRALSLKKRLEDRKMPKEDEAENDDGCKWVKTDSEY

SEQ ID NO: 239169 - protein, 142 aa, Glycine max
  Clone ID: PAT_MRT3847_57995C.1.pep
DGVVDADDEEESDADEEETESSRRMVVNGEGHRENGFRVAPVEGDDVEEEDDEDDSGEEIDEEEGDDDDVVEVHEIEDSDDEDGVEEYDERDDDEEDDEEEEEVDNDEGDFAEPESTGRLTSTDGEIDGHDASAFFIIEVFI

SEQ ID NO: 239170 - protein, 67 aa, Glycine max
  Clone ID: PAT_MRT3847_57996C.1.pep
SRRPPFFFFFFLTFAFFFCKNTKSSMRLNCGLPLCYGSLLDVYCSIPRKGWLSRCKKMVLCWYVIIN

SEQ ID NO: 239171 - protein, 295 aa, Glycine max
  unsure (1)..(295): unsure at all Xaa locations
  Clone ID: PAT_MRT3847_57997C.1.pep
MRHRISYLMDEIWERAMETALDGRXDHSAARTLSLYLFRLLLVSYFIFLSLLERFQNLQHLSIANVGVSSLEQFPRLRNLQKLNLSDNRIAGGLEFLVQAGLDSLRDLDLSNNRIQYIEDLAPLAQVKLVSLDLYECPVTRVKDYRSRVFGLIKSLKYLDKMDAEENERPESDDEEEDEEEEEEEDDPGSGEIDGAEEDRPFGINNGHSEGADGVVDADDEEESDADEEETESSRRMVVNGEGHRENGLGVAPVEGDDVEDEXKDDEDDDDEDDDEEEEVDNDEGDLCCFREPGG

SEQ ID NO: 239172 - protein, 51 aa, Glycine max
  Clone ID: PAT_MRT3847_57998C.1.pep
SNTYSMFCNLFLFCIVIKVHIQNFGFLHNVIYMQINADPLYVRGELKYSLF

SEQ ID NO: 239173 - protein, 137 aa, Glycine max
  unsure (1)..(137): unsure at all Xaa locations
  Clone ID: PAT_MRT3847_57999C.1.pep
DEEESDADEEETESSRRMVVNGEGHRENGLGVAPVEGDDVEEEDXEEEGDDDDVXVEVHEIEDSDDEDGVEEYDEDDDDEDDDEEEEVDNDEGDFVEPERTGRLTSTEGEIDGHEQGEEDGDEDDNGETGEDENGVE

SEQ ID NO: 239174 - protein, 70 aa, Glycine max
  Clone ID: PAT_MRT3847_5799C.1.pep
FGSRKPGGCNQKRRSHRLDEHWDPRLKHWRRRTSTLFNLLFLFLTILLMFYCCCCITTLHTTCLCSRLRV

SEQ ID NO: 239175 - protein, 38 aa, Glycine max
  Clone ID: PAT_MRT3847_579C.1.pep
TIGRYCNVLLDTSFNTFSNTENVMLIMWMHIKDASIEY

SEQ ID NO: 239176 - protein, 96 aa, Glycine max
  Clone ID: PAT_MRT3847_57C.1.pep
LTINHQQYSPVTSGAAVGQSNPNKPPPPVGYPTNDHVPSHQNVPIKTSIMGDRFFHGSCAGLFCCCSLDCFLLFPLFLSAYPLCPLSFSFTHLTFF

SEQ ID NO: 239177 - protein, 151 aa, Glycine max
  Clone ID: PAT_MRT3847_58000C.1.pep
TQKTLILPVLFLIFNDSILEFSQHLSPLLSGLQIVFFGSRNNLYNYIYVTPQILEQVVRLYSQNEPTNNGHNLSSPCIRPTPSKESNESKHFLHPRLPHPHDTISSKNSLATTKARCLLQNHSLRNSPNPNHLTMRNHYLNCHPRVRGRVG

SEQ ID NO: 239178 - protein, 43 aa, Glycine max
  unsure (1)..(43): unsure at all Xaa locations
  Clone ID: PAT_MRT3847_58001C.1.pep
HAXGHASERRKTHDANEDDPRNTAGGFVRNLNQNKLITEAYLG

SEQ ID NO: 239179 - protein, 45 aa, Glycine max
  Clone ID: PAT_MRT3847_58002C.1.pep
SYHLSGCTPHFVPLSNIRPYFLTEWTYPVSIITPPHHGSQCCFQG

SEQ ID NO: 239180 - protein, 95 aa, Glycine max
  Clone ID: PAT_MRT3847_58003C.1.pep
STKKGKFRRSLPSIYCGNVYKVNSKTLTLPVLFLIFNDSILKFSPHLSPLLSGLQIVFFGSRNNLYKYVTPQILERTPSPLLPKRTNKQRSQSLK

SEQ ID NO: 239181 - protein, 262 aa, Glycine max
  Clone ID: PAT_MRT3847_58004C.1.pep
MLELSESHSKNLHFPLTHIILFFTCFKLSKAQSSMEPVPTYITHHSWEPSVVITVGAIIIALLLMGIISIYLRRCAESHIIITTTQTTTTLPCSCAQGINRELLNTFPTLFYSNIKDLKKGNETLECAVCLTDFTDKDALRLLPKCNHVFHPHCIDSWLACHVTCPVCRANLSQESSHVSITVPPHNEEEGSRNTTTNEATQIEQSTSNDVGQVCLGDPTPTSDAAIMYISEEQQQQHSSSEPTFEELDPTILLLLLLTMVA

SEQ ID NO: 239182 - protein, 60 aa, Glycine max
  Clone ID: PAT_MRT3847_58005C.1.pep
NTMALQAPPSLDTANANAGLRRPLMNPSSLSLKSSLFSGSLNFYIDPTSPPSYFSSTQDF

SEQ ID NO: 239183 - protein, 63 aa, Glycine max
  Clone ID: PAT_MRT3847_58006C.1.pep
IMELKGIIPTHRITCLSLSINSSTNLFWEWDVFNIFTSFYFSHKKSFIFVSAIYTNYYFILKK

SEQ ID NO: 239184 - protein, 52 aa, Glycine max
  unsure (1)..(52): unsure at all Xaa locations
  Clone ID: PAT_MRT3847_58007C.1.pep
MRDCISIHIGKAGIQVGNACWELYCLEHGIHPDGQXPSDKTVGGGDDAFNTF

SEQ ID NO: 239185 - protein, 51 aa, Glycine max
  Clone ID: PAT_MRT3847_58008C.1.pep
MFLLFWLVLLMLSFFLMEESEGKLKAILGYTEDDVVSTNFVGDSRYKQLTS

SEQ ID NO: 239186 - protein, 39 aa, Glycine max
  unsure (1)..(39): unsure at all Xaa locations
  Clone ID: PAT_MRT3847_58009C.1.pep
IFKPFILKKKKKKKKKKKKKKKKKKKKKXXXXKKKKKKN

SEQ ID NO: 239187 - protein, 42 aa, Glycine max
  Clone ID: PAT_MRT3847_5800C.1.pep
GVILETLNNFMCTVVMDVSPGEHFGEGKCGPSCSCTVCPCGR

SEQ ID NO: 239188 - protein, 117 aa, Glycine max
  Clone ID: PAT_MRT3847_58010C.1.pep
SFKIENQSWTTSKTQETPPMMMMMILKQHDQESERAKVGPLHESLEWLMDCTAAMWFSTPKRKRGKEFVTWAGFPVPEAQTLGILMKKKLVKMEGPYEPLCCDQSHPREIKEGGIHE

SEQ ID NO: 239189 - protein, 104 aa, Glycine max
  unsure (1)..(104): unsure at all Xaa locations
  Clone ID: PAT_MRT3847_58011C.1.pep
QNYPPQQNFVRASQFYPPQXNYGQRSQNYPAQTRTIXQASQNYPPQHNFCQASQNYSPQQNYCHAPQNYPPQQNFDQASHNYPQQQIYCPSSPQYAQQHILLPP

SEQ ID NO: 239190 - protein, 99 aa, Glycine max
  Clone ID: PAT_MRT3847_58012C.1.pep
MSASRLEDLSKVDRKRTPWLLVLFHVPWYNSNKAHQGAGDDMMAAMEPLLYAASVDLVIAGHVHAYERSKRLYNGRLDPCGAVHITIGDGGNREGLAHK

SEQ ID NO: 239191 - protein, 119 aa, Glycine max
  unsure (1)..(119): unsure at all Xaa locations
  Clone ID: PAT_MRT3847_58013C.1.pep
PALSHACFPPLPPIPXSXRPSLATPLPYPPLPCNPPPPLSCRPTHPPLPLSAPPPPPHPPPLPPPPPPPTPPPPXPPPPPPPPPPSPPPLPPSPPPPXPSPAYPPPAPPPPPPPHPPPP

SEQ ID NO: 239192 - protein, 115 aa, Glycine max
  unsure (1)..(115): unsure at all Xaa locations
  Clone ID: PAT_MRT3847_58014C.1.pep
RNTENGKNSDAEKKPIWKAGRSNLELRVQRIAGVGRRRNTLTYRTKAPIYLATLLKYVATGRRELTXNTTRDNRKDGIIPRHVLLARRSDEEWEKVLTGVTRTHGNGLANISPVV

SEQ ID NO: 239193 - protein, 321 aa, Glycine max
  unsure (1)..(321): unsure at all Xaa locations
  Clone ID: PAT_MRT3847_58015C.1.pep
MSSYFPSFGTKIPRMGKGYDDVLFTVINQLVKPGSWSNYKVPCNLSKQHIGFVSKFDQICSSPVMMEDEHKKLDSLPEIGLSEPEKYSKELEVAVRAVQMACSLCQRVQDTLISNARTNHRQVQSKDDNSPVTVADWSVQAIVSWMLSECLGSQNVSIVAEEDAQTLSEANASELLEAVVETVNQCLAEAPRFGVQEPKSPLGTSDVLEIISRCNSTGGPTGRFWVLDPVDGTLGFVRXGDQYAVALALIEIAAVIRGVPGCPLHPLKLGSLGVRHLLHMVVSNLTRPXSKTXNKCCILYTKNGSEKAWIQPLLHINKILV

SEQ ID NO: 239194 - protein, 44 aa, Glycine max
  Clone ID: PAT_MRT3847_58016C.1.pep
IYNDNLQVDCALVFPCSINFIDNEWFLSRLCLFKAFQLASSFFY

SEQ ID NO: 239195 - protein, 88 aa, Glycine max
  Clone ID: PAT_MRT3847_58017C.1.pep
ITHLPALLTIAILLETERELIITPATTPFVIVNRRWPYSMDVDNSGHSMNRPDLAITIDYSAVTGNPIGYEDEVRESSDESRYGAIDV

SEQ ID NO: 239196 - protein, 68 aa, Glycine max
  Clone ID: PAT_MRT3847_58018C.1.pep
VVKAFIVLNPDYKSHDQEQLKKEIQEHVKKTTAPYKYPRKVEFIEELPKTVSGKVKRNELRKKEWVTT

SEQ ID NO: 239197 - protein, 159 aa, Glycine max
  Clone ID: PAT_MRT3847_58019C.1.pep
EPSPIKTFFRYHKGSPLFRVPQGNPAFIARQEKKTTVAIKASKLATVAVAMPFTTITVALNVTPKAASLYPSRHVQFLLTIMDAHLLDITIGADILIITQAIKMGISSNLSMFTIYTVFQIIKFRCHYNRIKFSYPYVRIIQSHLRDPKHVSSNACTHA

SEQ ID NO: 239198 - protein, 111 aa, Glycine max
  unsure (1)..(111): unsure at all Xaa locations
  Clone ID: PAT_MRT3847_5801C.1.pep
AGGGAFKPYPQHAGPIPKNGYIAIKRRPCNVVQIATCKPANHGHPQRHYGEIDIPTAKNLEDIAHSSHNCDGPHDNRTDYQLIHLAXDGCQNPLTENGHTKDEPKLSTDKS

SEQ ID NO: 239199 - protein, 45 aa, Glycine max
  Clone ID: PAT_MRT3847_58020C.1.pep
MPPTTSPEITTPATIYREEHNVVDLYIILLRFLRDHELCWMSLNL

SEQ ID NO: 239200 - protein, 51 aa, Glycine max
  Clone ID: PAT_MRT3847_58021C.1.pep
CDLSLAGPFAINPKLTTQTIDCLFANYIPPFQLPSPKANLITNCLKHLTLS

SEQ ID NO: 239201 - protein, 561 aa, Glycine max
  unsure (1)..(561): unsure at all Xaa locations
  Clone ID: PAT_MRT3847_58022C.1.pep
MINPTTLPQQSLPGIEVSAQSENSFQSQSVDAVKAQTENKSGFRLQADFAESPPQKDNGIKMFSADQRAFDVVGGGNEHSTPIEEQADEGDQRGNGDSMASGVGGAPSEDGYNWRKYGQKQVKGSEYPRSYYKCTHPNCQVKKKVERSHEGHITEIIYKGTHNHAKPPPNRRSXIGSVNLHTDMQVDHPEHVEPHNGGDGDLGWANVQKGNIAGAANWKHENIEATSSASVGPEYCNQSPNLQAQNGTHLDSGEAVDASSTFSNEEDDQVTHGSVSLGYDGEGDESESKRRKLESYAELSGATRAIREPRVVVQTTSEVDILDDGYRWRKYGQKVVKGNPNPRSYYKCTNAGCTVRKHVERASHDLKSVITTYEGKHNHDVPAARASSHVNANASNAVPGQASLQTHVHRPEPSQVHNGIGRLERPSLGSFNLPGRQQLGPSHGFSFGMNQSMLSNLVMSGLGHAQAKLPVMPVHPFLAAQQQHQQRQQHQQQQQHQQQQQQHQQQQQHQQQQCAANDLGFMLPKGEPNVEAIPEHGGLNLSNGSSVYQEMMSRMPLGPHM

SEQ ID NO: 239202 - protein, 75 aa, Glycine max
  Clone ID: PAT_MRT3847_58023C.1.pep
LRSSISFTRQNRMGCQGSNEKRSRPNLLLPMDQQPLVVVVVLVTTLFSLRRRHHHLLLLLLLVIRFKHQQHQTTI

SEQ ID NO: 239203 - protein, 50 aa, Glycine max
  unsure (1)..(50): unsure at all Xaa locations
  Clone ID: PAT_MRT3847_58024C.1.pep
YDRIXHTYVLSGESHNNRGGLAYRAANTSTLLFPLHPTVKDSKAIILTPF

SEQ ID NO: 239204 - protein, 48 aa, Glycine max
  Clone ID: PAT_MRT3847_58026C.1.pep
IEVRCRYRRVKIWKARVGRLGSFRPAPLFGFNLCGVVPRVPVGSLHPT

SEQ ID NO: 239205 - protein, 149 aa, Glycine max
  Clone ID: PAT_MRT3847_58027C.1.pep
HVNVDVVRAVDREFQGLGIGRRTHLSCSLGFCVKAKVRWQFCSFGDDVRMSLSVRTLCARRRRRARAFVERMMRSPQTCWKRRWSRRIRSEPRSFRATSLRSFLRSRHFRRAPNLVCLLGDAEIAPAGSSACRMTAPASHTGSGLLGSN

SEQ ID NO: 239206 - protein, 46 aa, Glycine max
  unsure (1)..(46): unsure at all Xaa locations
  Clone ID: PAT_MRT3847_58028C.1.pep
VKGLEKKXPXXXXINYLKKKNTTLKKGKCFKILKGIYQRVFSLKNL

SEQ ID NO: 239207 - protein, 132 aa, Glycine max
  Clone ID: PAT_MRT3847_58029C.1.pep
MPEDIVYQHPLFGGKISSTFPHRFQDVSSIRQVPDHQEVFADPSRDESLIFELLEFKPDVADNGSAGWFLQDLASEQDAEGSVVIEQSGVLEAPGLMYNNTPAVVTTAVGQMAISKGRQGREAQNLVKVYLA

SEQ ID NO: 239208 - protein, 88 aa, Glycine max
  Clone ID: PAT_MRT3847_5802C.1.pep
NKKIWLKKIWLATILAGEKPPLLEREGPIFWGGPPPFYVRASIKEKWSRGHTFHNGDNLDTRWGYPPQAQWLFNLSRTPPDFIFGSAL

SEQ ID NO: 239209 - protein, 61 aa, Glycine max
  Clone ID: PAT_MRT3847_58030C.1.pep
SAYLFLCVVSPNKSFDLFYTKLFDNFLFKINIFLNENKYSKHYFNLLKVSSFSRVVVCTIR

SEQ ID NO: 239210 - protein, 79 aa, Glycine max
  unsure (1)..(79): unsure at all Xaa locations
  Clone ID: PAT_MRT3847_58031C.1.pep
LYHCWHAIPTWFGSVLVARWAYWVFYNTATPMVVRQLNLIRYLSGCLTVFVFVGLLSIGCWFXVVGRFGVLYTVTPFNW

SEQ ID NO: 239211 - protein, 118 aa, Glycine max
  Clone ID: PAT_MRT3847_58032C.1.pep
DAQGLPIDGNRNVLYQRVQKARRINRSRGRPLWVPPVEEEEEEVDEELDALISHIKLEEGNTEFWKRRFLGEGLNGDQEMPTDAAESEVPEVLDDVDAIEDASKEGEDDETDDDEEEA

SEQ ID NO: 239212 - protein, 72 aa, Glycine max
  Clone ID: PAT_MRT3847_58033C.1.pep
FGKKNPPFGGTLIYLPPVGITVKGNPTFRSLLGFPSFRPDFLLAPPCLKGPPPPFFCLLGGVKFFKSNPQPL

SEQ ID NO: 239213 - protein, 235 aa, Glycine max
  Clone ID: PAT_MRT3847_58034C.1.pep
MEFVDTRKLQLQHQQQLQQQPQHFHVLAVDDSVIDRKLLERLLRGSSCKVTCVDSGDKALKYLGLIDELDDTSSTSLESESSHPPPQPLQREGIKVNLIMTDYCMPGMSGYDLLKRVKGSSWKDVPVVIMSSENVPSRISMCLEEGAEEFLLKPLQLSDLDKLQPYFLKSVDNSCEKESANSSIDSDNDNVINNNSNNSNSNNNNNNSISKRKAMSPEPHREERSRPKMKELAVV

SEQ ID NO: 239214 - protein, 193 aa, Glycine max
  Clone ID: PAT_MRT3847_58035C.1.pep
MAQTQTLSFIHEIESLVSDKLQVVSYKWLSRNYMVSSDEAKRLLQEFVQKHEGGLEVVYALSGWLKSNHPSYHVRLVTGPKLAEAQQEFDGDCSVQIYSVQASIPKDPAVLWNAEFIQAEELFKQPSSVDNCLRDNRFCGISNSFVQRNVDGPTVVFAAPQSKSVGEGPTKSDIVQQPPKNISRDSIDKVHTK

SEQ ID NO: 239215 - protein, 51 aa, Glycine max
  Clone ID: PAT_MRT3847_58036C.1.pep
YGCEKTTEGVQVNPNLISAHQILNTIRVNNLIHLTLIISWPPNKLSFRHDY

SEQ ID NO: 239216 - protein, 55 aa, Glycine max
  Clone ID: PAT_MRT3847_58037C.1.pep
FYFLSGDLSQCSLLICCLHIYIRYFCEAAVTGILTCVTLEFIHEHFLILFTQLLS

SEQ ID NO: 239217 - protein, 45 aa, Glycine max
  Clone ID: PAT_MRT3847_58038C.1.pep
PLGPFGLLSPQNLGGCRLGRPEEPRSKMPNFSQQKSPNYSKIQKP

SEQ ID NO: 239218 - protein, 55 aa, Glycine max
  Clone ID: PAT_MRT3847_58039C.1.pep
PTRPILSNTRPPIVLIPQPHLPYQREERQHQIKDTTFRLLNHLFKTTNSPPFWHS

SEQ ID NO: 239219 - protein, 53 aa, Glycine max
  Clone ID: PAT_MRT3847_5803C.1.pep
VTTIFAVRVFNFMMLVVLKVISDRTSEWCKLVNLPRPQLPTHALCNALLDIIF

SEQ ID NO: 239220 - protein, 48 aa, Glycine max
  Clone ID: PAT_MRT3847_58040C.1.pep
ILCELPNNKVMWPLCLFKSLIQRVGWPIKKPQRWQVILLNISCLPSQD

SEQ ID NO: 239221 - protein, 97 aa, Glycine max
  unsure (1)..(97): unsure at all Xaa locations
  Clone ID: PAT_MRT3847_58041C.1.pep
FSKVPIFWSSPVGGLRHVSAATGFENVHIDGDLTKHXIKFIGYHAEANEIVAIASVKSDPYVSKDAELLRLKQMPSFTEIKGGKNILEIDISGKSGN

SEQ ID NO: 239222 - protein, 105 aa, Glycine max
  unsure (1)..(105): unsure at all Xaa locations
  Clone ID: PAT_MRT3847_58042C.1.pep
RRTGSPVYKLGKAGEESHSALTEFDRTEKDITLIRGFPHYGVEKKINKFSWXGGAKKRVITLRQNILNQTGRGALXKNIKLKVIDTSLKIGHGRSQTTQEKQKIF

SEQ ID NO: 239223 - protein, 483 aa, Glycine max
  unsure (1)..(483): unsure at all Xaa locations
  Clone ID: PAT_MRT3847_58043C.1.pep
AESTIWCKRSPQSKGRRSPHVISGRLVHPNPCSPEAYENXIIKRRKLQSSALXIIGAFIPATMIAVLYYFEFCLSSQLAQQSEFKSNIPSSXTLXQRLVGFLTLMSGLIGIPPANGVIPQSPMHTKVRATLKHQLLRNKLVVTARKSMGKNASLGQLYGNMLEAYNQMQTPLVYQDPSARAQGLRELKESTIQAATSMGNVDAPVDETIFDVEKEIDDLLPVEVKEQRLSNLLQSTMVGGCVAAMPLLKKIPTSVLWGYFAFMAIESLPGNQFWERILLLFTAPSRRYKVLEDYHATFVETVPFKTIATFTIFQTIYLLICFGLTWVPIAGVMFPMMIMLLVPVRQYFLPKFFKGIHLQDLDAAAYEEQTALPFNLATHSEFGAGASQVGEGEILDEVITRSRGEFRHTSSPKITSSTPTPRTDTNSHLSPRLSFSARVGEFKTEQSPRSGARGPLSPKAGEVRLSNLGRSPLNPDSKQQDQN

SEQ ID NO: 239224 - protein, 41 aa, Glycine max
  Clone ID: PAT_MRT3847_58044C.1.pep
HQLRVPSDMLPDVNPGPAEDQTQSTSADTVHADGANTDPFA

SEQ ID NO: 239225 - protein, 92 aa, Glycine max
  Clone ID: PAT_MRT3847_58045C.1.pep
ANDQNHGKKKNNRKKFSPKEHAAPTIHAAPMLHHGNCPPFSGTGQGLMGGTTPLPPLNVAPTFATNGVWTNGTTFPHQQQSSMLPNGYPTNG

SEQ ID NO: 239226 - protein, 123 aa, Glycine max
  unsure (1)..(123): unsure at all Xaa locations
  Clone ID: PAT_MRT3847_58046C.1.pep
EARVSLLGTEFIKVATNIDPDCXMIINEKGRNAKCAMRKAFVDEXKSXLPKHILYKEHQQITDRDGXVETDSLKAHAEKPXPDRMIXNAANIFPFNTPTXRETYHYTMIIDRFFPQKSPRLTV

SEQ ID NO: 239227 - protein, 53 aa, Glycine max
  Clone ID: PAT_MRT3847_58047C.1.pep
LAENSFPSLFNLYVCIIFFIIINAYIPLLCIEKGNFYSPVYFYQKRKQKEKEI

SEQ ID NO: 239228 - protein, 139 aa, Glycine max
  unsure (1)..(139): unsure at all Xaa locations
  Clone ID: PAT_MRT3847_58048C.1.pep
MRPTMATTEHEKQFIVANPNPNPNAETPYRTCSCSSSLAIFARKSSFYDRLPFQPMRLTVLRLNGSCFHIQVSKMATAAELKDAAYAVFIHVPHKGPAKISWAHVRWQYCLCYDGQKLATEKDYLXTYGIKDGDQVSNF

SEQ ID NO: 239229 - protein, 313 aa, Glycine max
  unsure (1)..(313): unsure at all Xaa locations
  Clone ID: PAT_MRT3847_58049C.1.pep
MAIDDLCGDSEAETPLLSETLYGVVNFKGLPVLRSTSGGWKAAAFIITVEVAERFAYYGINSNLINYLTGPLGQSTVTAAENVNLWSGTASLLPLLGAFLADSFLGRYRTIVLASLIYVLGLSLLTFSTILPVTTSDGEVARPQLIFFFFSLYLVALAQGGHKPCVQAFGADQFDVNDPEECKARSSFFNWWYFAFSAGLFVTLFILNYVQDNVGWVLGFGIPCIAMLTALVIFLIGTWTYRFSIRREERGPFLRIGRVFIVAVNNWRITPSAVTSEEEACGTLPCXXSDQXXVFLNKALIASNGSRERGESL

SEQ ID NO: 239230 - protein, 130 aa, Glycine max
  Clone ID: PAT_MRT3847_5804C.1.pep
MQSAAFTFSPSLPLRNPSPNSWRRPSLSLRLHAKHSNNNNNSNSTEGVNSNGVSSTSFTRRSWTLLPSSSFKFRPLPSSPPRAAENAVPESAAAPVENPLFKTLELGALFGLWYLFNIYFNIYNKQVLKA

SEQ ID NO: 239231 - protein, 148 aa, Glycine max
  unsure (1)..(148): unsure at all Xaa locations
  Clone ID: PAT_MRT3847_58050C.1.pep
RTYANAGLVDEAISLYKSIPRFNCVNWTESFNTMLQIMVKENRLEIAHRLFVESSCGWEVRSLVRALNLLMYALCQKSRSDLALQLFQEMDYQSCYPNRDSYAILMKGLCQDRRLHEATHLWXSMFWRXSQKGNGEGYVVYRTLLDAL

SEQ ID NO: 239232 - protein, 211 aa, Glycine max
  Clone ID: PAT_MRT3847_58051C.1.pep
MQDPTLFQPMKPHFPEQEQLKCPRCDSTNTKFCYYNNYNLSQPRHFCKNCRRYWTKGGALRNIPVGGGSRKNTKRSSSSNNNTKRASPSPPVSSAPAPEPDPTRIGPTPVVGGGSFSSLLASSGHLGLGNLLKGLNSSGSNLKTVQMEEFGENVSSGPVADPDSGRNPGLEMQSNGNAENFLSLQNGDSSCWNGTSGWSHLAIFTPGSSFQ

SEQ ID NO: 239233 - protein, 124 aa, Glycine max
  unsure (1)..(124): unsure at all Xaa locations
  Clone ID: PAT_MRT3847_58052C.1.pep
KEKKGXKEKTEEKREXEQHXHKXEDTXAPXEKAEAAETAHAEEKKGPXDKXKEKPPGHKKTEVFFFTTPPPPPPDASLDHGEGAHHEGEAKEKKGILEKIKEKLPGYHSKTEEEKEKEKESGGH

SEQ ID NO: 239234 - protein, 211 aa, Glycine max
  Clone ID: PAT_MRT3847_58053C.1.pep
MQDPTLFQPMKPHFPEQEQLKCPRCDSTNTKFCYYNNYNLSQPRHFCKNCRRYWTKGGALRNIPVGGGSRKNTKRSSSSNNNTKRASPSPPVSSAPAPEPDPTRIGPTPVVGGGSFSSLLASSGHLGLGNLLEGLNSSGSNLKTVQMEEFGENVSSGPVADPDSGRNPGLEMQSNGNAESFLSLQNGDSGCCNGTNGWSNLAIFTPGSSYQ

SEQ ID NO: 239235 - protein, 46 aa, Glycine max
  Clone ID: PAT_MRT3847_58054C.1.pep
PSFTLCKSQCISDPYQTLTDNHTHSNLKSFSKHPTAPSTSISLNNT

SEQ ID NO: 239236 - protein, 196 aa, Glycine max
  unsure (1)..(196): unsure at all Xaa locations
  Clone ID: PAT_MRT3847_58055C.1.pep
MRGCATDGVVAWHRTLRKAFHSFCSPTSCIFGPNLPDVWVPREHTPPHTLFPESLQWANNGHNALILEGKPIAQQIKLVVAVEFXWLLRGCGMCPRLALVLVAVRWVSRAFLLLKLKACDQVGIETVTSQLPENCDESELLDVVSGFNEDPDVHGILVQLPLPQHLDEEKIINVLSPEKDVDGFHPLNIGNLAIRG

SEQ ID NO: 239237 - protein, 168 aa, Glycine max
  Clone ID: PAT_MRT3847_58056C.1.pep
HASARYLIKGFWLDFVAALPLPQALIWIVIPNLGGSTMANTKNVLRFIIIFQYLPRLFLIFPLSSQIIKATGVVTETAWAGAAYNLVLYMLASHFLGASWYLLSIERQEACWRSVCDMEEPSCQYGFFDCKRVEDSLRVSWFIASNITILCSPKANFYQFDIYSDAVT

SEQ ID NO: 239238 - protein, 56 aa, Glycine max
  Clone ID: PAT_MRT3847_58057C.1.pep
MSTTAMKRLMRDFKKLHQDPTAGISGAPQDINIMLRNAAIYGPYDTRWDGSTFKLT

SEQ ID NO: 239239 - protein, 111 aa, Glycine max
  Clone ID: PAT_MRT3847_58058C.1.pep
ASMRSFNGDFPPWRCSRRQRRRGERRRHLLGNKPWKKKLHHKECALDKKLEEDALMEEKKERRGEHEIEGIKEGEKWNFEVCLIRLSFIKVTTSVTHASIYRLGSFLEKLS

SEQ ID NO: 239240 - protein, 162 aa, Glycine max
  unsure (1)..(162): unsure at all Xaa locations
  Clone ID: PAT_MRT3847_58059C.1.pep
LSTTPPGVTPPILNNLTPAGQVDNDSSPAISTSVGADSVSDVDSKSASAPAPTPAVLVRPDNTHPMCTQAKAGVVKPRLQLTLLLAHAEPKSTKSALSNPQXLAAMKTECEALMKNGTWSLTALPSNRSPVGYQTRLVAKGFPQQPGFDYNRTFSPVLRRFL

SEQ ID NO: 239241 - protein, 88 aa, Glycine max
  unsure (1)..(88): unsure at all Xaa locations
  Clone ID: PAT_MRT3847_5805C.1.pep
RTSWCSYRCDGQLQMLIWFTTALIQLSYSISYQSRRHHDNLHSSPCCYLLLXSLSILVKCDHCYIXSHCCASECKICMCTLSLPGQCP

SEQ ID NO: 239242 - protein, 97 aa, Glycine max
  Clone ID: PAT_MRT3847_58060C.1.pep
SSFFHGLFPSGWCLPSPILLCRLLHLHDGKSPLKDPIEAQRSSLHRSPTSKLPSKYLKPSFLIHSMYPWWSTFCFMYFYSHFHSLFIPPFDVLKPFI

SEQ ID NO: 239243 - protein, 114 aa, Glycine max
  Clone ID: PAT_MRT3847_58061C.1.pep
ASMRSFNSDFSPWRCSGRQRRRGEGRHHPLGNKPWKKELHHQECALDKKLEEDALIEEKKEREREREEHEIEGGKGGEKLNFELCLTRLSFIKFTTSVTHASIYRLGSFLEKLS

SEQ ID NO: 239244 - protein, 293 aa, Glycine max
  Clone ID: PAT_MRT3847_58062C.1.pep
MKAKTVKGNWSLRTNKLSFPYVFLVCIFFFLAGFFGFTLFSHSQGDGDGLRPRQRLLEPGNEAEYNLMPVRDLGDDSITSIPFQVLSWRPRALYFPNFATAEQCENIIDVAKDGLKPSTLALRQGETEENTKGIRTSSGEFISASEDSTRTIAFIEEKIARATMIPRSHGEAFNILRYEVDQRYNSHYDAFNPAEYGPQKSQRMASFLLYLTDVEEGGETMFPFENGLNMDGNYGYEDCIGLKVKPRQGDGLLFYSLLTNGTIDPTSLHGSCPVIKGEKWVATKWIRDQEQDD

SEQ ID NO: 239245 - protein, 63 aa, Glycine max
  Clone ID: PAT_MRT3847_58063C.1.pep
PHFANFASKCDQKSGFKKTWSFPVVNLKKVFGVFFPRYILKCPPFSCSRSLQNWVFEWRKNFC

SEQ ID NO: 239246 - protein, 1152 aa, Glycine max
  Clone ID: PAT_MRT3847_58064C.1.pep
MSAFKRILGLEVIFRFLEVKETSSPLCDLVPLDLEIEATCIRNNTERRRKILQDRTTQPIPEEPQSSKSSSFYPEPRESEIGAFEADIMAEGQPRRVTLEDYSSSTVQQFFTSIARPEVQAHNITYPHYLIQLIQGNLFHGFPNEDPYAHLATYIEICNTIKIVGVPEDVVRLSLFSFSLSREAKRWLHSFKGNSLKIWDEVVEKFLKKYFPESKIAKGKATISSFHQFPDESLSKALERLRSLLWKTPTHGFSKPIQLNIFINRLRPQSKQLLDASAGGKIKLKTPDEAMELIENMAASLEVAAYCGGAHESECCIPLDDTAQEIADNSSSSFGANIEKNPKEECKAIMTRSRKATLVEDKGRTGDGKQQQVSEDEGDQLKEKSINEKEKEVEEKNDGEKEINEEEKEKEKEKEINEKNREKEENRKTKREKFEGAKATVSLSLDRVLSETQSLSETSAAYCFYVFNVSICAYVMHACGLITHSCYQDANNELAREKKKEVVPCSGKEVPYPLVPSKKDKERHLARFLDIFKKLEITIPFGEALQQMPLYSKAVIQRILQPTHKDPGSVTILCSIGSVSVGKALIDLGSSINLMSLSMCRRIGELEIMPTRMTLQLADRSITRPYGVLEDVLVKGKHFTFPEDFVVMDIEDDTEIPLILGHPFMLTASCVVDMGNGKLEMSVKDQKVTFDLLEAMKHPNDHKACFEVEKVEHEIAMVARAMELDGVEEKPVGHVVFEELKKNSSVEKAKVELKTLLEHLKKEEEDQLVKVLKKHKAAIGWHIYDLKGISPSYCMHKINMEADYKPVRQPQRRLNPVMKEEVRKEVLKLLEAGLIYPISDSDWVSLVQVVPKKGGMTVIRNEKNDLIPTRTVTGWRMCIDYRKLNEATIKDHYPLPFMDQMLQRLAGQSFYLFLDGYSGYNQIVVDPNDQEKTTFTCPFGVFAYRRMPFGLCNAPATFQRCMMAIFVDMVEKCIEVFMDDFSVFGSSFDCCLSNLERVLQRCEETNLVLNWEKCHFMVQEGIVLGHKISVRGIEVDKEKIDVIEKLPPPFNVKGVRSFLGHVGFYWQFIKDFSKIAKPLSNLLNKDALFLFDEDCLKAFNTLKTNLVSAPVIMMQSYLARALGRRLQVDWARDPRDGPRVLLSLRVDFEPMG

SEQ ID NO: 239247 - protein, 216 aa, Glycine max
  unsure (1)..(216): unsure at all Xaa locations
  Clone ID: PAT_MRT3847_58065C.1.pep
MEGVGARLGRSSTRYGPATVFSGPVRKWKKKWIHVSPSSASSNSSANNHASNASXFSSTSGPLSPTAFTPPTPLLYKWTPLTHSQNTATTNNANAKDSPPEPPEEPPRRKFKYVPVALLEEQKNEGAEIEGTEKVDEESKPIDADSGAAEATHKNETLDEKPDINDVPMEESQSQYKNQVVRQDLNESTLDLSLGLTSHDDEHDSDSKTNQTRDGQ

SEQ ID NO: 239248 - protein, 149 aa, Glycine max
  Clone ID: PAT_MRT3847_58066C.1.pep
GSRPTKSNLRRRQIEINDSLCPFCRSQQEDAAHLFFNCPKSLALWWESLAWTGIVGAFPIIPRYHFLQHQNGMNGGKRNHRWKCWWVALTWSIWQHRNKILFSNESFNAAKLMDDALFLLWSWLRASEKDFIIHYNYWSTNLPICFSAD

SEQ ID NO: 239249 - protein, 48 aa, Glycine max
  unsure (1)..(48): unsure at all Xaa locations
  Clone ID: PAT_MRT3847_58067C.1.pep
VTFIRSSVAPCKGVDISDVDLTFNEGATPAXCANVKPVIPAKAPTCTA

SEQ ID NO: 239250 - protein, 53 aa, Glycine max
  Clone ID: PAT_MRT3847_58068C.1.pep
RSLLVEVSRFALRQRDNLLNVDTQKQSLACLSFSKGRAAEDSPLQAECPTTTP

SEQ ID NO: 239251 - protein, 159 aa, Glycine max
  Clone ID: PAT_MRT3847_58069C.1.pep
YISSWGPTPSRQHHGRPMSKSSSSRSKMPCRTMPNAMHRPAKSIGQQPGFKAMVGRHCFNCLCGPVHFKSALAHVLLALCLTYFGSVIFCPSTTFHRLDLKNGSSWNNDRQKRKCRGADFVEILVKISFPMEQIVCEICPAKCDGAKGMASHMNMRHTG

SEQ ID NO: 239252 - protein, 285 aa, Glycine max
  Clone ID: PAT_MRT3847_5806C.1.pep
MNPSSGQPQQMSSQSVEKKPKPHPEQALKCPRCDSTNTKFCYYNNYSLSQPRYFCKSCRRYWTKGGTLRNVPVGGGCRKKRSSSLKRAQDQTLTPNLNPLTTLPHLSYDSNDFTLAVARFQKQSSGQLGYNDRDLSTLGNPTTGSFCDILGNSGMNPSSANPSFLDAIRTGFLETQNHLQNLYCMYGNGDLGEVDNGNSGVVGVSGEMMLPYDQVIMSNATTQSVSVMKQEMCSRREQSERRVLGGFPWQINADTNIGELDSGRTIASWNSFTNSWHGLLQSPLM

SEQ ID NO: 239253 - protein, 77 aa, Glycine max
  Clone ID: PAT_MRT3847_58070C.1.pep
MGGANSTQAHLGPPEGCCFWRKQPGFAWASWAASTLPFFAEALPKRFRNVFREEFRKGFNRSSTFFIRSSSFFDLQR

SEQ ID NO: 239254 - protein, 46 aa, Glycine max
  Clone ID: PAT_MRT3847_58071C.1.pep
RRQNEERKDKDKITVRDSEMSLQSGRSRGFKLTYSSMRRHNASIVS

SEQ ID NO: 239255 - protein, 244 aa, Glycine max
  Clone ID: PAT_MRT3847_58072C.1.pep
KVTNIPSAISYLNNHFFAPVDLEIPDQATVKEGKIHGLTALRLSYLFMKLCSILKISPNVTESGNKHLAPELEDFTNVFHPFSTPIQDSFNGGDVGMWTNNTKKVSCEHLVFLWGFKIGITAGMLKSLLRSSHDIFSREFDVKLVDKSCAIVVFWQSGVSKRFLDILNSEEIRGDLKELVSDGMRVTSYETYNPICRLGLWEMDLAESLERPLESSCCDIESNCERKSSEIHWYNDNVINLDDL

SEQ ID NO: 239256 - protein, 38 aa, Glycine max
  Clone ID: PAT_MRT3847_58073C.1.pep
ATTFLGVILTIKIKNLFYSFITRILQHSPVPGLLHRNK

SEQ ID NO: 239257 - protein, 296 aa, Glycine max
  unsure (1)..(296): unsure at all Xaa locations
  Clone ID: PAT_MRT3847_58074C.1.pep
MHQPDLVSWTSLIVGYAQNGQPEEALHFFKLLLQSGTKPDXNKGLEYFHSIREKHGLMHTADHYACVIDLLERFGRFKEAENIIDNMHVKPDKFLWASLLGGCRIHGNLELAKRAAKALYEIEPENPATYITLANIYANAGLWSEVANVRKDMDNMGIVKKPGKSWIEIKRQVHVFLVGDTSPPKTSDIHEFLGELSKKIKEEGYVPDTNFVLHDVEEEQKEQNLVYHSEKLAVAFGIISTPPGTPIKVFKNLRTCVDCHTAIKYISKIVQRKITVRDSNRFHCFEDGSCSCKDYW

SEQ ID NO: 239258 - protein, 53 aa, Glycine max
  Clone ID: PAT_MRT3847_58075C.1.pep
TYILLDDVPKRRTLHGSRISNIIDSNDIQILTHQSKQKCMRCTNDNQNNKNKH

SEQ ID NO: 239259 - protein, 67 aa, Glycine max
  Clone ID: PAT_MRT3847_58076C.1.pep
SPGELGFFFGARSFCFGNPLEKKLAPLFSFRQFHHKFSITYVMAFILSCSYCKECFYLIGVLLSWYS

SEQ ID NO: 239260 - protein, 85 aa, Glycine max
  Clone ID: PAT_MRT3847_58077C.1.pep
AAQPWNSTMLPANWWLKSTFFLLLGHPTSSRRNWINTLFNINTGSHLLIVHTKRDQYTGGDGLIWCAKYTRAKPTALTHANGELK

SEQ ID NO: 239261 - protein, 50 aa, Glycine max
  Clone ID: PAT_MRT3847_58078C.1.pep
KKKKKKKKKKKKKKKKKKKKKKKKKKKKKHKKNKKKKKKKIFFFGGGPPP

SEQ ID NO: 239262 - protein, 475 aa, Glycine max
  unsure (1)..(475): unsure at all Xaa locations
  Clone ID: PAT_MRT3847_58079C.1.pep
LASGVLVVEPENLGGEAVDITPKEFXTVAQEYGGGAFTVSDDVVFFANYKDQRLYKQSISSLDVPPIPLTPDYGGPVVSYADGILDVRFNRFISVREDRCKSSQNPTTTIVSIALGSKDAQEPQVLVGGSDFYAFPRLDPKSERMAWIQWSHPSMPWDKSELWVGYISENGEIYKRVCVAGNNPSLVESPTEPKWSSDGELFFITDRENGFWNLHKWIESENKVLPVYSLEAEFARPLWIFGMNSYEFLQSHTRKNLIACSYRQQGKSYLGIIDDVKGSKLTVLDIPFTDINNITSGNDCLFVEGASEVLPSSVAKVTLDDDKSKAVDFNIIWSSSPDSLKYSSYISKPEFIEFPTEVPGQNAYAYFYPPSNPDFQASKEEKPPLLLKSHGGPTQETRGILNLSVQYWTSRGWAVVDVNDGYGRVYRDKLGKYTRRGKKKVCQLLLLSMKENNTVSERLRTLSLHLNKKWSSSHD

SEQ ID NO: 239263 - protein, 119 aa, Glycine max
  Clone ID: PAT_MRT3847_5807C.1.pep
RGVPFSLLDWQIFVKGFFWGLFSFSPTGQKGFFFKGIYFGNPKVFSIPSFFKKRPVDLFLVTFLKNFYFSLRGFLNLVFLKGPPFFFEGFFFFFFFFFFFFFFFFFFFFFFFFFFFFFE

SEQ ID NO: 239264 - protein, 80 aa, Glycine max
  Clone ID: PAT_MRT3847_58080C.1.pep
LSFILRLELVTFSFMIICSREGDARTLPKSALLASQVDLPSVAPLSVVAPLAKLPGTLPSVPGLPAVPEVPTPEVILYTA

SEQ ID NO: 239265 - protein, 383 aa, Glycine max
  unsure (1)..(383): unsure at all Xaa locations
  Clone ID: PAT_MRT3847_58081C.1.pep
FLVKHMEGMVRKMDRYVTVTRNLYSEMEVLNELEQAVKKFQHNQHEESRRAFEQKLMWQKQDVRHLKDVSLWNQNFDKVVELLARTVCTIYARISVIFGESALRKNALGLGGGSPGTQNELGRGTTSRPQIDLRRGELVPIRPEDFGFPCGGTSAGRLFMECLSLSSSVSKFDDADDHEDGARVPFXQAKSGVQSCSTLGPKSRLAVYAPPSTLGGCALALHYANVIIVIEKLLRYPHLVGEEARDDLYQMLPMSLRLSLKAKLKSYVKSLAIYDAPLAHDWKENLDGILKWLAPLGHNMIRWQSERNFEQHQIVSRTNVLLLQTLYFADREKTEESICELLVGLNYICRYEHQQNALLDCASSFDFEDCVEWQLQCGDSFLN

SEQ ID NO: 239266 - protein, 69 aa, Glycine max
  Clone ID: PAT_MRT3847_58082C.1.pep
GGIPPPVGPFPKLTHLGLGPPPFSGGISVPFFKPPFFKEMSLGGNAFRAGGPPLGFPQGLGVFDGGFLG

SEQ ID NO: 239267 - protein, 132 aa, Glycine max
  unsure (1)..(132): unsure at all Xaa locations
  Clone ID: PAT_MRT3847_58083C.1.pep
HADSNGDVILYYRRALLHRRNHDAKTISKIQKELVVYVIYSGGEAVLTNLHSHMDSSLVPRNNLQEAILLLMILLRKISLNIIEWDPLILDHLSIALYVSGDLTAIAHXWEELLPGTIHRRERYHALYVLDY

SEQ ID NO: 239268 - protein, 61 aa, Glycine max
  Clone ID: PAT_MRT3847_58084C.1.pep
PASLALAWVFKQGKDVVPFPGTTKINNLYQNIGALDAKLSEKNLKKISEAVPIVDVPGGKY

SEQ ID NO: 239269 - protein, 120 aa, Glycine max
  unsure (1)..(120): unsure at all Xaa locations
  Clone ID: PAT_MRT3847_58085C.1.pep
ICQMLNVIIGNNVEIGANTCIDRGSWRDTVIGDNSKIDNLVQMRLLNXLLSYNNNTXVEVSIGDYVTTEGRVAVRDHLSIISKQVXVTKDIKEPGDYGGFPAVLIHQWRIQVASRCQTLV

SEQ ID NO: 239270 - protein, 75 aa, Glycine max
  Clone ID: PAT_MRT3847_58086C.1.pep
TKLRDANGRTARGKRRKTSTKINNKTAKKEKKSRGAKKEVKWTTERGNKRMGKKKGTKKKNKKGSKKGSNDWQKK

SEQ ID NO: 239271 - protein, 119 aa, Glycine max
  Clone ID: PAT_MRT3847_58087C.1.pep
QLLILLCVLLFLALIGTLYPYNRGGLLNWLVLLYALSSVFAGYTAASFHGLFAENGWERSASLAAILYTGPVFVVASILNIVAISYRATIGLPFGSIIAILGLLTFLAIPLLAFGGVIG

SEQ ID NO: 239272 - protein, 231 aa, Glycine max
  Clone ID: PAT_MRT3847_58088C.1.pep
RIIQVNAFGDPNRAADITKDVGVDVKFTYSVIWNATKVRFENRMDRYLRASLMPVHQQVHWFSFVNSIVIILLLIGLLALLYMRHLRSDLKKYSNANEEDNEVGWKSLQHGDVFRPPPNSSLLFAVVGTGTQLLILLCVLLFLALIGTLYPYNRGGLLNWLVLLYALSSVFAGYTAASFHGLFAENGWERSASLAAILYTGPVFVVASILNIVAISYRATIGLPFGSIIVI

SEQ ID NO: 239273 - protein, 55 aa, Glycine max
  Clone ID: PAT_MRT3847_58089C.1.pep
LPQPITMLEPLPNIVTLGMLTPFTPKNKKWRLLTTKATCSCHGQRMFILTRMAGI

SEQ ID NO: 239274 - protein, 80 aa, Glycine max
  Clone ID: PAT_MRT3847_5808C.1.pep
FDPLVRPSFLFSFVDASGKRLTVYTTEHKEKATASYRAAFNEGGTSLFCARYTSHHILFNVQSCGAQDADAWVNYTRTLV

SEQ ID NO: 239275 - protein, 349 aa, Glycine max
  unsure (1)..(349): unsure at all Xaa locations
  Clone ID: PAT_MRT3847_58090C.1.pep
VIVRERDEKETXAVVALIKNIRRKNLSVVEEAEAYKKLLEIGGTTQNELAKSLGESQSFIANNLRLLKLAPNVIKRFGEGKITERHARAVLVLPDETQEELIEQVISQKLNVKQTEDRVRQKTGPEKVKAQTFQFSQDVTQAKEELGVDISKRSSVVAHYKNGKFQKEFFIQNNKNGYNYLLKYLNDLDHPQLIFESTEIFTHPDMVLDIDKEVLITHIFNSTDKGMSMDKATKYALQLRVIAQESYPNVDRHSFLVEKLRLLIQQLKQSIHHLKQLDDAMIQLAQQLDYFENIHSIPGIGKLSTAMIIGEIGDIKRFKSNKQLNAFVGIDIKRYQSGHTHCRDTINKR

SEQ ID NO: 239276 - protein, 102 aa, Glycine max
  Clone ID: PAT_MRT3847_58091C.1.pep
FYCHKRVRPCYIEYVLQCLEWQFFPLRFFAMYYSIVLIISCYAFTTIFKKILPCFHFVFYFKGFEKKNGENSKFLFLHILYKLLETRNKLKIKWTLDNGLYN

SEQ ID NO: 239277 - protein, 268 aa, Glycine max
  unsure (1)..(268): unsure at all Xaa locations
  Clone ID: PAT_MRT3847_58092C.1.pep
MTGKDILHIMNVKAGLAPPDTGKGKGKIXKTHPMEDYLVSEFKQEKDRELGLFAIFDGHLGHDVASYLQNHLFQNILKEHDFWTETESAVKRAYLETDEKILEQALVLGRGGSTAVTAILIDGQKLIVANVGDSXFICENGKGQDNYLWGYHEPSKEKKWIERRGGFVSKIPGDVPRVDGQLAVARAFGDRSLKMHLSSEPDVLVEEVDPHTEFLILASDGIWKVMSNEEAVESIRQIKDAQAAAKHLIEEAVSRKSKDDISCIVVRF

SEQ ID NO: 239278 - protein, 93 aa, Glycine max
  Clone ID: PAT_MRT3847_58093C.1.pep
VFPTQLNFKSLFCAPSGRVVHSQRVCRVSKVSQVLNDLSGTMADKSQTRDSHVRLSLHLSHKAWSHRPNGQVPLGRWVSTSRGGPSNRYFTAP

SEQ ID NO: 239279 - protein, 186 aa, Glycine max
  Clone ID: PAT_MRT3847_58094C.1.pep
MTGREILHMMKVKAGFGTPDTGNGKGKISKHITHGFHLMKGKSAHPMEDYLVSEFKQEKDRELGLFAIFDGHLGHDVASYLQNHLFQNILQQHDFWTETESAVKKAYVETDEKILEQELVLGRGGSTAVTAILIDGQKLVVANVGDSRAIICENGKARQLSVDHEPSKEKKSIERRGGFVSNIPGR

SEQ ID NO: 239280 - protein, 92 aa, Glycine max
  Clone ID: PAT_MRT3847_58095C.1.pep
SLSLSLSFTRITLSTVRFIHQWIATVFSLLHSSASPTTTPAAPAPATKPPAASPPPAPVPVSSPPAPVPVSSPPAPVPVAAPTTPVAHAPAP

SEQ ID NO: 239281 - protein, 248 aa, Glycine max
  Clone ID: PAT_MRT3847_58096C.1.pep
MNGVEIFVKKKKKKTTNHTLHSAIHSPMDRNGVLSLAFICIVVAGVGGQSPAAAPSNTPATPAAATPAQAPSTVPNSPAPVASPKSSPPASSPKPATATPASSPAASPTTTPAAPAPATKPPAASPPPAPVPVSSPPAPVPVSSPPAPVPVSSPPAPVPVAAPTTPVAPAPAPSKHKKKGKKHGAPAPSPSLLGPPAPPTGAPGPSEDASSPGPATAANDESGAETIMCLKKVLGGLGLGWATLVLVF

SEQ ID NO: 239282 - protein, 216 aa, Glycine max
  Clone ID: PAT_MRT3847_58097C.1.pep
MDRNGVLSLAFICIVVAGVGGQSPAAAPSNTPATPAAATPAQAPSTPNSPAPVASPKSSPPASSPKPATATPASSPAASPTTTPAAPAPATKPPAASPPPANPPPAPVPVSSPPAPVPVSSPPAPVPVAAPSTPVAPAPAPSKHKKKGKKHGAPAPSPSLLGPPAPPTGAPGPSEDASSPGPATAANDESGAETIMCLKKVLGGLGLGWATLVLVF

SEQ ID NO: 239283 - protein, 49 aa, Glycine max
  Clone ID: PAT_MRT3847_58099C.1.pep
DYIFEIKKKSMKLLCVVWFNFHTRNCKQRQISTEKSDFFNLFVLSIYIF

SEQ ID NO: 239284 - protein, 53 aa, Glycine max
  Clone ID: PAT_MRT3847_5809C.1.pep
MESSKIYAYLFLCMHFLSSATPILGCRYCGKPPKKHKDRRTSETPSVPVLKPP

SEQ ID NO: 239285 - protein, 128 aa, Glycine max
  unsure (1)..(128): unsure at all Xaa locations
  Clone ID: PAT_MRT3847_580C.1.pep
GPLYPGRPTSLPTRTETTTGGFKASIRRDRQTQEHALLTCTLGVKHMIRGXNKMDATTPKYSKARHDEIEKEVSSYLKKGGYNPDKIPSVXNSRFEGDNMIERPTNPDWYKGTTLLDAPDQINEPKRP

SEQ ID NO: 239286 - protein, 106 aa, Glycine max
  unsure (1)..(106): unsure at all Xaa locations
  Clone ID: PAT_MRT3847_58100C.1.pep
MDKGRVSRRAEVLTNHLLRRTPAPFDLLHPHPCLIYSPPELSDTHXFDTREMRKLTDCHNLDERDWILSLILQSHVLNPRHRPGRVFDYPDYDQTMEHQRLDNMKR

SEQ ID NO: 239287 - protein, 51 aa, Glycine max
  Clone ID: PAT_MRT3847_58101C.1.pep
KFQMIRSTVNLKTTVVALFWGAYNYIMGGGVYYTLYLYTKFRVFDGALGSL

SEQ ID NO: 239288 - protein, 44 aa, Glycine max
  Clone ID: PAT_MRT3847_58102C.1.pep
MVMIKMMIQVVCFHICVACMLPPHVFVSLVRSCDHSIHRASRFS

SEQ ID NO: 239289 - protein, 91 aa, Glycine max
  Clone ID: PAT_MRT3847_58103C.1.pep
LHTTCGISPSLVGWKTHVLYDLGQKKDDLTYLTPSFINFSNVFLARFVKTPITNPEYVEQYVQYSLGGKDHRNQFPWQFPTKRKRVPTPPP

SEQ ID NO: 239290 - protein, 140 aa, Glycine max
  Clone ID: PAT_MRT3847_58104C.1.pep
PDGGSHRKRCPQLFGYWVCRYNSQSNQTVPNKCVPKQTKPKQVRRRRKSMMGRLLEDGSRRKQCHIFLSLYHSFAHVSCIFLSLYHSFAYGVAHEQPVLATVTATQLVPVFSCPIYAHFVHLQFCTSLFGIFGTIYRFSL

SEQ ID NO: 239291 - protein, 160 aa, Glycine max
  Clone ID: PAT_MRT3847_58105C.1.pep
MASSKVATTTTTTTNSDISSQQVWDGATMEMESQDNMNMSMSLQDLLTENDAVPPSHSHGRGKRKTLVEEPLVVDKVTLQKQRRMIKNRESAARSRERKQAYTVELESLVTHLEEENAILLKQEADRKRQRFNQLMECLIPVEEKRKPKPMLRRVNSSQW

SEQ ID NO: 239292 - protein, 55 aa, Glycine max
  unsure (1)..(55): unsure at all Xaa locations
  Clone ID: PAT_MRT3847_58106C.1.pep
SENVFSLEAKEGEWRLVGDVPGGKFPEFCKRLRIIKSFXAIGVAPKALEKGKSRS

SEQ ID NO: 239293 - protein, 78 aa, Glycine max
  Clone ID: PAT_MRT3847_58107C.1.pep
KDFISHLNSLKTGINIFFIRDVGMPLLVGLWDGDFLLLFLTKILLLLQNDKKKFSRTMYPKISSSFTKIMCLCLVSYQ

SEQ ID NO: 239294 - protein, 159 aa, Glycine max
  unsure (1)..(159): unsure at all Xaa locations
  Clone ID: PAT_MRT3847_58108C.1.pep
ELVAEVLAAAAVIMLALSASYAAFTKFSKIKKENNNLGQISSSISKSSLNYKYETLEKATDYFNXSRKVGQGGAGSVFKGILPNGKVVAVKRLIFNNRQWVDEFFNEVNLISGIEHKNLVKLLGCSIEGPESLLVYEYLPKKSLDQFIFEKNRTQILNW

SEQ ID NO: 239295 - protein, 56 aa, Glycine max
  Clone ID: PAT_MRT3847_58109C.1.pep
RPPPPSFFSLPGMTKKPFSILFSNRGVYHPRHINKKNYFNGPQNLFSDFNPPPQFF

SEQ ID NO: 239296 - protein, 79 aa, Glycine max
  Clone ID: PAT_MRT3847_5810C.1.pep
KMVLLALAFVKTPPLGGGSNNWFPMLGGNGVLPSQLGGGLVPRLWPEDKPRFWFLGGISPLGAGLFIFPGTWFFKGKGC

SEQ ID NO: 239297 - protein, 40 aa, Glycine max
  Clone ID: PAT_MRT3847_58110C.1.pep
HPLHEEVTKHNWQISLVTVHAHQSFEAPAAKMTRAYTQES

SEQ ID NO: 239298 - protein, 604 aa, Glycine max
  unsure (1)..(604): unsure at all Xaa locations
  Clone ID: PAT_MRT3847_58111C.1.pep
DLTLGELLKYKSEEGVRVLLLVWDDKTSHDKVFLKTAGVMGTHDEETRKFFKHSSVMCVLSPRYASNKMSFLKQQEQGLAATACSLAPHATPPASRPIRSPLVGTVFTHHQKCVIVDTQAAGNNRKITAFIGGLDLCDGRYDTPEHRLFRNLDDVFDGDFHNPTFPAGTRVPRQPWHDLHCRIDGPAAYDVLINFEQRWRKATKWKEFAILFKKTSQWHDDALIRIERISWILSPSGAATLKDKSDYYTVPEDDPLVWVSSEDDPENWHVQDSXSLKGFPKRVDVALSQNLICVKNLVIDKSIQTAYIQAIRSAQHFIYIENQYFIGSSYAWPAYKDAGADNLIPMELALKIASKIRAKERFAVYIVLPMWPEGDPKTGAMQEILFWQGQTMQMMYDAVARELKSMQLTDVHPQDYLNFYCLGNREHFNEDSSSTNGAQVSTAYKYRRFMIYVHAKGMIVDDEYVIIGSANINQRSMAGTKDTEIAMGAYQPHYTWSAKKRHPHGQIYGYRMSLWGEHLGMLDETFEEPERLECVHKVNKIADNNWKLFASEDFSLLQGHLLKYPVQVDSDGKIRSLPDCENFPDAGGKILGAHSTTIPDILTT

SEQ ID NO: 239299 - protein, 281 aa, Glycine max
  Clone ID: PAT_MRT3847_58112C.1.pep
MQKAGYGGDGIYRSLRPCLVLPNDPNLSLVSFLFQSVSSFPSKIALVDSHSSQTLTLAHLKSQVAKLAHGFLKLGINKNDVVLLLAPNSIHYPICFLAATAIGAVVSTANPIYTVNEISKQVDDSNPKLLITVPELWDKVKNLNLPAVIIDTETAQGLVSFEAGNEVSRITSLDAVMDMAGPATELPESGVKQGDTAALLYSSGTTGLSKGVVLTHRNFIAASVMIGMDDDLAGEQDDVYLCVLPMFHVFGLAVVTYAALRLGSAVVVMDRFELVALLEGY

SEQ ID NO: 239300 - protein, 604 aa, Glycine max
  unsure (1)..(604): unsure at all Xaa locations
  Clone ID: PAT_MRT3847_58113C.1.pep
LKYKSEEGVRVLLLVWDDKTSHDKVFLKTAGVMGTHDEETRKFFKHSSVMCVLSPRYASSKMSFLKQQEIGFFVSXFSVESNVKCPVFCGLSSKQWVVGTVFTHHQKCVIVDTQAAGNNRKITAFIGGLDLCDGRYDTPEHRLFRNLDDVFDGDFHNPTFPAGTRVPRQPWHDLHCRIDGPAAYDVLINFEQRWRKATKWKEFAILFKKTSQWHDDALIRIERISWILSPSGAATLKDKSDDYTVPEDDPLVWVSSEDDPENWHVQIFRSIDSGSLKGFPKRVDVALSQNLICAKNLVIDKSIQTAYIQAIRSAQHFIYIENQYFIGSSYAWPAYKDAGADNLIPMELALKIASKIRAKERFAVYIILPMWPEGDPKTGAMQEILFWQGQTMQMMYDVVARELKSMQLTDVHPQEYLNFYCLGNREHFNEDSSSTNGAQVSTAYKYRRFMIYVHAKGMIVDDEYVIIGSANINQRSMAGTKDTEIAMGAYQPHYTWSAKKRHPHGQIYGYRMSLWGEHLGMLDETFEEPGRLECVEKVNEIAENNWKLFASEDFSLLQGHLLKYPVQVDSDGKIRSLPDCENFPDAGGKILGAHSTTIPDILTT

SEQ ID NO: 239301 - protein, 84 aa, Glycine max
  Clone ID: PAT_MRT3847_58114C.1.pep
GHAVIVRLPRSYDSALQGNHLFLPRRLLHQVVSRDHLTQCMQILVVFELHILLAKASVSDEPDKCLSVGAQFRGVRMLARGYQK

SEQ ID NO: 239302 - protein, 50 aa, Glycine max
  Clone ID: PAT_MRT3847_58115C.1.pep
IGIWFSNPKLIEVPMARNTRAIDSLRGVISIFFPFYNPIFSLVFHWLNCK

SEQ ID NO: 239303 - protein, 130 aa, Glycine max
  unsure (1)..(130): unsure at all Xaa locations
  Clone ID: PAT_MRT3847_58116C.1.pep
VRVPLWVPCWATLGLIGVILVGSTLPSLPLPEVASSVPLQPVSNGPILCRLPPPGIGAFSLDTGSXRSPLPFPLEGIPQVCLGLCSCPCAVGCAQDPVLVHAPFLLLVLASFLPCVQKKKKKGFSPSGQI

SEQ ID NO: 239304 - protein, 234 aa, Glycine max
  Clone ID: PAT_MRT3847_58117C.1.pep
MAHLQEIDRVKNEVIRLERESVIPILKPRLIMTLANLIEHSSDRAEFLKLSKRIEYTIRAWYLLQFEDLMQLYSLFDPVHGAQKLEQQKLSSEEIDVLEQNFLTYLFQVMEKSNFKIVTDDEIDVAHSGQYLLNLPITVDESKLDKILLKKYFEEHHHDDLPDFSDKYVIFRRGIGIDRTADYFVMEKVDMLIGRFWAYLLRVTRLGKLLSRKVKRRNKKDPKKDNEINSEADG

SEQ ID NO: 239305 - protein, 86 aa, Glycine max
  unsure (1)..(86): unsure at all Xaa locations
  Clone ID: PAT_MRT3847_58118C.1.pep
QGAIQFARSEGLIPAPEPTHAIAATIIXAIRCREAGEAKVILTAMCGHGHFDLPAYEKYLQGNMVDLSFSEDKMKASLANIPQVIT

SEQ ID NO: 239306 - protein, 231 aa, Glycine max
  Clone ID: PAT_MRT3847_58119C.1.pep
MVQPAPAMTQFLNSVLSQRGPSAVPYSEDTKWLIRQHLVALTTAFPSLEPKTASFTHNDGRSVNLLQADGTIPMTFQGVTYNIPVVIWLMESYPRHPPCVYVNPTRDMIIKRPHPHVNPSGLVSVPYLQNWTYPGDDSVPQLRPFPARPLRGPLLRGHRVVHPLAPRRSHHCLPFPRAPTPSFTHNDGRSVNLLQADGTIPMTFQGVTYNVPVVISSPSPCPAPSSRVQST

SEQ ID NO: 239307 - protein, 353 aa, Glycine max
  Clone ID: PAT_MRT3847_5811C.1.pep
VIGPNANSSPLTLLGNYAGPPCKYTTRLQAFRHYVKNAFYHPGCDGGPKCSSAQIDQAVEVAKKVDYVVLVMGLDQSEEREERDRVHLDLPGKQLELINGVAEASKKPVILVLLSGGPLDITSAKYNHKIGGILWAGYPGELGGIALAQIIFGDHNPGGRLPTTWYPKDYIKVPMTDMRMRADPSTGYPGRTYRFYKGPKVYEFGYGLSYSKYSYEFVSVTHDKLHFNQSSTHLMVENSETISYKLVSELDEQTCQSMSLSVTVRVQNHGSMVGKHPVLLFIRPKRQKSGSPVKQLVGFESVMLDAGEMAHVEFEVSPCEHLSRANEAGAMIIEEGSHMLLVDDLEHPIDIYV

SEQ ID NO: 239308 - protein, 72 aa, Glycine max
  Clone ID: PAT_MRT3847_58120C.1.pep
KERYYRPIHGIVTVFCSRPKDGHTSYYPELRKKIRVCVCPSTLIVERALPVPGYLLFIDTIIFGYLLTAAKG

SEQ ID NO: 239309 - protein, 51 aa, Glycine max
  unsure (1)..(51): unsure at all Xaa locations
  Clone ID: PAT_MRT3847_58121C.1.pep
TPXXXXLVTPXRLPVPVIXFPGXVXASXVGGRSXSXTXSXRIPXXRTRAXD

SEQ ID NO: 239310 - protein, 327 aa, Glycine max
  Clone ID: PAT_MRT3847_58122C.1.pep
YLLCAITLAVLRQIHYLENGSVEIYSRHAERNTGKFPDVVAAVSRLKKPTVSSLILDCEIVAYDRQTQTIHSFQALSTRARKNVEMEDIKVDVCIFAFDLLYLNGQALLQENLRVRREHLYASFEEEPGFLQFATTITSNDVEEIQNFLDQAVGASCEGLIIKTLNEDATYEPSKRSLNWLKLKKDYMDNIGDSLDLVPIAAFHGRGKRTGVYGAFLLACYDNDNEEFQSICKIGTGFSEAVLEERSSSLRSKVIPKPKAYYRFGESINPDVWFEASEGISLRFPRLLRVRPDKSPEQASSSEQVAEMYNAQKQNHTINQNDDEDDD

SEQ ID NO: 239311 - protein, 209 aa, Glycine max
  Clone ID: PAT_MRT3847_58123C.1.pep
IQNFLDQAVGASCEGLIIKTLNEDATYEPSKRSLNWLKLKKDYMDSIGDSLDLVPIAAFHGRGKRTGVYGAFLLACYDNDNEEFQSICKIGTGFSEAVLEERSSSLRSKVIPKPKAYYRFGETINPDVWFEASEVWEVKAADLTISPVHRAAVGIVDPNKGISLRFPRLLRVRPDKAPEQASSSEQVAEMYKAQKHNHTNNQNDDEDDD

SEQ ID NO: 239312 - protein, 212 aa, Glycine max
  Clone ID: PAT_MRT3847_58124C.1.pep
FRFWNDLYGFQLDTNRWYPLELRKEKSTKDKLKKIEQNCPDDVNKINPACTTREETEESEDEENNIDDISKNIASNMSIDDGETLTKSEGKAEESSAKLDIQSSLPEVVKPCGRINACMAVGRDTLYIYGGMMEIKDQEITLDDLYSLNLSKLDEWKCIIPASESEWVEASDDDEEDDDDEDESDNDGSTDEDEDDEATGGGNRLRMPHFKW

SEQ ID NO: 239313 - protein, 135 aa, Glycine max
  Clone ID: PAT_MRT3847_58125C.1.pep
MEICWGGMPRVFPPINMGLFANLGGILPKYFPGPTLFFVFLLFKSLGGFTKGSSLRSFKALPIYTPVILLYLTLYPFWGLIKRCCYFRCCSSLPPPSALFPPPPPPPPPPPPPPPPHPRPKTEDRHTVMTGNLIG

SEQ ID NO: 239314 - protein, 123 aa, Glycine max
  Clone ID: PAT_MRT3847_58126C.1.pep
KKKKKKKKKKKKKKKKKKKKKKKKKKKKKKKKKGGNSYRGSKILFPGAGKVLFFCLGVPNLISWARGCPPSFIGNSLGFPLLTALLFFPFSPVGVFAKGPAPCGLSKPLPCPVGLGAAPCTVL

SEQ ID NO: 239315 - protein, 121 aa, Glycine max
  Clone ID: PAT_MRT3847_58127C.1.pep
MPTLTNFYSIKDLSQHTTKDDCWILVDGKVYDVTQYLDDHPGGDDVILAATGKDATEEFEDAGHSKSAREHMEQYCIGELDTSSPISTKEKFIQLTKQYWVVPATVVGISVVVAFLYLRKK

SEQ ID NO: 239316 - protein, 66 aa, Glycine max
  Clone ID: PAT_MRT3847_58128C.1.pep
IKTPRMCSGKGLSLTFRRWDPKKTVGDTFNGQTSKTQILALKKVHGQRVMPALSIAQLGCSDLASG

SEQ ID NO: 239317 - protein, 103 aa, Glycine max
  Clone ID: PAT_MRT3847_58129C.1.pep
AVAPLAPFGRVEGRLLWGFRARAAGNGEVRHVGNGGPIQPRYKEFPQLTQSQVIHGEVLSSLRWVWILWRFWHDSEAVVGHFLYPDPSKWTDEKLGVPPYHED

SEQ ID NO: 239318 - protein, 357 aa, Glycine max
  Clone ID: PAT_MRT3847_5812C.1.pep
MGIDSEYVISHKAYARVGLLGNPSDVYYGKTIALSVANFFATVTLRPSDQLILQPHPLHDLLHFSSLPQLVNRLSSQGYYGGVRLLMAICNVFYAYCRENAIDLGDDNFTLSYDTNIPRQAGLSGSSGIVCAALNCLLDFYNVRHLVKVEVRPNLILAAEKELGIVAGLQDRVAQVYGGLVYMDFSKENMNELGHGVYVPVDLSLLPPLYLIYAENPSDSGKVHSKVRQRWLDGDEFIVSSMLEIANIAQEGKTALEEKDYSKFAALMNRNFDLRRLMFGDDALGDLNLKMVEVARKVGAASKFTGSGGAVVAFCPEGTSQVKLLEDECQKEGFVILPIEPLPSRLNEIDLKTLQIK

SEQ ID NO: 239319 - protein, 72 aa, Glycine max
  unsure (1)..(72): unsure at all Xaa locations
  Clone ID: PAT_MRT3847_58130C.1.pep
NPASYRAIVIPTNANPCTDAXNLDFLKRTGFHCEIICVTAWTATPMDEVQVTNLSLISSQELLPMTCRVFNP

SEQ ID NO: 239320 - protein, 94 aa, Glycine max
  unsure (1)..(94): unsure at all Xaa locations
  Clone ID: PAT_MRT3847_58131C.1.pep
KKLLEEYVWAVYSNGRKVGSPIRRKQMRADEFHVIPHLKGVSMGPGVLPXSPDYKDCDGEIPPMRPRFXRVVGSKDSDPFYMINPDFTAQAPLS

SEQ ID NO: 239321 - protein, 83 aa, Glycine max
  Clone ID: PAT_MRT3847_58132C.1.pep
DGVANPQAPVFSVDDDSPLRHQADSKGGPMFLYVLKDTSFFLPRSIGPNKCFPKAWDIWSGKVITYNVHCILSENHCHYVCVF

SEQ ID NO: 239322 - protein, 113 aa, Glycine max
  unsure (1)..(113): unsure at all Xaa locations
  Clone ID: PAT_MRT3847_58133C.1.pep
GEINPYXSEWTEWDTRLLSKVNDILCCEYARFDGLITNQVMSKMEDMIYSLXGGDEKXMHEKTHLLVACCSRMAICKRDVWKDKCEIPSGFPLTGICNSIFNEKLIKYSYEKL

SEQ ID NO: 239323 - protein, 102 aa, Glycine max
  Clone ID: PAT_MRT3847_58134C.1.pep
IKYLRTDRSCFFSASIIFSRAFSLCGSSFFVSFTRPSVTARLSESLSVIHLSFKLRFSGMSRTSPRSKLTKMFRKLRVFRNEMQVLLSTFASPIKFQNYMFH

SEQ ID NO: 239324 - protein, 54 aa, Glycine max
  Clone ID: PAT_MRT3847_58135C.1.pep
GFLSCQYELAQVATDQLGVNLPWIGHNLLLLKFWKRENNGGYNFHKTLGKINHT

SEQ ID NO: 239325 - protein, 61 aa, Glycine max
  Clone ID: PAT_MRT3847_58136C.1.pep
LVIAHKGNEGYILGFLAHINPHDAKNIIYRNKNIFKWEHGEYIGSEKFENFFSPCVFEVDY

SEQ ID NO: 239326 - protein, 48 aa, Glycine max
  Clone ID: PAT_MRT3847_58137C.1.pep
SVIYIYYVPSIQKKKKKKKKKKKKKKKKKKKKKKKKKKKKKKKKKKKK

SEQ ID NO: 239327 - protein, 87 aa, Glycine max
  Clone ID: PAT_MRT3847_58138C.1.pep
WLFVPRGLGCKPTVYYVFAFCSFWNIRHNHLVSRVDTTVKIALANIVAVQLRMCSIGCCGWPSFPVKALLFIGKLIKKHVRCFDINF

SEQ ID NO: 239328 - protein, 162 aa, Glycine max
  Clone ID: PAT_MRT3847_58139C.1.pep
MEAHPNAAMLRTRTIIPSPPPSLALSKRLPSPSPSPSPLPLLSPSVILSEPVKPSFHRFPLFSNPHTLRTMTLSKCFSHSGPKPESEPEPEPDSPHTLVVVSFYKFADFPDHALLRNTLKQLCQRLGVSFLHRKGSIGINGSICGTRESVQEVLTFVESDDR

SEQ ID NO: 239329 - protein, 134 aa, Glycine max
  Clone ID: PAT_MRT3847_5813C.1.pep
PNANSSPLTLLGNYAGPPCKYVTILQGFRHYVKNAFYHPGCDGGPKCSSAQIDQAVEVEKKVGIEVPRSEKDGSFTRDDVAKTLKLAIVDEEGSDYRKNAKEMGKVFSSTDLHSRYIDNCIVALQKYKTPNSNC

SEQ ID NO: 239330 - protein, 51 aa, Glycine max
  Clone ID: PAT_MRT3847_58140C.1.pep
YIGQVEQLHFLLLKMLKLISGYHSTNMAAKVLAPVYCNVHCCYRCNEAKVE

SEQ ID NO: 239331 - protein, 69 aa, Glycine max
  Clone ID: PAT_MRT3847_58141C.1.pep
GKIRYTIVNRTTAPVIQSLKIFIVSIILSRVFFTVKVVFSLVPLVFPAVCASIDVSIHCGAYVDVLYWP

SEQ ID NO: 239332 - protein, 46 aa, Glycine max
  Clone ID: PAT_MRT3847_58142C.1.pep
SPPRPREPPRYPSRSPRDLLCRSQQGGPIGRSPGGPPNGLQKGLAL

SEQ ID NO: 239333 - protein, 526 aa, Glycine max
  Clone ID: PAT_MRT3847_58143C.1.pep
MGWFTKLLKGSNRKSSGGRYHGKYEDDRISDNLDCSADDLMDIEKEEIGRAIALSLSEADKKGKKVIEDDSESEDDELCPLSDEEAESVGEVQQDEDDHHAKIQQDEDKHLDEVQLEEDEQLARAIQESLSISSPPRSETDSLFQPFAHLFPPVYRICSGCNAEIGHGRFLSCMGGYWHPECFCCHACKLPITDYEFSMSGNRRYHKSCYKELHHPRCDVCKNFIPPNSAGLIEYRAHPFWLQKYCPSHERDGTPRCCSCQRLESVDTKYLLLDDGRKLCLECLDSAIMDTHECQPLYVEIQEFYEGLHMKIEQQVPMLLVERQALNEAMEGEKNGHHHLPETRGLCLSEEQTVPTILRRPRIGAGYQLIDMITEPFRLVRRCEVTAILVLYGLPRLLTGSILAHEMMHAWLRLKGYGNLRPEVEEGICQVLAHMWLESEIIPGTGDEGASSSSSSSSSSPSSSSSSKKGKRSDFEKKLGKYFKHQIESDSSAAYGDGFREGNQAVAKYGLRRTLDHIRLTGSFPY

SEQ ID NO: 239334 - protein, 110 aa, Glycine max
  unsure (1)..(110): unsure at all Xaa locations
  Clone ID: PAT_MRT3847_58144C.1.pep
VLVFTVARATYVXGNGTPKTTKHPSVPKPTSPKQDSCPKDTDKVGVCADVXGLINVKLGKRQKTPCXSLIQGHADVEAEVGLCTGLKANVMGMDLKVKVKLNLILNYSGK

SEQ ID NO: 239335 - protein, 114 aa, Glycine max
  unsure (1)..(114): unsure at all Xaa locations
  Clone ID: PAT_MRT3847_58145C.1.pep
LCLNLLLFYKAHVDYSLNNFGVHPSVDEYQKLIQSLCLKAXDKEIAEKLHEEMKEXNGLHLKGITRGLIRKRWWKRLWRLRLLHRHKHCSFFEVVCDVRGLVVVILFRFSRPFC

SEQ ID NO: 239336 - protein, 42 aa, Glycine max
  Clone ID: PAT_MRT3847_58146C.1.pep
IYYILKSNHFTFIISSPFSSPSRTLMMMRHQLLLLRIHKYFI

SEQ ID NO: 239337 - protein, 76 aa, Glycine max
  unsure (1)..(76): unsure at all Xaa locations
  Clone ID: PAT_MRT3847_58147C.1.pep
MMRARFPLLCXSVYLASVSVSFGIAYWVKVNPXHNMCLHSCNDERDSFRDQACHAHYNLLNVDVESVMTVSFDEHD

SEQ ID NO: 239338 - protein, 162 aa, Glycine max
  Clone ID: PAT_MRT3847_58148C.1.pep
IFIPSVKPLLVNLALLDQPPKSDRIPEVNNKNEGHLAQCPGSPKISPFPTLPDMSPKKVSATHNVYVSPLRSSKMEALISHSSKSYYACVGESTHAYQSPSKDLTAINNRLNGNRKVRGPLNFDDVDVGLVSDSMVANSLYLQNGSCASSSGAPLKSEQPDS

SEQ ID NO: 239339 - protein, 34 aa, Glycine max
  Clone ID: PAT_MRT3847_58149C.1.pep
FSIFYYNKQYLCLENFRKSIIIFNVLLEIVKNGN

SEQ ID NO: 239340 - protein, 55 aa, Glycine max
  Clone ID: PAT_MRT3847_5814C.1.pep
WQRKHHILIGVNHGTAREILKTEKYRITLTSTEGEGATEYRAVDTEKTMIGGEGP

SEQ ID NO: 239341 - protein, 706 aa, Glycine max
  unsure (1)..(706): unsure at all Xaa locations
  Clone ID: PAT_MRT3847_58150C.1.pep
FKDLMEESSLPSSLNMLEKDYDYMIRNKSELDERLFINEDDSLLASVSLSGGSVSVGGVKRKFDSMASPAKTITSPLSPHRSPASHANGIPGSANSKMAATPVSTAMTTAKWLRTVISPLPSKPSPELERFLTSCDRDVTSDVVRRAQIILQAIFPSSPLGERCVTGSLQSANVVDNIWAEQRRLEALKLYYRVLEAMCRAEAQVLHATNLTSLLTNERFHRCMLACSAELVLATHKTVTMLFPAVLERTGITAFDLSKVIESFIRHEESLPRELRRHLNSLEEPSGLLESMVWEKGSSMHNSLAVARPSLSAEINRLGLLAEPMPSLDEIAMHINFSCGGLPPVPTLPKLESSPTQNGDIRSPKRNVLMERNSFTSPVKDRLLPFNSLKSKLPPPPLQSAFASPTKPNPGGGGETCAETGINIFFGKIIKLGAVRISGMVERLQLSQQIRENVYCLFQRILNQWTSLFFNRHIDQIIKKLLYMCAKISQLKLRFLQKTXQQSITVYCKPQGFRSVFADWSLARRNWVXYRTGQDHIDIITFYNEIFIPSIKPLLVELGPAGPTTKSDRIPEVNKNDGHLAQCPGSPKISPFPTLPDMSPKKVSATHNVYVSPLRSSKMEALISHSSKSYYACVGESTHAYQSPSKDLTAINNRLNGNRKVRGPLNFDDVDFGLVSDSMVANSLYLQNGSCASSSGAPFKSEQPDS

SEQ ID NO: 239342 - protein, 77 aa, Glycine max
  Clone ID: PAT_MRT3847_58151C.1.pep
AALFFFFGGVFFIIILLKKPHMRIMTYPGKEDFKATTWNPYLVPHFKHNILGFKSTRVFLFKNIFLLYIYIYLYIFI

SEQ ID NO: 239343 - protein, 118 aa, Glycine max
  Clone ID: PAT_MRT3847_58152C.1.pep
VFPLPACLSLGRRPPLGGPSISALPLFPAWGLGRIGLHTSPASFLWALAPGKPAFGALLSPPRVGVGPRVGFSGLVPLQGLGPPGACPRAVCSLPVFPLSGFESSLGFAPPGKKGSKD

SEQ ID NO: 239344 - protein, 63 aa, Glycine max
  Clone ID: PAT_MRT3847_58153C.1.pep
EIIMAACACNLGRCSVVQAELGLGDLSWDHIRLIKDKGIPGQVLIETQGLLQKSLVLFVLIFL

SEQ ID NO: 239345 - protein, 89 aa, Glycine max
  unsure (1)..(89): unsure at all Xaa locations
  Clone ID: PAT_MRT3847_58154C.1.pep
RCYSASKWTADDNKKXEDAIEQAIQWLEGNQLGEADXFQDEMTELESICNPIIEKMYPGAGDDAMGALDEDGPAAVCEKIAGTPIEEVD

SEQ ID NO: 239346 - protein, 103 aa, Glycine max
  unsure (1)..(103): unsure at all Xaa locations
  Clone ID: PAT_MRT3847_58155C.1.pep
GRGPSPQAPIFILGGLPLFSGALSSSPVLGYSPSQPAPLNRGLEGLLFLVGFCSLFHPLLDSLGMPSLGYNIKSGSXRFGWGPKKKKKKKKKKKKKXKKKKNT

SEQ ID NO: 239347 - protein, 63 aa, Glycine max
  Clone ID: PAT_MRT3847_58156C.1.pep
EKLTFVESFTEMKRSIVYLDRARVFRRFRLSLLTLFFLHLALIFAQALVETWEKMCGRVGRPG

SEQ ID NO: 239348 - protein, 46 aa, Glycine max
  Clone ID: PAT_MRT3847_58157C.1.pep
PQMDRTSTLINVEVSNQHPMSEAPLIHFNGREPDGRIVLEAPSQVL

SEQ ID NO: 239349 - protein, 90 aa, Glycine max
  Clone ID: PAT_MRT3847_58158C.1.pep
IYKLANASAGRCYPKRKGAYHRNKGVLRNMGAQVAFILLTINKYLRMHGIRQKIYRKLRQRLRTHRPDQTRAKTSKAHTYMAKLLRHKSR

SEQ ID NO: 239350 - protein, 87 aa, Glycine max
  Clone ID: PAT_MRT3847_58159C.1.pep
PGRADAYLLSNADRVAEWPDLLQMAVVDLIRKVCRSKNRANKGRYITIITSLLSTPSTAVVYECAGALVLLSSAPTVVRAAVNTYCH

SEQ ID NO: 239351 - protein, 114 aa, Glycine max
  Clone ID: PAT_MRT3847_5815C.1.pep
SIKPFFVDTQTHSISLNNIHQIYERVKKHNRDEVQEKSSMMNPPKRPNINYGPLVCHEREMLQKNESLFSTKDAKLKAIGAIVFNDEGKIGSTSESKNNTKEQEDDDLDLSLHL

SEQ ID NO: 239352 - protein, 76 aa, Glycine max
  Clone ID: PAT_MRT3847_58160C.1.pep
KKTKPAYPLKGFTHFTFYNPKTFNTIPKKRSIGLFAFLKHKTLTYLFFFKTQNNNKAPPVDKGQKKKRTKDASPPA

SEQ ID NO: 239353 - protein, 118 aa, Glycine max
  unsure (1)..(118): unsure at all Xaa locations
  Clone ID: PAT_MRT3847_58161C.1.pep
NTNLGSILLVVYVDDNVLAASDSKGIDDLKSFLQXSFRLKTXGALKYFLGIEVMYSKKGIFLSQRKYVLDLLNETGLMGAKPCETPMEPGIKLTADGVPFSDPQSYRRLVEKLNYLCH

SEQ ID NO: 239354 - protein, 61 aa, Glycine max
  Clone ID: PAT_MRT3847_58162C.1.pep
LVVFFFFFFFFSFFFFFFFEIGINFTTEFIFRTFWGGKKKTGANFLLKKKFSPQTESEAHF

SEQ ID NO: 239355 - protein, 193 aa, Glycine max
  Clone ID: PAT_MRT3847_58163C.1.pep
MFGLGVSSSSFAAAAASAAATTTTSTHHLLCGTLHSASFLSTTHPFPTTSLRSSSLHFRCVPIRAMAEIDTISVSKSASSSAPGSKQALISLSDKKGLAFVGNGLQELGYSIVSTGGTASALESAGVAVTKVEQLTKFPEMLDGRVKTLHPNIHGGILARRDQKHDIEALSTHGIGTFDGGVVNLYPFYDEGT

SEQ ID NO: 239356 - protein, 181 aa, Glycine max
  unsure (1)..(181): unsure at all Xaa locations
  Clone ID: PAT_MRT3847_58164C.1.pep
GLLGNRWMGKLTFPEGTSRSVKRLPISIGGGAGAKNAIIMNMPNAVLSMWRYVDGDLAYEVNKMTPPYIQCTVSFYIAFGDSADDTINFEAFPHKLVGFGEIHXTQFVMKLHKREFVSSLDNSRCVPATTXLMADGCAYLHAMVHDSSVCTIPGDSVIGVTLTPMDNMCAYGINPGFQDLV

SEQ ID NO: 239357 - protein, 610 aa, Glycine max
  Clone ID: PAT_MRT3847_58165C.1.pep
HIHTRLRFVLGVSSSAAAAPAAATSSTHHLLSGTLHSPSSLSTSHLFPTTSVRSSSLHFRCVPIKAMAEVDTIAVSKTASSSAPGSKQALISLSDKKDLAFVGNGLQELGYTIVSTGGTASALESAGVAVTKVEKLTKFPEMLDGRVKTLHPNIHGGILARRDQKHHIDALSAHGIGTFDVVVVNLYPFYDKVTSAGGVEFEDGIENIDIGGPAMIRAAAKNHKDVLVVVDTEDYPALLEFLKRNQDDQKFRLKLAWKAFQHVASYDSAVSEWLWKQSVGDKFPPSLTVPLSLKSSLRYGENPHQKAAFYIDKSISEVNAGGIATAIQHHGKEMSYNNYLDADAAWNCVCEFRNPTCVVVKHTNPCGVASRDDILEAYRLAVKADPVSAFGGIVAFNVEIDEALAKEIREFRSPTDGETRMFYEIVVAPSYTEKGLEILCGKSKTLRILEAKKNEAGKLSLRQVGGGWLAQDSDDLTPHDIKFNVVSEKAPQDDELRDAEFAWLCVKHVKSNAIVIAKNNCMLGMGSGQPNRVESLRIAMRKAGDDVKGAALVSDAFFPFAWKDAVEEACESGIGVIAEPGGSIRDQDAIDCCNKYGVSLLFTNVRHFRH

SEQ ID NO: 239358 - protein, 100 aa, Glycine max
  Clone ID: PAT_MRT3847_58166C.1.pep
MVMTDEHGLNMHASMNKGNMSIEAMAMAGMDYKECAITLEECYPQQQPPMYLVAEPNNELVNVAAVEMMKAKIREWAKAVASTSKQQIIADEKCKVHVVS

SEQ ID NO: 239359 - protein, 37 aa, Glycine max
  Clone ID: PAT_MRT3847_58167C.1.pep
NEYYAMIAKAGVHNYTWDNVDLIIACSKYYRVCCLNI

SEQ ID NO: 239360 - protein, 63 aa, Glycine max
  Clone ID: PAT_MRT3847_58168C.1.pep
IIGKYSKQLYHKVNCSCRCSVFQLCVSAGPALGLWPQDIFKLQSFSCFVFLNSTFINLEPLKT

SEQ ID NO: 239361 - protein, 125 aa, Glycine max
  unsure (1)..(125): unsure at all Xaa locations
  Clone ID: PAT_MRT3847_58169C.1.pep
MASTIPLVSRCVLGDDLQLQTFLVEEDTSTPKRFQDSYSPDESLSWLPDTIKDFILPAGFPGSVSDDYLDYMLLQFPTNVTGWICHTLVTSSLLKARWYWLXSGTSATASASAIRXWVSKDGIGA

SEQ ID NO: 239362 - protein, 64 aa, Glycine max
  Clone ID: PAT_MRT3847_5816C.1.pep
MGVADNIPDLEEGTLEIGMEYRTVSGVAGPLVILDKGQGPKFQEMGAIRLGDGTTRRGQAVDVD

SEQ ID NO: 239363 - protein, 55 aa, Glycine max
  Clone ID: PAT_MRT3847_58170C.1.pep
SKKTGAIPYGNTKYHLHILRDERKMTIPTPSNHCLTLNTHTSTIYTFYTQPVRRL

SEQ ID NO: 239364 - protein, 96 aa, Glycine max
  unsure (1)..(96): unsure at all Xaa locations
  Clone ID: PAT_MRT3847_58171C.1.pep
MQNSSNKCVGTAIDMDPITPRTFDYQYHENLQKGNGLLLXNQTLFTHKGPRHLVNLFASNSTAFETSFVSAITKFRRIGVKTGNQGEFSCDCTMAN

SEQ ID NO: 239365 - protein, 86 aa, Glycine max
  Clone ID: PAT_MRT3847_58172C.1.pep
PTMGINEAQKWTQTTHGTELQIKGEHAHLNSENQYYQTGEKGNYKMGKKSVIQCREHLIILQKNTELSSLKKGIKPIWPMVKKTSS

SEQ ID NO: 239366 - protein, 49 aa, Glycine max
  Clone ID: PAT_MRT3847_58173C.1.pep
RRSQITMLTNCPTYDGHFKSSATYHHILWNLYLALARSHRGTPTTTGSL

SEQ ID NO: 239367 - protein, 69 aa, Glycine max
  Clone ID: PAT_MRT3847_58174C.1.pep
PTRTTMHALFYNIVLIMVLEGGIRSCRGTTDNIADSIEISLERLHHRLKLWEDTDANIADKSELACPTL

SEQ ID NO: 239368 - protein, 446 aa, Glycine max
  Clone ID: PAT_MRT3847_58175C.1.pep
MATPQSHFRFLAFSLSIIHISLFLSTTATQQPLLEEQDTPITHFQRYLRINTAHPTPDYTSAVSFLKAQAQSLGLKTQTLEFVQGKPVLLLTWPGSNPSLPSLLLNSHLDSVPAEPEKWLHNPFSAHRTASGAIFARGAQDDKCIAIQYLEAIRNLKSQSFTPHRTIHISLVPDEEIGGIDGAAKFVESEEFNGLNVGFALDEGQASPGDEFRVFYSDRVPWNVKIRAKGRPGHGSRMYDGSAVENLMESVEVVSRFRESQFDVVKAWKALNGEVVSVNPVYVKAGVVSEDGFAMNVQPSEAEAGFGLRLAPTTDPEEMRRRIAEEWAPAVRNMSYEIIEKGPLRDYMGRPLMTATDDSNPWWSVFKQAITSVGEKLSRPEILASTTDARYLRQKGIPVLGFSPMKNTPILLHDHNEHLKDTVFMKGIQVYESLISSLSTFTEASH

SEQ ID NO: 239369 - protein, 53 aa, Glycine max
  unsure (1)..(53): unsure at all Xaa locations
  Clone ID: PAT_MRT3847_58176C.1.pep
RRGGAVVESKYDGQARPHQPPHTLLIPLGNHREKKTEPSXFSEPXPRQLRNNR

SEQ ID NO: 239370 - protein, 80 aa, Glycine max
  Clone ID: PAT_MRT3847_58177C.1.pep
VKTRTSLCKLSNQVMIDKSTLTVNVYTGNNGGWTIRIPVETYYSILFDLAVCGPRRDCNYMSILFARAEFRAHVPVPATT

SEQ ID NO: 239371 - protein, 508 aa, Glycine max
  unsure (1)..(508): unsure at all Xaa locations
  Clone ID: PAT_MRT3847_58178C.1.pep
EVKFLEQHLIIGFRPSSNNSPFGLLGGQREKTCSLGLLLPLGTIVRLGIHFQQSVQIGSINNLYESVQNLSPXCFLEMLLSPRNPLEASYQRLKVKVDDTEPTKYFICHSCSKGSDLLLSSFDGARCSCRKLMQKKMELLEESKDEASVVDGIFVKGDAMFLIFDDLTVLRSSPSDSVQRSLQLGRKNFGSKLEDXTISKDVDMKEIFSILKQALISKSPLSEVFFKKEGSKSCSCPYSCPCSRNTNPIHWKDSIKIKVMVNKSNNKIVLAEADGDFVDFLFSFLTTPLGSILNLTNGKFPLGSIGNLYRSVKRLDPSWFKGSSKESLLNLRVAPHFGCKSSPFQEDHTPNYWYGTVAGKDNNEGRTMISKKNDMLQYPAKKLKLFEPRCSDGAKEAGVGFMKRPCLFVVMDDLKVIPMTTTSSIEYLQKLEEENVELDDLVEIRKRLEALNLLRASLTSDKAAFTRSLFYLLKKWKCQRCIPFYGVYVCKKKRSRKKKVMEEKESER

SEQ ID NO: 239372 - protein, 187 aa, Glycine max
  unsure (1)..(187): unsure at all Xaa locations
  Clone ID: PAT_MRT3847_58179C.1.pep
NKSFLINPRVAPKFGCKINPLNVLQEDDAPKYWCGTVADKDNEGRTMISKKNDMLQYPAKKLKLFEPRCSDGAKEAGVGFMKRPCLFVVMDDLKVIPMTTTSSIEYLQKLEEENVELDDLVEIRKRLEALNLLRASLTSDKAAFTRSLFYLLKKWKCQRCIPFYGVYVCKXKRNTXKKVMKEKESER

SEQ ID NO: 239373 - protein, 49 aa, Glycine max
  Clone ID: PAT_MRT3847_5817C.1.pep
PIHVIHKLKSFFNHAKRLNYIFIFLKSIIFLIKEFNYLKHLLLTLNTAP

SEQ ID NO: 239374 - protein, 85 aa, Glycine max
  Clone ID: PAT_MRT3847_58180C.1.pep
MMDRGQEKTVPAGCDLSLKKKELLSSAMKRTSEWIFSQEIPSDVNVQVGEASFSLHKFPLVSKCGYIRKLVSESNDADVSFIELP

SEQ ID NO: 239375 - protein, 225 aa, Glycine max
  Clone ID: PAT_MRT3847_58181C.1.pep
MALARLALKNLQQRVCASSFLSGNVHKQRWNNELLRRFGTAAGDKGKSEGTEVAVTEGKKSNRMFPRRRGRRWAWRNEDHDDFPPALYELFPSGLGSALMQASNNINRLFENMNLTPWSLTSGRVKEKDDHYKLRYEMPGIAKEDVKITIDDDGVLTIKGEHKEEKDDDEQYWSSSSYGYYNTSLILPDDAKADDIKAELKDGVLTLIIPKTQNPQKDVKQVTIE

SEQ ID NO: 239376 - protein, 261 aa, Glycine max
  unsure (1)..(261): unsure at all Xaa locations
  Clone ID: PAT_MRT3847_58182C.1.pep
VVIRSRKKRDFKGLRSRDQARAKWTSQITSSQEATIPLRYRVDNEQKRVVMAEASGDFVDVLFSFLTXLPLGTIIRLGNQFNQPVQIGSINNLYESVQNLSPXCFLEMLLSPRNPLEASYQGLKVKVDDTEPKKYFICHSCSKGSDLLLSSFDGTRCSCRKLMQKKMELLEESKDEASVVDGIFVXGDAMFLIFDDLTVLRSSPSDSVQRSLQLGHINFSSKLEEKFSDVGPNEVILLYIHFRAAAHFKKTTLNGMCSRKR

SEQ ID NO: 239377 - protein, 114 aa, Glycine max
  Clone ID: PAT_MRT3847_58183C.1.pep
FFPRVEVFSPILFSQVSKRRQGRSSPPFSTGLFLVEIKPEDGRTFSQRSFKKRSVFSQIWVFSGGFLHMEPFPGPQFCVVIRWGKFKSWFFLNKVAGLLLVSTRAHVWPALGSK

SEQ ID NO: 239378 - protein, 183 aa, Glycine max
  Clone ID: PAT_MRT3847_58184C.1.pep
MACLEMYNNSEHNKNNKGDNHHHHHQCAPMSPRISFSNDFVDVQQAMKLQEQRGGSSRSDTPVSSDFEFSVANYTMMSADELFFKGRLMSSTYVNTDNNNQQRATTTLKEELLINDDEYDHNFSLRPPKPSSTRWKGLLGLRKSHIGSKKPHKSTEASSSEASRSAFVNEGPPTSITFSGGVE

SEQ ID NO: 239379 - protein, 77 aa, Glycine max
  Clone ID: PAT_MRT3847_58185C.1.pep
PKPSTSLSLQPTETMDTRTGETELNPRRGQQTLKKEDDKLRDPTRHQNKPRKKQNYTKTNADLKLNHIEHCTLEASN

SEQ ID NO: 239380 - protein, 112 aa, Glycine max
  Clone ID: PAT_MRT3847_58186C.1.pep
ARASRVINISEDIFAGFNCTLRGGNVTHHEYIQVGKGRDVGLNQVSMFEAKVASGNGEQVLSRDVYRLGHRLDFFRMLSFFYTTVGSFFNTMVVVLTVYAFLWRRVFLLLMV

SEQ ID NO: 239381 - protein, 63 aa, Glycine max
  Clone ID: PAT_MRT3847_58187C.1.pep
RTKTSQYTFTSIFLLLDLWFLLLNMKLFVFLLAWAMALLASSFDSAAVVERTFKVQNKTIKRL

SEQ ID NO: 239382 - protein, 109 aa, Glycine max
  unsure (1)..(109): unsure at all Xaa locations
  Clone ID: PAT_MRT3847_58188C.1.pep
KKKKKKPPPPRRRVLPGGGPPPAGGGAPAEPPPPPAKQGGXAPADRRRKQAPPAAVGPPPGAPREGACHVGPPRGDKRLPPPAGKSQRVRSEREDRGGGAPRACNPASN

SEQ ID NO: 239383 - protein, 137 aa, Glycine max
  Clone ID: PAT_MRT3847_58189C.1.pep
MGVVVIDGSTVRDFVNDEAAFAKSVDEQFGVLDLNNDGVLSRSELRTAFESMRLIETHFGIDVATPPDQLAKLYDSIFDKFDGDRSGAVDRREFRDEMRKIMLAIADGLGSFPIRMVLEDDPNSLLQKAADLEASKT

SEQ ID NO: 239384 - protein, 84 aa, Glycine max
  Clone ID: PAT_MRT3847_5818C.1.pep
LSNLSRERGCSPGYRFPGLGGFFENKNDLLSKKLEKERRICFFFIDYLIFPDRRQQFIFATKDMAIYVKPMLLVTSGKTCALGH

SEQ ID NO: 239385 - protein, 34 aa, Glycine max
  Clone ID: PAT_MRT3847_58190C.1.pep
YIYIYIYIYIYIYIYIYIYIYIYIYIYNSARQLE

SEQ ID NO: 239386 - protein, 63 aa, Glycine max
  Clone ID: PAT_MRT3847_58191C.1.pep
VAGSSDKVGSFRHRLASVVPSTGFLIDGGSTAFIYRWGNVMCASGTPDCIFVLRSEFQDFAVS

SEQ ID NO: 239387 - protein, 84 aa, Glycine max
  unsure (1)..(84): unsure at all Xaa locations
  Clone ID: PAT_MRT3847_58192C.1.pep
SVLKFEKYVTLTMYNRYLNDYHGFFPYFLPPSSSIIHVILVDCFCRLTRGWFGLHLYLTFQNLLVPLLESNLSXHIMFFKKAKV

SEQ ID NO: 239388 - protein, 410 aa, Glycine max
  Clone ID: PAT_MRT3847_58193C.1.pep
METEVVEDIVIVGAGIAGLTTSLGLHKLGIRSLVLESSDTLRVTGFALSIWENAWKALDTVGVGDFLRHQHLQLNGIVTTSLVTGQQTSDMPFTETGNQQRNREIRCVKRKLLLEALANELPSDTIRYLSKVVAIEESGFYKIVHLADGTTIKTKVLIGCDGVNSIVAKWLGFKNASFTGRYAIRGCAEVQSNHGLEPRFMQFFGKGFRAGVIPCDGNVVYWFFTWTPNNQDKELEENPAKLKEHVLNKLENMPSDVRYYIEKTEIDAFQLAPLRYRHPWELMFGNISKGNICVGGDAFHPMTPDLGQGGCCALEDGIVLARCLAAAFSKHIKEKDEEDQFKRIEGSLKKYAKERRWRSIDVIATAYMVGSIQQAESKLVTFLRDNILAAFLASQLFKKSGYDCGKLNSS

SEQ ID NO: 239389 - protein, 41 aa, Glycine max
  Clone ID: PAT_MRT3847_58194C.1.pep
QVKDFIFTFSVRYVRKLIVIFLINISAAIMTKSPADLSFSI

SEQ ID NO: 239390 - protein, 195 aa, Glycine max
  Clone ID: PAT_MRT3847_58195C.1.pep
MGGHMSKKTPETSSGININADMATELRSYEAACKLDSDLQSFNTTIQARANQVINTLAVGVEVRSLSFESLKQVTECLLEMNQEVVKVILDCKKDIWKNPELFELVEEYFDNSLQTLDFCTALEKCLKRARDNQLLILMALQQFEEETSLGETRYTRTLQELKNFKAAGDPFTEEFFQMYQSVYNQQILMLEKLR

SEQ ID NO: 239391 - protein, 268 aa, Glycine max
  unsure (1)..(268): unsure at all Xaa locations
  Clone ID: PAT_MRT3847_58196C.1.pep
MFVFKPTSSLLFLLLSISYSASSVTSLTVPPRGGAPLDLTTTPQQQTDGDDDSLTYLWPLPAEFTSGGDTLSVDPALTLSVAGNGGGSAILREAFGRYRGIVFKNTAGVGFSFIRKLRERLVSSVSAFDVDTLKITVHSDNEELQFGVDESYTLLVPKAKESSQVTIEANTVYGALRGLETFSQLCSFDYTTKTVKIYKAPWSIQDKPRFAYRGLMLDTSRHYLPIDVIKQIIESMSYAKLNVLHWHIIDEPVISLENPIXKLWERSY

SEQ ID NO: 239392 - protein, 95 aa, Glycine max
  unsure (1)..(95): unsure at all Xaa locations
  Clone ID: PAT_MRT3847_58197C.1.pep
FXXXXXYXARXSXXXXXNYXEYXXYXXXXPXTISDFXXXXSDXQGRIVIRXWQXXXXNRXXRATLFXXLXCXYVXTRTGXLVVTVMTLVSNMIXP

SEQ ID NO: 239393 - protein, 81 aa, Glycine max
  unsure (1)..(81): unsure at all Xaa locations
  Clone ID: PAT_MRT3847_58198C.1.pep
PCHSLEGLSEALSVLRQNAFLLTELPXCMSSLASTLSGTGSHAANLDARFTLNVVANVTGCGRHELWFSSSIKRGXHDYYY

SEQ ID NO: 239394 - protein, 149 aa, Glycine max
  unsure (1)..(149): unsure at all Xaa locations
  Clone ID: PAT_MRT3847_58199C.1.pep
KKKKKKKKGGPDAWADAWADAWVAFYLGARLNRNERKRLFSLINDLPSVFEVVTDRKPVKDKPTADSGSKSRGSAKRSSDEQVKSNPKFVDEGYEEDEDEHNETLCGSLGXNYNADEFWXGKCVKITPAKSXSINQSKCPSYSLRRGSP

SEQ ID NO: 239395 - protein, 84 aa, Glycine max
  Clone ID: PAT_MRT3847_5819C.1.pep
FSPPKNIFALGGDFWGEVFFFYNSGGARGFPPLGYDRFHPRFPLVKKKGGLKNFFLRTGPKGRVFWGKVFPKGGGFPPFRELGG

SEQ ID NO: 239396 - protein, 44 aa, Glycine max
  Clone ID: PAT_MRT3847_581C.1.pep
IGDKWGNFILNSLKLPKSFKKILIVRANPYRCNLDPHFGWNFRL

SEQ ID NO: 239397 - protein, 65 aa, Glycine max
  Clone ID: PAT_MRT3847_58200C.1.pep
MESHVKHALVVKVMGRTGCIRQVEQVRVKFLDDQKPHIMTNVKRPVREGYILILRESEKEARRLR

SEQ ID NO: 239398 - protein, 41 aa, Glycine max
  Clone ID: PAT_MRT3847_58201C.1.pep
NVRLKLQRKLVCLVFLIKKKKIVRLVLNNAVDILEFWTPST

SEQ ID NO: 239399 - protein, 144 aa, Glycine max
  unsure (1)..(144): unsure at all Xaa locations
  Clone ID: PAT_MRT3847_58202C.1.pep
KKXXXKLKXXXXXXXKXNXGXXXXXEXXXSXXXTXSTTGXTPTDSGLTXXRRSTXTXXXSXTXHLXHXLKHXXKXXRXSYKHXXSMLXFKTTQEQXNRXXXXXXAXXXXXXXEPXXSXHXXTKXXAXXIXXXXXXXDDXTXXHX

SEQ ID NO: 239400 - protein, 68 aa, Glycine max
  Clone ID: PAT_MRT3847_58203C.1.pep
IEFCIPSKELSNSNDVVLRLGTYKRPDHFQKGLLSIMCIQLLLSQIQMQQQVVKHRCAIFQSSHKERT

SEQ ID NO: 239401 - protein, 78 aa, Glycine max
  Clone ID: PAT_MRT3847_58204C.1.pep
KCGGTPPHVKNMPKTFQNGAFFFAPKTLVILRMLRPRSTITFFVWDRATFGNGNFFLPRLVCPLVHSVKKMPMQKPIC

SEQ ID NO: 239402 - protein, 31 aa, Glycine max
  Clone ID: PAT_MRT3847_58205C.1.pep
QYSRTNRAALNIKIDLADLCSSSLPLNQLLA

SEQ ID NO: 239403 - protein, 77 aa, Glycine max
  Clone ID: PAT_MRT3847_58206C.1.pep
GWSKRRFPMDQEPILCVRPFDWHGDVCHRAMDVNSNILYKIQIMKLPFEIMNVGYGLILCILWKYYRMIESYECRHI

SEQ ID NO: 239404 - protein, 56 aa, Glycine max
  Clone ID: PAT_MRT3847_58207C.1.pep
STTPSEEMNIPYRRWNQEAVSISLLRAVTKIEDQESAREKNLPFMSMAPSPGFYQN

SEQ ID NO: 239405 - protein, 82 aa, Glycine max
  unsure (1)..(82): unsure at all Xaa locations
  Clone ID: PAT_MRT3847_58208C.1.pep
SCXTVQLEPIVTKGYPENRPIYRILQILESMILLCESIALARDXQGCXHRDWGKLLMLCACACVFCWTLSTCGYAPVGRAAI

SEQ ID NO: 239406 - protein, 267 aa, Glycine max
  Clone ID: PAT_MRT3847_58209C.1.pep
IILPPKLKSFSDSQICCSSKGDLVLVNGGQEIFVVSLLVQRNIFRLFFSISCIYRKEMKLSQEELVPSPVIHKEKKKGIFSSVIKDFTGSKEKHAPILETEDTKESILELSAIFSNENFPCDADNNDNLTVDEDEIELNIDDIDLDDHEEKRKDQSILGALNKKKLTGKFQALKGRLKEMKGNIQKTSSKEEQQDEQAGAVDQIKKKYGFSSSNETSFAKLAESKLQENMKKLQGINLRTTEMQDKAKSFSTLANQVLRTAEQERRN

SEQ ID NO: 239407 - protein, 85 aa, Glycine max
  unsure (1)..(85): unsure at all Xaa locations
  Clone ID: PAT_MRT3847_5820C.1.pep
RXHAYVSSEFGSXFEVILCMKRFIHKKKKKXXGXRLXXSSXXELXPXXXLXGXQFSXXXXXLXXGXIRAXXXXXXKXLXPXNXXX

SEQ ID NO: 239408 - protein, 151 aa, Glycine max
  unsure (1)..(151): unsure at all Xaa locations
  Clone ID: PAT_MRT3847_58210C.1.pep
RVPTKVIKKLQGIQRKFLWGGSHDQSKISWVKWETMCLPKERGGLGIKDVNSFNLALLGKWRWSLFQNHKDLWAKVLESKYGGWRSLDEESRGSNDSFWWKXLKLALHHPQQELAFHNGLEWKLGCGDQIKFWEDKWTCGGTALAAKYPRL

SEQ ID NO: 239409 - protein, 71 aa, Glycine max
  Clone ID: PAT_MRT3847_58211C.1.pep
MWKDLLPPLIASAYHILQNFCSRQDTIFCGVFDGHGPYGHMVAKRVRDSLPLKLNVHWEQSASGEEVLKEI

SEQ ID NO: 239410 - protein, 60 aa, Glycine max
  unsure (1)..(60): unsure at all Xaa locations
  Clone ID: PAT_MRT3847_58212C.1.pep
NVSDSCILFNLVVILYGEIIFSHLFDMVWMSFSAYVIGYIIYSLGELMTLSSMKGNLXKE

SEQ ID NO: 239411 - protein, 296 aa, Glycine max
  Clone ID: PAT_MRT3847_58213C.1.pep
MGFFVAHVVQGSALALLGLWHTIHTIRSYLVKGPANFTVRFWYQFNTTPQSRLKHLELVSILSFSILAFFDQILDFPHFHYAFKLDNFEHATMFIHLALFAGFSLSTELTDSLDLFSGFVGILASSVFSQELFLLHFHSTDHVGLEGHYHWLLQLIVLVSLVSSLAATIFPNNFNAALVLSISLIFQGCWFINMGFMLWIPSFVPEGCAVNLAKPSGHEIIGAVTCSSKEADFRARGLANLQFSWILSSILIFAGIICLKLSRKCTITTNRLEYERIQTKGATDSALANEGFKQAI

SEQ ID NO: 239412 - protein, 64 aa, Glycine max
  Clone ID: PAT_MRT3847_58214C.1.pep
TLVNATLHRATKSHLRVGVILSITITTAQIIINPSFLYGILGHNYSSGVSPYLLCYFKSLFFSL

SEQ ID NO: 239413 - protein, 55 aa, Glycine max
  Clone ID: PAT_MRT3847_58215C.1.pep
GTCKWLRWLTPPTLFVHKASPFLKKFAFLPMERKTSSKSGSNSLPADPSKTERIK

SEQ ID NO: 239414 - protein, 117 aa, Glycine max
  unsure (1)..(117): unsure at all Xaa locations
  Clone ID: PAT_MRT3847_58216C.1.pep
PPSNVIKQRGTALVTDEQLEXEMLAGENACLIERLKDIPTMSMLLPTEYTVQTRSLAPWHLESKLAGLYVEHALTGAXRSCVEHHDGFIEYTGKTADLTTRKSYATWAILCSKDDGP

SEQ ID NO: 239415 - protein, 66 aa, Glycine max
  Clone ID: PAT_MRT3847_58217C.1.pep
QSITGSGACLQAKYISVCIKIQKLDPPSQEKTSIVQKRANASSTSNTTGYRNRFIHTFYFLLRARH

SEQ ID NO: 239416 - protein, 147 aa, Glycine max
  unsure (1)..(147): unsure at all Xaa locations
  Clone ID: PAT_MRT3847_58218C.1.pep
MANNTGHLRIHDSVDELTTDLADYVAELSEASVKERGVFAIALSXKLCEAPYNKTVDWSKWYIFWADERVVAKNHADSNYNLAKDGLLSKLMDYPLFVFNHVHSINDSVSAXEAADDYEFVIRQLVKTRVVSVSEISDCPKFDLILL

SEQ ID NO: 239417 - protein, 261 aa, Glycine max
  Clone ID: PAT_MRT3847_58219C.1.pep
MAKNRGELRIHESVDELRTDLADYVAELSEASVKERGVFAIALSGGSLIGLMGKLCEAPYNKTVDWSKWYIFWADEHVVAKNHADSNYKLAKDGLLSKVPIVPSHVHSINDSVSAEEAADDYEFVIRQLVKTRVVSVSEISDCPKFDLILLGLGPDGHIASLFPNHSALNEREEWVTFITDFPKPPPERITFTLPVINSASNVAVVVTGESKAESVHLAIGDVGPDGPLIPARMVQPAMGKLVWFLDKLAASKLEDSNLNK

SEQ ID NO: 239418 - protein, 71 aa, Glycine max
  Clone ID: PAT_MRT3847_5821C.1.pep
FFPGSTPAPGYPRGFFAECFIALECFFPRCISLQGDPHVLFLNTLPIPQLGLLCLFSWLKNYFFSSFLIRQ

SEQ ID NO: 239419 - protein, 40 aa, Glycine max
  Clone ID: PAT_MRT3847_58220C.1.pep
HENHQTPHIKTSNLHCNNHLPEKRQHILLSQPHTNRTYQN

SEQ ID NO: 239420 - protein, 144 aa, Glycine max
  Clone ID: PAT_MRT3847_58221C.1.pep
TRITKLVYNSNSLTVIMSNSITHLQNQFENQDLDTYGSSMRHNNASFPEASLGAFPTSIGVVAEGSEISHTRHLMDLLGAAANERNHHQTAQGLSLSLGSHMLVPSDEYRHHQRPLNPGLINPNYFMSGQEPREACNNPPVEQQ

SEQ ID NO: 239421 - protein, 69 aa, Glycine max
  Clone ID: PAT_MRT3847_58222C.1.pep
SSPQRMPSPCPITPFSSRTSPTTSTSIRLRSSAIRDSLRRHSRPHYTVFRRASESQYGLRSHPARAIPT

SEQ ID NO: 239422 - protein, 131 aa, Glycine max
  Clone ID: PAT_MRT3847_58223C.1.pep
PKSKGNRNYIQYMKSSKYCICAKGYEVNSPRVVEAILYECVPVILSDNFVPPFFEMLNWESFAVFVLEKDIPNLKNILLSIPQKRYLQMQMMVRKVQQHFLWHNKSPVKYDIFHMILHSIWYNRVFTATAA

SEQ ID NO: 239423 - protein, 47 aa, Glycine max
  unsure (1)..(47): unsure at all Xaa locations
  Clone ID: PAT_MRT3847_58224C.1.pep
RRARVPLLWWGVVLLGQVDVSFGIAYWEKXNPAHNNCVHSCNRDRES

SEQ ID NO: 239424 - protein, 76 aa, Glycine max
  unsure (1)..(76): unsure at all Xaa locations
  Clone ID: PAT_MRT3847_58225C.1.pep
REVSLGRESSSGDENAVNLKVILXDCNHRGRQILRSDRLQSPFDYIDVAKVVKPGNXKLVRPCPKRAFNASESAAT

SEQ ID NO: 239425 - protein, 49 aa, Glycine max
  Clone ID: PAT_MRT3847_58226C.1.pep
DHLTSTCGRACMDLSHMMNLHPIKGYRSYKKRHWDKPHPLNFFLKIIPE

SEQ ID NO: 239426 - protein, 231 aa, Glycine max
  Clone ID: PAT_MRT3847_58227C.1.pep
NSARARAESARGGIEPDNFTYPFVLKACSLLVALKEGVQIHAHVFKAGLEVDVFVQNGLISMYGKCGAIEHAGVVFEQMDEKSVASWSSIIGAHASVEMWHECLMLLGDMSGEGRHRAEESILVSALSACTHLGSPNLGRCIHGILLRNISELNVVVKTSLIDMYVKCGSLEKGLCVFQNMAQKNRYSYTVILPGPAIHGRGREALRVFSDMLEEGLTPDDVVYVGVLSAC

SEQ ID NO: 239427 - protein, 101 aa, Glycine max
  Clone ID: PAT_MRT3847_58228C.1.pep
MVTMVLRFGMQAKLSQMAFLLALFLLILQISDHVISSYVLCSSPGLLNLELEDCREGLFVFFMLVLWVKLAGNYTTCSVESSWTENRLKWGVQGKPWETLV

SEQ ID NO: 239428 - protein, 74 aa, Glycine max
  unsure (1)..(74): unsure at all Xaa locations
  Clone ID: PAT_MRT3847_58229C.1.pep
VSIWTCGQVMEMNINPHYVYRMTILGAISLLAPXMGPETTRSNLLPVVDAASKDTYFVLPFESRGHAMICIQVL

SEQ ID NO: 239429 - protein, 65 aa, Glycine max
  Clone ID: PAT_MRT3847_5822C.1.pep
KCVRACSRKKKKKKKKKKKKKKKKKKKKKKKKKKKKKKKKKKKKAKKNKKRGADFKKHKIFIAVV

SEQ ID NO: 239430 - protein, 33 aa, Glycine max
  Clone ID: PAT_MRT3847_58230C.1.pep
GGLLIFKTSICNKTHLFTINSLSTYNPYSIVNV

SEQ ID NO: 239431 - protein, 94 aa, Glycine max
  Clone ID: PAT_MRT3847_58231C.1.pep
MQILLNTVTGTMISLAVESSDTIDNFMAKIHNSARIPPDQHRLIFAATQLEDGRALADYSIHNDSILQLVLRLPAGMQLFLKILTGKTMSLDVP

SEQ ID NO: 239432 - protein, 48 aa, Glycine max
  Clone ID: PAT_MRT3847_58232C.1.pep
TNENSVVKSGSSGHLGRAENSHTASDSLREASLMMHLWDQILQFQITC

SEQ ID NO: 239433 - protein, 78 aa, Glycine max
  Clone ID: PAT_MRT3847_58233C.1.pep
TRRPSFEGHSFLHHLFITLSSWCYVCHHGEWPQQQRQSRYLPFFTSCISQNDVTTDISFVLNISPLRSHQSFLVIITV

SEQ ID NO: 239434 - protein, 61 aa, Glycine max
  Clone ID: PAT_MRT3847_58234C.1.pep
PLFLCVGPFIAAFFAFQAAPSTKLGFFEFWMTDLQKKLVLYLWINEAVSRLLVFIPNQFLN

SEQ ID NO: 239435 - protein, 70 aa, Glycine max
  unsure (1)..(70): unsure at all Xaa locations
  Clone ID: PAT_MRT3847_58235C.1.pep
GPSPTKLFTNSFASREMMILTVXLDAVGPTTMLYKLKLGDMVTTIATRVFNVQTGESKNMSSTEWDGAGD

SEQ ID NO: 239436 - protein, 54 aa, Glycine max
  unsure (1)..(54): unsure at all Xaa locations
  Clone ID: PAT_MRT3847_58236C.1.pep
YRKCFDENVSDEVVGYVKIIYGGYVNGGNCKELVGEXDVDGFLDGGECVKNFFL

SEQ ID NO: 239437 - protein, 65 aa, Glycine max
  Clone ID: PAT_MRT3847_58237C.1.pep
HHGKCSVSFDQTNEMTHARLGPEAGARETSEMTDTTLSFGDDGLQTNEGAETIITCCRRGWSRHK

SEQ ID NO: 239438 - protein, 58 aa, Glycine max
  Clone ID: PAT_MRT3847_58238C.1.pep
SIKLNYPIHQNYQKLLLRVLLFCSFLIVGFLENLWLLEKFKFTLVIILSIISNLSHNI

SEQ ID NO: 239439 - protein, 71 aa, Glycine max
  unsure (1)..(71): unsure at all Xaa locations
  Clone ID: PAT_MRT3847_58239C.1.pep
FNGATIPLXIRDASTVSDLRQLLISRKILPVDDYLFIHKQRIMRDTCSLRWHAVEDADCLYVFKGTVSRSG

SEQ ID NO: 239440 - protein, 203 aa, Glycine max
  unsure (1)..(203): unsure at all Xaa locations
  Clone ID: PAT_MRT3847_5823C.1.pep
AREKVSLPVGSCNLALPLWEQGIDKVYDTWNLEQSVKSEARSKREXAYATVLHSSEGYVCGAITLAQTLLQTGTKRDLILLLDTSISVAKRRSLELSGWKIRLITRIRNPRAENGTYNEYNYSKFRLWQLTDYERVIFIDADIIVLRNLDILFHFPQMSATGNDQSIFNSGIMVLEPSNCTFHVLMSRRHDVISYNGGDQGFL

SEQ ID NO: 239441 - protein, 37 aa, Glycine max
  Clone ID: PAT_MRT3847_58240C.1.pep
ACEYGRNPNIAVGLSGSVHYLAMQQQSNMFAICIQIP

SEQ ID NO: 239442 - protein, 92 aa, Glycine max
  Clone ID: PAT_MRT3847_58241C.1.pep
FTKCFPTTHIHPHSNLNKPNNFLKYIITSLNNHQFFFNLFHLLPLLTNSIPYYILTIYTTYHINSIFIKKITILNSPYPQIKYIINHLPPLF

SEQ ID NO: 239443 - protein, 33 aa, Glycine max
  Clone ID: PAT_MRT3847_58242C.1.pep
LVINIYIIINYYLVYFIWNLFVELSRFIYIITV

SEQ ID NO: 239444 - protein, 63 aa, Glycine max
  Clone ID: PAT_MRT3847_58243C.1.pep
KDWCSKFHVAEAAVEKVIEERFKKNYHPAWAAAYILDPLYLVRDTSGKYLPPFNYLTPEQEKD

SEQ ID NO: 239445 - protein, 512 aa, Glycine max
  Clone ID: PAT_MRT3847_58244C.1.pep
MEEAWFIILVSLCVCVLIRVILLFFLHKKTLATPPGPPHIPIITSFLWLKKSFIELEPFLRTLAAKHGPIFTLRIGSRPVIFIANRALAHQALIQNGSIFSDRPKALPAAKIVSSNQHNINSAPYGATWRALRRNLTSEMLHPSRVMSFSGTRKWVLHTLLTRLKSDSQSNDSIKVINHFQYSMFCLLVFMCFGERLDDGKVRDIERVQRQMLLRFRRFNVLNFWPRVTRVLFFKLWEELLRVRKEQEDVLVPLIRARKQRRGTEGGGLRDDDGFVVSYVDTLLDLELPEEKRKLNEEELVTLCSEFLNAGTDTTSTALQWIMANLVKYPHVQERVVEEIKEVVGERVREEREVKEEDLQKLPYLKAVILEGLRRHPPGHFVLPHAVTEDVVFNDYLVPKNGTVNFMVAEIGWDPKVWEDPMAFKPERFMNDEGFDFDITGSKEIKMMPFGAGRRICPGYNLALLHLEYFVANLVWNFEWKVPEGGDVDFSEKQEFTVVMKNALQVQLSPRI

SEQ ID NO: 239446 - protein, 376 aa, Glycine max
  Clone ID: PAT_MRT3847_58245C.1.pep
MAVENQREDGGCDRFPVGMRVLAVDDDPICLKVLENLLRKCQYHVTTTNQAVEALTMLRENRNKFDLVISDVNMPDIDGFKLLELVGLEMDLPVIMLSAHGDTKLVMKGVTHGACDYLLKPVRIEELKNIWQHVVRRKNFDSRDQNKASNEEKAPNFAGGGSQGLRSENSADQNKRLGKKRKDQSDEEEEGGEENEDDEDPSAQKKARVVWSVELHRKFVAAVNQLGLDKAVPKKILDLMNVEGLTRENVASHLQKYRLYLKKAAQQANMVAALGGSDSYLRMGSIDGYGDFCTSSGSGRITNTTLPSYASTGIFSRLNSPAALNMRAISSSALIRPVQSQNINCSLNTLGNIQPSIFPANHQVPGITWNSNINLA

SEQ ID NO: 239447 - protein, 207 aa, Glycine max
  Clone ID: PAT_MRT3847_58246C.1.pep
ELHRKFVAAVNQLGLDKAVPKKILDLMNVEGLTRENVASHLQKYRLYLKKAAQQANMVAALGGSDSYLRMGSIDGYGDFCTSSGSGRITNTTLPSYASTGIFSRLNSPAALNMRAISSSALIRPVQSQNINCSLNTLGNIQPSVFPANHSSSLLQGIPTSIELNQSKQSNCTTGISQLSQVELYLWTFVSHLIRSISFFFQSCSVSP

SEQ ID NO: 239448 - protein, 127 aa, Glycine max
  Clone ID: PAT_MRT3847_58247C.1.pep
RVGVFRGRTRGQFLPTVSTVLSPEVIEREAESGGKLGELDSYEIEGGETKAEILQNLAEFQFSCVMYNAVLENACSEQGARMSAMDSSSRNAGDMLDRLTLTYNRTRQASITTELIEIISGASALEG

SEQ ID NO: 239449 - protein, 119 aa, Glycine max
  Clone ID: PAT_MRT3847_58248C.1.pep
TSDVFLCDGDGLGEEILEGHAAGIVGGGGSDPLPEVVDGIGGDGLEEVVHGVQIGEKRRKGRYRRRRVPWQIRIRRDKLRRRHAAFLAVFCSTSTVTKQHSQELAPLFRFFFFFFYYYS

SEQ ID NO: 239450 - protein, 70 aa, Glycine max
  Clone ID: PAT_MRT3847_58249C.1.pep
TLLSNGNIASTVRRFVGGFWRDCECGEEEEQSTSVYADEKSLTDMSNCVWDVPQEAFWQYAMPLALRVLG

SEQ ID NO: 239451 - protein, 156 aa, Glycine max
  Clone ID: PAT_MRT3847_5824C.1.pep
FLFGAFTTSYLPSTIDDFVLDHEGYPLESGGTYYILSDITAFGGIGADPTGNERCPLTVVQSSNELDKRIGTIICSPYRVRNIDEGHPLSLKFDSLADIMLSEGIPTEWTEVEDLTERPAVEMGENKDAMDERLRLERICDDEYGAISWCSGHGEQ

SEQ ID NO: 239452 - protein, 67 aa, Glycine max
  Clone ID: PAT_MRT3847_58250C.1.pep
SSYDVRLSAQCGILPSYLRTRSHLELPSQINNCTCTLCYAVDFLLLRPSAPHYQMTLSLALHIFAHT

SEQ ID NO: 239453 - protein, 390 aa, Glycine max
  unsure (1)..(390): unsure at all Xaa locations
  Clone ID: PAT_MRT3847_58251C.1.pep
MAMAAALRREGRRLTQPINALHSSLNSSLISQSVDQAPHGARSISTQVVRNRMKSVRNIQKITKAMKMVAASKLRAVQTRTENSRGLWQPFTALLGDDPSVDVKKNVVVTISSDKGLCGGINSTSVKISRVLNKLNSGPDKETKYVILGEKAKAQLLRDSKKQIALSLTELQKNPLNYTQVSVLADDILKNVEYDALRIVFNKFHSVVQFLPTVATVLSPEVLPFVNFFSPTFFKFCPLSLTSNLGKILGLQLLCMXKGLKGVIFCNDRLWYYAIYLFNLMKVIFMXVIEREAESGGKLGELDSYEIEGGETKAEILQNLAEFQLSCVMYNAVLENACSEQGARMSAMDSSSRNAGDMLDRLTLTYNRTRQASITTELIEIISGASALEG

SEQ ID NO: 239454 - protein, 104 aa, Glycine max
  Clone ID: PAT_MRT3847_58252C.1.pep
PWLKLDMPFGCFFFSLVFNLIRAYHFTLHAMANLCRCLNKGLQDFIEGNFCFFVILPFLFNLEKKFYQRKQGKSNLEDDKIFAKFGKTRCNKEKEKFKNGIKNA

SEQ ID NO: 239455 - protein, 35 aa, Glycine max
  Clone ID: PAT_MRT3847_58253C.1.pep
DFPHLRMRLLVWYRWCSCSHPYCLIGYSKVRYNIE

SEQ ID NO: 239456 - protein, 85 aa, Glycine max
  Clone ID: PAT_MRT3847_58254C.1.pep
KGGVPPLLGGPPPGKRFLGGGALFAPQGGVGPPWALSKIEPPGKKPGLSMAPVFSNSGFFQLGARAGGFPIVSPTPPAGLIQGFC

SEQ ID NO: 239457 - protein, 120 aa, Glycine max
  unsure (1)..(120): unsure at all Xaa locations
  Clone ID: PAT_MRT3847_58255C.1.pep
RDEGVTASHRVADGAFVMNANREVLVDQERNGRISGQGIWKMTTGGDDEGEHIXTAAGREAQEETGIDTQFFFFIRFKERNKYFFQNTKMIIECMKKHHCFRIGREGSEIEEGQRMEIED

SEQ ID NO: 239458 - protein, 42 aa, Glycine max
  Clone ID: PAT_MRT3847_58256C.1.pep
TGSAEETVEGIHLLNLVNNFKCQGKRESGFWVLQIGYRRKDA

SEQ ID NO: 239459 - protein, 142 aa, Glycine max
  Clone ID: PAT_MRT3847_58257C.1.pep
LPPPSSPKPTSLLRETPKKIIYQKKPTAQGKIGNYFPQPFGDKNTRNPKHTSGGRPFPQENRLRIKCGPVASSPLLCLWAPIKNTFAKTGAGAAPPNGTKAGKAHLKPPEQRQNPLNGREPPQPPWLNPKARRTGTKRKGPP

SEQ ID NO: 239460 - protein, 78 aa, Glycine max
  Clone ID: PAT_MRT3847_58258C.1.pep
IRYQVLPIIMCKPGKQAYPNIFSVGRDPPLECILPQLPVRNPGAIFGQNHVVPSIVIYIKQSSSITRSIKIGRLCSVT

SEQ ID NO: 239461 - protein, 76 aa, Glycine max
  Clone ID: PAT_MRT3847_58259C.1.pep
KRGRFFFPFFPKEMGFFQGVTKGFPKRLQRGPEINSKPLNTKGNGRGDTTGFCPQRVGGKNPFPKRGEKNLVNSFF

SEQ ID NO: 239462 - protein, 57 aa, Glycine max
  Clone ID: PAT_MRT3847_5825C.1.pep
SHHVCCCRARISFSSNYGGQKSKGVCTVSAYQVLVNWCMFSSLRRPHPCLKWLSLNT

SEQ ID NO: 239463 - protein, 189 aa, Glycine max
  Clone ID: PAT_MRT3847_58260C.1.pep
IRLLLLHYVTIYLILHGCIFWGSITGRLPGVGLLARKRTEQNHRYEHQHHATCRQSYHLGESSLEPPWIPLTVLDETALKARQRLHKKLGHFFSSYRSSENPRKEGKVNQSSYEKKDGGIGRKLLESSWLLRGNKFKKDRKVCAVCLEDLGQEQQVMNLSCSHKYHSACLLPWLAAHPHCPYCRTPVQP

SEQ ID NO: 239464 - protein, 83 aa, Glycine max
  Clone ID: PAT_MRT3847_58261C.1.pep
LSQPQGFSLNPEKLKPDPQEHDDQKPQVLYKWYGNITSQQGVCLCYNLGLQSNQTCYCKTMGTATTTTAPDSNLYRFYRPMNI

SEQ ID NO: 239465 - protein, 95 aa, Glycine max
  Clone ID: PAT_MRT3847_58262C.1.pep
SGSAICFAGCLCIPERSFRPFSGVLLVGGPLASYCLHGLCSAPLWHLLEPALFVGSRPARAWSAVFSIFRREKVSLCPLPGRCLVDDCSCLLAFS

SEQ ID NO: 239466 - protein, 445 aa, Glycine max
  Clone ID: PAT_MRT3847_58263C.1.pep
MNSQFANTIDIKLQLPKPFFPRKTPFPQFPHSSPRFLTTRFFPRNFTNRCKLRITASNSPSDTASPKQEQEQEQDAESAQLFEKLKETERKRMNELEEFDKKANVQLERQLVMASSWSRALLTLRGKLKGTEWDPQNSHRIDYSDFLRLLDSNNVQFMEYSNYGQTISVILPYYKNGKPIGTEGNPKDIIFQRHPVNRMPIDSWNDVWRKLHQQIVNVDVINVDAVPAEIYSTIAVAVIWSMRLALAVGFYVWIDNLMRPIYAKLIPCDLGTPSQKTTQPLRSRALGSLGQSRAKFISAEERTGVTFDDFAGQEYIKNELQEIVRILKNDEEFQDKGIYCPKGVLLHGPPGTGKTLLAKAIAGEAGLPFFAANGTDFVEMFVGVAASRVKDLFANARAFSPSIIFIDEIDAIGSKRGGPDIGGGGAEREQGLLQILTEMDGFKVS

SEQ ID NO: 239467 - protein, 67 aa, Glycine max
  Clone ID: PAT_MRT3847_58264C.1.pep
QKQKLKLICVVPFSLTSSFSPPLLLLLFPLSFHPNFPPNPSMNLFPLPLPCNQISFQTHYFTIFPIL

SEQ ID NO: 239468 - protein, 79 aa, Glycine max
  Clone ID: PAT_MRT3847_58265C.1.pep
CKFVPEYPRAGEGLSFWRPSILDPFTVLILQDRVRQYLAPHRVTVCINLIIRDVLGANILHKCGNHHPMFIRMNPLHPQ

SEQ ID NO: 239469 - protein, 73 aa, Glycine max
  Clone ID: PAT_MRT3847_58266C.1.pep
NCERNASYMCYTCTFSLCKGCIKDTVILCVRGNKGFCETCMRTVMLIEQNEQGNNVALYCWYNNVMTTKIFGS

SEQ ID NO: 239470 - protein, 121 aa, Glycine max
  unsure (1)..(121): unsure at all Xaa locations
  Clone ID: PAT_MRT3847_58267C.1.pep
RTASRXXRPRPSETPIFYPSXXVLKTGMGLISPQNAKTIVYXXRSFSSHLSNPQTLRTLDNLXLFSPMPFSSSPLXSTPKLXXPISNFRPVFLKYNPAVVVRRPLVACRSRFRSPMSSVFG

SEQ ID NO: 239471 - protein, 99 aa, Glycine max
  Clone ID: PAT_MRT3847_58268C.1.pep
VYWTAGALFFFVYKFAHMTFIAYEGSYLTEKKKRVPTWDSTITPTVHFSKTLLQWQVACHFGDLTTELIQCHYVNGFHYIHHITCSKQVMRTLPKYISS

SEQ ID NO: 239472 - protein, 71 aa, Glycine max
  Clone ID: PAT_MRT3847_58269C.1.pep
LAQNRCRISPLIGTLINLHFNRDRHSCFLYILISCSSDYQPPLADRLFMEPALGLSRFDGRASGLYHQCET

SEQ ID NO: 239473 - protein, 76 aa, Glycine max
  Clone ID: PAT_MRT3847_5826C.1.pep
GSSSLASPATDVLARDLAAARHSVTHYPARPAHFLFCPAPCTRSPISSEGISIQSYAASSATGLLHTGPWHMLSHT

SEQ ID NO: 239474 - protein, 96 aa, Glycine max
  unsure (1)..(96): unsure at all Xaa locations
  Clone ID: PAT_MRT3847_58270C.1.pep
FIGCYFCDILKTSVQQTLVCQLIVILWTMLQLLANEQELNTVVKKALQEKREAKDGLGSTEIIRSFLERNAKELGLPLAQADEADXLLYDAVFAEI

SEQ ID NO: 239475 - protein, 75 aa, Glycine max
  Clone ID: PAT_MRT3847_58271C.1.pep
YNTNLKSKPKTTVNNSRDEIIYALRGAATPSSCIKRLSLNKRSTKSVQKYNKPKSYIHPGNLKRILEFNEYMYIR

SEQ ID NO: 239476 - protein, 207 aa, Glycine max
  Clone ID: PAT_MRT3847_58272C.1.pep
MASKIESENSTDTSPSSPKNIYKDPDDGQQRFLLELEFVQCLANPTYIHYLAQNRYFEDEAFIGYLKYLQYWQRPEYIKFIMYPHCLYFLELLQNANFRNAMAHPTNKELAHRQQFYFWKNYRNNRLKHILPRSLPELSATPAAPAPASTPSQAPVSALPPVPATSVAVTAAPSQAPSPMPYVMPPGSGLAKNDMRNPTVDNRRKRK

SEQ ID NO: 239477 - protein, 123 aa, Glycine max
  unsure (1)..(123): unsure at all Xaa locations
  Clone ID: PAT_MRT3847_58273C.1.pep
EKALKDAGLGSRQVTPFMRLRVVGLTYKTRQDKPKEGIVAIWNPTETQRQELVEGGAYAISGLMPSSSDSDILHLDTRGSSTKWLPLSYNSRKQFKPFFCNRKSIPLTSLGDXPLSNEFDITA

SEQ ID NO: 239478 - protein, 270 aa, Glycine max
  unsure (1)..(270): unsure at all Xaa locations
  Clone ID: PAT_MRT3847_58274C.1.pep
MAPSSNYISFLFLTTLLFALQITARDSQFFSKVTHFDKDNAKVTELPNKEAPEVNKPEQQPPFIPETENSYGLYGHHDESNQVPSTTPTSYHPYKTKFENSNNKYYNNDAYNTRFSETSYNNNNNKYYNKDSYEGNQYELSDTKYTEEGYNNKYHNSYQNNYNNDAANDKYSYNNNNNXKNYNAHNNRYNTYNNNAVSRYNGERQGMSDTRFLEGGKYFYDVGAEKYNPTNYGDSSREVNTNNWYNNRGVNYNGYQNQEEFEDEHKNFEP

SEQ ID NO: 239479 - protein, 74 aa, Glycine max
  unsure (1)..(74): unsure at all Xaa locations
  Clone ID: PAT_MRT3847_58275C.1.pep
HAHQLFPIGMNTDYRTRTHYAKCTRXSWRNEXHKIRRPNTTCEQCVESTKETMTGRTETSHFTTIIEQDYLLCR

SEQ ID NO: 239480 - protein, 112 aa, Glycine max
  Clone ID: PAT_MRT3847_58276C.1.pep
LWFVGVCICFCLDPFVLQCCKVSGVFIEFGFFWAFFWFEMENFSHQTAIPLMFHFVFGFSCHFSSCCVIECHLDVCFYLLEPLWLKLGVLGCNCLVVPAPLRNTIARFFFVF

SEQ ID NO: 239481 - protein, 272 aa, Glycine max
  Clone ID: PAT_MRT3847_58277C.1.pep
MAPSSNYISFLFLTTLLFALQISARDSQFFSKVTHFDKNSVKETELPNKEAPEVNKPEQQPPFIPETENSYGLYGHHDEYNQVPSTTTNPTSYHPYKTEFENSNNKYYNNDAYNTRFSETGYNNNKDSYEGNQYELSDTKYTEEEYNNNNNKYHNSYQNNNQKYYNNDAANGIYSYNNNNNNYNANNNRYNTYNNNNAVNGYNGERQGMSDTRFLEGGKYFHDVAAEKYNPTNYGDSSREVNTNNWYNNRGGNYNGNQNQQEFEDEHENFEP

SEQ ID NO: 239482 - protein, 435 aa, Glycine max
  unsure (1)..(435): unsure at all Xaa locations
  Clone ID: PAT_MRT3847_58278C.1.pep
METSKFSLLFFYVICLAIFPTLNANIGHFDHVWHRRLKEAREAAKQAYKPNPMKVTAEFNTHVIRAMRGSNNSRRGLSNQYDGPCKATNPIDKCWRCDPNWEKNRKRLADCALGFGHGTTGGKDGKIYVVNDSSDNDLVNPKPGTLRHAAIQREPLWIIFDRNMNIKLHAELMLTDNKTIDARGANVHISEGAQITLQYVKNIIIHGLHIHDIKKCSGGLIRDSMDHYGVRAMSDGDAISVFGSTYVWIDHVSFTNCDDGLIDVVSASTAVTISNCHLTKHNDVLLFGASDSYSGDKIMQVTLAFNHFGKGLIQRMPRCRWXFFHIVNNDYTHWLMYAIGGSQQPTIISQGNGFIAPNDRNAKEVTKRDYAPESVWKNWNWRSEGDLLMNGAFFVQSGKNVAKNPKAEIIAKPGKAVSSLTRFAGPLKCEVNKSC

SEQ ID NO: 239483 - protein, 191 aa, Glycine max
  unsure (1)..(191): unsure at all Xaa locations
  Clone ID: PAT_MRT3847_58279C.1.pep
QLVQLNLQNMEFDNEDHYAKLLRAQTHIFDQTFGFINSMSLKCAIDLCIPDVIHKYGQPMPLSQLIASLPIHPSKACFIFRLMQILTHSGFFSQHNNATENYEQEEVSYVLTDASKLLLKDHHFSMISLPQVILDPIXVNPWFQFSTWFTNEDPTPFHTQNGMAFWDYASSEPKLNHLYHDAMTSDSRLIS

SEQ ID NO: 239484 - protein, 43 aa, Glycine max
  unsure (1)..(43): unsure at all Xaa locations
  Clone ID: PAT_MRT3847_5827C.1.pep
KLKSFLAGHNITITDGIDKTSDTLXFRKLADCELLKSNFKQTL

SEQ ID NO: 239485 - protein, 158 aa, Glycine max
  Clone ID: PAT_MRT3847_58280C.1.pep
DNYNGESRGRSIFSNGKEAFLWSNSWDNLKLVTPCAACKLLRRRCAEECPFSPYFSPHEPQKFAAVHKVFGASNVSKMLMEVPEGQRADAANSLVYEANLRLRDPVYGCMGAISALQQQVQTLQAELNAIRAEILKYKYREAASIISSQHVALVSSAD

SEQ ID NO: 239486 - protein, 84 aa, Glycine max
  Clone ID: PAT_MRT3847_58281C.1.pep
FNSVTYKGSFATVYRHKTLLSVINIISSYLKLHTFEEVANHNHTNDCCLIISFNVYYVTPFMYDHPLCDEVLLSATFKYSSNYF

SEQ ID NO: 239487 - protein, 48 aa, Glycine max
  Clone ID: PAT_MRT3847_58282C.1.pep
PALMMRLNDVHDIIEDNPLIVFRPRVYSMIESDEIYVLLNIIARIRLY

SEQ ID NO: 239488 - protein, 58 aa, Glycine max
  Clone ID: PAT_MRT3847_58283C.1.pep
MFPDRYVVHGLTIAQILEPRPFNKGDCSPTPVFYVKAKRSSAVLIHPQNVSRILKWFP

SEQ ID NO: 239489 - protein, 72 aa, Glycine max
  Clone ID: PAT_MRT3847_58284C.1.pep
SSAATMCSGAVNKGAMGSPYNYRASDSLSHSKYTIEGSTLKEHRGIHMFVFNLGGVEAILGMLGAIGLVIMP

SEQ ID NO: 239490 - protein, 115 aa, Glycine max
  Clone ID: PAT_MRT3847_58285C.1.pep
VLRSRRHGHGFGEPQHHSYIAFFFFVFISQTLFFLQLCTTSHPPSTISEAPRSYGSRRGEDDSPFPSRFPHRMVSLIKFILSLFFVILLSVSAANLDSDSPSPCYVYCLITSILC

SEQ ID NO: 239491 - protein, 131 aa, Glycine max
  Clone ID: PAT_MRT3847_58286C.1.pep
AWAIFYIFATSSLCLDAEQKAEYYRRMRDDLKKADKEDKLIERQRLREKRIKQKMKWKAGNAEEDDQDDISGSEGDETVDRLHKKSKVYFDSDSDEGERNEVTGNARTSTGGVTLEEQEALALKLLNSMHS

SEQ ID NO: 239492 - protein, 137 aa, Glycine max
  Clone ID: PAT_MRT3847_58287C.1.pep
GHTLPPLARIADTQSGKEMLLDPEKKAEYYRRMRDDLKKADNEDKLIERQRLREKRIKQKMKWKAGNAEEDDQDDISGSEVDETVDRWHKKSKVYFDSDSDEGERNDVTGNAGITTGAVTLEEQEALALKLLNSMHS

SEQ ID NO: 239493 - protein, 85 aa, Glycine max
  Clone ID: PAT_MRT3847_58288C.1.pep
TMRKLKRNQLFRGRHIALPLVMGSRRIIRWVLPDRLGSQLPTSKLNRFLRHQQDRIIKAIDRGDLVLAFRMFTSLAQNSYVFRTM

SEQ ID NO: 239494 - protein, 34 aa, Glycine max
  Clone ID: PAT_MRT3847_58289C.1.pep
DQTPWCLACKRHKLLTEEECASKSSMTQIWMRSP

SEQ ID NO: 239495 - protein, 48 aa, Glycine max
  Clone ID: PAT_MRT3847_5828C.1.pep
TRLDTRPLALILLLILNFNKCCVFKERGFYNRKTLTLTMKSSSTTKRK

SEQ ID NO: 239496 - protein, 125 aa, Glycine max
  unsure (1)..(125): unsure at all Xaa locations
  Clone ID: PAT_MRT3847_58290C.1.pep
FFFFFFFFFFFFFFFSFFFXXTQKWRIGFFFGILLPNHFPPALLKKLLGQKTCIFFKPRPKSPMGFLPNPRCCFKTTLFFLEIEGDTLLSPIFLWDPAKLFYGVEIVGIVLGIGKCKKPGFIKFG

SEQ ID NO: 239497 - protein, 79 aa, Glycine max
  Clone ID: PAT_MRT3847_58291C.1.pep
GGFFFFFFLTLKFNGIIIIKSIDKHYGLWANYLYRTFGTKENATTYRSTNQFFLLAKQGKKKKTTKFLHWLWVIPYASP

SEQ ID NO: 239498 - protein, 68 aa, Glycine max
  Clone ID: PAT_MRT3847_58292C.1.pep
LFFFLLLFSFFFFFFFQRNGNFLLPPLIHRFKINFSKTPIPACWWAYAPKIPMFMFNSNCFSHFSLIQ

SEQ ID NO: 239499 - protein, 140 aa, Glycine max
  unsure (1)..(140): unsure at all Xaa locations
  Clone ID: PAT_MRT3847_58293C.1.pep
MLRKVSSIVENSFAILGASSIXDKLQQGVPESIESLRIAGIKVWVLTGDKQETAISIGYYSKLLTSNMTQITINSKNRESCRKSLQDALVMSKKLMSTSGVANNAEGSSHATPVALIIDGTSLVHILDSELEEQLFQLAS

SEQ ID NO: 239500 - protein, 92 aa, Glycine max
  Clone ID: PAT_MRT3847_58294C.1.pep
NLRGGGGDRYQWSKKKKWGEKKSSPIGEKITKLVGGKVSEKGLLIFGWGIPTSFLRASRLKGNFSFLVQPAPIFFFFPKTRGGGKFLVWAGG

SEQ ID NO: 239501 - protein, 129 aa, Glycine max
  unsure (1)..(129): unsure at all Xaa locations
  Clone ID: PAT_MRT3847_58295C.1.pep
LAGFSFRXGSLLPLVLRFRGGLRFFVPPLAGGSLPLGVGGSGPFVFVAAGFRVSGGVPPGPLGVFFAGXLFGGGGSLAGCCFXGGXPLPLVLRLRGGFSARCVLVVFPGPLRLFGVSWVCLPVPWVRFV

SEQ ID NO: 239502 - protein, 83 aa, Glycine max
  Clone ID: PAT_MRT3847_58296C.1.pep
EKKIVCFWLLHYGSFTVSKSNLIYEDAMPSRVPHSATKLNAKALCYNFVFAVSEKAASVSKPSSGLKITLHSKHFSLFWTTML

SEQ ID NO: 239503 - protein, 47 aa, Glycine max
  Clone ID: PAT_MRT3847_58297C.1.pep
KFLILHLKWNNFLGQRIFAQVGGVLSPDQIRQFERGFLIASYSKEET

SEQ ID NO: 239504 - protein, 108 aa, Glycine max
  Clone ID: PAT_MRT3847_58298C.1.pep
KPGAIKSFPLQPPQEAPKLNNHLRFFPPWTLWYPGEPSKQAQSKLVVSDCPRSGPINQRAGGPLGMRVGTSPIANSATTLNGIILELIARGKNKAIPSPPGSKRGALT

SEQ ID NO: 239505 - protein, 70 aa, Glycine max
  Clone ID: PAT_MRT3847_58299C.1.pep
TFVVVASPGCFLGSSLKHGHFVIPIRTYISKQIKRQNQNDISGILTMKLTFNFIKGDLQINFVINTILYF

SEQ ID NO: 239506 - protein, 70 aa, Glycine max
  unsure (1)..(70): unsure at all Xaa locations
  Clone ID: PAT_MRT3847_5829C.1.pep
VHSLCFALLPQNQTPNTCGNCDCADKTSCTKGNSYGVXVETXKSYIETVVXDXPAXEHDGXXXXGXXCAW

SEQ ID NO: 239507 - protein, 220 aa, Glycine max
  Clone ID: PAT_MRT3847_582C.1.pep
RGIENTTNRQVTFCKRRNGLLKKAYELSVLCDAEVALVVFSSRGRLYEYANNSVRGTIERYKKACAASTNAESVSEANTQFYQQEASKLKRQIRDIQNLNRHILGEGLSSLSLKELKNLESRLEKGLSRVRSRKHETLFADIEFMQKREIELQNHNNFLRAKIAENERAQQRQQDMIPGTECESTIPNSQSYDRNFFPVNLIDSNNNQYSRQDQTALQLV

SEQ ID NO: 239508 - protein, 74 aa, Glycine max
  Clone ID: PAT_MRT3847_58300C.1.pep
SPQNPGLKKKLAWAKGWGFKTGFLLKKPPGGFRLGNSKGWIFKSCYFVLKIICFLPNWVKKILPRIWVFYWALF

SEQ ID NO: 239509 - protein, 56 aa, Glycine max
  Clone ID: PAT_MRT3847_58301C.1.pep
TSGNKRASPNIFLFFLFSWLGLISSHFFCISSVWANLSLFFFSLQGPFFVGLIQNV

SEQ ID NO: 239510 - protein, 213 aa, Glycine max
  unsure (1)..(213): unsure at all Xaa locations
  Clone ID: PAT_MRT3847_58302C.1.pep
MSVGHSSPVGGRDASLHSVTEVSENSSRDADQDGPAAAEQVNSDAGSGSIDPAFLEALPEELRAEVLSSQQGHVAQPSNAESQNNGDIDPEFLAALPPDIRAEVLAQQQAQRLHQAQELEGQPVEMDTVSIIATFPSELPEEVLLTSSDAILANLTPALGAXANMLPEKFAHRYSHTLFGMYPVVERLLGVMFSLALDGAGSLLYAGLLALRY

SEQ ID NO: 239511 - protein, 59 aa, Glycine max
  Clone ID: PAT_MRT3847_58303C.1.pep
MMRARFPLLLLGVVFLASVSVSYGIADWDKQKLSHKKCLRSCYSGEESYRDHECDARSN

SEQ ID NO: 239512 - protein, 71 aa, Glycine max
  Clone ID: PAT_MRT3847_58304C.1.pep
WSPTMGRLDLFYPSVWTASVYWASRISYLSRSPIGALNLFRLPNESHQGFRGAHPLLNTITEKGGGGFLHS

SEQ ID NO: 239513 - protein, 528 aa, Glycine max
  Clone ID: PAT_MRT3847_58305C.1.pep
MIEIEGRVSSVKKALVAVSQRLQDCPSVDRTKMMGNKPYEIVQYETLDALPRGTLTAAPRVTLTEVPPGTLTEVPHETVDHLLLRSSALSTLSSSSNSYATRIHSLPTEVNRVSSLEPKALKQEVTFRILCSNDRVGGVIGKGGNIVRALQSETGATISIGPAVAECEDRLITIAASENPESRYSPAQKAAVLVFSRSIEVGFEKGLDSGLNKGSIVTVRLVVPSSQVGCLIGKGGVIVSEMRKATGANIRIIGTDQVPKCASDNDQVVQISGEFSSVQDALYNAMGRLRDNLFVSTQNSAGTRSLSSLRVDTSPYGRQHDVVPLGSLRPPAASHGLSGRTVAQRLALLGRSACVVHPSSPGLWTRNLDRASSPGVSSRILDRTSSPGLWTRNLDRPSSPGLWTRNLDRPSSPGLWAPPTVAGINSRGINDFSLGLTSRKGGLELVSGSKSAIVTNTIVEIVVPDDTIDCVYGENGSNLARLRQISGANVVVHEPRPGTSDRIIVISGTPDETQAAQSLLQAFILSGS

SEQ ID NO: 239514 - protein, 78 aa, Glycine max
  Clone ID: PAT_MRT3847_58306C.1.pep
CLLSVVLGVPSCWVARLSGAAFVALAVLPPLSSFSSAGGALVRRGGSPGSVVSRFRRAPPLVLGLQASTCEWVVPGVS

SEQ ID NO: 239515 - protein, 82 aa, Glycine max
  Clone ID: PAT_MRT3847_58307C.1.pep
SAMVPETKLNLSLLGYIRPIIQTVLQVKHELSNCEGHLFIGNCMATGFNPPRKLLLGAYITAHNSAIQECKPTKPALCHFSR

SEQ ID NO: 239516 - protein, 95 aa, Glycine max
  unsure (1)..(95): unsure at all Xaa locations
  Clone ID: PAT_MRT3847_58308C.1.pep
LEVIYTFNGETATRDQLVRDLNVHVIHREIPAKYLDEPTITDGNPDGGAAIGEAXGDACMKSLKTINHTYGRGSAHGICGFYEKDATKVDRNDAY

SEQ ID NO: 239517 - protein, 51 aa, Glycine max
  Clone ID: PAT_MRT3847_58309C.1.pep
IFFIYTKEYMLTNTLLKNGVTSSSRSPDLDVVRSEVQTKQTVHRSYIHRPK

SEQ ID NO: 239518 - protein, 55 aa, Glycine max
  unsure (1)..(55): unsure at all Xaa locations
  Clone ID: PAT_MRT3847_5830C.1.pep
IRAKGYLMEKRILNXFFSVYLLKHMPCNYVCHHCLFLTISTKTLNLVEDNGEPCN

SEQ ID NO: 239519 - protein, 157 aa, Glycine max
  Clone ID: PAT_MRT3847_58310C.1.pep
RTSYQPEPAVDMKQRFVGHCNIGTDIKQASFLGQRGEYVASGSDDGRWFIWEKCTGRLIKMLSGDESVVNCVQCHPFDFVVATSGIDSTIKIWTPTAPVPSSVAGGPAGSETVDVLESNGEKSTKTHNSTLPFLEPFGMQEFPEGPLRLRPFECAQS

SEQ ID NO: 239520 - protein, 163 aa, Glycine max
  unsure (1)..(163): unsure at all Xaa locations
  Clone ID: PAT_MRT3847_58311C.1.pep
ISHFLSHPYVHVVDSFTDDEPQDPYESRSTLLFFRGRTYRKDEGIVRVKLAKILAGYDDVHYERSVATEENIKASSKGMRSSKFCLHPAGDTPSSCRLFDAIVSHCVPVIVSDQIELPFEDDIDYSQFSVFFSXKEALQPGYMIDQLRKFPKEKWTEMWRQLK

SEQ ID NO: 239521 - protein, 50 aa, Glycine max
  Clone ID: PAT_MRT3847_58312C.1.pep
HGSKPFCIHHLPLWTTLMSFSVAYSLVTRTLEALNPQEIRDEILQDRQQP

SEQ ID NO: 239522 - protein, 83 aa, Glycine max
  unsure (1)..(83): unsure at all Xaa locations
  Clone ID: PAT_MRT3847_58313C.1.pep
VGCVLGSECWVKGVASVAVKKVVKAPLSGLPLLEGSRAFVDVFNVGYQKVLEKSXFVKGGDFLEVYLLKGKTRRNGFFPYFLN

SEQ ID NO: 239523 - protein, 78 aa, Glycine max
  Clone ID: PAT_MRT3847_58314C.1.pep
PGFHSIQTAYFSLSLNKTTCYLLLFYSLSLSYTLHTQNTVLTSCLKTLFPFKPFFSVSRSNTCLGSNLIFQVKPFFVH

SEQ ID NO: 239524 - protein, 90 aa, Glycine max
  Clone ID: PAT_MRT3847_58315C.1.pep
GPFVAPLFTPFGPRFRRGPWGPPWPALNLGLGAFLPFCFSQVQGGPFSAPGFFGVFSGPPPGPFWVALWVFIFFLKKRVSLGFPFGPRVF

SEQ ID NO: 239525 - protein, 81 aa, Glycine max
  unsure (1)..(81): unsure at all Xaa locations
  Clone ID: PAT_MRT3847_58316C.1.pep
IKKLIXFFFLPGEYYLKKFYKSQKSNNXFKVPQTQKIRTGCYIHPRRYSHGQLHFEITWGASGDQGWFHQRYGTSQNCNSK

SEQ ID NO: 239526 - protein, 91 aa, Glycine max
  unsure (1)..(91): unsure at all Xaa locations
  Clone ID: PAT_MRT3847_58317C.1.pep
AKYHSSGKSSSMTAIALPFNPLITYTSTTDAQSRVWYGKPCTHLPTPQESXALFNKTTIXRMRISGHGPKVLETQKVPPSCFLQKFPKATL

SEQ ID NO: 239527 - protein, 77 aa, Glycine max
  unsure (1)..(77): unsure at all Xaa locations
  Clone ID: PAT_MRT3847_58318C.1.pep
ELPMGHDDGSITGQASCGNSEVSVGPTPFFRXDPCRRRNNIFGLYHVYTSAGEAMLTKRWQAAVLVVGHADVAVDLP

SEQ ID NO: 239528 - protein, 68 aa, Glycine max
  Clone ID: PAT_MRT3847_58319C.1.pep
TARKKPPKGGLIIHDPCLILYKTKTQQQSMKKHDAYLDACVRYTGANHMGIINPFLKKNKLRQKHCGR

SEQ ID NO: 239529 - protein, 93 aa, Glycine max
  unsure (1)..(93): unsure at all Xaa locations
  Clone ID: PAT_MRT3847_5831C.1.pep
NGPVRVAFPVHXPFVCTTREVYIHITGDHLGGHAVXQVGCAAIYDRSEYWLPANQLIIAFGHYGSFMIRIGMEXCGVEKNVSSGLPSAGSLVS

SEQ ID NO: 239530 - protein, 95 aa, Glycine max
  Clone ID: PAT_MRT3847_58320C.1.pep
GTKKPVFLPWELIMMLPLKSLIRFKTVFVGSCKDFLLLDYNRSSFIFNPSTGLHKFVDWSPISNNMGGYGFGYDPSTDDYSLVQASTNKNPTTST

SEQ ID NO: 239531 - protein, 148 aa, Glycine max
  Clone ID: PAT_MRT3847_58321C.1.pep
SSSNPIKQHSGRQHLRRLADAIEHYQIQQKQHRKSPETITKTENRRRNPDLGSATHHHPKTPTTHLLNQQPRRRGRFDLSKDEEEGFVLKNSTTIFECEEVSRNREKKNEEKRQRFCAMLILLQLRRGRCRTPAAARNRDRSSTKRTE

SEQ ID NO: 239532 - protein, 84 aa, Glycine max
  Clone ID: PAT_MRT3847_58322C.1.pep
SFFFTFSALFLNSLFCLLHFDIILFFDTALSYFRKAGLQEDLKIVLGKIESQLLGLGFGWENVLYIHLYIDDMNNFSEANETYV

SEQ ID NO: 239533 - protein, 74 aa, Glycine max
  Clone ID: PAT_MRT3847_58323C.1.pep
MRKKFGTRFPAARINQIMQADEDVGQIALAVPVLVSRSLELFLQDLIDRTYEITLQSGAKTLNSFHLKHCVKRH

SEQ ID NO: 239534 - protein, 55 aa, Glycine max
  Clone ID: PAT_MRT3847_58324C.1.pep
YILILIFLNITYLLLLNITISFTSYSIFKFSPIYTPIQFFVIFFFFSYTRISIFI

SEQ ID NO: 239535 - protein, 62 aa, Glycine max
  Clone ID: PAT_MRT3847_58325C.1.pep
PNVTRWNKTITYPKIFYITRKHLLLLLKPAKHRCITSNKTSSCASLETKFDAIVKKGTWGIK

SEQ ID NO: 239536 - protein, 79 aa, Glycine max
  Clone ID: PAT_MRT3847_58326C.1.pep
EAWCYSWFFQRSTITACMISGSVSTLLAGSFFLRFLTRGPLLSVYGRMGVMATSLIHAVVGNPTHVRLAHATFTKPAFE

SEQ ID NO: 239537 - protein, 183 aa, Glycine max
  Clone ID: PAT_MRT3847_58327C.1.pep
MSGTRFLFSNDILLRASDAPPVKGLLETHPGAYTTSRTHNNASWLLFWERHMKRLSQSIQILSNLAPELLFKSNNSAILLPSSATLPIWQPTVQMLVNDSVCKVLPIALKERNDCEELAITTLVSGNLEELNACDTFSEERMSKILDVHVHVETYVPPTFGIWGNGVHLAVVGYGRNVAAAKY

SEQ ID NO: 239538 - protein, 73 aa, Glycine max
  Clone ID: PAT_MRT3847_58328C.1.pep
IYTLLFSLFIFHNNPLPPNQITDLFALLIPEFENHRTTSLHNTYCALQESSSIADSGSWSVNDLRACENAGHV

SEQ ID NO: 239539 - protein, 139 aa, Glycine max
  unsure (1)..(139): unsure at all Xaa locations
  Clone ID: PAT_MRT3847_58329C.1.pep
SSRPTTLTGRYRLWTLHARNIALTDXGNEGGAXNSGISAAVLARRAHDSVKHAATESLMDQITAGDKADHTTVNKRAXSMNLTQSVAGELKRLTEGTRCEGQHIPVSHINAGEDYVGRLPLLGPEEILLSCAGAFRTAM

SEQ ID NO: 239540 - protein, 83 aa, Glycine max
  Clone ID: PAT_MRT3847_5832C.1.pep
PFQSRNASDNTRHSSAQQNHNSPVGHFYKHLLPTNKSDFSFQVLVVVGFEDEFQGREWRCEGSSETVPPHGELVQDGFQAVQH

SEQ ID NO: 239541 - protein, 63 aa, Glycine max
  Clone ID: PAT_MRT3847_58330C.1.pep
YVSYKNYVLGSCYALAHKLSSIRYSYPKRKKVEKVKIEDFVAILSAALHQFESSRTPNETSPW

SEQ ID NO: 239542 - protein, 290 aa, Glycine max
  Clone ID: PAT_MRT3847_58331C.1.pep
MQSEFSDAKKRREEDNPQTLVSLVHDSEKKKRKRKRKKKIEESNEQPQVEVCPKSLVDSVIPIVAQKENAETTTENSNPTPKKKKKKKNKNPKKRRKNETTSSLPKEKQSAAAKTGKKGVDKKASGASLFISFGPGSSLPSNSDLTTLYGKFGALNESETSMLSSDCTARVFFLKASDAEKALSHSQNMNPFGSSEASFRLEYLSAGSKSEKSKFKASSTKKKDKTPAKPSASLSPGGEASKLNYIKEKLQGLTSMLEASDAKLPDIKTKLESEMKQLLEDVNRMVESSS

SEQ ID NO: 239543 - protein, 65 aa, Glycine max
  Clone ID: PAT_MRT3847_58332C.1.pep
SLPPFCGCPMIPLILFAVIALCHPRFENIPLQLTAVFSLLGCIIKLFFLLKKKKKKKKKKKKKGA

SEQ ID NO: 239544 - protein, 87 aa, Glycine max
  unsure (1)..(87): unsure at all Xaa locations
  Clone ID: PAT_MRT3847_58333C.1.pep
KKTVGPGVFPNYAPSFKYGGGPPLFFVFPNFVAPKKQGGCIGFFFPFLEVGRNLKKFGCSALXTXPHIKSPNNPKKKPKKKKKKXEK

SEQ ID NO: 239545 - protein, 328 aa, Glycine max
  Clone ID: PAT_MRT3847_58334C.1.pep
MGGWAIAVHGGAGVDPNLPPERQEQAKQLLTRVLNLGISALRSDASALDVVELVVRELETDPLFNSGRGAALTEKGTAELEEASIMDGSNRRCGAVSGVTTVKNPISLARLVMENSPHSYLAFNGAEDFARQQGVEIVENEYFITPENVGMLKLAKEANAILFDYRVPLHNGYESCGVEVENPLQMNGLPISVYAPETVGCVVVDSEGRCAAATSTGGLMNKKCGRIGDSPLIGAGTYACKVCGVSCTGEGEAIIRGTLAREVAAVMEYKGLGLEEAVEYVMEHRLDGGKAGLIAVSSSGEVAYGFNSNAMFRACATQDGFMEVGIWE

SEQ ID NO: 239546 - protein, 53 aa, Glycine max
  Clone ID: PAT_MRT3847_58335C.1.pep
LRYAKSSLLNETMVQLTDLKRNVLYTRCRTLLLWECLHTLDVTELIGAAIRSL

SEQ ID NO: 239547 - protein, 143 aa, Glycine max
  unsure (1)..(143): unsure at all Xaa locations
  Clone ID: PAT_MRT3847_58336C.1.pep
FHSKIIGFETAIXRAYFHVPALNVESLEXDNYLDFIXREGGWSXIXXLXYKRSVIXCANYPEYXVRYRXXXEAXGXXDLANNGLXXATQXLXVRXRPXIHLFXAXVKEXTXDIXGAXAXYQLXHTETSPGLLKTIIKHANMEY

SEQ ID NO: 239548 - protein, 121 aa, Glycine max
  Clone ID: PAT_MRT3847_58337C.1.pep
MLTAVSGSEPLMDTAPKLVSVSLPATLIVTSIEASSGTSVSGSTSTLIVTSTGASSGTSVSGSASVSESASTLIVTSTGASSGTSVSGSTLTVIVTSASTPASLDVPLSLSTLTSTLTTAS

SEQ ID NO: 239549 - protein, 99 aa, Glycine max
  Clone ID: PAT_MRT3847_58338C.1.pep
EYSYSELYVFLVQSTTLYFTKKKVNHYLFTKTCDCQLVVCGSKEQDVFLSQSIHSKGSVLDYHLQTMGLPQQIKVTFFHLCSTRSLEPKMQCKLQTTRS

SEQ ID NO: 239550 - protein, 111 aa, Glycine max
  unsure (1)..(111): unsure at all Xaa locations
  Clone ID: PAT_MRT3847_58339C.1.pep
TTHPYKFSFFHKKSNPTPAFIISRHFIYINFSYIQLPNHKINTTILPKIIQLNHFPLTXITNSTHLLNTNTTNFNNPHTYNNPLITNYNYIIPSINTPILKPKSTKKLNHL

SEQ ID NO: 239551 - protein, 53 aa, Glycine max
  Clone ID: PAT_MRT3847_5833C.1.pep
CLTAVTKLHKLCASQSGTDFHRTANLYLADVEEFSHSGMPFSPLGHARCMILS

SEQ ID NO: 239552 - protein, 332 aa, Glycine max
  unsure (1)..(332): unsure at all Xaa locations
  Clone ID: PAT_MRT3847_58340C.1.pep
MRKPEACNNNTKNNSNKKLRKGLWSPEEDDKLMNYXMLNHGQGCWSDVARNAGLQRCGKSCRLRWINYLRPDLKRGAFSPQEEELIIHFHSLLGNRWSQIAARLPGRTDNEIKNFWNSTIKKRLKNMSSTTTTTSTSPNASETSISEPSNKDLNNMGGFISTLHNKHAGFVPMFGSSPSPSMMQTSTVFNNMIERFPMLEQGLINMPASGGYFEGTGSTPCFSQCEVHNNKGSCYLENEVFESVNIGVEGDMFVPPLENVTCKREETTNSSYFDDDINSILNNCNNIGIAENKAHHGVENLFQQELATATGEWDFEELMKDVSSFPFLDFSY

SEQ ID NO: 239553 - protein, 501 aa, Glycine max
  Clone ID: PAT_MRT3847_58341C.1.pep
MTGGGITMQSTPGSSGYLDLYPERKMSFFKNPYILGLAAVAGIGGLLFGYDTGVISGALLYIKDDFEEVRNSNLLQETIVSMAIAGAIVGAALGGWINDAYGRKKATLFADVIFTAGAIIMASAPDPYVLILGRLLVGLGVGIASVTAPVYIAEASPSEIRGSLVSTNVLMITGGQFLSYLVNLAFTGVPGTWRWMLGVSGVPAVVQFVLMLFLPESPRWLFVKNRKNEAVDVLSKIFDVARLEDEVDFLTAQSEQERQRRSNIKFWDVFRSKEIRLAFLVGAGLLAFQQFTGINTVMYYSPTIVQMAGFHANELALLLSLIVAGMNAAGTILGIYLIDHAGRKKLALSSLGGVIVSLVILAFAFYKQSSTSNELYGWLAVVGLALYIGFFSPGMGPVPWTLSSEIYPEEYRGICGGMSATVCWVSNLIVSETFLSIAEGIGIGSTFLIIGVIAVVAFVFVLVYVPETKGLTFDEVEVIWRERAWGKNPNTQNLLEQGSSS

SEQ ID NO: 239554 - protein, 246 aa, Glycine max
  Clone ID: PAT_MRT3847_58342C.1.pep
EQETRLDLTVVERRKKMVLPQDLITEILLRLPVKSLVRFKSVCKSWLFLISDPRFAKSHFELAAALADRILFIASSAPELRSIDFNASLHDDSASVAVTVDLPAPKPYFHFVEIIGSCRGFILLHCLSHLCVWNPTTGVHKVVPLSPIFFNKDAVFFTLLCGFGYDPSTDDYLVVHACYNPKHQANCAEIFSLRANAWKGIEGIHFPYTHFRYTNRYNQFGSFLNGAIHWLAFRINASINVIVAFD

SEQ ID NO: 239555 - protein, 78 aa, Glycine max
  Clone ID: PAT_MRT3847_58343C.1.pep
WSSNIDTLNISGLYTCKRTLHNNNRTTQKSTYQIQNINSIPNYLRELYSQLRLIKRFFQYTYCCRHQNLPPDYMCYTG

SEQ ID NO: 239556 - protein, 69 aa, Glycine max
  Clone ID: PAT_MRT3847_58344C.1.pep
SKSEKQYHSRSLWPAQRVIFFPLTNRTQKSTKKLIHSAHQVTNPFVSRLKVRQPVISLYPHRTRGRTRG

SEQ ID NO: 239557 - protein, 53 aa, Glycine max
  Clone ID: PAT_MRT3847_58345C.1.pep
MLTIATFLSNQSLLGILSLFYSHLFKALSNPKTPNLIFHNSRVSAPCNFLSQS

SEQ ID NO: 239558 - protein, 78 aa, Glycine max
  Clone ID: PAT_MRT3847_58346C.1.pep
SRLNWMPTCLRFRDGNWFPGIQSNYSSDLTSCVVINQRGGFSCFFPHPPPWRGSRLKKTAKFISFGKLTSPKLLFLSF

SEQ ID NO: 239559 - protein, 110 aa, Glycine max
  unsure (1)..(110): unsure at all Xaa locations
  Clone ID: PAT_MRT3847_58347C.1.pep
PRVLTDKSKVILQMTTEHKSERVVDLKDQLDMLSLQKSVHTEFKNIEYDHMHMRIARMLTEKRVREIDDGINKRFHRXARHKTXKSIVVRPPPSIKKLSTARISSRSSIH

SEQ ID NO: 239560 - protein, 75 aa, Glycine max
  Clone ID: PAT_MRT3847_58348C.1.pep
VTRKTALRRPAHAELAFENQQALTVPDVKLHKLQCHMPQLAFRQPTNQPPTVHDSAAATDLNVAAGTTQQMPSHA

SEQ ID NO: 239561 - protein, 207 aa, Glycine max
  Clone ID: PAT_MRT3847_58349C.1.pep
MLVTEDKSHVVVAIDNDGCCHRSSAGGEGFADAGERSDEEQRSSHDSGTEIVGVCEKERGSECSVEVDLVPEVKVHLANVERDCRICHLSMDMTNHESGTSIELGCSCKDDLAAAHKQCAEVWFKIKGNKTCEICGSVARNVAGAIEIQMTEQWNEANDASTAPSSGPAPPTETRNFWQGHRFLNFLLACMVFAFVISWLFHFNVPS

SEQ ID NO: 239562 - protein, 72 aa, Glycine max
  unsure (1)..(72): unsure at all Xaa locations
  Clone ID: PAT_MRT3847_5834C.1.pep
HICYRTGLSSPSSSGITLIARSTPVTVTVDDGNHREADTVPTPVAILDQDSDPDATXDEITFGDRLEAILDT

SEQ ID NO: 239563 - protein, 40 aa, Glycine max
  unsure (1)..(40): unsure at all Xaa locations
  Clone ID: PAT_MRT3847_58350C.1.pep
TLFSPPPPTPYLTNLGYGYSIAISLGVLXLLCSLILSSYV

SEQ ID NO: 239564 - protein, 118 aa, Glycine max
  unsure (1)..(118): unsure at all Xaa locations
  Clone ID: PAT_MRT3847_58351C.1.pep
HEWPAYDIQMHSSKDRMQKLEQNLHMMESSVTHVLLTPVISGDILPLTETMDRKRRLPICGHFYDQTCAEDTMATHQMSPXXNADDTTVLTLNAKPLYQLXESSLAFWEAIVHDIGHS

SEQ ID NO: 239565 - protein, 174 aa, Glycine max
  Clone ID: PAT_MRT3847_58352C.1.pep
MRTSLGSFSSPFTSFRSASSWFEVYAAFSTFMMLLRTAINDLIPHQVRTFIVTKIKALFSDRQNINQVSLQINEIWDGQINQLFQAAQEYLPAQISHSYKSLKVGKLPKHKNIAVAVDGTQEVVDLFQGIKLSWKLVEKSPKSDSDHRDHHPKSSGVGYERKSFTLSFDEKHRD

SEQ ID NO: 239566 - protein, 173 aa, Glycine max
  Clone ID: PAT_MRT3847_58353C.1.pep
APCGHRPGIPGATRASEKKKKKIKKNFKKKKKKKKKGEKGKKKKRGKRGGKIKKKKKWGGRQKRNKVAGKNQARTGGGPCGDTQSIPRGRGHTSTSGGAPANPQWGRLEKKKGAANGGMSHTGRRGKTPPPARGPKPQRGPPRKGPKTGASGGGSGPPPQTVEITPGGGGVGP

SEQ ID NO: 239567 - protein, 95 aa, Glycine max
  Clone ID: PAT_MRT3847_58354C.1.pep
LTGLALYAMAAAIVGYFGVNAYTGKYGLNARQELDQEIIALTSELAQLKRERARSEQRVSLLRSARIDPDMLDERARFQLDYVNPRDLVRMIPPN

SEQ ID NO: 239568 - protein, 257 aa, Glycine max
  unsure (1)..(257): unsure at all Xaa locations
  Clone ID: PAT_MRT3847_58355C.1.pep
XKKKKTTTIAVEVKKSQHKYVIGPKGNSLQEILERTGVSVEIPPSDSISETVILRGEPEKLGQALTEVYAKANSFTVSSVSAPSWLHRFIIGKKGQNLAKITQQMPKVHXIEFTEGEDKITLEGPTEDVNVAQEQIEGMVKDLINRMDYVEINIDHKFHRHLIGKSGANINRIKDQYKVSVRIPPDSEKSNLIRIEGDPXQGVQQAKRELLELASRMENERTKDLIIEQRFHRTIIXQXKGERIREIRDKFPEVIIN

SEQ ID NO: 239569 - protein, 175 aa, Glycine max
  Clone ID: PAT_MRT3847_58356C.1.pep
PNNIVDNNIRELFEEHVNVKKVELKEKKNFNDEISKFCFIEITATDQKLNTCFNKLKGKKIDGSEITVELAKESFIDRLKKERAEQEKSKKEFARNEQNDDEYSTNYSFPNSQNKSIHKKFSDSDLTTDLCFSKEKKRKKFEEDSYDDSLNNKKFKEENYKEFSNIDGTVQKSLD

SEQ ID NO: 239570 - protein, 76 aa, Glycine max
  Clone ID: PAT_MRT3847_58357C.1.pep
KSTFPVAYVQHSQGPDRVTRPEKCMMGPDHTQGGTLSVVHFKTTSEVTYKAKLQCSYCMVMLDRAKSDCNDSAMCP

SEQ ID NO: 239571 - protein, 143 aa, Glycine max
  Clone ID: PAT_MRT3847_58358C.1.pep
TGGCFSSDILSAVDRAVDDGVDVLSISLGGGVSSYYRDSLSVASFGAMEKGVFVSCSGGNAGPDPVSLTNVSPWITTVGASTMDRDFPADVSLGNGRKITGTSLYKGRSMLSVKRQYPLVYMGDTNSSIPDPKSLCLEGTLDR

SEQ ID NO: 239572 - protein, 422 aa, Glycine max
  Clone ID: PAT_MRT3847_58359C.1.pep
MGFQHGNESILTCPTSGLSGANVNVSEMAISSVSIAKPSDVVNPFIASSAWDPLVSLSQVQSFGGSSMVSHSEFANSNSSYPLVLDNQGISNTSHLVQYMSDSNLGGMVPKVHSYASGGFSEMVGAGSFCQHRSADMANTGYPIHYNPIKEAPINGEQSQVEDSIPEEEAPGSAPSGNRRKRGLDHNSTFSPNKNAEGDAVNDSPGKASDGSKEHEKRPKVEQNNGADVRGKQSVKQAKDNNSQSGEAPKENFIHVRARRGQATNSHSLAERVRREKISERMRLLQELVPGCNKITGKAVMLDEIINYVQSLQQQVEFLSMKLATVNPELNFDVDRILSKDILQSRIGHGIGAYGPGINSSHTFPNGSFHGTLAGMSSTSSQFPPLPQNVLDHEFQSFYGIGYDSNTALDNLGPNGRLKTEL

SEQ ID NO: 239573 - protein, 866 aa, Glycine max
  Clone ID: PAT_MRT3847_5835C.1.pep
MFSVPGVSGILNRGGGHKIKGTVVLMRKNVLDFNSVADLTKGNVGGLIGTGLNVVGSTLDNLTAFLGRSVALQLISATKPLANGKGKVGKDTFLEGIIVSLPTLGAGESAFNIQFEWDESMGIPGAFYIKNYMQVEFYLKSLTLEDVPNQGTIRFVCNSWVYNTKLYKSVRIFFANHTYVPSETPAALVGYREEELKNLRGDGKGERKEHDRIYDYDVYNDLGNPDHGENFARPILGGSSTHPYPRRGRTGRYPTRKDQNSEKPGEVYVPRDENFGHLKSSDFLAYGIKSLSQYVLPAFESVFDLNFTPNEFDSFQDVRDLHEGGIKLPTEVISTIMPLPVVKELFRTDGEQVLKFPPPHVIQVSKSAWMTDEEFAREMVAGVNPCVIRGLQEFPPKSNLDPTIYGEQTSKITADALDLDGYTVDEALASRRLFMLDYHDVFMPYIRRINQTYAKAYATRTILFLRENGTLKPVAIELSLPHPAGDLSGAVSQVILPAKEGVESTIWLLAKAYVVVNDSCYHQLMSHWLNTHAVIEPFIIATNRHLSALHPIYKLLTPHYRDTMNINALARQSLINADGIIEKSFLPSKHSVEMSSAVYKNWVFTDQALPADLIKRGVAIKDPSAPHGLRLLIEDYPYAVDGLEIWAAIKTWVQEYVSLYYARDDDVKPDSELQQWWKEAVEKGHGDLKDKPWWPKLQTIEELVEICTIIIWTASALHAAVNFGQYPYGGFILNRPTSSRRLLPEKGTPEYEEMVKSHQKAYLRTITSKFQTLVDLSVIEILSRHASDEVYLGQRDNPHWTSDSKALQAFQKFGNKLKEIEEKLARKNNDQSLSNRLGPVQLPYTLLHPNSEEGLTCRGIPNSISI

SEQ ID NO: 239574 - protein, 141 aa, Glycine max
  Clone ID: PAT_MRT3847_58360C.1.pep
IRLQSQKSINTNDHLSKQKKKKHSKRNPACHAYIFTLPFTHKPEPQLSTMELIHILLDHKSTTKIMESLYPCTLTLHQNTTHQTHHSYNNNVIHPLHRTPCRNTRRQGLPVAVIVAVNRAIVRRRGIPFISLRQTLSRQRR

SEQ ID NO: 239575 - protein, 167 aa, Glycine max
  Clone ID: PAT_MRT3847_58361C.1.pep
MSSDKLKSKSKNKFAVDDSIPTFIRKTYEILEENKFPDIIDWNYEGLALIIKKPAEFCQKVLPLYFKHNNLTSFIRQLNMYNFHKRRTQDVDHIYCHELFQRGKKHLLKDIRRKNNEHSLTIKSMDMLENINSNDNTGLLQENQLLKILNKEAAVKVSTYEKKIKDL

SEQ ID NO: 239576 - protein, 59 aa, Glycine max
  Clone ID: PAT_MRT3847_58362C.1.pep
FRVGQSRMLNPQSVGLCDLDSQEDTNTVGRLAALYTHMGTMGIAKPSKHSCMLCFCGST

SEQ ID NO: 239577 - protein, 101 aa, Glycine max
  Clone ID: PAT_MRT3847_58363C.1.pep
PSSVIDSKIFIKKMQLQDGSVGKVINNLSQVLARVVGDQSIFPHLHKKDHSAHVIEKFSHYVGRQMGFLESEVPAELCRLADEYLIKPKECVESILEYLAH

SEQ ID NO: 239578 - protein, 360 aa, Glycine max
  unsure (1)..(360): unsure at all Xaa locations
  Clone ID: PAT_MRT3847_58364C.1.pep
MAAVGGSSAAATTSSSLFSSARFRHSLRPPPSQLFFPRARFSVNATCPFFSDNNNSLPQNVVASKPSPLELLKASSADRYTKEKSCIICIGLNIHTAPVEMREKLAIPESHWAQAIKDLCALNHIEEAAVLSTCNRMEIYVVALSQHRGVKEVTDWMSKVSGISIPELCEHQVLLYNADVTQHLFEVAAGLDSLVLGEGQILAQVKQVVKAGQGVPGFDKKISGLFKQAISVGKRVRTETNISSGSVSVSSAAVELALMKLPDSSFADSGVLVVGAGKMGKLVIKHLAANXCRKMVVVNRTEEKVNAIRKELKDVEILFRPFSDMLACAAEADVIFTSTASESPCFLNRMCRCFLLLVMG

SEQ ID NO: 239579 - protein, 42 aa, Glycine max
  Clone ID: PAT_MRT3847_58365C.1.pep
TTKDTHLNRCPILIDPEEQNVCFIKLSWLANLPLYTGAKLPS

SEQ ID NO: 239580 - protein, 62 aa, Glycine max
  Clone ID: PAT_MRT3847_58366C.1.pep
TSMIYYERGDLLTLNHLQVPIPTPSTNDVVINVPPTTHKPITFICTQTHEVPTFLSHVPTYT

SEQ ID NO: 239581 - protein, 169 aa, Glycine max
  Clone ID: PAT_MRT3847_58367C.1.pep
MAALGRSSAAATTSLSSSSARFRRSLHLPPSQLSFPRARFSVNATCPFFSDNNGNKISLPQDVVASKPSPLELLKTSAADRYTKEKSSIICIGLNIHTAPVEMREKLSIPESHWAQVIKDLCALNHIEEAAVLSTCNRMEIYVVALSQHRGVKEVTDWMSKVSGISIPE

SEQ ID NO: 239582 - protein, 160 aa, Glycine max
  unsure (1)..(160): unsure at all Xaa locations
  Clone ID: PAT_MRT3847_58368C.1.pep
QVKIKVENQGASNIPRYLNLEPSLAMDWLEIPWDDLRIKERVGAGSFGTVYRAEWHGSDVAIKVLTVQDFQDDQLKEFLREVAIMKXVRHPNVVLFMGAVTKRPHLSIVTEYLPRGSLFRLIHKPASGYSDQYHCLKPAIVHWDLKXPNLLVDINCTVKV

SEQ ID NO: 239583 - protein, 81 aa, Glycine max
  Clone ID: PAT_MRT3847_58369C.1.pep
SNSYTRAVHQLSHRARGTAWLHPYTGLKSMAGLPTRKTNTDITSIASNGGRVQCMQVRPPAGSMKFETLSYLPDLDDAQLA

SEQ ID NO: 239584 - protein, 242 aa, Glycine max
  Clone ID: PAT_MRT3847_5836C.1.pep
GQALLPLLGGLLVARRRQKGLDFWLYYATYFCGGTLGLVYSNNLGQIAQSVGQSSNTSTLVMLYASFSFFGRLLSVGPDYIRNKIYFARTGWLSIALIPTPVAFFLLAASDSLLALQTGTALIGLSSGFIFAAAVSVTSELFGPNSVGVNHNILITNIPIGSLLYGFLAALVYDANAPSMPGNLITSDSVVCMGRQCYFWTFVWWGCISVLGLASSMLLFLRTKHAYDHFEKNRISTQSIVS

SEQ ID NO: 239585 - protein, 120 aa, Glycine max
  unsure (1)..(120): unsure at all Xaa locations
  Clone ID: PAT_MRT3847_58370C.1.pep
MSMSDSDSSSYAGADYKSFKQISRERLLHEMLRSAKTGDSKSTXEVGEDLYKQRQPLPTWDAIYFIQPTRENVIMFLSDMSGRTPLYRKFVVVIIISLLPVIHHGFSNLVFTSVFHVMFL

SEQ ID NO: 239586 - protein, 148 aa, Glycine max
  unsure (1)..(148): unsure at all Xaa locations
  Clone ID: PAT_MRT3847_58371C.1.pep
HNLDMGGGSWDRDTVVRALRAXAYNNPERAVEYLYTGILDQAETTIVTRTPVSAQPTNPTDDAAQTAQPAELTSDGPNANPLDLCPQGLPNVGYGAAGAGSSDCLRNSQQLQASRAMVHANPHILHSMLQELGKQNPHLMRLIPDHQA

SEQ ID NO: 239587 - protein, 95 aa, Glycine max
  unsure (1)..(95): unsure at all Xaa locations
  Clone ID: PAT_MRT3847_58372C.1.pep
PPPPLLPPPPPPPPHMPPLLSPPPHPPPPPSSPTPHHPPPTPPXPPHPHPPRAHPAPPPSPRPLAHPPPHDTRESPPFPCPLQHRPRRRQPPILH

SEQ ID NO: 239588 - protein, 54 aa, Glycine max
  unsure (1)..(54): unsure at all Xaa locations
  Clone ID: PAT_MRT3847_58373C.1.pep
MSCCGGNSGCGIACXCGNGCGGCTMYPDLSYFESTTTETLAIGAAPVLAQFESA

SEQ ID NO: 239589 - protein, 109 aa, Glycine max
  Clone ID: PAT_MRT3847_58374C.1.pep
INLFPTPSLCQGVGPLHPFFGEKPQLFQWFVCSKGGLERKIHPGFCTPFKWMYKNFPNGLKKNLPLPFVQPPSFSVFPGSPQFIPPIFSEGIQKFCCRHNFMLKGFFPA

SEQ ID NO: 239590 - protein, 57 aa, Glycine max
  Clone ID: PAT_MRT3847_58375C.1.pep
GIHELISNLSKDRGQFLCHFPPLSHTAAIDISNEMPLMCPLQLMQLKISNIKAQNST

SEQ ID NO: 239591 - protein, 76 aa, Glycine max
  Clone ID: PAT_MRT3847_58376C.1.pep
MMGASMVPARSLQMLSRLCKSFKYLNTTISFTIALGKSTNYELDLFDIIHHSFPTYPFFFLATLLIYYSSLRPIST

SEQ ID NO: 239592 - protein, 42 aa, Glycine max
  Clone ID: PAT_MRT3847_58377C.1.pep
TSSSLLVFCSISLNYHIPIKSKICSFHSGQLLYVFKHLKAHK

SEQ ID NO: 239593 - protein, 92 aa, Glycine max
  unsure (1)..(92): unsure at all Xaa locations
  Clone ID: PAT_MRT3847_58378C.1.pep
GTPXFLXXSXXXQXXTLVXSMXLAXPPKLHTCEKCSTSIANQAXRIQEVRYRHPGXYTCXDCGLNLKMRGHFWVGDELYSEXXXRHRXSXTY

SEQ ID NO: 239594 - protein, 173 aa, Glycine max
  Clone ID: PAT_MRT3847_58379C.1.pep
MSIRGNLIQRISHLYPLPVAVLCSGLPRHSRFFPCSYFSSCGLQWVTMEKANTSLVRTKSDQLLESMVAGLKSPPSSDHSANGVVDSRKSSRWLTGASPGRGGKNTHIRKSRSAQISQMKLELDDVSSGAALSRASSASLGLSFSFTGFTMPPEEIADSKPFSDDDIRKYMTI

SEQ ID NO: 239595 - protein, 138 aa, Glycine max
  unsure (1)..(138): unsure at all Xaa locations
  Clone ID: PAT_MRT3847_5837C.1.pep
NPPPVCAGRACTACYQRLXPCYIIVAAILTLPSWLPIPSGLHAACTPLGLQCCASTATGAKYPRTWLLLPHTPAPGLYTKWFYGHVNAMPMHVRTHMGLVMVGLGPTIGRRYRYCWAGDMDLGTSSIEIARRCSVLSH

SEQ ID NO: 239596 - protein, 51 aa, Glycine max
  Clone ID: PAT_MRT3847_58380C.1.pep
GPSAIRRQKGSFARNRHKGTASRIRHKGPAAKIPHKGGAPIIIDYFMIQVL

SEQ ID NO: 239597 - protein, 426 aa, Glycine max
  unsure (1)..(426): unsure at all Xaa locations
  Clone ID: PAT_MRT3847_58381C.1.pep
MKHPTWPRTSSSPFSSLPFSNRSEFFTTRLCARPPLPSPPGAGDFSALPYDVLAKIAASFDDPNLRAASLVCRAWCEALRPLREAMVLLRWGKRFKHGRRGVRPNVDRALDSFTKAAVRGSALAMVDAGLIYWERGEKPKAMELYLKAAELGNPSAQCNLGLSYLQAEPPNTEKAVKWLRKASVCGNVRAQYQLALCLHRSGGSVRSNLKEAALWXRKAAEGGYVRAMYNISLCFSFGEGLTRNHQLARKWMKRAADRGHSKAQFEHGLALFSEGDMMKAVVYLELATRAGEKGAAHVKNAVLHRLSSASRDPRHASSYQLACIAIKLSQSLCWFVMKKLHDLGRWHQKSEVNLRIPKHRNLGSPRSSLQGRPWPAFPGHGGLPRILRTLVRRRLYMLVELVSLAVRPIVQVHLPLLLPCPILIYN

SEQ ID NO: 239598 - protein, 86 aa, Glycine max
  Clone ID: PAT_MRT3847_58382C.1.pep
TSFETFKKTKRAETKQKKKKNNPSKRTTLFYLKTPKKGKKKKIGNPQLWGDTLWTAEAWKNKKKNFAAPLLSRGGGQHNEKRAPGP

SEQ ID NO: 239599 - protein, 67 aa, Glycine max
  Clone ID: PAT_MRT3847_58383C.1.pep
HRFPITVEANWCPIIEHDLEHIVDCPQLSDSNLNVVWSCHIGEHPYILIQTHLTLFYLYKKKCLVAL

SEQ ID NO: 239600 - protein, 110 aa, Glycine max
  Clone ID: PAT_MRT3847_58384C.1.pep
DLEYHRPMDGWTIHFVSANRYMQHRLALTNNYVGNHQKHNFCFISFSKSTLESNAYTCRHQLACLCKHIYITSLVENLKFLFGFFSDAPLPLELTEAEVTLHLPHPPTDF

SEQ ID NO: 239601 - protein, 64 aa, Glycine max
  Clone ID: PAT_MRT3847_58385C.1.pep
MARLHWLEAVLPLGIIGGMLCIMGNAQYFIHKAAHGRPKHIGNDMWDVAMERRDKKLVEQSSGN

SEQ ID NO: 239602 - protein, 70 aa, Glycine max
  Clone ID: PAT_MRT3847_58386C.1.pep
KDTKLCICGRKEVGYYNPFHWKRTCMHLHQNMVTRECEICMGSYMLSIMFPLKLSWGIHLYFCWNTVGLR

SEQ ID NO: 239603 - protein, 45 aa, Glycine max
  Clone ID: PAT_MRT3847_58387C.1.pep
HLQQFHMINIIFIFISLYIILSLTSMTLFYFFHFFLHNLKRPLFK

SEQ ID NO: 239604 - protein, 149 aa, Glycine max
  Clone ID: PAT_MRT3847_58388C.1.pep
MDACHNRANNFVSRSMTMGYGTSYHRTSLRNNNNNNNNNVSVSSPRSARFYDARFEDQHHPHFLSACFLCKKSLGDNRDIFMYRGDTPFCSEECRQEQIEIDEAKEKNRNLSSSMKALRNKEQRNNNRSTSPNKAQQDYSFRTGAVAAA

SEQ ID NO: 239605 - protein, 70 aa, Glycine max
  Clone ID: PAT_MRT3847_58389C.1.pep
ELQRISHFEIIKNLPVLFKINIWGFSLLLSPPPTRIPAFHFITNSSCLNFNDDSCVASHAPFSKQHLPHT

SEQ ID NO: 239606 - protein, 160 aa, Glycine max
  unsure (1)..(160): unsure at all Xaa locations
  Clone ID: PAT_MRT3847_5838C.1.pep
ASSMISSPAVTTVNRAGAGMVAPFSGLKSIAGFPTKKTNNDITSIATIRGKVQFLHVWPPLGKKKIDTLSYLPYLDDAQLPNELEYLLTNVWIPCLEFXMEHIFMYREHYTSPGYYNSRYCTMLKLPMVGCTDASRVIKELLQAKTAYPNGXFIRIIGFD

SEQ ID NO: 239607 - protein, 111 aa, Glycine max
  Clone ID: PAT_MRT3847_58390C.1.pep
MVKAKQSQVWLRKSWWRVSWPGTLTLLLLLTCSFLILIPLALRILSTPHVNSSSALSKPNDLNSVPRNTHVSEGENNRVKRWVEVMSWEPRAFLYHNFLSMVNHFMLSVMQ

SEQ ID NO: 239608 - protein, 33 aa, Glycine max
  Clone ID: PAT_MRT3847_58391C.1.pep
FYVFPAPLRVFVLSLRIKCFGEYPIELEVNFEY

SEQ ID NO: 239609 - protein, 238 aa, Glycine max
  unsure (1)..(238): unsure at all Xaa locations
  Clone ID: PAT_MRT3847_58392C.1.pep
MVKAKQSQVWLRKSWWRVSWPGTLTLLLLLTCSFLILIPLALRILSTPHVNSSSALSKPNDLNSVPRNTHVSEGENNRVKRWVEVMSWEPRAFLYHNFLTKEECEYLINTATPNMLKSLVIDNESGEGIETSYRTSTEYVVERGKDKIVRNIEKRIADVTFIPIEHGEPLHVIRYAVGQYYEPHVDYFEEXFSLVNGGQRIATMLMYLSXVERRGETVFPIANANFSSVPWWNELSEW

SEQ ID NO: 239610 - protein, 131 aa, Glycine max
  Clone ID: PAT_MRT3847_58393C.1.pep
FFFFFFFFFFFFFFFFFFFFFFFFFFFLKKKPGFALINRGGPLFPYFGFWACRALIRGVYPFLAFGGFTIKRGGKEIKLTPLGGGFRGGVFCPLDGLFFYNWGRGLWPFWGALRGTPLFLGGVNRAFCPLV

SEQ ID NO: 239611 - protein, 107 aa, Glycine max
  unsure (1)..(107): unsure at all Xaa locations
  Clone ID: PAT_MRT3847_58394C.1.pep
IFFCGAFHFSPPGGFMFSPPSLIGFPIIFSCSTLHGFAPFIFCKPPLFLVFLFSSAGPPIFCGRHYHFGFLSHFPPLYPFFFFXVCFFFVSKKFFLHRNHICSPGVV

SEQ ID NO: 239612 - protein, 48 aa, Glycine max
  Clone ID: PAT_MRT3847_58395C.1.pep
QVRTLGRSEFRITKVSRAIITEHYTICPSGRTHAIVKCCTQAESMMAI

SEQ ID NO: 239613 - protein, 63 aa, Glycine max
  Clone ID: PAT_MRT3847_58396C.1.pep
WRNGEMNNMIDLYYRKNTIVICSSEGKREPRFLPLNFDTISCQLSGVKHIVVIDFLIPPVYRI

SEQ ID NO: 239614 - protein, 54 aa, Glycine max
  unsure (1)..(54): unsure at all Xaa locations
  Clone ID: PAT_MRT3847_58397C.1.pep
KAQMVVHVGSLWMQEWLXAWESTGYCEGRLVQVAQFGGQHLVSTLVCMADMVLA

SEQ ID NO: 239615 - protein, 53 aa, Glycine max
  Clone ID: PAT_MRT3847_58398C.1.pep
LSTHNMVAPMQEFIVLPVPFHGPWVNSDVTISPVPFVHLSTSPLLTTFGDPQD

SEQ ID NO: 239616 - protein, 226 aa, Glycine max
  Clone ID: PAT_MRT3847_58399C.1.pep
MEGSHMGLLLFFSSMLFAAFPSASSRNLPVIPFDEGYAPLFGDSNLVIHRDGKSVHLSLDERTGSGFVSHDLYLHGYFSASIKLPSDYTAGVVVAFYMSNGDMFQNNHDEIDFEFLGNIRGKDWRIQTNVYGNGSTNIGREERYGLWFDPADDFHQYTIVWTDSQIIFYVDNVPIREVTRTESMGGDFPSKPMTLYATIWDASDWATNGGKYRVNYKYAPYVAEFS

SEQ ID NO: 239617 - protein, 56 aa, Glycine max
  Clone ID: PAT_MRT3847_5839C.1.pep
YGCEKTTEGFPRVEFLHCMSCRKEHKLRLKSKPNSKNYHDALTNKYWTCYPWPYQK

SEQ ID NO: 239618 - protein, 220 aa, Glycine max
  Clone ID: PAT_MRT3847_583C.1.pep
MEAAQRRLGGGMVPLSPSQTPRSSDKPVRDLRSADSNSNSHSKYDKDKGVNVQVLVRCRPLSEDETRLHTPVVISCNEGRREVLAVQNIANKQIDRTFAFDKVFGPNSQQKELYDQAVSPIVYEVLEGYNCTIFAYGQTRTGKTYTMEGGARKKNGEFPSDAGVIPRAVKQIFDILEAQNAEYNMKVTFLELYNEEITDLLAPEETSKFIDDKSRKFAGR

SEQ ID NO: 239619 - protein, 119 aa, Glycine max
  Clone ID: PAT_MRT3847_58400C.1.pep
MEGSHMGLLLFFCSSMLFAAFAAASSRNLPIIPFDEGYAPLFGDSNLVIHRDGKSVHLSLDERTGSGFVSHDLYLHGYFSASIKGASDYTARVVGAFYMSNGDMFQNNHDEIDFEFFGD

SEQ ID NO: 239620 - protein, 59 aa, Glycine max
  Clone ID: PAT_MRT3847_58401C.1.pep
KWIPLKGPAPIKFSGRRVPNLGAPLFFFFFFFFFFEVSMISTSQEHHKEIMLNAGLSCT

SEQ ID NO: 239621 - protein, 52 aa, Glycine max
  Clone ID: PAT_MRT3847_58402C.1.pep
LYILVYNYNFSNKNLNLNGAILEKTNYLPVISNLLVFTCMDFLLKKDCEDGH

SEQ ID NO: 239622 - protein, 96 aa, Glycine max
  Clone ID: PAT_MRT3847_58403C.1.pep
KKMPPLFVFVLVKGCLFTKQGGRISFFLKGETGCFFSSPPPHMSKMSKMCSRAPHSGSFFFFFVRGGAGFFPKKKDFGEIFSKKMSKFQGVYFCLV

SEQ ID NO: 239623 - protein, 39 aa, Glycine max
  Clone ID: PAT_MRT3847_58404C.1.pep
AILPKIQLVKARASHNYNSKHKIMSSTYTKTQIFRKQYI

SEQ ID NO: 239624 - protein, 38 aa, Glycine max
  Clone ID: PAT_MRT3847_58405C.1.pep
HSTKNTRTFIHTKYLFEPCISRRRNLNSTKSLQKKTTK

SEQ ID NO: 239625 - protein, 87 aa, Glycine max
  Clone ID: PAT_MRT3847_58406C.1.pep
VGCRGLCAPLGSFRRLCSLWLALGCALQLGLACPSAQFLLLVLVLRCVLLRFVVCGLAAPGSLVLRRLVGRLLGQRPLRLSVWPGVW

SEQ ID NO: 239626 - protein, 44 aa, Glycine max
  Clone ID: PAT_MRT3847_58407C.1.pep
KSHSFLRMCAWCRIKASSLREKCKNPLQFLTFLRIWMGLVKCLG

SEQ ID NO: 239627 - protein, 61 aa, Glycine max
  Clone ID: PAT_MRT3847_58408C.1.pep
LNMFKTFKALHLSLSSDKHTNWFIPLIGYLDIRLISIRHNDIISIPIQSYNLNKIKKGNLP

SEQ ID NO: 239628 - protein, 40 aa, Glycine max
  Clone ID: PAT_MRT3847_58409C.1.pep
DLDAQVPLMDQFHSKVTKESCDPKNTEVQFRDTVDHCRSI

SEQ ID NO: 239629 - protein, 72 aa, Glycine max
  Clone ID: PAT_MRT3847_5840C.1.pep
EYHRFIQVRQMPFLLRFVTLEFVPELQFCNLLYCFPGAYLEKISCLDTLEVCIPGPSSTILMNIYLLLVSRI

SEQ ID NO: 239630 - protein, 88 aa, Glycine max
  unsure (1)..(88): unsure at all Xaa locations
  Clone ID: PAT_MRT3847_58410C.1.pep
FLAPVFPPFVXVLAFFAXLPVLXXPXFFWQSPFFVLLXPLFLXLLSFVRRFCWLLFVRRXFAGGGRGGGRCVRFLCFPGFGLWKXRVQ

SEQ ID NO: 239631 - protein, 98 aa, Glycine max
  Clone ID: PAT_MRT3847_58411C.1.pep
RKRKAGEQDKRATQGASRKQLQGDIEANHNKNSQAEGNNPHKVQTTRAEGPRRIGPRQKRHPPSGHEETQKPGKEKAHPTITPPQNQAKQTRPNKAAR

SEQ ID NO: 239632 - protein, 86 aa, Glycine max
  Clone ID: PAT_MRT3847_58412C.1.pep
EFPWRPIGRSSDASTLRPTGGDLNEREVILSGTVCKITRSSYLECSLNLGSLKSQPYTTLDIFVCLPLQAMDSFKLFFDSTNRWTY

SEQ ID NO: 239633 - protein, 35 aa, Glycine max
  Clone ID: PAT_MRT3847_58413C.1.pep
KEERNVLTARRHRPFLQVRILYSKIWILQQHGSWP

SEQ ID NO: 239634 - protein, 63 aa, Glycine max
  Clone ID: PAT_MRT3847_58414C.1.pep
LTRPDYFILHFRSDWETRLESFGLRPFSPSDSLKHSASYTSKFLGTVSLKTRINLGYIIEAVA

SEQ ID NO: 239635 - protein, 63 aa, Glycine max
  Clone ID: PAT_MRT3847_58415C.1.pep
NFLMSALTFTTLQEPLRFILAGGTGTLFIVSLIVLRIYLVRSKFQSSFCSSCHGHFITGDRGG

SEQ ID NO: 239636 - protein, 190 aa, Glycine max
  Clone ID: PAT_MRT3847_58416C.1.pep
MAEKPQPVRVLYCGVCSLPPEYCEFGSDFEKCKPWLIQNVPDLYPDLLKEEKEADKVADKLQSTGISGAGDGAASSAPKQEEVKRLPGGKIKKKDKQEVVIEKVVRNKRKCITTVKGLELFGVKLSDASKKLGKKFATGASVVKGPTEKEQIDVQGDIAYDVVEFITDTWPDVPETAIFFIEDGRKVPAA

SEQ ID NO: 239637 - protein, 73 aa, Glycine max
  Clone ID: PAT_MRT3847_58417C.1.pep
NFPRFNVHKARYLDFIKPPHKKNFFLGLLFFFPQKLFSLLSPPQNKKRWPKNGAGKKGVGKKKNFYPAPLTIF

SEQ ID NO: 239638 - protein, 192 aa, Glycine max
  Clone ID: PAT_MRT3847_58418C.1.pep
MAEKPQPVRVLYCGVCSLPPEYCEFGSDFEKCKPWLIQNVPDLYPDLLKEANEKEADKVADKLQSTGISGAGDGAASSAPKQEEVKRLPGGKIKKKDKQEVVIEKVVRNKRKCITTVKGLELFGVKLSDASKKLGKKFATGASVVKGPSEKEQIDVQGDIAYDIVEFITDTWPDVPEAAIFFIKNGRKVPAA

SEQ ID NO: 239639 - protein, 39 aa, Glycine max
  Clone ID: PAT_MRT3847_58419C.1.pep
MEHLLCTDDKLSELFGFPDEDHKLDDILSDTRDDVGLHL

SEQ ID NO: 239640 - protein, 63 aa, Glycine max
  Clone ID: PAT_MRT3847_5841C.1.pep
IYSLYLIHLRILFGGIKICDILLTTVTHELYIFAIAQRDESTCLHILNIKGQYARRVTNIIRF

SEQ ID NO: 239641 - protein, 87 aa, Glycine max
  Clone ID: PAT_MRT3847_58420C.1.pep
ALACRVGFSVFLWDPRQWSVDSRGLGLCWLLPLPAAPGAGLSRFAFPVIGPLGPLVLGSMVFVNVTVPAVVLGPVVHIKRSKSHLEP

SEQ ID NO: 239642 - protein, 43 aa, Glycine max
  Clone ID: PAT_MRT3847_58421C.1.pep
RCKVLTNGYGSCKGFRSDSRDSVHGPRVKEFGQSTNTFRPAEP

SEQ ID NO: 239643 - protein, 98 aa, Glycine max
  Clone ID: PAT_MRT3847_58422C.1.pep
GFYFFLFFYILFYPVSFESVFIGSRQNGTSLARHESLDNGSTYELPPRVLERATPREPEGEKMLLRHDIRHSLKEEGGNLVRRETEPNSGLTKPPRGL

SEQ ID NO: 239644 - protein, 51 aa, Glycine max
  Clone ID: PAT_MRT3847_58423C.1.pep
FLLLAIPNKSPVFDILLGISQDFEIAGNTLKPAFFVPQVTPIFFEKAESSA

SEQ ID NO: 239645 - protein, 372 aa, Glycine max
  unsure (1)..(372): unsure at all Xaa locations
  Clone ID: PAT_MRT3847_58424C.1.pep
MGNRRFTQVATSDDEDEAPPAPAPPPKQQSSVSASEENCSKQQQQQQQQQQRKRKRMKLQEEEEEEKEEEKKKKRKIKDKQEERSNEEEEPPQEDAKPIGEPVRLSGKGRGRKKHYESFEYDGNQYTLEDPILLTPEDKDQKPYVAIIKRMAVEQLELHXRYFGSGSPPFFLCRVWDITQSLNGSMMVTGQWFYRPEEAERKGGGSWQSCDTRELFYSFHRDDVPAESVMHKCVVHFVPIHKQLPNRKQHPGFIVQKVYDTVERKLWKLTDKDYEDNKQQEIDELVQKTLQRLGKLLDIEPEEPVADQEDLMKNKRILRKKSISPLDVSKEEETTRQGDQPLKPEXPWSCVNNASEHYRILVDFNALTGDTH

SEQ ID NO: 239646 - protein, 120 aa, Glycine max
  Clone ID: PAT_MRT3847_58425C.1.pep
MVLLQLDPFLNELTSMFERSTKLGSVWVTLKRSSLKSKVQRNKLAAAGEAIEFRCLIRATDGKKTISTSVGPKDHQRFQASYATILKAHMTALKKRERKDKKKPAEADKREGSSKRLKKS

SEQ ID NO: 239647 - protein, 221 aa, Glycine max
  unsure (1)..(221): unsure at all Xaa locations
  Clone ID: PAT_MRT3847_58426C.1.pep
MGNRRFTQVATSEDEDEAPPPPPPPKQQSSVSAPEENRSKQQQRKRKRMKLQEEEEEEEEKEEEKKKKKRKIKDKQEERSNEEEEPPQEDAKPIGEPVRLSGKGRGRKKHYESFEYDGNQYMLEDPILLTPEDKDQKPYVAIIKDITQSLNGSMMXLDQWFYRPEEAERKGGGSWQSCDTRELFYSFHRDDVPAESVCISGVGHFVPIHKQLPNRKQIPGV

SEQ ID NO: 239648 - protein, 522 aa, Glycine max
  unsure (1)..(522): unsure at all Xaa locations
  Clone ID: PAT_MRT3847_58427C.1.pep
MVNRRRLTRVATSDDEDEAPPRPQRTRKRMRLIEEDNDDDENEEEKQEEVPELPQPAEDAKPLGEPVRVSGKGRGRKRHYDSFEFDGIQYILEDPVLLVPEEKGQKPYVAIIKDITQSINGNVKVTGQWFYRPEEAEKKGGGNWQSCDTRELFYSFHRDDVPAEAVMHKCVVHFVPXHKQLPKRKDHPGFIVQKVYDTVERKLWRLTDKDYEDIKQQEIDELVQKTLKRMGELLDIEPEEPVADQEDLMKNKRILRKKSISPLDVSKEEETTRKGDQPLKPETPWSCINNASEHYRILVDFNALTGDTHRDKWLERLLQRIQFMFNSDDSKKRDKGLGNANSDEINNESKHRSSESATDCQDKVQKSSKSFNWPDVAVSAMVALEKASHDALSSDSMKYNQKLRQLAFNFQKNAVLARRLLSGELEPSKILNMTPNELKEGLVAEEKTKEPDETQHLQMTDARCSKCMDCKVGLREIIQAGNNERYQLECVSCGHSWYASRDEVSMPTIDASDPKGNIGTAP

SEQ ID NO: 239649 - protein, 95 aa, Glycine max
  unsure (1)..(95): unsure at all Xaa locations
  Clone ID: PAT_MRT3847_58428C.1.pep
ASFGSSVFWFFSLXLXXVXFLXXXXSXAVFSFXDGLLPNGXFEXGXXXXXLXGSXVXGHDAXPXWTISGFVXXXXSRQXHGDMLXVVPXGXXAVX

SEQ ID NO: 239650 - protein, 56 aa, Glycine max
  unsure (1)..(56): unsure at all Xaa locations
  Clone ID: PAT_MRT3847_58429C.1.pep
NKXNXISIPPPPQSSQKASHKSKPIFTKAYHSLQQKNITSFTFSLTEGNLTSKLAV

SEQ ID NO: 239651 - protein, 88 aa, Glycine max
  Clone ID: PAT_MRT3847_5842C.1.pep
NSSDLTLEEALDAIFNTKISFSSTDMLQRCNGTSNGNEMVFTDICLGIANDRMLQINAICGLSWMGKGLLLRGHEKIKDITMIFMECL

SEQ ID NO: 239652 - protein, 220 aa, Glycine max
  unsure (1)..(220): unsure at all Xaa locations
  Clone ID: PAT_MRT3847_58430C.1.pep
MAPSTTVPNGTLPSGSVTGRLASVYSEVQKTRVDHALPLPSVLKHPFTILHGPPSSAAGNPDEIAKLFPHLFGQPSAALARSDAAQTQKKLKIGVVLSGGQAPGGHNVISGIFDYLQERAPGSTLYGFKGGPAGIMKCKYVELTSEYIYPYRNQGCFDMICSGRDKIETPEQFKQAEETAKKLDLDGARXVLVXDDSXTNACXLAENFRSXNLXXVYLDA

SEQ ID NO: 239653 - protein, 268 aa, Glycine max
  Clone ID: PAT_MRT3847_58431C.1.pep
NFGVRAGEDFKPWSMKGEEDDKKDVFDFKEDVGHEGNFTALDINPKVDVEQLEKEEHALTAIVKGPKRAFGDLIAASGITDEMLDSLIALKDFDGVHGLPPLSVIEDMRYEKNTRKSTRGEMERLKQEEAAKARVKQVDDKGRAYGTGRRKCSVPRVWVQPGNGQFTVNDKEFDVYFPMLEHRATLLRPFSETKTLGLWDVDCTVKGGGVSGQVGAIRLGISKALQNWEPDLRPALRNAGFLTRDSRVVERKKPGKAKARKSFQWVKR

SEQ ID NO: 239654 - protein, 91 aa, Glycine max
  Clone ID: PAT_MRT3847_58432C.1.pep
KSMTKLVNISIIECRITMTLSIQENISQLHPTMTIYNFSQLLPSVVETKTFFFTITLVLLPFEWDDMRYSNSLQDFLIIKEGCDFLQSSLF

SEQ ID NO: 239655 - protein, 88 aa, Glycine max
  Clone ID: PAT_MRT3847_58433C.1.pep
PVTHSRLDTRVSRVAKKHQRGFIHQLSKVAYARGDVSLSRIRTTSSNTHHQLIHSGVHGHEHGHRNGPWRFGGINRSRFKDWNFGFAT

SEQ ID NO: 239656 - protein, 173 aa, Glycine max
  unsure (1)..(173): unsure at all Xaa locations
  Clone ID: PAT_MRT3847_58434C.1.pep
MLRVAEPHGQYTTIFLYSLCINPSTTRADGNIHTTIWKLKIPPRAXVFCWRLHKNRLPTKANLLRRNISMXEDICPLCGSVQEDVGHLFFNCTLTRGLWXXXMSWIRVVGPLPITPKCHFIQFCEGFGEPKNHKTRCGWWIALTSSIWQHRNQVIFQGKPFDPYKVIWTMQSF

SEQ ID NO: 239657 - protein, 63 aa, Glycine max
  unsure (1)..(63): unsure at all Xaa locations
  Clone ID: PAT_MRT3847_58435C.1.pep
DKSSVIPEISMNTSRQNLRKLARDWFMIRISTRIQSRSTPPQMHEGXRKGRRTGYSPVKGTME

SEQ ID NO: 239658 - protein, 34 aa, Glycine max
  Clone ID: PAT_MRT3847_58436C.1.pep
LVFKGYISAENLNPFPCDRMIMHYLPACMVYSLS

SEQ ID NO: 239659 - protein, 89 aa, Glycine max
  Clone ID: PAT_MRT3847_58437C.1.pep
IRRHCLSLFHSDSHDFNCIQSQHGGLDFGHHPVHPRFSCIRNDSFNHYPKVFNCLFDRIRRKEVCFLLIVALPQAGGELPYGWLRIIHI

SEQ ID NO: 239660 - protein, 120 aa, Glycine max
  unsure (1)..(120): unsure at all Xaa locations
  Clone ID: PAT_MRT3847_58438C.1.pep
KKNYNHILICSFFLFVKLDHHKTSCYETSRCKTSHCIICYLIIQFLFILVCLLQIIFFFYSFMQSIIHTMTPNNDIDRIWKQIIYETLDNNINEQIMSYSRTMXXQKENXSQHKRLVLNY

SEQ ID NO: 239661 - protein, 109 aa, Glycine max
  Clone ID: PAT_MRT3847_58439C.1.pep
THAPGSSLNGDEGTDYMERIPLATSEGSPHVLSRKNGEKGKRRFVPGDGEQKTMIPGTTVEEAYNKLIVELEKSDPTLAGIERPKDEKPPSRKISDKPKTRCSTILPME

SEQ ID NO: 239662 - protein, 56 aa, Glycine max
  Clone ID: PAT_MRT3847_5843C.1.pep
SPWIPALKATRYMVFDQSYRDDGIKRPRVSCFVIRASKMLKWDASVIPDRPEQGHQ

SEQ ID NO: 239663 - protein, 69 aa, Glycine max
  unsure (1)..(69): unsure at all Xaa locations
  Clone ID: PAT_MRT3847_58440C.1.pep
MDPAISHAKRIGGLDALSISLITGHGPGYSLACDESLRDGVRNTGRMNGIQVGVXEKPDTRAGAEGFST

SEQ ID NO: 239664 - protein, 392 aa, Glycine max
  Clone ID: PAT_MRT3847_58441C.1.pep
MADNATTQGSNTLFSPYKMAKFNLSHRVVLAPMTRCRALNWIPQAALAEYYAQRSTPGGFLISEGTLISPTAPGFPHVPGIYSDEQVEAWRNIVDAVHAKGSIIFCQLWHVGRASHPVYQPGGAPPISSTSKPISDKWKILMPDGSHGIYPEPRALTTSEISEIVHHYRQAAINAIRAGFDGIEIHGAHGYLIDQFLKDAINDRTDEYGGPLENRCRFLMEVVEAVVSAIGAERVAIRISPAIDFNDAFDSDPLGLGLAVIERLNNLQKQVGTKLAYLHVTQPRFTLLAQTESVSEKEEAHFMQKWREAYEGTFMCSGAFTRDSGMEAVAEGHADLVSYGRLFISNPDLVLRLKLNAPLTKYNRNTFYTQDPVIGYTDYPFFNGTTETKLSN

SEQ ID NO: 239665 - protein, 230 aa, Glycine max
  Clone ID: PAT_MRT3847_58442C.1.pep
PTRPYGCEKTTEGGIEIHGAHGYLIDQFLKDAINDRTDEYGGSLENRCRFLTQVVEAIVSAIGAERVGLRISPAIDFSDGFDSDPLGLGLAVIERLNNFQKELGRKLTYLHVTQPRYTAYGQTESGRPGSEKEEAHLMQNLRKAYEGTFMCSGGFTRKLGMEAVAEGHADLVSYGRLFISNPDLVLRLKLNAPLTKYNRKTFYTQDPVIGYTDYPFLSKESETKEPRARL

SEQ ID NO: 239666 - protein, 96 aa, Glycine max
  Clone ID: PAT_MRT3847_58443C.1.pep
MTIFLNLFFFPLFMTWILCRVVLAPMTRCRALNWIPQEALAEYYAQRSTPGGFLISEGTLISLTAPGFPHVPGIYSDEHVEAWRNIVDAVHAKGSI

SEQ ID NO: 239667 - protein, 39 aa, Glycine max
  Clone ID: PAT_MRT3847_58444C.1.pep
FTFYRRLSPSHQGSLCQCSESRLEREITRVLNRPRKNVE

SEQ ID NO: 239668 - protein, 198 aa, Glycine max
  Clone ID: PAT_MRT3847_58445C.1.pep
MQNSKVARVGASIVKQLCTRNCTSLCGVGYIRSARYHYKQPLFQHHSFTKLYKGAMIEKHNFLSTMTTNNTTKERSEQEQAISVTFIDKDGEEKHIKVPVGMSMLEAAHENDIELEGACEGSIACSTCHVIVMDVEQYNKLEDPTDEENDMLDLAFGLTETSRLGCQVIAKPELDGIRLAIPAATRNFAVDGYVPKPH

SEQ ID NO: 239669 - protein, 61 aa, Glycine max
  Clone ID: PAT_MRT3847_58446C.1.pep
GWDNHLTCKPRCHQQKSTTKLIIFKSTKLEGKLTSMDQYISTTKTGRKALSSTTATTCAQP

SEQ ID NO: 239670 - protein, 86 aa, Glycine max
  unsure (1)..(86): unsure at all Xaa locations
  Clone ID: PAT_MRT3847_58447C.1.pep
SVTFIDKDGEEKHIKVPVGMSMLEAAHENDIELEGKSFDFIILLFHLKIXACEGSLACSTCHVIVMDVEQYNKLEDPTDEGNDMLD

SEQ ID NO: 239671 - protein, 42 aa, Glycine max
  Clone ID: PAT_MRT3847_58448C.1.pep
CFEELVLKILDTPSLLAEGSKGNKKNIFKDKPSQTNATSSCC

SEQ ID NO: 239672 - protein, 121 aa, Glycine max
  unsure (1)..(121): unsure at all Xaa locations
  Clone ID: PAT_MRT3847_58449C.1.pep
APPPTQPKKGTHIPTGNNPQAHPNPHLKPAXQVPPIDTSPPPPRRTKXNEXPQHPPRSTDASKQQKPLKHKQHPAPQXEQAPSTSKAAPAVDPPRQPKXAPXPPPAPDXAPARKTRVGRPR

SEQ ID NO: 239673 - protein, 68 aa, Glycine max
  unsure (1)..(68): unsure at all Xaa locations
  Clone ID: PAT_MRT3847_5844C.1.pep
XHPLPYHKGAPPLTPTPRLSLPPRATKQTYKXAFCSPACXRPTPEEPTSRQNTPTSHTRCXXXSLSXA

SEQ ID NO: 239674 - protein, 41 aa, Glycine max
  Clone ID: PAT_MRT3847_58450C.1.pep
ESTLAFWIHLASNNAKLKAKQIFCVGPFKKQARGGSPGITG

SEQ ID NO: 239675 - protein, 204 aa, Glycine max
  unsure (1)..(204): unsure at all Xaa locations
  Clone ID: PAT_MRT3847_58451C.1.pep
MRAESQIPRSLIHRIYAPLANEFHFAAPISTSRTNERELVRGILRMLQGFSGPLFFWDKSANSFRAKSGVYVSHLSQKSLHSLLNQFIHAATCLQLVAITLDKVETAMPKSPPTLNAFACSASACLERLRNIALKEETSTSNADGVTTPTLLGLANSLSSLCSGAEFLFQVVHEAIPAVYXEFGVSVPAAELAVHVLDYLHKKL

SEQ ID NO: 239676 - protein, 135 aa, Glycine max
  unsure (1)..(135): unsure at all Xaa locations
  Clone ID: PAT_MRT3847_58452C.1.pep
FTCETTTIGHARTLAHCFTMTPMLVLMNLHILVKKHCHLAFQGVSFFHQGDHLFSSTFILTLPXELMGNLGLFHNRFDLLLLKSFPQQRDPRTGPACLDQDHLFERCLXXLIHQXXKYNXINLPXQXXMKFXXHN

SEQ ID NO: 239677 - protein, 84 aa, Glycine max
  unsure (1)..(84): unsure at all Xaa locations
  Clone ID: PAT_MRT3847_58453C.1.pep
ALMSLDSQVLIXGLQHSVAQNVKPXLQMDETLIKAYYLSNSEYVLWARAHPXTVKGIIVGLVTLASSITGWNRRYRLVMLDRIE

SEQ ID NO: 239678 - protein, 182 aa, Glycine max
  Clone ID: PAT_MRT3847_58454C.1.pep
MAHNSDSATSNLLLLCSENSSTCFDDDGLECDAADGSNSRISHHEGGGGSELLLACFVAQSEEAVRAMVEREKEHLPRDDYLMRLRSGGLDLDLLGVRKEALDWIWKAHSYLGFGPLSFCLAVNYLDRFLSVFELPRGVSWTVQLLAVACLSIAAKMEEIKGPQSVDLQVGELKFLFEARPI

SEQ ID NO: 239679 - protein, 60 aa, Glycine max
  Clone ID: PAT_MRT3847_58455C.1.pep
MIFPNAIRWGRDPSLLAAIALHMQDLTKSIFASLRNAAPVEIIYRGCFGLQESSLSHSCS

SEQ ID NO: 239680 - protein, 94 aa, Glycine max
  Clone ID: PAT_MRT3847_58456C.1.pep
PQKSLNHNYREGVIHGWFTISPFLLNDPNSFSTQSPFNSSLYNKISVCTLIPNQIILFTVLLLIVYLLFFLLQFDNSLTHLFHIFFSHRYFCLS

SEQ ID NO: 239681 - protein, 49 aa, Glycine max
  Clone ID: PAT_MRT3847_58457C.1.pep
SQQNTNFSCTGWILFSFSTLSNSILQQLMSLKFGYIPPSRSQPIKKSIS

SEQ ID NO: 239682 - protein, 110 aa, Glycine max
  Clone ID: PAT_MRT3847_58458C.1.pep
ERITGPGPLKFKHWGGVHGLKKPWKKKYGDFYFSQIIGDHKGGDFFISQWGGELQVGVFFLKGLYLFPPLPGNRWGWPPPAPPLGKNPEAFPPGFPTNGIGRVRSRPQQP

SEQ ID NO: 239683 - protein, 968 aa, Glycine max
  unsure (1)..(968): unsure at all Xaa locations
  Clone ID: PAT_MRT3847_58459C.1.pep
MANRNLEKMASIDAQLRQLAPAKVSEDDKLIEYDALLLDRFLDILQDLHGEDLKETVQEVYELSAEYEGKHDPKKLEELGNLITSLDAGDSILVAKSFSHMLNLANLAEEVQISRRRRNKLKKGDFADENNATTESDIEETLKKLVFDLKKSPQEVFDALKNQTVDLVLTAHPTQSIRRSLLQKHGRIRNCLSQLYAKDITPDDKQELDEALQREIQAAFRTDEIRRTPPTPQDEMRAGMSYFHETIWNGVPRFLRRVDTALNNIGIKERVPYNAPLIQFSSWMGGDRDGNPRVTPEVTRDVCLLARMMAANLYYSQIEDLMFELSMWRCNDELRVRAEELHRSSKKDEVAKHYIEFWKKVPPNEPYRVVLGEVRDRLYQTRERSRHLLSNGYSDIPEEDTFTNVEEFLESLELCYRSLCACGDSAIADGSLLDFMRQVSTFGLSLVRLDIRQESDRHTDVLDAITKHLEIGSYQEWSEEKRQEWLLSELSGKRPLFGPDLPQTEEIRDVLDTFHVIAELPPDNFGAYIISMATAPSDVLAVELLQRECHIKHPLRVVPLFEKLADLEAAPAALARLFSVDWYRNRINGKQEVMIGYSDSGKDAGRFSAAWQLYKAQEELINVAKKFGVKLTMFHGRGGTVGRGGGPTHLAILSQPPDTIHGSLRVTVQGEVIEQSFGEQHLCFRTLQRFTAATLEHGMHPPISPKPEWRALMDQMAVIATEEYRSIVFKEPRFVEYFRLATPELEYGRMNIGSRPAKRRPSGGIETLRAIPWIFAWTQTRFHLPVWLGFGAAFKKVIEENVKNLNMLQEMYNQWPFFRVTLDLVEMVFAKGDPKIAALNDRLLVSKDLWPFGDQLRNKYEETRKLLLQVAGHKEILEGDPYLKQRLRLRHAPITTLNIVQAYTLKRIRDPNYNVKVRPRISKESAEASKSADELVKLNPTSEYAPGLEDTLILTMKGIAAXGMQNTG

SEQ ID NO: 239684 - protein, 34 aa, Glycine max
  Clone ID: PAT_MRT3847_5845C.1.pep
ILIKFPFLLLLTIYVLVMQCYRFDAMETLHNRKM

SEQ ID NO: 239685 - protein, 120 aa, Glycine max
  unsure (1)..(120): unsure at all Xaa locations
  Clone ID: PAT_MRT3847_58460C.1.pep
MNLLLGKLYRISRHSRAAVAIYKEXLRHCPFVLEAITALAELGSTAKDIITLIPQTPNRSGRASFDHTDSSRWLQRYVEAQCCMASNDYKGGLELFADLLQRFPNNIHLLLEMAKVEAII

SEQ ID NO: 239686 - protein, 119 aa, Glycine max
  Clone ID: PAT_MRT3847_58461C.1.pep
SWPVESLPDVMPRSAKVKSVATLETVREIGVYIQRFHNLDLFKQGWYRIKITVRWEDSENMSFGIPASVVQYEAPDMDPSSIYGVWRIDDTDNSFSTQSFRIKYARQDVHLYMMNVFNL

SEQ ID NO: 239687 - protein, 75 aa, Glycine max
  Clone ID: PAT_MRT3847_58462C.1.pep
ATPSNRFPPWNAKGGNIQLAKHLVCQVQFLWTISLVTDFVHRVLVGNHLQGLYIVPFVLKPWRVDAHKVIFKVKL

SEQ ID NO: 239688 - protein, 108 aa, Glycine max
  unsure (1)..(108): unsure at all Xaa locations
  Clone ID: PAT_MRT3847_58463C.1.pep
MDTHIEKLTLCDVHTHXGAMLDLRIYQSKFALSKNTTXGTILLNDLLTTFSTEGVLKAWVDLQSTLRIPXLIKMAAPVGIAENTGIXWACAMNRYIRGRAPSDIYTIC

SEQ ID NO: 239689 - protein, 49 aa, Glycine max
  Clone ID: PAT_MRT3847_58464C.1.pep
LIILYICYLIFFLNIIHYHTNAPGKCKNVNHLNTKHKSIEVRESKAKWK

SEQ ID NO: 239690 - protein, 169 aa, Glycine max
  Clone ID: PAT_MRT3847_58465C.1.pep
KGKKIFLLRGGPHPICSLHKFWGEKGGKKVFSTLPQGEGQGGKTQRGFFRKGAPPPKQPRKKLVFLFGAPSGKFKKNFFFLGGGSGRAPKIWGGRFFKKGAPPPGFPPPFKSYPLKNQSNVLGEGERKKIVCSPKIIFLQKKKKKTTKNEKKKKKKKKKIPTQGGRSRG

SEQ ID NO: 239691 - protein, 44 aa, Glycine max
  Clone ID: PAT_MRT3847_58466C.1.pep
LFKGDVTTCVEKPPTRIVGFPILICTWNHERKTKKYSTMHLHTI

SEQ ID NO: 239692 - protein, 58 aa, Glycine max
  unsure (1)..(58): unsure at all Xaa locations
  Clone ID: PAT_MRT3847_58467C.1.pep
RHKLIKVVDTIKKTXFYDTIFTTVVKNRFSMYNDDNLLDIVNILKVVSQKPSLNSGHF

SEQ ID NO: 239693 - protein, 167 aa, Glycine max
  Clone ID: PAT_MRT3847_58468C.1.pep
LAQCWKTVGVKGCSDCLRKAENEVKGCLPKREGRALNTGCYLRYSTVKFYNQGGQDGQGDDSSRKRVIIAAGSVLAAAVVVLTLAVSYVAFTKKRRKNNFIEVPPSLKNSSLNYKYETLEKATDYFSSSRKIGQGGSGSVYKGTLPNGNDVAVKRLVFNNRQWVDDF

SEQ ID NO: 239694 - protein, 97 aa, Glycine max
  Clone ID: PAT_MRT3847_58469C.1.pep
HNERASEYNVPRFLIPGEQRIRMGEQRIIMRGLGQGRALVIRLAYPDMRAGGGGGHQSRGATSQRVKVGARNAGCKQVSIRAWAGKAAGTLARWGQP

SEQ ID NO: 239695 - protein, 75 aa, Glycine max
  Clone ID: PAT_MRT3847_5846C.1.pep
WAYSGLASHEVVVYVISLPFLNLSVFQFLSKGNQHFQQLDSFSSMEANGVFHVLTAQQHKHAISVYFWRFFLPFC

SEQ ID NO: 239696 - protein, 53 aa, Glycine max
  Clone ID: PAT_MRT3847_58470C.1.pep
RSHERDSQRLPVRTFDANWIPHTRLRETTVLRSRCQSFMAICTSYETTNLDAS

SEQ ID NO: 239697 - protein, 70 aa, Glycine max
  Clone ID: PAT_MRT3847_58471C.1.pep
GSRIDSDTILECGFGPKNRNKTRFQLNDANELSYLSMYSLKNGYGVSEQCTYLEFKEWVKLIKLDLGWLI

SEQ ID NO: 239698 - protein, 73 aa, Glycine max
  Clone ID: PAT_MRT3847_58472C.1.pep
HFSAYYYLAGNACTPRMTCHLFKTQMLFRRRLHVQRANTQLLTLMIILAGKGVVNPDHPLPSAKKPLIHAPEC

SEQ ID NO: 239699 - protein, 71 aa, Glycine max
  Clone ID: PAT_MRT3847_58473C.1.pep
KKRFLKKRLVSNATRSNGFSFQNGQNSNGQRFPGGLTKPGVRSQNQQAFNFLPKGFFSIRKIKEFLPSSIT

SEQ ID NO: 239700 - protein, 70 aa, Glycine max
  Clone ID: PAT_MRT3847_58474C.1.pep
IIRVSQVCISRYSKIMNAGVIVSSSIMSHAKVIPGVPEAFESSDTPLKCFRNSMYLKAWVYRSLLSHFWC

SEQ ID NO: 239701 - protein, 259 aa, Glycine max
  Clone ID: PAT_MRT3847_58475C.1.pep
MVMMKSLPLLLIVLFSHSTTTLAQSPAAAPTAPATPSTAAAPAPAPSAPPTDIIRILKKAGGFTTLIRLLQATQVSNQINSQLLTTSGGLTLFAPNDNAFSSLKPGFLNSLNDQQKNELIQFHLLPTYVSVSNFDTLSNPVRTQAGENPDRLALNITSSGGNQVNMTTGVVNVTLGGTVYTDHQLAVYQVDKVLLPRDFFEAKPPAPAPAPEKAKGSKKKSVDSTATPADDAESDAVSVKQWHVMWVASVVLLVAAFTW

SEQ ID NO: 239702 - protein, 102 aa, Glycine max
  Clone ID: PAT_MRT3847_58476C.1.pep
SFTFQSTQYDKPSICFILHSQTPHCHHVNAATKSTTLATHITCHCFTLTASDSASSAGVAVLSTDFFLDPLAFSGARSRAGGLASKKSEEEAPCPPDTPRAG

SEQ ID NO: 239703 - protein, 50 aa, Glycine max
  unsure (1)..(50): unsure at all Xaa locations
  Clone ID: PAT_MRT3847_58477C.1.pep
LISPVQIXXLXKSLXALFAEXTYTRXXXVXKXKRMYSSLXKFXXMKQLFP

SEQ ID NO: 239704 - protein, 61 aa, Glycine max
  Clone ID: PAT_MRT3847_58478C.1.pep
PVNVYINNWEFLVSRDLYSSCGSRTPTILFYAKLLNMLIELLDDAKTALNSMGVSNDYMFT

SEQ ID NO: 239705 - protein, 94 aa, Glycine max
  unsure (1)..(94): unsure at all Xaa locations
  Clone ID: PAT_MRT3847_58479C.1.pep
YLSPFIYNFSTTFLNSNLCCFYNWDDSNXSYSYPKNYYPPSHTCPCFLNTHLLITTFCLIPFMHYSLINSNEIVFINYTLNIIFLLQTNIIFFH

SEQ ID NO: 239706 - protein, 61 aa, Glycine max
  Clone ID: PAT_MRT3847_5847C.1.pep
LVRILRGSSMQFAGSCIAPHEHMCRDIHYQDLTCLQFNDKPLALMEFDRNILNIYVGRLPR

SEQ ID NO: 239707 - protein, 154 aa, Glycine max
  Clone ID: PAT_MRT3847_58480C.1.pep
CHIIKSLPTAPHSAPHPGLVSLAHGGLRSVHISLISWVSTLITLSGSPNLRSSYTLVLPRLFPPPCAPTCFNGPLKLHTGYRFYALPPLPALSRYSRFKIVFSCLPKPSQRACAAFLSLAVGSPSPPLLSLASYLPPPPPQRRRTSYSDDGKPS

SEQ ID NO: 239708 - protein, 223 aa, Glycine max
  unsure (1)..(223): unsure at all Xaa locations
  Clone ID: PAT_MRT3847_58481C.1.pep
YQTLHTNQSDMNTPKMHYKTLIDENGLNITRLRYLKYVNSTVHSVNDTKYRRMSYKNRSTLKKDFYSLKKVNKLEVNEVHSYHVTSFEHVHRLTKGLKKITFLQNYNSQFSIRGVETKQQLLMLSKNLKSLAVSYEVQNPDLTGYEKFYESILTLNGLMPNKTTQKSVHDNISNMIQHLNIVLPSDIVSEGDFRLSNEVHDHPXIDRFKNDPEHFIWELAAGY

SEQ ID NO: 239709 - protein, 98 aa, Glycine max
  unsure (1)..(98): unsure at all Xaa locations
  Clone ID: PAT_MRT3847_58482C.1.pep
GGIRAALAANXXCPLRVVQSIXKLADGVGQIVSSAXRSRLSAGSHPVSIKCGSLAVIMMCVGSHTEWYVVEDLREDRADRIGXSKDAMYGWSRLERVY

SEQ ID NO: 239710 - protein, 50 aa, Glycine max
  Clone ID: PAT_MRT3847_58483C.1.pep
NHLTQESDIYRFGISLSGYNYRKERDLQLKICRRAEYCYVVRKSYCYFFS

SEQ ID NO: 239711 - protein, 110 aa, Glycine max
  Clone ID: PAT_MRT3847_58484C.1.pep
DIGSKSKGWHCAYQPRERTRTLMLFFFQFLQPLYPFLFVISGNPHRPFLPYEQLVYLTFLYAINTSTATPCQNQPTLTARAPQLRGYILLRVQVIYFLEKPQAGCFCECF

SEQ ID NO: 239712 - protein, 235 aa, Glycine max
  Clone ID: PAT_MRT3847_58485C.1.pep
MENQLELNPNSLTELSESSAPSDDDEPALSSHTLAALKEFLAEQQRGSDAGGESEVSLVSEDWRLSQFWYSPETATTVAEEVLALCGGGIRARVACIACPTLYAYLKKMDPNVPAQLLEYDKRFGQYGSEYTFYDYNHPEDIPSELKHSCKVVVADPPYLSKECLEKVAETIHLLVQPGESFLLLLTGEVQKETAAEILGLHPCGFRPQHSSKLGNEFRLFSNYDPGTRLGGWEK

SEQ ID NO: 239713 - protein, 51 aa, Glycine max
  Clone ID: PAT_MRT3847_58486C.1.pep
IMWKELVANIKVKDAYLNGKSYYYKASYKWLSHKLGIRARLPLTSRCWNSW

SEQ ID NO: 239714 - protein, 40 aa, Glycine max
  Clone ID: PAT_MRT3847_58487C.1.pep
EFWVQAIVFSQGPLKNLLAFLDNPVAPNAWVYPPKFSPGS

SEQ ID NO: 239715 - protein, 152 aa, Glycine max
  Clone ID: PAT_MRT3847_58488C.1.pep
MQFPSGAGGGGGGGGAGGEIHQPHHYRPQWFVDERDGLIGWLRSEFAAANAIIDSLCHHLRVVGDPGEYDMVVGAIQQRRCNWNQVLMMQQYFSVADVAYALQQVAWRRQQRPLDPMKVGAKEVRKSGSGYRHGQRFESVKEGYNSSVESYS

SEQ ID NO: 239716 - protein, 108 aa, Glycine max
  unsure (1)..(108): unsure at all Xaa locations
  Clone ID: PAT_MRT3847_58489C.1.pep
EKEGVGLEITTELRLGLPGGELPDKNDKMKKRVFSEINQGDENSSSEXYRIIQTKNQVVGWPSVCSYRNKNTMNETKXFVKVSLDGAPFLRKIEFVCSKVYFVLVLGL

SEQ ID NO: 239717 - protein, 239 aa, Glycine max
  Clone ID: PAT_MRT3847_5848C.1.pep
HASANILKKVASVRMFHQPNDVPNIRSYPLNRLVQQNVEAMHDGCLFASTSYFERNKIANLQNDIESENVGDRDMGFWVGLGPESEWESIRSLLPLSVAPISLQNEYIGMEVVMKNGKKHVIFRGLVTVVNDSDVILNILTCHASHGCDSLLGVNSSNTVTAEVFQNQYYQPSSGWGNNWPAVHNDNPGHWSTRDFSYSSKDFFEPPLPPGWKWASGWSIDKSQYVDKEGWAYGPDIKS

SEQ ID NO: 239718 - protein, 198 aa, Glycine max
  unsure (1)..(198): unsure at all Xaa locations
  Clone ID: PAT_MRT3847_58490C.1.pep
MFCARPTNTVTHPSFKSSSEMQTSISPFLSLHPQSHSFLPSTRHTLSLSAPQSYAPPSSPPLLIHPRPPRFDYAPSYETRPNGIYLKRRKVELARQVFDEIPKRDVNAWSTMITGFARNGMLREVWEYTRLMLEEGINPNLVGMTVILDVIGKFGGRNLGREAHGFVLKMNIYXRELSIQSALIDMYCNWGDVGSREP

SEQ ID NO: 239719 - protein, 100 aa, Glycine max
  unsure (1)..(100): unsure at all Xaa locations
  Clone ID: PAT_MRT3847_58491C.1.pep
HGWQLQFGELQVXVTPDKANIVAVIGSLFGILCWRIARRVQNVPDSSLQYANDNALLLAKLHSLKGASLAIYYCXTFLHAFISLRLVLLGLQLKSNKNKD

SEQ ID NO: 239720 - protein, 84 aa, Glycine max
  Clone ID: PAT_MRT3847_58492C.1.pep
DLISNPTPSGVTKHGSKKSPICSFGEGLPHNKKAHSNCEEWRLQRDCLRSHLGVAPVGTPLQENHLHSHCFPPPGSWTGAARSL

SEQ ID NO: 239721 - protein, 74 aa, Glycine max
  Clone ID: PAT_MRT3847_58493C.1.pep
RIPFNNAFPYNVNPQNSKKKNDLTRAQLYTVTEGYTVTRKTKIKAAESNGWHYHLIIQSLCEHSHIEIYKLHYE

SEQ ID NO: 239722 - protein, 77 aa, Glycine max
  unsure (1)..(77): unsure at all Xaa locations
  Clone ID: PAT_MRT3847_58494C.1.pep
TVIIHCXAVHILIKIHNVTVYINXXXXXXXXXXGDGIGNFNVXSVEFAEIVIVKPSIFSYSQSHRSHLGKKNPKTPN

SEQ ID NO: 239723 - protein, 85 aa, Glycine max
  unsure (1)..(85): unsure at all Xaa locations
  Clone ID: PAT_MRT3847_58495C.1.pep
LVSXFIXFXSFXKKXXXQXCFXXSXCQLCLSKHTXNRENEDGLXEAKVSXQPQKXXPSNCSXEYLXIGLAFRILFXXSLXAXRRL

SEQ ID NO: 239724 - protein, 246 aa, Glycine max
  Clone ID: PAT_MRT3847_58496C.1.pep
MGRSPCCEKAHTNKGAWTKEEDDRLISYIRAHGEGCWRSLPKAAGLLRCGKSCRLRWINYLRPDLKRGNFTEEEDELIIKLHSLLGNKWSLIAGRLPGRTDNEIKNYWNTHIRRKLLNRGIDPATHRPLNEAATAATVTTNISFGKQEQQETSSSNGSVVKGSILERCPDLNLELTISPPRQQQQTQKNLCFVCSLGLHNSKDCSCNVSNAVTVNNTTPSSAAAAAYDFLGMKTSGVWDCTRLEMK

SEQ ID NO: 239725 - protein, 42 aa, Glycine max
  Clone ID: PAT_MRT3847_58497C.1.pep
YIYHLHQHHKAIILNHNMNINHNNFSTHCNIHPNFKSISTNS

SEQ ID NO: 239726 - protein, 126 aa, Glycine max
  Clone ID: PAT_MRT3847_58498C.1.pep
FTTPSGPIIRFISYLLHPQKVNSRQNPMKNSGFDLSTTTHFKSLHKIEKLSIKTQTHLINSPIYSKTMKKIKNFRQPYLQKKRKNILKNTKRGKKVGGESPKLKMTKFDPNCLSAETENEQARTRG

SEQ ID NO: 239727 - protein, 60 aa, Glycine max
  Clone ID: PAT_MRT3847_58499C.1.pep
LIGVLPVAGSIVWPLCFHRRPAALVHASRSLFFPLAEYVCSDSVIIHQLVTAVSRTQLSQ

SEQ ID NO: 239728 - protein, 61 aa, Glycine max
  Clone ID: PAT_MRT3847_5849C.1.pep
PSGQGLFCPPFVAPWAGWARHFLVFQGFLFGVPCFFLNFNGFPFFFARARFTTKGFLYGLD

SEQ ID NO: 239729 - protein, 118 aa, Glycine max
  unsure (1)..(118): unsure at all Xaa locations
  Clone ID: PAT_MRT3847_584C.1.pep
FLYAGQCFHRIRSTVFQNEHEFDGAHVNPAQAWDLAHTSSKDLCSSHLXDALLASVADTENQTVMATMVSAWKQKIEDNLVDQDLHPPFDILDYGERILDKFSLLSLVASKCGVLSFS

SEQ ID NO: 239730 - protein, 47 aa, Glycine max
  Clone ID: PAT_MRT3847_58500C.1.pep
RRTKGRLISEGSKISSAIMQLPASCMESPNFNSLAQDTQPQALKNPV

SEQ ID NO: 239731 - protein, 48 aa, Glycine max
  Clone ID: PAT_MRT3847_58501C.1.pep
PRGPKKGSKGVGKCFLGTGVQVFLLKGFGICKNFFFFPHVVYPPPANK

SEQ ID NO: 239732 - protein, 43 aa, Glycine max
  unsure (1)..(43): unsure at all Xaa locations
  Clone ID: PAT_MRT3847_58502C.1.pep
FEFVISPCIARSMVVASKVVVRNKXATINGFLTVCTFQSFFMF

SEQ ID NO: 239733 - protein, 85 aa, Glycine max
  Clone ID: PAT_MRT3847_58503C.1.pep
VLNIHCYAVRMLVVLYTHELLDEGEPSTWRPLVHARVSLCRPHVVRFPNRGIVAPLNDSRFGSGIVHSVFDNLPFMKNPTGQQAQ

SEQ ID NO: 239734 - protein, 53 aa, Glycine max
  Clone ID: PAT_MRT3847_58504C.1.pep
AHRTVNLPSPPTRFIIPLRCSADPCRCPGLLMAAPPAGPMLHSPCLFVAHTYC

SEQ ID NO: 239735 - protein, 49 aa, Glycine max
  Clone ID: PAT_MRT3847_58505C.1.pep
KDGEYVCSIQHFLYLYIYFYVSEMKFKGHHEILFLFSSSPFCRLLAAVR

SEQ ID NO: 239736 - protein, 44 aa, Glycine max
  Clone ID: PAT_MRT3847_58506C.1.pep
PRAIDAITQVWSAYGSFHIVNHGVSLDLGKEAMQLSKTLFRLLG

SEQ ID NO: 239737 - protein, 184 aa, Glycine max
  unsure (1)..(184): unsure at all Xaa locations
  Clone ID: PAT_MRT3847_58507C.1.pep
PGRPTRQEKSIKTKVGAFSVLKELVVVLPNCLADHIGSLIPGIEKALNDKSSTSNLKIEALTFTRLVLSSHSPDVFHPYIKALSAPVLSAVGERYYKVTAEALRVCGELVRVVRPNIEGSGFDFRPYVHPIYNGIMSRLINQDQDQEVKECXISCMGLIVSTFGDHLSAELPACXLPVLXDRRE

SEQ ID NO: 239738 - protein, 88 aa, Glycine max
  unsure (1)..(88): unsure at all Xaa locations
  Clone ID: PAT_MRT3847_58508C.1.pep
SKXXCXSGXXXLEQVIXSXESPASLXDGXQSQRTVIYNKDXIEAXLVXIENPAXAKGHICNESTLTIGHCRQRXXXRSRFTXXKXXXN

SEQ ID NO: 239739 - protein, 107 aa, Glycine max
  Clone ID: PAT_MRT3847_58509C.1.pep
LKMMFLLSVLLVLRWFLPLVLRWFILRQFPQSHVDRLEQIPLDPACCVAGASLAGAGSRVVYRSYIPGDSYLNRRWFSCAPSTLTCLGWRNRDTSQCGTYRPLRCVG

SEQ ID NO: 239740 - protein, 121 aa, Glycine max
  unsure (1)..(121): unsure at all Xaa locations
  Clone ID: PAT_MRT3847_5850C.1.pep
MPHATEFSVVESTELGKKAKELNKALESLDKEERGGLKGSEMXKNVTSFGHXMCLNREXDVSLLAVMCTQREKADTTWALTALGYLAKFDMGIVGLIEDVAWTAHIIIYLLNEPPLSPFLN

SEQ ID NO: 239741 - protein, 203 aa, Glycine max
  Clone ID: PAT_MRT3847_58510C.1.pep
MEVSGQNIVKCDEEKALKCLLDAFGSVFSLEEIASAYCKASRNADLAGEMLYEMKGSSSGSSTTLDSSNADVMTEGSSESSDAYSLENSFQERKTSRPKGRPISMGTVSSVIGKDYGRPARSANGSFASVKPTKLDAKSLPMTGIWREKGKADVSISKHDQLHQDMEDFLFKMLGEGFQLDRNMIRQVLGMKISLFFFGCFEM

SEQ ID NO: 239742 - protein, 74 aa, Glycine max
  Clone ID: PAT_MRT3847_58511C.1.pep
SYTLFFTIFSAKDILDRSKTNFLKYKYYYTHMELRTKLLIIYIRNIIFAYYHTILVQFYSYTYSYSSLLPHLNF

SEQ ID NO: 239743 - protein, 94 aa, Glycine max
  unsure (1)..(94): unsure at all Xaa locations
  Clone ID: PAT_MRT3847_58512C.1.pep
MSKSIFVPDLVNVXEVFLPXLLLYPNPSDPLNGEAAALMMRDRPSYEQRVKEYCEKYAKPEDIGEATEEKSSDEEMSEDEYDSSDEQVVGKADP

SEQ ID NO: 239744 - protein, 113 aa, Glycine max
  Clone ID: PAT_MRT3847_58513C.1.pep
IFKPKCSCKAPHERGRVGLYVKIYFVPDLVNVFEVFLPQLLLYPNPSDPLNGEAAALMMRDRPSYEQRVKVYCEKYAKPEDIGEATEEKSSDEEMSEDEYDSSDEQVVGKADP

SEQ ID NO: 239745 - protein, 41 aa, Glycine max
  Clone ID: PAT_MRT3847_58514C.1.pep
LVFKNYSYSCEHYFRLNYNNTTILLYNTLILIHPIVRLTTA

SEQ ID NO: 239746 - protein, 42 aa, Glycine max
  Clone ID: PAT_MRT3847_58515C.1.pep
RAGLRMIQTCIQNQNMQSVCMQTDCITSIKFKTFLDYAVQEK

SEQ ID NO: 239747 - protein, 124 aa, Glycine max
  unsure (1)..(124): unsure at all Xaa locations
  Clone ID: PAT_MRT3847_58516C.1.pep
LVIRVIGQAPGCKCLDGYKPKSPRNGTEMSWNQGCEHNQTWSCRKKVRDGFNTVSDVKVPDTRRSWVNANMTLDECKNKGWENDSCTDYANSDIKGGXEDVPFXFRDLLDIRLMPNAGQELGIR

SEQ ID NO: 239748 - protein, 33 aa, Glycine max
  Clone ID: PAT_MRT3847_58518C.1.pep
ITILKHITEFLKYLLDNVILDKDYYGARNTEYD

SEQ ID NO: 239749 - protein, 149 aa, Glycine max
  unsure (1)..(149): unsure at all Xaa locations
  Clone ID: PAT_MRT3847_58519C.1.pep
AKLPPRAGPDRNSRPNPPVIRTDQAHIETSGFKLSLDDVETPKGSTSDLKISKYKMXLPNNTDGGTILRKDLXTNFWTEGNFIASADLQRTHCIKGMTNNSTTAVIPENTGIAXASAMSSTFMGRASYDIYTICSQDXELWNPACTKAV

SEQ ID NO: 239750 - protein, 92 aa, Glycine max
  Clone ID: PAT_MRT3847_5851C.1.pep
KLNCKFVKGSQNVNVQVLVKVCQVFLSSGFPIHQSSRGDGMTGSPRSTIDQQADLRSSRGSPGTRARHHSHRVSHLKRFDHGSTLGGPHKNK

SEQ ID NO: 239751 - protein, 50 aa, Glycine max
  Clone ID: PAT_MRT3847_58520C.1.pep
PDGYALPKTTGDYLPQSYSDDLPFTSVSKTTVDTCTHPYSGTSNVLTTTA

SEQ ID NO: 239752 - protein, 59 aa, Glycine max
  unsure (1)..(59): unsure at all Xaa locations
  Clone ID: PAT_MRT3847_58521C.1.pep
RSLFFVVTQVPCSLTLGKAVDPMLLLKRRKPGKYGLSISSKILRARLCQXKGTVAVLVA

SEQ ID NO: 239753 - protein, 59 aa, Glycine max
  Clone ID: PAT_MRT3847_58522C.1.pep
TKQKLLGRSTGINALLRIKFKESNCRKIYNYFDNQKKKPFANISCSRYRHYTQLKHQVV

SEQ ID NO: 239754 - protein, 253 aa, Glycine max
  Clone ID: PAT_MRT3847_58523C.1.pep
LPFRRFYGRSGCPGRPTRPAQSSLIKKAVELDGARSKTERKSTEACKSHREAERRRRQRINSHLSTLRTLLPNAAKSDKASLLGEVVEHVKRLRKQADDVTCGDSYSSRSGEPGSVRSEAWPFPGECDEVTVSYCDGEDGEPKRVKATVCCGDRTGLNRDVSQAIRSVRAKAVRAEMMTVGGRTKSVVVVEWEKEEEEVGALERALKAVVENRALVGFGMGPVILGQKRGRDCCASPSSEVDSDFLLRNGSFC

SEQ ID NO: 239755 - protein, 104 aa, Glycine max
  unsure (1)..(104): unsure at all Xaa locations
  Clone ID: PAT_MRT3847_58524C.1.pep
TRGDQFTFGPDRIXMFNRDPTGCTLSHYLHVGHADDTFLVPIPYYPGSDLHMSGTXIKLAPVVGDNSNNIQVTYHAXGEAYDKALEDYLKIHGLLMTNSLNPLC

SEQ ID NO: 239756 - protein, 633 aa, Glycine max
  Clone ID: PAT_MRT3847_58525C.1.pep
EWSDSESSDGQDYDDGNDSSCIDSDRDDHSNAGKDEGNCDSRNGARQVDVDLEGIEDTSGENVTNGKTQVNVTEQGGQLSKSEDEKGVFDSCRLFVRNLPYTTTEEELEEHFSRFGSVSQVHLVVNKDTKRSKGIAYILYTAPNIAARAQEELDNSIFQGRLLHVMPALQRHSDNQENNVLKDQSSKTLKQQRQEKRQADEASGDTRAWNSLFMRSDTVVENIARKFGVSKSDLLDREADDLAVRIALGETQVISETKKAFKNAGVNVEALEELANNKTDELKRSNHVLLVKNLPYGSTENELAKMFGKFGSLDKIILPPTKTLALVVFLEPVEARAAFRGLAYKRFKDAPLYLEWAPSNILSQSSTSKNNEINGAIGENEAKRQILEQQVERITDVDIDSDRVQARSLFVKNLNFKTIDESLRKHLTEHMKEGSILSVKVKKHLKNGKNVSMGFGFVEFDSPETATNVCKDLQGTVLDSHALILQPCNVKNDGQKQKTLEKDRSSTKLLIKNVAFEATEKDLRRLFSPFGQIKSLRLPMKFGNHRGFAFVEYVTQQEAQNALKALSSTHLYGRHLVIERAKEAESLEELRARTAAQFSDEQNGFQSAMKFSKKRKQVDFLDEGKMKFGRMAD

SEQ ID NO: 239757 - protein, 41 aa, Glycine max
  Clone ID: PAT_MRT3847_58526C.1.pep
HASVRASGFPLQDIFTTWTTSHLQDYITITQRHTTITFHSN

SEQ ID NO: 239758 - protein, 35 aa, Glycine max
  Clone ID: PAT_MRT3847_58527C.1.pep
RLSPSVCSTRLLESPLSTFSCASLTAPPSPFSLSP

SEQ ID NO: 239759 - protein, 59 aa, Glycine max
  Clone ID: PAT_MRT3847_58528C.1.pep
ILIIVCLDILRLNSATVSGTTHVMVLKKVIISACYGIKPNSYIVVCGQKQAMISRQYSI

SEQ ID NO: 239760 - protein, 67 aa, Glycine max
  Clone ID: PAT_MRT3847_58529C.1.pep
VYVYVSHQILARHLMLLSRPIPAKQFIKRGTKWIMSLVTLTMEGLGMARTFGGGLLQFKIRCWMERL

SEQ ID NO: 239761 - protein, 74 aa, Glycine max
  Clone ID: PAT_MRT3847_5852C.1.pep
CPLSRALARQTLRWRDNIGYLFPNSIQRIEAQMDCWLYNSVTPPVIFCLFLLLVEPEKLGVTENKNGDGEGFIV

SEQ ID NO: 239762 - protein, 70 aa, Glycine max
  Clone ID: PAT_MRT3847_58530C.1.pep
LTSVQVDFGFPKLINGTHVASITWLQLPLQSGPGVLSLRRSGPMVFQSGCLCDSWAFRGCSYEHPPPFCF

SEQ ID NO: 239763 - protein, 564 aa, Glycine max
  Clone ID: PAT_MRT3847_58531C.1.pep
MATQTQTQSHPNTTTIDPNSGFCSHSRTFHSLRPNVPLPPPSHPLSLTDYVFSLLPSAATATASSSITSAIIDAATDRHLSYSLLLRQVKSLTSSLQSLTPLSKGHVALILTPSSLHVPVLYFSLLSLGVTIAPANPLSSQSELTHLVKLAKPVIAFSTSNAAKNIPSSLKFGTILLDSPLFLPMLNNNEYVNADSRTRRVEVSQSDSAAILFCSGTTGRVKGVLLTHRNFIALIGGFYHLRMVVDDDPHPVSLFTLPLFHVFGFFMLVRAIAVGETLVFMHRFDFEGMLKAVERYRITYMPVSPPLVVALAKSELVKKDGMSSLRYLGSGGAPLRKEVAEDFRAQFPNVEIGQGYGLTESGGGAARVLGPDESKRHGSVGRLSENMEAKIVDPVTGEALSPGQKGELWLRGPTIMKGYVGDEKATAETLDSEGWLKTGDLCYFDSDGFLYIVDRLKELIKYKAYQVPPAELEHILHTNPEIADAAVVPYPDEEAGQIPIAFVVRKSGSNITADQVMEFVAKQVSPYKKIRRVSFIKSIPKSPAGKILRRELVDYALSCGSSKL

SEQ ID NO: 239764 - protein, 72 aa, Glycine max
  Clone ID: PAT_MRT3847_58532C.1.pep
TIFVFYLNTIFRACLKTSLKDRTWPGKTRRLVKVPPSTGAAEHSPIRRFFILMILVYSYTLDGMVLYSVIDP

SEQ ID NO: 239765 - protein, 79 aa, Glycine max
  Clone ID: PAT_MRT3847_58533C.1.pep
KHSRFRTITKLVNQPRQLNTGSLEKPNTIQAPIDLLNLISTPEPIIKNPSSLAHSILAMTYYNTTQEIPITTITIHTSY

SEQ ID NO: 239766 - protein, 116 aa, Glycine max
  Clone ID: PAT_MRT3847_58534C.1.pep
TPPISLYFFHRSSSAAELTYLNAPLLLNKGSLTRISDTGCCIPLSAIYRNKWYPAAPALTNQIVVITHPTFHRASSSMVSSPMPLYDEKLRDHEFAPTSLLRVYYKSFDTSSSRGG

SEQ ID NO: 239767 - protein, 114 aa, Glycine max
  Clone ID: PAT_MRT3847_58535C.1.pep
YVGGKSLFGPLSGLAIWECCVALRPIGAPLDPGSRHSFVRLGVFNLGAFVQPLCLCSRRVWGVPFGPPGGGILRGGRLAGGSDARSLSRVSYSCFTYWGGVLAALGNVVFFLVS

SEQ ID NO: 239768 - protein, 30 aa, Glycine max
  Clone ID: PAT_MRT3847_58536C.1.pep
MSDDMLIHFSINSSNQLYQSLPTKIAKLEA

SEQ ID NO: 239769 - protein, 168 aa, Glycine max
  Clone ID: PAT_MRT3847_58537C.1.pep
PESDTIQSALLLLRHNSLPTWVSPEILCTRGVPLVARRRHGGRSGSEAVTRKTRILDVVYNASNNELVRTQTLVKSAIVQVDAAPFKQWYLQHYGVEIGRKKKTAAKKETAEEACCCCSCGRSQKSNHLQRKLEKRPQDRKLDAHIEEQFGGGQLVGCISSRPGQCGR

SEQ ID NO: 239770 - protein, 196 aa, Glycine max
  Clone ID: PAT_MRT3847_58538C.1.pep
MGISRDSMHKRRATGGKKKAWRKKRKYELGRQPANTKLSSNKTVRRIRVRGGNVKWRALRLDTGNYSWGSEAVTRKTRVLDVVYNASNNELVRTQTLVKSAIVQVDAAPFKQWYLQHYGVEIGRKKKTAAKKETAEEGGDAAAAAEEAKKSNHVQRKLEKRQKDRKLDAHIEEQFGGGRLLACISSRPGQCGRADG

SEQ ID NO: 239771 - protein, 219 aa, Glycine max
  unsure (1)..(219): unsure at all Xaa locations
  Clone ID: PAT_MRT3847_58539C.1.pep
MGISRDSMHKRRATGGKKKAWRKKRKYELGRQPANTKLSSNKTVRRIRVRGGNVKWRALRLDTGNYSWGSEAVTRKTRILDVVYNASNNELVRTQTLVKSAIVQVDAAPFKQWYLQHYGVEIGRKKKTAAKKETAEEGAAAVAVEEAKKSNHLQRKLEKRQKDRKLDAHIEEQFGGGXLLACISSRPGQCGRADGYILEGKELEFYMKKLQKKKGKGAA

SEQ ID NO: 239772 - protein, 125 aa, Glycine max
  Clone ID: PAT_MRT3847_5853C.1.pep
MHLTFQKAMSNNLREARCNEKDRQTLLIFKHGIDREPYNMLETWPSEKDCRAWKGVQCDNTTRGDAELDLSTHSLEGEMNLALLEHEFINHLDLSMNNFNAISIPSMPNDVIYDCNLQHLDLSLS

SEQ ID NO: 239773 - protein, 66 aa, Glycine max
  Clone ID: PAT_MRT3847_58540C.1.pep
TCTQIKFQCKPIQNPTCFKIINLHTAHVRPSRTFIYYPFFIRYSILNSKFLLSKNLQRSHCMYDIE

SEQ ID NO: 239774 - protein, 97 aa, Glycine max
  Clone ID: PAT_MRT3847_58541C.1.pep
HVAGTCTWVSRSRGSEVSRLQAPCVCTPQCPLGSTSRPMCMRLSVQLAVHMQSPWPLVNSNRFCLHTQSTRSQAQPAVMSSVVKSSARIYIVSSYNI

SEQ ID NO: 239775 - protein, 45 aa, Glycine max
  Clone ID: PAT_MRT3847_58542C.1.pep
TIFLPVVMGLSVVPSTFMVGEIYSQGPDLATMGIRSDFRRTRTGL

SEQ ID NO: 239776 - protein, 60 aa, Glycine max
  unsure (1)..(60): unsure at all Xaa locations
  Clone ID: PAT_MRT3847_58543C.1.pep
NNXXQLVXPNXNDXIISXTCTXLTXYTHTADIXYXXRFXFPYMXXNXXSLSHEQLAQRAR

SEQ ID NO: 239777 - protein, 139 aa, Glycine max
  Clone ID: PAT_MRT3847_58544C.1.pep
SMDSASILKASSSTSVVYDGYAGGGGYNVIPMGTTTTVVANDGDQNPRSNHGFGDNEIKALGYESVYGSTTDPYHAHARNLYYLTQQQPSSVDAVKASAYDQGSACNTWVPTAIPTHAPRSSTSMALCHGATPFSLLHE

SEQ ID NO: 239778 - protein, 73 aa, Glycine max
  Clone ID: PAT_MRT3847_58545C.1.pep
VLTKPPCKAPRQGLEKTTKRRQCLGKIVTMDPMTEEEAARSCFYQTCFKNTTRKFLIKQGEKKGLKKTQILIL

SEQ ID NO: 239779 - protein, 50 aa, Glycine max
  Clone ID: PAT_MRT3847_58546C.1.pep
RLTLSQGSCEHKVHQVYIIRTNYYHTRYQTITTSFPTIDDLHIRSQPKRS

SEQ ID NO: 239780 - protein, 306 aa, Glycine max
  Clone ID: PAT_MRT3847_58547C.1.pep
MALMLGYDPCSHLSRAFSHFPSVSSSEANRNVGFTLKACFDANSGDNANRVFVKEKKKPNGFACVPHPPLLGGLEKGIDVEDRSLGGSPTKPFCFSDQQLPQKLVVAVDVDEVLGNFVSALNKFIADRYSSNCSVSEYHVYEFFKIWNCSRDEANTRVHEFFETPYFKSGIQPIPGAQTSLQKLSTFCSLSVVTSRQNVIKDHTLEWIEKHFSGLFQEIHFGNHFALDGMFRPKSEICRSINATVLIDDNPRYAIECAEAGIRVLLFDYENSYPWSKTNSADEHPLVIKVKNWEEVEQQLMSLVAL

SEQ ID NO: 239781 - protein, 369 aa, Glycine max
  unsure (1)..(369): unsure at all Xaa locations
  Clone ID: PAT_MRT3847_58548C.1.pep
MEASNSHSFRSRVHLFVLFLLCFVVTIEANLKKKVSAFYVFGDSTVDPGNNNFIDTAFRSDFPPYGRDFVNQAPTGRFTNGKLGTDFLASYLGLKELVPPYLDPNLSDKELVTGVSFASAGSGFDPLTPMLGNVIPVAKQLEYFKEYKKRLEGTLGKKRTEYHISNALFFISAGTNDYVINYFSLPIRRKTYTTPLTYGHFLLQHVKEFIQNLWKEGARKIALVGVPPMGCLPIMITLNSHNVFLERGCVDKYSAVARDHNMMLQHELFLMQLNFSNTNPAGAKISYLDIYXDPLDDMIQAHQNLGFDEVDRGCCGSGYXXXXFMCNGVAYVCSDPSNFVFWDSIHPTENAYYDLFMAARPTIDALING

SEQ ID NO: 239782 - protein, 85 aa, Glycine max
  Clone ID: PAT_MRT3847_58549C.1.pep
EPKKGPTKPNPISARPGKRKPQRNGPIHFRMGQPLNFPAGGIRLSFPSSVNGSASFQRRSSVGAFAAKAVDTQRPAASLYKVLQF

SEQ ID NO: 239783 - protein, 62 aa, Glycine max
  Clone ID: PAT_MRT3847_5854C.1.pep
SVTPARRADVKPELTPDGPMRGANVKILTKESYWHTVHRSMAAVDQDPDTRYRVVSRFNYAD

SEQ ID NO: 239784 - protein, 65 aa, Glycine max
  Clone ID: PAT_MRT3847_58550C.1.pep
CRADSARETPIKEKKRRILTQNAQWFGRTFVVNLSFYAFQTFICYFSQLVYIDKKRLNMHNPIKN

SEQ ID NO: 239785 - protein, 215 aa, Glycine max
  unsure (1)..(215): unsure at all Xaa locations
  Clone ID: PAT_MRT3847_58551C.1.pep
VKGMTKSTPVNEEIPPLLEGGGKIEVWRINGNAKNALPKEEIGKFYSGDCYIVLYXTYHSGERKEDYFLCCWFGKDSVEEDQTTATRLANTMSTSLKGRPVQGRIFEGKEPPQFVAIFQPMVVLKGGFSSGYKKLIADKGVSDETYTAESIALIRISGTSIYNNKSVQVDAVPSSLNSTECFVLQSGSTIFTWHGNQCSFEQQQLAAKVADLQLL

SEQ ID NO: 239786 - protein, 66 aa, Glycine max
  Clone ID: PAT_MRT3847_58552C.1.pep
KTTPLTLPRFMYLITPTTHILPTQTQPKLTPPSTTLIHKTYHQTLSLKQIILHHTLMNWLDKVPHL

SEQ ID NO: 239787 - protein, 46 aa, Glycine max
  Clone ID: PAT_MRT3847_58553C.1.pep
TYNCHFSVPPTVCNRADYHSPLVIAQSDCHSSLANNENIGTYIYNK

SEQ ID NO: 239788 - protein, 160 aa, Glycine max
  Clone ID: PAT_MRT3847_58554C.1.pep
PVVRKKSLKFLLILVFVSYHAFHLPSSLSIFPHFLSLQTACNSSSFSAIHGDVVNGGFALLRDSLHGSRRFPPTRTISTITEQFYTDCPTNISFYALVLRSFLRSPYLFVSFAVYARNSNSRISLTRDFRFIRQSCVVSDFRLVICLCAKFGYRRIFSAS

SEQ ID NO: 239789 - protein, 511 aa, Glycine max
  unsure (1)..(511): unsure at all Xaa locations
  Clone ID: PAT_MRT3847_58555C.1.pep
MTDAKPDKPLMASSSRNLPDFKKSVKLKYVKLGYHYLITHGMYLCLSPLVVLIAAQLSTFSLRDLYDLWEHLQYNLISVILCLTLLVFLSTLYFLTRPRPVYLVNFSCYKPEESRKCTKKIFIEQSRLTSSFTEENLEFQRKILERSGLGENTYLPEAVLNIPPNPSMKEARKEAETVMFGAIDELLAKTAVKPKFIWNSDCKIYSLVNPTPSLSAMIVNHYKLRGNIKSYNLGGMGCIAGLISIDSSLCASPYQHXVVAVGLVKFSCKVVGFLGYVRINLVSYCGIRLGGTAVLLSNKSSDRRRSKYRLVTTVRTHKGADEKCFSCVTQEEDANGKVGVTLSKDLMAVAGDALKTNITTLGPLVLPTSEQLLFFATLVAKKIFKMKIKPYIPDFKLAFEHFCIHAGGRAVLDELEKNLQLSPWHMEPSRMTLYRFGNTSSSSLWYELAYTEAKGRIKRGDRTWQIAFGSGFKCNSAVWKALRTINPSKEKSPWIDEIDQFPVDVPRVSSI

SEQ ID NO: 239790 - protein, 60 aa, Glycine max
  Clone ID: PAT_MRT3847_58556C.1.pep
GRSRTTFSSETTETASAVSVASKRRDDSMMQPQDGIKGAILHCRRSFNPCRPECKSSQLP

SEQ ID NO: 239791 - protein, 165 aa, Glycine max
  Clone ID: PAT_MRT3847_58557C.1.pep
PGTATHPTKIVALYISPKLVMIDLAKDLLQANPNSYALVISMENITLNWYFGNDRSKLVSNCLFRMGGAAVLLSNKSSDRRRSKYRLVTTVRTHKGADEKCFSCVTQEEDANGKVGVTLSKDLMAVAGDALKTNITTLGPLVLPTSEQLLFFATLVGKKIFKMKI

SEQ ID NO: 239792 - protein, 60 aa, Glycine max
  Clone ID: PAT_MRT3847_58558C.1.pep
AKDYQINLKECGPTVLDALINIKNEIDPSLTFRRSCREGIYGSCAMNIDGCNNLSFLTKI

SEQ ID NO: 239793 - protein, 49 aa, Glycine max
  Clone ID: PAT_MRT3847_58559C.1.pep
AHSNGFPQLQPDEIAAIMNYFNEPRSLAPTGLYLGGTKYMVIHGETRAV

SEQ ID NO: 239794 - protein, 66 aa, Glycine max
  Clone ID: PAT_MRT3847_5855C.1.pep
KKHARILSFLKEEPGVFYKFFTPSQKSERGTLPYIGGVFRHSKQHPGGELKGGPLFQKEFIHTRTG

SEQ ID NO: 239795 - protein, 241 aa, Glycine max
  Clone ID: PAT_MRT3847_58560C.1.pep
MVGTNCYSNPATLNASSGAGYVTNIAGVNSYVTGSPLSVLVCFMVSDIFGINATLFRDLADKVARKNGCYCVCPDFFNGDPFDPENENRPLPVWLKDHEPEKGIETAKPVIEALKREGASAIGAAGFCWGGKTVTDLGKSKHVQASVLLHPAYVEVDDIRGIKTPIAILGGQNDTITPPKLIKQFKQALQNAKPKVDSFVKIFPNVSHGWTVRYDPKDPKAVKAAEKAHDIMIGWFDKYLK

SEQ ID NO: 239796 - protein, 111 aa, Glycine max
  Clone ID: PAT_MRT3847_58561C.1.pep
MVGTNCYSNPATLNASSGAGYVTNIAGVNSYVTGSPLSVLVCFMVSDIFGINATLFRDLADKVARKNGCYCVCPDFFNGDPFDPENENRPLPVWLKDHEPVNSYLIILGCL

SEQ ID NO: 239797 - protein, 81 aa, Glycine max
  Clone ID: PAT_MRT3847_58562C.1.pep
FCNSDTPCKGYNTKHRRGKSETLRVQYINTKELRVTIGTWNVAGRAPSKDLDIEDWLCTNEPADIYIIGFQEVVPLSAGNV

SEQ ID NO: 239798 - protein, 110 aa, Glycine max
  Clone ID: PAT_MRT3847_58563C.1.pep
NCWKKGEILESMDPNLGANYRPNEVELGLKLALLCSHSEPLARPSMRQVVQYLEKDVPLPDLSMLSLSSIGLTFGLHEDFQDCPMSYPSSMDRPISHTSSIAESLLSGGR

SEQ ID NO: 239799 - protein, 68 aa, Glycine max
  Clone ID: PAT_MRT3847_58564C.1.pep
LLQGVRVHKSVTILLPLKAQCVSCVFCRTTSLSGPLYELYAVDQLNLQRCTDVPCFSPFMEPVIDCVP

SEQ ID NO: 239800 - protein, 81 aa, Glycine max
  Clone ID: PAT_MRT3847_58565C.1.pep
LASRLLKKLPPSNESFNRVQSPRSHTCCLFVRFSLRKSFLALLNHGTCPQSPPFFSTFFTKHMLKELLYTTRLSKRPPTRP

SEQ ID NO: 239801 - protein, 37 aa, Glycine max
  Clone ID: PAT_MRT3847_58566C.1.pep
MRLGFKILGKLFVKVVLFNNPLSAFIDACSFGRKLLF

SEQ ID NO: 239802 - protein, 154 aa, Glycine max
  Clone ID: PAT_MRT3847_58567C.1.pep
LGPFIPSVPYLKPLIHSFCMSFFMESLQFTPQSYQLQFHFMNKLSPKFKPTISSIHFRTFCDSSSSPSTTLTQTQNPSDPQIIVPNRKRRVKASSDTQFKENWLASLSYPFPEKTHFLSGEHEPTHQNDGSKWVLGIDPDVFGAVALLKPHGLL

SEQ ID NO: 239803 - protein, 103 aa, Glycine max
  Clone ID: PAT_MRT3847_58568C.1.pep
GSIINTMVGLNWDDLVQGVCGSVSSSWLMIIGLCCICSWYGTVHGWQRKHNETTRLIPREDGGFCGESIALLESYNGGHLHAWLGGLRTWFCDASLMIRWCEM

SEQ ID NO: 239804 - protein, 74 aa, Glycine max
  Clone ID: PAT_MRT3847_58569C.1.pep
GAVFVPLLASFCFCPVAVCSFPLFHWGPFSPLVCSFPRLRCLARYGAFLPCSHSWLVASWRILYKCGPCSCFVR

SEQ ID NO: 239805 - protein, 104 aa, Glycine max
  Clone ID: PAT_MRT3847_5856C.1.pep
MAKKRKPKKKPHNHNVNLNQNQNQNQNQNQNVAALISRVTHAVQSFLSQNDLVLLPSQSLRLESLISSIISHSPSPPLSSPHSDSWFRRFRSVSDSLWLHAFRM

SEQ ID NO: 239806 - protein, 85 aa, Glycine max
  Clone ID: PAT_MRT3847_58570C.1.pep
HIPSRDCQQFHLLKRTACWQLNKKSLFMNITTSLKFLNTSYKENLNLKLLSFVKTEINNLLMLMRPHITPHFLTLTKTKFLYWAE

SEQ ID NO: 239807 - protein, 336 aa, Glycine max
  Clone ID: PAT_MRT3847_58571C.1.pep
MATEMEELVSFLSSTSPQITKAAVDIVRGLTGSMEGLQSLANYSNALLPALSRLLTLPKEVSEAAAEALVNLSQNSSLAEAMVGIGLVKTTMDVLYKPECSIARLLVMLLVNLTQLEAGAASLLQTEDEKVHGLYVMKLVRSFCRTSHESNDDAFEHVGSILVNISKQRKGRELLLDPKRGLLKQIIRQFDSNSSLRKKGVSGTIRNCCFEAENQLQNLLLVSEFLWPALLLPVASNKIYREQDRLKMPLELGTALSIEREPVNDPEIRIQALEAIYLIILQEAGRRAFWSVNGPRIVQIGYEDEEDPKVMEAYEQLGSLLVHSSSAEEPLSDTTK

SEQ ID NO: 239808 - protein, 58 aa, Glycine max
  unsure (1)..(58): unsure at all Xaa locations
  Clone ID: PAT_MRT3847_58572C.1.pep
NKFPSENPGKTFFFNLNFNPPRIPVCFMVRAHGLFQAFFFILEGWAHFVRFRCSFXXT

SEQ ID NO: 239809 - protein, 46 aa, Glycine max
  Clone ID: PAT_MRT3847_58573C.1.pep
DYRITDLIRSNAKTMIGALLDPMLLLMLMHLGTFHRHFPTSPYDIM

SEQ ID NO: 239810 - protein, 52 aa, Glycine max
  unsure (1)..(52): unsure at all Xaa locations
  Clone ID: PAT_MRT3847_58574C.1.pep
LLRANNTTLGHHXARRLVEIGIIDVYTVPGDFNLILLDYLLSXPDLNLIRRC

SEQ ID NO: 239811 - protein, 45 aa, Glycine max
  Clone ID: PAT_MRT3847_58575C.1.pep
LSGRPATWLACFIPRGKWIQGKTKSLIPNYGCFCFFFFIPFGRNL

SEQ ID NO: 239812 - protein, 65 aa, Glycine max
  Clone ID: PAT_MRT3847_58576C.1.pep
YYLSLDAHLAGCAFFFLLCDVNRANMVRFTTIVRKDACSLCLLCVSSNLQCYLTRALRVCKNHCL

SEQ ID NO: 239813 - protein, 97 aa, Glycine max
  Clone ID: PAT_MRT3847_58577C.1.pep
TRIFVFLCNCRIFIFKNFVLLFFFEALSALCNGGDLSYCVASFSEFKILLLGFRHFRQKFLFLKFFLCSYNFFCAQTSLYCFWVRQFCIQVHLSPLS

SEQ ID NO: 239814 - protein, 64 aa, Glycine max
  Clone ID: PAT_MRT3847_58578C.1.pep
NPLEGGAPFTRKKTRRDKTPFVDWKFLPQFFRKKKKPALDCKLKFTLGQMLIHPFFMLNKPPFS

SEQ ID NO: 239815 - protein, 53 aa, Glycine max
  Clone ID: PAT_MRT3847_58579C.1.pep
FFFFFFFFFFCFGFFFFFFFFFFFFWGPPKRALGFFVKKKVLFFPGGGKKKGV

SEQ ID NO: 239816 - protein, 43 aa, Glycine max
  Clone ID: PAT_MRT3847_5857C.1.pep
GCEKTTEGFVFNTYCISCRSSPPPQNCIHLTYKLLLNDLTYKL

SEQ ID NO: 239817 - protein, 109 aa, Glycine max
  unsure (1)..(109): unsure at all Xaa locations
  Clone ID: PAT_MRT3847_58580C.1.pep
MCLSGLLILGVERKIPARNDDLRDAAWPNTPITCSLXDLLKPGPARVKILDHPMHTEETQEPLTVLSEQDLDSSKTLILHVTKPNFEQHWSVSTWVKDTTDSTPERCNL

SEQ ID NO: 239818 - protein, 59 aa, Glycine max
  Clone ID: PAT_MRT3847_58581C.1.pep
KRCGNFQIGRAYSARGSGLFSFMEVACGTGVGGHTFQLAHCVPQAAERSPENAEQKQLA

SEQ ID NO: 239819 - protein, 59 aa, Glycine max
  Clone ID: PAT_MRT3847_58582C.1.pep
IICKHVYSILCQEGGKGDSTLQFATWSALALQAGKDVPSNGVSVFAPIACPVFEYRESV

SEQ ID NO: 239820 - protein, 166 aa, Glycine max
  Clone ID: PAT_MRT3847_58583C.1.pep
LEPIRLEIIIIIIVSPSKSKNTITMNGKIVLCFAVVCIAQTMSAATGSTVDVDDIKKVSDQISQTFLSVTNHLVGIAPNSADAQKSIDKFRTIMSKGFTDIEAEANKLKDIIRKNADPKLVEKYDELEKELKKHLSNAKDAFEDKVVKPLGEKVELKKITENVIKT

SEQ ID NO: 239821 - protein, 40 aa, Glycine max
  unsure (1)..(40): unsure at all Xaa locations
  Clone ID: PAT_MRT3847_58584C.1.pep
SHVVKQGHLNSISVFRXXLXAPSSXKQHXTTSSSISTPLI

SEQ ID NO: 239822 - protein, 93 aa, Glycine max
  Clone ID: PAT_MRT3847_58585C.1.pep
YAQRVMFPPQILLLVIQQVIIDTGFGDNMEKMNTARETPNLPNSKKENVMNDLEKNICAQANIGTAIISEIKGNKSTISDMSCHHHFMVPTRQ

SEQ ID NO: 239823 - protein, 65 aa, Glycine max
  Clone ID: PAT_MRT3847_58586C.1.pep
AVFDYRGKTCAERLPFQCYAPQGNIRPPAVAPSSFLPQPSSLSMGKVHVYLSNRMFTLCIKSRTT

SEQ ID NO: 239824 - protein, 63 aa, Glycine max
  Clone ID: PAT_MRT3847_58587C.1.pep
CLLVKALVFFRLSTVQTIMVGSEIADWSECSSYNKVLRESFLFYRFILLVCKNPSVILTFALN

SEQ ID NO: 239825 - protein, 243 aa, Glycine max
  unsure (1)..(243): unsure at all Xaa locations
  Clone ID: PAT_MRT3847_58588C.1.pep
QFGATAESLNKASTAVFRIGTDAHLYDDPEDVNIAPLLDSKFDSEKCEALKRLLALIAQGFDVSNFFPQVVKNVASQSLEVKKLVYLYLLHYAEKRPNEALLSINYFQKDLGDTNPLVRAWALRAMAGIRLHVIAPLVIVAVQKCARDPSVYVRKCAANALPKLHDLRMEEHASAIEEIVGLLLNDHSPGVVGAAASAFTSVCPDNFSLIGRXYRRLCEILPDVEEWGQIILIGILLRYVIAR

SEQ ID NO: 239826 - protein, 52 aa, Glycine max
  unsure (1)..(52): unsure at all Xaa locations
  Clone ID: PAT_MRT3847_58589C.1.pep
RXXRTXARXSGXXHXVLKPXCKXXXXXPEXLGXAXLALXYXXVIXVIEKLAA

SEQ ID NO: 239827 - protein, 353 aa, Glycine max
  Clone ID: PAT_MRT3847_5858C.1.pep
MQEVLKMVKSNEQVVPGAKYCVTGSTGYIGSWLVEALLERGCTVHATVRDPAKSLHLLSLWKGGDQLRFFQADLHEEGSFDEAVKGCIGVFHVAASMEFNVRDKENNEAFVQANITDPAIKGTINLLKSCLKSNSVKRVVFTSSISTITAKDINGKWKSIVDESCQIHPDTVWNTQASGWVYALSKLLTEEAAFQFAKENGIDLVSVISSTVAGPFFTANVPTSVKVLVSPLTGETEYFRILSAVNARMGSIALVHIEDICSAHIFLMEHAKAEGRYICSSQSCALSDLATLISKVYSNSNIYQKTEKIYDKVPSEISSKKLQDLGFSYKHDLEDIIYQTLMCCLDYGYLPPV

SEQ ID NO: 239828 - protein, 52 aa, Glycine max
  Clone ID: PAT_MRT3847_58590C.1.pep
PGTIKYILYMAPKFQKTSTISVPILKPYDVMPLSKYGKKYKGEKRRPNSCSC

SEQ ID NO: 239829 - protein, 112 aa, Glycine max
  unsure (1)..(112): unsure at all Xaa locations
  Clone ID: PAT_MRT3847_58591C.1.pep
ENXXVXXNANAEXXKGSLNLFNMHFKDICSTQSRWLAFDKQLSEKIIMSLQHILLPAYGNFIEKLQDVLGIHASEYIKYGLFDIKDQLNHLFLGSMPMNQYLKDKEKLLKLA

SEQ ID NO: 239830 - protein, 468 aa, Glycine max
  Clone ID: PAT_MRT3847_58592C.1.pep
AIQALKPLRIRVGGSLQDQVLYEVGSLKSPCHPFQKMKGGLFGFSKGCLQMKRWDELNHFFDETGALVTFGLNALRGRHQISHTVWGGDWDPSNAKDFISYTISKGYKIDSWEFGNELSGKGIGASVGAAQYGKDLIKLKEILHTLYKNSTFKPSLVAPGGFYNKEWFDKLLQVTGPGIVNVLTHHVYNLGPGSDEHLDRKILDPENLSKIESIFSNLSETIQKYGPWSSAWVGEAGGAFNSGGRSISNTFVNSFWYLDQLGIASRYNTKVYCRQTLIGGNYGLLNTTTFIPNPDYYSALLWCQLMGKTVLAASSDVFSPSLRTYAHCSKGRDGITLLLINLSNQTHFTLTVHDRVPVSNGGNENAKSIHTENSFFSHLKRAFSWIGTKGSDVTFREEYHLTPKDDYLRSQTMLLNGIPLELTNDGEIPTLDPLLNNVHSPIHLAPLSIAFIVFPNFDAPACAGLRKP

SEQ ID NO: 239831 - protein, 92 aa, Glycine max
  Clone ID: PAT_MRT3847_58593C.1.pep
SPTSSGTGGAGVQAGPGPLLRAASPATCAPTSSAQVDRCFHKRGGAWNWACRLRCEPQIPAYMHEPPKRLQLPLLFMASPPALCLPVGSGPA

SEQ ID NO: 239832 - protein, 307 aa, Glycine max
  unsure (1)..(307): unsure at all Xaa locations
  Clone ID: PAT_MRT3847_58594C.1.pep
PFQKMKGGLFGFSKGCLQMIQLIPPFHLXNIPLKRWDELNHFFDETGALVTFGLNALHGRHQIIHTDXGGDWDPSNAKDFINYTISKGYKIDSWEFGNELSGKGIGARVGAAQYGKDLIKLKEILRTLYKNSTFKPSLVAPGGFYNKEWFDKLLQVTGPGIVNVLTHHVYNLGPGSDEHLDRKILDPECLSKVESIFSNLSETIQKYGPWSSAWVGEAGGAFNSGGRSVSNTFVNSFWYLDQLGIASRYNTKVYCRQTLIGGNYGLLNXTFIPNPDYYRQVPIEKCKMKRKRRKYIFVFLKCYKHIA

SEQ ID NO: 239833 - protein, 55 aa, Glycine max
  Clone ID: PAT_MRT3847_58595C.1.pep
CIEGLTRTIHVGQLLRLVWTHVSFTNSAQAPVISTTDINTEWWHRDLTYRDIPTQ

SEQ ID NO: 239834 - protein, 82 aa, Glycine max
  Clone ID: PAT_MRT3847_58596C.1.pep
QILNFVPLIEIGRILVQVLQFMFVIVASQNITVFVLDGPDTRLVVHVLRSIQAYAPSPIKVPPPGSWLVQRHCLCSYCLCLF

SEQ ID NO: 239835 - protein, 405 aa, Glycine max
  Clone ID: PAT_MRT3847_58597C.1.pep
MVRHKRGRPSPENSPSKRRRRRSPLECRRRWVVSSKDSSNCTDKVLVVSYNILGVENASNHPDLYSNIPHSFLEWDRRKRLILEEINNYNASILCFQEVDHFNDLDDLFQNSGFKGVYKARTGEAQDGCAVFWKDKLFKLLHQEDIEFQRFGMRNNVAQLCVFEANHDKKESDACNLTTMTPSTGKRRFVVGNIHVLYNPNRGDIKLGQVRLLLDKAYKLSQEWGNIPVIIAGDLNSVPQSAIYKCLSSSELDIQLHDRRNMSGQLEIQTNRVFRSQIGDDASISMSVSRQLYRWSVEELRLASGAEGVTRLQHQLKLCSAYSGVPGNHRTRDDIGEPLATSYHSKFMGTVDYIWHSEDLIPVRVLETLPIDTLRRSRGLPSEKWGSDHLAVVCEFAFANNANVS

SEQ ID NO: 239836 - protein, 67 aa, Glycine max
  Clone ID: PAT_MRT3847_58598C.1.pep
IEGTPMLCAQNFVNMGGINWGVSSGGRKNIFFVLRHMLLDWIQRINVQAVKTLFLNPIPKEKECYAT

SEQ ID NO: 239837 - protein, 89 aa, Glycine max
  Clone ID: PAT_MRT3847_58599C.1.pep
ILFLRRKAILKTGHVHDDSDLKEHHLRRACLNYTLEDHTRSLGEPDYFANIILLIPLRSRSVHALIWHALELLYPQQALFSSKIGGSPR

SEQ ID NO: 239838 - protein, 166 aa, Glycine max
  Clone ID: PAT_MRT3847_5859C.1.pep
MNHTKFIKILFSWILKACFMGLALFATVTSSEEKVEDPSSGLFCISDCAKCPVICSPPPPMLITPPHPPTSPSVPHSPPLSYLSPPPPKSQLPPPPPPSRIAPPPPFKSYNTPPSGLTQPQPTVISAPHDFSYPYYYFYASGAASLSFHPPFFGLVIVLNWVFCCW

SEQ ID NO: 239839 - protein, 72 aa, Glycine max
  Clone ID: PAT_MRT3847_585C.1.pep
LFNFFTFSIVEPFFHYTFLFSLSYPDSFLYSFAYKVLCFPFRRHSLSNPRLFVSGILVFSLLALDLSFLLIF

SEQ ID NO: 239840 - protein, 57 aa, Glycine max
  Clone ID: PAT_MRT3847_58600C.1.pep
RVCSWSIALLSTIISSWCSLFRGERLSRCRVYTSHDVLWLMWSSSSRISKVCSYLFA

SEQ ID NO: 239841 - protein, 621 aa, Glycine max
  unsure (1)..(621): unsure at all Xaa locations
  Clone ID: PAT_MRT3847_58601C.1.pep
YLPFSRAKEETNNAQVNVVVSDKQLVKHLQKEVARLEAVLRTPDPSKEKDWKIQQMEMEIEELRRQRDLAQTQADELRRKLQDDQKVSNPVESPHLPVKKCLSFTGALSSLKPELGCERVRSSTLRQSMRQSSTAPFNLMHEIRKLEHLXQEQLGEEANRALEVLQKEVACHRLGNQDAAETIAKLQAEIRGMRAVRSTTPKNVEVGSMVSINKSVSANLKEEITRLHSQESTIANLGQQLENVQRSIDKLVMSLPNNFQHSPSEASPKNKKEHKRKKLLPLSSSNAANRQNFLRSPCSPLSATQQVLESDVENRAPENDDIVSTDTLPESEKETPSKSEEAGDVSSKENTPVYRRSSSVNMKKMQKMFQNAAEENVRSIRAYVTELKERVAKLQYQKQLLVCQVLELEANEANGHNIDNEEYSCEPEEPQISWQIAFKEQRQQILELWDLCYVSIIHRTQFYLLFKGDPADQIYMEVELRRLTWLQQHLAELGNASPAPHVGEEPTISLSSSIRALKREREFLAKRLTSRLSLEEREALYMKWDVPLDGKQRKMQFISKLWTDPHDQIHVQESAEIVAKLVSFRTGGNMSKEMFELNFVLPSDNRPWLMGWNHLTNLLNL

SEQ ID NO: 239842 - protein, 62 aa, Glycine max
  Clone ID: PAT_MRT3847_58602C.1.pep
DKPGSGIMGKKKGKGFFDQGVLIKGFGKALPPGIFSDASKADLLDVYFAGLKGKTLNLVHPQ

SEQ ID NO: 239843 - protein, 51 aa, Glycine max
  Clone ID: PAT_MRT3847_58603C.1.pep
LYLSLARSCRVLLKTQKEIRMQRLLFNASDSQKAMVQSIISNNARCMCPRA

SEQ ID NO: 239844 - protein, 87 aa, Glycine max
  Clone ID: PAT_MRT3847_58604C.1.pep
AAFSVCGFPPDCLGFVQHFATGPQPALQNEIRVEGLFFAKAKGMEFCAPEKYKSFFPWAPSCLELGFIALSLSLSLSLSQNKTASSF

SEQ ID NO: 239845 - protein, 49 aa, Glycine max
  Clone ID: PAT_MRT3847_58605C.1.pep
MMDRWCLFLGMPGFQNRFCPMVGLVSFVFKLSYYMFKHEILVILFCINE

SEQ ID NO: 239846 - protein, 72 aa, Glycine max
  Clone ID: PAT_MRT3847_58606C.1.pep
STVFIKFSACYFLPLGVYSNVEIKSCYVAGISVRGPVFGYSTVSILVIGTSYFASCFMVPSSKSNMIILWSR

SEQ ID NO: 239847 - protein, 62 aa, Glycine max
  Clone ID: PAT_MRT3847_58607C.1.pep
DIYAKTNKVAFLTEYSILLIHKSKRKLQEKKVGIMKCKFDYIFYNNSKKNTYTTYLKESNIF

SEQ ID NO: 239848 - protein, 72 aa, Glycine max
  Clone ID: PAT_MRT3847_58608C.1.pep
CALDVHGASREMQVEYVTVRNGSVVFPGGYGGLLGIPHGFILRLLFIPSHFVFLPNTRTVVIRVAIAKIRFS

SEQ ID NO: 239849 - protein, 55 aa, Glycine max
  unsure (1)..(55): unsure at all Xaa locations
  Clone ID: PAT_MRT3847_58609C.1.pep
AWRVSFLLLGVGRXSGCXXLGCLRGRXPLWXLEGLVSXAVXAVCAPRXGTNXSXV

SEQ ID NO: 239850 - protein, 212 aa, Glycine max
  Clone ID: PAT_MRT3847_5860C.1.pep
MADEAKAKGNAAFSSGDYPAAIHHFSDAIALAPTNHVLYSNRSAAYASLQNYTDALADAKKTVELKPDWSKGYSRLGAAHLGLSQYGDAVSAYEKGLKIDPNNEPLKSGLADAQKALAAASRPRSSAANPFGDAFSGPEMWARLTADPTTRAYLQQPDFVKMMQDIQRDPNNLNLHLKDQRIMQALGVLLNVKIQTPPTGADTDMPDSPSPS

SEQ ID NO: 239851 - protein, 91 aa, Glycine max
  unsure (1)..(91): unsure at all Xaa locations
  Clone ID: PAT_MRT3847_58610C.1.pep
NQIPAPAEETALVPCTAKAPAPAPAPAPVDNQIPPGILGSFKTNSPRADGQNCGNFFPGGPSPKVHXPPGGGFPPPSLFGGPPGNCFTPPL

SEQ ID NO: 239852 - protein, 86 aa, Glycine max
  unsure (1)..(86): unsure at all Xaa locations
  Clone ID: PAT_MRT3847_58611C.1.pep
GFNPNSKGIIPHAKGGFSQQKAKVGAHFPFXKLGFFVVARDSPSKKLVFKRAVPLKGRKTKGGKKGPPNLFKSTKVGQAGLREKLV

SEQ ID NO: 239853 - protein, 596 aa, Glycine max
  Clone ID: PAT_MRT3847_58612C.1.pep
MGTVTYSYKMFKYFNRKFAVSKRAPPPDVKEAFSAFSDAAAASMSADQLLRFLHDHQRETDCSAEDSNRILDSIIQSRKQNDTNAECDHHTDNNNNGLSLDEFFRFLFLVDFNDRLKSQVHHDMNAPLSHYFIYTGHNSYLTGNQLSSDCSDVPIIKALQRGVRVIELDLWPNSTKDDIDVVHGRTLTAPVSLIQCLKSIKEYAFAKSDYPVIITLEDHLTPFLQAKVAEMIAQVFGDMLYFPQADSLTEFPTPESLKGRILISTKPPKEYLESKQFKDSDSERESTEEGSLSPCVIPELEAVDEKLNGSDLDEEGLNARDKKSDQQSAPEYKRLITIHAGKPKGHVKHHLNNVGGVKRLSLSEQELEKASATYGSDIVRFTQKNIIRVYPKGTRVTSSNYRPHIGWMYGAQMVAFNMQGHGKSLWYMQGMFRANGGCGYVKKPAFLIEKGPHNEVFDPKRALPVKKTLKVKVYMGNGWSSDFSKTHFDSFSPPDFYTKVCIVGVPADKANKKTKVIQDNWFPVWDEEFEFPLTVPELALLRIEVREYDKHEKDDFGGQTCLPISELRSGFRAVPLFDQKGEQLKSVKLLMRFQFK

SEQ ID NO: 239854 - protein, 58 aa, Glycine max
  Clone ID: PAT_MRT3847_58613C.1.pep
LCWFCCNSFSCKKKSRETCVKTLCLKKHHWVCSDLDHCYCGNSGKLGIYIVVFHIFVQ

SEQ ID NO: 239855 - protein, 62 aa, Glycine max
  unsure (1)..(62): unsure at all Xaa locations
  Clone ID: PAT_MRT3847_58614C.1.pep
LGPLYXIDLRFSQLFHLLPFILTVRPIHKFLLQLINTMQSLINCNIIHLLKILLHIATLSFT

SEQ ID NO: 239856 - protein, 90 aa, Glycine max
  Clone ID: PAT_MRT3847_58615C.1.pep
DTPLYIPTTNNIYVLMTSHSFNMNFTLELEFGLITLCVHLTTTSVLADSPFCFSAFNYCESIPFLYVIIFVYSISFLLLLLFILIFYGHF

SEQ ID NO: 239857 - protein, 204 aa, Glycine max
  Clone ID: PAT_MRT3847_58616C.1.pep
FGLAVWGPTTSSFLTQDVVGTFGYLAPEYFMYGKVSDKIDVYAFGVVLLELISGREPINSAACKGQESLVVWAKPIIESGNVKGLLDPNLEGKFDEAQLQRMVLAASLCITRAARLRPKLSQILKILKGEEKVEYFLNSQGDNDQEDSENQENIDDEVYPNSSAELHLSLALLGVDDDSTSHSSTDHSYSEDLKEQWSRSSSFN

SEQ ID NO: 239858 - protein, 127 aa, Glycine max
  unsure (1)..(127): unsure at all Xaa locations
  Clone ID: PAT_MRT3847_58617C.1.pep
SFFMPLDEKILPSVEQDMEEECQDCVDKEDLLQQGSLRAALNGVQGSDYMERIPFATSEGFPHELSRKTVEKRKRRFVSLHGQEMTSIPGTTVEEAYNKLIDELEKSDPTLIVIEXPKDEKLSLSQW

SEQ ID NO: 239859 - protein, 81 aa, Glycine max
  Clone ID: PAT_MRT3847_58618C.1.pep
YESSLVGEIPEAIGHMVALDELDLSKNDLSGQIPNDLFMLKNLSILYLYRNSLSGEIPGVVDAFHLTELSLSQSRLSGPIP

SEQ ID NO: 239860 - protein, 103 aa, Glycine max
  Clone ID: PAT_MRT3847_58619C.1.pep
PRVRSFNILLSQGFEPQLSDFGLAVWGPTTSSFLTQDVVGTFGYLAPEYFMYGKVSDKIDVYAFGVVLLELISGREPINSAACKGQESLVVWVRRSPIYKNEF

SEQ ID NO: 239861 - protein, 84 aa, Glycine max
  Clone ID: PAT_MRT3847_5861C.1.pep
TFQPQSQWRVVVVWFSKACINWYRSLPHVSQLQTSVAGGDAWATDHMMEHYDPIARYIGLESCIKSMGFDVGSLYGLGISSHNG

SEQ ID NO: 239862 - protein, 96 aa, Glycine max
  Clone ID: PAT_MRT3847_58620C.1.pep
CLVERGVRRRTSTSSDPQDPKQDLGIEEVTRKVKQVVSKRVFRGLGVCRCSKALLGTCHTIEGIVSNRKETEGSLPSRRKNSSQRLALLLPCNNQF

SEQ ID NO: 239863 - protein, 140 aa, Glycine max
  Clone ID: PAT_MRT3847_58621C.1.pep
YLSSEFGSSINASAWRLSTPKTNVVFIDTNVNTRLGLVGSDLYTVSNLKKSILSEHPLCFPKIGKIQIHGIKVERKGYFYHLTDSMPVRSAFSGVNESWFLTVDVSVLRECAQNDQLFSLGIANNALTVGSPSKRGCTFD

SEQ ID NO: 239864 - protein, 114 aa, Glycine max
  unsure (1)..(114): unsure at all Xaa locations
  Clone ID: PAT_MRT3847_58622C.1.pep
XIXLXPXXTHXXXXPXXRGXXXXLXRXXXHXXHXXXXTXXWXXIXXXXRAXXXXXXXXVXWXXXXXXXPXSXHSXXADHXXHSXXQXXXAGGXXXXXXXXXSXVXXXADAWXET

SEQ ID NO: 239865 - protein, 41 aa, Glycine max
  Clone ID: PAT_MRT3847_58623C.1.pep
ILCHLYDVNHHHKCGIDSFSLIPKVLKQVHDHDFATTTNVS

SEQ ID NO: 239866 - protein, 60 aa, Glycine max
  unsure (1)..(60): unsure at all Xaa locations
  Clone ID: PAT_MRT3847_58624C.1.pep
SXXXDRETVKAKLDASTIXLHSNXNLXSAINQNDMNTXTKYXKXTLNSXINLTFHRQIXN

SEQ ID NO: 239867 - protein, 138 aa, Glycine max
  Clone ID: PAT_MRT3847_58625C.1.pep
NGKRRFVSGDGEEMTLIPGSSVEEAYNKVIVELEKSVPTLVGIECAMDEKLPGRKIFDKPNTRCYTIVPMEVNIEVQQKFLNNVWFIMKKRDKLRCQVGINPYFMEWSVLGNRLLSKGNDILCCDYASSDGLITKQVM

SEQ ID NO: 239868 - protein, 209 aa, Glycine max
  unsure (1)..(209): unsure at all Xaa locations
  Clone ID: PAT_MRT3847_58626C.1.pep
STGVEVESEPEPSTPPRKSSRISVPPDKYSPSLHYLLLIDAGEPECFSEATQGNDSIEWELAMKDEMTSLQKNKTWSLXGKKALQNKWVDRLKEEFDGRRRYKTRLVVKGFQQKQGIDFTEIFCPVVKITTIRVILSIVAAENLHLEQLDVKTTFLHGDLEEDIYMTQPEGFEVPDKENFVCKLHKSLYGLKQGPRQWYKEFNEFMSNS

SEQ ID NO: 239869 - protein, 53 aa, Glycine max
  Clone ID: PAT_MRT3847_58627C.1.pep
FEAKGGETMDYSSDTTIWYRTSGEDFAISLLPFTLVESLSTIADHGGRICKTL

SEQ ID NO: 239870 - protein, 57 aa, Glycine max
  Clone ID: PAT_MRT3847_58628C.1.pep
TKKHTHQCLRAPHPTFSYLNRMENWYQDLFCKIGLNRGRVSINHSTGSIRSLLQRRP

SEQ ID NO: 239871 - protein, 66 aa, Glycine max
  Clone ID: PAT_MRT3847_58629C.1.pep
RNTILKLLLLCPKPSIDPIYLFIFRINFFFFLKPKLTSSTKYKLNNLFIMQNIAKTRTFTNVGTFT

SEQ ID NO: 239872 - protein, 86 aa, Glycine max
  Clone ID: PAT_MRT3847_5862C.1.pep
AHSLTPPLSLLHILKELSLTMSRFVSLTVSHAVSLTLSLSLALILSRSSLNMIPVIFNMQIFCIHSVLRFVVSMSCIVMRYQRKIQ

SEQ ID NO: 239873 - protein, 59 aa, Glycine max
  Clone ID: PAT_MRT3847_58630C.1.pep
IKKGGFGSLHFINPPLPFPFPLNKEINIIKMTQKNKHRLTRYLFMKVINPPLPHQKPPH

SEQ ID NO: 239874 - protein, 57 aa, Glycine max
  Clone ID: PAT_MRT3847_58631C.1.pep
TKIFLSSVLLSQTFTYNLLPNYHIILNALLYYILLTHLIITYNYSISLYTKIDYTPY

SEQ ID NO: 239875 - protein, 81 aa, Glycine max
  Clone ID: PAT_MRT3847_58632C.1.pep
RQLVACYLSLHLAKRGSQSFQLIWGYTGFSRNYVVKCGHLIVFSSTTIKLSPSHVRVSNSGSSKTGTPLFNFFFFLFFFFF

SEQ ID NO: 239876 - protein, 78 aa, Glycine max
  Clone ID: PAT_MRT3847_58633C.1.pep
ICHAVLYQIGECSANNLRMEKTIILQVCGQHIESIFFPLSHRTQQSRNKLRDSWNQVPNAYVPGYKVRHPMLSVHQNN

SEQ ID NO: 239877 - protein, 63 aa, Glycine max
  Clone ID: PAT_MRT3847_58634C.1.pep
EMNLMPSLFRPFPRSHFCQDMPAREGSLLGLPKLWLKPIEKPAFYIHQRNAIRIYKCLFFSTC

SEQ ID NO: 239878 - protein, 155 aa, Glycine max
  unsure (1)..(155): unsure at all Xaa locations
  Clone ID: PAT_MRT3847_58635C.1.pep
LRKVADCDTREFTDQKREEMLVSDFVARXFCVMMEYPEYVAYVTPMFSSDDWLNXYLDNFRDSSDAHQPNEEICCSDYQFVFMGVKGVIIGFINSSSRAMHIRLFCTSLYREMKNPPVTSFFQLFWQDLGLLFMLMFLGPIASKQMSVERIDGFF

SEQ ID NO: 239879 - protein, 61 aa, Glycine max
  Clone ID: PAT_MRT3847_58636C.1.pep
PHHQMGWLQSLLSPLKKLWFQMHSTHKKRRGIYILYEDVKSCPYEDVHVLWSVLVESHSSS

SEQ ID NO: 239880 - protein, 51 aa, Glycine max
  Clone ID: PAT_MRT3847_58637C.1.pep
HSPLPCIPLPIIINSLFSEIQNTHTFFYCVFRKGMGLGLGSLMAKCSSHPV

SEQ ID NO: 239881 - protein, 306 aa, Glycine max
  Clone ID: PAT_MRT3847_58638C.1.pep
MQIFVKTLTGKTITLEVESSDTIDNVKAKIQDKEGIPPDQQRLIFAGKQLEDGRTLADYNIQKESTLHLVLRLRGGMQIFVKTLTGKTITLEVESSDTIDNVKAKIQDKEGIPPDQQRLIFAGKQLEDGRTLADYNIQKESTLHLVLRLRGGMQIFVKTLTGKTITLEVESSDTIDNVKAKIQDKEGIPPDQQRLIFAGKQLEDGRTLADYNIQKESTLHLVLRLRGGMQIFVKTLTGKTITLEVESSDTIDNVKAKIQDKEGIPPDQQRLIFAGKQLEDGRTLADYNIQKESTLHLVLRLRGGDF

SEQ ID NO: 239882 - protein, 98 aa, Glycine max
  unsure (1)..(98): unsure at all Xaa locations
  Clone ID: PAT_MRT3847_58639C.1.pep
LNGLGTSWFISTRCVFKKKFENFNVKRGPLFFVGKEKSKPGTCRYGEKSPFLGSNGAETVIWFVFPLGNRRPFLVNPGKKVSNLPPAGYFXLQGKGHG

SEQ ID NO: 239883 - protein, 115 aa, Glycine max
  Clone ID: PAT_MRT3847_5863C.1.pep
MERSGDVALFCLALFFLWTSVAALLSPKGVNYEVQALMSIKNSLVDPHSVLNNWDTDAVDPCNWAMVTCSSDHFVIALGIPSQSISGTLSPSIGNLTNLQTVLLQDNNITGPIPF

SEQ ID NO: 239884 - protein, 43 aa, Glycine max
  Clone ID: PAT_MRT3847_58640C.1.pep
RSPGLTCCWLAVQEWQPVRKMSAESHPTSQMPTFTHPPPFLYP

SEQ ID NO: 239885 - protein, 409 aa, Glycine max
  unsure (1)..(409): unsure at all Xaa locations
  Clone ID: PAT_MRT3847_58641C.1.pep
MSPCIKKNTRSTEIEFVDQLEAGGEELAHADLVSPMDNTTLQLHADQKGSSSTNKRYINININMPLLVINYACLFVGSLSSSLLSKYYFTHKGSSRWVSTWVQTAGFPLLLIPICVPYLFKFTKRVPFNDFTPRMLIISISIGVMLGFNNLFFSWGNSYLPVSTSALLLSSQLLFNLLFSVIIVKQKITFSNVNCVILLTLSSILIALDSSHERPKGLTQKNYFIGFFCTIGAGLMFALYLPLMEKIYKKVNCYQMVMEMQXIMEGAATALAIVGMTWDGGFSEMKVESQMVFDKGSRVYWVTVMGNVVTWQLCFMGTAGMVFLTSSLTGGICMTFLLSMNVLGGVVFFRDAFGGVKAVSTFLCILGFCSYVYGIYKDNQMGEHKLASTRNKTISSNASSTEMIHIVNY

SEQ ID NO: 239886 - protein, 254 aa, Glycine max
  Clone ID: PAT_MRT3847_58642C.1.pep
QGEAQFQQEVNILGCIRHPNMVLLIGACAEHGILVYEYMAKGSLEDCMFGKKKEKEGKMRSWKVRFGIAAEIATGLLFLHQTKPEPLVHRDLKPGNILLDQNYVSKISDVGLAKLVPAATAGNGTQCCMTAAAGTFCYIDPEYQQTGMLGVKSDVYSLGIILLQLLTGRPAMGLAHQVEESIKKDRFGEMLDPSVPDWPLEQALCLANLALQCAQLRRKDRPDLATLVLPRLQILRDFASLHSSTSSDQGPNDH

SEQ ID NO: 239887 - protein, 76 aa, Glycine max
  unsure (1)..(76): unsure at all Xaa locations
  Clone ID: PAT_MRT3847_58643C.1.pep
MTDPDNYVSGDSIRQRFLNYYAFRGHKVLSMASLVPYDPSVLLTIAGMLXFNLYLLGQIIRQVPCAGTAQRCIRTN

SEQ ID NO: 239888 - protein, 101 aa, Glycine max
  unsure (1)..(101): unsure at all Xaa locations
  Clone ID: PAT_MRT3847_58644C.1.pep
LXGGIXXVXFHQTKQPMXXHXGISVIQRPQSYQEPMHDPLWGXXKSXXACXDIVSSNNDXXGNHNRRVGQGLPRDFYDGKSYLADRVSQQLLNDHVRKFHS

SEQ ID NO: 239889 - protein, 345 aa, Glycine max
  Clone ID: PAT_MRT3847_58645C.1.pep
MEESFVFQWSVIRSLLSILQWWAFNVTVIIVNKWIFQKLDFKFPLSVSCVHFICSSIGAYVVIKLLKLKPLITVDPEDRWRRIFPMSFVFCINIVLGNVSLRYIPVSFMQTIKSFTPATTVVLQWLVWRKYFDWRIWASLIPIVGGILLTSVTELSFNMFGFCAALFGCLATSTKTILAESLLHGYKFDSINTVYYMAPFATMILALPAMLLEGNGILEWLNTHPYPWSALIIIFSSGVLAFCLNFSIFYVIHSTTAVTFNVAGNLKVAVAVLVSWLIFRNPISYLNSVGCTVTLVGCTFYGYVRHKLSQQPQVPGTPRTPRTPRTPRSKMELLPLVNDKLEDKV

SEQ ID NO: 239890 - protein, 107 aa, Glycine max
  Clone ID: PAT_MRT3847_58646C.1.pep
GGKEPGPLGILIFTRPLDFGNSSLKLKSPAPLFQRKFFFGGGKPGNIFFYGDWKKLFFQTKKNIFFSGIFFPNANKFMGFWGEHFTLGPSFFVKFFPRFFFKKKNPK

SEQ ID NO: 239891 - protein, 116 aa, Glycine max
  unsure (1)..(116): unsure at all Xaa locations
  Clone ID: PAT_MRT3847_58647C.1.pep
QHTKHXXYTTXPHTQHNQKHTHTTHTQTKIXKPTLXTXXTHXHHXTHHTXTXTXTHHXTTHTTHTTHIPXHXTPTSXXHXTXHXXQXRAXXTHTAXHTTXXHTTRTSPHITPPQPH

SEQ ID NO: 239892 - protein, 182 aa, Glycine max
  Clone ID: PAT_MRT3847_58648C.1.pep
RAVKNYDPQRDKRFSGTVKLPRVPRPNMSICILGDQHDIDRAKHGGVDAMSADDLKKLNKNKKLIKKLARKYDAFIASDTLIKQIPRLLGPGLSKAGKFPTPVSHAENLSDKITEVKSTIKFQLKKVLCMGVAVGNVEMTEDELIGNIMLAINYLVSLLKKGWQNVGSLTIKATMSPPKRLY

SEQ ID NO: 239893 - protein, 210 aa, Glycine max
  unsure (1)..(210): unsure at all Xaa locations
  Clone ID: PAT_MRT3847_58649C.1.pep
MGMKGAPATLSDDDVVLKSPNDRRLYRLIHLPNGLRALLVHDPEIYPEGPPKHVSNEDEVEEEDDDDEEEDEDEEEEEEDEDDDDDDEEEEEGNEMDGVKGGAAAAQSKKAAAAMCVGMGSFSDPYEAQGLAHFLEHMLFMGSDEFPDENEYDSYFVKHVGSSNAYTETEYTCYHXEVKREVLXGALKRFSQFFISPLVKMEAMEREDLQ

SEQ ID NO: 239894 - protein, 72 aa, Glycine max
  unsure (1)..(72): unsure at all Xaa locations
  Clone ID: PAT_MRT3847_5864C.1.pep
ERSIKIANKEKNKRKMVRGKSLKVMDVGYKDVDGVKALHIKGDGHAGEGLEEDXNLEEKGREIKRKXGLYWN

SEQ ID NO: 239895 - protein, 38 aa, Glycine max
  Clone ID: PAT_MRT3847_58650C.1.pep
GTVFSNVGIFCGASWFILVVSSLFLCRAICRIHVVCFA

SEQ ID NO: 239896 - protein, 104 aa, Glycine max
  unsure (1)..(104): unsure at all Xaa locations
  Clone ID: PAT_MRT3847_58651C.1.pep
DPAFANLLPLHDIFNAHIKPTYSIISSNTSLTFFENHLLPLVKSYLPYVFNLTPDSDIXTLRHHDFYVKLTFNMTSHPKINPNTSYCFPLLYCPVLPFLIYFRF

SEQ ID NO: 239897 - protein, 61 aa, Glycine max
  Clone ID: PAT_MRT3847_58652C.1.pep
KAPSVDCKYGTPSFMLASPVEQAATTSIAGDLGLDIVQLSCRSCVALFPRLEYPAGMIWYK

SEQ ID NO: 239898 - protein, 120 aa, Glycine max
  unsure (1)..(120): unsure at all Xaa locations
  Clone ID: PAT_MRT3847_58653C.1.pep
MVPLQLPKLLAYSYLKCGMGQAXLTPNEVNXISMANSRQNLTKILLAGSIITKPTKIHCSSHALGLKDGQRMGRHFSYGKRXVPMEARLPTKILDMRKMHELMRLLCMIKESKMIGQDMF

SEQ ID NO: 239899 - protein, 253 aa, Glycine max
  unsure (1)..(253): unsure at all Xaa locations
  Clone ID: PAT_MRT3847_58654C.1.pep
MKSLTTLWPMDILKTSSFVRITALSLFSLTLFLFLFTRFSPTSYSSLTFFSSTPEPPSREQAPPPQPNSPPPPPPPPPPSPPPPGVKIFRVPPLPPVERMGVLDGNGVMTEDFKVGELDPGFEEDSLNDTFSSVSSGGGVREKVEKYKTCSRKGSSYVPCLDNVKTMKKYMESLRGEKYERHCKGMGLSVCAVPEAHQQRRFXNVPHTLVEDKGXNWISIKKDKFXFPELFIGADKYLDLSAYLYNVMRLNLM

SEQ ID NO: 239900 - protein, 120 aa, Glycine max
  Clone ID: PAT_MRT3847_58655C.1.pep
GPKKEQNPITPNPSYNSKPSLNCTTPSSQICNTPFESFLISHPPLAPCHQTSLTNLACGGGGHVVDGVFWCGYNGILLIFPCSFSFKAMLKRSFLRAVSLGKGNFNPLAFFNSSTSLHTL

SEQ ID NO: 239901 - protein, 40 aa, Glycine max
  Clone ID: PAT_MRT3847_58656C.1.pep
VRMVLLIACILPALVACIVRHYDFMWCLNKPIYCVQSHLL

SEQ ID NO: 239902 - protein, 281 aa, Glycine max
  Clone ID: PAT_MRT3847_58657C.1.pep
EKSGGITCPGGAFSNQLAMLTARNYMFPEIKTKGYCNFGKKLIVFTSSGGHYSIEKTGMALGLGIDNIVKVPCDDQGRMRTDELERLIIQSLERKEAPFFINATAGTTVLGAFDPLKEIGKIAKQYKLWFHVDGSWGGSLLFSDEHRHLIEGSSLADTFVLNPHKLLGTPLQCSFLLASDRQIFRQSNSLGAQYLFHDDSKYDLGDGTLGCGRRPDAVKLFIGWKIYGIIGYKQRIEHAFKMAKYLTNLVKKNSRFRMVLESPPNLQICFWYVPKRMIILD

SEQ ID NO: 239903 - protein, 39 aa, Glycine max
  unsure (1)..(39): unsure at all Xaa locations
  Clone ID: PAT_MRT3847_58658C.1.pep
PLXTEEGGTLNSQLSTLIGPNQECLSNIKFNTKHTGLRF

SEQ ID NO: 239904 - protein, 107 aa, Glycine max
  unsure (1)..(107): unsure at all Xaa locations
  Clone ID: PAT_MRT3847_58659C.1.pep
LTFSPTXPPTRARTRGERXXAXPPXGAXXAXDKXEGXXXXPXXXXNQRGXHDXXKXXKXAXXDXNNXNXXEXXXGXPPXXXXEKXXEXXDXXXKAEXHAAPXEXKRA

SEQ ID NO: 239905 - protein, 258 aa, Glycine max
  Clone ID: PAT_MRT3847_5865C.1.pep
MAEEKESTSIPLSQGENASRDDPEDPAKSPPSSPNSSTRKACCFVLQSWVSKKFMTGCVVLFPVAVTFFITWWFIQFVDGFFSPIYSRLGIDVFGLGFITSLAFVFLIGVFVSSWMGATVFWIGEWFIKRMPLVRHIYSASKQISAAISPDQNTTAFKEVAIIRHPRVGEYAFGFITSTVILQKDNEDEELCSVFVPTNHLYIGDIFLVNSKDIIRPNLSIREGIEIIVSGGMTMPQLISPVERDTRPNERVSLNRIG

SEQ ID NO: 239906 - protein, 93 aa, Glycine max
  Clone ID: PAT_MRT3847_58660C.1.pep
KDPKGFIPGGFLNWAIVFFGQDFGFFPLGGGGKLGPGKKRAFAAWGFKPGNFFYSFGGELPQGMKKGALFFEGLPGVPQHKKNPLGVGAKGFL

SEQ ID NO: 239907 - protein, 66 aa, Glycine max
  Clone ID: PAT_MRT3847_58661C.1.pep
DPTLHTHSYNLLSLLLTHLISKYFPSFYNHITIKTLSLPNLITFQHIPLFPTLLIPKKPIPISLSN

SEQ ID NO: 239908 - protein, 52 aa, Glycine max
  unsure (1)..(52): unsure at all Xaa locations
  Clone ID: PAT_MRT3847_58662C.1.pep
XAPXXXCQXRTCLCFGRMTRCLXXDDSTTALSPFVSIXSLLSXLEXYXXGMS

SEQ ID NO: 239909 - protein, 53 aa, Glycine max
  Clone ID: PAT_MRT3847_58663C.1.pep
LKYLQHASRVSLRVRNIFYRNNNMILLISTGQLRTRVCIIVESLINNLVKKPN

SEQ ID NO: 239910 - protein, 42 aa, Glycine max
  Clone ID: PAT_MRT3847_58664C.1.pep
MARAKQTARQSTAGKSANPQLATKAARKSTPTTDKVKKPHLY

SEQ ID NO: 239911 - protein, 258 aa, Glycine max
  unsure (1)..(258): unsure at all Xaa locations
  Clone ID: PAT_MRT3847_58665C.1.pep
MIQRVLLLYLANDILQNCKRKGNEFVTEFWKVLPAALKDVIKKGDDHGKRVARNLKDLMLGEDAPPPLEFGKKRSRSVRIAKRDSHSIKSVCYGSFISHFLDIVLMPETVHRSEQSAEDAEMSKCKSSVQRVRKLEKDVDTACSVEKXLAKELEEEENVLKQCIEXLKLVEASRVALVSQLKEALHEQESELENVRTQMQVAQAQVEEACNMRKILDNEDSSQKTSTGKSAAVIAAEVADKLACSCAKRLVIVKTIQN

SEQ ID NO: 239912 - protein, 113 aa, Glycine max
  Clone ID: PAT_MRT3847_58666C.1.pep
MTETMAMQGCYCHVYTKLATQRRTLDNLSFSGSISVKKLSKNERTTGNNQFHRLLVKMRQTEMPAASEYGTNELVKRKTMLEKTVNNGSATSKVVRKNGIPALSKTMKSRSSL

SEQ ID NO: 239913 - protein, 308 aa, Glycine max
  Clone ID: PAT_MRT3847_58667C.1.pep
MASLNFGSILVLRVNGRPITPFNRKLTHRDGGTATLSHWCIFHRSKEELVVATWKKQFDKSEMIQRVLLLYLANDILQNCKRKGNEFVTEFWKVLPAALKDVIKKGDDHGKRVVSTLIEIWEQRRVFGSQARNLKDLMLGEDAPPPLEFGKKRSRSVRIAKRDSHSIKSKLSIGGTAEKIVSAFHLVLSEQSAEDAEMSKCKSSVQRVRKLEKDVDTACSVASRVALVSQLKEALHEQESELENVRTQMQVAQAQVEEACNMRKILDNEDSSQKTSTGKSAAVIAAEVADKLACSCAKRLVIVKTIQN

SEQ ID NO: 239914 - protein, 97 aa, Glycine max
  Clone ID: PAT_MRT3847_58668C.1.pep
THGGYGAVTTMDSQPSLNGGSALFMCPCGTATTVDPPEKHKVDCPARMLTLIRQNKELELCVRDEGNTQVPGPIPTYYALETQANAPAQSRVGGVAP

SEQ ID NO: 239915 - protein, 64 aa, Glycine max
  Clone ID: PAT_MRT3847_58669C.1.pep
RALAVYGTPAFPKIIKNCMAQDFSWKGPPKKWEEVLLSLGVPASDPGSDGEKISPPAKENLAPP

SEQ ID NO: 239916 - protein, 258 aa, Glycine max
  Clone ID: PAT_MRT3847_5866C.1.pep
MAEEKESTSIPLSQGDNASRDDPEDPAKSPLSSPNSSTRRACCFVLQSWVSKKFMTGCVVLFPVAVTFFITWWFIQFVDGFFSPIYSRLGIDVFGLGFVTSLAFVFLIGVFVSSWMGATVFWIGEWFIKRMPLVRHIYSASKQISAAISPDQNTTAFKEVAIIRHPRVGEYAFGFITSTVTLQKDNEDEELCSVFVPTNHLYIGDIFLVNSKDIIRPNLSIREGIEIIVSGGMTMPQLISPVERATRPNERISLNRIG

SEQ ID NO: 239917 - protein, 60 aa, Glycine max
  Clone ID: PAT_MRT3847_58670C.1.pep
KEYYTIHTNYFIKIFFFKKIISVNSIILEERINEKLYSNIEVKNGKIIINYKIISYFKYK

SEQ ID NO: 239918 - protein, 106 aa, Glycine max
  unsure (1)..(106): unsure at all Xaa locations
  Clone ID: PAT_MRT3847_58671C.1.pep
PNQLPGPTPPKPPPQTPKRNPQXKNQPENPPTXXQKNXKPQKTTLTTYKINGQNNKPPAPTALKEPPKGWPQRPRSWGNGRKGRPLRAPLAKHAQGGKKGNPPQSG

SEQ ID NO: 239919 - protein, 155 aa, Glycine max
  Clone ID: PAT_MRT3847_58672C.1.pep
KLNGKLNLMDTKNTKDYAVLFPLALRVLEAQMPLESGPRTDGELCPHSIMLRRPFYSAHPSCGFPRGRRVCSFLCTCRLSTQTRSFPMPLGLGRPLCPLPWPLPPAGPPLLLPLPAPAPRLCRSSPQLGPPRFRWLLLVKVTILSPSFVCFLKQA

SEQ ID NO: 239920 - protein, 125 aa, Glycine max
  Clone ID: PAT_MRT3847_58673C.1.pep
GCVKCYCDATQNWKFTCEPSKLRPTNWSTCPSMKCDSSISSHMYIGDPTYSRSPHLAICAYAGYGTPTIFTTLTTVYNPPGKRHAPPPKNKWWAWPNVKTGGFVGLKIGHLCCLLWKKSQIKAGR

SEQ ID NO: 239921 - protein, 64 aa, Glycine max
  Clone ID: PAT_MRT3847_58674C.1.pep
ILRKCNGNDSQLSSGENCHVIVTRALNFLHKMGEHCETIYRNNQLPLKASPAIIQFMAFVTTKF

SEQ ID NO: 239922 - protein, 145 aa, Glycine max
  unsure (1)..(145): unsure at all Xaa locations
  Clone ID: PAT_MRT3847_58675C.1.pep
MSNRQRLGPAGLALHYANIVLQIDTLVARSSIPANTKDALYQSLPPNIKLALHSKLPSLRVVEELTIADITDEMEKTLHWLSPMATNTSKAHHGFGWXGEWANTGSEVRKTGVMRIETFHHADKDQVEYYILELLLWLHRLAIRS

SEQ ID NO: 239923 - protein, 82 aa, Glycine max
  unsure (1)..(82): unsure at all Xaa locations
  Clone ID: PAT_MRT3847_58676C.1.pep
MXXVLNPKXGQXXHEYPXXXDQGSLVFXLPLEIISSSGLXRASLTPTXXTWXHPYWGARNNNLSWHHPSKCAGSLVLIGENS

SEQ ID NO: 239924 - protein, 43 aa, Glycine max
  Clone ID: PAT_MRT3847_58677C.1.pep
ISLKESARIIDEHEMQRSERGDHTQRDITVPVFLISPPAFSAA

SEQ ID NO: 239925 - protein, 49 aa, Glycine max
  unsure (1)..(49): unsure at all Xaa locations
  Clone ID: PAT_MRT3847_58678C.1.pep
KRTQSVSFSCIYHSPVHDHPRWPGGPSXAAHTFLPLTGLARFSGTWPRT

SEQ ID NO: 239926 - protein, 45 aa, Glycine max
  Clone ID: PAT_MRT3847_58679C.1.pep
QRILPAARWELRFKASRRANPPHEGHQRHVPLRGAESPLTCSVRA

SEQ ID NO: 239927 - protein, 37 aa, Glycine max
  Clone ID: PAT_MRT3847_5867C.1.pep
LCYSIFKTSLNIRTCNGDRASTDIALYPYAELDVCRW

SEQ ID NO: 239928 - protein, 61 aa, Glycine max
  Clone ID: PAT_MRT3847_58680C.1.pep
FFFFYIFLFFWFFFFFFYFFFFRGGAEVFFIFTRFPNITFVVTTLPNPVPPQKEKKKNPPF

SEQ ID NO: 239929 - protein, 68 aa, Glycine max
  Clone ID: PAT_MRT3847_58681C.1.pep
SVLVLFNFFGNNHIFLSQNRTSQWTIVKFDYDIIRSHKSLSYLGLLSLLQHFYKGGPLPYQHLLPINP

SEQ ID NO: 239930 - protein, 31 aa, Glycine max
  Clone ID: PAT_MRT3847_58682C.1.pep
RTVCMEQLAAEEGLCELARKAFGAWDICRRS

SEQ ID NO: 239931 - protein, 138 aa, Glycine max
  unsure (1)..(138): unsure at all Xaa locations
  Clone ID: PAT_MRT3847_58683C.1.pep
LDKLLDSARTLRRGDLDYIDKNLPLVGGIVHRVRAGEXWHKLXQRYLHHLXDIYDILELXTADYFVCLCGLFXHSSYYNSYANLAIFDRSSXREVVRALAGDASDSLMHYVMIITMHAVIHNDLIFHYSDEELAHHLA

SEQ ID NO: 239932 - protein, 482 aa, Glycine max
  Clone ID: PAT_MRT3847_58684C.1.pep
MEQLYYLTLVLLFVSFVSVSFFIIFYRHRSPFSVPNLPPGKAGFPVIGESLEFLSAGRKGLPEKFFSDRMTEYSSKVFKTSILGEPTVIFCGAACNKFLFSNENKHVISWWPENVKKLFPTNIQTNSKEEAKKLRNILPQFLSAKAIQRYVGIMDTVAQRHFALEWENNTQVTVLPLAKRYTFGVASRVFMSIDDLNQVAKLAEPLNQVNAGIISMPINFPGTVFNRGIKASKFIMRELLRIVRGKKVELANGMSTPTQDILSHMLIYCDENGQYLAEHDIVNKILGLLIGSHETTSTVCTFVVKYLAELPQNIYENVYQEQMAIAKSKAPGELLNWDDIQKMKYSWNVACEVIRLNPPAQGAFREAINDFIFDGFSIPKGWKLYWSANSTHKNPEYFPEPEKFDPSRFEGTGPAPYTYVPFGGGPSMCPGKEYARMELLVFMHNLVKRFKCETLFPNGNVTYNPTPIPAKGLPVRLIPHRS

SEQ ID NO: 239933 - protein, 148 aa, Glycine max
  Clone ID: PAT_MRT3847_58685C.1.pep
FIREDTHRGFTFYLYKALNDRGIYTFFYDQELPRETEVTPGLYKAILASRVAIIVLSENYAFSSFCLDELVTILHCEREVIPVFHNVDPSDVRHQKGSYGEAMAKHQKRFKAKKLQKWRMALKQVAKLCGYHFKDGSLGCLVLLLYTL

SEQ ID NO: 239934 - protein, 216 aa, Glycine max
  Clone ID: PAT_MRT3847_58686C.1.pep
GEDEDLSWDVEDDENDDGGIRCDAKPVIMNKEVGGENVDNTHLHVDGNEEGTKRLDVEEESKEQKKDNLLESEEVGNKVDKSVEESQVEKSESVGDRGGVDEASKSKADDGVSKNDSTSESDEKVVKDREVGDEKTSGKGNESFTVEIQQSANKEEEDLGWDDIEDLSSIDEKKTMQSGGTSKVDLRKRLSAAEEDEDLSWDIEDDDDEPAKASSV

SEQ ID NO: 239935 - protein, 76 aa, Glycine max
  Clone ID: PAT_MRT3847_58687C.1.pep
GKNNGNFPFLEVYLKRIPPNGPFEGGPCVLEPFLGANILRGENSFFFPPKKYLIPIWEPIGIWGNGKRIMGNLERI

SEQ ID NO: 239936 - protein, 91 aa, Glycine max
  Clone ID: PAT_MRT3847_58688C.1.pep
IITKNLFKLGLQVSLGLQQQLVVLVVPLPLCLHLSPLGPSIIINGSYTNDQPCLYDVLGLFKFASGHGPFKCFMVLALGYVLIKRHVGYHC

SEQ ID NO: 239937 - protein, 113 aa, Glycine max
  Clone ID: PAT_MRT3847_58689C.1.pep
IITKNLFNLGLQVSLGLQQQLVVLVVPLPLGLQSSSMAAIQMTSLVSMTCWACLSLPLVMGPSSASWSLPLVMSSSDIETLVIENEISEKNQIKIIFNSDVRLSPVIYRDARN

SEQ ID NO: 239938 - protein, 238 aa, Glycine max
  unsure (1)..(238): unsure at all Xaa locations
  Clone ID: PAT_MRT3847_5868C.1.pep
MGCFTVLKSKKKRSDPITYVKRVSHNENVPTVLPEPQTHTRSLQSAPPSFRTRVKPIQPINKVSNNRARTLSAPSTLDAAEQDALASIEYEEQEESRHRAGSMKEHRSSSPQPLPLPSPQGGCALKAIGSFKSVTSGGSSYYASGPLPLPPTGSLRNFLYEEIAAACHHFSSDRCMSECLSSTIYKASFGDDVSSSKKFEATVTRLHPSSQXLEEFINEVNTLASLQHPNLCKLLGIH

SEQ ID NO: 239939 - protein, 69 aa, Glycine max
  Clone ID: PAT_MRT3847_58690C.1.pep
SESMSRTNRGTQCHQANFVDLPIGHRQEVFSRLNISNVYVSSIHKLPCKINVMVNSAIARKYFLCALDL

SEQ ID NO: 239940 - protein, 151 aa, Glycine max
  Clone ID: PAT_MRT3847_58691C.1.pep
ASGLFNRSQLPTSTPDVRVQLGEERPHDIYLNRTHPTAQHAYKNGDTTHSKTHVHSASLFDEGILRDTLAPSLTLHSGLAVIAYGIARYTNRVEVKDWLWPSGQVVNAWWSAGGRRLAACLTLTQAFHRLSWHERVLLTGVTLWCGRLFYR

SEQ ID NO: 239941 - protein, 40 aa, Glycine max
  Clone ID: PAT_MRT3847_58692C.1.pep
YGTPACSRSLYCVRSGDRVSLFLSKCGLRFMGISVVHGVT

SEQ ID NO: 239942 - protein, 89 aa, Glycine max
  Clone ID: PAT_MRT3847_58693C.1.pep
LRIPVGKEKVNAPSRQSLDPRGSRGKGFEAKDASCWFLEIWYFSPLSDCAYSLHYAMGWELAVLMHVCCSISLIVVVKCFLKIGHRLVA

SEQ ID NO: 239943 - protein, 100 aa, Glycine max
  unsure (1)..(100): unsure at all Xaa locations
  Clone ID: PAT_MRT3847_58694C.1.pep
KNIIFDVHGVTSLDGAGAQVLAEIVESYRSRXVRVFFCRVPKESSPVYQLFDKSGIVEMCGGPRHFVQSVEEALRMTELERLTEEFASSAEGSRAASSRA

SEQ ID NO: 239944 - protein, 127 aa, Glycine max
  unsure (1)..(127): unsure at all Xaa locations
  Clone ID: PAT_MRT3847_58695C.1.pep
RAARDGCEKTTEGDERSWENLXDNREFGNRQQDASQGGPTPTLVKAEVPWSARRGSLSEKDRVIKTVKGILNKLTPEKFDILKGQLIDSGITSADILKDVISLIFDKAVLKPTFCPMYAQLCSDLNE

SEQ ID NO: 239945 - protein, 775 aa, Glycine max
  unsure (1)..(775): unsure at all Xaa locations
  Clone ID: PAT_MRT3847_58696C.1.pep
MQQGDPTVLSLRPGGGRGGGSRLFGHSSSSLSADLPLCRPHAYFSLKTRDSRFEGHERVRYSRDQLLQLQEAVEVPDDILKIKQDIEAEIFGENPSWGRAESNLPHQLQNRYSEPDNRDWRGHSGQLPANSDERSWENLRDNREXLVIDSRMLSQXNRHDQLNSQFARTQISSMQGGGPTPTLVKAEVPWSARRGSLSEKDRVIKTVKGILNKLTPEKFDILKGQLIDSGITSADILKDVISLIFDKAVLEPTFCPMYAQLCSDLNEKLPPFPSEDPGGKEITFKRVLLNNCQEAFEGAENLREELKRMTAPEQEMERMDKERLLKLRTLGNIRLIGELLKQKMVPEKIVHHIVQELLGSPDSMFCPVEENVEAICQFFNTIGKQLDESLKSRRINDVYFSRLKELSSNLQLVPRLRFMIRDVIELRASNWVPRREEVKAKTITEIHSEAEKNLGLRPGATASMRNPRGGVQGNASSGGFPIARPGAGGLMPGMPGTRKMPGMPGFDNGNWEMPKTRSMPRGDLPGVQAAGQSNSALLSKSTTLNSKLLPQGSGGIISGRNSALVHGGGTNFGLGPEAAPQLSSPAKTATPVPVSSEKPQHPAARLNTDNLRCRTVSLLEEYFSVQLLEEALQCVEELKSPSYHPEVVKEAISLALDKSPPCVEPVANLIEYLYIKKILTPIDIGTGCLLFGSLLDDIGIDLPKAPSNFGEIIGKLILAGGLDCKLVREILKKVDDGMFQRAIFDSVVGAIRSASGQAVLDAQTSDIEACQSMLK

SEQ ID NO: 239946 - protein, 775 aa, Glycine max
  Clone ID: PAT_MRT3847_58697C.1.pep
MQQGDPTVLSLRPGGGRGGGSRLFAHSSSSSSLSADLPLSRPHASFSLKTGDSRFEGHERVRYTRDQLLQLKEAVEVPDDILKIKQDIEAELFGEDPSWGRAESNLPHQLQNRYSEPDNRDWRGRSGQPPASTDERSWENLRDNREFGNRQQDASQVNRHDQLNSQFARTQISSMQGGGPTPTLVKAEVPWSARRGSLSEKDRVLKTVKGILNKLTPEKFDVLKGQLIDSGITSADILKDVISLIFDKAVLEPTFCPMYAHLCSDLNEKLPPFPSEEPGGKEITFKRVLLNNCQEAFEGAENLREELKRMTVPEREMERTDKGRLLKLRTLGNIRLIGELLKQKMVPEKIVHHIVQELLGSPDSKSCPVEENVEAICQFFNTIGKQLDESPKSRRINDIYFSRLKELSSNLQLVPRLRFMIRDVIELRASNWVPRREEVKAKTITEIHSEAEKNLGLRPGATASMRNSRGGVQGNASSGGFHIARPGAGGLMPGMPGTRKRPGFDNDNWEMPKTRSMPRGDSSGVQAAGCSNSALLSKSTTLNSKLLPQGSGGIISGRNSALVHGGGTFSTSSTNFCLGPEAAPQLSSPAPVPVSSEKPQPPAARLNTDDLCRRTVSLLEEYFSVRLLEEALQCVEELKSPSYHPEVVKEAIYLALDKSPPCVETVANLIEYLYIKKILTPLDIGTGCLLFGSLLDDIGIDLPKAPSNFGEIIGKLILAGGLDFKVVGEILKKVDDDMFRRAIFDSVVGAIRSASEQAILDAQTSDIEVCQSQLK

SEQ ID NO: 239947 - protein, 99 aa, Glycine max
  unsure (1)..(99): unsure at all Xaa locations
  Clone ID: PAT_MRT3847_58698C.1.pep
RLFLKSQRSFCGGLPPIPSGGRIVFKNLGFIRRFFSGQGKIFSPRVNRLPFKQHRFIPIAFKQARVLFLVPFFNNEKPFXKSGSPARTSPFKKKXKIKK

SEQ ID NO: 239948 - protein, 125 aa, Glycine max
  Clone ID: PAT_MRT3847_58699C.1.pep
NVVVACLSSEGILCRHSLAVLSQERVKEVPCKYILDRWRKNIRRKYAYIKTSYGVQHFEPHVQRLELLCNQFTSIAAVAAEFEDTSSFVKDNLCNLKEKLEAWTTLLRNSSQVDVEKCNYMIDWE

SEQ ID NO: 239949 - protein, 62 aa, Glycine max
  Clone ID: PAT_MRT3847_5869C.1.pep
VFFFFFFFFFPVVQIFSNFWGQTPRKSLVVKEKLPNMGYYRLRKKQGQGAELDCTPLIGWIG

SEQ ID NO: 239950 - protein, 160 aa, Glycine max
  Clone ID: PAT_MRT3847_586C.1.pep
MGSAKFALILTIVIISMCSISLAQNSPKDFLDAHNAARAEVGVEPLAWDDTVAAYAQQYADSRIKECQVVHSQGPYGENLVASPGDVSGTDAVKMWVAEKANYDHKANKCVNNQECMHYAQLVWSNTFLVGCARSKCDNGWTFVICSYDPPGNFQGEQPY

SEQ ID NO: 239951 - protein, 60 aa, Glycine max
  unsure (1)..(60): unsure at all Xaa locations
  Clone ID: PAT_MRT3847_58700C.1.pep
GFFGSLLGLLHGPLILMRQGLGTYYXPIDKPPECKTPVYNPPVDRPPVYKPXPPGYRTKP

SEQ ID NO: 239952 - protein, 134 aa, Glycine max
  Clone ID: PAT_MRT3847_58701C.1.pep
KKKTVTALVLIALATISLQSSASASSVGKFVDETITSHKIVIFSKTYCPYCRRAKAVFKELNQVPHVVELDEREDGSKIQDIMVNIVGRRTVPQVFINGKHLGGSDDTVEAYESGHLHKLLGIEKKDHDDHDDL

SEQ ID NO: 239953 - protein, 65 aa, Glycine max
  Clone ID: PAT_MRT3847_58702C.1.pep
ACDVLICICHRKWYKHYPIIVWPVSALCLSWCQIQPSLYASEYNMCLRIDIISAKKKKKGGPPPN

SEQ ID NO: 239954 - protein, 169 aa, Glycine max
  Clone ID: PAT_MRT3847_58703C.1.pep
HASVRLRRRQKGRTKNNIENSKVLSFSSTCSNSNSTMVARLAVTALVLIALATISLQSSASASSVGKFVDETITSHKIVIFSKTYCPYCRRAKAVFKELNQVPHVVELDEREDGSKIQDIMVNIVGRRTVPQVFINGKHLGGSDDTVEAYESGHLHKLLGIEKKDHDDL

SEQ ID NO: 239955 - protein, 134 aa, Glycine max
  Clone ID: PAT_MRT3847_58704C.1.pep
MASRLTVTALVLIALATVSLQTSASSVGKFIDETITSHKIVIFSKTYCPYCRRAKAVFKELNQVPHVVELDEREDGSKIQDIMINIVGRRTVPQVFINGKHLGGSDDTVEAYESGHLHKLLGIETKDHDDHDDL

SEQ ID NO: 239956 - protein, 90 aa, Glycine max
  Clone ID: PAT_MRT3847_58705C.1.pep
SFREGANLKRRRWTKRANQYRIWVDSLAPQRGGHWHRSGIVKKEALSGSRRESLPTKILKEKSMVFSETTIVQQARIGFIQRYYSKVKKS

SEQ ID NO: 239957 - protein, 50 aa, Glycine max
  Clone ID: PAT_MRT3847_58706C.1.pep
TYQYNQVTYSSLINRLENAQQVLIIYFLIYLFSFNFSGGVRSNLSCTVFI

SEQ ID NO: 239958 - protein, 47 aa, Glycine max
  Clone ID: PAT_MRT3847_58707C.1.pep
ARGWSSIARPQVSKLNREPLEFLTRNHLQTCYTVYMPLIRCVWYSRL

SEQ ID NO: 239959 - protein, 81 aa, Glycine max
  unsure (1)..(81): unsure at all Xaa locations
  Clone ID: PAT_MRT3847_58708C.1.pep
SSRIGSSYAGQLFFDWLGDKLGRKRVYGMTLMXLVICSIASGLSIGKDPKAVMATLCFFRFWLGFGIGGDYPLSATIMSEY

SEQ ID NO: 239960 - protein, 144 aa, Glycine max
  Clone ID: PAT_MRT3847_58709C.1.pep
HLLSPLLLCLPLHLHGGKSPLKDLIEAQRFSLHRSSTSKLPSHSASCFEPSQLTRIIPMLDQFAPFIQGFIRDVVDVKADDNCGYRSIAALLGMGEDSWPLVRNELIKELGRWSHEYMNLFGGTERFEQLKLSLLVDRFLKVCF

SEQ ID NO: 239961 - protein, 135 aa, Glycine max
  Clone ID: PAT_MRT3847_58710C.1.pep
PQWTLKLERKRSALFLYMSMQLVDDKVPRMAANISSQPHSNNKNKEEVAWPVEPLVAPGVTLMWEVTFQASSQIVLILLDALHGLLLLLLPLLGRQDHGVLRLLLFLVDGDGGVVVQALRHELQRQRVLRARRLL

SEQ ID NO: 239962 - protein, 136 aa, Glycine max
  Clone ID: PAT_MRT3847_58711C.1.pep
SLHSTVEIVFQNTAIVGVQNHPIHIHGFSFHVLAQGFGNFNSTVDSTKFNLVNPQLRNTIAVPVGGWAVIRFQANNPGVWFVHCHVEDHVPWGLDMAFEVENGPTSSTSLPPPPVDLPKCYEGDSRVQHHQFRFFF

SEQ ID NO: 239963 - protein, 98 aa, Glycine max
  unsure (1)..(98): unsure at all Xaa locations
  Clone ID: PAT_MRT3847_58712C.1.pep
NHLAPFLHRRDWKNLGVPHLIRLGXHPHFPCWLNSKKAGTDRLSXNLPTLIGKGDAPLPALYPGGGGGSAQWDCLLARPLGPVFFHFYLYFLARFSGF

SEQ ID NO: 239964 - protein, 188 aa, Glycine max
  unsure (1)..(188): unsure at all Xaa locations
  Clone ID: PAT_MRT3847_58713C.1.pep
MVSILLYIVAFICTCGAIALSLLHIYKHLLNYTEPTYQRFIVRIVFMVPVYALMSFLSLFLPQGSIYFNSIREIYEAWVIYNFLSLCLEWVGGPGSVVLSLTGRVLKPSWFLMTCCLPPLALDGRFIRKCKQGCLQFVIXKPILVVGTLILYAXGKYXDGNFSPKQSYLYLTIIYTFSYTMALYALAL

SEQ ID NO: 239965 - protein, 126 aa, Glycine max
  unsure (1)..(126): unsure at all Xaa locations
  Clone ID: PAT_MRT3847_58714C.1.pep
PVQKAVVHPIVLLIIDDNYSGVAQNTLKRVDCVLLGXSPSQATVNLTNMVXAVPFEEDDADPSIWLLDHKYHESMFAMSLRINAKEHVAGWFTSGPKLRAYDLDVHCLFNDCVPTPGLGIMDAGPK

SEQ ID NO: 239966 - protein, 58 aa, Glycine max
  Clone ID: PAT_MRT3847_58715C.1.pep
WRFLVAPRTFMLISNSMAITKTQMLEPITAQNRQENCKANPHNLNIYEKELLMYLKKQ

SEQ ID NO: 239967 - protein, 73 aa, Glycine max
  Clone ID: PAT_MRT3847_58716C.1.pep
PHLLLKIYIFISTHTHTISWVYFKLSHLITNPLLSTSSNTFKSYESANISTNAPILLSSKPPVPTTSSTTISN

SEQ ID NO: 239968 - protein, 279 aa, Glycine max
  unsure (1)..(279): unsure at all Xaa locations
  Clone ID: PAT_MRT3847_58717C.1.pep
GLSEQQNLGQALTNINLVQPQPQLQPQPPVQQQVTPPNIVPAPMQQPLPVIVTQPVVLPVVSQVTNMEIMKADNNNNNNNNNNCENFLPPSSSRWPKVEVQALIKLRTSMDEKYQENGPKGPLWEEISASMKKLGYNRNAKRCKEKWENINKYFKKVKESNMRRPEDSMTCPYFHQLDALYRQKHKAEESTEAEKAESGGGPMMVXPEQQWPPQQQDDRDITMEDMENEYDEYEEEREGEEEEEEDEQEEEGGGGNYEIVANKTSGGGGAAASVGASTE

SEQ ID NO: 239969 - protein, 120 aa, Glycine max
  unsure (1)..(120): unsure at all Xaa locations
  Clone ID: PAT_MRT3847_58718C.1.pep
ALLLRRVRXPXKKKXQEKTPKREGEERQTFLYYREQIEKRKPGWNIELHPETPESSDEWRKYLTTQAGHIQVCNTRTTTENPRISCEEPTSSHHMSLNLELNMMWESPMKKEERYGYELN

SEQ ID NO: 239970 - protein, 238 aa, Glycine max
  unsure (1)..(238): unsure at all Xaa locations
  Clone ID: PAT_MRT3847_58719C.1.pep
QQQPRLIPLGGSTTWINFRHNVLSSVEIDNLPMQIDDTQYPKTFFYEQDLHPGKTMNVQFSKSPFTQPFTILTWLKGLKIKDIDKEGYTFDELCIKTKPNGAEHKFCAKSLETLIGFAISKLGKNIQVLSSSFVNKQELYKVEGVQNLGDKAVMCHRLNFRTVAFYCHEVRGTTAFMVPLVAGDGTKTXALAVCHSDTSGMNRHILHQTMGVDPGTNTVCHFLGSKXILWVPNLLWTL

SEQ ID NO: 239971 - protein, 62 aa, Glycine max
  unsure (1)..(62): unsure at all Xaa locations
  Clone ID: PAT_MRT3847_5871C.1.pep
XEQGQXLLFTNIPNXVQNSCCKSMXXKXXGXXFFIYEKIXXVTAVLXXPKPXXRGGRXXXEP

SEQ ID NO: 239972 - protein, 113 aa, Glycine max
  Clone ID: PAT_MRT3847_58720C.1.pep
TADVKANFRIVAANHPIVPDANGILSKKGVIILPDIYANAGGVTVSYFEWVQNIQGFMWDEEKVNRELKKYMTKAFQDIKAMCKIHNCDLRMGAFTLGVNRVARATLLRGWEA

SEQ ID NO: 239973 - protein, 278 aa, Glycine max
  Clone ID: PAT_MRT3847_58721C.1.pep
VGRLHGSTSAIMFYQLGLARESHAQSSIPDEDFWHAVWPNTSIPSALRELLKHGREGVEIDNLPMQIDDTQYPKTFFYEQDLHPGKTMNVQFSKSPFTQPFTILTWLKGLKIKDIDKEGYTFDELCIKTKPNGAEHKFCAKSLETLIGFAISKLGKNIQVLSSSFVNKQELYKVEGVQNLGDKAVMCHRLNFRTVAFYCHEVRGTTAFMVPLVAGDGTKTQALAVCHSDTSGMNRHILHQTMGVDPGTNTVCHFLGSKAILWVPNLAMDTAYQTNIVV

SEQ ID NO: 239974 - protein, 49 aa, Glycine max
  Clone ID: PAT_MRT3847_58722C.1.pep
LKKKKKKKKKKKKKKKKKKNKKKTRKQTKQILLKRNKNNNIWAPKIIKN

SEQ ID NO: 239975 - protein, 45 aa, Glycine max
  Clone ID: PAT_MRT3847_58723C.1.pep
VWELWHSQWPKEVPCNNYRHVWPSKTLIIITRFATLWMTSPFHQI

SEQ ID NO: 239976 - protein, 46 aa, Glycine max
  Clone ID: PAT_MRT3847_58724C.1.pep
DFLKKNTHFTHDYPSAKRCGNFQLGRAYSTRGSCLISFIELNQRSS

SEQ ID NO: 239977 - protein, 71 aa, Glycine max
  unsure (1)..(71): unsure at all Xaa locations
  Clone ID: PAT_MRT3847_58725C.1.pep
GIPNTYQSSNTFAGYYLANMLQAGNTNAPRNKDNILGDCTTKSVYNTGNDIXTYSIKSADDTRTLNEIVYI

SEQ ID NO: 239978 - protein, 68 aa, Glycine max
  Clone ID: PAT_MRT3847_58726C.1.pep
KKYIIIYIWTSFMQGFIYAKFQPEMSTRLRTMLEIPAFGQSEESQFKDFNLKNEKKNGRGGRIQWPIG

SEQ ID NO: 239979 - protein, 66 aa, Glycine max
  Clone ID: PAT_MRT3847_58727C.1.pep
FQESANFLLLLGGRFLKGKKITLCAGHRLRESFSFPLLDHSLNTLLFDIGLRVRFKLYLFLSQLSA

SEQ ID NO: 239980 - protein, 113 aa, Glycine max
  Clone ID: PAT_MRT3847_58728C.1.pep
SMEGDNSPNGKREGPPKKKKKKKKKKCQRKPQTRGKEWPPPKKKNQKKKKPTGKIDAGAKKSWVPNPPGEFSHTETPGNPNLPEGATKYGFKKGGGQQIGEKKPSGGKKKRPH

SEQ ID NO: 239981 - protein, 88 aa, Glycine max
  unsure (1)..(88): unsure at all Xaa locations
  Clone ID: PAT_MRT3847_58729C.1.pep
SHARVRXLGIXARAEAFALCINFDRQSATTLFFSXSXXSGXAFQXPSPPKLXLRXAXLXRXXXGSXGTRYLCXPXTLXXGGGGPGXDA

SEQ ID NO: 239982 - protein, 145 aa, Glycine max
  Clone ID: PAT_MRT3847_5872C.1.pep
MMLAKALSGNSGPLLLSSSVLERGSIEEIRPSSSYETPGFARSIYPLLEDLYSIFGDLPSLGKALAHVQKMLLDVNRGEVLDKSTVSEVYTFRIAVEGLRIALNNKGLRPVNGKGAAKSDKIEFSDLPMDDKSHALFAQAIRSQA

SEQ ID NO: 239983 - protein, 700 aa, Glycine max
  unsure (1)..(700): unsure at all Xaa locations
  Clone ID: PAT_MRT3847_58730C.1.pep
MRGPLGAVIGRYPSSDGVTQMGGIIRHNRKCRDITVLVIFIAFWIAMIVNSGFAFNQGNPLRLTYGLDYKGNVCGDKHAHPGLSELELRYWQNPNQVYQSGLKDSQFKLADARSICLSECPIFRXDSLNWVCDYPEGDIRLSMKDWINRNYDYFEFLTPEMRNSSLQLQGPCYPVIFPTVNVYWSCQFIARASNTSLKHWQQMGGVNINEDIVIDKSIHKSINSRSAVLERYMADIGKAWPVLIVCGGILPLFLSVIWLMMIRHFVAAMPWITVVLFNVLIISVTMFYYLKAGWIGNDAISPIIGEHDPYISVYGRELTHIRVVTILMTFIMVVAILTSIAIVRRILMATSVLKVAAKVIGEVQALIIFPLIPYTVLAVFYMFWISAALHLFSSGQVVQNNCNSNCCTYDLIAKRVNCDRCCGYSIHYTPHIGVAILFHLFGCYWATQFFIACSSTVIAGSVASYYWARGETSPEIPFLSVFSSMKRLMRYSLGSVALGSLIVSFVESIRFLLEAIRRKLKVSSHGHDSCLGKAAYQFSQCFLRCIEWTIKSVNRNGYIMIAITGKSFFSASFIATELIMNNILKIGRLNVIGDVILFLGKLCVSLSCALFAFLMLDTHKYNSAHNKTSXSPLLPVVVCWALGYIVSTLFFAVVEMSIDTIVLSFCQDFEEHQGTAQYAPPLLVETLSDQNEMQRLTQGP

SEQ ID NO: 239984 - protein, 129 aa, Glycine max
  Clone ID: PAT_MRT3847_58731C.1.pep
QLLHLPLFNSLYLTSFPHSLLSLSLPHGINKEHVHVLRHPPPPRSLLRHRVRSGLSNTGSGCRSSWISLELCLRHRCCGCVVHACHLQALSDPFIRVIVVLFTKLVRFYIQLYRVMFIVSFVFVYSVYW

SEQ ID NO: 239985 - protein, 64 aa, Glycine max
  Clone ID: PAT_MRT3847_58732C.1.pep
RMSICAQTDNHSHRISLARVEINTYASNKLSWVSLLNINIYPVFNRHIKWHCRHSSIHVITPNS

SEQ ID NO: 239986 - protein, 137 aa, Glycine max
  unsure (1)..(137): unsure at all Xaa locations
  Clone ID: PAT_MRT3847_58733C.1.pep
MHSISIAFTALVGAAAASVNGPWQSHSSWGTAVSSTPSASKTIISDPTIKPSGTGVTISDPTIKPTATGGHNTTETETLTTFTTVTTCPVTQTTSGHGSTYITTAXTTSTVVVTSCKGGCHGWQPHPTGAPNSTYVP

SEQ ID NO: 239987 - protein, 89 aa, Glycine max
  Clone ID: PAT_MRT3847_58734C.1.pep
LSFMPNSMAPLLINQLSVALGGLRAINTLSTTVSITETSNASQTLSCVMRHLNEQGQSNVDCTSFAQAQAITLDVSPSVADSQIVGGKS

SEQ ID NO: 239988 - protein, 173 aa, Glycine max
  Clone ID: PAT_MRT3847_58735C.1.pep
MPRLVFAACIFSLASIALAALPVTYIFGDSLTDVGNNNFLQYSLAKSNYPWYGIDYSGGQATGRFTNGRTIGDFISAKLGITSPPAYLSATQNVDTLLKGVNYASGGAGILNDTGLYFIERLSFDDQINNFKKTKEVISANIGEAAANKHCNEATYFIGIGSNDYVNNFLQPF

SEQ ID NO: 239989 - protein, 97 aa, Glycine max
  Clone ID: PAT_MRT3847_58736C.1.pep
MRDICRNFQRGSCQYGERCRYLHVQQQRKPNVNGFGGQSSSYQQQNTNPFGFGSGSQQQQQQKGNPFGFGKQNSSQLNGGPHSEHKPNQYKPFENKW

SEQ ID NO: 239990 - protein, 146 aa, Glycine max
  unsure (1)..(146): unsure at all Xaa locations
  Clone ID: PAT_MRT3847_58737C.1.pep
MFAAFIFSGDNRFTDTTIFNCRDLAILVDYYTMATQFTKFLPHYIRWGLYTLLIYILPSFITAERKYMRTQIIIHTLGLLYDGLYKFWTXKHEKNLALTXXEKMEVIKNRGMPADALAKRADGCEKHAAHDSLKDQIPAVARCILL

SEQ ID NO: 239991 - protein, 149 aa, Glycine max
  unsure (1)..(149): unsure at all Xaa locations
  Clone ID: PAT_MRT3847_58738C.1.pep
DPPPAPLFAPRSLPXWSLYRAPLAEFIATLLFLYVPGPPQMXKKKKKKTNRGWPPPCGVGILGLAWALXGPVLSLFPPPRISGAPNPAVPSGCSQAXQVSLIRALLSWGPPVPRAXCGPXLAQGLPKTTTTGXXVVPTSVADGLHWSAL

SEQ ID NO: 239992 - protein, 57 aa, Glycine max
  Clone ID: PAT_MRT3847_58739C.1.pep
LTFLLPRKGTKVGRHPQVPTLFPLTTSYFKDLLNFHHQWALAAPRTLMRVKGKAGPP

SEQ ID NO: 239993 - protein, 99 aa, Glycine max
  Clone ID: PAT_MRT3847_5873C.1.pep
KAISLKPWWGRPLTCLPRQYPQVEKNLTPPKFAIPKEPKAAAIIWTSVPVDEGMKMAPGITRSTNSFNQFPFEGFSWLMKPSFYTKHFRRCYSYLTSNT

SEQ ID NO: 239994 - protein, 93 aa, Glycine max
  unsure (1)..(93): unsure at all Xaa locations
  Clone ID: PAT_MRT3847_58740C.1.pep
STVVAGVIEGLDGKIAIMDNENRYTGNLTSHLKPGGGDFGNFYRLPSVNDLRIDMLPXSIRILLESAIRTCDNFHVKXEDFDKILDCENNSTK

SEQ ID NO: 239995 - protein, 184 aa, Glycine max
  Clone ID: PAT_MRT3847_58741C.1.pep
SILERAQSLMVKHANNHRRPHDINVGDWVYLKIRPHRQGSMPPRLHPKLTARFYGPYLVMRQVGAVAFQLQLPSEARIHPVFHVSQLKRALGNHQAQEELPPDLEHQAELYFPVQILKIREVQKQHEVERQVLIRWHGKSEEEATWENVDVIQTLFPEFNLEDKVHSLEGSIVRSQDRPVIWRV

SEQ ID NO: 239996 - protein, 57 aa, Glycine max
  Clone ID: PAT_MRT3847_58742C.1.pep
VNIKNISVYRGAPSPQLKFNHNNLVVYIPRPLNTINLNVLLSAIACNWHQTAFYGHH

SEQ ID NO: 239997 - protein, 76 aa, Glycine max
  unsure (1)..(76): unsure at all Xaa locations
  Clone ID: PAT_MRT3847_58743C.1.pep
GFGSRFLLLLRLSHELLFIHFSSFLFLSFLISFSHLDFSCIKLRSKLSFLQFTLASLQIFSLLPXSKTHASDIATK

SEQ ID NO: 239998 - protein, 64 aa, Glycine max
  unsure (1)..(64): unsure at all Xaa locations
  Clone ID: PAT_MRT3847_58744C.1.pep
LLXPRIPTTXXVXRCSALPSLPPRVSXXXTXLFXPSLXXFSVSRXSSLLQTRASSEXXSSVDAX

SEQ ID NO: 239999 - protein, 142 aa, Glycine max
  unsure (1)..(142): unsure at all Xaa locations
  Clone ID: PAT_MRT3847_58745C.1.pep
PSRPAPPHLFCSLITLFPPISGLIFSSSLFILLFISIFLLLRILFLFHHLNNNFSDSHCCALLFDAFLIKLCITRIDLSFGGVLNANHHTRYGYSLSDAIVKDSRLLDMCFLGFLLLFCYVFCAITITPLXYLICDALWLVS

SEQ ID NO: 240000 - protein, 100 aa, Glycine max
  Clone ID: PAT_MRT3847_58746C.1.pep
PYEQRIVQQKACLQLTTMTTTTIGWVPQSATVRAMRAKFKAHTMADADYCAFINAETELRIHMQEDIGLHVLVHREYERNDMVEYFDEHLHGFCVTSNGW

SEQ ID NO: 240001 - protein, 65 aa, Glycine max
  Clone ID: PAT_MRT3847_58747C.1.pep
ARASFNAGAGYTAKVGPDGAGGHCTPHENGNQRAPAAIEHSSQSSIRLHVNTLNLYEAQTLNAIT

SEQ ID NO: 240002 - protein, 68 aa, Glycine max
  Clone ID: PAT_MRT3847_58748C.1.pep
YNFLSSTSTNISALSVKLYRIQRLQNYIIFHYSGLNRELKMLLLVCSGQNLSFLFFFLLGGASGEGMK

SEQ ID NO: 240003 - protein, 267 aa, Glycine max
  unsure (1)..(267): unsure at all Xaa locations
  Clone ID: PAT_MRT3847_58749C.1.pep
MNSTVQLLSAAARLSLLKHSRMRGAYXEGICSNGNDTITLLGGIVVRNTLVMCDREHSKIGFWKTNCSELSERLHVSNAPPTXMPPKSEGTNFTKAFKPSVAPSPSQYNLQPIELYITKLLVEXSLTSNXLDINFHHSLNCNTSQVHNQNFTSTGNNSRSKWVITTKPYSYNISNTTAMIIIARLAEHRIQLPGTFGNYKLIDWSVEPPSKNWWQQHFLVVSLAILITLLLGLSILGTFLIWKKRQQSSHSYKPVDVVVPEQELQPL

SEQ ID NO: 240004 - protein, 137 aa, Glycine max
  unsure (1)..(137): unsure at all Xaa locations
  Clone ID: PAT_MRT3847_5874C.1.pep
MDFLWSENAATPRASHFSVAICFAFASFAARFFXCTDSXFRRLAIRMLPRASAPVHITKEMQVKIGKCSESMWKLTYYATVEAFILKITYQEPWFSNTKLYFNDWPNHELKSPLVLYYMCQCGFYIYSNAAILTWET

SEQ ID NO: 240005 - protein, 38 aa, Glycine max
  Clone ID: PAT_MRT3847_58750C.1.pep
KKDRGMPWWVKFRTFRGDNRNEEFYTLPFNLNRFFPPT

SEQ ID NO: 240006 - protein, 115 aa, Glycine max
  unsure (1)..(115): unsure at all Xaa locations
  Clone ID: PAT_MRT3847_58751C.1.pep
MLSQQNYRNIRHTDLLRSIQADTPNXCLALWCAPCVSYLLSNRALYDDMSKYTCSADYMHCSGMCGESKCPEYLLCTEVLMCFGNANPLTRLLLLDEYSILTTQCDNCIIGLVSC

SEQ ID NO: 240007 - protein, 78 aa, Glycine max
  Clone ID: PAT_MRT3847_58752C.1.pep
YSSRSNALTEPHIRVFHFGSDILRHGRWQCALVEDGSRSEARKSLVCARGCQLSPDWRGMCIPSLMCLRAPLCPSPGV

SEQ ID NO: 240008 - protein, 211 aa, Glycine max
  Clone ID: PAT_MRT3847_58753C.1.pep
YLSRSRLGSHLIEDKEDDRGEVDNGVECEEESAESDLHSIELNMDNNNKSYKWTYPPESRFDTRRYPIEEEVKGSRRSTSGKASRKSTSLQRSISDGMEWGVQADKLQNSGDGIDWESFYELEKQAQGKGYGDEMQGYKSVKGLRDQILAGSRLASYRGYASPTRQFSQPWSSRDLANNFQERPATAQGNGLKSRLGEARGEGQNVRKSKR

SEQ ID NO: 240009 - protein, 258 aa, Glycine max
  Clone ID: PAT_MRT3847_58754C.1.pep
SRYCVFNTFRALEGSYLDHIKEELGHKSVFSVGPLGLGRAESDPNRGSEVLRWLDEVEEEASVLYVCFGSQKLMRKEQMEALAVGLEKSETRFVWVVKTASTKEEMDEGFGLVPEGFADRVSGRGLVVTGWAPQVAILSHRAVGGFVSHCGWNSVLEAMTSGVVIVGWPMEADQFVNAKMLVEDRGLGVRVCEGSDFVPDPDEWGQVVKAVMVRDSAEKRRAKLMREEAIGAVREGGESSMDVEKLVKSLLELGVKQG

SEQ ID NO: 240010 - protein, 183 aa, Glycine max
  Clone ID: PAT_MRT3847_58756C.1.pep
DFDSDEEASDSFQDPDDLSEPEMEMNNKHVELKIPLLEKFATVSKPPAFCESQANVETRPRLVVKFSLRDSKKNVPTEDTRLACETQDNMVCQSFRPQPEESDQKTFPDTKSLDPALSSMAAPNAKLPQSLDRNENDDKEQTENITNNLDASRYVEANTDQCRKMKTHTHELSRSGDALLTDA

SEQ ID NO: 240011 - protein, 96 aa, Glycine max
  Clone ID: PAT_MRT3847_58758C.1.pep
NCYDLVSRGQIARIWAQAIPRLCLFFFPPLPLFSPSPFPQKKKLFGLGAPPPVFFLLYVFPFLGLCSPKTQNVFFSLIPKKKPIKKKKKKNKKKKK

SEQ ID NO: 240012 - protein, 79 aa, Glycine max
  unsure (1)..(79): unsure at all Xaa locations
  Clone ID: PAT_MRT3847_58759C.1.pep
KKKKKKKNSRGGPVPNSPYSESYYARSLAVVLQRRDWENPGVTQLNRLAAHPPFASWRNSEEARTDRPXPQLRSLNGEW

SEQ ID NO: 240013 - protein, 85 aa, Glycine max
  Clone ID: PAT_MRT3847_5875C.1.pep
LTELGLGFRLAGHQHEGLGEQAARQSQPVEPREHEMQQQRQEQIEDQQQQLEVLLILTRRLGYVILSQFYSCETQNSVALKSGTH

SEQ ID NO: 240014 - protein, 63 aa, Glycine max
  Clone ID: PAT_MRT3847_58760C.1.pep
EDEELRQMRYEVGHWKEKEINGTERRLTGGCPLTPRETSLLLRALGFPSQTRIYLVAGDPYGR

SEQ ID NO: 240015 - protein, 142 aa, Glycine max
  unsure (1)..(142): unsure at all Xaa locations
  Clone ID: PAT_MRT3847_58761C.1.pep
MRFMSEKGSVEYAALSINPETESLKTITAMMETLIDLTMIXSLAGHTSDEFYLGERDGGDYSTSDAGPLXSLQMLVMMLHXIEQKLIHINKDNTLRNRMGAANLPNALLYPSREEGLTVKGVTNSLSIYGLYACCHALHGLE

SEQ ID NO: 240016 - protein, 84 aa, Glycine max
  unsure (1)..(84): unsure at all Xaa locations
  Clone ID: PAT_MRT3847_58762C.1.pep
LLGSIVASLLLAFVTASTVPAFGLSAGVGXWXXRLGWLEIVMTFXSGCTRVYGNWPFEPQERVNFGEFIGFPFPQLGFSFGPGA

SEQ ID NO: 240017 - protein, 75 aa, Glycine max
  Clone ID: PAT_MRT3847_58763C.1.pep
TCYVIWHHSNDIHLFQIYCADLPQRGEYNFVVFSNRLGEITTKISDFEKKKWLLLKHWCFTLESTLSQSSILEVC

SEQ ID NO: 240018 - protein, 94 aa, Glycine max
  Clone ID: PAT_MRT3847_58764C.1.pep
RQIDFNGEKKKEMQPHASYPDNEKTKIHDSQRPRPRNIQIAGPLTLARTRTGGPLKTNQPDQTLRAPHQSRLSNQNPGQRPQHWGNSQTRIFQP

SEQ ID NO: 240019 - protein, 52 aa, Glycine max
  Clone ID: PAT_MRT3847_58765C.1.pep
NLRILHAKNAHHSQFSFEEGTVGSLVSEYDRASEIAASNKDSKARHILLAIN

SEQ ID NO: 240020 - protein, 39 aa, Glycine max
  Clone ID: PAT_MRT3847_58766C.1.pep
TKSVMIDRGRFIEVSVPLLIVVYNYVGTCVFSYPPLPCV

SEQ ID NO: 240021 - protein, 76 aa, Glycine max
  unsure (1)..(76): unsure at all Xaa locations
  Clone ID: PAT_MRT3847_58767C.1.pep
ARVPALGVTPSFITDLADPVIEALPSATAMYAPTSISEDVDHDPVSYFIRXFCGSILAFILFLSPKMIMAFRNQVI

SEQ ID NO: 240022 - protein, 74 aa, Glycine max
  unsure (1)..(74): unsure at all Xaa locations
  Clone ID: PAT_MRT3847_58768C.1.pep
MASSICLLSPKVGQLNSLVXXXXNLSAKERVLLEECRDLLSAITTMQVRECSLKTHVAQLKCQPRSTTVKVTSK

SEQ ID NO: 240023 - protein, 108 aa, Glycine max
  unsure (1)..(108): unsure at all Xaa locations
  Clone ID: PAT_MRT3847_58769C.1.pep
IFSMGQEHVTNGICTEQLVECKWTKMAPHSRELSGTIEGGGPNXGLETWGTEGASETLRRIXSFLKARPKRLPPVDILGRTGQELDSAGNTLMPALAXPQANARSSEN

SEQ ID NO: 240024 - protein, 81 aa, Glycine max
  Clone ID: PAT_MRT3847_5876C.1.pep
DYAGILENLFYYIFIFFFIYFNRKELRKCDVGCPHRDWPAFLPKKGGEECETVNGFFEFILKFSAHIHFVPEIIMLEQITH

SEQ ID NO: 240025 - protein, 481 aa, Glycine max
  Clone ID: PAT_MRT3847_58770C.1.pep
MNATSYSALPSTFRSLHHRNFSAFCSDIQNPGYVDCHSNCNKSTSQASLFLCSDSNSRRNGVFGRPLCVNPSGRRNLVGPAFYSLETSAYDVAALESPSRVAEEKVGVLLLNLGGPETLSDVQPFLFNLFADPDIIRLPRLFRFLQRPLAKLISVLRAPKSKEGYAAIGGGSPLRKITDDQALAIKMALEAKGISSNVYVGMRYWYPFTEEAIQQIKRDRITRLVVLPLYPQFSISTTGSSIRVLEHIFREDAYLSKLPVSIINSWYQREGYIKSMANLIQKELQSFSEPKEVMIFFSAHGVPVSYVEEAGDPYRDQMEECIFLIMQELKARGISNEHTLAYQSRVGPVQWLKPYTDEVLVELGQKGVKSLLAVPVSFVSEHIETLEEIDMEYKELALESGIKNWARVPALGVTPSFITDLADAVIEALPSATAIYAPTRTSEDVDHDPVRYFIKMFFGSILAFILFLSPKMITAFRNHVI

SEQ ID NO: 240026 - protein, 76 aa, Glycine max
  Clone ID: PAT_MRT3847_58771C.1.pep
RHVFMGLMSHGAIDNHGKGLCSDPSADTMHDIYDMKGTSTVVGAGKESNLTCDDSLDYCEKDIHNHNRLEKMDACG

SEQ ID NO: 240027 - protein, 98 aa, Glycine max
  Clone ID: PAT_MRT3847_58772C.1.pep
LGLINWRSRVTLMTSCFHLFRKKGSSSGTQLTGVDIDVTKPGMIFEFVEAKSARKQKGKAEVDSKSSLAEGKQDESSSSGTMSSFATMTFTAIYDRSN

SEQ ID NO: 240028 - protein, 126 aa, Glycine max
  Clone ID: PAT_MRT3847_58773C.1.pep
MASLEIKSGALVSLQDLRPSSPFFKQGASLRITGKLHEYSIETGLATIIDGDDILKVSTKHLRDLTFQVGSVYQFIGELLIQPDNEGVLQARVGRNVDGIDLNLYHQSLLLLRQFQTNHLNNPATM

SEQ ID NO: 240029 - protein, 63 aa, Glycine max
  Clone ID: PAT_MRT3847_58774C.1.pep
QSTVLDRYHNYQECIQGFRHTPPYDTQMNISNLTSVDQVAQLWELHRETMVEPPNCCIGTQSL

SEQ ID NO: 240030 - protein, 652 aa, Glycine max
  Clone ID: PAT_MRT3847_58775C.1.pep
MDFDHHLTELSASSPFIPSGEDFHFYYKFRNFRRPIEEIARRTQSMLDRIGSAENIWGRGSAFPGDVDDAYEWLVNANDDVLELVEELVDELRMLKKDEGEECDGANPKVPFHIPTIKKPQYAYNIVVDNSNEPFEHILLEKSDDGQRYIHPLEKLSVLDFVDKENLENLVPVEPPSIECTPFKLVEDVKGLKEVAAMLSSVNEFAVDLEHNHYRSFQGLTCLMQISTRTEDFVIDTLKVRNHVGPYLREVFKDPTKKKVMHGADRDIVWLQRDFGIYVCNMFDTGQSSRVLKLDRYSLQYLLQQFCGVTANKEYQSADWRLRPLPDVMLRYGREDTHYLLYIYDLMRIKLFALSKESEGSDNPLLEVYKRSYDVCMQLYEKELLKEDSYLHIWGLRGAGFNAQQLAVVSGLWEWRDGLARADDEGPGYVLPNRIILEIVFFFFTHFKANQMPVIISNLRRIVGRTKHPYVERSLDVIVNIVRHSMQNAAAFEEAALRLKEEHAASLSNVIPVKDGTEVPHTLQKDGCAARGSMGIENGSCVDITQNCMLSYDQEEKSFQHQVEDGLSDCLNSDLLRVKKEIKPEQSRSSLNIPSPLLLGNNEKSRLVAETPSVTYETSYSREKLVSGSPSTSNPIGMVMVDSAKEKKMNDE

SEQ ID NO: 240031 - protein, 104 aa, Glycine max
  Clone ID: PAT_MRT3847_58776C.1.pep
ALNPCSETPPLKSLHHIEFICVGVLSVKSDENSDNSLTRVVSESPHPDLCSSEHRKASGESSGLSPYSLPKPVREDLSSTTREPAPSCPVLPAVCQEHHKHKKR

SEQ ID NO: 240032 - protein, 66 aa, Glycine max
  Clone ID: PAT_MRT3847_58777C.1.pep
PLIPPPVFLCSCICEACFPLLGVPFCHRSAYACLFVVFPPSSCSPAAWVSNPFLPYCALVEGSSLC

SEQ ID NO: 240033 - protein, 109 aa, Glycine max
  Clone ID: PAT_MRT3847_58778C.1.pep
MKCFSVSLASLWVLLALFSLSVSSQNISESGLQQASLPPRGWNSYDSFCWTISEDEFLQSAEMVSQRLKAHGYQFVVVDYLWYRKKVKGAYPDSLGFDVIDEWGRMIPD

SEQ ID NO: 240034 - protein, 68 aa, Glycine max
  Clone ID: PAT_MRT3847_58779C.1.pep
RWKNWFPTMGDLPWSPIIALIFTLLALAFMTRIGKKITTILFQTRSTYDKIHMLPLMLVELIIGKKHR

SEQ ID NO: 240035 - protein, 262 aa, Glycine max
  Clone ID: PAT_MRT3847_5877C.1.pep
PRVRPKPLSLSLTHTTMAALKLLLSQARRHSLPKCAFSMTSHRSLCASSESNSNPPRRPFEPIPIQPVSYPVKPKPAPPEPQPSPEPQSQSLPPSSPDSQRAWTREDIRYVKDVPSIAPVAYASRGGVAPLPDDRAPVEDAAESERRMIEAENEMRLRMAKAVEEERMKVPFPLLIKPKKNEKPHPLDLNEAIRSVKCDGFAKFDETAEAHKGFVCESKRTEHISRDMTGHSNLQIRHPNTAHLVSLFVKSLFQLEFLKMPI

SEQ ID NO: 240036 - protein, 30 aa, Glycine max
  Clone ID: PAT_MRT3847_58780C.1.pep
ELRAPTFLKSRESYFREQHKVCKNIEWTRG

SEQ ID NO: 240037 - protein, 68 aa, Glycine max
  Clone ID: PAT_MRT3847_58781C.1.pep
FQESLNLFLLVWVRSLKGKNITLCAGHRLRESFSLPLLVYLLDTLLFDIGLRVRSKLFVPLSEHAGEI

SEQ ID NO: 240038 - protein, 91 aa, Glycine max
  Clone ID: PAT_MRT3847_58782C.1.pep
MLELEYASSKFVYDVQIPTITSHRSHYVFYKSHLHPFSLDFKIQQYMKHNHSLMQFTMSPHSVTLSFTKIHASTKREQADHANKRLKRSSS

SEQ ID NO: 240039 - protein, 833 aa, Glycine max
  Clone ID: PAT_MRT3847_58783C.1.pep
MMRMVRKKMLTMVSISNLRHSSSLPINTKSQFLSPRPHTFLSGTHLRLPDKKQLSISDFRIRRHFFNRVLPVVSFKRRVEEDKEMTIKPVVRVSEGKLVVKERTILTGMPENVVETSTVEGMFLGVDLEKEDSRQVVSLGKLKDVRFMACFRFKLWWMAQKMGDRGRDIPLETQFLLMETKDGSHLESDNDKNKNQIVYTVFLPLLEGSFRACLQGDSDDQLQLCLESGDVETKTSSFTHALFISAGTGPFATIHHAYHAVRNELNTLRRRDEKKLPGIIDYFGWCTWDAFYQEVTQEGVEAGIKSLAGGGTPPKFVIIDDGWQSVGGDDKKQNSNSLQRLTGIKENGKFQKKEEPELGIKNMVEVAKKKHSVKKVYVWHAITGYWGGVRPGVKEMEEYGSVMKYPKVSSGVTENEPTWKVDPLAVQGLGLVNPKKVFTFYDQLHSYLASAGVDGVKVDVQCILETLGAGLGGRVELTRNYHQALDASISRNFPDNGCIACMSHNTDALYCSKQTAVVRASDDFYPRDPVSHTIHIASVAYNSVFLGEIMLPDWDMFHSLHPVAEYHASARAISGGPLYVSDAPGEHDFDLLRKLVLPDGSVLRARLPGRPTKDCLFTDPARDGVSLLKIWNMNKLGGVLGLYNCQGAAWSATERKNAFHHSTDSGAAAITGYVRGCDVHLIADAAADDDWNGDCALYSHYSGQLIVLPHNVALPVSLKVLEHEVYAVAPVKKVLGGGAGCSFAALGLVNMFNAGGAVEGLVYEQGLVRVEVKGCGKFGAYSSAKPTRCMLGNNEVVDFDYDADSGLLIFNIDHLPQEGHRVHLVELVYSLSS

SEQ ID NO: 240040 - protein, 69 aa, Glycine max
  Clone ID: PAT_MRT3847_58784C.1.pep
WHAKGGSTGENKWCDGRHVIISEAQAQGNNIGVYCDRGVNINPFCVFSPARADRVGPTQEIRDQHQQEH

SEQ ID NO: 240041 - protein, 51 aa, Glycine max
  Clone ID: PAT_MRT3847_58785C.1.pep
IYFYEYHRVMKVARPPHGIKTRPISIAKKLANLEWRPLLYLGKQYEVIDHG

SEQ ID NO: 240042 - protein, 94 aa, Glycine max
  unsure (1)..(94): unsure at all Xaa locations
  Clone ID: PAT_MRT3847_58786C.1.pep
CXLXPLXXXVXPXXSDSCXXXSLPXXNTXXLXXXNXXIXLFXXXXAXYLXXAFIXTXLXPFFXXDXISMXSXXXXSXXXSXXXPXXXSXXSYXX

SEQ ID NO: 240043 - protein, 119 aa, Glycine max
  Clone ID: PAT_MRT3847_58787C.1.pep
TVIVEHNSSAWTIGLNVDLWSTIYGGVVVAGLIIYIQLWCTEKKGPVFVTVFNPLSTILVAILAYFVFGEKLYLGSIIGAIIVIIGLYFLLWGKEGDQEVYMKTKDKSQCSTVDPECRI

SEQ ID NO: 240044 - protein, 50 aa, Glycine max
  Clone ID: PAT_MRT3847_58788C.1.pep
FSLRKSLLITSIVSDPSNVVPEYHMSYRTTAQDSSQKSITLYIIKCNHLN

SEQ ID NO: 240045 - protein, 103 aa, Glycine max
  unsure (1)..(103): unsure at all Xaa locations
  Clone ID: PAT_MRT3847_58789C.1.pep
RFGXRAGLGCFWGVVLPGGVPGGVALCASRGAARCLGSXRVFGLLCAGVXAXVVAGXAXSPLXLGGRGLVRVLTARRVVARFSQRTEARGSARAFRSGPXXRA

SEQ ID NO: 240046 - protein, 49 aa, Glycine max
  unsure (1)..(49): unsure at all Xaa locations
  Clone ID: PAT_MRT3847_5878C.1.pep
SSLPQLGESLISIINDYHIQPMIYRFSCFNSTGNPLFXXXXNKYGTRNC

SEQ ID NO: 240047 - protein, 42 aa, Glycine max
  Clone ID: PAT_MRT3847_58790C.1.pep
DVLDYSIVVTNAWLTLDYSAPFEDQTLYASRYALVTDSELAI

SEQ ID NO: 240048 - protein, 62 aa, Glycine max
  unsure (1)..(62): unsure at all Xaa locations
  Clone ID: PAT_MRT3847_58791C.1.pep
KSSCYSHLPSIARVLYQLLVQLYVTYCLVFIPMQYRCLVCRMNLESRTLETLVILTXCSWIM

SEQ ID NO: 240049 - protein, 77 aa, Glycine max
  unsure (1)..(77): unsure at all Xaa locations
  Clone ID: PAT_MRT3847_58792C.1.pep
IIGAGSHSLXDFPEKEDHEKPTPIDAXLRQRIDSLYNEVXAQMGTKQFKLTLVEVVTPQGSMVGLKISQFKNGLSKN

SEQ ID NO: 240050 - protein, 101 aa, Glycine max
  Clone ID: PAT_MRT3847_58793C.1.pep
IKHESLLQSKKGRGVQTLWTHGLKMEGKWLLSESIQPEYICKSLRTHKTPSATHNRQPKRAYCSYQGYNTGSGNRCIHTLQLLREHDPLSQLDHHIMLEPP

SEQ ID NO: 240051 - protein, 93 aa, Glycine max
  Clone ID: PAT_MRT3847_58794C.1.pep
FKALFGKESRRGKDLGVKLCRGPLLEGGPRFPGVQALSIRPFFGPGMGANENPAHPAPGVCQFFFPPPWGPPFPPLPSLFLVFFVSGSPLGAP

SEQ ID NO: 240052 - protein, 199 aa, Glycine max
  unsure (1)..(199): unsure at all Xaa locations
  Clone ID: PAT_MRT3847_58795C.1.pep
ICLDDAAKLILGDAHYMYALRTKVXHLYDIAPVLSSMNLIEKTHTMDTRKPAFRWLGSEGKTWDETLHKSNLNDSRKRAFGSDITNISFERNKVELFTSGDLNPNPKKPRMENGSGLGEADENNLKQGIKQASKSYEFGPFAPACVPKVGASQNNNMKQVHDWGSLATAHSPQYQNEASPSLLQQGHCTVKASSCASFV

SEQ ID NO: 240053 - protein, 99 aa, Glycine max
  Clone ID: PAT_MRT3847_58796C.1.pep
ILLFLSQPIFFFGFFFYFGRPQKQQSARALREVFIFQKLHPLPRKDHQKKLIAPNRGTTPGPQTGGLKPPISARAKRPLMGARPPPIVVKPAFFFWRQP

SEQ ID NO: 240054 - protein, 131 aa, Glycine max
  Clone ID: PAT_MRT3847_58797C.1.pep
EDNKQNTSFFMAHQSSSSESDDHIPSHHHPLDLNSPHPSKDIIFDDNMELQQHQQEEESNINNHEYDGDNNRDKDDKDDVTTTQNPSAASETNEEKIALQEEASDDVVVEAEEKEEDSGRERLNRHRVEVA

SEQ ID NO: 240055 - protein, 67 aa, Glycine max
  Clone ID: PAT_MRT3847_58798C.1.pep
CEKTTEGRSHLRQMTPSSSPILQSENAIDNVREVSHSKFSCVYFLLASISFFSTVSTHTLTLKPIKH

SEQ ID NO: 240056 - protein, 190 aa, Glycine max
  Clone ID: PAT_MRT3847_58799C.1.pep
FSGHNIRTDTRYPIGFMDVVSIPKTGENFRLLYDVKGRFNVHRITEEEAKFKLCKVTNVAIGRKAIPYLVTHDGRTVRYPDPLIKQNDTVKFSLETNTIVGHVSFDVGNLAMITGGNNLGRIGVIERREKHPGSYEIVHLKDSAGHKFATRLSNVFVIGSGVTALVTVPKSQGVKLTIMQDRQRKLKNQS

SEQ ID NO: 240057 - protein, 177 aa, Glycine max
  Clone ID: PAT_MRT3847_5879C.1.pep
NDEDYTLSVNAPSDRVPDIDMQPSEHPWLNDFSGVMKNVRGPVTAAKTIYEDEEGYMIVISLPCVDLSSVKVSWRNTLTHGIIKVSCVSTSGKPYIKRHDRTFKLTDPSSEHCPPGEFVREIPLSARIPEDANIEAYYDGPGSVLEIMVPKLRVGSEEHEVRVCLRPHLGGNDLMLT

SEQ ID NO: 240058 - protein, 219 aa, Glycine max
  Clone ID: PAT_MRT3847_587C.1.pep
MGILYALVGRGSVVLAEFSGTTTNASAIARQILEKIPGNNDTHVSYSQDRYIFHVKRTDGLTVLCMADDTAGRRIPFAFLEDIHQKFVRTYGRAVHSAQPYGMNEEFSRVLSQQMEYYSSDPNADRINRLKGEMSQVRNVMIENIDKVLDRGDRLELLVDKTANMQGNTFRFRKQARRFRSTVWWRNVKLTIALIVVLLVIVYVVLAFVCHGPALPSCF

SEQ ID NO: 240059 - protein, 214 aa, Glycine max
  Clone ID: PAT_MRT3847_58800C.1.pep
PTRPRSRAAARDLEPHASEKKKKKKKKKKKKKKKKKKKKKKKKKKKKKKKKKKKKKKKKKKKKKGGGPFKRNKFNYRGVERKNFFKGAPKIKYGGGVLKPGEGKKPGVPQIKRFGKKPLFPKGGKKKKAPHKSPFKKVPNLKGKREPPLKGPLNRGGGGVYPKWSGYFGKGLKPGLLGFFPSFLHKCGGFPRKSLKKGAPLLGAKKKGLRGPTP

SEQ ID NO: 240060 - protein, 189 aa, Glycine max
  unsure (1)..(189): unsure at all Xaa locations
  Clone ID: PAT_MRT3847_58801C.1.pep
MEDKAAIKELLEDEENPYDNTGNKQDAEKLPMLHTRQFLNMGESSSILDGNTKACAIAENAEKKMLGKNLACDDNKYNVEGEINSQITSHEAKSTEDQVSEVTCRRARVSIRARSDFSSMFDGCQWRKYGQKTAKGNPCPRAYYRCSMGTACPVRKQVQRCFKDETVLITTYEGNHNHXLPPAARPLAS

SEQ ID NO: 240061 - protein, 95 aa, Glycine max
  unsure (1)..(95): unsure at all Xaa locations
  Clone ID: PAT_MRT3847_58802C.1.pep
CQQHVRIVDPEDHFYEEDSKVWDDNFVTVAQATMFDLIMDXTHFNIKSVLDLTCXTVVDMIKGKILEEIRKTFNIKNAFILEEEEEVCWEXQWAF

SEQ ID NO: 240062 - protein, 146 aa, Glycine max
  unsure (1)..(146): unsure at all Xaa locations
  Clone ID: PAT_MRT3847_58803C.1.pep
SLRVRKSLQVESIGGFLSAALQAPEPRAVQNAIDFLKMIGALDEQENLTNLGKFLSMLPVDPKLGKMLIMGAIFRCFDPVLTIVAGLSVRDPFLLPQDKMGFSRDSXKLGFSAKDYXSDHMAXLVRAYEGWKDAEREGSAYEYLLR

SEQ ID NO: 240063 - protein, 59 aa, Glycine max
  unsure (1)..(59): unsure at all Xaa locations
  Clone ID: PAT_MRT3847_58804C.1.pep
GSSKFLRLRTFIWLMKHGRLSTAXRNAKWSSSAPTCYDCSSINESILYVFPSIAYRLCE

SEQ ID NO: 240064 - protein, 115 aa, Glycine max
  unsure (1)..(115): unsure at all Xaa locations
  Clone ID: PAT_MRT3847_58805C.1.pep
SKVTCVEHAESHDKSQIPQLYRPLLRSRMLSGAQAXLTLVHAKTXCLAYSNITQHFHVGTHNIMHLRVRNRMMKLLQALPNTILSGCCPRTAHRXYRLNTGNWREDARLTTRKSI

SEQ ID NO: 240065 - protein, 77 aa, Glycine max
  Clone ID: PAT_MRT3847_58806C.1.pep
KKKTGIFVFVKKKRGLKKRGGNKAKSPRLLETHCFLLGRAPCYSIKPNCFFGSSYKTSKIKKIPKKKNPQGRGEEIP

SEQ ID NO: 240066 - protein, 56 aa, Glycine max
  unsure (1)..(56): unsure at all Xaa locations
  Clone ID: PAT_MRT3847_58807C.1.pep
QGVRXPLGQTIVSRLVCPAGAEELCLSANNLKNIHQRSLLIHPSLSKKIRVEFFIF

SEQ ID NO: 240067 - protein, 73 aa, Glycine max
  Clone ID: PAT_MRT3847_58808C.1.pep
RHEQPAVAPARAVRCPVRRHACAMSACHSLQRVSARSALSDLRPCLRNVFRPFLAFTGPVVGHLDVCNGTPAT

SEQ ID NO: 240068 - protein, 50 aa, Glycine max
  unsure (1)..(50): unsure at all Xaa locations
  Clone ID: PAT_MRT3847_58809C.1.pep
PRQIDXPDYKGTWIHPEIDNPEYSPDPSIYAYDNFGVLGLDLWQVASGTI

SEQ ID NO: 240069 - protein, 243 aa, Glycine max
  Clone ID: PAT_MRT3847_5880C.1.pep
MAALKLLLSQARRHSLPKCAFSMTSHRSLCASSESNSNPPRRPFEPIPIQPVSYPVKPKPAPPEPQPSPEPQSQSLPPSSPDSQRAWTREDIRYVKDVPSIAPVAYASRGGVAPLPDDRAPVEDAAESERRMIEAENEMRLRMAKAVEEERMKVPFPLLIKPKKNEKPPPLDLNEAIRQVKANAKAKFDETVEAHIRLGVDSKRTEMAVRGTVILPHGAPKAVSVAVFAEGAEAEEAKAAGAD

SEQ ID NO: 240070 - protein, 157 aa, Glycine max
  Clone ID: PAT_MRT3847_58810C.1.pep
MEGYTWLSIRDLITTSFIIWYCIPLGTIAYLYTRIGLVLWNSGLKPLEIRYSSDSYGGPPTLTINYEGESLTGNGLQRSNSNGTQSKIHDHTSINSDVLETRKRIIRLLIAIVCSFAVLTLPHHARLLYTMWSDTHMCNSTATALLQPFAYLSLFMS

SEQ ID NO: 240071 - protein, 71 aa, Glycine max
  unsure (1)..(71): unsure at all Xaa locations
  Clone ID: PAT_MRT3847_58811C.1.pep
GEIDNDIKTDELAEFELASIKFATNNYSEXNKLGQGGLGIEYKGKQSDGQEIEIKRMNINSNQGEKELKNE

SEQ ID NO: 240072 - protein, 78 aa, Glycine max
  unsure (1)..(78): unsure at all Xaa locations
  Clone ID: PAT_MRT3847_58812C.1.pep
TGEFXFHVHXXXNRXMXXXXVXGIXXYXXHGXXGXXTXVPQLVEXLVKEPGKQREXRKXRDNSRVGFIVNLXDRDVVX

SEQ ID NO: 240073 - protein, 64 aa, Glycine max
  Clone ID: PAT_MRT3847_58813C.1.pep
QNVWRGTATSSPLFTEFFCIRLKSDCISRAASINVACQTYKHGLRLGVDFAEVESQRDRQSGVV

SEQ ID NO: 240074 - protein, 54 aa, Glycine max
  Clone ID: PAT_MRT3847_58814C.1.pep
KFLSWFGSLLTFRFPRSPFDSVFSQPFFFFRGRRFREKVAHFIWPSFWASRGGN

SEQ ID NO: 240075 - protein, 94 aa, Glycine max
  Clone ID: PAT_MRT3847_58815C.1.pep
TEFKPLGRVRSTCHFGMSAVYILCVELSFPRPHYLHVEFFLLWPICLAIVAHPGSCSYEGSGFMAPPAQQYGSCASIESSELRVLLAIPHIVFT

SEQ ID NO: 240076 - protein, 85 aa, Glycine max
  Clone ID: PAT_MRT3847_58816C.1.pep
HSSQNVCSTIAAINPPVQGYKDTPIWCTSRNGMLSVKTAYWYLAGYYDNPRDESGDFKMIWRYEGPQRVCLFLWKLMHGRLLPNE

SEQ ID NO: 240077 - protein, 120 aa, Glycine max
  Clone ID: PAT_MRT3847_58817C.1.pep
HRFSAEIKGNPCNSNNFRLKPSDLFSNGYPKRYGIFGNPWGSSRIVTNEVFLIQMQQHYYLSGGDHFPVHRNHWEVIKKQSFKRACLSSEKEKTQNVRRPKWTQKAAKELQRSNAEERSV

SEQ ID NO: 240078 - protein, 69 aa, Glycine max
  unsure (1)..(69): unsure at all Xaa locations
  Clone ID: PAT_MRT3847_58818C.1.pep
EGYFNLLLRRLDSSVTXAXVKQLSRKDRSIVVVVEAKGCQLTFCSSLKVKTKPXAGESKVLALCCGKGP

SEQ ID NO: 240079 - protein, 265 aa, Glycine max
  unsure (1)..(265): unsure at all Xaa locations
  Clone ID: PAT_MRT3847_58819C.1.pep
RTLGDWTRSLXQRLTECCQPPDNGKSGLLRAEYLQGDRSPSTLPKVLIDGPYGAPAQDYKQYEVVLLVGLGIGATPMISILKDIVNNMKAMEEEEGSNIEEGGASSGFGNKSPRGSSPHKKSGSSNFNTRRAYFYWVTREQGSFDWFKGVMNEVAEEDHRGVIELHNYCTSVYEEGDARSALIAMLQSLNHAKNGVDIVSGTRVKSHFAKPNWRAVYKRIAVSHPRSRVGVFYCGPPALTKQLGQLASDFSHNTNTKYDFHKENF

SEQ ID NO: 240080 - protein, 213 aa, Glycine max
  Clone ID: PAT_MRT3847_5881C.1.pep
MAVRGTVILPHGAPKAVSVAVFAEGAEAEEAKAAGADIVGGKELIEEIASGKNKLKVDKCFSTPGMAPNLGKIAQYLRKRRLMPDKKLGTLTSDIAGQLKELRQGRVEFWRKMDIHGIINFACVRKLGKPYIKRHDRTFKLTDPSSEHCPPGEFVREIPLSTRIPEDANIEAYYDGPGSVLEIMVPKLRVGSEEHEVRVCLRPHLGGNDLMLT

SEQ ID NO: 240081 - protein, 103 aa, Glycine max
  Clone ID: PAT_MRT3847_58820C.1.pep
LFSAHLAKPHPESSSILPSPLALCPQSIHPLTGRRTCVLCIVPALRVAIVNQDGYEDIIILADNFAAFNQRSLVPVKVASGSWWKYANRAVSNQIKSCILETC

SEQ ID NO: 240082 - protein, 80 aa, Glycine max
  Clone ID: PAT_MRT3847_58821C.1.pep
CLLFPPPFFLCSLFYRVFLPFCFYKRLFVLGYKGFFSFVPPRLCINNIPSPRVLRGVPPPAFFFTFFKFFLPGEMGFPNP

SEQ ID NO: 240083 - protein, 69 aa, Glycine max
  unsure (1)..(69): unsure at all Xaa locations
  Clone ID: PAT_MRT3847_58822C.1.pep
SAKEIVGVKKLIEKKAGRYVQNDLRLTTDYLRFDLNTDIAGKPNDEKKSHKELTAKLFXDISIMDHATK

SEQ ID NO: 240084 - protein, 99 aa, Glycine max
  unsure (1)..(99): unsure at all Xaa locations
  Clone ID: PAT_MRT3847_58823C.1.pep
XXXXXDXQXHXXLXXXXXXXXXXTRXHXXXXHRXXCXXXXXXLXTSTXTSXXXHXXSXXXXXXXHXKXXSXXLSXXXXXGAXXHXXXTIAAXXXXXXXX

SEQ ID NO: 240085 - protein, 53 aa, Glycine max
  Clone ID: PAT_MRT3847_58824C.1.pep
EEWIANMEACMSFLSPFLPPKDISQVEFVINNMSSHYVIGLKPNSNISCTNSL

SEQ ID NO: 240086 - protein, 91 aa, Glycine max
  unsure (1)..(91): unsure at all Xaa locations
  Clone ID: PAT_MRT3847_58825C.1.pep
FTGKLVDAFFYGLTSTLXIILSCAISLFTNLIHFICIGRFTALTFQFLFHIKTILVLILXFIFFLKYGLNLHFFLFIIILISLIVSYFFSF

SEQ ID NO: 240087 - protein, 39 aa, Glycine max
  unsure (1)..(39): unsure at all Xaa locations
  Clone ID: PAT_MRT3847_58826C.1.pep
XTSPWILPXXVLNIXHSSVXVLAPSELXDXXVXHXADXA

SEQ ID NO: 240088 - protein, 72 aa, Glycine max
  Clone ID: PAT_MRT3847_58827C.1.pep
KRNQKMKFKYIFSNQAIQVFYPTLFEFCIFCLVCMDIPLDFVFLLIVAIILSMGIYLMLICVFAICMHRYYL

SEQ ID NO: 240089 - protein, 75 aa, Glycine max
  Clone ID: PAT_MRT3847_58828C.1.pep
MPWGKAISSSAAKSSKPEEPVESDEKVDFEEANDPEEAMEEEIEYEEVEEEEEVEEIEEEVEEVEEEEDGDVCRR

SEQ ID NO: 240090 - protein, 75 aa, Glycine max
  Clone ID: PAT_MRT3847_58829C.1.pep
FRHFMLKKIKFVLISNDKGTKMNSWLTSISPCLIGYGEKKRKIGYDMEIGSCILIMIYFKIVGKHIKVLTWRLIS

SEQ ID NO: 240091 - protein, 52 aa, Glycine max
  Clone ID: PAT_MRT3847_5882C.1.pep
TTFSANFLLLNAPHSKPSISFIHNLQGWINRSCSEHLSIRDQKSKYCTELSS

SEQ ID NO: 240092 - protein, 92 aa, Glycine max
  unsure (1)..(92): unsure at all Xaa locations
  Clone ID: PAT_MRT3847_58830C.1.pep
PLACFGPXPXEPXRMXGNGFFPMKCCPGPGLSGIYNLWYPLTSPSQSGGFFFSHLFGSLQTNLSQPGLSPYLFLVSPRERGSSSSSLVGRQK

SEQ ID NO: 240093 - protein, 266 aa, Glycine max
  unsure (1)..(266): unsure at all Xaa locations
  Clone ID: PAT_MRT3847_58831C.1.pep
ENGETISDERKIRIKPLPKRIVSRPPEFPADHPVSDVGLVSRNSSHLDSFLDPAFMSLIKDPDERRLEQWEKTVQAQRGWNFANLLGFGDLGGPPLSAAEEYSVHSRYLSKAKSLNLSEIAEMKVVYRGGVDIEGRPVMVVVGAHFLLRCLDLERFVLYVVKXQPDLGWMKRFQQILGRKHQHNLHAIYVLHPTLGLKLTIFALQLLVNNVVWKKVVYVDRLLQLFRYVPREQLTIPDFVFQHDLEVNGGKGLVVDPRTKYVYHRP

SEQ ID NO: 240094 - protein, 42 aa, Glycine max
  Clone ID: PAT_MRT3847_58832C.1.pep
HVHLIYCIKNTLRAINYKLNSQIHHHEKELKSLNLSKSKGTN

SEQ ID NO: 240095 - protein, 73 aa, Glycine max
  unsure (1)..(73): unsure at all Xaa locations
  Clone ID: PAT_MRT3847_58833C.1.pep
XVXTKXGNPSTHGXVTXPXFXMIXTEPXFGKXQXHELXTQXLCKNSCTSQALGCDRFWCTXXKAXSXQSNXQX

SEQ ID NO: 240096 - protein, 77 aa, Glycine max
  Clone ID: PAT_MRT3847_58834C.1.pep
LDYTSTHTFRTTKVNGGDFFPRTCSPLSSQTALKHGRPWAYIEGQFSEYHPPITSVGGGSPYVKKDIQFAQRCEVNQ

SEQ ID NO: 240097 - protein, 47 aa, Glycine max
  Clone ID: PAT_MRT3847_58835C.1.pep
LNLSLILYTHLRRSGQNHRISLLLKADRAMAFLNKIGNLLKNCCCQA

SEQ ID NO: 240098 - protein, 60 aa, Glycine max
  Clone ID: PAT_MRT3847_58836C.1.pep
SCGNEHPFPSKAIVHEIFFCFCSNNVHEIPSYNITSLHLFLLGYYYCKINIYFKMMKIKA

SEQ ID NO: 240099 - protein, 112 aa, Glycine max
  Clone ID: PAT_MRT3847_58837C.1.pep
FTHKLHPLKSKCIRQLTHLIQILKQQVNILKMPGSQFMSHFHTSHSNENLSICLSWSNLHGFPSHNLCFPALPPPFCAFYLHDHHHPCCAAFFRIIIIPSVVSRRLEPIRLE

SEQ ID NO: 240100 - protein, 81 aa, Glycine max
  Clone ID: PAT_MRT3847_58838C.1.pep
AKPAGDKKTAAKPAAKPAAKPAAEKSAKPAAVKPVAEKPAKPAAEKPAKPAAPATEKPAAKEAAAKKAPAKAAAKKAPAKK

SEQ ID NO: 240101 - protein, 146 aa, Glycine max
  unsure (1)..(146): unsure at all Xaa locations
  Clone ID: PAT_MRT3847_58839C.1.pep
MWRTRAARKSAPGDRRSEEAHTGLRPATGGLTQISTYQNXTDLLIRXFRFYGSXRDLPRDFKTNLTIQTSADTTLHEDADAHLDGLSEDTKLCAILATRVTIMPKGLQLPRRIRSKRAYVNNSLWIEVNETLYQRLVCESRSVRKC

SEQ ID NO: 240102 - protein, 92 aa, Glycine max
  Clone ID: PAT_MRT3847_5883C.1.pep
SHKHGIDDHVSHMEMSLQYDEFVDHDGENIGQFIRHVHRDGNITRYCKGLQHRSECLYDCGIRYHLLVMSRDGSVSESQSVTVQPIRYHSPS

SEQ ID NO: 240103 - protein, 54 aa, Glycine max
  Clone ID: PAT_MRT3847_58840C.1.pep
PGCPHESVKASAETTGQNGLQTFSYQDRGFRGLFVELYSLCRLALRCIHQGMVT

SEQ ID NO: 240104 - protein, 227 aa, Glycine max
  Clone ID: PAT_MRT3847_58841C.1.pep
MVREKIQIKKIDNATARQVTFSKRRRGLFKKAEELSVMCDADVALIIFSSTGKLFEYSSSSMKEILERHHLHSKNLARMEQPSLELQLVENSNCSRLSKEVAEKSHQLRQLRGEDLQGLNIEELQQLERSLETGLGRVIEKKGEKIMSEITDLQRKGMLLMEENERLKRHVAGIINGQRHGGAESENFVMDEGQSSESVTYVCNSTGLPQDYESSDTSLKLGLPYSG

SEQ ID NO: 240105 - protein, 261 aa, Glycine max
  unsure (1)..(261): unsure at all Xaa locations
  Clone ID: PAT_MRT3847_58842C.1.pep
MSFPFNHSHRRDDDDDDKRPAVYPPPGNTFNNPPPPFYGVHQPETHVSHVFNNSNYSAPPPPPPSHNHHHDSFTHGGGSTVHHTPHNNAPPTTSVHHLSHLVNTGVLSSKPTVRVFTKANPNFSLTIRGGQVILAPSDPTNEYQHWYKDEKYSTRVKDEEGCPAFSLINKATGEALKHSIGATHPVRLIPYKPDYLDESILWTESRDLXDGHRAIRMVNNVHLNVDAFHGDKNFGGVRDGTTIVLWDWNKGDNQRWKILPY

SEQ ID NO: 240106 - protein, 311 aa, Glycine max
  Clone ID: PAT_MRT3847_58843C.1.pep
MSFPFNHSHATHTHHRRDDDDDERPTVYPPPGNSFSNPPPPFYGVPQPPPPQPETHVFHSAHVTPGHVSHDFNNYSAPPPPPPSHHHHDRHHDSFTHAYPPAPAAADYPAHGGSSTTVHHVAHESHHHTPHSAFSSHNNAPPTTVHHVSHQVNTGGLSTKPTVRVFTKANPNFSLTIRRGQVILAPSDPTNEYQHWYKDEKYSTRVKDEEGCPAFSLINKATGEALKHSIGATHPVRLIPYKPDYLDESILWTESRDLGDGHRAIRMVNNVHLNVDAFHGDKNSGGVRDGTTIVLWDWNKGDNQRWKILPY

SEQ ID NO: 240107 - protein, 145 aa, Glycine max
  unsure (1)..(145): unsure at all Xaa locations
  Clone ID: PAT_MRT3847_58844C.1.pep
MASLASLAVVQPSTVKGLAGTKLSFKPSRQSFRPKNXQFNINYRSGAVVAKYGDKSVYFDLEDLGNTTGQWDLYGSDAPSPYNPLQSKFFETFASPFTKRGLLLKFLILGGGSTLAYFSSTASGDILPIKKGPQLPPKLGPRGKI

SEQ ID NO: 240108 - protein, 45 aa, Glycine max
  Clone ID: PAT_MRT3847_58845C.1.pep
RNHSFFRALFIFLSSLTLKGYFSLISKLQDHGCCAFHFRDIWECF

SEQ ID NO: 240109 - protein, 72 aa, Glycine max
  Clone ID: PAT_MRT3847_58846C.1.pep
QTPQVCSCFKCFTYLGWQCCCSNRRGYEHTCSLIDVDLIKLFCSFPLHKSLLNFMHAFKHICKSVFQRWDEI

SEQ ID NO: 240110 - protein, 80 aa, Glycine max
  Clone ID: PAT_MRT3847_58847C.1.pep
SGGPGNTFFFFFFFFFFFLISTNRMLTSNKPMPLPRKKKKEKGGLKKKRKPLPPPPLKRGGTKKKRQGGPRPPKPGGGEP

SEQ ID NO: 240111 - protein, 139 aa, Glycine max
  Clone ID: PAT_MRT3847_58848C.1.pep
MASLASLAVVQPSTVKGLAGTKLSFKPSRQSFRPKNFRSGAVVAKYGDKSVYFDLEDLGNTTGQWDLYGSDAPSPYNPLQSKFFETFAAPFTKRGLLLKFLILGGGSTLAYLSATASGDILPIKKGPQLPPKPGPRGKI

SEQ ID NO: 240112 - protein, 79 aa, Glycine max
  Clone ID: PAT_MRT3847_58849C.1.pep
ILNTLIRECHLTDPYILHLIGRKALTQLLETLDNVMELDLSFTRVSALSSPFGRPSTRKMLSLVITNIESLPSRLRNLT

SEQ ID NO: 240113 - protein, 69 aa, Glycine max
  Clone ID: PAT_MRT3847_5884C.1.pep
KTGCKFNMFFNFELKRWRGWIFITPKPLVLSPAHEFTPHFLGVENKIFDQNFSFTFGGFLFFQIFPGGV

SEQ ID NO: 240114 - protein, 98 aa, Glycine max
  unsure (1)..(98): unsure at all Xaa locations
  Clone ID: PAT_MRT3847_58850C.1.pep
SLHAYVSSEFSGSSSXMGLLXCXXXTXLXXXSKGGXXVXXLXXTXNFQRXLILSGGHXXYXXXFNRGXYTXXYMGXXXXXGXXXAXXRXPHVXXLXXX

SEQ ID NO: 240115 - protein, 90 aa, Glycine max
  Clone ID: PAT_MRT3847_58851C.1.pep
LFFFVLLEECFMVKTKQQTPCIFSGEIENGACAYYFTGCAYDKILLPVSNPQGLLFFLSSLGKPCFCYHTRCLAPTFTINGGPVENKYLT

SEQ ID NO: 240116 - protein, 74 aa, Glycine max
  Clone ID: PAT_MRT3847_58852C.1.pep
PLEAPLTYSGITLSNTNNITITPTFIMGPTRIYHHISTRTCLCPITPSTPHTTPPDLSPFPPPPPQRRRTSYSM

SEQ ID NO: 240117 - protein, 70 aa, Glycine max
  Clone ID: PAT_MRT3847_58853C.1.pep
MFFFKKKKKKKKKKKKKKKKKKKKKKKKKKKKKTLGGGPGPQFPLLGGVLPPPIGPVFKTGLEKPWGSPI

SEQ ID NO: 240118 - protein, 70 aa, Glycine max
  Clone ID: PAT_MRT3847_58854C.1.pep
EQHSMHRCISHLSCLPSATEPTSCSETRVAIAKTPCGCSQPCPMEDKVQAPDGTGEIITPKELPVEETLF

SEQ ID NO: 240119 - protein, 152 aa, Glycine max
  unsure (1)..(152): unsure at all Xaa locations
  Clone ID: PAT_MRT3847_58855C.1.pep
LWWPTRAADNAIHILCDEKYSSSGDRLIKIWXCAMVLATKTSVGHEKGIACVQFDNQRVDSGSNDNTIRIFDHASRAEVACLRGHADLVRTVQAGFGDPPGSEEALKLEALAVDREFWNAQRSGEATDLGPRALRRAGHIQDNNWIPQPARH

SEQ ID NO: 240120 - protein, 126 aa, Glycine max
  unsure (1)..(126): unsure at all Xaa locations
  Clone ID: PAT_MRT3847_58856C.1.pep
TKQIKAKGVKXNKREYLAVQDCVNXXSLIVWSNLISQAIKELRRLNQRGSTINDDMLWRISNDETWVSTALTDASSCVYSFPGXGLTREQLRLRXMNVAEVTNNALALFHRYASRYRQAATKTTKP

SEQ ID NO: 240121 - protein, 63 aa, Glycine max
  Clone ID: PAT_MRT3847_58857C.1.pep
NSCFAPCQFKRQKTWFANDSPPIEAKPIPFPFAAWYFVPKAVKPIAWAFPCGTGSHNLGFTFK

SEQ ID NO: 240122 - protein, 170 aa, Glycine max
  Clone ID: PAT_MRT3847_58858C.1.pep
DSKLLAENLLDTICTECGASRVSSCKVYSAVPPPQQVYTAVPPPHQVYSAVPPPQQVYSGPSLLKQIPAAISPPQVYSAVPPPQQLLTGVQSSGIDLEAGASLITSSMSAAGVLTPVPPASLVGVTGVTGALTLGTTAQSIRHLNSGPQANMTGYTPPPLVSGGTSYIGY

SEQ ID NO: 240123 - protein, 40 aa, Glycine max
  Clone ID: PAT_MRT3847_58859C.1.pep
SHANPSSNAITEQSLLDIFRSLDRFTTLLCTRIQGKGLEP

SEQ ID NO: 240124 - protein, 49 aa, Glycine max
  Clone ID: PAT_MRT3847_5885C.1.pep
RLMSACLLCYASCGGNQFRSEIQKKQISLELNKSCQLFFSPLGHLHDKN

SEQ ID NO: 240125 - protein, 85 aa, Glycine max
  Clone ID: PAT_MRT3847_58860C.1.pep
HERRSSDTNTTNASNNNTSSRPGKMVSVPATVSSLVMDKSNNCGGESGAKRITVKRNVGDAGSRGTASPRAQSPARVNGNVGRDK

SEQ ID NO: 240126 - protein, 94 aa, Glycine max
  Clone ID: PAT_MRT3847_58861C.1.pep
GMSEAPPPPPVKFNNNPNNNPNGGYCWGLDVPIRPKVKEEVNGVCCSDDQSNSSGGYLGGFSDLEGFISEIGGFPLLPLDGNHMMQGLEESQLL

SEQ ID NO: 240127 - protein, 144 aa, Glycine max
  unsure (1)..(144): unsure at all Xaa locations
  Clone ID: PAT_MRT3847_58862C.1.pep
LVSCKTVSEVTHDNKVIRKILKXGAGYERPNEGAIAKVQXLGKLQDGAAFLEKVHHTEEQXFAFFPGEEQVADGLNRGVFPMKKGEVALMTIAPEYAFGSSKSQQEGLVVPPTPTVYLEVXVVSFEKEKESWDLFTKEKLEAAG

SEQ ID NO: 240128 - protein, 113 aa, Glycine max
  unsure (1)..(113): unsure at all Xaa locations
  Clone ID: PAT_MRT3847_58863C.1.pep
MAGSLQADSTFMQPSRVGMAARNLXCAQCIRKAFGYRTLWAYLICXIRPDLKDGAKMCVDAXEWKDYPLTTQXIIATGASAECVLGRLIFDLTHSKRFLLADGTATGKQGPPI

SEQ ID NO: 240129 - protein, 66 aa, Glycine max
  Clone ID: PAT_MRT3847_58864C.1.pep
GCKARKESGCMPYHHQTFIKPLSLPSNRSYSSNLLILLFFYLSPSLNNSKQKTRTTKFSRLHPNGS

SEQ ID NO: 240130 - protein, 65 aa, Glycine max
  Clone ID: PAT_MRT3847_58865C.1.pep
ILLQRETKHLKMYSKSITNSESIAQRETKHAHQQAMESKIKFLQFQCRQNLDAYPNVVLVLFSNQ

SEQ ID NO: 240131 - protein, 416 aa, Glycine max
  Clone ID: PAT_MRT3847_58866C.1.pep
SINYLMMEEPVVVNKGDYDHDHDQPLDLPPGFRFHPTDEEIITCYLTEKVLNRAFSATAIGEADFNKCEPWDLPKKAKMGEKDWYFFSTWDRMIPTGMRTNRATQSGYSQTLSTSLWSVPRKNNLVGMKKTLVFYRGRAPKGEKTNWVMHEFRLDGKFACYNLPKAAKDEWVVCKVFHKSSTTTTDVNKRVLPIINPGLLRMNSSNGEDLLFDFSSLPPLVDPLFDQTSNKHIDNDFKGTNNTPSSSSAKLPSSSGYYLPNFNNNNNNQQMLMMKPEEHKIYEIPINNYASTSQVDFTTTNNPMGISTSNNNILLSQPQIRTQNSTSVPFNMFQDCYNHTHQGKQCKMEQFSIDSTKKQPVVSASQDTCLSNDTSSVVSKQDNNMGRNKALYEDNFEGPSSVATTLSDLECLWDDY

SEQ ID NO: 240132 - protein, 172 aa, Glycine max
  unsure (1)..(172): unsure at all Xaa locations
  Clone ID: PAT_MRT3847_58867C.1.pep
MRRMKKDIEDEVLPNDMSGAQLNDESYEGSAGIVLKKGPWTSTEDDILVDYVKKHGEGNWNAVQKHTGLFRCGKSCRLRWANHLRPNLKKXGAFAAEEERLIAELHAKMGNKWARMAAHLPGRTDNEIKNYWNTRIKRRQRAGLPLYPPEVSLHALQESQHSQSTGGLKWWR

SEQ ID NO: 240133 - protein, 57 aa, Glycine max
  Clone ID: PAT_MRT3847_58868C.1.pep
SRIRQLFGILFLLTVMMCILFPSLVIYVSSRVNGACCFRLPLWLVSILGVLITVGCP

SEQ ID NO: 240134 - protein, 145 aa, Glycine max
  Clone ID: PAT_MRT3847_58869C.1.pep
MPKNKGKGGKNRKRGKNEADDEKRELVFKEDGQEYAQVLRMLGNGRCEAMCIDGTKRLCHIRGKMHKKVWIAAGDIILVGLRDYQDDKADVILKYMPDEARLLKAYGELPDTTRLNEGIGAGLDEEDDATANDYIEFEDEDIDKI

SEQ ID NO: 240135 - protein, 338 aa, Glycine max
  Clone ID: PAT_MRT3847_5886C.1.pep
MVVCKCRKATKLYCFVHKVPVCGECICFPEHQICVVRTYSEWVIDGEYDWPPKCCQCQSVLEEGDGSQTTRLGCLHVIHTNCLVSHIKSFPPHTAPAGYACPSCSTTIWPPKSVKDSGSRLHSKLKEAIMQSGMEKNVFGNHPVSVTESRSPPPAFASDPLIIRENHGNSDSVDGYSPATGSELPKLSVTDIVEIDGANPAGDFLKNSSPVGPGATTRKGPVHVERQNSEISYYADDEDANRKKYTKRGPFHHKFLRALLPFWSTALPTLPVTAPPRKDASNAAAETSEGRTRHQRSSRMDPRKILLLIAIMACMATMGILYYRLAQRGPGDELLNDE

SEQ ID NO: 240136 - protein, 913 aa, Glycine max
  unsure (1)..(913): unsure at all Xaa locations
  Clone ID: PAT_MRT3847_58870C.1.pep
MGPSSKKASPKSGVTKHMKGFSLCNSTLKVNGQVILSQVPKNVTLTPCTYDTHTTGCFLGFHATSPKSRHVAPLGQLKNISFTSIFRFKVWWTTLWTGSNGRDLETETQFLMLQSHPYVLFLPILQPPFRASLQPHSDDNVAVCVESGSSHVTASSFDTVVYLHAGDNPFTLVKEAMRVVRAHLGSFKLLEEKTVPGMVDMFGWCTWDAFYLTVHPEGVREGVKXLVDGGCPPGFVLIDDGWQCISHDTERSRGSLNYTVPGEQMPNRLIKFEENDKFKEYKCRRQGNKGMGAFVRELKEEFSGLEYVYVWHAFCGYWGGVRPKVPGMPEATVVPTKLSPGAEMTMTDQAVVKIMEIGVGLVPPHRAHELYEGLHSHLESVGIDGVKIDVTHILEMLSEEYGGRVELAKAYYKALTASVRKHFKGNGVISSMQQCNDFMFLGTETISLGRVGDDFWCTDPAGDPNGTYWLQGCHMVHCAYNSLWMGNFIHPDWDMFQSDHACAEFHAASRAISGGPIYVSDSVGKHNFKLLKKLVLPDGSILRCQHYALPTRDCLFVDPLHDGKTMLKIWNLNKCSGVLGLFNCQGGGWCPVTRRNKSSSDYSHSVTCFASPQDIEWGKGKHPVCIKGVDVFAVYMFKDDKLKLLKYTESVEVSLEPFSCELLTVSPVVILPRKSIQFAPIGLVNMLNSGGSIMXLEFDQQENLARIGVRGHGEMRVFASKGVTWCIVHTTACGWAISSTQIGTCSNLLILVLPSMLPQEPYLVAPFTSVTQLGTTTLSCLRPWPCQMGPSSDVSTMHSQPGTVSLLTLSMMAKQCSRYGTSTSTLEFLGCLTAREEVGSVRLGPTNVLLSFLIGYQPRPISKTLNGIVERIQFPLKGCNFSLRISAKPRNSSSQHHLMTVKRFPWSHSISSL

SEQ ID NO: 240137 - protein, 50 aa, Glycine max
  Clone ID: PAT_MRT3847_58871C.1.pep
EKITDASQNWGCCELVNHDIRHDSLNTAKRMTKEHYKKRMEDTFKEFMAS

SEQ ID NO: 240138 - protein, 319 aa, Glycine max
  Clone ID: PAT_MRT3847_58872C.1.pep
MVVLTFTDEFTSSVQPRRLFKALILDAPNLIPKLMPEAIKNVQLAEGNGGPGSIQEITIAEGGNIKQLKHRIDAIDLEKLTYSYAVIDGDAALEKVDSISHEIKFEATEEGGCKTKNVSKYHPKEGVDVKEEDFKAAREEGLALLKVVDAYLVANPEAYAEGTINSDEFTSTVQPGRLFKALVLDAPNLIPKLMPEAIKNIQLVEGNGGPGSIQEITIVEGDKIKHLKHRIDVIDQEKLTYSYAVIEGDGALEKVDSIAHEVKFEATEEGGCKIKNVSKYHPKVGVDVKEEDFKAATEEGLALLKVVDAYLVANPEAYA

SEQ ID NO: 240139 - protein, 56 aa, Glycine max
  Clone ID: PAT_MRT3847_58873C.1.pep
LYTAYVNSINHDLKTILHFALPPHETVALHYEPVLEGGGLTRDARLQPDTDYQIFN

SEQ ID NO: 240140 - protein, 75 aa, Glycine max
  unsure (1)..(75): unsure at all Xaa locations
  Clone ID: PAT_MRT3847_58874C.1.pep
LFEXGIIGXTQXSLSQXXXAIXXHCIXANIPTCRALHKLIXIRIAXCXXYVATHYFXLXSRSSLFRGMGQSIGAV

SEQ ID NO: 240141 - protein, 103 aa, Glycine max
  Clone ID: PAT_MRT3847_58875C.1.pep
GHAPVLDRHTSHIPVKFCAILTTLPRRSGKELHKEPKFLKNADAGLAHMVPSTPMVVDTFSEYPPLGRFAVRDMRQTVAVGVIKSVEKKDPTGAKVPKAAAKN

SEQ ID NO: 240142 - protein, 46 aa, Glycine max
  unsure (1)..(46): unsure at all Xaa locations
  Clone ID: PAT_MRT3847_58876C.1.pep
AXXVGRKCRNXANTNKPSASSSNIVNXXARPVXXXXDPEXEXGXXL

SEQ ID NO: 240143 - protein, 165 aa, Glycine max
  Clone ID: PAT_MRT3847_58877C.1.pep
DEFHANGVIPRGANASFITLIPKVSDPHCLNDFRPILLIGCVYKIVAKLLANRVKRVMPSIIDECQSAFIAGRHLLHSVVITNVVEEARRGKKLCMIFKVDLERAYDFVSWNFLSYMLRRLGFCNKWILWIEGCLKSASVSVLVNGSPTVEFVPQRGLRQGDPLA

SEQ ID NO: 240144 - protein, 98 aa, Glycine max
  unsure (1)..(98): unsure at all Xaa locations
  Clone ID: PAT_MRT3847_58878C.1.pep
RNPCQFPNSMANTCPSPFFCHNLIPQPEPCTAFSDLNNQKKSLRTYFVLLSSNIILLFLTNLIIVFFIVTLVFNNLVLYYIIQQPRIHIHLRDLKFNX

SEQ ID NO: 240145 - protein, 46 aa, Glycine max
  unsure (1)..(46): unsure at all Xaa locations
  Clone ID: PAT_MRT3847_58879C.1.pep
ESGSNIIVAVSETKVVDSHEINYKGWTSGKCVFLFLDKKKKKKKKX

SEQ ID NO: 240146 - protein, 88 aa, Glycine max
  Clone ID: PAT_MRT3847_5887C.1.pep
QSLVAQHFSFVSNYVFLAVGILCGSCYIGTVLLNSDSWHVFRILLHWSNFHTREKYARHFFLWLKSCVDCIVAFVEVNKSKFLKFHFF

SEQ ID NO: 240147 - protein, 57 aa, Glycine max
  Clone ID: PAT_MRT3847_58880C.1.pep
ACREKKYNYLDILTILSRFLNFNNFPIIILLFSLKFLNCSAKKGYQIKVHFGGFTHH

SEQ ID NO: 240148 - protein, 78 aa, Glycine max
  Clone ID: PAT_MRT3847_58881C.1.pep
VPKIGIVRHQIPMISGMMNVLRGSTLFCKITHASIIFMIHIHRDSLGRFVLILGFNTNLVAHIGHFRFVILFGRSNQH

SEQ ID NO: 240149 - protein, 77 aa, Glycine max
  Clone ID: PAT_MRT3847_58882C.1.pep
DFGSSYCTARGSIMRSVLLPISPTLACTKASVGSHGTRLLKRMIQMVASQGPTVYSCFSSAFSLDGYFNMHAHDFFY

SEQ ID NO: 240150 - protein, 172 aa, Glycine max
  unsure (1)..(172): unsure at all Xaa locations
  Clone ID: PAT_MRT3847_58883C.1.pep
EFAWGXLANSKKPFLWIIRPDLVIGGSVILSSEFVNETRDRSLIASWCPQEQVLNHPSIGVFLTHCGWNSTTESICAGVPMLCWPFFADQPTNCRYICNEWEIGMEIDTNAKREDLEKLVNELMVGEKGKKMGQKTMELKKKAEEETRPGGGSYMNLDKLIKEVLLKQTTLD

SEQ ID NO: 240151 - protein, 49 aa, Glycine max
  Clone ID: PAT_MRT3847_58884C.1.pep
RAFCAFLAVVEPCWRGRGRVCWGVLLDYAPSCLLGWSVLGIERCVLASL

SEQ ID NO: 240152 - protein, 60 aa, Glycine max
  unsure (1)..(60): unsure at all Xaa locations
  Clone ID: PAT_MRT3847_58885C.1.pep
MIDSAPGMXALHMNAADEAIVRLTTEIVPGMDATCMKGAELDGSPRMGPTFGAIMKSWHK

SEQ ID NO: 240153 - protein, 78 aa, Glycine max
  unsure (1)..(78): unsure at all Xaa locations
  Clone ID: PAT_MRT3847_58886C.1.pep
ANIHDMEGIPPHHPRLIFAGKHLXDCRSLSYYNIHKESTLHLVLLLQGGMXIFVKTLTGITITLEVESIYTIDNVKAN

SEQ ID NO: 240154 - protein, 107 aa, Glycine max
  Clone ID: PAT_MRT3847_58887C.1.pep
PTVKWHRLMMPPFTIMMGNSIPKADGVIRPIHSVIPQWTRMLAGAFSGHWVLAHLYPSTKGIMAKKGRPPTTGGVWSGPIAITSSLLWGAIDPPAGAGQIGGSNQFP

SEQ ID NO: 240155 - protein, 113 aa, Glycine max
  Clone ID: PAT_MRT3847_58888C.1.pep
GGNFPYKPIGSLGGFKHLTTGKLRKILRVFNQTKPPILGPIRNIPPPSYGGVLNPPKGFDSQIAPQAGEHFGSLPMDTENFFRKLSGVSSTKGPGSGMAKLFKTLGEKMPKGP

SEQ ID NO: 240156 - protein, 109 aa, Glycine max
  unsure (1)..(109): unsure at all Xaa locations
  Clone ID: PAT_MRT3847_58889C.1.pep
MRSRIAAYINTHLLLLHLTNPQPLVHRDQKPLNIPLDHNHYINIIHDELPRIVXAVAKXVTQXTITSPTETFKFFNPKNYKTLILIEKSIVYSLRIIYLQLLTGNAPIE

SEQ ID NO: 240157 - protein, 62 aa, Glycine max
  Clone ID: PAT_MRT3847_5888C.1.pep
VTELFICLPKAIPKFLFFTNILRALPPFHIHYMGIFDYSQTHCIYATVWGALLHMATRFCGT

SEQ ID NO: 240158 - protein, 72 aa, Glycine max
  Clone ID: PAT_MRT3847_58890C.1.pep
HASANDLIVWNALTKQRVFGSKPAERKKKKKKKKKKKKKKKKKKKKKKKQKQKKKKKKNINKKIKNKENQKE

SEQ ID NO: 240159 - protein, 55 aa, Glycine max
  Clone ID: PAT_MRT3847_58891C.1.pep
FSVFHISPEVAGHLLNNPQPLLLLVRAMLILVIKMPMSPPPSLICLPLCCLAGST

SEQ ID NO: 240160 - protein, 151 aa, Glycine max
  unsure (1)..(151): unsure at all Xaa locations
  Clone ID: PAT_MRT3847_58892C.1.pep
GPPGSQKLHSVAASFQKQLPGFKIAIFDISKPLXALVPSPPKSGFGEPTPGSWGTGPVKPPPPGGNSKSPGPCFNPPQYVFWARVPPPQGANPVLGEAFIFQGIFLVPKKLGIIYGVKLILGPPPPGKGFQRWRFFFRLKKKKRAPIFFRF

SEQ ID NO: 240161 - protein, 68 aa, Glycine max
  Clone ID: PAT_MRT3847_58893C.1.pep
GLKSPVLNGCFVLGPVLPGMWSLELVVGVLKFVAGSDGKTVWRHSPWLGTHAVEGPQRPLRRIIQVNC

SEQ ID NO: 240162 - protein, 54 aa, Glycine max
  Clone ID: PAT_MRT3847_58894C.1.pep
ATYPWSSFRAYAEFRFVASPLSGLETAHPKGAYLPMLLSNKLLDLFPDTELSLS

SEQ ID NO: 240163 - protein, 387 aa, Glycine max
  unsure (1)..(387): unsure at all Xaa locations
  Clone ID: PAT_MRT3847_58895C.1.pep
LSLSFESLSSNTHYFGHSPSLSARFDPEVIAYRVTFSEPHVLCLLSYCAGAWPFDHLGFLGVASSACPTGLPHHARRWMSVSTSPARSLPDLFSNSEYTPRASSTPALSXRTFRGFDTAMDTSPDSLALFKYIEGEAGGLDYIGMNSYGHEEVWVADLKMEENEEYSGSGRGLFSGGLYRMFLQYHQRYKQLNIPFIITENGVSDETDLIRRPYLLEHLLAIYAAMIMGVRVLGYLFWTISDNWEWADGYGPKFGLVAVDRANNLARTPRPSYHLFSKIVNTGKVTHEDRERAWDELQRVAKEKKTRPFYRAVDKHRLMYAGGLDKPEQRPYIERDWRFGHYQMDGLQDPLSRFSRSIFRPFSLFSLKRKPKSQKKNAKLILQPLET

SEQ ID NO: 240164 - protein, 72 aa, Glycine max
  Clone ID: PAT_MRT3847_58896C.1.pep
MHVFIIERGGRPETTPAELKRFTSTMTTGLHVNRSAEGPFLAKGKTDDQGRHPSWKEHKEYMINPGVTRSQL

SEQ ID NO: 240165 - protein, 300 aa, Glycine max
  Clone ID: PAT_MRT3847_58897C.1.pep
MQSGSGDFHTFICSEDPVGPAADVPFDTAAREEQLSSSADSSEQKTPLGKTLKLISGSCYLPHPDKEETGGEDAHFICSEEQAIGVADGVGGWADLGVNAGYYSRELMSKSVEAIQDEPKGSIDPARVLEKAHSSTKARGSSTACIIALTDQGLNAINLGDSGFMVVRDGCTIFRSPVQQHDFNFTYQLECGSNGDLPSSGQVFTIPVAPGDVIVAGTDGLFDNLYNNEITAVVVHAMRTGLSPQVTAQKIAALARQRALDKDRQTPFSTAAQDAGFRYYGGKLDDTTVVVSYITGSGDA

SEQ ID NO: 240166 - protein, 151 aa, Glycine max
  unsure (1)..(151): unsure at all Xaa locations
  Clone ID: PAT_MRT3847_58898C.1.pep
GGGGRHGQDPQKEERHTQRESKQKSKKTTARHHHKQGGXXPPPQQAPXXXKGGGRXPXXXAPAAXPREETAGAAXRAAEKPAXPQPAXPERGPGRGXPKGAXEKEXAPXXAAPRPQPDREAPETQPTRAKDQPPAPPRGGKQAPAPRTGEP

SEQ ID NO: 240167 - protein, 75 aa, Glycine max
  Clone ID: PAT_MRT3847_58899C.1.pep
VFFQRCQVWNKTFCSHAIYQLIHSATIFIRSHPCLPFHLFIELTSNHFHLFGAISSKFHLNESLPERSSKTNLER

SEQ ID NO: 240168 - protein, 91 aa, Glycine max
  Clone ID: PAT_MRT3847_5889C.1.pep
DSGLRLPKMWPPDHHHHPLGHNHDLQIGSSSSNWPLRLFSILLVFLSKKLKTKGTPTTIFPFSSLQQHSLVLFMVATKMLKLILLLLLLPD

SEQ ID NO: 240169 - protein, 177 aa, Glycine max
  unsure (1)..(177): unsure at all Xaa locations
  Clone ID: PAT_MRT3847_588C.1.pep
MGILYALVGRGSVVLAEFSGTTTNASAIARQILEKTPGNNDMHVSYSQDRYIFHVKRTDGLTVLCMADDTAGRRIPFAFLEDIHQKFVRTYGRAVHSAQPYGMNEEFSRILSQQMEYYSSDPNADRINRLKGEMSQVRNVMIENIDKVLDRGDRLEXLLVDKTANMQRNTFRFKKQA

SEQ ID NO: 240170 - protein, 63 aa, Glycine max
  Clone ID: PAT_MRT3847_58900C.1.pep
KFKNDFCFNTQVQGGVCTKGVHLSLLNEKLFFGPGSFYFKKFLHDPPIFVFINWKHEIGSFED

SEQ ID NO: 240171 - protein, 68 aa, Glycine max
  Clone ID: PAT_MRT3847_58901C.1.pep
MRQLLISFELNTGATIPSGVLGTWQAEPGVVGKAVTTAILVGYRHIDCAQAYNNQAEIGSALKKLFGD

SEQ ID NO: 240172 - protein, 67 aa, Glycine max
  Clone ID: PAT_MRT3847_58902C.1.pep
RTEVIFRSMSPRHNRYYLFLFALNFAFVLFFHLRKRKCVGTQPKQGTTFESHILSIIFCYGVCKTFP

SEQ ID NO: 240173 - protein, 73 aa, Glycine max
  unsure (1)..(73): unsure at all Xaa locations
  Clone ID: PAT_MRT3847_58903C.1.pep
YSTTTQSLDQCYKHMPVITRSYLTTALVTTIIFSLDIISXYHLYLNPIKLMKHYXIYHLFTNFLNSNKMHLDF

SEQ ID NO: 240174 - protein, 68 aa, Glycine max
  unsure (1)..(68): unsure at all Xaa locations
  Clone ID: PAT_MRT3847_58904C.1.pep
ALFASKGCSYFDSKALPMIGATMDGLLDRXTGFILRFTAYPMRNPLQCXYRFGKKRRLPVGFIDFASK

SEQ ID NO: 240175 - protein, 104 aa, Glycine max
  unsure (1)..(104): unsure at all Xaa locations
  Clone ID: PAT_MRT3847_58905C.1.pep
PHPTTXITXTQQTXTXXXXPLXPIXNXXXXXXPXPXXRXXQXRXGXXXXGGXARXXHXGXXXXXXQXXXPXXXXXSXXXXXXXXXXXXXXXXXXXXXXXXLXYX

SEQ ID NO: 240176 - protein, 256 aa, Glycine max
  unsure (1)..(256): unsure at all Xaa locations
  Clone ID: PAT_MRT3847_58906C.1.pep
MSEEAGSMLVVYDDPSDQRSLSLDDASSTEESPDETRLSLETTNDAIPYIGQRFATHDAAYEFYSEFAKRSGFSIRRHRTEGKDGVGKGLTRRYFVCHRAGNTPVKTSTESKPQRNRKSSRCGCQAYMRISKTTEFGAPEWRVTGFANHHNHELLEPNQVRFLPAYRTISDADKNRILMFAKTGISVHQMMRLMELEKCVEPGYLPFTEKDVRNLLQSFRKLDPEEESLDLLRMCRNIKEKDPNFKFEYTLDAXNR

SEQ ID NO: 240177 - protein, 42 aa, Glycine max
  Clone ID: PAT_MRT3847_58907C.1.pep
CSHVTESWSLHLMRLCTCISSRKCLIISQTPPHGGGGPLGYC

SEQ ID NO: 240178 - protein, 141 aa, Glycine max
  Clone ID: PAT_MRT3847_58908C.1.pep
FLASFSGVGGGPLLAVALLSVVGGSSLVSCARASCSPLFGPVPFSRLAPLFPGVAGGLFPRPFLLWVGSLFGPPGLSALCFPVRLLCCFVAVLRFCSVSRPFRVWGGSFSSSLLAPLVRVLVPVRCFRVKPEIRPRVRFDR

SEQ ID NO: 240179 - protein, 68 aa, Glycine max
  unsure (1)..(68): unsure at all Xaa locations
  Clone ID: PAT_MRT3847_58909C.1.pep
PTPPTPDHTXEXXNXXSNAGGTTNGXAPXXKNXXAEXGHGKGTXTTTXXNXGDQRXXEAXHXDPRRAR

SEQ ID NO: 240180 - protein, 134 aa, Glycine max
  Clone ID: PAT_MRT3847_5890C.1.pep
VAELSSSSVSSSFASSYVMESSALILARFSLSFFSKFSLNVAKLALVSFNVVISHTRNNYSGRRLDTTVTTSFNTDVTRSNIASFKCDFLVAKNKIREFLTLKFSGLTTETLGTKSQPLAPAQSKLASVLQRRH

SEQ ID NO: 240181 - protein, 75 aa, Glycine max
  Clone ID: PAT_MRT3847_58910C.1.pep
ARRPESGDAAYPPARDDAGGPARKAALGQRVSPVQAIARKLQHFFLFFNKKESWVSMRRERGRSRVELKKQVVLN

SEQ ID NO: 240182 - protein, 61 aa, Glycine max
  Clone ID: PAT_MRT3847_58911C.1.pep
PSFYNGHGCPGALASAVPRSFKNCGNFWVFDCFWVPACSRFKVELQLCFLFLDFSIFKAFP

SEQ ID NO: 240183 - protein, 99 aa, Glycine max
  unsure (1)..(99): unsure at all Xaa locations
  Clone ID: PAT_MRT3847_58912C.1.pep
XXXXXXXXXXXXQXXXXXXXXXXFXXFYXXXNXXXITISXXKXLXPXLHXXXIXLTIXKXXTPXXTXXXLIPNXXXSLXXNXXXSXTNXXLIXXLXXXX

SEQ ID NO: 240184 - protein, 83 aa, Glycine max
  Clone ID: PAT_MRT3847_58913C.1.pep
PPNLVPPPSLPPPPLGKFWGWQNPKGLRPMAGKQSVNNSPLLLNSEIVSKKGDPPRGAPLVFPKNFFGNTKRPLGVETRFRLR

SEQ ID NO: 240185 - protein, 85 aa, Glycine max
  Clone ID: PAT_MRT3847_58914C.1.pep
SSNTCLLELFSSLLLLFSLPSNKSSSSCLLDLFSSLQLLISLPSNLSSSSSCHRFVISFLSLLLGWLSNTASLFPTHENSCQCKV

SEQ ID NO: 240186 - protein, 64 aa, Glycine max
  Clone ID: PAT_MRT3847_58915C.1.pep
SKSTVKVPVDTILGLIILYYLCDSVHLRNTTRNISQTHIFILFKTTNSVIDVLNFKEKIVKFIS

SEQ ID NO: 240187 - protein, 138 aa, Glycine max
  Clone ID: PAT_MRT3847_58916C.1.pep
HGEFKAPYALIYRNMAVGGVEGFSALPQHCLQLCYGFFAFAVVVNMVRDLSPNVFGKWMPLPMVMAIPFLVGAYFAIDMCLGSLVVYVWHKLNTKKAEAMIPATASGLICGEGLWALPASILALAKVNPPICMNFLAS

SEQ ID NO: 240188 - protein, 81 aa, Glycine max
  Clone ID: PAT_MRT3847_58917C.1.pep
LSLVIFIVVASLKTGASIPNLSNLTLIANLPTSPPVLGVQRNLYMLMKSLIILLFKYTSPVPKSTMNACKEACIGNSSTFP

SEQ ID NO: 240189 - protein, 91 aa, Glycine max
  Clone ID: PAT_MRT3847_58918C.1.pep
LCACLAVMIEGETKCEATNVMEDGGRKGQIIKYDTGNPAIDNPRNRSSPKHPPKDETKTLTKVINRYAAVRHGTAPKPKRSTLYLSEQIPY

SEQ ID NO: 240190 - protein, 85 aa, Glycine max
  Clone ID: PAT_MRT3847_58919C.1.pep
SNSVRGWSVAESVPTWQILNLTEQKKGRQLHVTVIPGRLALQQTTSVLLSLFVLWITPNQTGTLLSFTSPLISLKLGNLIYEFGV

SEQ ID NO: 240191 - protein, 40 aa, Glycine max
  Clone ID: PAT_MRT3847_5891C.1.pep
AVLRSTKALAFRPHLSVCMLTFLAVVIAPRPHLVQTTTRW

SEQ ID NO: 240192 - protein, 42 aa, Glycine max
  Clone ID: PAT_MRT3847_58920C.1.pep
NQNLIPFLQFLISLHFKNTFIFAFATRFTSNNFHPLNENLKK

SEQ ID NO: 240193 - protein, 202 aa, Glycine max
  unsure (1)..(202): unsure at all Xaa locations
  Clone ID: PAT_MRT3847_58921C.1.pep
MEEKRRDAAPSAADSPASEPATSRRRAGANKRKSGTLSASGSSSAPSKRAARDKASPLFPPAPHNGPLTRARQTPNNLSASSSAAASAPAAVKRSERAHPSAAESTALAEQLKKESEWETLEAAIEAEFEAIRSRGANAHVVPTHCGWXSWSCIHPIEKQMLPSFFSGRTGNRTSDVYWEIRNWIMXKFHSXPKCTKLNWKI

SEQ ID NO: 240194 - protein, 49 aa, Glycine max
  Clone ID: PAT_MRT3847_58922C.1.pep
ETFFFYGITIFMLLSAFAFPLGTPHTWPPPPPPPPPPPPPPPPPPPPPP

SEQ ID NO: 240195 - protein, 158 aa, Glycine max
  unsure (1)..(158): unsure at all Xaa locations
  Clone ID: PAT_MRT3847_58923C.1.pep
MEEKRRDAAPSAADSPASEPATSRRRAGANKRKSGALSASGSSSAPSKRASRDKASPLHPPPLHNGPLTRARQTPNNLASASSSAGASAPAAVKRSERAHPSAAESAALAEQLKKESEWETLEAAIEAEFEAIRSRGANAHGVPTHSGWXSWAWIHPI

SEQ ID NO: 240196 - protein, 136 aa, Glycine max
  Clone ID: PAT_MRT3847_58924C.1.pep
MDNDYETISFLIEDSENTTAKETRSGKDIQGITWETETSNYRSRETFRQHRSKGLLNGPEEHLSIKQAKQECQSTVQGGEFYNSYQYNNCLMPTIQDWALADYAGRLWSTSKHDLYLSAGTQICHWNALTSTNTEI

SEQ ID NO: 240197 - protein, 55 aa, Glycine max
  Clone ID: PAT_MRT3847_58925C.1.pep
LLDSKLKIEINLDIIVLAKHGNNNVSKYIPRDINRLTDNKCFTFYFFILLFEKKI

SEQ ID NO: 240198 - protein, 40 aa, Glycine max
  Clone ID: PAT_MRT3847_58926C.1.pep
TLSYTKGRGLIPGLIHQSPILKPNSIYYTNLHSHTLHHHI

SEQ ID NO: 240199 - protein, 211 aa, Glycine max
  Clone ID: PAT_MRT3847_58927C.1.pep
MASTASPMTVQAGRVRTLKEGSRGESGLGPVVYWMFRDQRVTDNWALIHAVAEANKANVPVAVVFNLFHTFLGAKSRHLGFMLRGLRQLCHRMQHSLQIPFFLFQGEAEETVPKFLRECGASLLVTDFSPLREVRRCKEEICKRVSDSVAVHEVDAHNVVPLWVASDKLEYSARTIRAKITKRLSDYLVDFPDIEVEPPAGKWVATEQPFH

SEQ ID NO: 240200 - protein, 44 aa, Glycine max
  unsure (1)..(44): unsure at all Xaa locations
  Clone ID: PAT_MRT3847_58928C.1.pep
APKGSLRVQNFLKKAPKGLFXGGKKKIFPPMYFFLARKPYLDRK

SEQ ID NO: 240201 - protein, 157 aa, Glycine max
  unsure (1)..(157): unsure at all Xaa locations
  Clone ID: PAT_MRT3847_58929C.1.pep
MRKPSRRXSLHSAGTRGASHLFRRGDASEPGPERKGAGLGGAGGIGXPLSLLMXLNPLGSRLSLYDIGGTPGVAGEIRHINTRSEGVGGQGEEGGGKXXGGAXGGIIAGGGRXKAGMSXEDLLNMNGGVGETLGAGRRRVAPVRLGGMGGGWRELDG

SEQ ID NO: 240202 - protein, 242 aa, Glycine max
  Clone ID: PAT_MRT3847_5892C.1.pep
MPTRPAHLTSRTPATSMSSGEERETAAFRALADRCRSLEEKQTKLREEFDELLQKNNLTVRDDNDHVSGNGNNNEVIADSTTDGFLSGFIFSGNPYATVLKCMGHAVHVLRVPSSEIVYWNHSAETLYGWKDYEIIGQRVAKVLIAEENYASLQKILEGLVTGVPWSGQFPFKKRSGEVFMAMVTKTPLYEDGELVGVIAVSSDAAILNTTNSENQRTYQSGYNGQPGVQRLNLKRISGHDQ

SEQ ID NO: 240203 - protein, 80 aa, Glycine max
  unsure (1)..(80): unsure at all Xaa locations
  Clone ID: PAT_MRT3847_58930C.1.pep
ASAEVLYLAEKGNMATAXSSACRSFGPFCHKVTASTTITFVVVVFYVLLSLISSYKLFSKYDAPTVSNPSMGADIVAFHG

SEQ ID NO: 240204 - protein, 52 aa, Glycine max
  Clone ID: PAT_MRT3847_58931C.1.pep
LVHQLYLFFFFSFIFFHPHNLSFFFIQTQNFENKRISIEVFEILLFSKLCVI

SEQ ID NO: 240205 - protein, 51 aa, Glycine max
  Clone ID: PAT_MRT3847_58932C.1.pep
QLRPSTCWNQKQPWLVGLSLQQSLQLKCSKNSTRPANITLCGRVDGRVGRP

SEQ ID NO: 240206 - protein, 379 aa, Glycine max
  unsure (1)..(379): unsure at all Xaa locations
  Clone ID: PAT_MRT3847_58933C.1.pep
MSLRKVFRSRKFSKSFKEVLPAEGAAVEGGVAGTVEEAANGNNNGWSSMLPEILGEIVRRVDAAEEQWPNRQNVVACACVCKRWRDITREVVRVPSHTGKITFPSCLKQPGPRDVPHQCLIKRNQKTSTFYLYLALTPXTFTDKGKFLLAARRYRCGTHTEYIISLDADDLSQGSNAYVGKLSSDFLGTNFTIYDSQPPHSGAKPSSGRASRRFASKQISPQVPAGNFEVGQVSYKFNLLKSRGPRRMVCSLKCPVTPVSPTSGSSDSTPVNGHKMHDKEQAASGYTILKNKAPRWHEHLQCWCLNFHGRVTVASVKNFQLVATVDQSQPGGKGDEETVLLQFGKVGDDTFTMDYRQPLSAFQAFAICLTSFGTKLACE

SEQ ID NO: 240207 - protein, 237 aa, Glycine max
  Clone ID: PAT_MRT3847_58934C.1.pep
KLGIRLEDVFRSKEIKLAFLVGAGLQAFQQFTGINTVMYYSPTIVQMAGFNSNEWALLLSLIVAAMNATGTILGIYLIDHAGRRMLALCSLGGVFASLIVLSVSFLNESSSSSGWLAVLGLVIYIAFFSPGMGPVPWTVNSEIYPEEYRGICGGMSATVCWVSNLIVSQSFLSIAEAIGIGSTFLILAAISVLAFLFVLLYVPETKGLTFDEVELIWKERAWGNNTDSRNLLAENQP

SEQ ID NO: 240208 - protein, 107 aa, Glycine max
  unsure (1)..(107): unsure at all Xaa locations
  Clone ID: PAT_MRT3847_58935C.1.pep
MAVSTIALYASPPSSVCSTPHQINAHASYDFELGSRSSSPAGSTGPPSTSHNXVMGGLSCLFSSPAPAVKHAPPLSSNFSGEEEEMKELSSSFSYSPEQIPQVLPWK

SEQ ID NO: 240209 - protein, 68 aa, Glycine max
  Clone ID: PAT_MRT3847_58936C.1.pep
ELWAGCSACKSSFPIVIYLSLLFLNRNGAFPYSCVPPPLFRLKLSSLLSPLFIISSYLSTLLFKIPPP

SEQ ID NO: 240210 - protein, 44 aa, Glycine max
  Clone ID: PAT_MRT3847_58937C.1.pep
ILMQSSYLVVDGPSYLVCLLFWKKNVGIVFRALTRYDGPSTTKY

SEQ ID NO: 240211 - protein, 68 aa, Glycine max
  Clone ID: PAT_MRT3847_58938C.1.pep
TKAPIGHEAFKLAALNIFCNRGFRQPQHFKPRLVKGVFATDDQEPFFGNNSAEMMGDTSNFGQKTGFF

SEQ ID NO: 240212 - protein, 82 aa, Glycine max
  Clone ID: PAT_MRT3847_58939C.1.pep
SQETILTLRSCFISECKPPTQLKKTLLFEQWYYIRLKLFFWEIIQFLATWTFACPPSLTWGAKAGTEMTVPAGLEPLTALAD

SEQ ID NO: 240213 - protein, 79 aa, Glycine max
  Clone ID: PAT_MRT3847_5893C.1.pep
VHMGSGVPYVEVQRQGMTRTLDMPLLRAAPKGEKFQLTRSYSNDIVTGLKPEATKGHTETKKRLAQVEASSPYHYCSLS

SEQ ID NO: 240214 - protein, 74 aa, Glycine max
  unsure (1)..(74): unsure at all Xaa locations
  Clone ID: PAT_MRT3847_58940C.1.pep
FRISTRHNCMXXYSLGMGASKAMSMSVYVVAXXIWLIRWFDXLILVGAICVCSLVSTQQILQCGRFRKADSIEP

SEQ ID NO: 240215 - protein, 43 aa, Glycine max
  Clone ID: PAT_MRT3847_58941C.1.pep
CSQKNGLTFEKHKKVKICYAPSNNLQVYEVKNCIQHSDKKCKW

SEQ ID NO: 240216 - protein, 152 aa, Glycine max
  unsure (1)..(152): unsure at all Xaa locations
  Clone ID: PAT_MRT3847_58942C.1.pep
EGLLXRCNFKADMLYLKVSLXXXGERAPLGVXRFIXXPSTILXXDXPTNHLDIPSKEMLQEAINXYHCTIITLSHYRYFIKQIFNIIIEIKDCTIHDYSCYYHYYLXKIFILWKDNFNXHAYLYNKSPKVKTKSNISKAYKNARNKQNIHSF

SEQ ID NO: 240217 - protein, 51 aa, Glycine max
  Clone ID: PAT_MRT3847_58943C.1.pep
HASAHSYGQPESITHINNTGYRVHQILRLHGCCIYYIFLPSAHGLLCQYTM

SEQ ID NO: 240218 - protein, 86 aa, Glycine max
  Clone ID: PAT_MRT3847_58944C.1.pep
HRSWRVQTYSRGACPRRAIQANFGGPFMTLDIGSAAESTYSVPSDTEPVVGAGGYATFDYEEPLPDELGIHPGQIWSKIRSVLNPF

SEQ ID NO: 240219 - protein, 44 aa, Glycine max
  unsure (1)..(44): unsure at all Xaa locations
  Clone ID: PAT_MRT3847_58945C.1.pep
QKRKLNQARKTKFILSKLKKDNKKVXLVGHPIYETSLSEPNSLT

SEQ ID NO: 240220 - protein, 90 aa, Glycine max
  Clone ID: PAT_MRT3847_58946C.1.pep
PPQKKGFFFGGKKYFKSTRHIILYYEDIVKNRTKLRDVQDFLKVPQMDLKSRQVKIHKGSLSSQVENWNDISKALTGTPYESFIHEDYRR

SEQ ID NO: 240221 - protein, 39 aa, Glycine max
  unsure (1)..(39): unsure at all Xaa locations
  Clone ID: PAT_MRT3847_58947C.1.pep
RIIIDRIFLCIHPNVIQSXFVNLELPQPLLKCPRPFPRS

SEQ ID NO: 240222 - protein, 179 aa, Glycine max
  Clone ID: PAT_MRT3847_58948C.1.pep
TLILKEFPSLRDNHVITTYATKAIAVSISSPPREHRISVSGSRPKQKTRSGAPQRSSFTSSLSNLQKEARRAFSWAPKNTVDKNAPKDVYRKRKSSGLSPSDRVAWEAMTGIQEDHISSFSTDGQERLPSVSIAEEWMLTGDPLKDESIRSSHRYESAPDITLFKALLGLCSDESVSAK

SEQ ID NO: 240223 - protein, 105 aa, Glycine max
  Clone ID: PAT_MRT3847_58949C.1.pep
YAVWLTRHLKNKLLLIANTGKGLPLQPTQVKKTKVPNRSILLALGSPQYTWFTGLKPQRKVKYWQAKKKQCSQHGQNIHHNLGSCLSTIRGFFSQRVMDWANILV

SEQ ID NO: 240224 - protein, 58 aa, Glycine max
  Clone ID: PAT_MRT3847_5894C.1.pep
SATGANAVLTDEAWVANLVAKDSGSDRGRATASRLSHARIEERKIIGDQAYAACRTKE

SEQ ID NO: 240225 - protein, 43 aa, Glycine max
  Clone ID: PAT_MRT3847_58950C.1.pep
RRQKGTFSFCFTIYILVGEGFITCASQINDFIYKHIHTHSQGN

SEQ ID NO: 240226 - protein, 47 aa, Glycine max
  Clone ID: PAT_MRT3847_58951C.1.pep
VNHLICIIYTCNSQILLHIAQRRASLRNHSLYIHTNREGHLIAHWLT

SEQ ID NO: 240227 - protein, 53 aa, Glycine max
  Clone ID: PAT_MRT3847_58952C.1.pep
ILLMIIRHIVRLVICQSVTSVCFAIVMYAQCDISALAPFLLRIKNQIVRQCRG

SEQ ID NO: 240228 - protein, 85 aa, Glycine max
  Clone ID: PAT_MRT3847_58953C.1.pep
MGMARFLNRIQVFAAFLATIVLVTSAFEGNEPRPRCWRNSKTWPHARCFHSSICSHHCQTSENAISGQCVFFFKKCKCKFCEEPL

SEQ ID NO: 240229 - protein, 49 aa, Glycine max
  unsure (1)..(49): unsure at all Xaa locations
  Clone ID: PAT_MRT3847_58954C.1.pep
MMSHGEFDDPRHGSLGLLPRKRAGRHRGXVKAFPKDDPSKGPKLTAVCG

SEQ ID NO: 240230 - protein, 187 aa, Glycine max
  Clone ID: PAT_MRT3847_58955C.1.pep
MAGKVAKAAYDAKMLKLLKEYSQVLVVSSDNVGSNQLQGIRRGLNADSVVVMGKNSMMKRSIILDAQKTGNKAFLNLVPLLVGNVALIFTKGDLREVSEQIAKYKVVQPILMCPKYTSYDTYQNCTYMQSGQIPLGLTCCNQQSSQASEPFLVCSKFLPHQHCFLMRSRQFLMTSIWSPLLLLAGNL

SEQ ID NO: 240231 - protein, 171 aa, Glycine max
  Clone ID: PAT_MRT3847_58956C.1.pep
VLEDIYDEKQLQDIVRLTNCFSSNSKVVITTKDNSLLHRHEIRLYEVERFKTKEAFQLLSLKAFNSKNLKSMYLSILERAETYASGNPFILEVMGSYLRGKSVEECVSALDQYEKIPNKEKQRIVQISFDALEKCHQKMLSCIAFYLNRQDLQVGEEKLYRQVSCQSKRWD

SEQ ID NO: 240232 - protein, 59 aa, Glycine max
  Clone ID: PAT_MRT3847_58957C.1.pep
FWSGAASNAVVVEPDAFKENDVIYRALSSRGHHDDMLQTAELVCFCVNMTSMLLLSFFH

SEQ ID NO: 240233 - protein, 318 aa, Glycine max
  Clone ID: PAT_MRT3847_58958C.1.pep
VSVSRSNITMGTPYPTPISTSETRIGWIGIGVMGFAMASRLLSAGYTLSFYARNPSNPNALSLQSQGATLAQSPAQLAQLSDVLFTMVGHPSDVRSLLLDSPVLSSLRPNSVVVDTTSSHPDLARQIFSAARSLDAWSVDAPVSGGDIGARDGKLAILAAGEKAVVEWLSPLFSILGRATYMGPAGCGQSCKIANQITIGANLIGLSEGLVFAKRAGLDLREFVEAIKDGAAGSKALELFGERMIERDFRPGGFAEYQVKDLGMGVDVVEGGDDAHLVVLPGASLSKQLFSSMLANGQGKLGSQGIISVIERINGINQ

SEQ ID NO: 240234 - protein, 37 aa, Glycine max
  Clone ID: PAT_MRT3847_58959C.1.pep
LQAVKDNAIIIITDTGIVMTRQELVDCLGTIAQSVSA

SEQ ID NO: 240235 - protein, 54 aa, Glycine max
  Clone ID: PAT_MRT3847_5895C.1.pep
EPENVNGTVVYYLRYMRDTLSYVNAPNLSYMIHSYLLGSLNRAHQQDIGPPPIG

SEQ ID NO: 240236 - protein, 87 aa, Glycine max
  Clone ID: PAT_MRT3847_58960C.1.pep
MGFRLLGVRRARQALSIKGAEVPKGYLAVYVGEEKKRFVIQIECLNQPSFQDLLSKAEEEYGYHHPMGGLTIPCREDVFLHIMSLLA

SEQ ID NO: 240237 - protein, 43 aa, Glycine max
  Clone ID: PAT_MRT3847_58961C.1.pep
PQALLSIALRSIKKNSDLLPPSYKLFGACYCFSDGIYVINYLT

SEQ ID NO: 240238 - protein, 45 aa, Glycine max
  Clone ID: PAT_MRT3847_58962C.1.pep
PVMPMTRVPGDDTVQLDANRHNVIEQAGRCPMDPPFSPLLTAVWT

SEQ ID NO: 240239 - protein, 62 aa, Glycine max
  unsure (1)..(62): unsure at all Xaa locations
  Clone ID: PAT_MRT3847_58963C.1.pep
RQXHLYLXNHXTLYTIAXIQVKTHHKPXFSFLTPXAIVLDETAYGSAWELLLKFNTELQSLG

SEQ ID NO: 240240 - protein, 128 aa, Glycine max
  Clone ID: PAT_MRT3847_58964C.1.pep
MFPPASFGGINYGPRPRIDGYGYGFQSPPPPWAEGLVADNFASRKRRGGPDGLSEGDWICPRCDNVNFAFRTTCNIKHCGAVKPSSNKPNTAVIPEGSWTCEKCGNLNYPFRNVCNRKDCRNEKTVSA

SEQ ID NO: 240241 - protein, 98 aa, Glycine max
  unsure (1)..(98): unsure at all Xaa locations
  Clone ID: PAT_MRT3847_58965C.1.pep
GSRTFDSFSIQAIGYDSDCEESHXYVHGTLPYENLKPNPGLRNLLLIATYRRLILTNTDKVHADNALSTLGLEDCWGGLICLETLDPIHKSTDYDDED

SEQ ID NO: 240242 - protein, 56 aa, Glycine max
  Clone ID: PAT_MRT3847_58966C.1.pep
PPAPEAIPSSLQQTPNFLVLMGVPILKGKKMTLCAGHRLRESVLFTLLVYQLNTHL

SEQ ID NO: 240243 - protein, 53 aa, Glycine max
  unsure (1)..(53): unsure at all Xaa locations
  Clone ID: PAT_MRT3847_58967C.1.pep
FFKNQAWVKGTXGMPGFLHKNXIGGFEKKIKRFRDYGFWVGEDQAPESPLGGF

SEQ ID NO: 240244 - protein, 43 aa, Glycine max
  Clone ID: PAT_MRT3847_58968C.1.pep
FFQFNWVYEFQVGLSIFNNGLYGFRPASWFKMGRTFKGRMVSP

SEQ ID NO: 240245 - protein, 60 aa, Glycine max
  Clone ID: PAT_MRT3847_58969C.1.pep
NLDRPQIHSTLILKTLFNTYRGFDHTNYNMPPPRHTEIIIDNRHITIPSQLNGVKHKPFF

SEQ ID NO: 240246 - protein, 72 aa, Glycine max
  Clone ID: PAT_MRT3847_5896C.1.pep
FNWLISNLVEFDSVSAPSSSFLHIQIQFPTHSNSKETNKTTPFPQKTVKPIKSTNLPLYRPEINSGSGWTTD

SEQ ID NO: 240247 - protein, 70 aa, Glycine max
  Clone ID: PAT_MRT3847_58970C.1.pep
YLRATANTTSSVLIYQIQLFNSLKLKKIINLIYNNKFVIFFKLILVINTSLFFNYLSIYSLLFKLGVFIV

SEQ ID NO: 240248 - protein, 85 aa, Glycine max
  Clone ID: PAT_MRT3847_58971C.1.pep
LCCGMNPGRYEAFHLRLVRAGTGPNCHSRSIILCTAAPVVVGVSPIRHRSIYKGGVDSHSFYFSAKQAWTPFDIQMEAHVVCCLQ

SEQ ID NO: 240249 - protein, 372 aa, Glycine max
  Clone ID: PAT_MRT3847_58972C.1.pep
GSSPCQEVNGSKAAMLFIGLYLVALGVGGIKGSLPAHGGEQFDETTPSGRKQRSTFFNYFVFCLSCGALIAVTFVVWIEDNKGWQWGFAISTISIFVSIPVFLAGSPTYKNKIPSGSPLTTILKVLIAALLNSCTYKNTSSAVVNMTSSPSNPHSGRTESQQETVKASTTTETPTSNLKFLNKAVTNKPRYSSLECTVQQVEDVKVVLKMLPIFACTIILNCCLAQLSTFSVEQAATMDTKLGSLKVPPSSLPVFPVVFIMILAPIYDHIIIPYTRKATKSEMGITHLQRIGFGLVLSIVAMAVAAIVEIKRKRVATQSGLLDDPTKPLPITFLWIAFQYLFLGSADLFPLCFINVVTCPSIFVLRGPIQVV

SEQ ID NO: 240250 - protein, 58 aa, Glycine max
  unsure (1)..(58): unsure at all Xaa locations
  Clone ID: PAT_MRT3847_58973C.1.pep
XQKYXPLXNSEKWGLSLAVKFKYXAMMNXXWXXQAXAEEEKDELXSQESXKPAERMXL

SEQ ID NO: 240251 - protein, 245 aa, Glycine max
  unsure (1)..(245): unsure at all Xaa locations
  Clone ID: PAT_MRT3847_58974C.1.pep
LNFIFFFYVSPNTYFLHLELLNFMIIAISTQLLCGPSPGPNDVNPFLDAAMAQDSHLVTSVVCNLLLNYITRPRVPFNRASYSIFYDGSQNSVLKRVGSAAANIVLLPFSYLISSSSEGSRNPIADSSLQVLLVLIHYHKCLVSEGYSVLKNQVSASSDSSPKDNTYFSDNPYCRALERAIDCELDCVDXEGNAHSGQHVKLPFAPLFDTLGMCLPDEQIWFRFFSLITLATLSSNITTKNVVSY

SEQ ID NO: 240252 - protein, 49 aa, Glycine max
  Clone ID: PAT_MRT3847_58975C.1.pep
TLNRRLSQRLRLRALRLLLHTIFDSGDSSQTDALCCKIIHRHWTLYYTS

SEQ ID NO: 240253 - protein, 65 aa, Glycine max
  Clone ID: PAT_MRT3847_58976C.1.pep
WNILYIAHKSLLPIQILGGLHIRRTPLYSNPSRPDIISPVKRIIALWLYSICDSTKPAQDDIIAN

SEQ ID NO: 240254 - protein, 198 aa, Glycine max
  unsure (1)..(198): unsure at all Xaa locations
  Clone ID: PAT_MRT3847_58977C.1.pep
YALVLVKLKAERQRGITIDIVLWNFVTTKFYCTDIDARGHGDSITNMITGTSQAXMCAVLIIDSTTGGYEAGIFNDGQTLEHALLAFTLGVKHMICCCAKMDATTAKSSXRRRNDEIVKEVSIYLKKVGYNPDDNAYEPIYGFEGDNMTDRITCLDWCKGPTLLEAVDQIREPQRPSNQPLRLSLHDDYKIGGIGTEP

SEQ ID NO: 240255 - protein, 58 aa, Glycine max
  Clone ID: PAT_MRT3847_58978C.1.pep
IIIIIIIMGSNFKNRCGNWNGNILIGSNSKPHAETLRKTPQGNDSLKYDINQVLYIHT

SEQ ID NO: 240256 - protein, 79 aa, Glycine max
  Clone ID: PAT_MRT3847_58979C.1.pep
GIFSIKNVAATNPCSRGGWEQKRLNNIPPTGGKLGTSSKGDLGWTSLLPVTEYPVFKVSLPKNYFKTGISGAYFFGKPW

SEQ ID NO: 240257 - protein, 72 aa, Glycine max
  Clone ID: PAT_MRT3847_5897C.1.pep
SAITCSFTALTALIRGVAWFVCGTSIVLNHRSQQVCCELSCGLSAYKYTFFQLIQMIVQEGMATRHFGQTHQ

SEQ ID NO: 240258 - protein, 281 aa, Glycine max
  Clone ID: PAT_MRT3847_58980C.1.pep
MVGKILAKLCTLPGFGFKLQFDKQIHIEYIILVTQTCFVNGQGSYWRPFIHANDLTATTRFTISPVKVGNFIFRYGAKTLASIKYVYGAALINEDLGHHAIGDHDEEDYGVVLVDRVDALEVSVDECYGRETSWEWFVNTIDVDILDNMEMTLLGLARLSSIGKFACNGVDYTSNLLGELIFLFLQRVKILDLDNNSSKPVHDLSEVSKLSMDLGGSPPYHVNAAPLRNVGKTRQKIASSLGRSASMTLLVYIHALCRESACHPGGVSPEPPSGRGQPLAL

SEQ ID NO: 240259 - protein, 300 aa, Glycine max
  Clone ID: PAT_MRT3847_58981C.1.pep
MASLPHFDDDFDFGGGFSGTQSGNKRPSPDYDEDEYENDPFGHKKAKSKAEEAASGVTTGMILSLRESLQNCKDMLATCQNELEAAKSEIQKWHSSFQNEPFISAGTTPAPKSLINYLQALKSSEESLREQLEKAKKKEAAFIVTFAKREQEIAELKSAVRDLKVQLKPASMQSRRLLLDPAVHEEFTRLKNLVEEKDKKVKELQDNIAAVSFTPQSKMGKMLMAKCRTLQEENEEIGNQAFEGKMHELGMKLALQKSQNSQLRSQFEGLQKHMEGLTNDVERSNEMVFTSFSFSIFFVI

SEQ ID NO: 240260 - protein, 50 aa, Glycine max
  Clone ID: PAT_MRT3847_58982C.1.pep
ACRVVGNLIAQRSMEADVYAVAYEPRKDERIEGRLGIVLDTIKENGIIFA

SEQ ID NO: 240261 - protein, 343 aa, Glycine max
  Clone ID: PAT_MRT3847_58983C.1.pep
MASPPHFDDDFDFGGGFSGTQSGNKRPSPDYDEDEYENDPFGHKKAKSKATLREDDRRGMILSLRESLQNCKETLATYQNELEAAKSEIQSWHSTLKNEPSKSAGITPEPKMLINYLQTLKFSEESLREQLEKAKKKEAAFIVTFAKREQEIAELKSAVRDLKVQLKPPSMQSRRLLLDPAVHEEFTRLKNLVEEKDKKVKELQDNIAAVSFTPQSKMGKMLMAKCRTLQEENEEIGNQASEGKMHELGMKLALQKSQNSQLRSQFEGLQKHMEGLTNDVERSNEMVLMFQEKLEDRDREIQRLKHELQQKNLEDQRLKHKLQQKNLEDGNANNETIAGEAAN

SEQ ID NO: 240262 - protein, 39 aa, Glycine max
  Clone ID: PAT_MRT3847_58984C.1.pep
TDRLRAFLKAAVVSSAWVMFQVLDSSSKTRTAVNMGFYG

SEQ ID NO: 240263 - protein, 310 aa, Glycine max
  unsure (1)..(310): unsure at all Xaa locations
  Clone ID: PAT_MRT3847_58985C.1.pep
MASPTHFDDDFDFGGGFGGRHSGNKRSSPDYDDEDYDNDPFAPKKAITKAEEASGVTTGMILSLRESLQNCKDTLATCQNELEAAKSEIQSWHSTLKNQPSILAGITPEPKMLINYLQALKSSEESLREQLEKAKKKEAAFIVTFAKREQEIAELKSAVRDLKVQLKPPSMQAAKEXLLLDASFHEEFTRLKNLVEEKDKKVKELQDNIAAVSFTPQSKMGKMLMAKCRTLQEENEEIGNQASEGKXHELGMKLALQKSQNSQLRNQFEGLQKHMEGLTNDVERSNEMVLMLQEKLEEKDRERGRCKNEG

SEQ ID NO: 240264 - protein, 385 aa, Glycine max
  Clone ID: PAT_MRT3847_58986C.1.pep
MANRTDPAAKSIRGTNPQNLVEKILRSKIYQNTYWKEQCFGLTAETLVDKAMELDHLGGTYGGNRKPTPFMCLVMKMLQIQPEKEIVIEFIKNEDYKYVRILGAFYLRITGSDIDVYRYLEPLYNDYRKLRRKLADGQFTLTHVDEVIDELLTKDYSCDIALPRVKKRWTLESLGSLEPRRSALEEDFEEEEEKEDNEQPVDEIEDKAYEKDHYRGRSPTRERDRDRRHDSHRHRDRDYDRDYDRDYDRERGRGRDRDRDRERERDRDRDRYRLREEKDYGRDREGRERERREKDRDRGRRRSHSRSRSRSRDRREHDGGDYRKRHARSSVSPRRHGDGLEDGEPKKKKKKEKKEKKDDGTDHPDPEIAEANKLRAALGLKPLRV

SEQ ID NO: 240265 - protein, 66 aa, Glycine max
  Clone ID: PAT_MRT3847_58987C.1.pep
SAAARKNLTKIACNMHHTELMEWQGNPHTGCRHTVTVNLQRWVVELTRSPKTLYSNETYYLDDDIT

SEQ ID NO: 240266 - protein, 92 aa, Glycine max
  Clone ID: PAT_MRT3847_58988C.1.pep
TRTLYEPHVDAVNLTSCDDNIFCGLDVIDCYVYCWIRLRWVPHTHFSFLLILPFIFTQVNCYSYLIRFSLPYVTLLLLGLPPPPPKKEDVIQ

SEQ ID NO: 240267 - protein, 118 aa, Glycine max
  Clone ID: PAT_MRT3847_58989C.1.pep
CLHVGSLSFLLQLSVLLQHSNSKSLLSSPSLSSTQTSHGLWCCVVISLTHSQRLFSLCFDCNIVTLAFHLLLPLTWLPSFARVFFFPSLLSLSFFGLCMLCYIYVGVVASWDISILNI

SEQ ID NO: 240268 - protein, 67 aa, Glycine max
  Clone ID: PAT_MRT3847_5898C.1.pep
TTLCQLMQQNLAIPPAKCSVEQTNIVGGGRFSIACKVLFMAVYMCVQFKACSFIKLLQSSLYIISHP

SEQ ID NO: 240269 - protein, 84 aa, Glycine max
  Clone ID: PAT_MRT3847_58990C.1.pep
LEIFLNTNIHACSTYISFHHQPIWTKWLNFPAKRSWHNNGFFPHVRFFNIKPSKSSSFLIKFSHCETLYCTFLYALYLRPLNLS

SEQ ID NO: 240270 - protein, 37 aa, Glycine max
  unsure (1)..(37): unsure at all Xaa locations
  Clone ID: PAT_MRT3847_58991C.1.pep
XXXRXKPLLHXKRVPFMXDLXSLPGVYMXXXPXNFXV

SEQ ID NO: 240271 - protein, 111 aa, Glycine max
  unsure (1)..(111): unsure at all Xaa locations
  Clone ID: PAT_MRT3847_58992C.1.pep
TRSFIFAAGCLRKEGTLNICPIRASNARGPPTVATAQKCPSIDAAVDDISNAXLATWNSDHMPIYDPSHNHKPKQSLGKNLLFITAADKHVSEVFLVSVSVXTPTKTRKLG

SEQ ID NO: 240272 - protein, 166 aa, Glycine max
  Clone ID: PAT_MRT3847_58993C.1.pep
HRCCTALGLLYHQSHPPSPTGIASTHNTKHKALVFVELEKQTYCDLKVLNNTENYVAFKVKTTSPKKYFVRPNTGVVHPWDLCIIRVTLQAQQEYPPDMQCKDKFLLQSTIVNPNTDVDDLPPDTFNKDGEKSIEDMKLRVVYISPMSPQGSTEDDTVKNSTQKLD

SEQ ID NO: 240273 - protein, 142 aa, Glycine max
  unsure (1)..(142): unsure at all Xaa locations
  Clone ID: PAT_MRT3847_58994C.1.pep
PTPPNQPETTKTHXESREXERETXREPXEKEGPQGGEGKDAEGGEKGXEPRTEEXARTREGDAEXKGEAGXEGPKEEGKGAKPAGGEAAEAAGEGXQAXRTGEGKSEKETAEEEGNDATRGNSGGEEQQKGQEGEKGSKKKK

SEQ ID NO: 240274 - protein, 63 aa, Glycine max
  Clone ID: PAT_MRT3847_58995C.1.pep
RRPPTPRGASFKKNGRFTTTPPEHSRGASQASPQRQPEQPRDKQNNKKQPNSYTTELKQFQST

SEQ ID NO: 240275 - protein, 153 aa, Glycine max
  unsure (1)..(153): unsure at all Xaa locations
  Clone ID: PAT_MRT3847_58996C.1.pep
DLSKKIDARLRQRIDPQYNGAQAQMETNKXKSSLEEEETPKGSMADHKTPQAKKALPKNTEGGTKLRREQWANLLTEGQTRASADSQEKQPEKGKNKTAATKGTTGKPGIKSDRARKGPKRGRTRQKRTPSALKTEKYGKQLEQKQDKCDQPK

SEQ ID NO: 240276 - protein, 55 aa, Glycine max
  Clone ID: PAT_MRT3847_58997C.1.pep
GKEKNIRGIYKIQNPTGRGKCYNRGYKNPYARIYSPKKRGVLLTVEKKSLKKNRV

SEQ ID NO: 240277 - protein, 43 aa, Glycine max
  Clone ID: PAT_MRT3847_58998C.1.pep
LICRVRIPPHRYSFSRLSGALTSPVREFIMLSWHLRHYRGFRP

SEQ ID NO: 240278 - protein, 79 aa, Glycine max
  Clone ID: PAT_MRT3847_58999C.1.pep
PFVCPDSFVIFKRTLCLAPSRMSTLRLSGNMFNEFFMATDSCICVVSQESDICRPCWNVRQGVRKAMTMSSNQGWMASV

SEQ ID NO: 240279 - protein, 73 aa, Glycine max
  unsure (1)..(73): unsure at all Xaa locations
  Clone ID: PAT_MRT3847_5899C.1.pep
MAAALQAAATFMQPTKLSRSNTLQQKSTQSISKAFGWEXVGAKKVTCSLQADLKDLAHNCVDATKIAGFALGT

SEQ ID NO: 240280 - protein, 154 aa, Glycine max
  unsure (1)..(154): unsure at all Xaa locations
  Clone ID: PAT_MRT3847_589C.1.pep
LEKLKVDYDFLEPESRVIVTTRNREILGPNDEIYQVKELSSHHSVQLFCLTVFGEKQPKEGYEDLSERVLSYCKGIPLALKVMGASLRRKSKEAWESELRKLQKISSMEIHTVLKLSYDGLDHSQKDIFXLDIACFFKGRERDWVTLLSSSRSR

SEQ ID NO: 240281 - protein, 62 aa, Glycine max
  Clone ID: PAT_MRT3847_59000C.1.pep
HCLIKFLIIISINIGIVIMKLLLLLLTPSFTPFHVAAWSGCEAIVNMSIHSTKKIEKTMLST

SEQ ID NO: 240282 - protein, 142 aa, Glycine max
  Clone ID: PAT_MRT3847_59001C.1.pep
GSVSQTWPEVDNPERIPRYPGGLNLQHSMEYWLTLDLLSSKVGQPCTAIRVQDSSQADVIFVPFFSSLSYNRHSKLNGQEKVSLNKRRQDRLVQFLMGRKEWKLSGGKDPLMGAHQLNSLLDARRKLGAAMLVCADFGSPRV

SEQ ID NO: 240283 - protein, 81 aa, Glycine max
  unsure (1)..(81): unsure at all Xaa locations
  Clone ID: PAT_MRT3847_59002C.1.pep
LCRPIRVKYNCRVSKGATRFDGLHSXNKSRCIHFWFTLFLSLNMIKHLFSLLGCQRKSYRICFLFNYWHSELSYVTPKKYR

SEQ ID NO: 240284 - protein, 122 aa, Glycine max
  Clone ID: PAT_MRT3847_59003C.1.pep
MTDTNTNSNMSLPQTHQLNPTLEPLLHALDPISLILNQNSNSDHPFPLRLTSADSFILERGPKYTAYAELRETRLHMKCLMQEQQQQHEAQELEPRTKPVTPPRKKQVKFQACEGHSKGSFS

SEQ ID NO: 240285 - protein, 76 aa, Glycine max
  Clone ID: PAT_MRT3847_59004C.1.pep
QLTTVGWLSNMLYRGCSGFFYPSQSPPYTDTINTNLAQPPRPVVPSSITFLSVISPSISTSLSIFLKSGLYTRATR

SEQ ID NO: 240286 - protein, 66 aa, Glycine max
  unsure (1)..(66): unsure at all Xaa locations
  Clone ID: PAT_MRT3847_59005C.1.pep
HFFLLSXLASQRLSQFFSNLVYIPVPHGDFAKLLYLAMAPTSAFYSPPPPPQRRRTSYSDDGKPSW

SEQ ID NO: 240287 - protein, 114 aa, Glycine max
  Clone ID: PAT_MRT3847_59006C.1.pep
PFVFPVFFVGFGLRVRLSGRRGFALCSGIVCRWRSPSGLVSFVALGCGALVLVLFFLGAFFFLDCAVSPSCCRALPWMRCLVSFVPPPLVGPSRLKLNALLSSLLLWLAPPSVL

SEQ ID NO: 240288 - protein, 35 aa, Glycine max
  Clone ID: PAT_MRT3847_59007C.1.pep
YTTPMMPAMDEIFYTDAQYMAGEWYYWNHEEYHCE

SEQ ID NO: 240289 - protein, 60 aa, Glycine max
  Clone ID: PAT_MRT3847_59008C.1.pep
KVITNTLNKAVPKGSQTVKNLFHKGLFISMGPGNLLKGVLSELFQFQNFFSLPKNKKAKP

SEQ ID NO: 240290 - protein, 66 aa, Glycine max
  Clone ID: PAT_MRT3847_59009C.1.pep
LVKPMKRTPRLAFTQRLDKTIFFRNHTPASNFRSQGTHLHNVKRPIYQTGPPRPTVHTYNWKHKGE

SEQ ID NO: 240291 - protein, 99 aa, Glycine max
  Clone ID: PAT_MRT3847_5900C.1.pep
FRSDSLLAYVSSSIPHTSISSIISSTSQLLCSSSSFSLSSPSSISPPSCSTHQGFVSDLDIALCSSAFACTHDAAFVSFCLTPPPLPGITPPLSYSPHV

SEQ ID NO: 240292 - protein, 126 aa, Glycine max
  Clone ID: PAT_MRT3847_59010C.1.pep
MEDSDQPAKSAENQQTEQVCSFFRKPVNKKNIRKRTIVNEDNEEDSNNETSLLHIQKKTLKPDNKLYFSTGSSKSSASAEPSEEPGKPVFQFESSKEIQVQHDSKATATLETGTEFSKDARAFRER

SEQ ID NO: 240293 - protein, 250 aa, Glycine max
  Clone ID: PAT_MRT3847_59011C.1.pep
MAFSSFFSHSPLALKIDRLGQTIKPCGTVEKGQKFSFPIRSNGGELELCYQSQLNQRSRVNLIRDWSFIGGSRIVVKPNFVRLVPFRKASRVYASWLSGSQLASSAFTLGTTAVLPFYTLMVLAPNSELTRKSMESSVPYVVLGILYAYLLYHSWTPETVGLIFASKYLLPELTSIGKMFSSEMTLASAWIHLLVMDLFAARHVFLDGLENQIETRHSVSLCLFFCPIGVLSHAITKEMTKSARKNKHSL

SEQ ID NO: 240294 - protein, 180 aa, Glycine max
  unsure (1)..(180): unsure at all Xaa locations
  Clone ID: PAT_MRT3847_59012C.1.pep
EHSSLKTSIQFEMLTAASTRQTTVAMANGRRQVASVPWPGGGSGHRYRAIHLPTSVRPPEQVSSHILQAAQKYFSAPRRIISRFIEHLTAPGWGQVPSRTMSKELYHYHGSARQGLSLPARVAISSSKATAVRPSGLFFPKVPQMNAMKTTSTTXVGLGTARNFCARARPVFQHWAGVVE

SEQ ID NO: 240295 - protein, 330 aa, Glycine max
  Clone ID: PAT_MRT3847_59013C.1.pep
MEDSDQPAKSAENQQTEQVCSFFRKPVNKKNLRKRTIEIEDNEEDSNNETSLLHIQKKTLKADNKLYFSTGSSKSSASAEPSEESGKTVFQFESSKEIQVQHDSKATAILETETEFSKDARAIRERALKQAEESLKGKSASSEDKKLYKGMNSYKDYKAGFRREQTIASEKAGGSHGPLRASAHIRVSARFDYQPDICKDYKETGYCGYGDSCKFMHDRGDYKSGWQMEKEWEEAEKARKMRLAAGEDADEEEGANLTDEDDEDSLPFACFICRNSFVDPVVTKCKHYFCEHCALKHHSKNKKCFVCNQPTLGIFNVAHEIRRKMAEDKS

SEQ ID NO: 240296 - protein, 114 aa, Glycine max
  Clone ID: PAT_MRT3847_59014C.1.pep
LNIFCKFGENGILPFRVPQNEQYTACVVAIIHGAPPNPENIKSRGKRETQVTICSKPTNQLEGKNTTLHDQKGIFITSPRLQKESCSVGDEQERRQEMLQILKKQGSSWVHNVN

SEQ ID NO: 240297 - protein, 72 aa, Glycine max
  Clone ID: PAT_MRT3847_59015C.1.pep
VGYGLDHANPPYTLIYMKLVPLLVNQLGSRTHYGINVSSGAMNKSFHDSSLLPSSHLFQNESNWILPNQLIR

SEQ ID NO: 240298 - protein, 104 aa, Glycine max
  Clone ID: PAT_MRT3847_59016C.1.pep
SSWVLKDKIQIITVLYSGIVGSSVCYVGMSWCVKKRGPVFTAAFSPLVQIMSGMIDIPFLHEQLHLGSVVGSMLVMIGLYILLWGKSKDMMQNNGATKFAQEVE

SEQ ID NO: 240299 - protein, 34 aa, Glycine max
  Clone ID: PAT_MRT3847_59017C.1.pep
SGIPGCTLMTNSSNMAVINVLLPRQRVRRYLPYA

SEQ ID NO: 240300 - protein, 61 aa, Glycine max
  Clone ID: PAT_MRT3847_59018C.1.pep
NSNMAVTLYPGMYHFNIYGQLNISSDISSPQVRLIFCSYRRKQCVAILRSYVSKDIYASNS

SEQ ID NO: 240301 - protein, 88 aa, Glycine max
  Clone ID: PAT_MRT3847_59019C.1.pep
ERKKKRKTISAIRWESCPTILLLFHLIINMTISNLILPKCQLGSGSLQTCFITVIKLHLKDTEVEHIFNWSIKQDLGGIKCKPNCNKN

SEQ ID NO: 240302 - protein, 80 aa, Glycine max
  unsure (1)..(80): unsure at all Xaa locations
  Clone ID: PAT_MRT3847_5901C.1.pep
SQTDTTVNRTDAGAIAXLTGLKSMAGLRTRXTNTDITFIASNCGRTQCMQVXSPIGXKKSETSFYLPDLDDAQLAKEVEY

SEQ ID NO: 240303 - protein, 45 aa, Glycine max
  Clone ID: PAT_MRT3847_59020C.1.pep
RRHGVDGYTCMRSALSMLSIHTFTGCGSYGTQNGWIEDDLLTQGT

SEQ ID NO: 240304 - protein, 138 aa, Glycine max
  Clone ID: PAT_MRT3847_59021C.1.pep
MSGEEEENAAELKIGDEFLKAKCLMNCEVSLILEHKYEQLQQTSDDPMNQVSQVFEKSLQYVKRFSRYKNPDAVRQVREILARYQLAEFELCVLGNLCPETVEEAIAMVPSIKSRGRAQDDEAIEKMLNDLSLIKKFE

SEQ ID NO: 240305 - protein, 138 aa, Glycine max
  Clone ID: PAT_MRT3847_59022C.1.pep
MSGEEEENAAELKIGDEFLKAKCLMNCEVALILEHKYEQLQQTSDDPMNQVSQVFEKSLQYVKRFSRYKNPDAVRQVREILARYELAEFELCVLGNLCPETVEEAIAMVPSIKSRGRAQDDEAIEKMLNDLSLIKKFE

SEQ ID NO: 240306 - protein, 44 aa, Glycine max
  Clone ID: PAT_MRT3847_59023C.1.pep
LFRASINNNSPKSSFLYHSIFTHTEFLTSGGRILHNSFLSRKTL

SEQ ID NO: 240307 - protein, 65 aa, Glycine max
  Clone ID: PAT_MRT3847_59024C.1.pep
IGLKLHKHYLFLCILKAILNSKQFYSSRVISRGRGSLFWLITMKNIDYLSLSPLTTLRGANPFIS

SEQ ID NO: 240308 - protein, 143 aa, Glycine max
  unsure (1)..(143): unsure at all Xaa locations
  Clone ID: PAT_MRT3847_59025C.1.pep
MLWNMSGEEEENAAELKIGDEFLKAKCLMNCEVSLILEHKYEQLQQTSDDPMNQISQVFEKSLQYVKXRFSRYKNPDAVRQVREILARYQLAEFELCVLGNLCPETVEEAIAMVPSIKSRGRAQDDEAIEKMLNDLSLIKKFE

SEQ ID NO: 240309 - protein, 168 aa, Glycine max
  unsure (1)..(168): unsure at all Xaa locations
  Clone ID: PAT_MRT3847_59026C.1.pep
STLFLCSSAIAIPPSPSSSSPCRSSSSSSSPCCCPLSSSSSPCCCPPSSSSSTCCCSPSSSSSTCXSSSSSPSPCCCSSSSSSSPCXCCSSSIKASSFVFPSPISSSSASIAKFGSSSTFTVSKATSSTSIPSLPFSSIISSPATSVTSVSAPSSDTATASSRCPAAA

SEQ ID NO: 240310 - protein, 93 aa, Glycine max
  Clone ID: PAT_MRT3847_59027C.1.pep
YKGAKRGWPKRVFFSPPRILNFPFPPLGKIFPQKIVFFAPFKTCYSWVGGPPSPIGPKCPRGPQIFFIPPPWGFFFFVWRQKFLWGLVTLFFF

SEQ ID NO: 240311 - protein, 145 aa, Glycine max
  Clone ID: PAT_MRT3847_59028C.1.pep
SSAAAAAAASSSSPSSSSSSCCCSPSSSSSTCCCSSSSPSPSCSTSSPSCCCSSSIKASSFVFLSSISSSSASIAKFGSSSTISVSKATSSTSIPSFAFSSIISSPATSVTCVSAPSSDTASASGSTATASVVVAAASSRSTAEA

SEQ ID NO: 240312 - protein, 47 aa, Glycine max
  unsure (1)..(47): unsure at all Xaa locations
  Clone ID: PAT_MRT3847_59029C.1.pep
TVLEWYRXXPXTCCGXQXYSDTXTIXREFLSLVWVLLKNXXDXKNLT

SEQ ID NO: 240313 - protein, 192 aa, Glycine max
  Clone ID: PAT_MRT3847_5902C.1.pep
MGLSLSLLQSAWEEIVRHFPFSDLPLSISFASKDGTLILRASSFKRRESESAITVLSNGSRSSNRLRDNRPQHVILERNFSFVQDEENNKMGWDTLASKGGELKHKPVPVLSLPQAAIFSHSRPASELDAAATKLQKVYKSYRTRRNLADCAEVVEELWWKALDFAALKRSSVSFFDVEEPETAALRWARAR

SEQ ID NO: 240314 - protein, 73 aa, Glycine max
  Clone ID: PAT_MRT3847_59030C.1.pep
LLVWSEKRLYYQGFYNNQHSKYLSNWQLCRQMFVQSKNFRNSVYIWFRNTGEMVLLHFYFLMALIYAYLCFNL

SEQ ID NO: 240315 - protein, 59 aa, Glycine max
  Clone ID: PAT_MRT3847_59031C.1.pep
TGHFVGYIYYDYSLQYNNDTYIIELQQTQKTIANSTPHVKTLVPKYWKRELICGVQTPQ

SEQ ID NO: 240316 - protein, 56 aa, Glycine max
  Clone ID: PAT_MRT3847_59032C.1.pep
LTLILFLWFLHILSLHLNLLDSLILFEWIFNNLWHLQNNLGSFASTLMNLGEQIKI

SEQ ID NO: 240317 - protein, 58 aa, Glycine max
  Clone ID: PAT_MRT3847_59033C.1.pep
WHFVSRTMNSKCLDTFPFLVHIITYLLLKSTFVMNSILAFNMCSFYNNIHHKCRMNTC

SEQ ID NO: 240318 - protein, 104 aa, Glycine max
  Clone ID: PAT_MRT3847_59034C.1.pep
MGAQHIHEKSRINALVAYRPNKSPSQLSKNCLIKNGPVPIHRIYSLASHIIPPLKTSSPFGNIGEHSPSAMTSLLKEVPADLWKNAPMVNVSRFHLAVPIKLSR

SEQ ID NO: 240319 - protein, 104 aa, Glycine max
  Clone ID: PAT_MRT3847_59035C.1.pep
MGAKEVERVDGRTPNQLRPLACSRNLLNRAHGSAQWSQGNTIVLAAVYGPKAGTRKGENPEKASIEVIWKPKSGQIGKPEKEYEMILKRTLQSICLLTIHPNTT

SEQ ID NO: 240320 - protein, 58 aa, Glycine max
  Clone ID: PAT_MRT3847_59036C.1.pep
PLSHRGYDMKSINRVTYSSACTVITLLAAEYLIKLSDKVFEKMRKLREKTDIITRLKS

SEQ ID NO: 240321 - protein, 94 aa, Glycine max
  unsure (1)..(94): unsure at all Xaa locations
  Clone ID: PAT_MRT3847_59037C.1.pep
MSVTIRTRKVLTNRLLNRKQMIIDVLHPNRANVSKKELTDLIAXEFQAKDSKAVFVFGMRTAFGGQKSTGFALIYDSLEDALDSEPKYRLVRPG

SEQ ID NO: 240322 - protein, 124 aa, Glycine max
  unsure (1)..(124): unsure at all Xaa locations
  Clone ID: PAT_MRT3847_59038C.1.pep
MGCTHKGNQHTRARSHNVGLLTLDIGQNAILMNTGARAMCMAWSYIDHFVDGLKRTGLRTYGWVAPPFKGSLNLMSLIIGTGSVLGLAPAXEYTFLIFVVTVENYFKEGFSLFIFSWRYTFIDL

SEQ ID NO: 240323 - protein, 317 aa, Glycine max
  unsure (1)..(317): unsure at all Xaa locations
  Clone ID: PAT_MRT3847_59039C.1.pep
MKNIQPEQLEIQETERRESALGKDIEQLPTLLEEYQLRNKSEKSPATYISSHGFTENSHFPEGKEEKYEKKLKDAAARELMLAEEAAMLDRELKRERAKASRPINSLQEKMEEKLKTELEQKEIETDLKFKQAQELAKAELNAAIANEKAAQIEKMAEANVNINALCMAFYARSEEARQSHATQNFALRALALEDALSKGLPIETEIASLQSYLGSTDKDSVLDLVLASLPEETRSNGTDTQLQLKQKFDALKGSVRHFSFFPPGGGGMLAHSLAHVASWLKVKEDNQSGDGIESVIXKVEVYLAEGKLAEAAACLE

SEQ ID NO: 240324 - protein, 119 aa, Glycine max
  Clone ID: PAT_MRT3847_5903C.1.pep
TCQGEPRVPALGTVMDQTRSRTLRSFLPLEQPFLLQQFPPEALFNDNVWCVVCGFLPFPCTFHSRINVHTYVRTLFLGTLKFWYWMLSSCLTFNRVLSQFLCIALCSFQVHPHRVSPCT

SEQ ID NO: 240325 - protein, 619 aa, Glycine max
  unsure (1)..(619): unsure at all Xaa locations
  Clone ID: PAT_MRT3847_59040C.1.pep
MFRRSILLISSRPTLRRNPRRFVYQXPLHLSLQKNFSTVSKPGVSSASGSPGKPPESNGTLSKFFIGSVALGAAFLAAYQTHYLDQYLKKEHYSVLQEPHVNATIEDLKSVQHSTDQLISPSEKFNHKNPTVEITEQKIDAHFSHPEIVVEDQVDKPIPVQDKSDIAEDVTAAAKENQLPEYPESSLTSDDPSKESVTQSDGIIGIQSTETVNARMEEGYHHASTSTQTSPDENGMKNIQPEQLEIQEMGRRESALGKDIEQQPTLLEEYHLRNKSERSPATYISSHDFTENSHFPEGKEALNGAMEELKDGYISENGKLVLDFLQAIHAAEKRQADLDAHAFNEEKKVLKEKYEKKLKDAAARELMLAEEAAMLDRELKRERAKASLAIKSLQEKMEEKLKTELEQKEIETDLKFKQTQELAKAELNAAIANEKAAQIEKMAEANVNRALALEDALSKGLPIETEIASLQSYLGSTDKDSILDLVLASLPEETRSNGTDTQLQLKQKFDALKGSVRHFSFFPPGGGGMLAHSLAHLASWLKVREDDQSGDGIESVINKVEVYLAEGKLAEAADCLEESVRGTQAAEIVAGWVRQARNRAISEQAVLLLQSYANSLSLT

SEQ ID NO: 240326 - protein, 279 aa, Glycine max
  unsure (1)..(279): unsure at all Xaa locations
  Clone ID: PAT_MRT3847_59041C.1.pep
NECNSNGFGVLTEVISGSAARELMLAEEAAMLDRELKRERAKASLAIKSLQEKMEEKLKTELEQKEIETDLKFKQTQELAKAELNAAIANEKAAQIEKMAEANVNINALCMAFYARSEEARQSHATQNFALRALALEDALSKGLPIETEIASLQSYLGSTDKDSVLDXFDALKGSVRHFSFFPPGGGGMLAHSLAHVASWLKVREDNQSGDGIESVINKVEVYLAEGKLAEAAACLEESVRGTQAAEIVAGWVRQARNRAISEQAVLLLQSYANSLSLT

SEQ ID NO: 240327 - protein, 50 aa, Glycine max
  unsure (1)..(50): unsure at all Xaa locations
  Clone ID: PAT_MRT3847_59042C.1.pep
LXRXDFQSEPWPSIXDSVQRSXSXNACSESKXKGYSSPSTLFXLGLLLTX

SEQ ID NO: 240328 - protein, 80 aa, Glycine max
  unsure (1)..(80): unsure at all Xaa locations
  Clone ID: PAT_MRT3847_59043C.1.pep
MASPSARTRSHYDYLIKLLXLIGDRQCVNEXLLMRCPEGSFTTGXITTIGIEITMTSIELDGKRIKLQICDTACHEPIST

SEQ ID NO: 240329 - protein, 221 aa, Glycine max
  unsure (1)..(221): unsure at all Xaa locations
  Clone ID: PAT_MRT3847_59044C.1.pep
MGRGRVELKRIENKINRQVTFAKRRNGLLKKAYELSVLCDAEVALIIFSNRGKQYEFCSGSSMLKTLERYQKCNYGAPEDNVATKEALELSSQQEYLRLKARYEALQRSQRNLMGEDLGPLSSKELESLERQLDSSLKQIRSIRTQFMLDQLXDLQRKEHFLGESNRDLRQRLEEFQINPLQLNPSAEDMRVWTPYRYHPDPVSVVTEGPSMNNYMAGWLP

SEQ ID NO: 240330 - protein, 74 aa, Glycine max
  Clone ID: PAT_MRT3847_59045C.1.pep
KFFFSPFLKSFPPQQILFPAFLFGLKKKKKIFFSQKKKKKKKKKKKKKKKKKKKKKKKKKKPKKKKKKKKKKTK

SEQ ID NO: 240331 - protein, 94 aa, Glycine max
  Clone ID: PAT_MRT3847_59046C.1.pep
TLERYQKCNYGAPEDNVATKEALELSSQQEYLRLKARYEALQRSQRNLMGEDLGPLSSKELESLERQLDSSLKQIRSIRTQFMLDQLSDLQRKV

SEQ ID NO: 240332 - protein, 99 aa, Glycine max
  Clone ID: PAT_MRT3847_59047C.1.pep
GPPILPHVPLSTHSLSRVVVEIGYEIQAWIDRETLHRLSASLRNPNINNNDLVALLTQFHDRVSQGFNRELQDLVLKLKLFSLLESVLFDSKCPNRVRE

SEQ ID NO: 240333 - protein, 241 aa, Glycine max
  Clone ID: PAT_MRT3847_59048C.1.pep
MGRGRVELKRIENKINRQVTFAKRRNGLLKKAYELSVLCDAEVALIIFSNRGKLYEFCSSSSMLKTLERYQKCNYGAPEANVSTQEALELSSQQEYLRLKARYEALQRSQRNLMGEDLGPLSSKELESLERQLDSSLKQIRSIRTQFMLDQLSDLQRKEHFLGESNRDLRQRLEEFQINPLQLNPSAEDMGYGRHPGQPQGHALFQPLECEPTLQIGYHPDPVSVVTEGPSMNNYMAGWLP

SEQ ID NO: 240334 - protein, 128 aa, Glycine max
  Clone ID: PAT_MRT3847_59049C.1.pep
GEDLGPLSSKELESLERQLDSSLKQIRSTRTQFMLDQLSDLQRKEHLLSEANRSLRQRQLEGYQINPLQLNPGVEEMGYGRHPAQTHGEALFQQMECEPTLQIGYQPDPVSVVTAGPSMSNYMAGWLP

SEQ ID NO: 240335 - protein, 76 aa, Glycine max
  unsure (1)..(76): unsure at all Xaa locations
  Clone ID: PAT_MRT3847_5904C.1.pep
HIKTQPNYHSVHQSTNSHPDFIFTPHQYNAXFALAIYPTEPYYLSXTNDITILFTTIKNHTTTSATYSKTYSLIIK

SEQ ID NO: 240336 - protein, 53 aa, Glycine max
  Clone ID: PAT_MRT3847_59050C.1.pep
KKKKKKKKKKKKKKKKKKKKKKKKKKKKKKKKKKKKKKKKKKKKKKNKKKNKK

SEQ ID NO: 240337 - protein, 42 aa, Glycine max
  Clone ID: PAT_MRT3847_59051C.1.pep
IDSCEKRLNILSNQYRHWSVLNVVSGTLDRKCNKLYEQTVWT

SEQ ID NO: 240338 - protein, 49 aa, Glycine max
  Clone ID: PAT_MRT3847_59052C.1.pep
NCFVFSNITTLLCNLLLNLLSDSLSKSQIYNTNVPTSIKPSIQQLQQTC

SEQ ID NO: 240339 - protein, 243 aa, Glycine max
  Clone ID: PAT_MRT3847_59053C.1.pep
MGRGRVELKRIENKINRQVTFAKRRNGLLKKAYELSVLCDAEVALIIFSNRGKLYEFCSSSSMLKTLERYQKCNYGAPEANVSTREALVMELSSQQEYLKLKARYEALQRSQRNLMGEDLGPLSSKELESLERQLDSSLKQIRSTRTQFMLDQLSDLQRKEHLLSEANRSLRQRLEGYQINPLQLNPGVEEMGYGRHPAQTHGEALFQQMECEPTLQIGYQPDPVSVVTAGPSMSNYMAGWLP

SEQ ID NO: 240340 - protein, 57 aa, Glycine max
  Clone ID: PAT_MRT3847_59054C.1.pep
DNHLSGWGDSYPTQFNDYSTNSYPSLFNNMGPHCSTRARNIINFTCTLNKRHSSQHQ

SEQ ID NO: 240341 - protein, 79 aa, Glycine max
  Clone ID: PAT_MRT3847_59055C.1.pep
LNPTKSTCKIRIVLHLYNLSRYYPYLMLDFNMPHFSHDYLSCETFNTLLYLGVESPTWRGTMRKMKHVEVLHRIKIMSR

SEQ ID NO: 240342 - protein, 63 aa, Glycine max
  Clone ID: PAT_MRT3847_59056C.1.pep
CSAVSDDKICWHFLLGFCMITWAVHQRGMPWYGLHGSFPIQDVFRPCSQKKKKKKKKKAAALE

SEQ ID NO: 240343 - protein, 108 aa, Glycine max
  Clone ID: PAT_MRT3847_59057C.1.pep
MVMKQRDEELSLFLELRRREKENEKNNLVLLQNSEEFHLSNLESNDGGSMISKMVSSVPPRKNGVEEFLNSEIDKSDYEWLLAPPDAPLFPTLEKESQISVKSEHNFS

SEQ ID NO: 240344 - protein, 66 aa, Glycine max
  Clone ID: PAT_MRT3847_59058C.1.pep
AGARLGLKGGVNVQNVMSVLLSVLEGRPSDGIRVDLVINSFVVRFIQAGIEASIIILIWGTRLKLN

SEQ ID NO: 240345 - protein, 69 aa, Glycine max
  Clone ID: PAT_MRT3847_59059C.1.pep
DLVCLATACSWRVASHLVHMNVCMHPCRYRGIALLFTLRLAPLAISVMLHKDSSRDHIFGFFDIATAHV

SEQ ID NO: 240346 - protein, 83 aa, Glycine max
  Clone ID: PAT_MRT3847_5905C.1.pep
SVENMRELCLILIYIATVYAFLHVSMPTTESILFLLTGLHACVRFGLYVRLHACVQKHLPLCLSVMCIVLDSSLSFMFKALPL

SEQ ID NO: 240347 - protein, 967 aa, Glycine max
  Clone ID: PAT_MRT3847_59060C.1.pep
MANRNLEKMASIDAQLRLLVPAKVSEDDKLVEYDALLLDRFLDILQDLHGEDLKETVQEVYELSAEYEGKHDPKKLEELGNLITSLDAGDSIVVAKSFSHMLNLANLAEEVQIAHSRRNKLKKGDFADENNATTESDIEETLKKLVVDMKKSPQEVFDALKNQTVDLVLTAHPTQSVRRSLLQKHGRIRNNLTQLYAKDITPDDKQELDEALQREIQAAFRTDEIRRTPPTPQDEMRAGMSYFHETIWKGVPTFLRRVDTALKNIGINERVPYNAPLIQFSSWMGGDRDGNPRVTPEVTRDVCLLARMMAANLYYSQIEDLMFELSMWRCNDELRVRADELNRSSKKNSVAKHYIEFWKAIPPNEPYRVLLGEVRNRLYQTRERSRHLLAHGYSDIPEEETFTNVEEFLEPLELCYRSLCACGDRAIADGSLLDFLRQVSTFGLSLVRLDIRQESDRHTDVLDAITKHLEIGSYQEWSEEKRQQWLLSELSGKRPLFGPDLPQTEEIRDVLETFHVIAELPLDNFGAYIISMATAPSDVLAVELLQRECHVKHPLRVVPLFEKLADLEAAPAALARLFSVDWYRNRINGKQEVMIGYSDSGKDAGRFSAAWQLYKAQEELIMVAKQYGVKLTMFHGRGGTVGRGGGPTHLAILSQPPETIHGSLRVTVQGEVIEQSFGEQHLCFRTLQRFTAATLEHGMHPPISPKPEWRALMDEMAVIATEEYRSIVFKEPRFVEYFRLATPELEYGRMNIGSRPAKRRPSGGIETLRAIPWIFAWTQTRFHLPVWLGFGAAFKHVIEKDVRNIHVLQEMYNQWPFFRVTIDLVEMVFAKGDPGIAALYDRLLVSEDLWSFGEQLRTMYEETKELLLQVAGHRDLLEGDPYLKQRLRLRDSYITTLNVCQAYTLKRIRDPNYNVKLRPHISKESIEISKPADELITLNPTSEYAPGLEDTLILTMKGIAAGLQNTG

SEQ ID NO: 240348 - protein, 54 aa, Glycine max
  Clone ID: PAT_MRT3847_59061C.1.pep
YGQNNHLAFFCSVFLSTPFKRIMFLHSKGIPRIISHSKEYALRTNQTFQVLRYS

SEQ ID NO: 240349 - protein, 41 aa, Glycine max
  Clone ID: PAT_MRT3847_59062C.1.pep
KLILIIVKGVSWICSYVFSRLEKNHLLLLSKDVRSLMFFFI

SEQ ID NO: 240350 - protein, 177 aa, Glycine max
  Clone ID: PAT_MRT3847_59063C.1.pep
MFTKLGGLSLEPKSVPPPKRTGWIGRGNCHMEKATIDLKRDGKDLSGRVHQLPCCVKHDGPASVSHYFKPKHKGVGEDEGLPLQEAHFRGRLLQGTTLPLPHGYSGFVLSKSSPPTSDENSHSWDTKATFQDITYWNHDYSPSQNDELFRAFHWLTVAKALHNPVTPEELASSSVTL

SEQ ID NO: 240351 - protein, 49 aa, Glycine max
  Clone ID: PAT_MRT3847_59064C.1.pep
FLLRATYVQKTEHGIQRRHGAGMMMNKMDFHYLHRMKGMALGLRLMQWR

SEQ ID NO: 240352 - protein, 64 aa, Glycine max
  Clone ID: PAT_MRT3847_59065C.1.pep
ELVSLSFCLLIGTMVGALLVGASNWQGLFTVFFYSFAWFSDCCSGNYLMVRVSPEQRKKKKKGR

SEQ ID NO: 240353 - protein, 72 aa, Glycine max
  unsure (1)..(72): unsure at all Xaa locations
  Clone ID: PAT_MRT3847_59066C.1.pep
TYCDPGINGKESGRIVMDLSGKADPKXTAESLRALCTVKKWTVXTNKPVHVTGCAFHIIIPSFMLQGGDYTH

SEQ ID NO: 240354 - protein, 123 aa, Glycine max
  Clone ID: PAT_MRT3847_59067C.1.pep
RTGLTAVFIGFFFFLSLFFTPLLASVPPWAIGPSLVMVGVMMMKVVKDIDWTNTKDAVTAFATMLLMPLTYSIANGIIGGVGLYIALSLYDYAASIVNWSRKMRRMVAKEQNQVSVDSAVEMI

SEQ ID NO: 240355 - protein, 130 aa, Glycine max
  Clone ID: PAT_MRT3847_59068C.1.pep
MARSQQRYRGVRQRHWGSWVSEIRHPILKTRIWLGTFETAEDAARAYDEAARLMCGTRARTNFPYNPNASQSSSSKLLSATLTAKLHRCYMGSLQMTRPLSQPETQRVGASPNVITFSGSNFSLKRNQTE

SEQ ID NO: 240356 - protein, 51 aa, Glycine max
  unsure (1)..(51): unsure at all Xaa locations
  Clone ID: PAT_MRT3847_59069C.1.pep
VIRACSNKLTGESLACKSIAKDRRXLVSSDDWQSVRREIEIXSLLSGLPXV

SEQ ID NO: 240357 - protein, 70 aa, Glycine max
  Clone ID: PAT_MRT3847_5906C.1.pep
YFLPDKIIAPEPRHPFYGPLPNSGIITFGCYHYLPSFLKGFNQVSFQTFLPFQVFGLLNLDKLGLRIHLT

SEQ ID NO: 240358 - protein, 70 aa, Glycine max
  Clone ID: PAT_MRT3847_59070C.1.pep
TVLLLALVSLVDATISIHNAWCLYQDLARRTLDLATTSIALSISKMSWLFTHLMQVLTNQCQLFMHSRLD

SEQ ID NO: 240359 - protein, 67 aa, Glycine max
  Clone ID: PAT_MRT3847_59071C.1.pep
NPPQSAILGKHSIVQRPVVVDGNILARPIMYLALTYDHRLIDGKETVYFLRRIKDVVEDPRRLLLDI

SEQ ID NO: 240360 - protein, 87 aa, Glycine max
  unsure (1)..(87): unsure at all Xaa locations
  Clone ID: PAT_MRT3847_59072C.1.pep
ARVRKLGIRLEGNIXXFSGXXXXXSQXXFXPFMXXXGXXEXXIQXGXXXKGXSXXVXXXXXVKLCITYGSXVXHNEFTLGXXCXWRF

SEQ ID NO: 240361 - protein, 102 aa, Glycine max
  Clone ID: PAT_MRT3847_59073C.1.pep
MERVTKMVSERPVVIFSKSSCCMSHTIKTLFCDFGVNPAVHELDEIPRGRDIEQALSRLGCSPSVPAVFIAGDLIGGANEVMSLHLNRSLIPMLKKAGALWV

SEQ ID NO: 240362 - protein, 51 aa, Glycine max
  unsure (1)..(51): unsure at all Xaa locations
  Clone ID: PAT_MRT3847_59074C.1.pep
ENRLYNQTMLWRKDSGLSDSXYMHTDMVRGYYDARDNAKLGLPMAISSTML

SEQ ID NO: 240363 - protein, 107 aa, Glycine max
  unsure (1)..(107): unsure at all Xaa locations
  Clone ID: PAT_MRT3847_59075C.1.pep
MSCRKVREPKEENVSLGPAVIVGEHVMGVARILACFSDTFMHDTDLXGRETLVLITGGMKXKADREEXLHXAAMVAAQEVAARCXELSITVLDLKPNATGRNKTKTP

SEQ ID NO: 240364 - protein, 503 aa, Glycine max
  unsure (1)..(503): unsure at all Xaa locations
  Clone ID: PAT_MRT3847_59076C.1.pep
MMSNKLFYANLVLAFYLSCHYALAQTENFPLPLKAVNLGNWLVIEGWMKPSLFDGIXNKDLLDGTQVQFMSTKLQKYLCAEHGGGSAVVANRTKASGWETFRLWRINESTFNFRVSNKQFIRLTNRDGGSNLVADSDSPSDLETFEILRNDDDPNMVRIRAPNGQFLQAISENEVLANYEGSSWDDSDPSIFKMNVLSGSIIRGEYQITNGYSPDKATKIMRDHWNTYIIEDDFKFMSENGLNAVRIPVGWWTTQDPTPPKPFVGGSLEVLDNAFTWAEKYGIKVIVDLHAAPGSQNGRPHSASRDGYLEWDDSYISDTVAAIDFLAERYANSSGLVAIELMNEPQGVNLESLKSYYQSRLXAVRKHTSSAYVIMSNPLDRDSKVLLSFAGAFSGVVIDVHYYNLFSDRFSNMNVQQNIDFIKKQRVSDLSSLTTSNGPLIFVGEWSSDWKVQSASKIDQQKFTQVQVDVYSRAKFGWAYWAYKCDSNFWSIKWMIENNYIKL

SEQ ID NO: 240365 - protein, 175 aa, Glycine max
  Clone ID: PAT_MRT3847_59077C.1.pep
RYSNRSGLVAIELMNEPQGVNLESLKSYYQAGYDAVRKHTSSAYVIMSNPLDRDSKVLLSFAGAFSRVVIDVHYYNLFSDRFSNMNVQQNIDFIKNQRASDLSTLTTSNGPLIFVGEWSSDWKVQSASKKDHQKFTQVQVDVYSRAKFGWAYWAYICDSNFWSIKWMIENNYIKL

SEQ ID NO: 240366 - protein, 104 aa, Glycine max
  Clone ID: PAT_MRT3847_59078C.1.pep
FWSFHAREKNHNNYNGNDNFNNNVFGEWCRIKRPPLPAQVRVDSRIRFSCVGIGDKVILIQSLNEVRGVKEGFVFVYDCVAEEWGRGVDLPEVYRRAAYVGVEC

SEQ ID NO: 240367 - protein, 85 aa, Glycine max
  unsure (1)..(85): unsure at all Xaa locations
  Clone ID: PAT_MRT3847_59079C.1.pep
MLQSQCSSLAPIPWFPMVKLPLKELKNKQALPDPCHFIGAQTMMIVTTPAALHLSRSKHQEQDTLPSREFELGRVINXXXLKGYR

SEQ ID NO: 240368 - protein, 93 aa, Glycine max
  Clone ID: PAT_MRT3847_5907C.1.pep
FVPLFFSPSRFRSFNSLRVFLLFFGSLGLAFVPLFFFSLRAAGVFLPGCPPSIFEFLFSFFGSFFFSVTGCYASPVSFVSPVVFLISPSFLFG

SEQ ID NO: 240369 - protein, 97 aa, Glycine max
  Clone ID: PAT_MRT3847_59080C.1.pep
PYVIWWPRSDIRVNCAISCLTVHGSRRSKCFFSQSVVSRQEILRLAVGSGGASGVGIPARRSWFRRSDKKRLDEKNQIRISAREILCLISTRAVVIR

SEQ ID NO: 240370 - protein, 58 aa, Glycine max
  Clone ID: PAT_MRT3847_59081C.1.pep
CIRVPDYLVNIMFWFPSETVRACRHDGMPWRFFLRNRLLQLVNGGCLLRVHDEHPPQC

SEQ ID NO: 240371 - protein, 81 aa, Glycine max
  Clone ID: PAT_MRT3847_59082C.1.pep
GGTLGEFISINIYPGCVVGPPLIRGDPRRRTSSMKLRKKFSAAGESGNYNFHNFHQEKLSFFIKKIAQLFLTGIRRGHATK

SEQ ID NO: 240372 - protein, 40 aa, Glycine max
  Clone ID: PAT_MRT3847_59083C.1.pep
ICLAVLCVSALSLNRCIAEDNGPDMNIYKESCPQAEDIIK

SEQ ID NO: 240373 - protein, 121 aa, Glycine max
  Clone ID: PAT_MRT3847_59084C.1.pep
KCFNPDGLEYEPNPQGSRNLAFKRGSKGGKNNCNIGPFARPLKKGGSLLARFSTFNYAVDAEGGLRFLGICLGLKWGSSFLTDFGVKISCPPKVFVEIVPRPCSYGSTLLIAFPQKILVPG

SEQ ID NO: 240374 - protein, 177 aa, Glycine max
  unsure (1)..(177): unsure at all Xaa locations
  Clone ID: PAT_MRT3847_59085C.1.pep
MGDKEEESAMPRDAKIVKSLLKSMGVEDYEPRVIHKFLELWYRYVVDVLTDAQVYSEHAGKPAIDCDDVKLAIQSKVNFSFSQPPPREVLLELAQNRNKIPLPKTIAGPGIPLPPDQDTLISPNYQFAIPNKRPAEPLEETEDEEATIPNPSQEQRXDMQPNPHQRVSFPLPKRQKD

SEQ ID NO: 240375 - protein, 47 aa, Glycine max
  Clone ID: PAT_MRT3847_59086C.1.pep
VWLRESMADDIYCLCENDKKKHTYISKIQKRIIFPWSRPFRHLLRRN

SEQ ID NO: 240376 - protein, 396 aa, Glycine max
  Clone ID: PAT_MRT3847_59087C.1.pep
MLNSEGELKISFGYKCNRDRGIPCEVVSGCKILPGVCRTSSFSCLSGAALSANATLANTNICNGKIGEEILPSWDSPTSFRKVTSSPSLSKLDILSSSPPNSLSYLSCSPSTVSDILEYDSCTLKSMSDPSRSEGFLNAKEVQVAGGAAGEDRVQAVCSEENGWLFCAIYDGFNGRDAADFLAGTLYETIISYFNKLIWELEPGSIKAYDKGCLGGSLQYKLDDSLIYHENQSLSRFKGINNSNHGCFAKCNPSTKSEVSCDSFSHGVLDILQRAISQAENDFLYMVEQEMEERPDLVSIGSCVLLVLLHGNDLYTLNLGDSRAVLATCGTADRMDKSERLKAIQLTDNHTVDNKVERARLLADHPDDPKIVIAGKVKGKLKVTRAYGVGYLKKVS

SEQ ID NO: 240377 - protein, 68 aa, Glycine max
  Clone ID: PAT_MRT3847_59088C.1.pep
ATSYSYCLVDRHSARAGTLEFNSPQPGDSVVAPLLKNHNANTLYYLELTGVSVSGEIWTVPSETFDVD

SEQ ID NO: 240378 - protein, 114 aa, Glycine max
  Clone ID: PAT_MRT3847_59089C.1.pep
MKSGYQHGGVDITHTKAFLTSLSAMVAETTTFPIDLIKTRLQLHGESLSSSHPTSAFRVGLGIIREQGALGLYSGLSPAIIRHMFYSPIRIVGYENLRNVVSVDNASFSIVGKA

SEQ ID NO: 240379 - protein, 117 aa, Glycine max
  Clone ID: PAT_MRT3847_5908C.1.pep
MDVDSSMVPEPDHDPPVQNHAERDQLGDSPSPSLSEGGGSLAQSPPQQQQQQQQQPPPATAAQVHQPNSLVGPRLAPTYSVVNAILEKKEDGPGPRCGHTLTAVAAVGEEGTSGYIG

SEQ ID NO: 240380 - protein, 84 aa, Glycine max
  Clone ID: PAT_MRT3847_59090C.1.pep
SDYLSGHLTQPKIEESDLQYSKKRTSLGRIPSNVKKMISAFEGGLDQDKRPQIKPPPTKQQESSIERRDSSKTQHLEQDKSKNI

SEQ ID NO: 240381 - protein, 373 aa, Glycine max
  Clone ID: PAT_MRT3847_59091C.1.pep
MEVTQVLHMNGGSGETSYANNSLVQQKVIFLTKGMREEAISSLYRSMLPRSLAVADLGCSSGPNTFFVISEAIKSVEKLCRELNHQSPEYQIYMNDLPGNDFNNIFKSLDSFKEKLCNEIIEAGHGIGSCFFNGVPGSFYGRIFPTKSLHFVHSSYSLMWLSKVPDGVENNKGNIYMASTSSLNVLKAYYEQYQKDFSLFLKCRAEEIVEGGRMVLTFLGRRSDDRSSKECCYIWELLAMALNDMVSKGIIKEEQMDTFNIPQYTPSPSEVKFEVQKEGSFSITSLEVTVVPWNAYDNGNAFDSECGLSKSLSNGGYNVTKCMRAVAEPLLVSHFGEAIIEEVFSRYQQILTERMSKEKTEFVNVTISMIRRA

SEQ ID NO: 240382 - protein, 54 aa, Glycine max
  Clone ID: PAT_MRT3847_59092C.1.pep
VDKFLDFYQLVYKLSGDNCNYQLVDDFVDSYINNFYISIISSKYKCFTHKTQLY

SEQ ID NO: 240383 - protein, 57 aa, Glycine max
  Clone ID: PAT_MRT3847_59093C.1.pep
NKIRRIPLESIVNVSNNVYCYENRNSGITECGVVAFGVQLCGCKYTWPELCHDEIHV

SEQ ID NO: 240384 - protein, 107 aa, Glycine max
  unsure (1)..(107): unsure at all Xaa locations
  Clone ID: PAT_MRT3847_59094C.1.pep
CAFXFSVVLPXPFSSXCPLVLSFCLPSWVFLFWWRXRCSRFCGWLPPSLLGFAXFCPSGALVVFLXFLLVPFVALLLXXRPFLPPFLVPLLCPSCRLLAAAGRWSPA

SEQ ID NO: 240385 - protein, 141 aa, Glycine max
  Clone ID: PAT_MRT3847_59095C.1.pep
TKGLEKVNITCLPSNAGLFFWMNLKGLLKEKTFEGEMMLWRVIINEVKLNVSPGSAFNCPEPGWYRVCFANMDDETVDVALMRIRAFVGKETGKPPKELKRWKSNLRLSFSNSRRFDENLMSPHMMSPHSPMPHSPLVRAT

SEQ ID NO: 240386 - protein, 72 aa, Glycine max
  Clone ID: PAT_MRT3847_59096C.1.pep
RQCYNEPLENHQVMFLTEPIQWKHVHQLSYSHPSRRFRYQLINVIINLVITQTFKFFIRYKLKNLLKCKLTI

SEQ ID NO: 240387 - protein, 178 aa, Glycine max
  Clone ID: PAT_MRT3847_59097C.1.pep
MDWLRRSLSRGSRNSKTPNIQTQSNSEVQQHLEESIYGITEELINHIKTFTLDTFKNFPLQDEVEGSYGEDTQSSSTKVRNELSQWQEKHAILVLSRVKEMSQLRYVLCPRHLKESQFWKIYFKLARSHVLEYELRDIQREKLKQMAVEDEKASDNNPYEVEMAEANHENFIEPLPPS

SEQ ID NO: 240388 - protein, 53 aa, Glycine max
  Clone ID: PAT_MRT3847_59098C.1.pep
SPLRPHKTYCTALLSVSASWLQLQWETSFLTLFLAYLHEETNLYIVYIHFISP

SEQ ID NO: 240389 - protein, 104 aa, Glycine max
  unsure (1)..(104): unsure at all Xaa locations
  Clone ID: PAT_MRT3847_59099C.1.pep
XXLYXSXPXXFXSXXXXAXLXSXXXXSXLXXAXXXXXXXPXCLXXXXXSXXXXXXXPXIXXAVXXPLRXXXXXLXCXXPTFLLFXPXXXDXXXXXSXFTTXXXI

SEQ ID NO: 240390 - protein, 128 aa, Glycine max
  unsure (1)..(128): unsure at all Xaa locations
  Clone ID: PAT_MRT3847_5909C.1.pep
PRGRFGYVAHPINQTQKKDSLEGTTSFDIKSRSRLEKDGSTKAHFGSGKTFKYDIIWRWXHSSEHFPEKEEHEKPQKTDARLRQRIXPQYNEVQAQMETNLLKLPLDDGATPKGSMMALKISQSKIAL

SEQ ID NO: 240391 - protein, 112 aa, Glycine max
  Clone ID: PAT_MRT3847_590C.1.pep
MNSVARRLSSLVRHSGFTPEPFNNGHHQMQQLQQCRGIRVKVMGGNLEAALGLMQRKMQSSGIERMIKQEQRFHIKNSEKRVLAQKNLERKIRSEDLAKKLKAIMIKKVRGL

SEQ ID NO: 240392 - protein, 41 aa, Glycine max
  Clone ID: PAT_MRT3847_59100C.1.pep
IDMKHILGDEKFPPPENINTQTHSQCFFSIKNFPLFILYPP

SEQ ID NO: 240393 - protein, 95 aa, Glycine max
  unsure (1)..(95): unsure at all Xaa locations
  Clone ID: PAT_MRT3847_59101C.1.pep
XLXSLSSPIXXXSNXLHLXXXSXYXXXXPXHSTYXXXSSLFXXXXXSXXXXXSFXLXXSXXXXTLXXXXXNXYFXXSPIQXXLYPNSXLTYSXXX

SEQ ID NO: 240394 - protein, 34 aa, Glycine max
  Clone ID: PAT_MRT3847_59102C.1.pep
LFHNFYSTLSHWKNFLISVYIECYIAIGKVMVIS

SEQ ID NO: 240395 - protein, 66 aa, Glycine max
  Clone ID: PAT_MRT3847_59103C.1.pep
QRVLGLSKFSARKFLILGTFNANNVGHFSQVQLLACCSLFNVVPGIMSSFTSPDNLLCLFHRLVKN

SEQ ID NO: 240396 - protein, 105 aa, Glycine max
  Clone ID: PAT_MRT3847_59104C.1.pep
SMLFMLCDARPINPAAVGAVLSMAIVIGLVKMSRHVLSLVSIMDVYSYVLSVTLSFVLNDVFTTVLPVGFSSTVVILKPRCLVVSSLIKGLVNGAVGQCQSPHGD

SEQ ID NO: 240397 - protein, 227 aa, Glycine max
  unsure (1)..(227): unsure at all Xaa locations
  Clone ID: PAT_MRT3847_59105C.1.pep
STPSGDGGGGSYNPTPSTPPGGGSYDPTPSPPTNGGSYNPTPSTPPGGGSYDPTPSPPSGGGSYNPTPSTPPGGGSYDPTPSPPTDGGSYNPTPSPPSGSNCGTPPQDPSTPTPSVPTTPSTPSNPPLGGGGYYNSPPTYGGGSPPTPITVSPPSTPIDPGTXTIPSTPPYLPSPTPFTGTCNYWNTHPGIIWGLLGLWGTLGHAFGVSSIPGFWCQSQLTTSTFPH

SEQ ID NO: 240398 - protein, 81 aa, Glycine max
  unsure (1)..(81): unsure at all Xaa locations
  Clone ID: PAT_MRT3847_59106C.1.pep
LLLXPFVLKAYPLXXQNXTMSXSAASXXLXTLTLRTRQPLCXPQXFSXSXSITPNSKPICISGVFLKRXLLSXSLXXLSXX

SEQ ID NO: 240399 - protein, 51 aa, Glycine max
  Clone ID: PAT_MRT3847_59107C.1.pep
NHHSDDQVLQVLHRASRCIVVIIRLCIECTERVASFVVLSHVFGRVYGRVG

SEQ ID NO: 240400 - protein, 228 aa, Glycine max
  unsure (1)..(228): unsure at all Xaa locations
  Clone ID: PAT_MRT3847_59108C.1.pep
MQEQIYQILCVHTALQIMALGVVDMEAHHITLIMDHHLIMDHHLIMDLRHNGGGGSYNPTPSTPPGGGSYDPTPSPPSGGGGSYNPTPLTPPGGGSYDTTPSPPLGGGGSYNPTPSTPPGGGSYDPTPSPPSGDGGGGSYNPTPSTPPGGGSYDPTLSPPTNGGSYNPTPSTPPGGGSYDPTPSPPSGGGSYNPTPSTPPGGGSYDPTPSPPTDGGXYNPTPSPPSGS

SEQ ID NO: 240401 - protein, 67 aa, Glycine max
  Clone ID: PAT_MRT3847_59109C.1.pep
LLLPRISFASFFLKPFFLFLGIQFKNHVSRCFCSMFISNLSSFFLFSFCIEILCLIWLSWEIYILFS

SEQ ID NO: 240402 - protein, 80 aa, Glycine max
  Clone ID: PAT_MRT3847_5910C.1.pep
RAIRENRIFTNPFIEIRDRHHKECKTIQQPTLDRKKKFQTNNISYTNSLKLLCHRWMWKRWLPPAPAVAPTRKSPTSLVG

SEQ ID NO: 240403 - protein, 413 aa, Glycine max
  Clone ID: PAT_MRT3847_59110C.1.pep
MERKRHISHYFTMFTLLLGVLAQNLVIPVISTTAIIVDQNFNSPDPHAGTDLSNSLCSYCSPDHGSGSGGHGSSPHHSQHGTPSHHGSTSHGGGGSHNPTPSTPPGGGSYDPTPSPPSGGGGSYNPTPSTPPSGGSYDPTPSPPSGGGGSYNPTPSSPPVGGSHDPTPSPPSGGGGSYNPTPSTPPGGGSYDPTPSPPTDGGSYNPTPSPPSGSNCGTPPHDPSTPTPSVPTTPSTPTTPSTPSTPSHPPSGGGGYYNSPPTYGGGSPPTPITVSPPSTPIDPGTPTIPSTPPYLPSPTPFTGTCNYWNTHPGIIWGLLGWWGTLGHAFGVSSMPGFGASLSLPQALSNTRTDGLGALYREGTASFLNSLVNNRFPYTTQQVRDRFIASLASNKAAEAQANLFKMANEGRMKP

SEQ ID NO: 240404 - protein, 386 aa, Glycine max
  Clone ID: PAT_MRT3847_59111C.1.pep
KFDIKAWVCVSDEFDVFNVTRTILEAVTKSTDDSRNREMVQGRLKEKLTGKRFFLVLDDVWNRNQKEWEALQTPLNDGAPGSKIVVTTRDKKVASIVGSNKTHCLELLQDDHCWQLLAKHAFQDDSHQPNADFKEIGTKIVAKCKGLPLALTTIGSLLHQKSSISEWEGILKSEIWEFSEEDSSIVPALALSYHHLPSRLKRCFAYCALFPKDHRFGRESLIQLWVTQNFVQCSQQSNPQEEIGEQYFNDLLSRSFFQRSSREKYFVMHDLLNDLAKYVCGDICFRLEVDKPKSISKVRHFSFVSQYDQYLDGYESLYHAKRLRTFMPTFPGQHMRRWGGRKLVDKLFSKFKFLRILSLSFCDLQEMPDSVGNLKHLRSLDLSDTG

SEQ ID NO: 240405 - protein, 84 aa, Glycine max
  unsure (1)..(84): unsure at all Xaa locations
  Clone ID: PAT_MRT3847_59112C.1.pep
SYYVFISIKLHXNHRYXLSYACRSSPAIKTSHPSQFQLKSFNQGWPNVTAETNKNKYKNIPEHYHNITANSTKTKSPRIKSSCE

SEQ ID NO: 240406 - protein, 133 aa, Glycine max
  Clone ID: PAT_MRT3847_59113C.1.pep
HASEKIDVFSFGVVLLELTTGKEANYGDQHSSLSEWAWRHVLIGGNVEELLDKDVMEGIYSDEMCTVFKLGVLCTATLPASRPSMREALQILQSLGEPFAYGDQKNFGHYYDAIPLLKSSEKETRLDVVDHSE

SEQ ID NO: 240407 - protein, 209 aa, Glycine max
  Clone ID: PAT_MRT3847_59114C.1.pep
MATVETSHEAMATVANKAPITSERKLPEDLDTKLPKPYLPRALSAPDTENVNGTRGHKHNDMSVLQQHVSFFDLNNDGVVYPLETYKGFRALGFNVILSFIFSIGIHVTLSYPTLPVSHPLHGTGLSGKDLPYHYYKHLLKACWDMTHRHGGAYDFFGWAASKFEWGVLYVLARDEQGYLSKEAVRRCFDGSLFEYCAKNPRGAAGKMA

SEQ ID NO: 240408 - protein, 315 aa, Glycine max
  Clone ID: PAT_MRT3847_59115C.1.pep
MCRIEYTPATRVTRKNLNLLLLRVPSLLLLSSRHFFKFFFFPVSFIQHPPLPNFYKEEKRTRDSLHPSSLVGHIVMATVEASHEAMATVANKAPITAERKVPEDLDSKLPKPYLPRALSAPDTENVNGTWGHKHNDMSVLQQHVSFFDLNNDGVVYPLDTYMGFRALGFNVILSFIFSIGIHVTLSYPTLPTWLPSPFFPIYIKNIHRAKHGSDTGTYDTEGRFMPANLEFMFSKYAREVPDKLTLKELWHMTEGNRVAYDFFGWAASKFEWGVLYVLARDEQGYLSKEAVRRCFDGSLFDYCAKNSKGAAGKMA

SEQ ID NO: 240409 - protein, 47 aa, Glycine max
  Clone ID: PAT_MRT3847_59116C.1.pep
LILFNHYYKASLDYLCDFSRKEKITQYLSIIVRARSELGRHSHTGLS

SEQ ID NO: 240410 - protein, 88 aa, Glycine max
  unsure (1)..(88): unsure at all Xaa locations
  Clone ID: PAT_MRT3847_59117C.1.pep
KVGPEQHRKALPXNILGITEAAIQRPARTVGGNGITGLIYKQTRVVLKIFVTPSVSXRSFTYAEHARIDIVTVMDMIYALKRHVMTLY

SEQ ID NO: 240411 - protein, 42 aa, Glycine max
  Clone ID: PAT_MRT3847_59118C.1.pep
MRCPLRHAPTKAMDNVGLNNHTVISSGLELNKGIHHDLPIGV

SEQ ID NO: 240412 - protein, 98 aa, Glycine max
  Clone ID: PAT_MRT3847_59119C.1.pep
GLSPGDYHWPPIPVGSSSACDVPLASGMAAPSSAFSQRWVELLSALLALLEARLAGSLGVAHALPAIFPPFFWVFLGWWWNICQRPRGRSRGSFRAFR

SEQ ID NO: 240413 - protein, 77 aa, Glycine max
  Clone ID: PAT_MRT3847_5911C.1.pep
QDERKYKVASRQCQIQVHINSSNFKRFNLYLQANQIKLVKLLRGVEKKDHQSSRRSPSQTNKHVMTKTYAIQILHIK

SEQ ID NO: 240414 - protein, 213 aa, Glycine max
  Clone ID: PAT_MRT3847_59120C.1.pep
MASSAAATTTTNTWIKTTLPSPPTTLKKRFPCNSNSNSNSNAITCSLQTLHFPKKYQPTSTTTTTTTTTTPARETKPVIASPSETKHPLPQSWNFLQKAAASALDMVETALVSHERKHPLPKTADPRVQIAGNFAPVPEHPAQHSLPVAGKIPKCIEGVYVRNGANPLYEPVAGHHFFDGDGMVHAVKFHSGAASYACRFTETQRLAQEKTLG

SEQ ID NO: 240415 - protein, 35 aa, Glycine max
  Clone ID: PAT_MRT3847_59121C.1.pep
RCGIWWAGDFGIGLFHLRKGLSCILRMLSQHFRSR

SEQ ID NO: 240416 - protein, 87 aa, Glycine max
  unsure (1)..(87): unsure at all Xaa locations
  Clone ID: PAT_MRT3847_59122C.1.pep
RCKARWYEGLDPSXIKRTEWTXEEDEKLLYIAXLMPTQGRTIATIDGQALSKSRERCEKLLAGPGVVREDYEPRDEPYNCLLTRMIQ

SEQ ID NO: 240417 - protein, 114 aa, Glycine max
  unsure (1)..(114): unsure at all Xaa locations
  Clone ID: PAT_MRT3847_59123C.1.pep
FFPDPQYENVQHIICCDSYATYAYDFVFENNVGFSRTKSDVPTIQIAFQYSVVVPPQELSISNSGGVSTNRTKHFLQRRVKIRTLEFGVAQNIHELYDSCDPEXVLSLLGHKVI

SEQ ID NO: 240418 - protein, 56 aa, Glycine max
  Clone ID: PAT_MRT3847_59124C.1.pep
KLILTRDIIRKISLITFLCFFILFFGTFYYQQINLVYFTFNLLKTTLNYIFIVKLM

SEQ ID NO: 240419 - protein, 104 aa, Glycine max
  Clone ID: PAT_MRT3847_59125C.1.pep
PCAARSSRFRAGLCQFNGRFAYRSPRLRRAWYVFISTGGVFSSRDCGSMRLLKFWTRFSPMWVFWFLLILVSLRFPYELYVSCQLGIGMNSFFFQLGVFVNNPH

SEQ ID NO: 240420 - protein, 66 aa, Glycine max
  Clone ID: PAT_MRT3847_59126C.1.pep
VVNHSMRGKWENSFSCCGNCFCTFRVSTFSNDIPQLASYEHNLWEQLLRMQKEHDDPLFPFMSPGG

SEQ ID NO: 240421 - protein, 284 aa, Glycine max
  Clone ID: PAT_MRT3847_59127C.1.pep
MGREATKKKKMKKNAKSGGFESLGLNPNVFKGIKRKGYKVPTPIQRKTMPLILSGSDVVAMARTGSGKTAAFLVPMLHRLNQHIPQSGVRALILSPTRDLALQTLKFTKELGHFTDLRVSLLVGGDSMESQFEELAQSPDIIIATPGRLMHHLSEVDDMSLRSVEYVVFDEADCLFGMGFAEQLHQILAQLGENRQTLLFSATLPSALAEFAKAGLRDPQLLRLDLETRISPDLKLAFFTLRQEEKYSALLYLIREHIGSDQQTLIFGSTKPHVEVLNLLVPEK

SEQ ID NO: 240422 - protein, 74 aa, Glycine max
  Clone ID: PAT_MRT3847_59128C.1.pep
SMLYARSSLIQFLCIILCNVVDSRVSCRSMRSFNNIDRRPMSEYPISFVMAAALAAHAAICICSIFSCSTLGQT

SEQ ID NO: 240423 - protein, 81 aa, Glycine max
  unsure (1)..(81): unsure at all Xaa locations
  Clone ID: PAT_MRT3847_59129C.1.pep
AASMASIKAAKAGKAVXRKKARLKXKADTSAKRALDLVASFSEEAVSKIVYITRNNTLTKHSRVEFLYNKNDPIVKFATDD

SEQ ID NO: 240424 - protein, 112 aa, Glycine max
  unsure (1)..(112): unsure at all Xaa locations
  Clone ID: PAT_MRT3847_5912C.1.pep
SRRRSRRVNLTVPSSVRGVLIGALFWTDFRSKTNGRSIPVRRANKGQVVGGTYKGRGGKGVQVYRRRGLIKMRRITRRRVNGSTVNVGFNLSRVVVTKLXLAKDRKSWLDRK

SEQ ID NO: 240425 - protein, 56 aa, Glycine max
  Clone ID: PAT_MRT3847_59130C.1.pep
MGKSMACLDGAIVILRCLVSHVTSDASDHRYMNGDSDDFYANKVGSYYNLSVTYRD

SEQ ID NO: 240426 - protein, 63 aa, Glycine max
  Clone ID: PAT_MRT3847_59131C.1.pep
TKSPSLKMVIQTNISGKGTAKVSAAPKPFPEKDPWQSNEKLREPKAPPNQVRQLSDELSEVLH

SEQ ID NO: 240427 - protein, 90 aa, Glycine max
  Clone ID: PAT_MRT3847_59132C.1.pep
ESAPLQQAVSPKVSRPSQHLPLQVLIWNCSLPRSSTTLVTFTVQSCVSLWRHQPTSQPGVIVLRPCRVPRWYTAATAVAIDSHTHQAPLS

SEQ ID NO: 240428 - protein, 590 aa, Glycine max
  Clone ID: PAT_MRT3847_59133C.1.pep
MVPKPILVTTPPPATSAPSPLLNAVSPLKTEEKPQTQTLKTPTTTTQKAITKPSPSSSTTKTTPQQRVELKRKTNSWVPALMLNAFDDIINNFIDPPLKPSIDPRHVLSQNFAPVHELPPTECEVIEGSLPPSLDGAYIRNGPNPQFLPRGPYHLFDGDGMLHALRISHGKKPTLCSRYVKTYKYTMENDAGFPLIPNVFSGFNSLVASAARGSLSAARFLTGQFNPANGIGLANTSLAFFGNRLFALGESDLPYVVNVTPDGDIETLGRHDFDGKLTFSMTAHPKIDPDTAECFAFRYGPVPPFLTYFRFDGNGKKHEDVPIFSMLTPSFLHDFAITKKYAIFCDIQLGLNPLDMISGGSPVGSVASKVPRIGILPRDAKDESMMKWFEVPGFNIIHAINAWEEDEGRTVVLVAPNILSMEHALERMELVHAMVEKVRIELDTGIITRQPVSARNLDFAVINPAFVGKKNRFVYAAVGDPMPKISGVVKLDVSKGEERRDCTVGCRMYGEGCYGGEPFFVAREEGGEEDDGYLVSYVHDERKGESRFLVMDAKSPELDVVAAVRLPRRVPYGFHGLFVKESELRKVSLS

SEQ ID NO: 240429 - protein, 56 aa, Glycine max
  Clone ID: PAT_MRT3847_59134C.1.pep
GDPLFGRVFFAFWVIFHLYPFLRGFMGRRKRHTGPIVFSWSLLVGLLSSSLIWGQR

SEQ ID NO: 240430 - protein, 338 aa, Glycine max
  Clone ID: PAT_MRT3847_59135C.1.pep
RESLAYHGCAELFQDVHTELIQHKRSWMIKRGIVKGKLSVNSAEERLKGSCPLMPQEIGILLRAYGYSKDAIIYVSGGEVFGGQRTLIPLHAMFENVIDRTSLSTPWEMIRLYGKEVNLVDTPGPPPFVEEVTKRAAWKNAGPRPRPLPPPPARPKSYNIEGWWGWVAESDNEPDSTVIELRTNAHKLLWEAIDYVICVEADVFIPGFDRDGKGHPNFASLVMGHRLYQSAASKTFRPDRKEVAKLLDEICDHRHHANHTWLETVRRHLTKTLLDGIIEASNKSKPLSFLSHPVPECSCSRRDSFEVSKNSSSPLTSQLWTALSVAHQCPAWMDTGPI

SEQ ID NO: 240431 - protein, 64 aa, Glycine max
  Clone ID: PAT_MRT3847_59136C.1.pep
CRDIIPKVFFRKKRFKTVKGIYSFSYVSQPKNTEERRSRVQLIFLIHFILENRGIVVCLLKSLQ

SEQ ID NO: 240432 - protein, 64 aa, Glycine max
  Clone ID: PAT_MRT3847_59137C.1.pep
TQPGQQSDPASVSGRPRRCAAWKSIVNRMSFGHIVCYHIHMVSLPHLFVLAIDSFLWHLSPRVQ

SEQ ID NO: 240433 - protein, 203 aa, Glycine max
  Clone ID: PAT_MRT3847_59138C.1.pep
REELSRAECEAKTIPKFSSFNQRVLKECSEPSLSSFPSNRVNWGDGGSAFSLKDANSQGNQSTRDIGVQFNAVEFKRSTEELKLRYSNSNEEAVNKTAKKKRKSEPYGEEPSGENEEEAEMRYRFYESASARKRTVTAEERERAINASKTFEPTNPFCRVVLRPSYLYRGCIMYLPSTFAEKNLNGVSGFIKLQLSNGRQWSV

SEQ ID NO: 240434 - protein, 188 aa, Glycine max
  Clone ID: PAT_MRT3847_59139C.1.pep
GGELISDSENVADKPWRFYELASARKSTVTAEERERAINASKTFEPTNPFCRVVLRPSYLYRGCIMYLPSCFAEKNLNGVSGFIKLQLSNGRQWSVRCLYRGGRAKLSQGWFEFTVENNLGEGDVCVFELLRTKEVVLQVTVFRVTEDAGLLNQPPMMQQQHIPNMSHTKLLNPHLQHRVSTTKLIRN

SEQ ID NO: 240435 - protein, 74 aa, Glycine max
  Clone ID: PAT_MRT3847_5913C.1.pep
QQKNFSIQGYGSVPLAFIVSTEDQEIPLNFQHWMIQNAGINVEVLEIKGADHMLMISKPQELCDSLLQIATKYA

SEQ ID NO: 240436 - protein, 71 aa, Glycine max
  Clone ID: PAT_MRT3847_59140C.1.pep
LGGLGTLGQRGAALVTSGYSRYGGAGGGMYRVRPAGCSVSNETVKPPGCGGLRAMGPRQRPAAGKGGNTRG

SEQ ID NO: 240437 - protein, 94 aa, Glycine max
  unsure (1)..(94): unsure at all Xaa locations
  Clone ID: PAT_MRT3847_59141C.1.pep
MVGDLTFTYNGHGTQVGAMVLTGSSSGPGAVQRGMSDKKDESAMPKDAKNVKSLLKSMGLEDYXPRVIHKYLELXYRYNGYVLTDAQVYTQHAV

SEQ ID NO: 240438 - protein, 66 aa, Glycine max
  Clone ID: PAT_MRT3847_59142C.1.pep
AHPEEATVKKKYGRVPPLKPTVLDQDHERADYDSAERAGGQQGARTPEGPLAALPAKWQAKCIADV

SEQ ID NO: 240439 - protein, 227 aa, Glycine max
  Clone ID: PAT_MRT3847_59143C.1.pep
MADKQSQLNGAYYGPAIPPSELPRHHHRGRRCCCCLFSFFWKLLLAIVVFLVVVFLVFWAVVQPRTFKLHVTDAKLTQFNLTTNNNNNINMLRYNLVLNLTARNPNKKLNIYYDQVEGHVSYEGMRFASADLITWRNSFRQYTKSTNNMSGVFTGQHGLVFDGDHVKDFEKDERGGVFDIDVKLYFNIRFRLGDFIGSSSRVRAKCELQVPLVSRGVFLPTRCHVKF

SEQ ID NO: 240440 - protein, 56 aa, Glycine max
  Clone ID: PAT_MRT3847_59144C.1.pep
LGSESTCWVKDFFVAKCYGLNAELLTLLVWMGVYPKVFLDCMHTYVSNLVQHGKFN

SEQ ID NO: 240441 - protein, 63 aa, Glycine max
  Clone ID: PAT_MRT3847_59145C.1.pep
MAVSSASLRVVAFLSLILAALMTVASSQVTAPAPAPTGDGTTIDQAVAYVLMLVALVLTCIMH

SEQ ID NO: 240442 - protein, 224 aa, Glycine max
  Clone ID: PAT_MRT3847_59146C.1.pep
LLHFLRVFFFILLYMGASSGIVLEITVISCENLRVTEDPYVVVRAESLNCCTSNIAKDCGSNKTSLFSWNEKLMLNMPMHARSITFEVQCNRFKGFRPAGVARIAVSDFLGGAVSENCMHVLSYRLRDWEGKENAMINLKGSRVFDRLGWPESPCRIFSALACREISCTWSYRLKDWEGKENGVIHFAVRVEVAPVKGTVVSKVLVMVSWESKLVTSVTKLLLV

SEQ ID NO: 240443 - protein, 157 aa, Glycine max
  unsure (1)..(157): unsure at all Xaa locations
  Clone ID: PAT_MRT3847_59147C.1.pep
LGPVFFFFFFFFFFFFFFFFFFFFFFFFFFFXXPKGFLGGAPRILLFFFSSSPPGGKRPPQRRTPPFLFWAHPPHLFSFPWFPLSVPLTAEKSSPLVLGGKMLLLLPLLLLGLNPLPFKSLRAGGQNLSFFLNPPGFFFKVGGPLSPLLVGGKPCPF

SEQ ID NO: 240444 - protein, 81 aa, Glycine max
  Clone ID: PAT_MRT3847_59148C.1.pep
ARGASHTRKTFLRARTTTFIHALNGEHALHILTGKCTAPYILSIIYGCSLHHPRQLTAMQNVHLPERTLPRTTTGTILWSF

SEQ ID NO: 240445 - protein, 85 aa, Glycine max
  Clone ID: PAT_MRT3847_59149C.1.pep
GQHGGRGHAASVRTAWKSCDSHATVHALALTRGVSSTATENDEDEKRDAEAKPLAHYTMAAADAAHTAEYQLTWPNEKTNLTVGA

SEQ ID NO: 240446 - protein, 35 aa, Glycine max
  Clone ID: PAT_MRT3847_5914C.1.pep
QFPPFLTRQMNSYLEFTPTHTFYSDSRMCLYIFYQ

SEQ ID NO: 240447 - protein, 78 aa, Glycine max
  unsure (1)..(78): unsure at all Xaa locations
  Clone ID: PAT_MRT3847_59150C.1.pep
AFSNKIVFDDEVVLANTQEFFDGNFPVDFWLPICENCLYPVRQLPXKACLVNVTWWSGRSWNVRLFLYRIWKFGWLFH

SEQ ID NO: 240448 - protein, 71 aa, Glycine max
  Clone ID: PAT_MRT3847_59151C.1.pep
GVLNVAIVVPQMIVSAISGQWDKWFGGGNFPAFVLGAVAAAVSAVLAVVLLPKPKPADVAKVSSVTAGSFH

SEQ ID NO: 240449 - protein, 49 aa, Glycine max
  Clone ID: PAT_MRT3847_59152C.1.pep
RTRGFNFNQKKKKKKKKKKKKKKKKKKKKKKKPKKKKKKKKKKKKGGAV

SEQ ID NO: 240450 - protein, 71 aa, Glycine max
  Clone ID: PAT_MRT3847_59153C.1.pep
GNLWLLSDDRRSDPSFGSFKRAFGKMAEGTLSPAVENVSPAGILNGGRLCPNGTQKINQHVSVRGLRVSNW

SEQ ID NO: 240451 - protein, 84 aa, Glycine max
  Clone ID: PAT_MRT3847_59154C.1.pep
CSQSSSRTRFFVLRTPPARGATTIGWRQLMATTLTPIQTLQYCSPNAKPFLTPKPIFPSKPAYICTPHTLRADQLFLFLFRATF

SEQ ID NO: 240452 - protein, 87 aa, Glycine max
  Clone ID: PAT_MRT3847_59155C.1.pep
LLKAWGGVTSLQGAIAVGNHADIVVWKPEVEFDLNEDYPVFLKHPSLSAYMGRRLSGKVLETFVRGNLVFKKGKHAPSACGVPILAK

SEQ ID NO: 240453 - protein, 110 aa, Glycine max
  Clone ID: PAT_MRT3847_59156C.1.pep
MAVRATVSRFPMDTDAREGSGLLWGVTVTPFSAADENARAPSYGSGGDLLPRCENCWAYFNTYCELEQWSWSCSLCGNLNGLSSDAIDRYSRTQSYALISQHSERAQRLG

SEQ ID NO: 240454 - protein, 147 aa, Glycine max
  Clone ID: PAT_MRT3847_59157C.1.pep
KLSNLYEMQLSRNGFSGEIPFEIGSLQNLQISLDLSYNNLSGHIPSTLGMLSKLEVLDLSHNQLTGEVPSIVGEMRSLGKLDISYNNLQGALDKQFSRWPHEAFEGNLLCGASLVSCNSGGDKRAVLSNTSVVIVSALSTLAAIALL

SEQ ID NO: 240455 - protein, 61 aa, Glycine max
  unsure (1)..(61): unsure at all Xaa locations
  Clone ID: PAT_MRT3847_59158C.1.pep
CNKTISCKIAVGRFLVYRHAMLSMVHIAAVXVSVALLFKSSAEVISMFRPFRWEHLYFETR

SEQ ID NO: 240456 - protein, 165 aa, Glycine max
  Clone ID: PAT_MRT3847_59159C.1.pep
GVQAVVKETMRLYAAAPLPGPREFTSECTLGGYRIQAGTRFILNIWKMQRDPRVWSDPLEFQPERFLTNHKGVDVKGQHFELLPFGGGRRSCPGMSFALQMTYLALATFLQAFEVTTLNNENVDMSATFGLTLIKTTPLEVLAKPRLPYQLFFTDETKENPTHSP

SEQ ID NO: 240457 - protein, 216 aa, Glycine max
  Clone ID: PAT_MRT3847_5915C.1.pep
PCLFLLDIVLGGTETTSTTLEWVVARLLQHPEAMKRVHEELDEAVGLDNCIELESQLSKLQRLEAVIKETLRLHPPLPFLIPRCPSQTSTVGGYTIPKGAQVMLNVWTIHRDPDIWEDALEFRPERFLSDAGKLDYWGGNKFEYLPFGSGRRICAGLPLAEKMMMFMLASFLHSFEWRLPSGTELEFSGKFGVVVKKMKPLVVIPKPRLSKPELYQ

SEQ ID NO: 240458 - protein, 523 aa, Glycine max
  unsure (1)..(523): unsure at all Xaa locations
  Clone ID: PAT_MRT3847_59160C.1.pep
SSFSGTHKDRFFKDRHYLDKEWGEYFSGGGRKVILEVGCGAGNTIFPVIASNPDAFVYACDFSPRAIELVKTHEDFKESHVSAFVSDLTADDLCNEILPSSVDIVTMLTLXQIFMLSAVSPEKMPLVLQNIRKVIKPNGYVLFRDYATGDLAQERFSSKDQKISDNFYVRGDGTRAYYFSNEFLKNLFKENGFDVDKHHVYCKQVENRSRELIMNRRWVQAVFRVSDSSNSSSCIEAEANHLDNGNANMEIKQNSLNGGLNDSAVDLSEGVAVDMFGVLPSNEYEIIEINLRGWNFKISLLSKEYQHTCKSTGLMLWESARLMASVLAENPNIVAGKRVLELGCGSGGICSMIAARDADLVVATDGDGFALDLLTKNVASNIEPSLLTKLTTKKLEWGNKDQFESIKEVVSNGGFDVIIGTDVTYIPDAILPLFATAKELIAPSGNKEDDNVPALILCHIFRRVDEPTLLSAAAHFGFRLVDKWPAGTSTNLSHRIIGNWFVDNDLKDDLPSTALNILLFCKE

SEQ ID NO: 240459 - protein, 117 aa, Glycine max
  Clone ID: PAT_MRT3847_59161C.1.pep
KQVVPNTGFDVIIGTHVTYIPDAILPLFATAKELIAPRGTKEDDNVPRLILCHIFRRVDEPTLLSAAVHFGFRLVDKWPAGTSSNLSQSIIDNWFVDNDLKDDLPSTALNILLFCKE

SEQ ID NO: 240460 - protein, 177 aa, Glycine max
  unsure (1)..(177): unsure at all Xaa locations
  Clone ID: PAT_MRT3847_59162C.1.pep
MAEAAAAPTVSSFLSKRSSLFTYTHAMTKTPTLPLQLALSKDPVTDTVGSYNNYKPSEECGVGGIYCDPEASRICYLALHALHHRXGQEGAGMVPDHNTVLEPPITGVGLVCEGMNRSQLDRLHGNRGIGHVRYSTGGQSMRKNDQPFVAWYRFRCVGLVHIGNRVYYKTLRTSLED

SEQ ID NO: 240461 - protein, 58 aa, Glycine max
  Clone ID: PAT_MRT3847_59163C.1.pep
LEVGGSMLHAVDESEGSRERVWVRFLNAEYTLKTKLWSRYDPSTVFDARGATATNSSF

SEQ ID NO: 240462 - protein, 99 aa, Glycine max
  unsure (1)..(99): unsure at all Xaa locations
  Clone ID: PAT_MRT3847_59164C.1.pep
LRVRPRCRASEGRTPLESQKSKPQATAMHVGAIKIIIXSIASTDCNIEGAMLLVXDTYNTNPEKEVTIILXVPLKGGRPIRVVSLPNTMVQIEPHMNSK

SEQ ID NO: 240463 - protein, 61 aa, Glycine max
  unsure (1)..(61): unsure at all Xaa locations
  Clone ID: PAT_MRT3847_59165C.1.pep
EVYFHGESSESSPLFSKKGVFLGRKQPKPILKRFFFXKGKFNXFKTQHWTSFRFTGNSLCT

SEQ ID NO: 240464 - protein, 53 aa, Glycine max
  Clone ID: PAT_MRT3847_59166C.1.pep
FWSPFLVTLWGFSFLPWLSITPPKIRGLILPPFLVSYTRCFFTPFVDYPRPTG

SEQ ID NO: 240465 - protein, 48 aa, Glycine max
  unsure (1)..(48): unsure at all Xaa locations
  Clone ID: PAT_MRT3847_59167C.1.pep
CSHCEKEAWNVSLGNLITYPVGXDGWVNKTLSLKGGYCDFGKESCELW

SEQ ID NO: 240466 - protein, 209 aa, Glycine max
  Clone ID: PAT_MRT3847_59168C.1.pep
ILTNQWPQNSPRFRETLQEYAREVEKLAYKLLELISLSLGLDAEKFHGCFMNQLSMVRLNYYPTCPFPDLALGVGRHKDSSALTVLAQDDVGGLQVKRKSDGEWIPVKPTPNAFIINVGDIVQVWSNDKYESVEHRVVVNTERERFSIPFFFSPAHYVIVKPAEELVNEQNPARYREYNYGKFFANRNRSDFKKRDVENIQIHHFRILD

SEQ ID NO: 240467 - protein, 136 aa, Glycine max
  unsure (1)..(136): unsure at all Xaa locations
  Clone ID: PAT_MRT3847_59169C.1.pep
MGSHNTTTSSSSDSELPCSNYIPIPDGTHFPAEEAPRELLVIFCGLLVLVSLVAFNGYRAHPNDHHHVSSXLPTTLLTVTPNELELSPDTVPCSTSETTDSRGLSRRVSEKSSWQLNSNNGSGESYPWNNSVLSWQ

SEQ ID NO: 240468 - protein, 102 aa, Glycine max
  Clone ID: PAT_MRT3847_5916C.1.pep
PFFQRTTILDLKEKGPKKKSKKKGEKIPIPDGWVQPGNPERKQEAQQISLYGNKVEGGRKKVIGDCCTKVITRDNKGPHSWRKGKKKKPEGLKKGPTPIKRG

SEQ ID NO: 240469 - protein, 71 aa, Glycine max
  Clone ID: PAT_MRT3847_59170C.1.pep
ISPTMKAILIAFLLLPYVAFVPSSTLAREPKEAVTIPIGPAYRNPPFIGCDPFKRNCHRLDPPCTHGSGNC

SEQ ID NO: 240470 - protein, 401 aa, Glycine max
  unsure (1)..(401): unsure at all Xaa locations
  Clone ID: PAT_MRT3847_59171C.1.pep
SELVTRDDSYVKKAKSSFYSNGYGFEPTIPSKASILDSSLKPTSTAGQDGDKLSLIKLASLIEVSAKKGTRDLKLQNKLMDQVDWLPDSIGKLSSLVTLDLSENRIMALPATIGGLSSLTRLDLHSNRITELPDSVGNLLSLLYLDLRGNQLTLLPASFSRLVRLEELDLSSNQLSALPDSIGSLVRLKILNVETNDIEELPHSVGSCSSLRELRVDYNRLKALLTRLDLHSNRITELPDSVGNLLSLLYLDLRGNQLTLLPASXSRLVRLEELDLSSNQLSALPDTIGSLVRLKILNVDTNDIEELLHSVGSCSSLRELRVDYNXLRVLRAEENPLEVPPREIAEKGAQAVVQYMDELVEKREKKDVKAQPLKQKKSWAQICFFSKSNKRKRDGVDYVKT

SEQ ID NO: 240471 - protein, 116 aa, Glycine max
  Clone ID: PAT_MRT3847_59172C.1.pep
NMVHHIAAQHGNLLKSHLKSKCYKDEPYPALSFSSKGERDGHWQSFSTGLSPTTSKAASDPWLSFLCGPSAVDECENVQPDSSSEVSIEEIHSNDNVLERDVQPSLSDKDQIEKAQ

SEQ ID NO: 240472 - protein, 69 aa, Glycine max
  Clone ID: PAT_MRT3847_59174C.1.pep
LCSLLFTFPYFLLYIYIFYLLIIFQSYYLFFIIFYLYSIIFFYLQSFSYFYIINFYFSNFFIFLNFISF

SEQ ID NO: 240473 - protein, 81 aa, Glycine max
  Clone ID: PAT_MRT3847_59175C.1.pep
LQHDHRFVVDVAPSRHALAHSQVRIYEPCFLRFPDNAMYSFGVSSRSYNLRLYNICAHALNSLDGLSVNVLIQIDRSPAVG

SEQ ID NO: 240474 - protein, 69 aa, Glycine max
  Clone ID: PAT_MRT3847_59176C.1.pep
HNLNIYDWWIRYSYQHSTKRRPPTPPPNPAPPPPQKPPLAPKPPPPPNPPPPPPPNPPPHIPSPPPAPN

SEQ ID NO: 240475 - protein, 147 aa, Glycine max
  unsure (1)..(147): unsure at all Xaa locations
  Clone ID: PAT_MRT3847_59177C.1.pep
PTGFPPPPPSXGGAARRGFLSRLFSFLAPPGSPPKLLPQNSFAAGGAPPPPAEKPPSPSLGFVLFLLEKGTAGTPVGGGSFVFPPARAPGXLFFLETPPFSTPLFFFPSFAAHPAVVFSPLFVKGVRSFPLFVGSFPFRPLCSPSPD

SEQ ID NO: 240476 - protein, 106 aa, Glycine max
  unsure (1)..(106): unsure at all Xaa locations
  Clone ID: PAT_MRT3847_59178C.1.pep
VQPQVPVRNPGRPRVRTSLDRERPPFFFFFFFFYWXXRXXLVLMYFWFLILIFIVFGYCYFDCAACYXXESXVGGGGXEAFDGGLGKREVXLFGPKFWVFVLGLVF

SEQ ID NO: 240477 - protein, 85 aa, Glycine max
  Clone ID: PAT_MRT3847_59179C.1.pep
GCGRSLCSVVPTVVHLPPCLCGFAISRVRLFPCAGDRAQGILSIRSAPYSSSFLVLTALVPSSVLSCVCSPSWPFPGLLLALFAL

SEQ ID NO: 240478 - protein, 44 aa, Glycine max
  Clone ID: PAT_MRT3847_5917C.1.pep
IPNIRTLNTDHRMTAEPSFFVKLNRNPETLFWYLVASPTCLSLN

SEQ ID NO: 240479 - protein, 124 aa, Glycine max
  unsure (1)..(124): unsure at all Xaa locations
  Clone ID: PAT_MRT3847_59180C.1.pep
PRVRLALLEAATFYPGWINPANALLGMPGRKPGPHVQDDMKSSVNEGVREEVHVKSMSAEDVDDKRWEDCTGEVYWWTXIHISGATGGDNRPGLTDHPTGGTHXRLGDARAHGSRPGWGGVPNI

SEQ ID NO: 240480 - protein, 148 aa, Glycine max
  unsure (1)..(148): unsure at all Xaa locations
  Clone ID: PAT_MRT3847_59181C.1.pep
NLHLWWRLLSFLLLLLQPVTSQFVTPLNSDGIHLLKFKYSILSDPLSVLKNWNYDDVTPCSWHGVACSEIGAPGTPDFFRVTSLALPNSQLLGSXSEDLGLIQYLRHIDLFNNFLNGSLPNTILNSFXLQVLSLSNNVIFGELPQLIG

SEQ ID NO: 240481 - protein, 52 aa, Glycine max
  Clone ID: PAT_MRT3847_59182C.1.pep
LSSNLFFFGPWPLSGQLTTYNRQRHCLSNRLDSTNDFRGAEGAYGSTGCSCT

SEQ ID NO: 240482 - protein, 49 aa, Glycine max
  unsure (1)..(49): unsure at all Xaa locations
  Clone ID: PAT_MRT3847_59183C.1.pep
YHEKXVLXXGEIYVEKTSXXYXAEEKXVIXNXLHNITEIXXGKSTFLIP

SEQ ID NO: 240483 - protein, 161 aa, Glycine max
  Clone ID: PAT_MRT3847_59184C.1.pep
MARNTADLVTQLNVAHHFPHDSLLRYCSSHVSGFPHPPTHFTVSQFGHGQSNPTYLLEVGSHGSLVKHYVLRKKPPGTLLASAHAVDREFQVLQALGAHTKVPVPKVFCLCNDPTVIGTAFYIMEYLEGRIFIDPKLPGVAPENRRAIYRATAEALACLHS

SEQ ID NO: 240484 - protein, 38 aa, Glycine max
  Clone ID: PAT_MRT3847_59185C.1.pep
MGSEGPRAITIHVTGFKKFQGVPENPTEAIVNNLKEYV

SEQ ID NO: 240485 - protein, 50 aa, Glycine max
  unsure (1)..(50): unsure at all Xaa locations
  Clone ID: PAT_MRT3847_59186C.1.pep
KLGVAIVLRFLVFSYSFMPXTVNLGSCLYDKFNVLSCFNFGMCKKIFMNC

SEQ ID NO: 240486 - protein, 85 aa, Glycine max
  unsure (1)..(85): unsure at all Xaa locations
  Clone ID: PAT_MRT3847_59187C.1.pep
GGTGKAFEYTEDMLCSWYKVISALNDDKVEQCVDXKLKGNFAADKAIPVIKLGLVCASQVPSNRPDMAKVINILELIQCPSEELQ

SEQ ID NO: 240487 - protein, 98 aa, Glycine max
  unsure (1)..(98): unsure at all Xaa locations
  Clone ID: PAT_MRT3847_59188C.1.pep
CRVRGXSVRSXKQGVLXTHRXLLXLQRXLSICTPVCSVTFTVRGTXXCLCXALLTQSPHLRPMTPFASLDGLCNXSSYCLNAVLRRYARLXLYRESML

SEQ ID NO: 240488 - protein, 86 aa, Glycine max
  Clone ID: PAT_MRT3847_59189C.1.pep
SCSLFHIPVLMKKTRQFFFFKKLYTRDPNKILLLEIINHWFPSLQIIKLIIIIIIITNKKLTNSNTAVRPAGTMHSRSNIHQSSSA

SEQ ID NO: 240489 - protein, 117 aa, Glycine max
  unsure (1)..(117): unsure at all Xaa locations
  Clone ID: PAT_MRT3847_5918C.1.pep
MTPQGSSKALIMCVIPLIASSQAQLLLGLYPRWXTPAETIIVNYVVEHIHNAXSIATXLISKPVHECTLKGCGGSXLVDCTPGHQAENDAIPDLTLRSVGCNESIIMLAEAECTGVV

SEQ ID NO: 240490 - protein, 55 aa, Glycine max
  unsure (1)..(55): unsure at all Xaa locations
  Clone ID: PAT_MRT3847_59190C.1.pep
KIKSTIFFALLIFCSFTNSYLPGGIADFVLDNESNPPENGGTYDILSXITVFVGI

SEQ ID NO: 240491 - protein, 119 aa, Glycine max
  unsure (1)..(119): unsure at all Xaa locations
  Clone ID: PAT_MRT3847_59191C.1.pep
MLHIALAAPVSPTVVAFHRGAKQWSALIPNFRRSRGIGSSVFSSSLRKRLQLRFFASGENGGNGGVLEEISEAEKEPTNFAWPDNKKPMVCILGGGFGGLYTALKLEXLEWPDDKNHRL

SEQ ID NO: 240492 - protein, 115 aa, Glycine max
  unsure (1)..(115): unsure at all Xaa locations
  Clone ID: PAT_MRT3847_59192C.1.pep
STFTFKAGCTIDIDARTDRPSQHYCTLIDACDPPCFITIMXTGASXTDSADLTIACTTSGSDSAIFNDLLTREHALPAFTLGVKLTICCXNKTDATTHNYSMAKYDEIRNEASSY

SEQ ID NO: 240493 - protein, 37 aa, Glycine max
  Clone ID: PAT_MRT3847_59193C.1.pep
EVLGIGLRSREDDDLGVVSWSVVDLKNLIELELNACC

SEQ ID NO: 240494 - protein, 88 aa, Glycine max
  Clone ID: PAT_MRT3847_59194C.1.pep
AKEEEGGEEKIKCSSKHCGSCCGGYVADCVAVCCCPCAVLHCCAMAIVKGPSLVGRKCLGLGKNKNKNNNIKRVQEGCEDGVDVDVVV

SEQ ID NO: 240495 - protein, 144 aa, Glycine max
  unsure (1)..(144): unsure at all Xaa locations
  Clone ID: PAT_MRT3847_59195C.1.pep
PAGAGPLLPGPPTPAFSPRPFHRHNVPVPLDASEKSNRHSFDPAKGPHVSPSEILFHFNTTQEDIPHSACDLLCWCRATTRPNNXAAESLSCLLNTATGRPFPRAGSNHCRGHGHHMHTTERHNLPELDVRLAYDACTIPQESG

SEQ ID NO: 240496 - protein, 69 aa, Glycine max
  unsure (1)..(69): unsure at all Xaa locations
  Clone ID: PAT_MRT3847_59196C.1.pep
YDLLTGDELLSDSFRYTEIDNGMLCEVXGKRAVKAAVDVDIGANPFADGAEDEGIYDSPAKVVDIADTF

SEQ ID NO: 240497 - protein, 61 aa, Glycine max
  Clone ID: PAT_MRT3847_59197C.1.pep
SSRQNKKTSFFAIGICHQTIVGRSYKQALATTMKKGVLQLDLHGGRIKPKAFETASWPLRG

SEQ ID NO: 240498 - protein, 101 aa, Glycine max
  unsure (1)..(101): unsure at all Xaa locations
  Clone ID: PAT_MRT3847_59198C.1.pep
INGKKKLEXXKVWTSSNMVXNIXXNWAQFTVCSAYXXHLLNTITSVLERHNIEVIAANVSFNHNENGKTCMILVHAKQVSDENSAEETYKDASGEIFSLIS

SEQ ID NO: 240499 - protein, 91 aa, Glycine max
  Clone ID: PAT_MRT3847_59199C.1.pep
ACTSSSSTFIPKGYSFFFWLSILFALRSSSGGCSEYHHHHAPMATIGGLRDSQGSQNSVQTEALARFAVDEHNKKQVAAKSPFVKIFFSTK

SEQ ID NO: 240500 - protein, 176 aa, Glycine max
  unsure (1)..(176): unsure at all Xaa locations
  Clone ID: PAT_MRT3847_5919C.1.pep
MEAVQLMSTTTIKASSNNYNDNSVQKIDLTPWDLQFFHIGSIQRGLLFRKEKNTEYCQIEHLQHSLSSTLAFFPLLAGRLAILEHHDNTVSSHIVCDNKGVPFVHAAAHNTTVADILQPKYVPPILRSFFALNGVKNYEATSQPVLAVQVTELFDGIFIALSINHVVADRKSXWLF

SEQ ID NO: 240501 - protein, 102 aa, Glycine max
  Clone ID: PAT_MRT3847_591C.1.pep
PPAKKAAETGRGPNPKWIPPTRLLMISWRIGRQNHVDQGAVSSNGDNGSLATALTIEKGQVAGEIHGDCNANMFQDGVQTWAFMVGLLTRFPNICILWPKVT

SEQ ID NO: 240502 - protein, 35 aa, Glycine max
  unsure (1)..(35): unsure at all Xaa locations
  Clone ID: PAT_MRT3847_59200C.1.pep
GAXNLNERVGESVGKRVGRQGNSAIGTCRLYELCI

SEQ ID NO: 240503 - protein, 58 aa, Glycine max
  Clone ID: PAT_MRT3847_59201C.1.pep
LTCVHQNHLLVDGLIINRRRCRAINSDVYMNDQMNRRKLIAEKIDPSWTTWGGWGLVT

SEQ ID NO: 240504 - protein, 98 aa, Glycine max
  unsure (1)..(98): unsure at all Xaa locations
  Clone ID: PAT_MRT3847_59202C.1.pep
ASSSYLDRTVQGPVTGPKINYLNRRGGGVLLERVGQQLAIPPRIHIPRPGRRDLATQKVRGASQRYTTGGSVPRIRRPRTXVSXGLGPCSXGNMLNYR

SEQ ID NO: 240505 - protein, 29 aa, Glycine max
  Clone ID: PAT_MRT3847_59203C.1.pep
GANILTCNRQVFGTPGPRLASHSHYTTDK

SEQ ID NO: 240506 - protein, 71 aa, Glycine max
  Clone ID: PAT_MRT3847_59204C.1.pep
NEFTVLRSHIHRPIYLFSALVYIGWSVILLLLKENILRLHAFCRWVLVQTFQLTSKGSQYVVACLVYTRNS

SEQ ID NO: 240507 - protein, 57 aa, Glycine max
  Clone ID: PAT_MRT3847_59205C.1.pep
RFKYKGNLKRHVQGLNACYDHQAQCSAMHLSGASQKHSKTEIMTQERSASGYHISRA

SEQ ID NO: 240508 - protein, 59 aa, Glycine max
  Clone ID: PAT_MRT3847_59206C.1.pep
TRQTGAKRTTKGGTIDLVDQNNKNNFKKIEGPCFLRSPSFGTTEFHSFELFPLLMDPCS

SEQ ID NO: 240509 - protein, 183 aa, Glycine max
  Clone ID: PAT_MRT3847_59207C.1.pep
VEQRFLWVVRNPVSDQKHNLALGTQEDPDLEFLLPKGFLDRTKEKGLVVKNWVPQAAVLSHDSVGGFVSHCGWNSVLEAVCAGVPMIAWPLYAEQRFNRVVLVEEMKVALWMHESAESGFVAAIEVEKRVRELMESERGERVRNRVRVAKDEAKAATREGGSSRVALDKLLKSWKERDKVCVS

SEQ ID NO: 240510 - protein, 106 aa, Glycine max
  Clone ID: PAT_MRT3847_59208C.1.pep
SILIPFKINPFIIPISIIRPILVDQSTTTTPTLNTNMIKIVLRPTMNQLLSIRITPNKLVEQAQTTHCTALYASYVQANTTTEFEESYADLLNYYPHQCHHAADEA

SEQ ID NO: 240511 - protein, 56 aa, Glycine max
  Clone ID: PAT_MRT3847_59209C.1.pep
GRTSRIKFTGVPLPNPRNKKTFPFIKKLGPEQNPPQYCLLGKKPLLPPHLHLFGGG

SEQ ID NO: 240512 - protein, 70 aa, Glycine max
  Clone ID: PAT_MRT3847_5920C.1.pep
FWSIINILYHLSLHAWSAPEVLRPLYESSKVVVHKMTICVVLLYHANSLMNHEVRFVFCLAKAPRCCCGL

SEQ ID NO: 240513 - protein, 71 aa, Glycine max
  unsure (1)..(71): unsure at all Xaa locations
  Clone ID: PAT_MRT3847_59210C.1.pep
DQVTMRWNIQXDHCGPRTYXNLKLPFPFCENRNLAELRFPQGTFRRGKRMPMCIGGGDLSNNAILMNMPNA

SEQ ID NO: 240514 - protein, 39 aa, Glycine max
  Clone ID: PAT_MRT3847_59211C.1.pep
MLSVLREHLASDITNVRCELTPYVLRRRPDTTETTDDTA

SEQ ID NO: 240515 - protein, 53 aa, Glycine max
  Clone ID: PAT_MRT3847_59212C.1.pep
GSPGSKGWGRKTPAPPGGFLNFFFFMVFFFFFFFFFFFLPNGIMDTYKLGVLN

SEQ ID NO: 240516 - protein, 186 aa, Glycine max
  Clone ID: PAT_MRT3847_59213C.1.pep
MPPVAPRSGDAIFANVERVNAELFTLTYGAIVRQLLTDLEEVEEVNEQLDQMGYNIGIRLIDEFLAKSNVSRCNDFRETTDVIAKVGFKMFLGVTASVTNWDADGTCCSIVLEDNPLVDFVELPDNCQGLYYCNILSGVIRGALDMVSMKTEVTWLRDVLRGDDVFELQVKLLKHVPEEYPYKDDE

SEQ ID NO: 240517 - protein, 108 aa, Glycine max
  Clone ID: PAT_MRT3847_59214C.1.pep
STSHRAPVIFPTTEYLFFHALRFMHTEGNWPNCAIAQYLCKVHSMTVTIVLVNDNCINFLALKTWVYINYNYPDTLLLCSAKGTLKTLAYVVEDAFYMHVANQTYDTC

SEQ ID NO: 240518 - protein, 68 aa, Glycine max
  unsure (1)..(68): unsure at all Xaa locations
  Clone ID: PAT_MRT3847_59215C.1.pep
SDEXXXXAAXXGLEXXDHTERTXXATXEXXXXXXXRKXXEKGKRRPAPGDGEETTXTPGTXXEEAHNK

SEQ ID NO: 240519 - protein, 70 aa, Glycine max
  Clone ID: PAT_MRT3847_59216C.1.pep
SDSSVCSDRTIVSGCICVVLIPLSYTYPRVTSSMLTPPTASDLMIGQRLSHHRRVDLVQIHTDPVSNSVT

SEQ ID NO: 240520 - protein, 35 aa, Glycine max
  Clone ID: PAT_MRT3847_59217C.1.pep
GVMGPTSRPMQPRMGMETGYSRSCWPFSNSSMSSA

SEQ ID NO: 240521 - protein, 39 aa, Glycine max
  unsure (1)..(39): unsure at all Xaa locations
  Clone ID: PAT_MRT3847_59218C.1.pep
SIIFLFAXNSINLLKIWCSTTFHTLCSLNFVVVILKTMP

SEQ ID NO: 240522 - protein, 97 aa, Glycine max
  unsure (1)..(97): unsure at all Xaa locations
  Clone ID: PAT_MRT3847_59219C.1.pep
SXKXRXXQQYNXXSXXDXKKIXQDIXKQXDKQKKXMVNXEFKXKERHIVXWSQEVLLVXHYKNYFPXCLXXXNXAXFGSLMSVXGLQEDDILRXQXG

SEQ ID NO: 240523 - protein, 55 aa, Glycine max
  Clone ID: PAT_MRT3847_5921C.1.pep
GAELSERFADLGVASAGDFIHRFHHSGHAYPTYRPHLNMIRYLRLAAAPTLPSTS

SEQ ID NO: 240524 - protein, 40 aa, Glycine max
  Clone ID: PAT_MRT3847_59220C.1.pep
SSEPLKITDPHPCQGTGYNEGERICAQHLRDLLGNQEDEH

SEQ ID NO: 240525 - protein, 86 aa, Glycine max
  Clone ID: PAT_MRT3847_59221C.1.pep
DSDWASDPDDRHSTSGAALYVGPNLVSWWSRKLKVVSRSSTEAEYRSLAAVTADILWIQTLQELAVPHITPLVLCDNSSAVQLAHN

SEQ ID NO: 240526 - protein, 35 aa, Glycine max
  Clone ID: PAT_MRT3847_59222C.1.pep
DRIEPVTVRPGHCPMNLHPACQLAYNQLYHSHFHL

SEQ ID NO: 240527 - protein, 101 aa, Glycine max
  Clone ID: PAT_MRT3847_59223C.1.pep
LEAKEAAYFTAQVIIMNHPGQIGNGYAPVPYCHTFHIAVKFAELLTMIDRRSAKELATEPNILKNGEAGSANTTPTKPMDAETYYDNPPLGRDAGRHKRQT

SEQ ID NO: 240528 - protein, 39 aa, Glycine max
  Clone ID: PAT_MRT3847_59224C.1.pep
NIISSTNSFFSINPFTKLPFLLFPQTHSYSFSFLILIKH

SEQ ID NO: 240529 - protein, 160 aa, Glycine max
  Clone ID: PAT_MRT3847_59225C.1.pep
ETLDEPDGKLSYQELGIAKLSGFREWLALHPIIAGSENASKMIIFAHHHKVLDGVQVFLCEKGISFVRIDGNTLARDRQSAVVSFRSSPEVKIAIIGILAAGFGLDFSTAQDVVFLELPKCPTIMLQAEDRAHRRGQTNAVNVYIFCAKDTLDESHWKNL

SEQ ID NO: 240530 - protein, 87 aa, Glycine max
  unsure (1)..(87): unsure at all Xaa locations
  Clone ID: PAT_MRT3847_59226C.1.pep
YMDISQCVILTCYPEEIGSLVSLDKIDIRECSMISNVPKYALSMQSLRHVICDEXVSGIWKEVYKDEPNNFYIQDSEQCXDLDWLIE

SEQ ID NO: 240531 - protein, 41 aa, Glycine max
  Clone ID: PAT_MRT3847_59227C.1.pep
GSSLYTTFFILNDISTHQYVAMGSNQPKPTPLNLLSSFHYH

SEQ ID NO: 240532 - protein, 224 aa, Glycine max
  Clone ID: PAT_MRT3847_59228C.1.pep
STFKRYNFIIVAGKSYYGAELLCCAWSMDGKYILTGGEDDLVQVWSMEDRKVVAWGEGHNSWVSGVAFDSYWSSPNSNDNEETVRYRFGSVGQDTQLLLWDLEMDEIVVPLRRPSGGSPTYSAGSQSSQWDSVVPLGTLQPAPSMLDVLKISPLVTHRVHTEPLSGLIFTQESVLTACREGHIKIWIRPAAAESQSSNAETLLSTSLKEKPSILSKVGNSSHRQ

SEQ ID NO: 240533 - protein, 85 aa, Glycine max
  Clone ID: PAT_MRT3847_59229C.1.pep
RYYVMQPATSGSCFNSIPVAVEYNSKSGVTAQNHIPMCLKEFPPPPVTPSSSMKIEDILVNIFSNFKQSKVLCCWNQKTNIQRPC

SEQ ID NO: 240534 - protein, 57 aa, Glycine max
  unsure (1)..(57): unsure at all Xaa locations
  Clone ID: PAT_MRT3847_5922C.1.pep
AILRSLSPLRNCSLGPSNSGDPVVGAKRKGPASRCLPCFFLXXXKKKKAASKDQLRT

SEQ ID NO: 240535 - protein, 121 aa, Glycine max
  Clone ID: PAT_MRT3847_59230C.1.pep
QIFVKTLTGKTITLEVESSNTINNVKAKIQNKEGIPPDQQHLIFTEKQLKDRHTLANYNIQKESTLHLILHLHNNIQIFGETLTNKTITLEVESCDTIDNVKTKIQDRKSIAPDQQRLIFG

SEQ ID NO: 240536 - protein, 111 aa, Glycine max
  Clone ID: PAT_MRT3847_59231C.1.pep
PISLKYSANVIPAIEKKGIYIKISVKTLKQHTVKRFINHFKGKYYQHSAQVQNFGMKSSPLICRNWGVFPTWNPKPRSTAKFSAQPMQVLTKPTEWNPTRLSPSHLNTIGQ

SEQ ID NO: 240537 - protein, 54 aa, Glycine max
  Clone ID: PAT_MRT3847_59232C.1.pep
DVFPTSPDLDDAQLAKEVQYLLRKGWIPCLEHEPDHGFVYRGHNMAPGYYHGRC

SEQ ID NO: 240538 - protein, 283 aa, Glycine max
  unsure (1)..(283): unsure at all Xaa locations
  Clone ID: PAT_MRT3847_59233C.1.pep
LSRKVGISRKMEGGRRRITLYDQMKAGNSSRYSLASLMLGDVVFKKVEAEEAEEAEAEAEASCELSRSRTLQDIIREEKPSNSSNNTKDRNSWRAFTAKLRLKRAIGSAWSSTTTITNHSNDDRNLPNIPETRHDSDELTQQNDIVVDGANDSDPIAPAGSPVEHVEAVGNSSDGENNHEAVVGVSLMDLLAGSEARNGFIXVSDDDDDVAEYEKREEEKGTAARRLQRGVEYNCCVCMVRHKGAAFIPCGHTFCRTCSREIWVSRGNCPLCNNLILEILDIF

SEQ ID NO: 240539 - protein, 119 aa, Glycine max
  Clone ID: PAT_MRT3847_59234C.1.pep
FNDQTKGDVTARHERLGTLKQAGRSKPVATPGVSGSTVFLEAWTETRIVAWRATYERATICNWDGLGLTAGSTTPKTMAYTPYMPADAGRALIAKRTESNSEQMGDTAWTTHLNARCDR

SEQ ID NO: 240540 - protein, 52 aa, Glycine max
  Clone ID: PAT_MRT3847_59235C.1.pep
VIPRLLALVRLALSLLPSYGLTEHLPCLLLWGVNRKTSPIAPPSVVFSQPYD

SEQ ID NO: 240541 - protein, 78 aa, Glycine max
  unsure (1)..(78): unsure at all Xaa locations
  Clone ID: PAT_MRT3847_59236C.1.pep
TLRVRXKKKKKKKKKKKKKKKKKKKKKKKKKKKKKKKKKKKKKKKKKKKKKKKKGGPFLKIQFLFPLLSKGGVFFWGP

SEQ ID NO: 240542 - protein, 253 aa, Glycine max
  Clone ID: PAT_MRT3847_59237C.1.pep
SGFPRGEDYPSPEIFANWSPVYLFTSKEDMDSKESEAAFCMGGQVTEEGLKWLLDKGYKTIIDLREEDVKDNFYQAAVCDAISSGSIKLVRIPVKVRTAPTMKQVERFASYASDCSKRPIFLHSKEGVWRTSAMVSRWRQYMTRPASKFFSNQAVISNDMSSYYTIGSGKLQDSMIAEGSSLQKDTNLLQEGLGATHGSAGTFDSCSSSKKNNEKTQSNGALSELTPDDIASSQATAATGEGSFPSFSSETRP

SEQ ID NO: 240543 - protein, 157 aa, Glycine max
  unsure (1)..(157): unsure at all Xaa locations
  Clone ID: PAT_MRT3847_59238C.1.pep
ARDFSLCLSSPIISTLVHFLLVASLFCPVCSSDIGNIGNTPVANQTFKPQEEAHKMNIIRTRLQQINKPAVKTIQSPDGDVIDCVVSHQQPAFDHPMLKGHKPLDPPERPKGHNQMDMSENFQLWTMSGESCPXGTIPIRRTTEQDMLRASSVSRFG

SEQ ID NO: 240544 - protein, 64 aa, Glycine max
  Clone ID: PAT_MRT3847_59239C.1.pep
KIYTFAARGKKAGNSAQFLTSVMESVKFGIGGKDFVILPIRQRGGFPLFEKGSSFFQASFFGPK

SEQ ID NO: 240545 - protein, 56 aa, Glycine max
  Clone ID: PAT_MRT3847_5923C.1.pep
GGGGLIGNFFSLKTKKYKSFIPGFIYAIKKLWGRRVLTRHTKQGIRNYGVYLRCEQ

SEQ ID NO: 240546 - protein, 61 aa, Glycine max
  Clone ID: PAT_MRT3847_59240C.1.pep
FLMVNLIRYYKLAMGTQSQFFNPYWPYKKTNCPGPLTDEFFFWFLVTPSLNYYPSYPWAHE

SEQ ID NO: 240547 - protein, 231 aa, Glycine max
  Clone ID: PAT_MRT3847_59241C.1.pep
MCWIDLVESKPRNTHFCFVHGRKRSRRRRRRRRQGQCEQSHTDLPIETRKRNLSSMDFSLCLSSPIISTLVHFLLVASLFCPVCSSDIGNTLVANQTFKPQEEAHKLNIIRTRLQQINKPAVKSIQRPERVEMDSVPSFQHPAFDELVWVVSLLLPASDRPKGQRHCVVSHQQPAFDHPMLKGHKPLDPPERPKGHNQMDMSENFQLWTMSGESCPEGTIPIRRTTEQDML

SEQ ID NO: 240548 - protein, 38 aa, Glycine max
  Clone ID: PAT_MRT3847_59242C.1.pep
KFLRRFYLCLGKHYLVYFKYPSFICSLCLYINTPYHFQ

SEQ ID NO: 240549 - protein, 79 aa, Glycine max
  Clone ID: PAT_MRT3847_59243C.1.pep
RKSKNLVALDYNKHWGGHLLTWASQFFYKVYLQPFQFNAPSYFGGEYFEFLGGAIQTIYFPHKLASFQRNLESTMPILI

SEQ ID NO: 240550 - protein, 106 aa, Glycine max
  Clone ID: PAT_MRT3847_59244C.1.pep
LRIQPVLLASFASAIRACASNGCGFSASGLGSTTVHVQRVLLVEYTSQPIMVSSCALNHVLFHVISGPRCIIPVVHTPGKSPPPNFSFLSFLMSFSAFIIPPSLLC

SEQ ID NO: 240551 - protein, 43 aa, Glycine max
  Clone ID: PAT_MRT3847_59245C.1.pep
PTFSILRYWLLYKQMTCTCPCDFTCHMFVILTSSLHFLFYGTG

SEQ ID NO: 240552 - protein, 510 aa, Glycine max
  unsure (1)..(510): unsure at all Xaa locations
  Clone ID: PAT_MRT3847_59246C.1.pep
MELVLHFLNTTTIGVVSLIFLLCLFLYGPLKKVHGSSKEAPTVGGAWPIFGHLPLLIGSKSPHKALGALAEKHGPLFTIKLGAKKALVVGDWEMARECFTTNDVAVSARPKLXVAELMCYNKAMLLLAPYGCYWRELRNIIVTVFLYPSSSXRLQVYRVSIVQNSIVELYDFWRSQQIEKAFLTTHIDIDVRGHHFELLPFGGGRRVCPGISFSLQMVHLILASLFHSFSFLNPSNEPIDMTETFGLGKTKATPLEILIKPRLSSNXSMKACDSCLSGLXKFIVKLCNLFLVESYLAQIYXVAIIQTGTETSISTIIWAMCLILKNPLILENKAELDIQVGKDRCICESDISNLVYLQAVVKETLRLYAPGPLSSPREFAEDCTLGGYHVKKGTRLITNIWKIHTDPNVWSDPLEFKPERFLTTHKDIDVKGHHFQLLPFGSGRRVCPGISFGLQTVHLALASFLHSFEILNPSTEPLDMTEAFGVTNTKATPLEVLVKPCLSPSCYKSM

SEQ ID NO: 240553 - protein, 154 aa, Glycine max
  Clone ID: PAT_MRT3847_59247C.1.pep
TPWVIALLHAPWYNTNEAHQGEGEDMRQAMEELLYEARVDLVFAGHVHAYERFTRIYDNKADSCGPLYVTIGDGGNREGLALRFKKPPSPLSLYREPSFGHGRLRIVNETHAYWSWHRNNDTDTFVADGVWIESLSNSKACWNAQGQHVAHEEL

SEQ ID NO: 240554 - protein, 120 aa, Glycine max
  Clone ID: PAT_MRT3847_59248C.1.pep
NVKKGTRLITNIWKIHTDLSVWSNPLEFKPERFLTTHKDIDVRGHHFELLPFGGGRRVCPGISFSLQMVHLILASLFHSFSFLNPSNEPIDMTETVGLGKTKATPLEILIKPRLSSNCYL

SEQ ID NO: 240555 - protein, 150 aa, Glycine max
  Clone ID: PAT_MRT3847_59249C.1.pep
AVVKETLKIYPAGPLSAPREFIEDCTLGGYNVKKGTRLITNLWKIHTDLSVWSNPLEFKPERFLTTHKDIDVRGHHFELLPFGGGRRVCPGISFSLQMVHLTLASLCHSFSFLNPSNEPIDMTETFGLTNTKATPLEILIKPRLSSSCYV

SEQ ID NO: 240556 - protein, 58 aa, Glycine max
  Clone ID: PAT_MRT3847_5924C.1.pep
MTSPKCFTTNFLVYLLSVHCKACGVVGPLEIIKIMRGYNNNNNNNNNNNNNNNNNNNF

SEQ ID NO: 240557 - protein, 84 aa, Glycine max
  Clone ID: PAT_MRT3847_59250C.1.pep
KGPPSSPSKKTIKKYRNSISRLLYSPSPFYFFFTLTPKIFFQFKNKTFPFQLRKKPFFFKGSGKRLAPLIPLKHNCFCGGTLAL

SEQ ID NO: 240558 - protein, 292 aa, Glycine max
  Clone ID: PAT_MRT3847_59251C.1.pep
MVRIRTPCLRKSGRFAEGSHSLSLVLSLKLKFTLNALQINPKLEYLLILSLPNLNPSECFLSVTNPNHQLIQRMNLWTDENSSVMEAFMPSSDLSSIWPPPAPPQPQSTAVFNQDTLQHRLQALIEGARETWTYAIFWQSSYDYSGSTLLGWGDGYYKGDDDKAKAKAKSKATSAAEQDHRKKVLRELNSLISGSSSASASDDVDEEVTDTEWFFLVSMTQSFVNGGGLPGQAFFNSTPVWVTGSDRLSASPCERARQGHMFGLQTLVCIPSANGVVELGSTELIFQNSDLM

SEQ ID NO: 240559 - protein, 227 aa, Glycine max
  unsure (1)..(227): unsure at all Xaa locations
  Clone ID: PAT_MRT3847_59252C.1.pep
GLDPGASVSASWDSSRASVSSRTSTGGRRSXRNSLESSSTFGRRRLKKKQQKVTSQKPFKLRTEQRGKLKEEEFVKKIQEMAAVEEKQRIPVAQGLPWTTDEPECLVKPPVKDITRPVDLKLHSDVRALDRAEFDHQVQEKLSLIEQYKLERERQQKLAEEXELRRLRKELVPKAQPMPYFDRPFIPMRSMKNPTIPREPKFHNHKKIKCSLSSWNDMSPYSSSCLN

SEQ ID NO: 240560 - protein, 61 aa, Glycine max
  Clone ID: PAT_MRT3847_59253C.1.pep
HIHNKPWWNFRVLLLMRHNLFQHKPNLFSRYIITHPLKHKNSSNVLGPHPTLHNTLKTPHD

SEQ ID NO: 240561 - protein, 47 aa, Glycine max
  Clone ID: PAT_MRT3847_59254C.1.pep
HIPKELGALTDTNVAGENSAQDMSSSDSGPSVDRNRHYELTDLSICI

SEQ ID NO: 240562 - protein, 46 aa, Glycine max
  Clone ID: PAT_MRT3847_59255C.1.pep
HSTHSSSHASAYLFSKITTSTHFNPKSATIMLPLIYLHSFSSTNLL

SEQ ID NO: 240563 - protein, 55 aa, Glycine max
  unsure (1)..(55): unsure at all Xaa locations
  Clone ID: PAT_MRT3847_59256C.1.pep
XRLXAYXRXAFGSXXAXVXXLXRSHAYQXGQLLLXXPSTNIXXXRXHXIXXAXPX

SEQ ID NO: 240564 - protein, 97 aa, Glycine max
  unsure (1)..(97): unsure at all Xaa locations
  Clone ID: PAT_MRT3847_59257C.1.pep
ARVRLGIRLEVPSXDLGMAPDSSMSMXFGPDMVPQVYPPHSHSIXPYQGLSPEESVNVLSAFQEPHLXQMPPSLGQMSLPFDXPHPQDLLXXQPQEX

SEQ ID NO: 240565 - protein, 41 aa, Glycine max
  Clone ID: PAT_MRT3847_59258C.1.pep
RRRSIGAVIIVVGIMCDDGVQGINYSLQETHSSVTNAILCF

SEQ ID NO: 240566 - protein, 82 aa, Glycine max
  Clone ID: PAT_MRT3847_59259C.1.pep
RTNGMSFLDSSTQFLFSKLYRPKPFEEKTCAERKQQLFLFNKNRTNKILKIQFKTMMASLLLYSNTTSNNSLLVKVTMQSVL

SEQ ID NO: 240567 - protein, 101 aa, Glycine max
  Clone ID: PAT_MRT3847_5925C.1.pep
YVLVQVDQQELYVIIQWPALTSQHYLQPSLRRRLKGYDLRLFRLLTRAELESPICPKGLSRAWLSKPPPLLPPNTPNTKPLGNILLIKIKEPMEKTQGGIL

SEQ ID NO: 240568 - protein, 94 aa, Glycine max
  Clone ID: PAT_MRT3847_59260C.1.pep
RLREDDRRATNIHHIHVRNMGAIKYMTTDELKLLSIPSEILKFFNHSIFPHKGHPTRSLHPPHEHTQHAHLNAFPTSSTFHFNVILNINIILFP

SEQ ID NO: 240569 - protein, 252 aa, Glycine max
  unsure (1)..(252): unsure at all Xaa locations
  Clone ID: PAT_MRT3847_59261C.1.pep
FQRAQSLLSTDREASIDILHSIVKRDIQENDEEAVQVKEQSILELGSLLAKTGQAAELGGLLKYVRPFLNSISKAKAARLVRSLLDLFLDMEAATGQEVELCLECIEWAKSEKRTFLRQALEARLVSLYFDTKRYQEALHLGSQLLRELKKMDDKALLVEVQLLESKTYHALSNLPKARAALTSARTTANAIYCPPKLQATLDMQSGIIHAAEEKDWETAYSYFYEAFESYDSIDSPXAITSLEYMWLGKSC

SEQ ID NO: 240570 - protein, 80 aa, Glycine max
  Clone ID: PAT_MRT3847_59262C.1.pep
IVPVSHAAAETTPIGCSLRRPHAVVPSAFSFSFSPPLCFGERDHGNWDDHTRVLFGAQSCTRRPYALRVSPPLLSSSRNE

SEQ ID NO: 240571 - protein, 88 aa, Glycine max
  Clone ID: PAT_MRT3847_59263C.1.pep
QTDAGTLGDLIILAPFPPRPPEDPNIIPFTRPADIVPFSPCDRYSKLDNHQTDAGTLGRVIPLPPTRPGTGITKVPFPGTNIAPFPKP

SEQ ID NO: 240572 - protein, 62 aa, Glycine max
  Clone ID: PAT_MRT3847_59264C.1.pep
FHMTKDKGEELHWMPISFYFYFYILFIFLSCARTHAYMYASNYLERSRRHARRIIQGLNSSA

SEQ ID NO: 240573 - protein, 63 aa, Glycine max
  Clone ID: PAT_MRT3847_59265C.1.pep
LIFSEIGDKIYMDGKYCLGCFNGSCAIFYFHRNMGKKCTIRILKIDLTDQSTHSDIYLGHSIS

SEQ ID NO: 240574 - protein, 284 aa, Glycine max
  Clone ID: PAT_MRT3847_59266C.1.pep
MGTCGIVLLTTASPKPWPLRTSSRRTLPRIRCCSASSTSELSPDKLPTSIDLSVTGGAYDFSKATTSLTNELISSPKKVTLLRHGLSTWNSESRIQGSSDLSVLTEVGEEQAKRCKKALENIYFDQCFASPISRAKQTAEIIWQWRENPLVYLDSLKEISLYHLEGMKNVDAMQIYPKEYTIWREDPANFLMNGRYPVRDLWKAAKDCWKEMLLSPGESFLVVTHKSILRALTCTALGLGPERFRSIDINNGGICVFNFNVRGEAMLEALNMTAHMYSDHVYPG

SEQ ID NO: 240575 - protein, 48 aa, Glycine max
  Clone ID: PAT_MRT3847_59267C.1.pep
TKRNLTEWGTQKKKAETTKIEVFYSLDIALKYTTISLLPLQLSRWDLS

SEQ ID NO: 240576 - protein, 48 aa, Glycine max
  Clone ID: PAT_MRT3847_59268C.1.pep
CLGTTNLARYRHCLVRCNVKERYVAHHVLRARCHQITAVPAPRTWCLV

SEQ ID NO: 240577 - protein, 70 aa, Glycine max
  Clone ID: PAT_MRT3847_59269C.1.pep
LQSLKAKRNIRHFMLATPSKRTQKGCILSPFKGKELGILLTVNQKNAKMVSNFIIRFCPRVNNASKSFFP

SEQ ID NO: 240578 - protein, 73 aa, Glycine max
  Clone ID: PAT_MRT3847_5926C.1.pep
IAFVYSGFTPSRPSPFFIRTPGLFYLGLHLYQKPGLPPISFPPLNGPPLNFKGSTGKRLVLTKSEGVFFLKGV

SEQ ID NO: 240579 - protein, 81 aa, Glycine max
  Clone ID: PAT_MRT3847_59270C.1.pep
ELGIRKQELGHWDFGPLEPSIWREWPRAIRSGITCHREKFKAFRCQPGDLKHMVYSEHKGYWEVRNQSCKRSAARTLQVSL

SEQ ID NO: 240580 - protein, 189 aa, Glycine max
  Clone ID: PAT_MRT3847_59271C.1.pep
MQGQGVDEVSIEELASNLSLYKDQLNQVRELLNDDPANSEYVDMERELSEVIALTEELLATAKQNEISAPPNNAAASPTLSIHNENQLLDSSSDHQEKLAVGTKVQAVWSEDGEWYDATIEAYTPNGYYVSYDNWGNKEEVDPANVRSIQEGSVDALLEAERVAEATKQAIKRKIAQAASIDLQSRSLP

SEQ ID NO: 240581 - protein, 45 aa, Glycine max
  Clone ID: PAT_MRT3847_59272C.1.pep
GLPCSLMERFQLARGGQSVCILRDQKGAEPLSESLDSSSKRVKHG

SEQ ID NO: 240582 - protein, 253 aa, Glycine max
  Clone ID: PAT_MRT3847_59273C.1.pep
NCVTQVIALTEELLATAKQNEISAPPNNAAASPTLSIHNENQLLDSSSDHQEKLPVGTKVQAVWSEDGEWYDATIEAYTPNGYYVSYDNWGNKEEVDPANVRSIQEGSVDALLEAERVAEATKQAIKRKIAQAASIDLQSRSLPAKLRIEADDPEDVKASKRKKIHAFKSKMRMEQLEVTQNKRQNAWQQFQSTKGKAKKIGFFSGRKRESIFKSPDDPQGKVGVTGSGKGLTEFQKREKHFHLKDGTVENDD

SEQ ID NO: 240583 - protein, 231 aa, Glycine max
  unsure (1)..(231): unsure at all Xaa locations
  Clone ID: PAT_MRT3847_59274C.1.pep
MEGESVDEVNIEELASNLSLYKDQLNQVRQLLNDDPSNSEYADMERELSEVCSVSXVQHAFSSYEMFTLRFXVIALTEELLATAKQNEIPAPPNAAAASPTLSIHNDNQVLDSSSDHQEKLPVGTKVQAVWSEDGEWYDATVEAYTPNGYYVSYDNWGNKEEVDPANIRSIQEGSVDALLEAERVAEATKQAIKRKIVQAASIDLQSRSLPAKLRIEADDPEDVKASERKK

SEQ ID NO: 240584 - protein, 54 aa, Glycine max
  Clone ID: PAT_MRT3847_59275C.1.pep
QVVNEYLVYELSHNFFVVAFALSESYVVPSDIGVEDRYHVFFSFKYSHVPIDIF

SEQ ID NO: 240585 - protein, 103 aa, Glycine max
  unsure (1)..(103): unsure at all Xaa locations
  Clone ID: PAT_MRT3847_59276C.1.pep
SXARVRKLGIRLEXIXXXXXXXXXXXXXXXQXXXLDXVQLXXXXXXXXXXIXXXXTXXXXXXXXSDXGHXSXGLERDVTXGXXHXETCVXXXXXMXXXXAVSF

SEQ ID NO: 240586 - protein, 34 aa, Glycine max
  Clone ID: PAT_MRT3847_59277C.1.pep
KRKHCFLTFFCFRLIGHTVALLLLSDHILMPLLL

SEQ ID NO: 240587 - protein, 321 aa, Glycine max
  Clone ID: PAT_MRT3847_59278C.1.pep
MREKENHPSTNSEDDHRSSLLDLARAEITESSNSKTRTCGSGLGSGSGTSEPQAPFPDQVLENVLENVLHFLSSRRDRNAASLVCRSWYRAEALTRSELFIGNCYALSPTRATARFTRARSVTVKGKPRFADFDLMPADWGAHFCPWASALAQAYPWLEKLHLKRMLLTDADLALIADSFAAFRELVLVCCEGFGTPGLAVVVSKCRLLRVLELVESEVEDDEEVDWISCFPESQTNLESLVFDCVDVPINFEALEGLVARSPRLKKLRLNRYVSMAELYRLLLRAPQLTHLGTGSFSATEAGAVGDQEPDYQEPDYAAAD

SEQ ID NO: 240588 - protein, 222 aa, Glycine max
  Clone ID: PAT_MRT3847_59279C.1.pep
CLWKQHLSYWRSPSYNLMRIIFVAVSSLLFGILFWKQGKKINSQQDVFNVFGAMYSAALFFGINNCSTVLPYVATERTVLYRERFAGMYSPWAYSFAQVLVEVPYIFIQAVVYVIITYPMLSYDWSAYKIFWSFFSMFCNILYYNYLGMLIVSLTPNVQLAAIVASSSYTMLNLFSGYFVPRLRIPKGWNLMYYLCPMTSALHGMLLARYGLGLIVMSAFVV

SEQ ID NO: 240589 - protein, 94 aa, Glycine max
  Clone ID: PAT_MRT3847_5927C.1.pep
GTIKLFNGATSTSVQVLFTSTSVQVLFTMSLLCCMFLQVLWVMLGLEPFAWKKRRKKDQINMVLHSRGQGGKIVFSTSFVTEITHMLLLSTSCD

SEQ ID NO: 240590 - protein, 58 aa, Glycine max
  unsure (1)..(58): unsure at all Xaa locations
  Clone ID: PAT_MRT3847_59280C.1.pep
MGKSYPHGSAYYQNAVEKANKRLRRDIAEKRCXSPLMLRWTWHSIXSYDLNSNTRGPF

SEQ ID NO: 240591 - protein, 184 aa, Glycine max
  unsure (1)..(184): unsure at all Xaa locations
  Clone ID: PAT_MRT3847_59281C.1.pep
MGNCFSEVAAGRAAIGGTARDFHNLAGAPNDAVDNFLRSHGHHGLFSQIELSFSASGLRDRDLLFKSNPMMVLYARGKNGALEELRRTEVVLNSSSPTWITKHTLIYHFEVVQALVFRVYDVDTQFHNVDIKMLELDEQXFLGEGTCVLXSDITQPIIDYRSTHRRFYPDLPFSKNSGKLHGCI

SEQ ID NO: 240592 - protein, 89 aa, Glycine max
  Clone ID: PAT_MRT3847_59282C.1.pep
SPPLRICPFVGVIQIQIFEFVPKVQFQNFPSSLLFPRNGGNSPLAFILGVLSKKKNPGLKKTVVCYFHPESPFIWSPAPLIKFMSGVFP

SEQ ID NO: 240593 - protein, 84 aa, Glycine max
  Clone ID: PAT_MRT3847_59283C.1.pep
FGASNCYCSSVANHGGHQPYPRSGHFPWTVPSQEYSHPLPPTPSVPQSLPSLAVRDWLDASQQPGHQDFYRVYGQPSTKHYVTS

SEQ ID NO: 240594 - protein, 63 aa, Glycine max
  Clone ID: PAT_MRT3847_59284C.1.pep
GVGRILGIGMEFIMGLLGLVVNVRCELCFFFEWIFGGFIFRVRYLSPDIYVVQSEMWNTDDDK

SEQ ID NO: 240595 - protein, 102 aa, Glycine max
  Clone ID: PAT_MRT3847_59285C.1.pep
CFKAKSSSNFFLVMALVLALASALISDQALIGDIGKHFGISKRELRCVSGPSSSSSSSFRIAFHASHSRLPSRSLSETFLLPKQSYQSWPISGQPRPRSHQK

SEQ ID NO: 240596 - protein, 60 aa, Glycine max
  Clone ID: PAT_MRT3847_59286C.1.pep
VRKGSSSVIAIGRPHDATQPRTLSAGFAQFISRLIFVFARSRSGNPLQRAHGHWPPSLPP

SEQ ID NO: 240597 - protein, 88 aa, Glycine max
  Clone ID: PAT_MRT3847_59287C.1.pep
MAAMNGKVLGKCGRNMNSLKRKRENPAAYDADIFHNSELHQHPVNDSAARFHVDKDRKAKIVCHFNKQVLQSYKNFMSSAPPKRILLA

SEQ ID NO: 240598 - protein, 243 aa, Glycine max
  Clone ID: PAT_MRT3847_59288C.1.pep
MASSIQQVEGDESVVLRVTHSNLKTFASDIRFSLHLTVEAVKDKLWKKCGTSVNSMHLQLYDDARNKIADLSDHSKPLAFYSPLDGFRLHVVDLDPSSVTSGGWLEDTSLVEKYTISEEAYNKRPDTFRKYKEKFTSQNTATAEAKIPDDCMGDLSADIKVGSRCEVEPGAKRGVVKFVGRAESLGPGFWVGVQYDEPLGKHDGMVKGVRYFECPPSHGGMVRPEKVKVGDYPERDPFEEDEI

SEQ ID NO: 240599 - protein, 83 aa, Glycine max
  unsure (1)..(83): unsure at all Xaa locations
  Clone ID: PAT_MRT3847_59289C.1.pep
TASGWNDTNGTLSYNVNSSSSDAYAGQFGEEILRNSSLLLLSXSXDENIKLHGXQLGTELSETLQXNLNAEFQSLAMILMTTA

SEQ ID NO: 240600 - protein, 40 aa, Glycine max
  Clone ID: PAT_MRT3847_5928C.1.pep
KVFPPGKKCSQVFPALCPRKILDPLLETPGEWNGAPLPKW

SEQ ID NO: 240601 - protein, 108 aa, Glycine max
  unsure (1)..(108): unsure at all Xaa locations
  Clone ID: PAT_MRT3847_59290C.1.pep
AYEQVNFNEDNPFKYLIHRIDVLVKDNLVCKYTMIEGDXLGDKLESIGYEVKFEATSDGGCLCKMTSNYNTIGEFDVKEEEVKEGRESGIAVYRVVESYLLENPQVYA

SEQ ID NO: 240602 - protein, 50 aa, Glycine max
  Clone ID: PAT_MRT3847_59291C.1.pep
FLLKRCMYLILWVPCEYVTKTHFWRSYAPTPMRGLMKRKLSHDCCYFKCH

SEQ ID NO: 240603 - protein, 156 aa, Glycine max
  Clone ID: PAT_MRT3847_59292C.1.pep
MGVTTFTQEYSSSVAPSRMFKALIVDSRNLLPKLLPQFVKDVNVIQGDGEAGSIEQVNFNEASPFKYLKHRIDVLDKDNLVCKYTMIEGDPLGDKLDSIGYEVKFEATSDGGCLCKMTSNYNTIGEIDVKEEEVKEGRESGIAVYRVVESYLLENP

SEQ ID NO: 240604 - protein, 75 aa, Glycine max
  Clone ID: PAT_MRT3847_59293C.1.pep
SRHPTNISWCGKVNFHPFLQTDAPFNTLTRTPRPTEYTCFLRFLRSHRGIIQKGIRILAQNLSLIWRGNLLLHFK

SEQ ID NO: 240605 - protein, 86 aa, Glycine max
  Clone ID: PAT_MRT3847_59294C.1.pep
CPPMGPGSASVPACPPGLPPARQGSGLRAVGGVNEPSCSSAALAWHVGSDEWQVPGRQRGRCEGRAYAVTAVSASRPWGGLVPPQL

SEQ ID NO: 240606 - protein, 91 aa, Glycine max
  Clone ID: PAT_MRT3847_59295C.1.pep
MSFSNLKHLSVKDCHGLKCLFTSTTAKKLVHLEEMYIMRCKSLQQILARELEDTTTSEAIQFERLNTIILDSLSSLSCFYSGNEILLLSSL

SEQ ID NO: 240607 - protein, 107 aa, Glycine max
  unsure (1)..(107): unsure at all Xaa locations
  Clone ID: PAT_MRT3847_59296C.1.pep
NTTSILPSQIFYVSLNYNLLYIHLHRRHFTTPRLTKLNRLSSYSPFTTCHFTQLAYSQRPSQQLPFLNVEQYAPXIGPSISRHIKLTRCFTYTLSNPLTHHPFTFFS

SEQ ID NO: 240608 - protein, 43 aa, Glycine max
  unsure (1)..(43): unsure at all Xaa locations
  Clone ID: PAT_MRT3847_59297C.1.pep
GXRLERSPNDSSRVPTPTTTPFKSTNDTSYAMYAAGVESLISN

SEQ ID NO: 240609 - protein, 54 aa, Glycine max
  unsure (1)..(54): unsure at all Xaa locations
  Clone ID: PAT_MRT3847_59298C.1.pep
KEIIFIININXNMIKKKKERLECQKLNKGYVKLRTKVIDHYSSFAPESQFQGRK

SEQ ID NO: 240610 - protein, 113 aa, Glycine max
  Clone ID: PAT_MRT3847_59299C.1.pep
MVGTPINGRTRLSFGAVNGGHDLGPSSAPPSNAGSDYGIIEFTREDVEALLNEKAKRKERFNYKERCENMMDYIKRLKVCIRWFQDLEISYSLEQEKLKSSLELAQQKCTEIG

SEQ ID NO: 240611 - protein, 36 aa, Glycine max
  Clone ID: PAT_MRT3847_5929C.1.pep
EVKANGDAMLKMNKTQVELDSGKGKLRSERTPQNMP

SEQ ID NO: 240612 - protein, 74 aa, Glycine max
  Clone ID: PAT_MRT3847_592C.1.pep
VTKPTITETSNTIAYSTTLVQKELKRKEQNQTKKTETRLKSPKSEASSRGKRGRRPQRIARRALSDQHSTLYYP

SEQ ID NO: 240613 - protein, 51 aa, Glycine max
  Clone ID: PAT_MRT3847_59300C.1.pep
LDPPLLSLCSFFVYVCVEHHQSLLAKATIFHLFLLAFNTIHDPTTLVSLFL

SEQ ID NO: 240614 - protein, 374 aa, Glycine max
  unsure (1)..(374): unsure at all Xaa locations
  Clone ID: PAT_MRT3847_59301C.1.pep
MVGTPINGRTRLSFGVVNGGHDLGPSSAPPSNAGSDYGIIEFTRENVEALLNEKNVSINXFKDLERCENMMDYIKRLKVCIRWFQDLEISYSLEQEKLSTSTAARRRQKGEIELLLKIKEEELNSIIVEMRRNCTSLQEKLVKEETEKTVAAESLVKEREARLNFERSQSTLQEDLGRAQRELQSANQKILSLNDMYKRLQDYITSLQQYNGKLHSELSTVENELKSVEKEKATVVETLTMLKGQLTLSMASQEEATKQKDALASEVTSLRVELQQVRDDRDRQLSQAQTLTSELEKSKDFTEKSCSELNKLTLRTNELETKCALQDERIKVLQEKLTTAEEKLQVCDISASETRIEFEGQQKLVHEMQRRLAD

SEQ ID NO: 240615 - protein, 116 aa, Glycine max
  Clone ID: PAT_MRT3847_59302C.1.pep
WYPYPSTSQQLSQLVCVHPNSHVGYCYPKVHCSNKINFRLNPWHLSRAIFVFRFWPNSSTIPGKQNSNVPPNFLFWCYEYQMLRSLCSSYHRIVPRTEVFIISLCRPEDTPTVKRQ

SEQ ID NO: 240616 - protein, 44 aa, Glycine max
  Clone ID: PAT_MRT3847_59303C.1.pep
NIPIISSVTFPLFIYYKSSESWNSNKTNLFSHDAHTFNNYHNSN

SEQ ID NO: 240617 - protein, 251 aa, Glycine max
  Clone ID: PAT_MRT3847_59304C.1.pep
MEKKVLDLILVPSGFLVLLAYHFWLLHQVMKQPTKTVIGVNAINRRFWVQAMMEDASKNGILAVQSLRNNIMASTLLASTAIMLSSLIAVLMSSGNERKTVVSEVFGDRTELGLSIKFFSILVCFLLAFLLNVQSIRYYSHASILINVPFKKVSPNLRHQMLTAEYVANTVNRGSYFWSLGLRAFYFSFPLFMWLFGPIPVFFSCFALVFMLYFLDVTFERGCAGVSDTDDSVQVVELNKHNVDVEIGKAN

SEQ ID NO: 240618 - protein, 310 aa, Glycine max
  Clone ID: PAT_MRT3847_59305C.1.pep
MSSHSHLSFAFGILGNIASFVCFLAPLPTFYRVCKKKSTEGFQSIPYVAALFSAMLWIFYAYVKTGETLLITINAFGCVIETIYLAVFITYCPKKARMSTLRMIVLLNFGGFCTIVLLTHLLAKGEEARVKLLGWICVVFATSVFAAPLSIIRVVIRTKSVEFLPFPLSLLLLISAIMWLLYGISLKDIYVTLPNVVGLTFGVIQIGLYAMYRNNKPIKDQKLPEHKGDIVESENVIAPTGNGEKQEEEVKPQGGDIEIGEKKEENNKQDQQQSVENKKLDQVAHDQTELNKNNINKNNNKTEERVSCEV

SEQ ID NO: 240619 - protein, 129 aa, Glycine max
  Clone ID: PAT_MRT3847_59306C.1.pep
SETTEELHVEDPLDLALLSPPPLMPSTPSTPPTFFSPPTQHGHGQRLFNGKYCTVDEMVHRIRRSRSRCPRATNAESASCYLPLKIIVITDWELVRYPSSAPSYSRHPISGTRESRASSADPITTRNPS

SEQ ID NO: 240620 - protein, 316 aa, Glycine max
  Clone ID: PAT_MRT3847_59307C.1.pep
MSSHSHLSFAFGVLGNIASFVCFLAPLPTFYRVCKKKSTEGFQSIPYVAALFSAMLWIFYAYVKTGEMLLITINAFGCVIETIYLAVFITYCPKKARMSTLRMIVLLNFGGFCTIVLLTHLLAEGEGRVKLLGWICVVFATSVFAAPLSIIRVVIRTKSVEFLPFPLSLLLLISAIMWLLYGISLKDIYVTLPNVVGLTFGVIQIGLYAMYRNNKPVKDQKLPEHKGDIVDNNNESVIAPTVNGEKQEQEVKPQGGIIETGEKKEENNKQDQQQPEENKKFDQVVHEQTKLNNKNTNNINDDDNNKTGERVISCEV

SEQ ID NO: 240621 - protein, 198 aa, Glycine max
  Clone ID: PAT_MRT3847_59308C.1.pep
ASSRSFPAVIQKQLESPMILNQKRPVFDIDMPKVRKNVETVNLEHKMTLKEVLETTHFNGVLKSPVREPKVQVHHSIDPHYKHFGDLPPIVLMKPRCTPYRECAKSYEHVVPPEELSLRNLKAKFLPSKVFQHREGSTTNMGKKMEEYVSKRLAKEERANLLSEGVELKEKEIKPVENEKAPGGFKTAKSCQSQITCK

SEQ ID NO: 240622 - protein, 99 aa, Glycine max
  unsure (1)..(99): unsure at all Xaa locations
  Clone ID: PAT_MRT3847_59309C.1.pep
MGEDGIKISGEGGLLKVEPKPINGFTSQAVDLXLQKLAEKSLYDASLPHHYFTGNFAPVSDTPPTKDLPVQGYLPDRLNGELSXMAPNPQSAPVAGYHW

SEQ ID NO: 240623 - protein, 51 aa, Glycine max
  unsure (1)..(51): unsure at all Xaa locations
  Clone ID: PAT_MRT3847_5930C.1.pep
SSSSKSLXYXAPLGYSIEXXRPNGGIKXXRSAAYSXCARKPSLYPSRLVVM

SEQ ID NO: 240624 - protein, 70 aa, Glycine max
  Clone ID: PAT_MRT3847_59310C.1.pep
KFFLESHCVFIIEIQLFFCLVLKKYYFLSFTLEGCFLIPSKSSPFFLIFPWYFNGLLYYYTYFQYLFLLV

SEQ ID NO: 240625 - protein, 96 aa, Glycine max
  Clone ID: PAT_MRT3847_59311C.1.pep
NPPPKGKKGKKLWKKQIKTLTSIGGHKMGKKKILLWPRGWGGAIPPTIRLLFLKKTTSQGDPYWVLKWGRETKKKKVPKWKRKIPVFPNQIGTSRP

SEQ ID NO: 240626 - protein, 162 aa, Glycine max
  Clone ID: PAT_MRT3847_59312C.1.pep
LGVSCAPIHRVAHCALPRPVCWPWRLFTGTAVPVLFALSNATTAVPWYSPVSIGALVVCFGFYAPYHDTYFYAGSVAAWHFGTAYRLVLCVTLEYFFPRCVACLCTHWPSPSLVPRPGITWLSALTSSAALCVLGYFTALASALAQHKCIGSYPALNKLLAH

SEQ ID NO: 240627 - protein, 72 aa, Glycine max
  Clone ID: PAT_MRT3847_59313C.1.pep
AGGILSKGSVTRHPIRVLLVGSGQYTLVYEVNEGVRMLVGDVPWHMFVSTVKSLRVLKSSNPRAFTLGSKQD

SEQ ID NO: 240628 - protein, 76 aa, Glycine max
  Clone ID: PAT_MRT3847_59314C.1.pep
IKNGMNPHISHISGESSLGNELRRSVSEKLHHVDEADAAKQGRVLKYIQTEKRRRRSHRAEDPIRTLMFLGSMNHT

SEQ ID NO: 240629 - protein, 245 aa, Glycine max
  unsure (1)..(245): unsure at all Xaa locations
  Clone ID: PAT_MRT3847_59315C.1.pep
MSSDAVKPLQNLLDAFGARLARLETQLGMEGALTSAHVVTAAVSPAAVSEDLSPQLKAYDEYVAQYFPPFLDVSNKLGDDTQKLAKVMEKAFAAQRAYLLMASQCKKPATLNPEHLKDLQACIKEINTLRDNRSDFANHQNMVNEGIQALGWLCVEPAPKPFIESYVGGSDFWGNKIRVQFKTSNPDQIAFVASFKSLLTELMAYVKAHHTTGVTWNXQGGDVANYAPAATPICRICRRYSQCLC

SEQ ID NO: 240630 - protein, 82 aa, Glycine max
  Clone ID: PAT_MRT3847_59316C.1.pep
MVTTCPQAFPPHCLLEGSASPAEDLPACVQTSILLKLCLEAIGTTIPTIYLCVPTVVFNSKSFTLWGGGCLCTANPLWRHSL

SEQ ID NO: 240631 - protein, 197 aa, Glycine max
  Clone ID: PAT_MRT3847_59317C.1.pep
MRHFLVLVPLILLVFAGFPSKAKGSLLPFTNHPNTLLADLWSNHFPDPFRVLEQIPFGVDKDETFTALSSHARVDWKETPEGHVIMLDVPGLKRDEIKIEVEGNRVLRVSGERKREEEKEGDHWHRVERSYGKSWRQFKVPDNVDLDSVKAKMENGVLTLTMNKLSPDKVKGPRLVSIAGDDEQAPKLKGNEDKQEL

SEQ ID NO: 240632 - protein, 57 aa, Glycine max
  unsure (1)..(57): unsure at all Xaa locations
  Clone ID: PAT_MRT3847_59318C.1.pep
XFIGKXXXIEEXLSXXSEXFSXXXXRKXXXHWYTGEGMEEMEFXEXEXXMXDXVSEY

SEQ ID NO: 240633 - protein, 95 aa, Glycine max
  Clone ID: PAT_MRT3847_59319C.1.pep
KVQNLNSGHHQRGVLSSKAFGEPPFFLAAPVHCAPRAPVKKPSNQLLSWSIQHEEGSTFQLGAPTTKPGVKETWDVAIEKKYLKWKMGKKKMGLP

SEQ ID NO: 240634 - protein, 122 aa, Glycine max
  Clone ID: PAT_MRT3847_5931C.1.pep
MARTKQLATKAARKSAPATGGVKKPHRFRPGTVALRGIRKYQKSTELLIRKLPFQRLVREIAQDFKTDLRFQSSAVSALQEAAEAYLVGLFEDTNLCAIHAKRVTIMPKDIQLARRIRGERA

SEQ ID NO: 240635 - protein, 33 aa, Glycine max
  Clone ID: PAT_MRT3847_59320C.1.pep
LAWKAFQHVASYDSAVSEWLWKQSVGGTSVSSL

SEQ ID NO: 240636 - protein, 86 aa, Glycine max
  unsure (1)..(86): unsure at all Xaa locations
  Clone ID: PAT_MRT3847_59321C.1.pep
SDNHVPPFLXMVNEASPAVLIXAKHIPNLNYIHLPIPXNRYLSIHMMVRKVQQHIVWPSKSHVKYEIFHMMLPAVWYMRVFTTTCA

SEQ ID NO: 240637 - protein, 180 aa, Glycine max
  Clone ID: PAT_MRT3847_59322C.1.pep
MAATNNIHGNTESAQSNIAPPTKQPLHPSKTVDSQSVLKRLQSELMALMMSGDSGISAFSEEDNIFFWKGTITGSKDTVFEGTEYKLSLSFPNDYPFKPPKVKFETTCFHPNFDVHGNICLDILQDKWSSAYDVRTILLSIQSLLGEPNISSPLNQQAAQLWSNQEEYRKMVEKLYKSAN

SEQ ID NO: 240638 - protein, 96 aa, Glycine max
  unsure (1)..(96): unsure at all Xaa locations
  Clone ID: PAT_MRT3847_59323C.1.pep
MLFLFLLLGISLVRLIPHAYDXLFEAPVYVDGSSLYEDEIADYYSTAWDIIIPLVSLMFAAIIHLQQQFGGCSILSWRINTKGVEEYKKVPVVTEA

SEQ ID NO: 240639 - protein, 180 aa, Glycine max
  Clone ID: PAT_MRT3847_59324C.1.pep
MAANNNIHGNTESAQSNIAPPAKQPLHPAKAVDSQSVLKRLQSELMALMMRGDSGISAFPEEDNIFFWKGTITGSKDTVFEGTEYKLSLSFPNDYPFKPPKVKFETTCFHPNFDVHGNICLDILQDKWSSAYDVRTILLSIQSLLGEPNISSPLNQQAAQLWSNQEEYRKMVERLYKSAN

SEQ ID NO: 240640 - protein, 295 aa, Glycine max
  Clone ID: PAT_MRT3847_59325C.1.pep
MEDQGQQQQQQHQVEAKSPRQGTERSEAVRSRWTPKPEQILILESIFNSGMVNPPKDETVRIRKLLEKFGAVGDANVFYWFQNRRSRSRRRQRQMMQQQATATATATVTTFDHPQPQTQTLVNVGGAIPHDHHTLGNLVVATESSATSTMGFGCSSQSSYGFLGSSSSSSSCGGGVIGGQQQGMDGFFSSVSSHQMGFPDHHHTSPASSALYPPLDPNLTYQAGYGGPNISGFITVFINGIATELPKGPIDLKTVFGEDVMLVHSSGVPIPTNEFGFLMHNLQHGDSYFLVSKPT

SEQ ID NO: 240641 - protein, 66 aa, Glycine max
  Clone ID: PAT_MRT3847_59326C.1.pep
KNKRISKGKKGGKKNAADPFAKNDWYDIKAPSVFQVKNVGKTLVSRTQGTKIASERLKHKMFEVSL

SEQ ID NO: 240642 - protein, 144 aa, Glycine max
  Clone ID: PAT_MRT3847_59327C.1.pep
NKPKTEYVQTFGRKKNAVAVATCKTGNGLIRVNGLPLDVLEPSTLRIKVYEPILLLGAKTFSGVDIRIRVRGGGYTGQVYAIRQAVAKAIVAYHQKFVDENSKRELKERLLQYDRTLLVADPRRCEPKKPGGRGARGRKQKSYR

SEQ ID NO: 240643 - protein, 53 aa, Glycine max
  unsure (1)..(53): unsure at all Xaa locations
  Clone ID: PAT_MRT3847_59328C.1.pep
SSTDNRGSQILFNDSQATVVVDEIRITPLSIIIVTKKCVHYAMAQNFHFXFYF

SEQ ID NO: 240644 - protein, 119 aa, Glycine max
  unsure (1)..(119): unsure at all Xaa locations
  Clone ID: PAT_MRT3847_59329C.1.pep
MAHAENEEVLGSGQSASTNRSPPAANSTLLKLNPPDIHADEAASHASLAAXNKKRGGQRSVGPDKSGRGLRQCSMKECETVXKHAKNSTXEVADELVAEFVEPSNTVLPTDQHQYDEKN

SEQ ID NO: 240645 - protein, 136 aa, Glycine max; identical to SEQ ID NO: 143601
  Clone ID: PAT_MRT3847_5932C.1.pep

SEQ ID NO: 240646 - protein, 166 aa, Glycine max
  Clone ID: PAT_MRT3847_59330C.1.pep
MTSSETLAFMELAIQQAKLALDVLEVPVGCVIVEDGKVIASGRNRTTETRNATRHAEMEAIDVLLGQWQIHGLSMSEVAEKFSNCSLYVTCEPCIMCASALSILGIKEVFYGCSNDKFGGCGSILSLHLSNTAPLNNEVPSGKCFRCTGRIMASEAVLLFRTFYEQ

SEQ ID NO: 240647 - protein, 67 aa, Glycine max
  unsure (1)..(67): unsure at all Xaa locations
  Clone ID: PAT_MRT3847_59331C.1.pep
LVYLRDRPHRPPTRPLKRXSFFKLYEGKHIPVSNISAGENHVVQIPLMAQEVILDYTSSDFQNRFGE

SEQ ID NO: 240648 - protein, 51 aa, Glycine max
  Clone ID: PAT_MRT3847_59332C.1.pep
VADPPSLDQTTPSEAKRVLNRCSVCLPKVGLTCLRCLRGELFCAEHRHSVR

SEQ ID NO: 240649 - protein, 247 aa, Glycine max
  Clone ID: PAT_MRT3847_59333C.1.pep
IVTHASVRLREDDRRVRLPKDSSREAEVKLHGFWYSPYTLRVVWTLKLKDIPYQNIEEDRYNKSLQLLEYNPVYKKTPVLVHNGKPLCESMLIVEYIDEIWSHNSLLPADPYERALARFWVKYADDDMFSAVIAFFLSNNDEEREKSIEKIWEHLRVVENQCFGDQKKFFGGDIINIMDIAFGSIFKILVVAEDILDAKVLEDEKFPHLHSWYNNFKDVAVIKENLPDHEKMVAFAKFIREKRLACT

SEQ ID NO: 240650 - protein, 288 aa, Glycine max
  Clone ID: PAT_MRT3847_59334C.1.pep
MLFFILQNELLIYLLNCMMQWVLMTLLDPPCSLANLIYIGYSGNPAAALRVTRRRAVDRKKQATEKNVFQCYVFGSKNAGKSALLDSLLGRPFSNNYTPTTVERFAANSIELIGGTRKTLVLREIPESEVSNVLSNKGYLAACDVAVFVYDSSDEHSWKKSRDLLEKVGRQGDLTGYRVPCLLIAAKDDLTPYPRAVQDSVKVTEELGIEAPIHVSMKLGDSSNVYHKIVNAAEHPHLSIPETEIGRKRKQYHRLLQHSLVFASVGTAMAFVGLAACRAYAVKKNSSG

SEQ ID NO: 240651 - protein, 114 aa, Glycine max
  Clone ID: PAT_MRT3847_59335C.1.pep
CTLYSLSHGINKKHVHVLGRHPLHRSLLRHRLCSGLPNTGSRWRSSRNSFKLRLHDRGCGCDHHACHLQALSHPFLYTALPSDVYCEFGVCIYIQNMREFLRYFVLFIVAHRGK

SEQ ID NO: 240652 - protein, 223 aa, Glycine max
  Clone ID: PAT_MRT3847_59336C.1.pep
MAEVKLHGFWYSPYTLRVVWTLKLKDIPYQNIEEDRYNKSLQLLEYNPVYKKTPVLVHNGKPLCESMLIVEYIDEIWSHNSLLPADPYERALARFWVKYADDDMFSAVIAFFLSNNDEEREKSIEKIWEHLRVVENQCFGDQKKFFGGDIINIMDIAFGSIFKILVVAEDILDAKVLEDEKFPHLHSWYNNFRHVGVIKENLPDHEKMVAFAKFIREKRLACT

SEQ ID NO: 240653 - protein, 77 aa, Glycine max
  unsure (1)..(77): unsure at all Xaa locations
  Clone ID: PAT_MRT3847_59337C.1.pep
AILDNMHGLSLYIDGGISDYYSDHVDIGCFSEIQKWIXVSCSHSSRVPVTXSLFHVAPWITTVVAGTHDRDYLAFVA

SEQ ID NO: 240654 - protein, 75 aa, Glycine max
  Clone ID: PAT_MRT3847_59338C.1.pep
VGSQGDLTGYRVSCLLIGAKDYLTPYPRAVQDSVKVKLAWFNPPILNFVHDCGMGKPLKLYRPMQRSSIPYLLEK

SEQ ID NO: 240655 - protein, 61 aa, Glycine max
  Clone ID: PAT_MRT3847_59339C.1.pep
TFLIQLFIENVELEFTEELRCNFIWIQDRSNKKTNTQNLNMTIFASLFLENIKLGFSEGII

SEQ ID NO: 240656 - protein, 51 aa, Glycine max
  Clone ID: PAT_MRT3847_5933C.1.pep
LPVPGATHNIRLAKFLLEIQSATLIASRTVLSIHQYGDIMPVEAFQFKPLK

SEQ ID NO: 240657 - protein, 35 aa, Glycine max
  Clone ID: PAT_MRT3847_59340C.1.pep
SLGRARTTKWGEMKVFPMATPTREQIAQAEQEELL

SEQ ID NO: 240658 - protein, 165 aa, Glycine max
  unsure (1)..(165): unsure at all Xaa locations
  Clone ID: PAT_MRT3847_59341C.1.pep
GFAWRIVAYSMTDFQEKEALDTLDLLSXRFCAMAHSDEEFDMDRIIRFMIARRDTTYAALTXVFWLISKHPEVEEEVVHEVMEKYASYTHVYDEVKDMGYTHAVVSYSMKLSPAEPHDTKEAGGDYSFPDGTXVKSGWRVAYHIYAMERSLKISRAHWCEFKPER

SEQ ID NO: 240659 - protein, 90 aa, Glycine max
  Clone ID: PAT_MRT3847_59342C.1.pep
ASVMFYRVSRLHVDARHLFVMGPGFQMHCFELHRIVTSRSRIVKIFGSILFMCTSMISENRGCYYFIFFASFGQFVPREHLVRSTHVLPA

SEQ ID NO: 240660 - protein, 54 aa, Glycine max
  Clone ID: PAT_MRT3847_59343C.1.pep
SEPNMRCHQWLTQIERCIDDRSAPKYVLSLLGNYKSRQLIVLCLSLLRVCYQMP

SEQ ID NO: 240661 - protein, 55 aa, Glycine max
  Clone ID: PAT_MRT3847_59344C.1.pep
NQGYSTKQLNYWYMIVWKYSAFTDHRKLLQCYVLKHMLYVHEILSSNINLTIMLL

SEQ ID NO: 240662 - protein, 45 aa, Glycine max
  Clone ID: PAT_MRT3847_59345C.1.pep
LSFKPWGLPLPIGEGNYQAPKVKCGRGKSVGPPRGLPPLAPFPGN

SEQ ID NO: 240663 - protein, 122 aa, Glycine max
  unsure (1)..(122): unsure at all Xaa locations
  Clone ID: PAT_MRT3847_59346C.1.pep
XYWWXXRAPEXALGGIYXVLNXKRGHVFXEMXRPXXXLYNIXAXLXVIESXGFXSQLMAATSGQALPXCVXXXWXMMGSDPXXAGSXAAXLVLDIRKXXXSEXTDDXXXEXXXKSNLTFTVL

SEQ ID NO: 240664 - protein, 219 aa, Glycine max
  Clone ID: PAT_MRT3847_59347C.1.pep
MDTRSEMRHSKFKRICVFCGSSPGKKSTYQDAAIELGNELVSRNIDLVYGGGSIGLMGLVSQAVHDGGRHVIGVIPKTLMPRELTGETVGEVKAVADMHQRKAEMAKHSDAFIALPGGYGTLEELLEVITWAQLGIHDKPVGLVNVDGYFNSLLSFIDKAVEEGFISPNARHIIVSAPTAKELVKKLEDYVPCHEGVASKLSWQIEQQLAYPQDYDMSR

SEQ ID NO: 240665 - protein, 46 aa, Glycine max
  Clone ID: PAT_MRT3847_59348C.1.pep
KGLILYMIWNLCFLSFVHWVNSLKELPHHPLVDYAMSILTFSTSLL

SEQ ID NO: 240666 - protein, 186 aa, Glycine max
  Clone ID: PAT_MRT3847_59349C.1.pep
NTRVAAAANNVTFVTPNIALLQAHFFNKCKGVYTTDFPSNPPFKFNYTGTPPSNIFVSSGTKTVVLPYNTSVELVLQDTSIIGAESHPLHLHGFNFFIVGQGNGNFDPKKDPIKFNLVDPAERNTAGVPSGGWVAVRFLADNPGVWFMHCHLEVHTSWGLKMAWIVQDGKRRNQKLPPPPSDLPKC

SEQ ID NO: 240667 - protein, 364 aa, Glycine max
  unsure (1)..(364): unsure at all Xaa locations
  Clone ID: PAT_MRT3847_5934C.1.pep
SEHNVGCISSAAWGPQGNNGKVKKTLTCAGSGGVEDMLVGCLWLNDYLVTVSLGGTISIFLATDLDKAPTTFSGHMKNVSSLTILRSNPRVLLSSSYDGLIVKWIQGIGYSEKLQRKENSQIKCLAAVEEEIVTSGFDNKIRRVSLHRDQCGDTEAIDIGSQPKXDLSVALLSPELALVSIDSGVXVMLRGTKIVSTINLXGFIVTASAVSPDGSEAIIGGQDGKLHIYSVSGDTLVEEVVLEKHRGAISVIRYSPDVSMFASGDVNREAVVWDRASREVKLKNMLYHTARINCLAWSPDSHRIATGSLDTCVIIYEVDQPASSRITIKGAHLGGVYGLAFTDEYSLVSSGEDAFIRVWRITPR

SEQ ID NO: 240668 - protein, 80 aa, Glycine max
  Clone ID: PAT_MRT3847_59350C.1.pep
SCQIQSLPKESWARGVFNDVDNLTEEIVDEILNKFLRDFKEGSLESKGWPKYLSAYIVSKAAMNAYTRILSKKYPSFCIN

SEQ ID NO: 240669 - protein, 101 aa, Glycine max
  Clone ID: PAT_MRT3847_59351C.1.pep
LMPLCITIIEPIGCRGTGSQLYEQPLTVAISNQRNHILRLHRNHLVTFTMDRSLLQRALVVLVTRHSVLVLSKRIQPSKQGYGYHTKAGLATEVPTSSRSM

SEQ ID NO: 240670 - protein, 104 aa, Glycine max
  unsure (1)..(104): unsure at all Xaa locations
  Clone ID: PAT_MRT3847_59352C.1.pep
VSVDTCERPHVXLDGVRNVDGDMTRSWYRKTVDVSGKECAREEYARALEVQYVDVYASRFVPDKWKKAPRRQCCEIMDGADGVNSSVVRVKIRGCRRFESVTPS

SEQ ID NO: 240671 - protein, 88 aa, Glycine max
  Clone ID: PAT_MRT3847_59353C.1.pep
HVSFLVPDDPALDHEVKQELLDLAQAMEAGVAYIMGHTHVKARKSSSLLKRLVINVGYAFLRTNCRGPATALNIPHISLIEVGMIYYV

SEQ ID NO: 240672 - protein, 59 aa, Glycine max
  Clone ID: PAT_MRT3847_59354C.1.pep
KLSTFDSCTFQSPRALVSIFQQTIIADYTIILLIKHITEILRTTNYILNLHQPTTNYIG

SEQ ID NO: 240673 - protein, 183 aa, Glycine max
  unsure (1)..(183): unsure at all Xaa locations
  Clone ID: PAT_MRT3847_59355C.1.pep
HFLSYLCSVRSFRNTPTSFITFSNWLLMYLSDIEVQKLAERMLRWLKDAGYIFFRESCFHQSGDSKRKYNPTHYREPRFYTKVFKECHMSDNTGSSCKCIGAYVRNKKNQNQICWIWQKVRSQDDRDFQCFXDRVEYSYKSILRSERMYGPGFVSTGGLETTKEFVTKLGLKPGQKVLDVWLW

SEQ ID NO: 240674 - protein, 63 aa, Glycine max
  Clone ID: PAT_MRT3847_59356C.1.pep
FQSPPKEGDPAQKIWKAVARKVPFIKPKTNRFRKFLGPLYGNPHLGGRLISWGWKKSQIKAKP

SEQ ID NO: 240675 - protein, 92 aa, Glycine max
  unsure (1)..(92): unsure at all Xaa locations
  Clone ID: PAT_MRT3847_59357C.1.pep
MSYYNQQQPPVGVPPPQGYXSRGKDAYPPPGYPPQGGYPPQAYPAQGYPPPYAPPQYAQPPPQQHQNSSGPGCLEGWYVSLSLSLCYKIKIE

SEQ ID NO: 240676 - protein, 58 aa, Glycine max
  Clone ID: PAT_MRT3847_59358C.1.pep
FWYKSARKSLSQHHKVSTSAQKLIKEVLSPAYKMAVEQAKTLCTEKNGRAPDTNFPCS

SEQ ID NO: 240677 - protein, 135 aa, Glycine max
  Clone ID: PAT_MRT3847_59359C.1.pep
MAKISSSECGCQKCKFATGELPASHELVVSEHLIEACKHETIAQRKSESFEAIDSCTSQLLPVLPFCLLECKITFRDTLPFLASGMTNLKGQKIFQKECRKQQLDFEWAYLRFTLVLYGTVGPLVLESYVHFVSI

SEQ ID NO: 240678 - protein, 74 aa, Glycine max
  Clone ID: PAT_MRT3847_5935C.1.pep
RKKFEIQQIFPKLHIYSISGDTLVEEAVLEKHRGAISVIRYSPDLSMFASGDVNREAIVWDRASREVKLKNMLY

SEQ ID NO: 240679 - protein, 52 aa, Glycine max
  unsure (1)..(52): unsure at all Xaa locations
  Clone ID: PAT_MRT3847_59360C.1.pep
KKRSISMINYKSKHSCVXXKRFWVDFYLRENHHLPLGLLFCEKKKKKKMGGN

SEQ ID NO: 240680 - protein, 215 aa, Glycine max
  Clone ID: PAT_MRT3847_59361C.1.pep
LPLNFPRSVSPYVTHRKSDCERRRERLFYGTPQMNAAACDGGAASENRRHGGRFWILSNLFRARSNKTESSPSHPPPSWFSTILHARRHNKCRHADRGLSPLTEVENFTEFSADTAQDRSDSGISSEDSPAKQNPTPVTGHRRSRMGPTGKGFTSMAFCLNPLVRAGPNRHWSHHNKGLAQEQGGGGAHHISNAASFCANRSRKLADFGRGAHNR

SEQ ID NO: 240681 - protein, 83 aa, Glycine max
  Clone ID: PAT_MRT3847_59362C.1.pep
MREKKASKTSSSTSPCAQLRDAYHNCFNRWYAEKFMKGHWDKQECVSEWQKYRACLSEHLEDKHLIRFLQADGVVQDSGVASQ

SEQ ID NO: 240682 - protein, 55 aa, Glycine max
  unsure (1)..(55): unsure at all Xaa locations
  Clone ID: PAT_MRT3847_59363C.1.pep
AYRXDELIDRDPLLRIKDMFDELLEDGWRQGAEQLRLGQEKDKEDMELLATKVSE

SEQ ID NO: 240683 - protein, 83 aa, Glycine max; identical to SEQ ID NO: 240681
  Clone ID: PAT_MRT3847_59364C.1.pep

SEQ ID NO: 240684 - protein, 88 aa, Glycine max
  Clone ID: PAT_MRT3847_59365C.1.pep
VNLYHKKKLDEIVQVALLCTQYLPSHRPKMSEVVRMLEGNGLAEKWEASQSAESTRSRGNELSFSERYSDLTDDSSLLAQAMELSGPR

SEQ ID NO: 240685 - protein, 75 aa, Glycine max
  Clone ID: PAT_MRT3847_59366C.1.pep
SIFVQISLAFAMWTKYLFLGARYSHLVSGAWIDRIRLLWDEHKEKLLHRWNVTEDLTRLKCFAHNVAQINTFNAQ

SEQ ID NO: 240686 - protein, 184 aa, Glycine max
  Clone ID: PAT_MRT3847_59367C.1.pep
NKVVTKKIFPGRRYWHKPSISKEIETPNQKLKSKVTCYNCGKQGHISKYYRLKRKLRNLNLEPAIEEQINNLLIESSEEEETKTSSSMISDENLNLIQQDDQLSSTEDERKINTLTREQDLMFEAINSIPDPQEKKNFLEKLKKTLEVKPKQKDFITNNKFDVSNILRRLENTSAKPTTIQDLP

SEQ ID NO: 240687 - protein, 68 aa, Glycine max
  Clone ID: PAT_MRT3847_59368C.1.pep
VAIERETDVMDRLQRSEVSFTRQGSSSLVWDDKLLSGEFNKVNNNQYQNGGGSGGHLNLKVITTPPNT

SEQ ID NO: 240688 - protein, 111 aa, Glycine max
  unsure (1)..(111): unsure at all Xaa locations
  Clone ID: PAT_MRT3847_59369C.1.pep
GGVKKNWNPAPFVAPXKEFQIKGGGGPVPGRSPKNFKNCTTTEDKKYWWEEPTLFELNLPQNPQLMWGRANQKVYNYWAATARFPVKPPEGVPPRPPLKGKKKRKRPPPFC

SEQ ID NO: 240689 - protein, 75 aa, Glycine max
  Clone ID: PAT_MRT3847_5936C.1.pep
PQFPASLFGEQASYPFGEGHSPRSRGLKSGSEDVHLCCPCAYENVSLVRACERDKDVFVLDGNGTMPTTNPVEGI

SEQ ID NO: 240690 - protein, 87 aa, Glycine max
  unsure (1)..(87): unsure at all Xaa locations
  Clone ID: PAT_MRT3847_59370C.1.pep
EALLNQKTEFLSGNADLCGKPLKILCTVPSTMSSAPPNVTTXFXQPLQXIPQKQLDSXPLQXNSTGNHHQLNGSHKVGPKTATIRLW

SEQ ID NO: 240691 - protein, 181 aa, Glycine max
  Clone ID: PAT_MRT3847_59371C.1.pep
PPPPPPPPPFFFFFFFFFFFFFFFFFFFFGAKREKALKLIPKNKKKGPQGQLKRDKKNNSKFPRQEKTLKQPNPPKNFPLLKGPKGPPKKFRGHFKKKHPPGGFPKPPLGPKKGGENPHPKNGLKKSKKKGPGIWGGGSNPGNRGPPLEKPLTKMGGPPLKEKGFKEIGDKKIWSSKIKNC

SEQ ID NO: 240692 - protein, 87 aa, Glycine max
  unsure (1)..(87): unsure at all Xaa locations
  Clone ID: PAT_MRT3847_59372C.1.pep
KAHVEXPIAGSIVLAAVLLKQGGYGIIRLTLILNPLTKHIAYPFLVLSLXGIIITSSICLRQTDLKSLIAYSSISHIALVVTAILIK

SEQ ID NO: 240693 - protein, 41 aa, Glycine max
  Clone ID: PAT_MRT3847_59373C.1.pep
MNRLAPVPHPHDAAPTPGVTAAVRQSDPRRVVDPGAPDLRV

SEQ ID NO: 240694 - protein, 127 aa, Glycine max
  Clone ID: PAT_MRT3847_59374C.1.pep
EANAITEEPTEFSFPHLTSLNLHMLPQLSCFYPGRFTLECPALNHLEVLSCDNLEKFQNQQEAQCSTSVTKLPLFSEGKTIFILESLKLYWEIARMLCNKKFLKDMLHKLVELELDFNDVREVPNFV

SEQ ID NO: 240695 - protein, 84 aa, Glycine max
  Clone ID: PAT_MRT3847_59375C.1.pep
ASTENKLFLFILNIHASLFLENGELESPNGFRTHLLCLHDGPTKKTNKSASYVSILASLLIENAAWDFPDGFPSCGLRLLALSH

SEQ ID NO: 240696 - protein, 86 aa, Glycine max
  unsure (1)..(86): unsure at all Xaa locations
  Clone ID: PAT_MRT3847_59376C.1.pep
YSFVAVVAEVLVSLYEQNDKPSSAVEFIQQKLSCPSISXYEKLQAEFSDLQIKYNDLLAAHQKTCRELEQMKNSHALAASTKGTTD

SEQ ID NO: 240697 - protein, 171 aa, Glycine max
  Clone ID: PAT_MRT3847_59377C.1.pep
TSFDSVLLMSNGEIIQAAPYHHLLSSSQEFQDLVNAHKETAGSNRLVDVSSSKGDSNTATEISKIYMDKQFETSQEGQLIKKEEKEKGNKGFKPHLQYLNQDKGYIYFYVASLSHLIFVIGQIFQNLWMASNVDNPYVSTLQLIFVYLLIGFISACLLFIRCLVVVSMSIR

SEQ ID NO: 240698 - protein, 189 aa, Glycine max
  unsure (1)..(189): unsure at all Xaa locations
  Clone ID: PAT_MRT3847_59378C.1.pep
IPLSDWQVMQPPRFEPPIPNPEHPGXEAGFKYFQQTFADAYFKTISDSLKWHAPNQLLLGGRYAVSTPESVASCAQYCDVMSFNMYTLKPQDGYDFAALRALDNPVLITEFNFGSAGRDPFWPGVTQLAREEDRGAAYGNFLKQAMAEPSIVGVHWFQYLDQPVTGRMLDGENGHFGLVGITDVPFQGF

SEQ ID NO: 240699 - protein, 54 aa, Glycine max
  unsure (1)..(54): unsure at all Xaa locations
  Clone ID: PAT_MRT3847_59379C.1.pep
ADLGFGKCKETEVEEEDPELGTCRHQCSQSQQYTEGDKLVCLQRCRXHDSWSDA

SEQ ID NO: 240700 - protein, 65 aa, Glycine max
  Clone ID: PAT_MRT3847_5937C.1.pep
IPAGRHASCYLTMSSIIKLLDQKKSVQLNSEARKSNHYYTEYNSYTPNLNTIAYQISSTHNHQLP

SEQ ID NO: 240701 - protein, 102 aa, Glycine max
  Clone ID: PAT_MRT3847_59380C.1.pep
SPCPVSAFQLLPFRSNLQPSQESEEHYSESKIKEVKDAIEPLSGRSLKYCTDNCLRRYLEARNWNADKSKKMLEDTLKWRSTYKPEDIRWDEVAMEGATGKL

SEQ ID NO: 240702 - protein, 367 aa, Glycine max
  Clone ID: PAT_MRT3847_59381C.1.pep
MGGISLEEIKNENVDLEKIPVEEVFESLKCSTAGLTSDEGANRLQVFGPNKLEEKKESKLLKFLGFMWNPLSWVMEAAAIMAIALANGGGRPPDWQDFVGIIALLFINSTISFIEENNAGNAAAALMAGLAPKTKVLRDGRWTEQDAAILVPGDIISIKLGDIIPADARLLEGDALSVDQSALTGESLPVTKNPSEEVFSGSTVKKGEIEAVVIATGVHTFFGKAAHLVDSTNQVGHFQKVLTAIGNFCICSIAVGIIIELIVMYPIQHRKYRDGIDNLLVLLIGGIPIAMPTVLSVTMAIGSHRLSQQGAITKRMTAIEEMAGMDVLCSDKTGTLTLAQWIDIYIYIFSLYHSSSSLSFSLSFHRK

SEQ ID NO: 240703 - protein, 82 aa, Glycine max
  Clone ID: PAT_MRT3847_59382C.1.pep
KIPYGPNVVKVKGIEKVFIFFRDVDFWENNAPFKNFKWAGFKPDSQNKLDTQPVLSNFLLLCCPYGGVLLIFGPMVIPRIWN

SEQ ID NO: 240704 - protein, 56 aa, Glycine max
  Clone ID: PAT_MRT3847_59383C.1.pep
KQSKFAFQSHHLLLLYFSFIFGMVIKKFITNNVAISNFYFIIWTDLFNILCESVKS

SEQ ID NO: 240705 - protein, 157 aa, Glycine max
  Clone ID: PAT_MRT3847_59384C.1.pep
TPRVRVVRIASIQPRASSSISQPNPTFSSSESNANSQFNKSLLSWNRLKPPSTKCNFPKLRHKWKQYQGINHWEGLLDPLDDDLRWEILRYGHFVDATYSSFDFDPSSLTYATCLYSKKSLLNKCGLGNYGYRLTKYLHVTCGIHMPTWINKCFKQA

SEQ ID NO: 240706 - protein, 77 aa, Glycine max
  Clone ID: PAT_MRT3847_59385C.1.pep
DPPIMLGAYDPNYVVDNGPGSTPRQPPFHIPRLMLLILVTWSNDDQCVHAEESYHDCLTGLRTHNNTRRPFRICCLV

SEQ ID NO: 240707 - protein, 36 aa, Glycine max
  unsure (1)..(36): unsure at all Xaa locations
  Clone ID: PAT_MRT3847_59386C.1.pep
RXXIPXXEAXCNIHAIXPWPMAKGXQINTCTGXHTA

SEQ ID NO: 240708 - protein, 97 aa, Glycine max
  unsure (1)..(97): unsure at all Xaa locations
  Clone ID: PAT_MRT3847_59387C.1.pep
LSSFGGHMGHMILGNXVTMRTNVLDINSTTSAKGVIRTSLNIIGGDADTVTVIDSHISIQLISVTLVXEHGNGYAGKSSNRTRQVSLPTSGSSKYAY

SEQ ID NO: 240709 - protein, 132 aa, Glycine max
  Clone ID: PAT_MRT3847_59388C.1.pep
METLKAAIPENLKRAIGDSDVDDLRSTCSSLHRFFLHFHPFHQMITELADPKYALCAKNKDAALKSRLLGNQCFSNADYAKALDCYTQALREAPLDTASDMESNLVVATLYINRATVLHKMSLIVECLRDCT

SEQ ID NO: 240710 - protein, 136 aa, Glycine max
  Clone ID: PAT_MRT3847_59389C.1.pep
APHPEHFINLIMRVNCHNKYKSSERFNPSVGRLAVLAVSLIVTLSPVPSFRGHLTSGMEHSPIGKSTSYCQVFCITFTPAMVRSINRISWLGHQYNYGLSPKNEAIVFHTPSVYGRGFLAVIHIFQQACLGKNVLH

SEQ ID NO: 240711 - protein, 55 aa, Glycine max
  Clone ID: PAT_MRT3847_5938C.1.pep
MQDDLSGKFERRKIAGRSSTGNLVDPENTYLPVPADIPDLPIVRRIRARPNHIHH

SEQ ID NO: 240712 - protein, 71 aa, Glycine max
  Clone ID: PAT_MRT3847_59390C.1.pep
MAHISDIKLIRTDTTLDLSQKAEKGMSCSHSRVAFYNKTSGHCFLFSAMWDFITSTSATSTLALGLAAIEN

SEQ ID NO: 240713 - protein, 66 aa, Glycine max
  Clone ID: PAT_MRT3847_59391C.1.pep
DALILSYIITVNIDMYYARQHSSCMTTRVMQVKALLQDGERMAYDCHTRRENAFISTLIWTKGLCE

SEQ ID NO: 240714 - protein, 107 aa, Glycine max
  Clone ID: PAT_MRT3847_59392C.1.pep
TNIAKLNKPINKPRLERKNTDLKIGKGQRWAEGKYSEPQREMTSTLVSIVLSWCVASTMQPGHQGLAVEAKGGNSVCISDMKRGKCQNVNMGVPCCRRSWQRPRPTG

SEQ ID NO: 240715 - protein, 82 aa, Glycine max
  Clone ID: PAT_MRT3847_59393C.1.pep
NWRSTKLTFRSRALKPHKGKFHNQYLTTQGENTKDWVAKNSVGCPPGLMGLANFFFMIQTSGRSRVIGLIHRRVWDQSRSSQ

SEQ ID NO: 240716 - protein, 59 aa, Glycine max
  Clone ID: PAT_MRT3847_59394C.1.pep
IPLYPLSTPLGPWHFGIRNSHRPFRWKWVIIMVGRVEPEKAPFFLVVPLLWGILCEKFY

SEQ ID NO: 240717 - protein, 101 aa, Glycine max
  Clone ID: PAT_MRT3847_59395C.1.pep
RLEIKQPKLLIKHSFTSSELIGAAAFKSFGPTYATTLLTHYRFKLLLVTNHTEHTASKRPLSHRLLFHQNPSSFHFQTPYLSSANQALSHPQRHKLHCATY

SEQ ID NO: 240718 - protein, 50 aa, Glycine max
  Clone ID: PAT_MRT3847_59396C.1.pep
LVHKLNSAVLLGDNNPFFIFPTASQMTREFLIHKKSFQYLVFHLPFAFKN

SEQ ID NO: 240719 - protein, 51 aa, Glycine max
  Clone ID: PAT_MRT3847_59397C.1.pep
KIIYIKLSIFHNFKVVVINFLKNLILNDFKVILIIIYILLFNSFKIKNNYN

SEQ ID NO: 240720 - protein, 61 aa, Glycine max
  Clone ID: PAT_MRT3847_59398C.1.pep
NDELVLLFFMVDESCYQISLEIFSAAGSLLEIKLVLVFTCVMFYIYLKLFSHLLNLIMYLT

SEQ ID NO: 240721 - protein, 66 aa, Glycine max
  Clone ID: PAT_MRT3847_59399C.1.pep
TRLTSVDDRLILSEPSSEVDLLIGKINYTLCRTLLFDLIPTQHNNSGEPSCCLTEPDKNKGPKSKS

SEQ ID NO: 240722 - protein, 96 aa, Glycine max
  Clone ID: PAT_MRT3847_5939C.1.pep
MKWHQGHTLCSTCKTRVHNQRPIFREEVGDIRRLALDKIAESLELPCRYISLGGAQIFPLYSKIKPGAICNFTTYKCPYAGCTTVWGGGYPQPCCP

SEQ ID NO: 240723 - protein, 78 aa, Glycine max
  unsure (1)..(78): unsure at all Xaa locations
  Clone ID: PAT_MRT3847_593C.1.pep
YQVMICLSGNAPFIMNDWYSATHRCXTDSSPAKHCDACLMTXIKPHAWVCIPPIXASGAYNTIAMRSSEWAKQTSWPL

SEQ ID NO: 240724 - protein, 303 aa, Glycine max
  Clone ID: PAT_MRT3847_59400C.1.pep
VKPLISLSILMVIIGLIIISIFKLNLGIDFSSGTRADIQSKNAITQAQVEKTVKSVGLEPDQIQINGSGNKNATVQFKKDLSREEDNKLSAKVKSEFGDNPQINTVSPLIGQELAKNAVTALILASIGIIIYVSLRFEWRMGLSSVLALLHDVFIIIAIFSLFRLEVDLTFIAAVLTIVGYSINDTIVTFDRVRENLHKVKVITHTDQIDDIVNRSIRQTMTRSINTVLTVVVVVVAILILGAPTIFNFSLALLIGLLSGVFSSIFIAVPLWGMLKKRQFKKTKNNKLVVHKEKKSNDEKILV

SEQ ID NO: 240725 - protein, 79 aa, Glycine max
  unsure (1)..(79): unsure at all Xaa locations
  Clone ID: PAT_MRT3847_59401C.1.pep
VQVRDNDILEIPEXNDSHIHDRYILRDVQKNMLVVDFYEEKNIMLCWRKRETRITLYLDAITYPMSVIFIPLSMVTVNN

SEQ ID NO: 240726 - protein, 236 aa, Glycine max
  unsure (1)..(236): unsure at all Xaa locations
  Clone ID: PAT_MRT3847_59402C.1.pep
MTEPQDPFSYPPIDPVNFDLIIVGTALSESVIAAAASAVGKTILHLDPNSFYGSHFASLSLHDLTSYLTSPHSLPSAATAPHPXDSDDIVVVDLVHQPLCTDAETATYDESAFLSENSRKFNIDLGGPRALFCADKTIDLLMKSGAAQYLEFKGIDESFVYEANADLANVPNSRGAIFRDKKFSLKEKNQLMRFFKLVQQHIDDTQEEKIXKEDLEIPFVSFLEKMKLPPKIKSIL

SEQ ID NO: 240727 - protein, 80 aa, Glycine max
  Clone ID: PAT_MRT3847_59403C.1.pep
GHTDHRENRQLCFRSLLLGLSPWAFRLPCSWAEALGRQCTLKASTRERPYCSPLFFHTSFKMVTPCSSPKPSQFCAFSPL

SEQ ID NO: 240728 - protein, 155 aa, Glycine max
  unsure (1)..(155): unsure at all Xaa locations
  Clone ID: PAT_MRT3847_59404C.1.pep
VTRGQAAVQQLQAEGLSPRFHQLDIDDLQSIRALRXFLRKEYGGLDVLVNNAGIAFKVADPTPFHIQAEVTMKTNFFGTRDVCTELLPLIKPQGRVVNVSSIMSVRALKSCSPELQQKFRSETITEEELVGLMNKFVEDTKKGVHQKEGWPSSAY

SEQ ID NO: 240729 - protein, 179 aa, Glycine max
  Clone ID: PAT_MRT3847_59405C.1.pep
GLDLSYLPITEKCLNHILQLEHLEDLILEHCLGIEDHGLATLQASCKSMKMLNLSKCQNIGHIGIASLTSGSQNLEKLILSSSVIVTTDLAKCLQSFSRLQSVKLDSCLGTKSGLKAIGNLGASLKELNLSKCVGVTDENLPFLVQPHKDLEKLDITCCHTITHASISSLTNSCLRLTS

SEQ ID NO: 240730 - protein, 69 aa, Glycine max
  Clone ID: PAT_MRT3847_59406C.1.pep
WQCPSLSSFLRSHQRSLNPHRLQFCPLTHHWSWDPEPESFHQCLVLSARWCREMYSGFTCQPLVAGASS

SEQ ID NO: 240731 - protein, 129 aa, Glycine max
  Clone ID: PAT_MRT3847_59407C.1.pep
PPPEQRFWPLRRCRPPWPDDTATAPLVPPPRRRKPSRTTMSNSHAVTSPSSASGRATTSFPCMRVSLTRSKVLRSASVVKDVVVVGHVVGEGGGGRKTKADDGGDDCGTTAVDRGDSDNESEGEQQMVQ

SEQ ID NO: 240732 - protein, 40 aa, Glycine max
  Clone ID: PAT_MRT3847_59408C.1.pep
FTENPCSLLWYIVCNKLYLQCNKISSSIKLYTIIMSRDFQ

SEQ ID NO: 240733 - protein, 35 aa, Glycine max
  Clone ID: PAT_MRT3847_59409C.1.pep
DLKESCCLPSQQYSCFFSRECVQRNSLDSERSVEG

SEQ ID NO: 240734 - protein, 70 aa, Glycine max
  Clone ID: PAT_MRT3847_5940C.1.pep
RYYVIIILPNSKGSRNQWRMSVLKGWAQAQLTSGLHPTHTGLLVRLDHTSFTLLRWISNGPATRQSQTNW

SEQ ID NO: 240735 - protein, 54 aa, Glycine max
  unsure (1)..(54): unsure at all Xaa locations
  Clone ID: PAT_MRT3847_59410C.1.pep
TININASTHKLDLDNRIALRFYYIISDNILKQADIFFAXTNIVDLYIMLLKFFS

SEQ ID NO: 240736 - protein, 50 aa, Glycine max
  Clone ID: PAT_MRT3847_59411C.1.pep
LGVRFPFVSVRLSCPVLFLRWCSARFALLFPPGGPLACCALVLWLLFSRA

SEQ ID NO: 240737 - protein, 193 aa, Glycine max
  Clone ID: PAT_MRT3847_59412C.1.pep
EKDTRSRYSHSRDRYRSRSRSTGHATDRSHSGSIVEEHARSKRKHSGEQGDDSYASRLKTDYDLDDERMMASRRESRDLVVDKRREHRTSYHTQEAWGRARSSDRDVDRDLKMEKEQERSRNREVNWVHRREKERERSCERHRRDVEKDRREREDDRDSRREKESDRIRETVFERDRRRDKEKAQSRDRARGY

SEQ ID NO: 240738 - protein, 498 aa, Glycine max
  unsure (1)..(498): unsure at all Xaa locations
  Clone ID: PAT_MRT3847_59413C.1.pep
QSLFKVPLDAYMMDFVFSESEHGGVFDNKFGMDYXIPVFGSIAKEPPLHIIHIAVEMAPIAKVGGLGDVVTSLSRAVQDLNHNVDIILPKYDCLNLSNVKDFDRHIGFRLEGTEIKVWHGKVEGLSVYFLEPQNGFFQVGCVYGRGNDGERFGFFCHAALEFLLQSGFHPDIIHCHDWSSAPVAWLFKDNYAHYGLSKARVVFTIHNLEFGAHSIGKAMAYADKATTVSPTYSREIAGNPVIAPHLHKFHGIINGIDPDIWDPYNDKFIPVSYSSENVVEGKRASKETLQQRLSLKKADLPLVGIITRLTHQKGIHLIKHAIWRTLERGGQVVLLGSAPDPRIQNDFVNLANELHSAHHDRARLCLAYDEPLSHLIYAGADFILVPSIFEPCGLTQLTAMRYGSIPVVRKTGGLYDTVFDVDHDKDRAQAQGLEPNGFSFDGADTGGVDYALNRAISAWYEGRDWFNSLCKRVMEQDWSWNRPALDYLELYHAARKAE

SEQ ID NO: 240739 - protein, 123 aa, Glycine max
  Clone ID: PAT_MRT3847_59414C.1.pep
MAVDLMMGYRNHNFGQENAVREAASGLESVEKLIKLLSQTQQQFQTTSNSTSNSKSSMANIDTDYRAVADVAVSKFKKVISLLGSSRTGHARFRRAPVAPPPPPAEPIVYRATPLHQIPPPNL

SEQ ID NO: 240740 - protein, 210 aa, Glycine max
  Clone ID: PAT_MRT3847_59415C.1.pep
MYTSFKPNSHNHKHQKDHNVTTTTTTNTKYSEISHFSHKQHKLAFDYSESPFKCDGCKELGIGSRYKCSICDFDLHTHCSIPSPSLFHPFYPKCSFHFLSQPPGDTSRYCNACEKPVKGFLYHCFSCGFDLHPCCAKLPTVLGSDEHGVRLFLYRKVSSACHRCGRKGSGWSYRSSCKRYNLHVACVREMVVESWHEGGGLMNVVESGLS

SEQ ID NO: 240741 - protein, 276 aa, Glycine max
  unsure (1)..(276): unsure at all Xaa locations
  Clone ID: PAT_MRT3847_59416C.1.pep
LLHLKNLCMKLNAGDDEQRTNGKGESKTSGFGPEEYLIGIIANMLKELGKGDGVSTFEFIGSGVVAALLNYFSCGYFSKDRPLETHLPKLRQQALTRFKLFIAVALPSTIEVGTVAPMTVLVQKLQNALSSLERFPVVLSHSSRSSSGSARLSSGLSALSQPFKLRLCRAQGEKSLKDYSSNVGLVDPLASLAAIEEFVWPRIQRSESGQKSTVATGNSESGTTPAGAGVSSPTTRRHSXRSRSSANIGXDPSRKEITQDKSTSSFKGKGKVALKP

SEQ ID NO: 240742 - protein, 56 aa, Glycine max
  Clone ID: PAT_MRT3847_59417C.1.pep
RQHRLRNPVISDTFMEVKLPVARVNLQLEFSTTEHTTKLMCGFLLNTVIGESASVF

SEQ ID NO: 240743 - protein, 57 aa, Glycine max
  Clone ID: PAT_MRT3847_59418C.1.pep
ACGIPLFVRKKLPEYCVPPTKDYINGENLYETSPTFNQRLSLMLVNPNSITATYLIL

SEQ ID NO: 240744 - protein, 103 aa, Glycine max
  Clone ID: PAT_MRT3847_59419C.1.pep
YTPAGGKKNGKINLFLGLFQERGLFQGVFSLSLFPRLIKFPGGFFRQTREILFKMGPFGVGKTALKGEKKNRNRFFFFLLNPLKSFDFFFLNKPQERGLMSPA

SEQ ID NO: 240745 - protein, 58 aa, Glycine max
  unsure (1)..(58): unsure at all Xaa locations
  Clone ID: PAT_MRT3847_5941C.1.pep
SLRRRLEAMGCAIRVLRCVCVRVRLWWCCDTIINXSRFPERRERGEELECACTLAHRL

SEQ ID NO: 240746 - protein, 351 aa, Glycine max
  Clone ID: PAT_MRT3847_59420C.1.pep
TETKKVTSACWVCPFGSKAIVGYNNGELFIWSIRSLNIGNGSASEHSYQNTPLLKLNLGYKSDKISIGSIKWVYAGGKASRLYIMGASDCATSNLLQVVLLNEHTEARTIKLGLHLSECCIDMEIISTSTEQSKNKQDSFILLGKSGHLYLYDDILIERYLLQCQSKSTPSLPKEVTVKLPLAESSITTAKFISNNPNVLTFEDEYYRQLITSYPLFVPVETNQKDEISLSSAKFTGFSKVQNLYITGHSNGAINFWDASCPIFTPILQLKKFHANDCTLSGIPLTIQNSASKEEQQDEQAGAVDQIKKKYGFSSSNVSIYPISPLFKVRNMDETRKQALLNWQKASCRRT

SEQ ID NO: 240747 - protein, 73 aa, Glycine max
  unsure (1)..(73): unsure at all Xaa locations
  Clone ID: PAT_MRT3847_59421C.1.pep
TVFRRXQKGTIHTLQHKISGVKGLQKGTCFYKTTYGNWLIEVNRRLSHTIILSAPCIKSFINQISSYGYYQEN

SEQ ID NO: 240748 - protein, 216 aa, Glycine max
  unsure (1)..(216): unsure at all Xaa locations
  Clone ID: PAT_MRT3847_59422C.1.pep
MDRVIYSFMFVLILLSSKSVVTTKAQPPIYLADDCDFNPQKPLGGEYQTNLNSILSWLSSDAATSKGYNHKSIGKNNSAVYGLYDCRGDVVGYFCQFCVSTASRQMLQRCPNRVSAIMYYNFCILRYSNENFFGNVTIYPPRHVVGTKNVSSEEEIQKGEHFMRSLIRKATVETDQLYXYGWLQFEFHSEKVXGLVQCKXDLTNEGCRQCLEAMLA

SEQ ID NO: 240749 - protein, 57 aa, Glycine max
  Clone ID: PAT_MRT3847_59423C.1.pep
PRVRSEEIQVQMDSMCPPQKHKSMLMIHFFLVFFNSFARKRKLAFYIPSSTGEILMY

SEQ ID NO: 240750 - protein, 65 aa, Glycine max
  Clone ID: PAT_MRT3847_59424C.1.pep
IHLQINFFLLHIMHFFLYKHHFTLNQLSSTYSKHETYPFFLSTLSFHNPFSLFHLLLFLQQISSL

SEQ ID NO: 240751 - protein, 109 aa, Glycine max
  Clone ID: PAT_MRT3847_59425C.1.pep
MARRRPKNREVITPASLNDQLANVLRVHQHHLALKRNDTRRQSQIGLVMRREMTSYLYCHWLSLHPKKQNKREGDHSNRDWLPGINRRLCPSVRAISAHISLARGPHPL

SEQ ID NO: 240752 - protein, 255 aa, Glycine max
  unsure (1)..(255): unsure at all Xaa locations
  Clone ID: PAT_MRT3847_59426C.1.pep
MPLNSWDGTVKFPLHKFNQQKYGGVIGPRESEGEMEEGKEWSLNKQNETTTRPSLKSDAPFNKYQLWKHKLRNNCYKRVREDRTRLLWKFRCSQQEEDIVKCAFQDIVSDEFNKMKHTDEMLWEYEGPPDTTYQDLECDIETWEDEVDQYLARAVCEHMQLNEDEAHGKEIWCPICKQGELKDNHNIICCTCCELRLHKASKGYLWVALVCIXKVHTEHFDKGCRLXPQFCMRTKFNLTALYISREGCDTFEVVI

SEQ ID NO: 240753 - protein, 71 aa, Glycine max
  Clone ID: PAT_MRT3847_59427C.1.pep
LQEAYSTPILPLDVLFDRPPQKKFEWAKRVLAKYGSLISVISIKGLFKNLGGSPSKSSPKGSKKKRLSLAN

SEQ ID NO: 240754 - protein, 93 aa, Glycine max
  Clone ID: PAT_MRT3847_59428C.1.pep
QSIDTFGSNNVCNSVCESVVLWFQDFVYVDLSQALATIQCNLDSSVTIEKFSVRIGWNKFAIYEPEDSNKCALCLLKNNGSISDCHIDCEFFE

SEQ ID NO: 240755 - protein, 49 aa, Glycine max
  Clone ID: PAT_MRT3847_59429C.1.pep
ILLRFSLLFKFGTIQMYSSRFYNSSNWLHLLLTRAWMLDNEQVVFVYYR

SEQ ID NO: 240756 - protein, 120 aa, Glycine max
  unsure (1)..(120): unsure at all Xaa locations
  Clone ID: PAT_MRT3847_5942C.1.pep
HLSPNMTQYLFILDCLVNTDKDASILIDNXIFINWLGDANAVAKMFNSLCSNVGLPFISEECFSLCDNLVKFYENPRNKYKAIFYHEYFNTPWKKASTSAAVLLLLLTLIQTICSVISFF

SEQ ID NO: 240757 - protein, 63 aa, Glycine max
  Clone ID: PAT_MRT3847_59430C.1.pep
IGLRVPSTLDISTRIFGRSVLELGLPDFLLRLREDLVEGDVALHYRHAVPCVSLATLKTHPPI

SEQ ID NO: 240758 - protein, 163 aa, Glycine max
  Clone ID: PAT_MRT3847_59431C.1.pep
MDPGKMLVGPSKVFLMDEISTGLDSSTTFQIVKFLRQLVHVMDVTMIISLLQPAPETFDLFDDIILLSEGHIIYQGPRENVLDFFESVGFKCPERKGIADFLQEVTSRKDQEQYWFARDKPYRYVSVPEFVAHFNNFGIGQQLSQELKVPYDRAKTHPAALVK

SEQ ID NO: 240759 - protein, 222 aa, Glycine max
  Clone ID: PAT_MRT3847_59432C.1.pep
MYNSSICSFMFSTNILQPRMVIARLSCTLKTHQNVRIGHCTKVPRNVNMEKLQHGYLFPEIERHELMHLESAPHANVIDLGIGDTTQPLPTIVTSSMVDFVHGLSTATGYKGYGPEQGEKALRKAISVTFYKDLGIKPSEVFVSDGAQCDITRLQLLMGPNLKIAVQDPSFPAYIDSSVIIGQAGKFVDKAGKYKNIEYMTCGPQSDFFSDLLPFKDLTYFF

SEQ ID NO: 240760 - protein, 63 aa, Glycine max
  unsure (1)..(63): unsure at all Xaa locations
  Clone ID: PAT_MRT3847_59433C.1.pep
RGVGVXXTHTPFYQKTYEQSVSLEGGFNKFSNFEKLLAAFLNKLGWFKNLVGGEKVYLNVCFF

SEQ ID NO: 240761 - protein, 86 aa, Glycine max
  Clone ID: PAT_MRT3847_59434C.1.pep
RDIGDGAQQEGCNFVLADGGWKYPSRSPRRLAVKTYTNSYHSAAMKRPKLEPHSWELIFPIEVCGPNNGFEMRRICQRAIDYEPYD

SEQ ID NO: 240762 - protein, 44 aa, Glycine max
  unsure (1)..(44): unsure at all Xaa locations
  Clone ID: PAT_MRT3847_59435C.1.pep
HSHDSQLHYRXSPSSWRHCSCSTNPYPPCQASPHYRSCPNSCIS

SEQ ID NO: 240763 - protein, 91 aa, Glycine max
  Clone ID: PAT_MRT3847_59436C.1.pep
SLGLSSLTRSNPRDRASPLRSVSDTTANPNKPPNPKPPPPPPPPPIEELCTIRDLDNGKEFVVNELENLREVATGRQLKTEELLVQSLGRI

SEQ ID NO: 240764 - protein, 92 aa, Glycine max
  Clone ID: PAT_MRT3847_59437C.1.pep
SSYGDPWRSLQQSSLNKEMKTQCVGSSCSWSGQIKLSGVCIKDCHVASNNGHQAPFLWQKPHLIDFVCSVSKKVSPCDSYHFVKEVIVHSVK

SEQ ID NO: 240765 - protein, 180 aa, Glycine max
  Clone ID: PAT_MRT3847_59438C.1.pep
MVTNFLIVRLTASFTHHRSTPIQLGSLLQHKHNAFLLFFFSFTSGTSSDSELDGNQHKGDNFTVPYLINSCGVSPKLARKLSKKVNLKTPNGPNSVLDLLNNYGFDKTHLAKLVEKHPMVLVANAENTLLPKLKFFRSIGVSNTDMPKILLCNHVLLVSSLENDLIPRSEILRSVFGTIQ

SEQ ID NO: 240766 - protein, 150 aa, Glycine max
  Clone ID: PAT_MRT3847_59439C.1.pep
MGGFGVWMEASPSFEVEDDNEHCSTSATSSIGNDSDVLSETECGENDNEAHSTYKCHQPLDTMDSLQQVLPIRRGISKFYDGKSKSFTSLADAGSTPSVKDIAKPENAYTRRRRNLMWEKSRNYPLRSNNGGISKRTTISSSRSTVTLAF

SEQ ID NO: 240767 - protein, 55 aa, Glycine max
  Clone ID: PAT_MRT3847_5943C.1.pep
MHANQHYAVEDTVAIVKLEDIEASNDNCDDAYDEPTDCLIIDIAQDGPFRLLTEN

SEQ ID NO: 240768 - protein, 75 aa, Glycine max
  Clone ID: PAT_MRT3847_59440C.1.pep
PTRTHIHSLNLQVNTLFFGHGSYHSAEKYKPLHYFYYKTHLLHLSYMYFTKSTQTSQSYTMTSSFPFIRINKYST

SEQ ID NO: 240769 - protein, 213 aa, Glycine max
  unsure (1)..(213): unsure at all Xaa locations
  Clone ID: PAT_MRT3847_59441C.1.pep
PLFLLRFPVHLASRASDFIGSNLPSPSFKLTYLFFWGAPFRGSSFPSPSLRRFSFFFLPPIFISLPVFFHLVVWETPGFPHLFRLAALPLFSGWLFTQGARPFRLSHLLPPLFGNWAPPFTGPFTPAVVVVPPMFPVPFSRPLSPVLFVFFPSFFPPFPGFPRXFFFRGLLFGFPFFPFRPLLPPKTFFCVVCFPFFWFPFSSLFFLISLLFL

SEQ ID NO: 240770 - protein, 55 aa, Glycine max
  unsure (1)..(55): unsure at all Xaa locations
  Clone ID: PAT_MRT3847_59442C.1.pep
KLGVLNLAIVIPQLVVDDTSGPWDAQFEGGHSPXLLAGAVAENQNATLCIILLSS

SEQ ID NO: 240771 - protein, 51 aa, Glycine max
  Clone ID: PAT_MRT3847_59443C.1.pep
YQSLLGQIIIFLGELQKETYSVPHHTIKILSSLTRPPPPKKLNPYPRLMGT

SEQ ID NO: 240772 - protein, 46 aa, Glycine max
  Clone ID: PAT_MRT3847_59444C.1.pep
PNYYYPSYHLFISKIHQSPSLHSIITYIILHTHPHNQSFLLLIYKN

SEQ ID NO: 240773 - protein, 138 aa, Glycine max
  Clone ID: PAT_MRT3847_59445C.1.pep
QSMMYQHTDPCESFQTLDAAHEHKISSILQYFHCNKQWMFIQMEGKQSSLRVAALNVQGGQAVLANVHGHLHQVLIVSSFYRDALCNCYIVIIVAYGPYMGPKKTHSRDRAPGAPRSLSWFLAGQQSAVHISSSQLTA

SEQ ID NO: 240774 - protein, 82 aa, Glycine max
  Clone ID: PAT_MRT3847_59446C.1.pep
YTRLQSFLNKNIQNQRAAGAIFVFYTFKTKPILQIPPLIEKEFLHFIFWIHQRPYTKIVLIYLILKIFTILVAPNRILTKTL

SEQ ID NO: 240775 - protein, 59 aa, Glycine max
  Clone ID: PAT_MRT3847_59447C.1.pep
GLLNKPLVMFLSNKSRIQGRLSWILDLCCHMRKWMSITLSWKSCFLLKATHFLLKSGLL

SEQ ID NO: 240776 - protein, 44 aa, Glycine max
  Clone ID: PAT_MRT3847_59448C.1.pep
IQEESLVGWSFDSKEQSDLNSHPIRVMYGMLDNLKAYVVVRLDA

SEQ ID NO: 240777 - protein, 141 aa, Glycine max
  Clone ID: PAT_MRT3847_59449C.1.pep
HASVLLDGSLVYGGSGANRAVSMWPVPADEVDGVEEPFLRALVSFLSALFKEKIWRPEKALNLIELLVNKLFLGEAVNTNCLKILPLLINVLLEPLYGYAEPGTGVHHCSLEERFVQNTMIDWLERAGSLTPLVTWKTGED

SEQ ID NO: 240778 - protein, 55 aa, Glycine max
  Clone ID: PAT_MRT3847_5944C.1.pep
KFHVTNNLRWVNFDINDLIFTFELIYFSSFTKNFCWLGEPITYIYLISLLTKRNN

SEQ ID NO: 240779 - protein, 51 aa, Glycine max
  Clone ID: PAT_MRT3847_59450C.1.pep
KKHVRASCPGTSINIQLVIASSDNIALVQFFAQISFDASFLYSVHYLSPDP

SEQ ID NO: 240780 - protein, 125 aa, Glycine max
  Clone ID: PAT_MRT3847_59451C.1.pep
LNGGANFVAPGYTKGDGLGAEIVGTFVLVYTVFSATDAKRNARDSHVPILAPLPIGFAVFLVHLATIPITGTGINPARSLGAAIIFNKDLGWDDHWIFWVGPFIGAALAALYHQVVIRAIPFKSK

SEQ ID NO: 240781 - protein, 158 aa, Glycine max
  Clone ID: PAT_MRT3847_59452C.1.pep
TLNGGANFVALGYTKGDGLGAEIVGTFVLVYTVFSATDAKRNARDSHVPILAPLPIGFAVFLVHLATIPITGTGINPARSLGAAIIFNKDLGWDDHWIFWVGPFIGAALAALYHQVVIREVIQSNQVGNTKKNQNNVSGFRFHFIKMICLSFFFLILI

SEQ ID NO: 240782 - protein, 124 aa, Glycine max
  unsure (1)..(124): unsure at all Xaa locations
  Clone ID: PAT_MRT3847_59453C.1.pep
MEGKEQDVAVGANKFPERQPIGTAGHIQNDGXDFQEPAPAPLXDPTEFTSWSVYRARIAEFVGTFLCFYITVLTVMGVAGAKSKWSTAGIQGIAWAFGGMIFALVYWTAGVLWGHINTPVTFEL

SEQ ID NO: 240783 - protein, 204 aa, Glycine max
  Clone ID: PAT_MRT3847_59454C.1.pep
MECVFGLVGNGFAIVVADSSAVHSILVHKSNEDKIMLLDSHKLIAASGEPGDRVQFTEYIQKNVALYQFRNGIPLTTAAAANFTRGELATALRKNPYSVNILLAGYDKETGPELYYIDYIATLHKLEKGAFGYGSYFSLSMMDRHYHSGMSVEEAVDLVDKCIMEIRSRLVVAPPNFVIKIVDKDGAREYAWRESVQDVPVPSA

SEQ ID NO: 240784 - protein, 119 aa, Glycine max
  Clone ID: PAT_MRT3847_59455C.1.pep
MMVGKEQDVSLGANNFPVRQPIGTAAHIQDDGMDFQEPAPAPMVDPTEFTSWSFYRAGIAEFVATFLFVYITVLTVMGVAGANSKCSTVGTQGIAWAFCGMIFALVYCTAGISSGHINP

SEQ ID NO: 240785 - protein, 103 aa, Glycine max
  Clone ID: PAT_MRT3847_59456C.1.pep
VKPRPPLCSNPYPTGLTLHAEMQARELAQAVLNEVRNTAHNTYNGSHICDLQYAAYMRIFYQHQISFPVIHLLWETSENNHILAYRDYYLYKFGFGRKGGLPL

SEQ ID NO: 240786 - protein, 60 aa, Glycine max
  Clone ID: PAT_MRT3847_59457C.1.pep
ININWGLGKEKKTPPRGSFLTIPFEKGFLVYAPLWLNFILVLFIWGGEKEGNLNVAIPHG

SEQ ID NO: 240787 - protein, 76 aa, Glycine max
  Clone ID: PAT_MRT3847_59458C.1.pep
LAPLPIGFPVFLVPLGTIPITGLGINPARSFGAAIIFNKGLGWDDPWIFWGGPFIGGALAALFPQVVIRALPFKSK

SEQ ID NO: 240788 - protein, 65 aa, Glycine max
  unsure (1)..(65): unsure at all Xaa locations
  Clone ID: PAT_MRT3847_59459C.1.pep
SDCSILNLKTKFLEGSRAFSMNPIVFWLXIVFFLSHYSLPHQLFLPGPLLASPCMTKPLFPYRCL

SEQ ID NO: 240789 - protein, 201 aa, Glycine max
  unsure (1)..(201): unsure at all Xaa locations
  Clone ID: PAT_MRT3847_5945C.1.pep
KLEEENHNRGLTLDPNRNYHHHHLLHQQPHHQNLILNSRRHVTNQEDQESHPHQFHIQFQQQREQQSYTALDTELLNPLQPPKKRSCRPPLPPPPPSSLTLSEHARKMGEPQHPHQHHQQAAATPSRAAMRGGGGGEIVEVQGGHIVRSTGRKDRHSKVCTAKGPRDRRVRLAAHTAIQFYDVQDXLXGYDRPSKXAVDWL

SEQ ID NO: 240790 - protein, 289 aa, Glycine max
  Clone ID: PAT_MRT3847_59460C.1.pep
MEGKEQDVSLGANKFPERQPIGTAAQSQDDGKDYQEPAPAPLVDPTEFTSWSFYRAGIAEFVATFLFLYITVLTVMGVAGAKSKCSTVGIQGIAWAFGGMIFALVYCTAGISGGHINPAVTFGLFLARKLSLPRAIFYIVMQCLGAICGAGVVKGFEGKTKYGTLNGGANFVAPGYTKGDGLGAEIVGTFVLVYTVFSATDAKRNARDSHVPILAPLPIGFAVFLVHLATIPITGTGINPARSLGAAIIFNKDLGWDDHWIFWVGPFIGAALAALYHQVVIRAIPFKSK

SEQ ID NO: 240791 - protein, 99 aa, Glycine max
  Clone ID: PAT_MRT3847_59461C.1.pep
LTYTPFLPTFSDHSAHFLCECHSLSSQIQFSRCDIVIPSKAVFQPAGSVYQSSVCSVHHCFHSGFMFLGNLGPVVLILKTLSYMKLRAIMPSDVNLINI

SEQ ID NO: 240792 - protein, 241 aa, Glycine max
  unsure (1)..(241): unsure at all Xaa locations
  Clone ID: PAT_MRT3847_59462C.1.pep
MEGKEQDVSLGANKFPERQPIGTAAQSQDDGKDYQEPAPAPLVDPTEFTSWSFYRAGIAEFVATFLFLYITVLTVMGVAGAKSKCSTVGIQGIAWXAFGGMIFALVYCTAGISGGHINPAVTFGLFLARKLSLPRAIFYIVMQCLGAICGAGVVRGFEGKTKYGALNGGANFVAPGYTKGDGLGAENVGTFILGYTVFSATDAKRSARDFHVPILXAPLAIGFVGSWSLGNHPITGLDSLL

SEQ ID NO: 240793 - protein, 71 aa, Glycine max
  unsure (1)..(71): unsure at all Xaa locations
  Clone ID: PAT_MRT3847_59463C.1.pep
LLMASDLYRPRARVFICVGRPVSFLKWSDFYNFGILASCLRESGASDLMFLSCSSERLKVSLLCLWXKREX

SEQ ID NO: 240794 - protein, 99 aa, Glycine max
  Clone ID: PAT_MRT3847_59464C.1.pep
NPKSGINDLEVPPLSPGESLRGFSRIDYHNGHQLNVDYPIRDGVKVKGFFVGSRLDSFEWSKGYNPRLGLIFGDPKNNLTRFPKLSAKGFRKFFQNGLL

SEQ ID NO: 240795 - protein, 98 aa, Glycine max
  Clone ID: PAT_MRT3847_59465C.1.pep
GQSQNQRSLRKLAAVTNSDDASDAGSSMAREIRPLEENFNQDLLMHESETASWLHYPIDDDEPATDQRFSADFLYSTTTTANNSCMLHTLRHTYQITE

SEQ ID NO: 240796 - protein, 123 aa, Glycine max
  unsure (1)..(123): unsure at all Xaa locations
  Clone ID: PAT_MRT3847_59466C.1.pep
FLNLQNAPLDFGTDDFYIARKSSIESHLQQIRDGMAEEFLIKSWETHIGTTCRGVNWGCHSLDELRADVSCVGGTCLASLCKLLAQDYRSXSSGMPDLLPWRFHGEYSGEAKLVEVKGPRHLL

SEQ ID NO: 240797 - protein, 70 aa, Glycine max
  Clone ID: PAT_MRT3847_59467C.1.pep
LMLQHQNHFILTLLQQNLRATETMYDKHPCFLRGNTYKLLPKREHGSEQAKKEILHYFRTSRYMKTRRFD

SEQ ID NO: 240798 - protein, 65 aa, Glycine max
  Clone ID: PAT_MRT3847_59468C.1.pep
RNHVIQNLKDCDFIPIYDWYQSEKEKKKGMTAEVSWYTFHLTTVEIYTMRALDFGFVSNIFILFI

SEQ ID NO: 240799 - protein, 65 aa, Glycine max
  Clone ID: PAT_MRT3847_59469C.1.pep
FLTIYRYLLILEIDRRDDSTISTNLEYIHSNIKIITELHDHIYILYNLGDSYMVFLSERVFFCFY

SEQ ID NO: 240800 - protein, 301 aa, Glycine max
  unsure (1)..(301): unsure at all Xaa locations
  Clone ID: PAT_MRT3847_5946C.1.pep
AVSIRLSLHATAAGCLGESLISSSTYDLLRELIYYDRDVMSLWADSSLNGKIWLYGVXHWHSLRKXSTDSISFSSGLHPFAILMYPLAIGGLVXFFPSLFTAMSFFTGGVIFIMVPPCIKRLHLRYLPQNYFLLLLVSFXQLQPLLHVNMIKSVMAHILQVLXCEFYHLIXFYYSQSRWKCGHFVLIGAVKTSDKWILTSCXRLLVLDFSAFGKSGAFCIWYAWMXAVGVCVGFTVGSVAPARVRTSFGVAFCTAIAGIVVLLFGNISDVGGAVAAGHVRDECERSSAVLPGLDSKESARV

SEQ ID NO: 240801 - protein, 61 aa, Glycine max
  Clone ID: PAT_MRT3847_59470C.1.pep
MILVAIVAEVLEEYTALLARVLEQVFRSAPVPRRVRFLILRALPFVSSRPRTILPPPTPSY

SEQ ID NO: 240802 - protein, 102 aa, Glycine max
  Clone ID: PAT_MRT3847_59471C.1.pep
VRHSHARVRTTTEDCPYPSQVLACVQGRVHASQPCDLIRRNTGPKPNLLKAVTAVQPNPGSTGHYIHWHHCLTGAMSLRMGPQEPCSSLLMQSDDLPVIGDH

SEQ ID NO: 240803 - protein, 233 aa, Glycine max
  unsure (1)..(233): unsure at all Xaa locations
  Clone ID: PAT_MRT3847_59472C.1.pep
MNIFKSVFSEDPDPPRPGSNHASPDKAPDPHSPPRSNATESAAGGGGGDGWNFGGLIKTLTSKSESIIETYRRDLQEFGTGLKKEIEVAQGSLGTVGHVIDEFGNTVVKGTAQIISQGKDAILAVNLDSDSDSNSANRKSLDSVRYSRFDAQVRAIQGDVSTYSEEPEDLNEFNEWKLGFSLEGKGEEMEGLFRENDAMESVYKKVVPNSVDNETFWYRYYYXVYKLKKAENV

SEQ ID NO: 240804 - protein, 59 aa, Glycine max
  Clone ID: PAT_MRT3847_59473C.1.pep
CSALKYQTKFKVHDLSMKHCCEFYVTLHKSVSPGWNILILKKSWKKAKGPEGLVDPEFK

SEQ ID NO: 240805 - protein, 157 aa, Glycine max
  Clone ID: PAT_MRT3847_59474C.1.pep
RPLFFCLTLPKPGGFFPPPPGFIFGGGCSPKNPGFARFYPFFFFQNPFWAPPSFPGQISFFSRGEEFPLFPRGGPRFFLLFAWQNGKRFFPGPVPLSPLLYFVQGAHPPQPGGGGGFFIPRGPFFSKDFGPIFSCGFPFLGFGGLPPLGGGFNGFFF

SEQ ID NO: 240806 - protein, 93 aa, Glycine max
  Clone ID: PAT_MRT3847_59475C.1.pep
WAIDILAAQKWMYARVNWGRRVFTVFVVNHGQSIELGSYDTYRCMAGRSWIYRRGPLCFGSVRVNLFELTSFFKRISKVVGVFGPYLRRALTY

SEQ ID NO: 240807 - protein, 71 aa, Glycine max
  unsure (1)..(71): unsure at all Xaa locations
  Clone ID: PAT_MRT3847_59476C.1.pep
TKILIFPGKYIKKNIXNMVNIDIFYIINQLDNITXQKEKEKKQLDNNLARXFSVTIIKVNDFQCYDNPWIG

SEQ ID NO: 240808 - protein, 76 aa, Glycine max
  Clone ID: PAT_MRT3847_59477C.1.pep
APRLLFFYFNSNISWIIVFSIFSLPSNQIHLKRSVLNLRFGSPEAGGCCPFSFIHFFFSIALFICPCPSLSHSLIL

SEQ ID NO: 240809 - protein, 242 aa, Glycine max
  unsure (1)..(242): unsure at all Xaa locations
  Clone ID: PAT_MRT3847_59478C.1.pep
MKMSCKLHDVKLQMLXGDHQLQNAATATCVALVLRNLGWSISDKSIRYGLEDTYLLGRSQFLTSEEAEVLGLTGSTVLLDGAHTKESAKALMNTIRMAFPKAQLVFVVAMASDKDHVGFAREILSGVHVETVLLTEAAIAGGVTRTTPASLLRDSWIKASDELGIGIVHDGMAEYSELLKEQPVGSESNLGDGKTVLATVPCLKGCLRSANQILSRRGDEKRVIVFTGSLHIAASVLASLAG

SEQ ID NO: 240810 - protein, 126 aa, Glycine max
  Clone ID: PAT_MRT3847_59479C.1.pep
KICGTREYKCDCGTIFCRRDSFITHRAFCDALAEENNKANEGQLPKIGPNLQCQQIPNLVSSLPINTNSIVPNPAQMGGTTSEFNHADHKHPLSLPHELMPMPAQKPFNNNMAAGTVFTRSLSSTS

SEQ ID NO: 240811 - protein, 36 aa, Glycine max
  Clone ID: PAT_MRT3847_5947C.1.pep
LSITIGISLFFSSTFLFFFFFFFFFKFFFFFFFFFF

SEQ ID NO: 240812 - protein, 183 aa, Glycine max
  unsure (1)..(183): unsure at all Xaa locations
  Clone ID: PAT_MRT3847_59480C.1.pep
MASAPTPHKEIMYMAKLAEQAKRYKDMAEFMETVSSSVESXELTXVEERTLLSVPYNNEIIARQSSWRIMCLIEQMEESRXTNDHVASSETSRPRSKPSSXNICDGMLKLLNTRLVRCDDCGDYKDFYLMMKADYHMHLAEFKTGSNPREADQSTLSCYTASHDIAHTELPTTDPMRLRLALN

SEQ ID NO: 240813 - protein, 418 aa, Glycine max
  Clone ID: PAT_MRT3847_59481C.1.pep
MEGEKENPDCNATLVNSFCEITSSSKEEALFFLESHNFDLDAAVSTFLDNANNPLIPQNDDVVVAANPNPNSVSPPSDSHSPDFNPSRSPSPSPSPTRTPYELRSRRSLGKKPSTRRQGKIRTLGDLKRSSRDDDSDSDPDFEPDEYYTGGEKSGMLVRDPTRGNSNNNNSVDDIFDQARQVAVDAPPENPRSSSRSGSFSGTARLLSGERLPSAAAAAPAPQRVEEVTHTVTFWRNGFSVNDGPLRRLDDPQNAPFLESIKKSECPKELEPADRRTAVHVNLTRRDEDYPEPVKPRHRAFQGVGRTLGSTSSSNDEPIQTTGASPSTAPLPTMGLIVDEAQSVTSIQLRLADGTRMVSRFNHHHTIRDVRAFIDASRPGGVRSYQLQSMGFPPKQLANLDQTIEQAGIANSVVIQKL

SEQ ID NO: 240814 - protein, 260 aa, Glycine max
  Clone ID: PAT_MRT3847_59482C.1.pep
NSAGAEMEGEKENPDGNAALVNSFCEITSSSKEEALFFLESHNFDLDAAVSTFLDNANNPLIPLNDDLAIPNPNAVSPPSDSHSPDFNPSRSPSPSPSPTRTPYELRSRRSLGKKPSTSRQGKIRTLGDLKRPSRDDDDSGSDPDFEPDEYYTGGEKSGMLVRDPTRGNNNNNLDDIFDQARQVAVDAPPENPRSSSRSRSFSGTARLLSGETVPSAPQRVEEVTHTVIFWRNGFSVNDGPLRRLDDPQNAPFLESIKKS

SEQ ID NO: 240815 - protein, 211 aa, Glycine max
  Clone ID: PAT_MRT3847_59483C.1.pep
MSKLSFITKSICSGHLIVPFCCLTMHSFSSLSFMILMGQKSTTSDQSEEEHMLWNSFLEEASMLQKELSGEVLDHETRQRLVAPVSVELEGDQYEEYVKTELYYKKHLFRTPHCSLLLSNYAQFLFLVLHDIDGAEEYYKKSVLAESSEAEAFSRYADFLLMVRKDVWAAELRYLQTLEADPGNAYYLSKYASFLWNTGGQDTNSFPMMVI

SEQ ID NO: 240816 - protein, 104 aa, Glycine max
  unsure (1)..(104): unsure at all Xaa locations
  Clone ID: PAT_MRT3847_59484C.1.pep
LMGEMTHMMLACCSRMAICKKEVCRVECGNNFGFPLTVIWNTIFNEMLIRYSYEKLLHQAKSSIMFIQSFKKLVCXCVYGDDNLISAHEYDKPYFSWSLLKCFL

SEQ ID NO: 240817 - protein, 77 aa, Glycine max
  Clone ID: PAT_MRT3847_59485C.1.pep
PEYCNHNIMEHESNRQLIPPSSLDKSNIVGAPRSNPQIGFEYQMEVTSMIKESKWLKLLMNTTDSVHTALLSSSRSR

SEQ ID NO: 240818 - protein, 62 aa, Glycine max
  Clone ID: PAT_MRT3847_59486C.1.pep
SKSEHPFHSCFRGGYNYKQQPQLGWKIYTRKRKYKYITEKPTNLGLMVDKLQSFSHSFATRL

SEQ ID NO: 240819 - protein, 87 aa, Glycine max
  unsure (1)..(87): unsure at all Xaa locations
  Clone ID: PAT_MRT3847_59487C.1.pep
WAKFFNVENHLLAVPEAVDFVGKFFRYGPQGRPTGKKXMAHPYFNPVKNSESSRTRAPLGGGACLKKGVGFTKGATVLNGNFGWNCF

SEQ ID NO: 240820 - protein, 43 aa, Glycine max
  Clone ID: PAT_MRT3847_59488C.1.pep
YVRVILRFQIYGRSYIFVALTLRKIINKCSRYSHNNIKAFEVL

SEQ ID NO: 240821 - protein, 124 aa, Glycine max
  Clone ID: PAT_MRT3847_59489C.1.pep
PYCSSIVEVSCSANQDSFAPPPLARGREGVVLYSTWKHGISLSTLYRRSMLCPGMSLLVVGDCKGAVFGGLVEAPLRPSNKRKYQGTNNSFVFTNTSGCPVIYHPTGIYFSLSLNIPFFIKIND

SEQ ID NO: 240822 - protein, 154 aa, Glycine max
  Clone ID: PAT_MRT3847_5948C.1.pep
AKKNELGSGTVNTMTWLVLKTKKIIIYWKKPQYCKPLTTKHHPNLEITNGSLAQIRKLLSYLKHQNTDSKCKIKTNLKRKKGTIHRKRKIHKNQIFCCIYHCLRNDKTHMNPRVVRQCFERKEGSTVHKTKREEKRRRNKVIIRSKRDKMQTQQ

SEQ ID NO: 240823 - protein, 39 aa, Glycine max
  unsure (1)..(39): unsure at all Xaa locations
  Clone ID: PAT_MRT3847_59490C.1.pep
FXKKNHPLHLYMKSNITNDTLYKCISLTANIRHTNHLLY

SEQ ID NO: 240824 - protein, 83 aa, Glycine max
  Clone ID: PAT_MRT3847_59491C.1.pep
LICCDNCPSTFHLACLSTQEIPDGDWYCTNCTCRICGNLVIDKDTSDAHDSLQCSQCEHKYHEKCLEDRDKQEVAISDTWFCG

SEQ ID NO: 240825 - protein, 51 aa, Glycine max
  Clone ID: PAT_MRT3847_59492C.1.pep
IDFVETRGLSEWWFLCGSICLICVFYLFAWIECLLLPVTYILQLLLLIQIF

SEQ ID NO: 240826 - protein, 43 aa, Glycine max
  Clone ID: PAT_MRT3847_59493C.1.pep
RSGIPSRPPYVQPLPQHYIRLTGLLLSHYIVDNTTQVGPIIII

SEQ ID NO: 240827 - protein, 49 aa, Glycine max
  Clone ID: PAT_MRT3847_59494C.1.pep
GCMFILFNCEWFFASFLVYEINVLIRKKLLEHYPNPIRFGFCDLDVNLY

SEQ ID NO: 240828 - protein, 81 aa, Glycine max
  Clone ID: PAT_MRT3847_59495C.1.pep
KKPSGGIVYSPSQLITCEHGIDQTGKRNQKIVSNDIIQLKPHYNKLHNPTSLPYNKPISQSLYLYSLCSAVWLFPPLSDIA

SEQ ID NO: 240829 - protein, 84 aa, Glycine max
  Clone ID: PAT_MRT3847_59496C.1.pep
NKTSYPHAFTVYSSHSLLKNAIKRFAFVCLKATATVLPLTPRLVFQGGILTPAGSRLISPLETHFICMDAPGCLLILDICMEKP

SEQ ID NO: 240830 - protein, 206 aa, Glycine max
  unsure (1)..(206): unsure at all Xaa locations
  Clone ID: PAT_MRT3847_59497C.1.pep
VYASETRKLVVFYINYVIYKLSRIGLQNVEGKWIHDFFLTLATCNTIVPLVXSVDTPDPDVKLIDYQGESPDEQALAYAAAAYGFMLIERTSGHLVIDIHGXRQKFNVLGMHEFDSDRKRMSVILGYPDNSVKVFVKGADTSMLNVIDRSFKMDLVRATEAHLHSYSSMGLRTLVIGMRDLNASEFEQWHAFFEAASTAVFGRAAM

SEQ ID NO: 240831 - protein, 190 aa, Glycine max
  Clone ID: PAT_MRT3847_59498C.1.pep
PDLVETWTKGFGFIPVDDIERQRLNKINLMVFPGTVLLVKSLHWKEKIEAQTGLCDQSTLATDESIKAGICSEGMAISESMAQDIGNITTNKGEAKSEHEPVDGKNQSDYEAGSETGRDDKTQAVDTALEAKESTEISSFSKEEKISYLEVSGGSEKSIEEKNVKELRTSNNAEMANESVQQSSENCADK

SEQ ID NO: 240832 - protein, 134 aa, Glycine max
  unsure (1)..(134): unsure at all Xaa locations
  Clone ID: PAT_MRT3847_59499C.1.pep
LYKLQRDLELDLDKAAELEHVLAMLHDMFAEELGAKIKDYGIDYAETKNYIYDPYPDNXMFKTIIDTSSVSPGFMRPXTGHGIVHNIKDXYNDNGNKLAFTVAQIGQAIGHEISTELGLLQVLEFTLADIEHYI

SEQ ID NO: 240833 - protein, 99 aa, Glycine max
  Clone ID: PAT_MRT3847_5949C.1.pep
DLSGTLSMTVSTTSHTYIHVYMDVMDDVLDKVRNNCGTGEEAVKELLTVLESMMKQAITQLGPILRSIDSNTAADATTTAAHALNDHHDVTYEDATATD

SEQ ID NO: 240834 - protein, 62 aa, Glycine max
  Clone ID: PAT_MRT3847_594C.1.pep
PPILNCRAFVSRPEARILSWNGDECPPHALSEHGFEHHTVKDYSLAHAPFSGCNNAGGHCAA

SEQ ID NO: 240835 - protein, 66 aa, Glycine max
  Clone ID: PAT_MRT3847_59500C.1.pep
WCIPNHFWPVLCLTRKSAKDPHPHVVVTNGSTTLINRSLGASDKVMAFGMTVNRECSHHSYPPPCI

SEQ ID NO: 240836 - protein, 378 aa, Glycine max
  unsure (1)..(378): unsure at all Xaa locations
  Clone ID: PAT_MRT3847_59501C.1.pep
MSSSNSKTQTQTPSSLSLCTSKPQEGNMALESQPQKNKYGHGVFGDVYSIIKEMEIDHHNNSTFDFQFPPITNFLGSREVREFISGALSGAMTKAILAPLETIRTRMVVGVGSKNIAGSFIEVIEQQGWQGLWAGNMINMLRIVPTQAIELGTFECVKRAMTSLHEKWESNEYPKLQIGPINFNLSLSWISPVAIAGAAAGIASTLVCHPLEVLKDRLXASPRLXKTTEGAIRNIYKDGGVGAFYAGISPTLVGMLPYSTCFYFMYDTIKESYCRTKSKKSLSRPEMLLIGALAGFTASTISFPLEVARKRLMVGALQGKCPPNMAAALSEVIREEGLKGLYRGWGASCLKVMPSSGITWMFYEAWKDILLVQNGNPL

SEQ ID NO: 240837 - protein, 177 aa, Glycine max
  Clone ID: PAT_MRT3847_59502C.1.pep
FEWLTWPQRKNIILGVARGLAYLHYEIKPPIYHRDIKATNILLDSEMNAKLADFGLAKQGSEDQSHLTTKVAGTYGYVAPEYALYGKLTEKSDVYSFGIVILEIMSGRKVLDALNSSADSITDWVWTLVESGKKGEIFCESIREGPVKVMERFVLVGMLCAHGVVTLRPTIVEALKM

SEQ ID NO: 240838 - protein, 70 aa, Glycine max
  Clone ID: PAT_MRT3847_59503C.1.pep
QGPKKFTKRIPCNSRSYDTGFFPSPFWKEIGSVLANNSKSLISEVCPSVNFLFCYPTKKKNWSYISGHKI

SEQ ID NO: 240839 - protein, 130 aa, Glycine max
  unsure (1)..(130): unsure at all Xaa locations
  Clone ID: PAT_MRT3847_59504C.1.pep
PEITLEPRDFMGQPTKKLGPRLIEIFPGGDANYLNRALMGWVRKDVIKHXTALKGIFQPGLPPEKKVPGFWFSTGLKIGTSSITLALRLANLYLGGLRTPAGVWLSSLRPXTPTSWGTTPGGWVLGAGPR

SEQ ID NO: 240840 - protein, 286 aa, Glycine max
  unsure (1)..(286): unsure at all Xaa locations
  Clone ID: PAT_MRT3847_59505C.1.pep
SSRIGSREDGKLKLRLGGVATGDSWISXPEDFVFSWGPLRHLLARLVVLARHXSVSLAERCRPPLGVAHGVGAPVSWAALVHGVVMRPRIQDFYNLLEDAGGDDIAAMELGSYEKLSMEKYSRYLTSMRSRSSSPGGDDDLDKLLNGVIKKKLKIIPENVTWGGQSGDVFNYLAGDFMRPRINEVDELLTKGVNVTVYNGQVDLICSTKGTEAWVHKLKWEGLKIFLAKDRTPLYCGSDKSTTKGFAKSYKNLYFYWILKAGHFVPTDQPCVALDMLGAITQSPAT

SEQ ID NO: 240841 - protein, 200 aa, Glycine max
  unsure (1)..(200): unsure at all Xaa locations
  Clone ID: PAT_MRT3847_59506C.1.pep
AFPIAVVASGIXMLHPKVGDLILAHLHKKCPYSVPFYPAFKEGMALEDYQRMLGYQVTDSKVEQQDNFLKRMSGMIRLYAAIIQLQWPYGNRQEAHPHGLNHGWRWLAQVLNMEPLSDVTATLLFDFLEVCGNALMKQYQVQFWKMILLIKEDYFPRIEAITSSGQMGSFIRLKQFLEKCLQRREIPVPRGFLTTSFWRS

SEQ ID NO: 240842 - protein, 172 aa, Glycine max
  Clone ID: PAT_MRT3847_59507C.1.pep
SSRIGSREDGKLKLILGGVALGDSWISPEDFVFSWGPLLKDLSRLDDNGLQKSNSIAERIKQQIEDGKFVEATDSWGELENVIATSSNNVDFYNLLEDAGGDDIAAMELGSYEKLSMEKYSRYLTSMRSRSSSPGGDDDLDKLLNGVIKKKLKIIPENVTWGGQSGDVFNYL

SEQ ID NO: 240843 - protein, 52 aa, Glycine max
  unsure (1)..(52): unsure at all Xaa locations
  Clone ID: PAT_MRT3847_59508C.1.pep
PGKNQHKLVKFCSEIGIPNVNAIRPEYAYKEDMHYLKRNSRSEQILXNLIYT

SEQ ID NO: 240844 - protein, 103 aa, Glycine max
  unsure (1)..(103): unsure at all Xaa locations
  Clone ID: PAT_MRT3847_59509C.1.pep
RKKFVLLXEXGTPAGFPFTVICNTISNETLMRYSYEKLLRQAKAPSMILQSFKNFVSLCVYGDDNLISVHEYVKPYFSGSKLKSFLAGHNITISDGIDKTSAF

SEQ ID NO: 240845 - protein, 62 aa, Glycine max
  unsure (1)..(62): unsure at all Xaa locations
  Clone ID: PAT_MRT3847_5950C.1.pep
HASAHAFVDFYLIRGLGIFINKYIXIITSDVAALIDEYARRAFQELNHVHEGQNALRYKKLY

SEQ ID NO: 240846 - protein, 81 aa, Glycine max
  Clone ID: PAT_MRT3847_59510C.1.pep
LSRGERLVTADGDIWIRTGLGKGKKIVFLTRVDPFPVALLAVLFGVKNEILSSNATNPMLTRLLENCKSLKYLVDECAITY

SEQ ID NO: 240847 - protein, 123 aa, Glycine max
  unsure (1)..(123): unsure at all Xaa locations
  Clone ID: PAT_MRT3847_59511C.1.pep
ASLSPSAVSSSRVCQYXTFLPKRVPNHSLTLAKLILVNTYLFLLSPLLLLQAALIILVWYSCAVVVRCFCVILQPRPGACGASRTTTLWCCRLYVYSYCKCLLRCYVCYASSSEAWSSGHWAQ

SEQ ID NO: 240848 - protein, 40 aa, Glycine max
  Clone ID: PAT_MRT3847_59512C.1.pep
EYMVGVKGRRVINGRADEHSRVERHYLHCHISREGLWMYL

SEQ ID NO: 240849 - protein, 95 aa, Glycine max
  Clone ID: PAT_MRT3847_59513C.1.pep
FAPGIVPGLHPNALMMVLPALVLPSRLAGAAFLTMFLLGTVVAMGSYPVFIGSCREALKNKVPRITEKLPWGFFFIAIALGFALIINQFFGFSLY

SEQ ID NO: 240850 - protein, 65 aa, Glycine max
  Clone ID: PAT_MRT3847_59514C.1.pep
MWVCSEAEIYPVGRFITSWKVPSGKDLLFVRPDAVFNGNKPISGGVPHCFPQFGPGPIQQVRVHL

SEQ ID NO: 240851 - protein, 73 aa, Glycine max
  unsure (1)..(73): unsure at all Xaa locations
  Clone ID: PAT_MRT3847_59515C.1.pep
FSTTTQSHDQYYKHIPVITHSYLNTAVVTHYXCSLDIISPYRXYWNPIMVLKHYQYXHLYTNFLNSSKIHFDF

SEQ ID NO: 240852 - protein, 114 aa, Glycine max
  unsure (1)..(114): unsure at all Xaa locations
  Clone ID: PAT_MRT3847_59516C.1.pep
TXAXXXQXXXAHXXXPPXXXXXXXXGXXXXXXXAXXLXEXXXXXXXXXNXGHXXXXYXPXXFFXXXGRPXXXXXXYXVXXXXXEXXEIXXXXAXXXXXXXXXEXIXELTYACMR

SEQ ID NO: 240853 - protein, 36 aa, Glycine max
  Clone ID: PAT_MRT3847_59517C.1.pep
YFPKLRTLIRKNHSLGNKNFHLGGFISGHQLNNPEV

SEQ ID NO: 240854 - protein, 71 aa, Glycine max
  Clone ID: PAT_MRT3847_59518C.1.pep
DGLYMQILSFGVTDSSIRKLVKLVLYPIVIVAVVVVVAPPLPSLQLWQQHQFQRHLIVDLINDYWPTSRYS

SEQ ID NO: 240855 - protein, 77 aa, Glycine max
  Clone ID: PAT_MRT3847_59519C.1.pep
EAKKKGLGKPKKNWRPPQTFGRGQIPPPGGGLNNFTKKTTFYYFFLGVPQQTPPIPKGGGIARSGHIQFFASSSGIK

SEQ ID NO: 240856 - protein, 524 aa, Glycine max
  Clone ID: PAT_MRT3847_5951C.1.pep
AILFQLVTGRTPFAGNNQIQLLQNIMKSTELQFPSDSQSLSFECKDLCQKLLRRNPVERLTFEEFFNHPFLAQKQTERDESLRNKSSSRMDGGFCSTVSDLRRTEENYQEDCLPFMLDDDSSGPEGSSSFSRKKSSMKSTYGFDLNAKLDKAESSSPISRFGSMTQRSENTTKRLDNHTISRNLTDPLESPEQLFASPYPKVMDSLENIDQEYVLVSGPTIDVSSLSVGASRPIHTPSRSGSLPQESSSTITRLSAPMPIVGVPTNSVCQIGSSGSQDSAPGTSLGSMDTGDEQPSAHCMTRVKSLQQCASSITDLVNEKMEAGKHLEAFSIQLVILAIWKQALHICHTQAASAMEGSPNQETSRYRRSTSRKHGSPDSEECLDGNTLGPKDILSQIESEFLREFEHAEELAKTIEPGNTEMPDAMETIFQSALAFGRHGGVEELMGEMESAAALYSKAVRLLVFLLVEGPSLILNPPFSLTNSDRYRLRNYIDILNNRQGYSRSQRMTLLKCDDSRGILKEKF

SEQ ID NO: 240857 - protein, 85 aa, Glycine max
  unsure (1)..(85): unsure at all Xaa locations
  Clone ID: PAT_MRT3847_59520C.1.pep
MTDGHLFNNITLXSRGGTNPGQSRLYTGRIISKRQCDGQLNEVDQSDIVELTWMNVPTSNQLEVEIKDGTFYKLTLSRDADDVSV

SEQ ID NO: 240858 - protein, 256 aa, Glycine max
  Clone ID: PAT_MRT3847_59521C.1.pep
MANALRVGSVISLCSLRNTRPHLPLLSNATRFRSKFPFFTLSSSPNPSGYPPFRTLSSSSASTDEAVTTEAITSNNASGEAENSIKDAAGLLDMRVGCILRAWKHDEADSLYVEEVDIGEPEPRIICSGLVKYIPLEHLQGKKVIVLSNLKPRNMRGVKSCGMLMAASDAKHENVELLFPPEEAIPGERIWFGTEDEKDNQPDAATPNQLQKKKIWELVQPHLKTDTSCIAMLGEHVMRTSVGSVACQSLQNANIS

SEQ ID NO: 240859 - protein, 88 aa, Glycine max
  unsure (1)..(88): unsure at all Xaa locations
  Clone ID: PAT_MRT3847_59522C.1.pep
HSYYKXLNQISPAMQCDKLFALKFLFSKKAEMELNRKVSNKTFSSHARYPLIHSATIFMSSHPCLLFHLFIKLTSNHSYKPLRLSGRV

SEQ ID NO: 240860 - protein, 90 aa, Glycine max
  unsure (1)..(90): unsure at all Xaa locations
  Clone ID: PAT_MRT3847_59523C.1.pep
PPPPPPPPPXPPPPPPPPAPPPPPPPXPSPQPRPPPPNPRXQXPPXPPPXXNPPPTGGKADPPPPKGGPTPPXXGPRPQDXPHPPPSKPP

SEQ ID NO: 240861 - protein, 63 aa, Glycine max
  Clone ID: PAT_MRT3847_59524C.1.pep
KRTHPLRRHEQTQPESDKRQSAHSFIETQPKLPPPITLRRAHHNTAWASPPLYRATTTPHRDP

SEQ ID NO: 240862 - protein, 46 aa, Glycine max
  unsure (1)..(46): unsure at all Xaa locations
  Clone ID: PAT_MRT3847_59525C.1.pep
DCLQITHSLQFLGFCYCFASVPPFSQKKRLXSFSSEPILRRRFLVN

SEQ ID NO: 240863 - protein, 66 aa, Glycine max
  Clone ID: PAT_MRT3847_59526C.1.pep
SFFTLLPSPGGGVIHSSCSKGIQQPFDLRKKQSFRKYRPNVETPVITRMSMSVQVASEFLFLSLFG

SEQ ID NO: 240864 - protein, 77 aa, Glycine max
  Clone ID: PAT_MRT3847_59527C.1.pep
LRHRLAIESLDSRIINATWCRVPLEFVKERVTHCICQCLLEELMKNWFTAGCMLDVGYENDKTLWLHKCDKIVIIFR

SEQ ID NO: 240865 - protein, 111 aa, Glycine max
  Clone ID: PAT_MRT3847_59528C.1.pep
RLFRVAGEKCQRKQHDPDFGCDFPTRNTKIAINPNLPHPFLSEPATPTKGLLVLGVGPKIGSPLPGVAREHKRPSRLGCKHREPEAPIPPLVGVHGMSDIEVLLMIFISAL

SEQ ID NO: 240866 - protein, 93 aa, Glycine max
  unsure (1)..(93): unsure at all Xaa locations
  Clone ID: PAT_MRT3847_59529C.1.pep
SHLSVNQGLATLAFFGVGVNLVLFLTRVMGQNNAAAANSVSKWTGTVYILSLKGALLRDSYWGRXKTCALFQVIFEILRNNLSISFTFPNSPL

SEQ ID NO: 240867 - protein, 97 aa, Glycine max
  unsure (1)..(97): unsure at all Xaa locations
  Clone ID: PAT_MRT3847_5952C.1.pep
MGKEKVHISXVVIGPVVSGKSTTTGALVYKLGGLAKRVVXRFVKXAAVMNMRSFMFAWVLGILKAVRVRGVPFGVALWRFVSLCVIVQFFGAPGPSG

SEQ ID NO: 240868 - protein, 41 aa, Glycine max
  Clone ID: PAT_MRT3847_59530C.1.pep
NAFSAGVNCRGHYRCPNKSSLSMRAVLFLSRLLPSFNYTEK

SEQ ID NO: 240869 - protein, 104 aa, Glycine max
  Clone ID: PAT_MRT3847_59531C.1.pep
SLDLLNSTRFFVFLKQGICLCVLSLKHQTFLNHSDIYFSFGVHAFICWLAIQLIQIAPTICNHNANLQISLCGCIVLVDHEPYRGRRRRIVIWLNICSCVLHGG

SEQ ID NO: 240870 - protein, 58 aa, Glycine max
  Clone ID: PAT_MRT3847_59532C.1.pep
DAHIHIKIKTIVNIRFKCMSLRLTLQMSMEYGYSGIKYDNILHSTVSGGISSLYCLVT

SEQ ID NO: 240871 - protein, 260 aa, Glycine max
  Clone ID: PAT_MRT3847_59533C.1.pep
MDHQGHSQNPSMGVVGSGAQLAYGSNPYQPGQITGPPGSVVTSVGTIQSTGQPAGAQLGQHQLAYQHIHQQQQHQLQQQLQQFWSSQYQEIEKVTDFKNHSLPLARIKKIMKADEDVRMISAEAPVIFARACEMFILELTLRSWNHTEENKRRTLQKNDIAAAITRTDIFDFLVDIVPREDLKDEVLASIPRGTMPVAGPADALPYCYMPPQHPSQVGAAGVIMGKPVMDPNMYAQQSHPYMAPQMWPQPPDQRQSSPEH

SEQ ID NO: 240872 - protein, 80 aa, Glycine max
  unsure (1)..(80): unsure at all Xaa locations
  Clone ID: PAT_MRT3847_59534C.1.pep
RGGRQIFXRTPTGKTIPLXGRRSAPFVNVKGKIQAKKGIPPDHQGLNFAGKQIEDGRCLADFNIQKESTLPLVLRLRGGF

SEQ ID NO: 240873 - protein, 53 aa, Glycine max
  Clone ID: PAT_MRT3847_59535C.1.pep
IFVRSVLRDVRIYLSDVQLGNSLRIVRLNVMIVGIGKVQSEIASLGHTGNILG

SEQ ID NO: 240874 - protein, 40 aa, Glycine max
  Clone ID: PAT_MRT3847_59536C.1.pep
VVLENLSYLLHLSATWDMDLDGFEFKKKKKKKKKKKKKKN

SEQ ID NO: 240875 - protein, 440 aa, Glycine max
  unsure (1)..(440): unsure at all Xaa locations
  Clone ID: PAT_MRT3847_59537C.1.pep
LIVYVVIPVSYWGLNVYNANRFPIFSSHLFTAQGQKYNIPKIVDNHFELNVAEYEKQGSSRFGSSFALTYGFGFATIASTLTHVVCFYGREIMERYRASSKGKEDIHTKLMRRYKDIPSWWFHSLLLVTLLVSLALCIFLKDQVQMPWWGLLFAGVLAFGFTLPISIITATTNQTPGLNIITEYVFGLIYPGRPIANVCFKTYGYISMAQAVSFLSDFKLGHYIIHFVHTCIYVXFIGTMLAGTINIGVAWWLLNSIKNICHDDLLPEGSPWTCPGDRVFFDASVIWGLVGPKRIFGSQGNYSAMNWFFLGGAVGPIIVWLLHKAFPKQSWIPLINLPVLLGATGMMPPATPLNYNAWIFVGTIFNFFIFRYARKCWWQRYNYVLPPALDSGVAFMTVLLYFALGLENKSLNWWGNDGEHCPLAVCPTAKGVIVDGCPAN

SEQ ID NO: 240876 - protein, 51 aa, Glycine max
  Clone ID: PAT_MRT3847_59538C.1.pep
FPFERNENREHRLPELKTGFLLICGLFLKVTKITLTAGRTIAEGYDFPPLG

SEQ ID NO: 240877 - protein, 80 aa, Glycine max
  Clone ID: PAT_MRT3847_59539C.1.pep
RLREDDRRGLLQKPLSLPANGVSLSCLRCMSSGVPPFQDNIGVQEERQHDHESDSLEVPPSLMRARILLLTNQIAPFNLL

SEQ ID NO: 240878 - protein, 87 aa, Glycine max
  Clone ID: PAT_MRT3847_5953C.1.pep
GMCGSRNCCITMQKVFVKEFRFKASASASTTATATTSILPPLSLRSHEKHKFVIFNLVFADEFVSLFFGEVKISLVIIIKLSLHFWS

SEQ ID NO: 240879 - protein, 92 aa, Glycine max
  Clone ID: PAT_MRT3847_59540C.1.pep
HWPFSAYATGHSGHAYSYCLQNSPEKRTCLSSDTVLTSETARNGEGRLAIVIITHKFTPLETLMLKRDSISCRCHHTLCDRQQYAEWDPPPD

SEQ ID NO: 240880 - protein, 78 aa, Glycine max
  Clone ID: PAT_MRT3847_59541C.1.pep
VYIHYYGEITLSCLSLHLYLFRGLSFKQYILLNKPYYICPSSMHFYHPLDLFRVGVFWHAIISNLQINIHIPRKITSS

SEQ ID NO: 240881 - protein, 55 aa, Glycine max
  Clone ID: PAT_MRT3847_59542C.1.pep
LLPFISFYLTRKKRIKYSERSDNWKNMLWQATSVKVRWTYNLSRRPISVTNEGKK

SEQ ID NO: 240882 - protein, 587 aa, Glycine max
  Clone ID: PAT_MRT3847_59543C.1.pep
LEESFSAAASKASAAPSSAGITPPAVKINETDKMWHYQDPSGKVQGPFSIVQLRKWSNTGYFPADLRIWRTTEKQDDSILLTDALTGNFSKEPSMVDKAQSVHDLHYPSSYSRKSPQQGIEGQVGERLSLDQNGGSWNSHSTLGSPGQTTGGSWRSKDNMNSLANRTSPLAVEVPKNPANGWGSDAGVRNDATNLPSPTPQTTPGGTMGLAFENKWSPTPVQLPGSLLGNSFPGSHGGLQASVAVHPEHAVQNAEKGSSSQPGISSASTDNNKLHPQATAVAPVVASGVGIKMTGANMQNQVVSSHNSHAETQGWGSAGVPKPEPLAWGGASSQRIEPNNPATMPAQPASHAPWGDASSVQNTASFNTGNPIASLPTPGFLGMTAPEPWRPPASSSQSNTTAPSPAQPNMPWGMGMPGNQNMNWGGVVPANMNVNWMPAQVPAPGNSNPGWAAPSQGLPPSQGLPPVNAGGWVGPGQGRSHVNANAGWVGPGQGLAPGNANPGWAAPTGNPGMWGSEQSHNGDRFPNHGDRGAQGRDSGYGGKSWNRQSSFGRGGSSRPPFGGQRVVCKYYESGRCRKGTSCDFLHT

SEQ ID NO: 240883 - protein, 148 aa, Glycine max
  Clone ID: PAT_MRT3847_59544C.1.pep
FYRKAWRSKGLLTIGSTCWFPPQLWLLLWPHWGGAPPPFRVFNIYQKASAGRPFLVLSPRPKGICSATGKFWTPPGFPLPQVLKTRRRIYFLGPRYIIFPQLASGKLKRLFALYTYKRNKKKCTAKQKKKKNHNQPPKHKQKKKKKTK

SEQ ID NO: 240884 - protein, 67 aa, Glycine max
  unsure (1)..(67): unsure at all Xaa locations
  Clone ID: PAT_MRT3847_59545C.1.pep
XXVWXRXQWIVXXSXDXNFPCXEMXSSDPFXLHXXXXXSFFCSFXLCTLLLXXLLCYDLLMSTSFFT

SEQ ID NO: 240885 - protein, 162 aa, Glycine max
  Clone ID: PAT_MRT3847_59546C.1.pep
EYERGWGCPANTNVNWMPTQVPAPGNSNPGWAAPSQGLPPVNAGGWVGPGQGRSHVNANAGWVGPGQGLAPGNANPGWTAPVGNPGMWGSEQSHNGDRFPNQGDRVTRDSGYGGKSWNRQSSFGSGGRGGSSRPPFGGQRGVCKYYESGRCRKGTSCDFLHT

SEQ ID NO: 240886 - protein, 166 aa, Glycine max
  Clone ID: PAT_MRT3847_59547C.1.pep
MSRNLTDYAIIPSLASGMLQNFTDCTLTLPFNSRHVAKLHGLSNDGCQVPRSGQARVASQQTDGPRTKLGYDKYILVVVDYVSKWVEAMATSRNDAKTVVKFVKKKIFARFGVPRILISDGGSHFCNTQLQKVLSQYHVNHRVASPYHPQTNGQVEVSNRELKRTR

SEQ ID NO: 240887 - protein, 87 aa, Glycine max
  Clone ID: PAT_MRT3847_59548C.1.pep
KFKNALLFSEDHCYFFSSSIPVDPPSFRLLPDTASQALVFFRTPRAKLLLLLRLLREQPSRLVSLTLHCFYYPVLIQQWNLRIVTLG

SEQ ID NO: 240888 - protein, 278 aa, Glycine max
  Clone ID: PAT_MRT3847_59549C.1.pep
MLISRSVQDRFGSNMDGKSPEKLILVNREPNGVALVTINRPGSLNSLTRPMMVDLAQAFKRLDRDELVRVIILTGSGRSFCSGVDLTAAEDVFKGDVKDPESDPVVQMELCRKPIIGAIRGFAVTAGFEIALACDILVAAKGSKFMDTHARFGIFPSWGLSQKLSRVIGANKAREVSLSATPLTAEVAEKLGFVNHVVEEGELLKKSREIADAIVKNNQDLVLRYKAVINDGLKLDLGHALSLEKERAHNYYNGMTKEQFKKMQEFIAGRSSKKQSKL

SEQ ID NO: 240889 - protein, 65 aa, Glycine max
  Clone ID: PAT_MRT3847_5954C.1.pep
SFRIDKCRVLFSQATIKRFRLIFPMANFLPSRDLSGSRLASSFAVSSGAACSAPHATSQIAAKTK

SEQ ID NO: 240890 - protein, 252 aa, Glycine max
  Clone ID: PAT_MRT3847_59550C.1.pep
MAVCSIMLLLLLFTLLIATTKTQPMSKPNCPTNCGSVTVPFPFGMTEDCSLDASFLVSCNRTSSSSHVLFLPQTNISVLNISLNGELQISWPVASDCYAERGKLVSQTFQDINLTTFQVSSNRNKFTVIGCDTLGVVVGIDSKGRNYTTGCVSLCNRLQDIETNGSCSGTGCYETSIPRGLSGFSYGSGSVVDFNLCGHAFLTDLVNFDKTTFPVGMDWVVKNQTCQEAMKKVSSYPCRAQNSTSKCYHSLV

SEQ ID NO: 240891 - protein, 82 aa, Glycine max
  unsure (1)..(82): unsure at all Xaa locations
  Clone ID: PAT_MRT3847_59551C.1.pep
RNTASSQAMAMSYNGNPCSDAWRKEYLXRAGFHCEVIGVTGWPATTVHDVRDTIERLISFXECWSNTYGGLNSHTGYWLNLW

SEQ ID NO: 240892 - protein, 107 aa, Glycine max
  Clone ID: PAT_MRT3847_59552C.1.pep
PIGCFAVFTTRMARESNCLQGYDAVLYAKYTNSPRSMTGSRTFCTAEEVGLRPLRPRMLPRRLLPRRITCHWHRQILCRRCNHCRADLCMQHRYHVRASCKTSLRCT

SEQ ID NO: 240893 - protein, 77 aa, Glycine max
  Clone ID: PAT_MRT3847_59553C.1.pep
RSNAIRINTSAYTLTCYAVELVNTAPKIVRIRLNMSPSSTADIMATPDAAPWQLNVDTYDAFIIRNNNFYTLLSLQL

SEQ ID NO: 240894 - protein, 82 aa, Glycine max
  unsure (1)..(82): unsure at all Xaa locations
  Clone ID: PAT_MRT3847_59554C.1.pep
PPLPPLQQDFCLVGQNRGGRLVQLFQGPAVKGHQLLAVSLGKKKTXLGAQKPTPSPRGVGDSLNQLGRQVFPLENGPLGPPQ

SEQ ID NO: 240895 - protein, 302 aa, Glycine max
  Clone ID: PAT_MRT3847_59555C.1.pep
MSNTTFRPFTGSSRTVVEGEQAGAQDDMSLLQSLFSDKSREEFAKECKLGMYTNLSSNNRLNYIDLVPKNTGSRALNLFKSEYEKGHIPSSGVLSIPRVLVFLVRTTTVTESGSVTIRLVDLISASSVEILEPVDGTQEATIPISSLPAIVCFSPSYDCPMQMIGNRHRCFGLVTQLDGVISSGSTVVMSHAYWSANFRSKPNNYKQYAPMYKYVEPFDRLKRLSRKQLKNYVRGITNQSVNHGYLLGKPLLKTDEQDPEMIVLEEESLTPTDSNGVGKDKIAVTAKSVAGLPTASMSINRR

SEQ ID NO: 240896 - protein, 62 aa, Glycine max
  Clone ID: PAT_MRT3847_59556C.1.pep
SRFCQEFEDHISHVVTLLGIVPLAQQVIGLDNGYHARCTFTAQEIDSFHALFAFTRTVVGDT

SEQ ID NO: 240897 - protein, 240 aa, Glycine max
  Clone ID: PAT_MRT3847_59557C.1.pep
CPSAVSTQNSLGCSPPHQPPTLEDISCSSCVEKSKKAPCGTANGPVNTEIKANGPHLYSSPTDSTDPRRLPGANTPLPGLTHRQGWPRPLTPPSAGGLQNHVGIIVKTENATGPSSCPQRSLVPVPSLPPSIPSSCASIENTSTLHRKTVQSQIGPSSTESRPLGSPPNATRVLTPPQAAGDSILATGANQRFCSPAPSSDGKVSPGTLSIGSALTVPSFPANSTAMVDLTNSLRAFMDV

SEQ ID NO: 240898 - protein, 102 aa, Glycine max
  unsure (1)..(102): unsure at all Xaa locations
  Clone ID: PAT_MRT3847_59558C.1.pep
VPTVDVSDVDRTVRLDKPASYEHIMSAIKEESEGKLKGNVGPTXDDAESLNYVGHNRSSRFNAKXAGISLNDTFVKRVSWYATESGNSSRVMDLSDRKASVA

SEQ ID NO: 240899 - protein, 60 aa, Glycine max
  Clone ID: PAT_MRT3847_59559C.1.pep
KRTRSSLNLTRNPISNRRVFSNYTKSGKENDSRSLSPAQRVIFFPLRNRPHSSRKTLRDS

SEQ ID NO: 240900 - protein, 55 aa, Glycine max
  Clone ID: PAT_MRT3847_5955C.1.pep
IPGRVPFLPHNFSSFSTLKQNDNIGPISRHMLHLILIILHLYIQNPNTLNSKIKK

SEQ ID NO: 240901 - protein, 54 aa, Glycine max
  Clone ID: PAT_MRT3847_59560C.1.pep
PIAISMVYPNQIMQHANTSSRGYILGYVVLHTILDMSMTQKFDLYLELNLERSR

SEQ ID NO: 240902 - protein, 47 aa, Glycine max
  Clone ID: PAT_MRT3847_59561C.1.pep
YALLEKNETIPFYMPQIASFKPARVGMRMHIFSTKNLFLHFATEYLH

SEQ ID NO: 240903 - protein, 37 aa, Glycine max
  unsure (1)..(37): unsure at all Xaa locations
  Clone ID: PAT_MRT3847_59562C.1.pep
KISXKRLLRRKINPRSPVSITEFLXVCXXLSXASETQ

SEQ ID NO: 240904 - protein, 81 aa, Glycine max
  Clone ID: PAT_MRT3847_59563C.1.pep
AGFFVALSFVSPIFLFLVGLSVITWPPTFLSLYSVYVYLFGLISVQFMVRNFWTSFVGPVLFPPNDFAFSTSNFLCIFCFS

SEQ ID NO: 240905 - protein, 681 aa, Glycine max
  unsure (1)..(681): unsure at all Xaa locations
  Clone ID: PAT_MRT3847_59564C.1.pep
PRVRTAFRVECFTVELTRRVDEGGVKDVLIDGAHVKGSLIERKAEARGQLYGDHHDVKKKLEKPGLTVVDHIGPGRVPKAIEGEQVAAGWPAWLSSVAGEAIKGWIPRSANTFERFHKIGQGTYSTVYKARDVINQKFVALKKVRFDNLDPESVKFMAREIHVLRRLDHPNIIKLEGLITSRMSRSLYLVFEYMEHDLTGLASNPDIKFSEPQLKCYMQQLLSGLDHCHSHGVLHRDIKGSNLLIDNNGVLKIADFGLANFYDPHHNVPLTXSRVVTLWYRPPELLLGASNYGVAVDLWSTGCILGELYRGRPILPGKTEVEQLHRIFKLCGSPSEDYWCKLRTPHSTVFRPPHHYRRCVAETFKEYPSAATRLIETLLSLDPTLRXTAATALKSEFLSFQDFLGDRTMLPKYSSSKLIDTKLWEEATRHGADREKEQKFRPGGRQEKEPQTFILSKDSADSCISMQQGQRLPNSRSRNEFFNPHREPVSGHLVFPQKQSEDHKETLNYFSGPLYQRPLHSGPLVPGYGCEMVGREAGERRPHVSNKVNLPKLSGLVASRTSSLSGDQKENPVPSRPRETIEVQISLESTNGSESRRRHDTKHHSQRIDPRKIENGKVSTETLIQDGHGSMGNNIYHLSGPLLVSSNNIDQMLKERDRKIQEYSRRARMYKSGEIAHAKQN

SEQ ID NO: 240906 - protein, 68 aa, Glycine max
  Clone ID: PAT_MRT3847_59565C.1.pep
NYLNCIHVQIDEAKFFNPQRIPKIWMLCRIWIENHDSLILLSHNVQKAGSCFNHAPKNFLQTIFYAFN

SEQ ID NO: 240907 - protein, 180 aa, Glycine max
  Clone ID: PAT_MRT3847_59566C.1.pep
MFIKEKKREMLVNGGVSGSSSRASNLDGAVHGGVKGKRSERERNQSRDQSGQNSIGRAGRMSLDSSQNENKPKAKKQKSTASGHDRIMEAKESARLPIHDTINNDSKDGATISGSIDTSQIKESNDFGNLPLPDLSSIEEFGGAQDLSSWLNFEEDGLPDHDSIGLDIPMDDLSDLNMLM

SEQ ID NO: 240908 - protein, 80 aa, Glycine max
  unsure (1)..(80): unsure at all Xaa locations
  Clone ID: PAT_MRT3847_59567C.1.pep
MVKPKQQKKLYQKKQPHPQIKKQGKQVGTSQFRTQLDGLGLRIVEVTADGNCFFRAVADQLEGNEEEHGKYRSMVVXHIA

SEQ ID NO: 240909 - protein, 132 aa, Glycine max
  Clone ID: PAT_MRT3847_59568C.1.pep
QSGQNSIGRAGRISLDSSQNENKPKAKKQKSTASGHDGSRQLRDDDRWAIHDAINNHSKDGATISGNQDTSQIKESNDFGNLPLPDLSSIEEFGGTQDLSSWLNFEEDGLQDHDSIGLDIPTDDLSDLNMLM

SEQ ID NO: 240910 - protein, 70 aa, Glycine max
  unsure (1)..(70): unsure at all Xaa locations
  Clone ID: PAT_MRT3847_59569C.1.pep
LLETSGFKRTLEFSEPFVFRGIAIPQNRLIVVDRRXRVGCMNWSGSWIISRLNLITSYGCWFFSFWLIAL

SEQ ID NO: 240911 - protein, 113 aa, Glycine max
  Clone ID: PAT_MRT3847_5956C.1.pep
GEVVKADSVLQKAAQQSQMKPIFSTYLTILEQYAKRGDIHNSEKIFLRMKQADYTSKAKMYQVLMNAYINAKVPAYGIRDRLKADSIYPNRNLVNQLVQVDGFRKNPVCDLLD

SEQ ID NO: 240912 - protein, 230 aa, Glycine max
  Clone ID: PAT_MRT3847_59570C.1.pep
MSSNPVILQSVNLTKYILETSVYPREEETLKELRKATAGHPWGFMGAAPDAGQLMTLLLKLLNAKKTIEVGVFTGYSLLLTALTIPDDGKIIALDPDREAYEIGLPFIKKAGVEHKIDFIESPALPVLDKLLEDPSNKESFDFAFVDADKDNYWNYHERLLKLVKIGGLIIYDNTLWGGTVAWPEEDVPVPKRKLRQATLAFNKAIADDSRVEISVVSIGDGFTICRRAH

SEQ ID NO: 240913 - protein, 65 aa, Glycine max
  unsure (1)..(65): unsure at all Xaa locations
  Clone ID: PAT_MRT3847_59571C.1.pep
YFSLSLSHSNLMFSFHISYYLXKXAXXXXXXISXXKPPKAQEPSTRKTPHHTKPEXQTRGRPTKP

SEQ ID NO: 240914 - protein, 259 aa, Glycine max
  Clone ID: PAT_MRT3847_59572C.1.pep
NDPRLLKEDTLNNELSSSRRDMQLSVRDALNSKKDEPQKDSDAGSMACLNFSDDDEADFDARMRMQILKKRKELGDLPPKPKLRNAGRSSPENHDTSSAARSNAVSVDEDQPKVEKLSLKKKGVGSEARAERMSNADADLQLLNQAERGRQLQKQKKRRLQGREDEVLAKLEKFKNSLSAKATPPTDESEDVSNEELSDWKGVSLKFAPQTGKDRMSRNEDPNDYVVHDPLLEKGKEKFNRMIAKQKRREREWAGSSLT

SEQ ID NO: 240915 - protein, 174 aa, Glycine max
  unsure (1)..(174): unsure at all Xaa locations
  Clone ID: PAT_MRT3847_59573C.1.pep
NIEDLLICQKLVQSGADATAKTSMRAHRVQTDILVAINTGIQGFIHASISLSQTSLSEIFGCTRCRNIYCQNQLAAEDCTCETCTNGDGYCSLCMCVICSKDDFEDNTCRLIGCDKCSHWTQTDCAIREQHISMGPSAENGARASDMVFRCQACNRTCELLCXVKDAFQHCAPS

SEQ ID NO: 240916 - protein, 63 aa, Glycine max
  Clone ID: PAT_MRT3847_59574C.1.pep
LNGYHYVKNLKYFPIAMVHFLGDLALLFIFHKYGPEYPAILHSVWFISTELKIVRKPGRMPGS

SEQ ID NO: 240917 - protein, 83 aa, Glycine max
  unsure (1)..(83): unsure at all Xaa locations
  Clone ID: PAT_MRT3847_59575C.1.pep
EHRLAISIELSKVLSPPWVKQQRQQDKNVGCFGLEGVCVSKPHGGNNKSDAIXVLGGGVCIGEYWCGRGNSKSIGVCIGRTWW

SEQ ID NO: 240918 - protein, 48 aa, Glycine max
  Clone ID: PAT_MRT3847_59576C.1.pep
FVHLSITQINIKFLFSKKKKKKKKKKKKKKKNKKKVENKQNKKKKKRK

SEQ ID NO: 240919 - protein, 88 aa, Glycine max
  Clone ID: PAT_MRT3847_59577C.1.pep
QGCTRLRVQVSTPSCIRPHVWHTRDCDQRQMTNCDIHVRHCRPWRESSYNELGMVIAHRHRDDASTSLRGLLVKNQVNEASSYNRHSC

SEQ ID NO: 240920 - protein, 100 aa, Glycine max
  unsure (1)..(100): unsure at all Xaa locations
  Clone ID: PAT_MRT3847_59578C.1.pep
MAAFVSTVGAVNRALLNLNGSGAGASAPTSAFFGTSLKKVIASRVPYNRVFGGSFKIVACRTXKEIDETQPTDKDTWKGVAYDILEHPQELTKGKGLGDS

SEQ ID NO: 240921 - protein, 162 aa, Glycine max
  unsure (1)..(162): unsure at all Xaa locations
  Clone ID: PAT_MRT3847_59579C.1.pep
MDPAAMMNAAANTASYHLSEIWHFPPPNAPDALGLRRAHFAPGPTRHAVPGRDLASIAPKKRRQAEEEEVESTRGASTTNAVDEGCGDGKRVKTSESGKGEGESCSXKPAKHSGKPPSEPPKQDYIHVRARRGQATDSHSLAERARREKISERMKIPSDLVP

SEQ ID NO: 240922 - protein, 57 aa, Glycine max
  Clone ID: PAT_MRT3847_5957C.1.pep
QIVSHSPLRILNSLERCSIRPFSQTRQLGKGVYFAIRVILQGHAFFQVVHCKPLTCN

SEQ ID NO: 240923 - protein, 89 aa, Glycine max
  unsure (1)..(89): unsure at all Xaa locations
  Clone ID: PAT_MRT3847_59580C.1.pep
HTYEPQQYPGSTKNCPWCLAPISNRYFLTLNTXNKYQYAYNSGEGADVYAVDTGTNTKHVTLMFCQVRLTITTVCTPGWQLPQNPLLQY

SEQ ID NO: 240924 - protein, 72 aa, Glycine max
  Clone ID: PAT_MRT3847_59581C.1.pep
KKKSERLKEFIFFTQGVLVVQFGSIFRQNVIQIKHKINIRFNLNITSNLNQTNYLLFDSIWFWGLFFFSLFS

SEQ ID NO: 240925 - protein, 106 aa, Glycine max
  Clone ID: PAT_MRT3847_59582C.1.pep
MRMSRCATITAPEMPPPSTGLPIIVPQIPAPLAPQPSQSQPSEPATAVQATRVSSVAVTETSTTSRIEVCMGGKCKKSGALALLQEFEKAVGTGGAVVGCKCLGKC

SEQ ID NO: 240926 - protein, 30 aa, Glycine max
  Clone ID: PAT_MRT3847_59583C.1.pep
QASRQNQTNISNSRLKCPSLCSKLRITQNA

SEQ ID NO: 240927 - protein, 177 aa, Glycine max
  Clone ID: PAT_MRT3847_59584C.1.pep
IVQVKKIVKSSEMERLPLEICMKIFYLLDYQHLAVAQQVCRKWKLVASENALWSDLFKERWGEDHAAFYAPVGSKSWKDVYEVQDRCDRIGVGLKIIREGIDYYLIHQGEIQRHLGSRKNHEKEIGHCSNTLNSESNFNGEGSLAEERSCRGILDRILFFIGDLEVASAEAKRSRVI

SEQ ID NO: 240928 - protein, 73 aa, Glycine max
  Clone ID: PAT_MRT3847_59585C.1.pep
PVGLTRYPSSIAVSYARTVIFGDSQCSRLDAIALDPADKCSHDASLIVAQCMSIEQIPSSDGASLMQAHLLCN

SEQ ID NO: 240929 - protein, 52 aa, Glycine max
  Clone ID: PAT_MRT3847_59586C.1.pep
MGRMHSGGKGISGSALPYKKTPPSWLKTTPSEVAEHVMKLSKKGLTPSQIGI

SEQ ID NO: 240930 - protein, 99 aa, Glycine max
  Clone ID: PAT_MRT3847_59587C.1.pep
MHHALFHHSHAHHPNHHHIPYPHCKILYPCPFHDHVLFLASLVSLLPLETTRHVSMITITLSKKELDTSSAGYQHPLPVDQVKPLNEYEEEGGSSSHPW

SEQ ID NO: 240931 - protein, 33 aa, Glycine max
  Clone ID: PAT_MRT3847_59588C.1.pep
FWVINKKLVIINKTYIPFFTFSKQIYFSPHHKN

SEQ ID NO: 240932 - protein, 45 aa, Glycine max
  Clone ID: PAT_MRT3847_59589C.1.pep
RLQVRRGYPLSLSEKKKKKKKKKGGRFKGSKLTYPCLQRNSFLIG

SEQ ID NO: 240933 - protein, 83 aa, Glycine max
  Clone ID: PAT_MRT3847_5958C.1.pep
FLIPKVQAPLVVKTGVVRGSPKQKKLQDIPPTLFPPLGPKNLETLKKLPEQFQKQALKRALGSPPPQKENNVPVPKFFPGQDF

SEQ ID NO: 240934 - protein, 125 aa, Glycine max
  unsure (1)..(125): unsure at all Xaa locations
  Clone ID: PAT_MRT3847_59590C.1.pep
DGNHPIMMCAGXLESGNAREPXKLIKKRYRETENMFFKGKMCALFINYIDAGAGRRGXFFFYTANNHKEKATLFVIADNATNVKLAGMYNNEENPRSXIIVTGKDFXTIYATVILDGIMGKVLWG

SEQ ID NO: 240935 - protein, 341 aa, Glycine max
  Clone ID: PAT_MRT3847_59591C.1.pep
PRLSVPEESLLSGNCCSDAAPGLGWDATADTLTAVFGKYGEIEDCKAVTDKVSGKSKGYAFILFKHRDDARKALKHPQKKIGNRTTSCQLASAGPVPAPPPSVTPVSEYTQRKIFVSNVSAEIDPQKLLEFFKQFGEVEDGPLGLDKNTGKPKGFALFVYKSVESAKKALEEPNKNYEGHTLYCQKAVDGPKGSKGYHHQQHSHSHHHHHHHQPHYQRKEKNKYSSGGGGPSHGSGHLMAPSGSAVGGFNPGVPAQGLNPVLGQALTALINQGAGLGLGNLLGGLGGAPVNQGGPPAPYANQPAMGYGNQPAMQPGYQNPQMGQSSGVRPHPGAGAPYMGH

SEQ ID NO: 240936 - protein, 49 aa, Glycine max
  Clone ID: PAT_MRT3847_59592C.1.pep
RPRVPLVSTLDVACPLGTMTAIYDILQNALIDIELSHHTHNPYTALLHQ

SEQ ID NO: 240937 - protein, 498 aa, Glycine max
  Clone ID: PAT_MRT3847_59593C.1.pep
MPMAKKRKLRSSNPEPTKPVEPQQQNQETVELDQQQQQPNPKQTLEDPNTMAVDEPKQEEEEEEEDAEPQNAESEEEEEEEDEQQEEQEPETLEEQQDPETLAAANHAEANGSNEGNNEEEEEEDLTLEEEPVEKLLEPFTKEQLHSLVTQAVDMFPEFVDSVRRLADVDPAHRKIFVHGLGWDATADTLTAVFGKYGEIEDCKAVTDKVSGKSKGYAFILFKHRDDARKALKHPQKKIGNRTTSCQLASAGPVPAPPPNVTPVSEYTQRKIFVSNVNAEIDPQKLLEFFKQFGEVEDGPLGLDKNTGKPKGFALFVYKSVESAKKALEEPHKNYEGHTLYCQKAVDGPKGSKGYHHQQHSHPHHHHHHQPHYQRKEKNKYSSGGGGPSHGSGHLMAPSGSAVGGFNPGLPAQGLNPALGQALTALINQGAGLGLGNLLGGLGGAPVNQAGPPAPYANQPAMGYGNQPAMQPGYQNPQMGQGSGVRPHPGAGAPYMGH

SEQ ID NO: 240938 - protein, 60 aa, Glycine max
  Clone ID: PAT_MRT3847_59594C.1.pep
FMCLNMCMTVIAIKAVAPGTTRCAWVVVNSAQTNNSVCPVADDYTKRENLASEPAKATSV

SEQ ID NO: 240939 - protein, 142 aa, Glycine max
  Clone ID: PAT_MRT3847_59595C.1.pep
APAVVHLYNSVAKNARAFKAAWKHAAKLVQKRLPESAQPTDAVLQPILARNAPKHPLHRIAYLKQSKGRWYTTHSQISAAVRRFTTSAARNSGVKYDKASFPKSRIGGIVTAQAGRAPFASTLRPNLTGGTLVLTAGRYRWG

SEQ ID NO: 240940 - protein, 63 aa, Glycine max
  Clone ID: PAT_MRT3847_59596C.1.pep
MSGSSSSGSEEEDEGFDSYRKGGYHAVRVADQFAGGRYIAQRKLGWGQFSTVWLAYDTTTSAY

SEQ ID NO: 240941 - protein, 43 aa, Glycine max
  Clone ID: PAT_MRT3847_59597C.1.pep
LVSNHCCCGYIYDKEAPNGKGVLPRLIIKSFLKQKRLVSDILP

SEQ ID NO: 240942 - protein, 70 aa, Glycine max
  unsure (1)..(70): unsure at all Xaa locations
  Clone ID: PAT_MRT3847_59598C.1.pep
QTKEXKHPXXKKRAAKRXASXAKRAXQKXXGKANXXGQGGPXXQNRKPXEXXGXAGRRKXGPXTGXNPGA

SEQ ID NO: 240943 - protein, 84 aa, Glycine max
  Clone ID: PAT_MRT3847_59599C.1.pep
MSANSSLHVELSRKTSFLGLRLWVLIGIGVGVFIVVILCVLSVWVMFRRKSKRSLDKYSLSQIPHVSEDIISDMIGVHISHDQS

SEQ ID NO: 240944 - protein, 214 aa, Glycine max
  Clone ID: PAT_MRT3847_5959C.1.pep
MGKKAKKAMKKNLKRASFNKNPSEDADFLPLEGGPARKLAGQQKPPPPPENTATVLYVGRIPHGFYEKEMEGYFGQFGTIKRLRIARNKKSGKSRHFGFIEFESPEVAKIVADTMHNYLLFEHLLQVYVIPPEHVHPRIWRGFNYHYKPLDSVQIERKRHDKDRTLEEHKKLVEKVLKHDQKRRKRIEAAGIDYECPEIVGNIQPAPKKIKFED

SEQ ID NO: 240945 - protein, 77 aa, Glycine max
  Clone ID: PAT_MRT3847_595C.1.pep
FNCDNSTCSCKLRPISSSILQLTYQMVLEWKDEFTRCLVIWSNYHQRILPRSWCNTMHSPSQNDLILVTSRTHSPNS

SEQ ID NO: 240946 - protein, 50 aa, Glycine max
  Clone ID: PAT_MRT3847_59600C.1.pep
VLNVVITKDPSGCVLKDKPMNEGLCYCHCLISYMVIVRPYNVHLLAFMPV

SEQ ID NO: 240947 - protein, 83 aa, Glycine max
  Clone ID: PAT_MRT3847_59601C.1.pep
KKKHYRRRLRKTNTSYLEPMLKATGRITAGALSSRVIMTESEAESLTATFHFYANALLTLNHNPRTIGVSPEYCTKPSLGPGR

SEQ ID NO: 240948 - protein, 48 aa, Glycine max
  Clone ID: PAT_MRT3847_59602C.1.pep
LYFLFFGLDSYNFYTLLNPLLRLIWTPIQGKRAPTLKLLALHVPRDRR

SEQ ID NO: 240949 - protein, 37 aa, Glycine max
  unsure (1)..(37): unsure at all Xaa locations
  Clone ID: PAT_MRT3847_59603C.1.pep
PVERPGRRSXXIIRSMGFSNRGEHNPSSDCYIKAAVV

SEQ ID NO: 240950 - protein, 128 aa, Glycine max
  Clone ID: PAT_MRT3847_59604C.1.pep
SFAWERIPLATSEGLPHVLSLKNGDKGTRRFVPGHGEQMTLIPGSSVVAAYNKLIDELEKSVPTLVGIACPKDEKLPRRLIFDKPKTRCFTILPMEFNPAVRPKFLHIARHIMQKRDKLRWQVGIIPY

SEQ ID NO: 240951 - protein, 66 aa, Glycine max
  Clone ID: PAT_MRT3847_59605C.1.pep
TASIIGPTSFSITTTVAPSTNFVTMFGTRCASYALAILVVYAPADAEIARVVKCFAAVHRKLNTTS

SEQ ID NO: 240952 - protein, 41 aa, Glycine max
  Clone ID: PAT_MRT3847_59606C.1.pep
ACYNSRSTSYTPFFFFFFFFFFFFFFFFFFFFCFPGSLTRT

SEQ ID NO: 240953 - protein, 89 aa, Glycine max
  Clone ID: PAT_MRT3847_59607C.1.pep
TLWSSQLNLPLPHPQNKVKFSFFKTPKKNLKKGVFNTLAYISIQMRVAKKQNFVCKKKVAPKNGFWYKMWQKVVSPLKRCNFPYFINYS

SEQ ID NO: 240954 - protein, 248 aa, Glycine max
  Clone ID: PAT_MRT3847_59608C.1.pep
VANEAPWISTIGASTLDRKFPATVHMGNGQMLYGESMYPLNHHPMSSGKEVELVYVSEGDTESQFCLRGSLPKDKVRGKMVVCDRGVNGRAEKGQVVKEAGGVAMILANTEINLGEDSVDVHVLPATLVGFDEAVTLKAYINSTKRPIARIEFGGTVIGKSRAPSVARFSARGPSYTNPSILKPDVIAPGVNIIAAWPQNLGPTGLPEDTRRVNFSVMSGTSMACPHVSGIAALIRSAHPRWTPAAVK

SEQ ID NO: 240955 - protein, 38 aa, Glycine max
  Clone ID: PAT_MRT3847_59609C.1.pep
YFSCPKLSCSGNMDGMFSFLINFIQRASCFICLHEFNV

SEQ ID NO: 240956 - protein, 40 aa, Glycine max
  Clone ID: PAT_MRT3847_5960C.1.pep
CRNGEQDLRNYRIFIDFLLLLLCFIHILNRIFADEARILT

SEQ ID NO: 240957 - protein, 60 aa, Glycine max
  Clone ID: PAT_MRT3847_59610C.1.pep
MKKKFTLFQSKKNPEIGIKCKSFLKFDWPPRPFNLCSFQQHTMKRLLIIIIIRLKYVFHT

SEQ ID NO: 240958 - protein, 315 aa, Glycine max
  unsure (1)..(315): unsure at all Xaa locations
  Clone ID: PAT_MRT3847_59611C.1.pep
MAMARRVPRYVLGSVQRNMSFKSLDPPSSLTHGIHVFHCPDAVGIVAKLSDCIASRGGNILAADVFVPENKQVFYSRSDFVFDPVKWPRVQMEEDFLKLSQTFNAIRSVVRVPALDPKYKIAVLASKQDHCLVDLLHGWQDGRLPVDITYMSSKDXEVDPNTDFLVLARSMRILSSFFXGAMGRDIMNIHHGLFPSFSGLAPSKQILSGNFLRSYGTGIINIHHGLLPSFKGGNPSKQAFEAGVKLIGATSHYVTEELDAGPIIEQMVERVSHRDNLQSFVQKSENLEKQCLSKAIRSYCELRVLPYEEKRTVVF

SEQ ID NO: 240959 - protein, 122 aa, Glycine max
  Clone ID: PAT_MRT3847_59612C.1.pep
TSKSPGAEGAFKLVSEAWSLLSDKVKRLAYNQNRRLEGFQHNAPNLVGTQSKAPSSNGYKKHNKNATSSIRTGNNDARAHPHPPSIPPPHTNVGTFWTICNKCKTHYEYLRTYLNQTLLCPN

SEQ ID NO: 240960 - protein, 41 aa, Glycine max
  Clone ID: PAT_MRT3847_59613C.1.pep
NSARGDPSMPSLAAFTETMSDILEYHENLSWATRTAAAATT

SEQ ID NO: 240961 - protein, 106 aa, Glycine max
  Clone ID: PAT_MRT3847_59614C.1.pep
FPQGFLRRCYPRLCLSVGSPPPFMLSAGGLLEEAPGSSAGGFAGAGFAAWCSDSGARSSAVIARFVFFWFCFFFFFPACCGVFFFCGFFFFFFLPTLADFFVRQNI

SEQ ID NO: 240962 - protein, 196 aa, Glycine max
  Clone ID: PAT_MRT3847_59615C.1.pep
IWQNRAFWFRRFLCLSVFSLVPRHIHGKLCFGGTKVEPLVKIRHTFCPSRIRVAEEYQEGLSDEDDDLCPVECVREFTTDEEFSKILDKAKETGSLVVVDFFRTSCGSCKYIEQGFAKLCKKSGDHEAPVIFLKHNVMDEYDEQSEVADRLRIRAVPLFHFYKDGVLLEAFPTRDKDRILAAILKYSSLEAEDILG

SEQ ID NO: 240963 - protein, 126 aa, Glycine max
  Clone ID: PAT_MRT3847_59616C.1.pep
MKFMKLGSRPDTFYTAEAVRSVSSEVSSDLIIQVKGSRYLLHKFPLLSKCLRLQKLCSEPPDSSSQHQIIQLPDFPGGMEAFELCAKVCYGITITLSPYNIVAARCGAEYLQMTEEGEKGNLIQKL

SEQ ID NO: 240964 - protein, 176 aa, Glycine max
  unsure (1)..(176): unsure at all Xaa locations
  Clone ID: PAT_MRT3847_59617C.1.pep
KYTNGPLLSAEPCKSAQHACIQIVHRGGKITPGDVILSARSHTPVTAILPQQLRASTYLAQDEGVKVGNTYDQVREEGTPQELVPHKRFLGSRPTASILVGGAIGPAXPSALFVFWTPLTFTEGAILDLTSSVQWGVXLARVLAKYILKEHHEAGHGEGPNASTGGLIGAFNKYGI

SEQ ID NO: 240965 - protein, 54 aa, Glycine max
  Clone ID: PAT_MRT3847_59618C.1.pep
MRFILHNHGGQCGNQIATTNWDLICDDHGIEHTGQYSGDSELQYQRVNVYYNEA

SEQ ID NO: 240966 - protein, 100 aa, Glycine max
  Clone ID: PAT_MRT3847_59619C.1.pep
PYKKRINVGLIPPQEDKKGQNVSLQFKMFCLHKLSLVGKRFLKIFQMRNDVLCGIFSLHNTTKIFVEYCKGESQESSKYADLDVYLPVGQGSHTQESAKE

SEQ ID NO: 240967 - protein, 45 aa, Glycine max
  Clone ID: PAT_MRT3847_5961C.1.pep
MWGLLACPIVSRKLCKKLFRFIFDTPFHFGSLFNQLEFAWISILV

SEQ ID NO: 240968 - protein, 69 aa, Glycine max
  Clone ID: PAT_MRT3847_59620C.1.pep
WLTVPTYGQCNIECVGQVLHLQQMKCVILRAIDGPQCIYELFFMWKRSVYKVKFRFTDMSLQYHVSLII

SEQ ID NO: 240969 - protein, 106 aa, Glycine max
  unsure (1)..(106): unsure at all Xaa locations
  Clone ID: PAT_MRT3847_59621C.1.pep
TAASXTASGLSKSESEFVKAIGSGGSLSXXEKGEKAPPLEENFTGRDWRALXPLRSLGKKCRLGFHGILNPESGKCFLLVAVRRPLFALNPTISYFKYLMKKKKKX

SEQ ID NO: 240970 - protein, 113 aa, Glycine max
  Clone ID: PAT_MRT3847_59622C.1.pep
LVFQQQYYADDGTWMETHQAQQHGYAFHEESSWSSDNNYGHKRFPAAMHMNKLGAFAVDSDLSMSKQKHTKLGGAMRMNRLAAFAMDSDISMSKQRHGKLGRGMHMNMNMLGD

SEQ ID NO: 240971 - protein, 320 aa, Glycine max
  Clone ID: PAT_MRT3847_59623C.1.pep
MEAKKIPEVILNSGKKMPVIGLGTASIPLPSHEALTSILIDAFEVGYRHFDTASLYESEESLGKAVAKALELGLINSREELFITSKLWSTDAHPDLVVPALKTSLQKLGLEYVDLYLIHWPVRLKPEAKGYHNILKENVLPSFDMKGIWEAMEECYRLGLAKSIGVSNFGIKKLSQLLENATIPPAVNQVEMSPAWQQGKLKEFCKQKGIHVSAWSPLGAYKSAQGTNAVMESPILKEIACERQKSMAQIALRWIYEQGAIAIVKSFNKERMKQNLDIFDWELSQEESQKFSQIPQRRMYRGITFVSENGPYKTLEELWD

SEQ ID NO: 240972 - protein, 121 aa, Glycine max
  unsure (1)..(121): unsure at all Xaa locations
  Clone ID: PAT_MRT3847_59624C.1.pep
MVLLQLDPVLYELTSMFERIAKLGSGWVTLKRCGIMLSTLLGFLLNMSRNXFLLVCLFLASLKSKVQRNKLATAGEAIEYRCLIRATDGKKTISTSVGPKEKKRERKDNKKTVKADKREGS

SEQ ID NO: 240973 - protein, 178 aa, Glycine max
  unsure (1)..(178): unsure at all Xaa locations
  Clone ID: PAT_MRT3847_59625C.1.pep
SKTTPNKRLIQQNGLHSQSSEDGRYSFRIYCAKFXKIPKHLGARSIGDPIYVFDPEANNLSLGIIPHTCDENTDRNADETSHLIYSETDDHFCKDWETYHLIAXGKPSGVLMGHLYGITFIDXRGDRHYFISNGEDQTIKPWDIRKMSYNATSNTGYTSYEWDYRWLDYPPQAKDLTH

SEQ ID NO: 240974 - protein, 186 aa, Glycine max
  Clone ID: PAT_MRT3847_59626C.1.pep
SSQARFACSIFDLLTSTLCSSTSLFSSSTLRRRLPLVGAFCMLSLGLSNLCTPFHSSALKTGSKFGIRSHSSTRMEGSNSTVPSIVVYVTVPNKEAGKKLAESIVKEKLAACVNRVPGIESVYQWEGKIQTDSEELLIIKTRQSLLEALTEHVKTNHEYDVPEVISLPITGGNLKYLEWIKESTRD

SEQ ID NO: 240975 - protein, 67 aa, Glycine max
  Clone ID: PAT_MRT3847_59627C.1.pep
QEYVAMKTDAVVASLIDSDIQELKVAAKKLLHDATMLGDKGFGTSFFKWIASFAAIYLLILDSTNWG

SEQ ID NO: 240976 - protein, 164 aa, Glycine max
  Clone ID: PAT_MRT3847_59628C.1.pep
CASATLRRRLPLVGAFCMLSLGLSNLYTPLKTGCVQSLLRSKLGIRTQSCIRMEGSNTTVPSIVVYVTVPNKDAGKKLAESIVKEKLAACVNRVPGIESVYQWEGKIQTDSEELLIIKTRQSLLEALTEHVKANHEYDVPEVISLPITGGNLKYLEWIKESTRD

SEQ ID NO: 240977 - protein, 64 aa, Glycine max
  Clone ID: PAT_MRT3847_59629C.1.pep
CRSNNTSFCFCWLRTIYGCLCPNTTRGFKLRCRLQAGSIHNRVPIATFFSDNKLCLCAHVLSTS

SEQ ID NO: 240978 - protein, 57 aa, Glycine max
  Clone ID: PAT_MRT3847_5962C.1.pep
MPCLIWLLLTLFRNQKHLQVPFFQFYYYYYYYYYYYYYYYYYYQVLVYICCCDLLLI

SEQ ID NO: 240979 - protein, 54 aa, Glycine max
  Clone ID: PAT_MRT3847_59630C.1.pep
HKKGGLDIILEYCFTPVVRVVVVMCFLNPVSLTAVLCNQLSVGSWFFTVQTNQL

SEQ ID NO: 240980 - protein, 50 aa, Glycine max
  Clone ID: PAT_MRT3847_59631C.1.pep
KNRTNPQTISGISTKNLAQVVNCYVHLAVQYKSHLFYLFFTLFDINYIPV

SEQ ID NO: 240981 - protein, 59 aa, Glycine max
  Clone ID: PAT_MRT3847_59632C.1.pep
KTNCLLYESKELDLYCFILIEPIWLIWHHPTEEMIGEFGTRKTQGPVLRYHSLYKMHLK

SEQ ID NO: 240982 - protein, 129 aa, Glycine max
  Clone ID: PAT_MRT3847_59633C.1.pep
PPPGEGASARFPQVHPRRFFFRPFFTSQEQARSPVVFFGARLRAARVLSGMKALPRCCPPGGPRRILLKVLFFFLARRDPFLCFFSPAGRGAKLFFFFLGSPRKIPPQGEPKRKIDKKNLFKNFRHTLI

SEQ ID NO: 240983 - protein, 48 aa, Glycine max
  Clone ID: PAT_MRT3847_59635C.1.pep
LCCAVCFWCKAYTSVHFPAAGSVVILLLGCYESEEKIKQIILRKREFV

SEQ ID NO: 240984 - protein, 78 aa, Glycine max
  Clone ID: PAT_MRT3847_59636C.1.pep
RPRLRRVHSLTSTPVVYATGARINFVLKYVHISYHFRDLMNIDARLHVSSSIEVFSYTEKVACGYDTRNREIYILICH

SEQ ID NO: 240985 - protein, 750 aa, Glycine max
  unsure (1)..(750): unsure at all Xaa locations
  Clone ID: PAT_MRT3847_59637C.1.pep
NDNFDFDEDEIQSVLYNALEEFSLEKQXNGXCSLMLVHALTVERTRXSEDKHCFEGDRNYLTSKYQWIVSSVLMASLSSHFPVILHWYFKRKLEEVSAIMDGEFCDDASQNKDGMNLDEKGKICNKVGEMDVDECYSDHRFSENSRLVKNIGKVVLDLRNLGFTSMAEDAYASAIFLLLKAKVHDVAGDDFRSSVLQSIKSWIQAVPLQFHAVMLLVIVKRPVPHAAATVGAWLNIFQSLLLISICTNCAXEFGYVMRGEXWKIEPALAAILIMEHVLLLTNFGDTRFIPEEPAWVIANRAKHTTQVQAICSKKRLRTISGGAKTFEEGKKLDSSLXALRTIDPAGVFLEAVGEPIRDYLRGRRDTIKCIVTMMTDGTGAHSSSSGNPGDSLLEELNRDEEIQENAGVDDFNTDDRQAWINAMRWQPDPVEADPLKGSRNQRKVDILGMIVSIIGSKDQLVHEYRTMLAEKLLNKSDYDIDSEIRTLELLKIHFGESSLQKCEIMLNDLIGSKRTNSNIKATINQPSQTSVEVGDNAISMDAISATIISSNFWPPIQDEPLNLPEPVDVENMAXQVRIEIKTPRKLQWKKSLGTXSWTSKNLAAAIGIPADVLNRRINFWISKGIIAESQGADSSDHVLDPVENMAETSKNGASTGCAQELLGGEEEEERSVASVENQLRKEMTVYEKFILGMLTNFGSMALDRIHNTLKMFCIADPPYDKSLQQLQSFLSGLVSEEKLELRDGMYFLKK

SEQ ID NO: 240986 - protein, 570 aa, Glycine max
  unsure (1)..(570): unsure at all Xaa locations
  Clone ID: PAT_MRT3847_59638C.1.pep
NILHWYFKRKLEEVSAIMDGEFCDDASQNKDGMNLDEKENXNKVGEMDVDECYSDHRFSENSRLVKNIGKVVLDLRNLGFTSMAEDAYASAIFLLLKAKVHDVAGDDFRSSVLQSIKSWIQAVPLQFLHALLVYLGDVVSYESTSSGLKSPLAPQPSSCCPGIDTPSEGLVRWKLRLEYFAYETLQDLRIAKLFEIIVDYPESSPAIEDLKLCLEYTGQHSKLVESFISALRYRLLTAGASTNDILHQYVSTIKALRTIDPAGVFLEAVGEPIRDYLRGRRDTIKCIVTMMTDGTGAHSSSSGNPGDSLLEELNRDEEIQENAGVDDDFNTDDRQAWINAMRWQPDPVEADPLKGSRNQRKVDILGMIVGIIGSKDQLVHEYRTMLAEKLLNKSNYDIDSEIRTLELLXHFGESSLQKCEIMLNDLIGSKRINSNIKATINQPSQTSVELGDSAISMDVISATIISSNFWPPIQDEPLNLPEPVDQLLSDYAKRFNEIKTPRKLLWKKSLGTIKLELQFQDREMQFTVAPVHASIIMKFQDQPSWTSKKLAAAIGVPADVLNRRINFWIS

SEQ ID NO: 240987 - protein, 43 aa, Glycine max
  Clone ID: PAT_MRT3847_59639C.1.pep
CYLLFRKKQVTLSWLLILQVIYGLIPAGDPAIAIPRRYFNVRK

SEQ ID NO: 240988 - protein, 74 aa, Glycine max
  unsure (1)..(74): unsure at all Xaa locations
  Clone ID: PAT_MRT3847_5963C.1.pep
WLNSTSGTGNFNMTMIDVHLSLRRILRQFMLISVFRFPLHSHTNHPYPPSNATHGIFLQAXTVLIKSTHPEHRA

SEQ ID NO: 240989 - protein, 67 aa, Glycine max
  Clone ID: PAT_MRT3847_59640C.1.pep
QYTVRRNVVAAHANNSFITSYSSKFDSLFFYLKQSKIPSILSRFHNPIHLQQNTTFAMKNAKQKRNF

SEQ ID NO: 240990 - protein, 66 aa, Glycine max
  Clone ID: PAT_MRT3847_59641C.1.pep
AYSAPERYSSIYAVNIIVRWLSQILFRICDKTNYVLYSVPHGSVITHGIVYLFSIHTPPPRLFYSI

SEQ ID NO: 240991 - protein, 75 aa, Glycine max
  Clone ID: PAT_MRT3847_59642C.1.pep
MGNGDCDSGINTNSLESIGGENSIEARDAYFYKCAKLAAWTIFLVFMFRITVVVFSNGHSDQKQQEHTNELAHLN

SEQ ID NO: 240992 - protein, 131 aa, Glycine max
  unsure (1)..(131): unsure at all Xaa locations
  Clone ID: PAT_MRT3847_59643C.1.pep
KILGQGQAGYNVGFFFRGLKREDIQRGQVIAKPGFVKTSKKFGGGIFGLPKDWGGGHTAFFFNFKPQFFFGAADVPGKVKLPENVXMVLPGDNVSPGFXLILAVPLEAGKKFAFRKGGKTVGAGVGSKVFR

SEQ ID NO: 240993 - protein, 77 aa, Glycine max
  Clone ID: PAT_MRT3847_59644C.1.pep
VSCGLWLVGEMATMGNGDCDSGINTNSLESIGGENSIEARDAYFYKVIAALITVVVFSNGHSDQKQQEHTNELAHLN

SEQ ID NO: 240994 - protein, 88 aa, Glycine max
  unsure (1)..(88): unsure at all Xaa locations
  Clone ID: PAT_MRT3847_59645C.1.pep
MEKGTDNPKPFLNNLTRKPVIGKLNWGMEYKGYSCLLRDLIYECSSLPTLEDYIDGSISLVXLGEILIRRNNVMYLRGVPYDAEIEDA

SEQ ID NO: 240995 - protein, 184 aa, Glycine max
  unsure (1)..(184): unsure at all Xaa locations
  Clone ID: PAT_MRT3847_59646C.1.pep
MSSSSSSFTSLHITALDAIVNVNSLFTLAVFIGLTWNPNDPXAIAENLIAFHVYSFSSFLFSSLVALALKQAIRLSRTTSFHYPAVVDHLVADVNRTALRLGMLVSGVGSVAGCAFLMLALVNVAQIKLGTLAYAAVVPLLIFVPLALLIYVSLVLYANSLESIGGENSIEARDAYFYKVIAAL

SEQ ID NO: 240996 - protein, 96 aa, Glycine max
  Clone ID: PAT_MRT3847_59647C.1.pep
MATMGNGDCDSGINTNSLESIGGENSIEARDAYFYKVIAALLFAVTQFMRQNSKCAKLAAWTIFLVFMFRITVVVFSNGHSDQKQQEHTNELAHLN

SEQ ID NO: 240997 - protein, 99 aa, Glycine max
  unsure (1)..(99): unsure at all Xaa locations
  Clone ID: PAT_MRT3847_59648C.1.pep
FLTSHTNSYKCITTTTTSPPLTSPHIISPTISTSPYPTPTXTTSSPQNPSTTTTLASSHHTTSSPAPPLXSNSRKTSSQSNPPTVLTPILNIILSRFLF

SEQ ID NO: 240998 - protein, 83 aa, Glycine max
  Clone ID: PAT_MRT3847_59649C.1.pep
ILVAYHSQSELLHFIISSFSQVNLITFQIFILQSSRTGHVLTKYVQNVCSLSILDFLSNLPQLTFNTLQCLYWFPNILSRFSQ

SEQ ID NO: 240999 - protein, 78 aa, Glycine max
  Clone ID: PAT_MRT3847_5964C.1.pep
LPLMLVPLSLTEVSELIRPFAIFHMHILFDLISNSSLSCFQKGKSQSPPARVDQRNESPCVGLQKCNHSLGCPCTYVR

SEQ ID NO: 241000 - protein, 60 aa, Glycine max
  Clone ID: PAT_MRT3847_59650C.1.pep
LELQLKKCSDNLYFLHFFYIYFIYFSISLIFLCTTYLTLKYIKKSLELKNIHPKSKDNSN

SEQ ID NO: 241001 - protein, 183 aa, Glycine max
  Clone ID: PAT_MRT3847_59651C.1.pep
MLVNKVFSIYRAWCKAIFMSKFVGVFLLLLITVTVAEYDHSYPEHENEKNGPCGKFSTLRILTHKLRHCEKAARNAWAPVSSQCCNDLVESRNHHSPSLPFRQQAIDHNFPTYHKFQHIFQLVDGWERWLWLRNLRFLQFVKASGYSSVCCVFFLDLLTTLLITALATIAEYVLKVATNFYMT

SEQ ID NO: 241002 - protein, 54 aa, Glycine max
  Clone ID: PAT_MRT3847_59652C.1.pep
LAFEPSLGSHLSCSLEHIFYRENVPLMKAFEFFLCTDSVFLGVKSVHFPLCLTT

SEQ ID NO: 241003 - protein, 180 aa, Glycine max
  Clone ID: PAT_MRT3847_59653C.1.pep
MSSSSSSFTSLHITALDAIVNVNSLFTLAVFIGLTWNPNDPSNSLNSDPACAPTAAIAENLIAFHVYSFSSFLFSSLVALALKQAIRLSRTTSFHYPAVVDHLVADVNRTALRLGMLVSGVGSVAGCAFLMLALVNVAQIKLGTLACGSSHTYAAVVPLLIFVPLALLIYVSLVLYAFTR

SEQ ID NO: 241004 - protein, 202 aa, Glycine max
  Clone ID: PAT_MRT3847_59654C.1.pep
MYNFILYQINSRFRKKKKKKPMVKYSREPDNPTKSCKARGADLRVHFKNTRETAFAIRKLPLVKAKRYLEDVLAHKQAIPFRRFCRGVGRTAQAKNRHSNGQGRWPVKSAKFILDLLKNAESNAEVKGLDVDALYISHIQVNQAQKQRRRTYRAHGRINPYMSSPCHIELILSEKEEPVKKEPETKLATSKKSQALRSGTSS

SEQ ID NO: 241005 - protein, 109 aa, Glycine max
  Clone ID: PAT_MRT3847_59655C.1.pep
IINQIHLVKMSKFVGVFLLLLITVTVAEYDHGYPEHENEKNGPCGKFSTLRILTHKLRHCEKAARNAWAPVSSQCCNDLVEVSIPCLYAVFSSVAISPTSHRPQLTYLS

SEQ ID NO: 241006 - protein, 34 aa, Glycine max
  Clone ID: PAT_MRT3847_59656C.1.pep
SPDIQRSRMDEVMKQKHIYSSNRTLANAIAKKSY

SEQ ID NO: 241007 - protein, 754 aa, Glycine max
  Clone ID: PAT_MRT3847_59657C.1.pep
MGKFVGLFLLVLVSVAVAEYDNGYPEHENEKNGPCGKFSTLRILTHKLRHCEKAARNAWVPVSSQCCNDLVEVSIPCLYAVFSSDAFKRVACRWLRTLVMVTQPEKGWKLFDLETKEIFVFRDVEFVETKYPFFIDVTTQEDVPLKNWRYEEIVGDVTDGVEETDHIRGTEESGNMAMDDRGGKPNMGFDEQGVTLQNMDTQDIMLPSISPTEPLFGRGHRTKQPSTRLQDYVTNTIKRLSPSNCSPSPKADSGAPYPITDYVNYDHFSLAHRAFLASISQEKEPVTYTNAVKDNRWRNVIKSEIHALETNEAWTVTQLPSGKKALGCKWVYKIKNKADGSVEWFKARLVILCNHQKEGIDYTDFFTVMDVHNAFSHGDLKEVLYMKLPPGFLPQQYGIVYKINKSLYGLKQMSHCWFAKLSAALKHYGFRHSLSNYSLFVLQRPRVHIVVLVYVDDLIISGDNHEAIIKCKAYLHNCFHMKDLGILKYFLGVEVVQSSAGIFLCQRKYALEIIAETGLLGAEPSNVPIEQNHRLALAVDLFFPHPDQHRRLVGRLIYLCFMRPELSYCVHVLSQFMQAPKETHWEAALCVVQYLKGNPGQGVLLRKDFDLQLSSLCDSDWKQQTVSHSSTEAEYRSMTAVTGELKQLKGLLHSLGISHSQTMRLHCDSQAVLHIVKNPVFHEHTKHIQVDCHFIRDEYLTDNIAPTYVSTHARLADIFTKALGPTQFTSLLCKLEICNLDAQLEKGNDIMMRY

SEQ ID NO: 241008 - protein, 82 aa, Glycine max
  unsure (1)..(82): unsure at all Xaa locations
  Clone ID: PAT_MRT3847_59658C.1.pep
SRADSAPLKFKESISSCPYGVFLSWNTSNHLCNWPGITCNPKXSRVTQLNLTRYKFEGSISPHVGYLSYMITLHLATNSFHG

SEQ ID NO: 241009 - protein, 36 aa, Glycine max
  Clone ID: PAT_MRT3847_59659C.1.pep
RLKPKRNGFEGFFKKKRKGIKFSHGFGISIRGLMVF

SEQ ID NO: 241010 - protein, 41 aa, Glycine max
  Clone ID: PAT_MRT3847_5965C.1.pep
LWYASSGASSEEIVSIVAMNIPSISLSLDLIFQIRVSDLAK

SEQ ID NO: 241011 - protein, 121 aa, Glycine max
  Clone ID: PAT_MRT3847_59660C.1.pep
RITDGGADFSLKCVGDTDMITTALQSCCDGWGLTVTLGVPKVKPEMSAHYGLLLMGRTLKGSLFGGWKSKSDLPSLVEKYLIKEIQIDDYITHNLSFDDINKAFNLMKEGECLRCVIHMPR

SEQ ID NO: 241012 - protein, 338 aa, Glycine max
  Clone ID: PAT_MRT3847_59661C.1.pep
AVAWRAGEALVMEEVEVSPPQPMEIRIKVVSTSLCRSDLSAWESHAIFPRIFGHEASGIVESVGQGVTEFKEGDHVLTVFIGECMSCRQCTSGKSNTCQILGLERRGLMHSDQKTRFSLKGKPVYHYCAVSSFSEYTVVHSGCAVKVSPLAPLEKICLLSCGVAAGLGAAWNVADVSKGSTVVIFGLGTVGLSVAQASKLRGASRIIGVDNNPQKCENAKAFGVTEVVDPNSYKEPIAQVIKRITDGGADFSFECVGDTDMITTALQSCCDGWGLTVTLGVPKVKPEMSAHYGLLLMGRTLKGSLFGGWKPKSDLPSLVEKYLNKEGECLRCVIHMPR

SEQ ID NO: 241013 - protein, 348 aa, Glycine max
  Clone ID: PAT_MRT3847_59662C.1.pep
METRAAAKRKANAAIVVVVEKQHPKRQRVVLGELPNLQNLIVSKIQNPRKEKLQCRKNPNANKPSPTNNTLSSPQLDGSYVSDIHEYLREMEMQKKRRPMVNYIEKFQKIVTPTMRGILVDWLVEVAEEYKLLSDTLHLSVSYIDRFLSVNPVTKSRLQLLGVSSMLIAAKYEETDPPSVDEFCSITDNTYDKAEVVKMEADILKSLKFEMGNPTVSTFLRRYANVASDVQKTPNSQIEHLGSYIGELSLLDYDCLRFLPSIVAASVIFLAKFIIWPEVHPWTSSLCECSGYKPAELKECVLILHDLYLSRKAASFKAVREKYKHQKFKCVANLPTPPYVPSCYFEDQ

SEQ ID NO: 241014 - protein, 73 aa, Glycine max
  Clone ID: PAT_MRT3847_59663C.1.pep
AVAFINSPADGPASVSHYFKTKHIALVDDEGLPLQEVHFRGYSKEQHSLFLTVLSCVRKVRLLPPTKTLTLGT

SEQ ID NO: 241015 - protein, 68 aa, Glycine max
  Clone ID: PAT_MRT3847_59664C.1.pep
NIFPKLVESFVKDSGLCPAGTMEMIQKSLPESLRKSVKKCALAKSKKSIEWIPHNFTFRYLIPKELVK

SEQ ID NO: 241016 - protein, 64 aa, Glycine max
  Clone ID: PAT_MRT3847_59665C.1.pep
NCYLLISLTPSSYLNICYAYGDLNYTFKKKSSYKKSLIDKELNVEILLLRLLFYHWSLGSLGLH

SEQ ID NO: 241017 - protein, 87 aa, Glycine max
  unsure (1)..(87): unsure at all Xaa locations
  Clone ID: PAT_MRT3847_59666C.1.pep
VILKLLTDGKLNEGKHIPVSNISAGENYVVQIPLKAQEENLSSRASDFRTAMVXKILRPKLIGMLVGAIXIINDSFASPDSNIVGSI

SEQ ID NO: 241018 - protein, 37 aa, Glycine max
  Clone ID: PAT_MRT3847_59667C.1.pep
NDPPAVYVSGLTSTGNKLFSGHSYNLSMVRRLRSSTL

SEQ ID NO: 241019 - protein, 48 aa, Glycine max
  Clone ID: PAT_MRT3847_59668C.1.pep
IFPGWDNHPLARKEMMDLGNKSGKFRRKFEELTATDGPLGKRLNDTKT

SEQ ID NO: 241020 - protein, 80 aa, Glycine max
  Clone ID: PAT_MRT3847_59669C.1.pep
AFKEGNQGYRVSEGMVEKTSHVITTRIQSLQNNTLNICVLHCSNFINLLLVLYVLLWRTNYLTFGPVHYINYYYYYYYYY

SEQ ID NO: 241021 - protein, 106 aa, Glycine max
  Clone ID: PAT_MRT3847_5966C.1.pep
PKRKMGSPKFFLEIFFPKSGTENFGKTFGGGEFFAFQKRAPNKCFQAGGEGFSQELKNLGPRGRGEIPFWGGLFERGGPFGLNNWGPVFIPSKLGGKTPGFPLAPF

SEQ ID NO: 241022 - protein, 89 aa, Glycine max
  Clone ID: PAT_MRT3847_59670C.1.pep
HDINQIKLDTGFKLMWCTSGSEYVNTPMALFFFNFKNASVTFHELVITNESFPSSLKRSIPCISISKIMHSHFPRFSFRIPKIDLFQCF

SEQ ID NO: 241023 - protein, 212 aa, Glycine max
  unsure (1)..(212): unsure at all Xaa locations
  Clone ID: PAT_MRT3847_59671C.1.pep
MHRSSLNCRTPLLWTADSSGLYSTKSAYRLLITANRYLPQANIYKTIXRLNIPPRAAVFSWKLIKDRLPTRHNLLKRNVPIQEHTCPLCGYYQEKAGHLFFNCKLTSGLWWEPMRWNRMVGPLAASPASHYAQFCDGFGAGKNQKRWCGWWIALTSSIWQHRNYLIFQGNRFESAKVMEDALFLMWSWLKSRDKNLCTSFNHRSSNLVEYFG

SEQ ID NO: 241024 - protein, 43 aa, Glycine max
  unsure (1)..(43): unsure at all Xaa locations
  Clone ID: PAT_MRT3847_59672C.1.pep
VYHYNYLXPRXGIPSRRALYYPLAYKKYLLFLKLPKVKNHTQY

SEQ ID NO: 241025 - protein, 139 aa, Glycine max
  Clone ID: PAT_MRT3847_59673C.1.pep
MGRNSIDMDRERLTAEMDFKDSSSAVIRIRRRLPDFLQSVKLKYVKLGLGYGYSYSCKAASIVMLAITLPLVFSLTGGIKLSKLCSHNHQLDAETVAAASAALLSLAALYRWKRSPAVYLVDFACYKPEKERKIRWGGF

SEQ ID NO: 241026 - protein, 46 aa, Glycine max
  unsure (1)..(46): unsure at all Xaa locations
  Clone ID: PAT_MRT3847_59674C.1.pep
FGDYVPEDPSSFRLSSNFSXYPQFMYHLRRSQFFDVSYTTPDETAF

SEQ ID NO: 241027 - protein, 66 aa, Glycine max
  Clone ID: PAT_MRT3847_59675C.1.pep
ESRVELLLCLKVKEHIIFLANKKRRTSAGYSSFAGLNFGPLPNANPRFRLLSLLLPGPPHSSSLFL

SEQ ID NO: 241028 - protein, 42 aa, Glycine max
  Clone ID: PAT_MRT3847_59676C.1.pep
PHPTCDSHTGTTRRGLKISFARMNQPTIPFSKGFSFKYSQTS

SEQ ID NO: 241029 - protein, 459 aa, Glycine max
  Clone ID: PAT_MRT3847_59677C.1.pep
MDFQVVVLGGGLSKKLLPLVSQELPNALLPVANRPVLSYVLEYLELSNLKDLIVVVEGEEAVLHVGAWISGAYADRLHVEVAAVPEDVGTAGAIRAISHHLTAKDILVVSGDLVTDVPLGAVAATHRRHDAVVTAMLCSAPVSGPSESVSSGGKDKIKKPGRYDLIGLDPTKQFLVHIATGAEVEKDLRIQKSMLPAVGQIEIRADLMDAHLYAFKRSVLQEVLDQKSAFHSLKHDVLPYLVRSQLKSEVLLNGMPQAEENGTEKVISQSNQQMLSQILANASEPIFHLRNALGPHGSTSDRRTHKCCVYIAGSSKYCARLNSIQAYSDINRDVTGEASHLSGYSFSAQNNIIHPSAELGAKTTVGPHCILGEGSQMGDKCSVKRSVIGRHCRIGANVKVVNSVVMNHVTIGESCSIQGSIICSNVQLQERAILKDCQVGAGFVVTAGSECKGEVLAKK

SEQ ID NO: 241030 - protein, 75 aa, Glycine max
  Clone ID: PAT_MRT3847_59678C.1.pep
RSVIGRHCRIGANVKVVNSVVMNHVTIGESCSIQGSVICSNVQLQERAVLKDCQVGAGFVVTAGSECKGEVLAKK

SEQ ID NO: 241031 - protein, 109 aa, Glycine max
  unsure (1)..(109): unsure at all Xaa locations
  Clone ID: PAT_MRT3847_59679C.1.pep
SIPTKGHERPRTNHKTNRDGDXXXTSAKDHNPTDXDADNGERXGTNRGHNGAXGGRDAPREAXRPTTGXAEQTAKPRNGQTGQQKXTXKNETPARAADNADGEKXAEQP

SEQ ID NO: 241032 - protein, 110 aa, Glycine max
  Clone ID: PAT_MRT3847_5967C.1.pep
PTQQCFLDLNPLHEVGNHHECREKYFKSLIPLGLKYAELFPWGGKLTSESINIFSPIVIWTKFTSNPEKYDILNSAFMEYYTVWLKFDCKEINRHINLRFYTTSNHTIDI

SEQ ID NO: 241033 - protein, 68 aa, Glycine max
  Clone ID: PAT_MRT3847_59680C.1.pep
MGYSQCSLYIGIKQHMGCYNIISKIIRAKCDEPTPSWLKVLVDLYDRWLEQFKKHTGGTKQKQYVWAF

SEQ ID NO: 241034 - protein, 342 aa, Glycine max
  Clone ID: PAT_MRT3847_59681C.1.pep
HASEKFKKFFKLDISAITSSVSCDSTMADQKLLGPAFSFKHDELTSRFLEKLRLLEELRLLQDRLFKEPENNDECRKNGSLKRLNDQSDVCGFRSCFKNDYDLLQNQRCLRNREEVIQETMEMELENMMELGTLEGKKTYSFKNGTRSALNLENTTRSFLDNNKSNDNNWNGEMTLPLLVDKSTVCMLNKDEEVDEPLSPGKHMKTAQSVLSFLIATIALFWILTDLCSLLSIIKLQPEHGPLPIWFSLLEPVGFMVFVWAVAAKIVIGAPFSRLLSAILLFWGIWLLVRSSQSLTTLCLPILGILLMVWHLCSRKSSCQIKGNEQGSEAPKIKPMCFTFAV

SEQ ID NO: 241035 - protein, 305 aa, Glycine max
  Clone ID: PAT_MRT3847_59682C.1.pep
SYLLSLCLPLPMLQSSLYFEQRILELRLLQDLENNDECRKNGSLKRLNDQSDVCGFRSCFKNHYDSLPNQRCLRNREEVIQETMEMELENMMELGTLKGKKTYSFKNGTRSALNLENTTRSFLDNNKSNDNNWNGEMTLPLLVDKSTVCMLNKDEEVDEPLSPGKHMKTAQSVLSLLIATIALLWILTDLCSLLSIIKLQPEHGPLPIRFSLLEPVGFMVFVWAVAAMIVIGAPFSRLVSAILLFWGIWLLVRSSQSLTTLCLPILGILLMVWHLCSRKSSCQIKGNEQGSEAPKIKPMRFTLAV

SEQ ID NO: 241036 - protein, 102 aa, Glycine max
  Clone ID: PAT_MRT3847_59683C.1.pep
WSGRKALLADYIWSERMAPPSRTYDLQNPILTLCCDKGGHPNNLEMIKLYVMYLVIAASDPDIYDDYCETIHFISITTRLLSYTGTDAHAGRILSQVSARTK

SEQ ID NO: 241037 - protein, 158 aa, Glycine max
  Clone ID: PAT_MRT3847_59684C.1.pep
ALRKIHYSLSHSQTLIVFINQIRLSPKSAKEYGSVEEVTCGGNALRFYAAVRLRLSRVRLIKFVDKVEGVMICAQVVKNKLAPAATKRAELGIKFGRGFCHESDVLDLACEHGIFVKHEGSYFIEGNSFDSREAAELFLAQNHAVCDKVVKDMRRLYF

SEQ ID NO: 241038 - protein, 34 aa, Glycine max
  Clone ID: PAT_MRT3847_59685C.1.pep
VRSRKYSAEQQTVPPAMRTPCECAGDDDGIHQMR

SEQ ID NO: 241039 - protein, 57 aa, Glycine max
  Clone ID: PAT_MRT3847_59686C.1.pep
VGAEAPSPANEYCPSHVSKRENAPRRGVIVFTVSSPHEKSGYLACPTATCNSERVNP

SEQ ID NO: 241040 - protein, 61 aa, Glycine max
  Clone ID: PAT_MRT3847_59687C.1.pep
HNYNESKDAINNLKDFCLHIHTLSFSPLLTNDNLFFSGSSIIVFILPCQFFIWFPRSSILQ

SEQ ID NO: 241041 - protein, 112 aa, Glycine max
  Clone ID: PAT_MRT3847_59688C.1.pep
MLSTDSLLENFPGSVNGFIFENGPVSVFSNQNPASGFEVDDSISPSESATDSGPSSGASSNREHVESTKHSNPILRYISDILMDEEDDLERKPCMLQDCLRLQAAEKSFYDA

SEQ ID NO: 241042 - protein, 107 aa, Glycine max
  Clone ID: PAT_MRT3847_59689C.1.pep
MSMLSPEGELKISFGYQCNSDRAISCNEIQRTSSFSWLSGAALSANATLANTNICNGVIGEEILPSLDSPKSFRRVPSSPSFPKLDMLSSSVNSSLANLSCSPSTPS

SEQ ID NO: 241043 - protein, 48 aa, Glycine max
  Clone ID: PAT_MRT3847_5968C.1.pep
TSTNYHLKALFIDKKNIINHYKLKPMIPEENRDLSSYDRFRSIIIHNG

SEQ ID NO: 241044 - protein, 54 aa, Glycine max
  Clone ID: PAT_MRT3847_59690C.1.pep
IITLPIIFAFRMKQRRPHSALPSWNPFSVLNGPPLQLPSPLEVKTGLWLLSLPL

SEQ ID NO: 241045 - protein, 82 aa, Glycine max
  Clone ID: PAT_MRT3847_59691C.1.pep
NKKAGILKLPHSQTRGKIKTPPVFDGIIYWGQNYTQNGAYFNLPHKSFLKFSLYPPGNPPTLFLKLICFIGKKHEGAPPVFH

SEQ ID NO: 241046 - protein, 128 aa, Glycine max
  Clone ID: PAT_MRT3847_59692C.1.pep
SGNHLVGRIPTGTQIQSFPADSFKGNDGLCGPPLSQNCSGDGMKETPSPASNSNVDTKNSIYWNFISVEVGFIFGIGIIVLPLLFYMPWRTRYWKFVDGILYHTFPQLDFVHERRGGQSYSILRWKSH

SEQ ID NO: 241047 - protein, 57 aa, Glycine max
  Clone ID: PAT_MRT3847_59693C.1.pep
KIMEEKKEFSKEKFSSFMSILECSETQCVFFPWFDSFFIVAGVDLGLRTRAKPALLS

SEQ ID NO: 241048 - protein, 64 aa, Glycine max
  unsure (1)..(64): unsure at all Xaa locations
  Clone ID: PAT_MRT3847_59694C.1.pep
GXSIGNXXLGGGDMELWEVXVPAAXNVYAALQRLNLGXXNSGVQLHIQRXVSAXLHXXPILAXN

SEQ ID NO: 241049 - protein, 92 aa, Glycine max
  Clone ID: PAT_MRT3847_59695C.1.pep
SNSARARCGLKLPIFWTVGARPGPAQAQPQPAGLRLCVVAYANGDVYEGELKGGKCCGSVVYYYSMSGRYEGDWVDGKYDGFGVETWARGSR

SEQ ID NO: 241050 - protein, 53 aa, Glycine max
  Clone ID: PAT_MRT3847_59696C.1.pep
PGKYVELKKHVPSLQVVLDEKSSYLPEQSFTMVGGIKKVIAKAKKIAKECPAS

SEQ ID NO: 241051 - protein, 37 aa, Glycine max
  Clone ID: PAT_MRT3847_59697C.1.pep
LLSGMFNFGYRIELRIVLFIMKQLSQESIQKSCICFW

SEQ ID NO: 241052 - protein, 57 aa, Glycine max
  Clone ID: PAT_MRT3847_59698C.1.pep
YSPLVHLSCTKFEAGLWSDGISCKFCTIQTSLKHNYNAITFQTCALYHLHVRSDTFP

SEQ ID NO: 241053 - protein, 68 aa, Glycine max
  Clone ID: PAT_MRT3847_59699C.1.pep
PLVQPRVEDAGTSDGSMLEIKIIQSITDTYTYTVGGTILRREVLSYSLSDDTCTRREDIERTHLMKGM

SEQ ID NO: 241054 - protein, 104 aa, Glycine max
  Clone ID: PAT_MRT3847_5969C.1.pep
TEKILKWAYPFVSLFRKALLLPSKKFYRSQSILCYNIKSLFGCSLEELLRASLLVLQFSTFRQAVLHFLLDKNVLIKNLKMTSMSYTLNCTKPRSLAPLFSLVS

SEQ ID NO: 241055 - protein, 69 aa, Glycine max
  Clone ID: PAT_MRT3847_596C.1.pep
PQVPLRVRNEGWEREESGALGQRVADATSGGCRGRPEEKMEAARDLTAAMALKNVCVSIPGPLADLEKP

SEQ ID NO: 241056 - protein, 64 aa, Glycine max
  unsure (1)..(64): unsure at all Xaa locations
  Clone ID: PAT_MRT3847_59700C.1.pep
VRIEKFIQFDVIKYSWHTNTYRYSSIYRPTYSIYGCSSGYIHMYXXMTFTYVYQIXRRHNLRYV

SEQ ID NO: 241057 - protein, 86 aa, Glycine max
  Clone ID: PAT_MRT3847_59701C.1.pep
GWEGSKPTTPHGPELLVIALRPAEPRQPSPTDTKNEGPASRPPARPPVRAIPVSPPTGPSASAPLAPPPPPNPPPSPLPKPLPPSS

SEQ ID NO: 241058 - protein, 30 aa, Glycine max
  Clone ID: PAT_MRT3847_59702C.1.pep
QKIYYLKTLETIIFVGSNRFNGVNIENPCK

SEQ ID NO: 241059 - protein, 100 aa, Glycine max
  Clone ID: PAT_MRT3847_59703C.1.pep
MSGVWVFKNGVVRLVENPGSERKVLVHTASNEIITSYAVLEHKLSSLGWERYYDDPDLLQFHKRSTVHLISLPRDFNKFRSMHMYDIVVKNKNYFEVRDM

SEQ ID NO: 241060 - protein, 69 aa, Glycine max
  Clone ID: PAT_MRT3847_59704C.1.pep
SSFYWLCRKYDVDLFLVINWERPIIESRHGIYINHHFASKLLQNVQNRLNTLIMQTPTLTTTSPDNELR

SEQ ID NO: 241061 - protein, 104 aa, Glycine max
  Clone ID: PAT_MRT3847_59705C.1.pep
FGSSSSRSSRKLETLLDPNLLGNRYIEEVEELIQVALICTQKSPYERPKMSEVVRMLEGEGLEEKWDEWLNMTEDIQNFTFNLCTPTPNDSNPNIQPDVLSGPR

SEQ ID NO: 241062 - protein, 155 aa, Glycine max
  Clone ID: PAT_MRT3847_59706C.1.pep
MDFDFRASFHSVKHLSAVQAARLHSVPVLCSNLEEEHCSALKNVVCPVCEENIGKDAIMQFTHSSSRRWAWKPEKSSIWPGNSAMLGKKLATRGNKQESITDPLLSPFICNVPIPNSNNFHPDENSKSSNKDIDIPDANRTSTFAPDMVMRGITR

SEQ ID NO: 241063 - protein, 54 aa, Glycine max
  Clone ID: PAT_MRT3847_59707C.1.pep
PRLPAIYPLMFRPHALARPVLSGYKVSCISWGRHPYLGHLSMYSIPCSNPYSLL

SEQ ID NO: 241064 - protein, 67 aa, Glycine max
  Clone ID: PAT_MRT3847_59708C.1.pep
FSACRMSRLEGRIRRMFRKRPPGKNHEGRSYRRDVARKPRPLRDPRKPDGLTRHKYVRSTFLDRQRT

SEQ ID NO: 241065 - protein, 194 aa, Glycine max
  Clone ID: PAT_MRT3847_59709C.1.pep
MDFDFRTSFHSVKHLSAVQAARLHSDVDNDGRCDFRCPFCDFEIEVPVLCSNFEEEHCSALKNVVCPVCEENIGKDAIMQFTHSSSRRWAWKPEKSSIWPGNSAMLGKKLATRGNKQESITDPLLSPFICNVPFPKSNNFHPDENSRSNNKDIDIPNAKRTSTDAPDKGDEKDQQERRLKAAFVQQLVLSTIFE

SEQ ID NO: 241066 - protein, 138 aa, Glycine max
  Clone ID: PAT_MRT3847_5970C.1.pep
LPYWNISSLSAIAIDRPAFYGRILPVLLSLEPSSSVVNGVSVSATHFALKNAFLTCSKCTHPSAAPWRDRLAGALKELQSEGKADQVFHLISASNGTIEREKDVQPVIKVTTLSSWDGYLFNLIIFICFGSYIHICTL

SEQ ID NO: 241067 - protein, 155 aa, Glycine max
  Clone ID: PAT_MRT3847_59710C.1.pep
MDFDFRASFHSVKHLSAVQAARLHSDNNSVIHYTDVDNDGRCDFRCPFCDFEIEVPVLCSNFEEEHCSALKNVVCPVCEENIGKDAIMQFTHSSSRRWAWKPEKSSIWPGNSSMLGKKLATRGNKQESITDPLLSPFICNVPFPKSNNFHPDENS

SEQ ID NO: 241068 - protein, 98 aa, Glycine max
  Clone ID: PAT_MRT3847_59711C.1.pep
MDFDFRASFHSVKHLSAVQAARLHSDVDNDGRFDFRCPFCDFEIEVPVLCSNLEEEHCSALKNVVCPVCEENIGKDAIMQFTHSSSRRWAWKPEKSSI

SEQ ID NO: 241069 - protein, 121 aa, Glycine max
  Clone ID: PAT_MRT3847_59712C.1.pep
KEALGGNLSLEPLGIGLDMESFPDEGLLPLSLTSLCIYNSLNLKRLDYKGICNLSSLKELILFDCPSLQCLPEEGLPKSISTLKILGNCPLLKERCQKPEGEDWGKIAHIRFIYVGSHLVL

SEQ ID NO: 241070 - protein, 46 aa, Glycine max
  unsure (1)..(46): unsure at all Xaa locations
  Clone ID: PAT_MRT3847_59713C.1.pep
PXXXXXSXLYXFXHPHIHIXSYFNNQLQKSLXKIHIPFSLFLFLSI

SEQ ID NO: 241071 - protein, 246 aa, Glycine max
  Clone ID: PAT_MRT3847_59714C.1.pep
ARFLARARDCSLPKFKPKLLFQKIRGKRLMFVGDSLNRNQWESMVCMVNSAVPSHNKTWYKTGSLAIFKIQEPEHVTTVEFYWAPFLVESNSDDPNMHSILNRIIMPESIEKHGVNWKDVDYLIFNTYIWWMNTFSMKVLRGSFDEGSTEYDEVPRPIAYGRVINTWSKWIDDNIDPNRTKVFFSSTSPLHIKSENWNNPNGIKCAKEITPVLNMSTPLDVGTDRRLFTIANNVTQSMKVPVYFIN

SEQ ID NO: 241072 - protein, 93 aa, Glycine max
  Clone ID: PAT_MRT3847_59715C.1.pep
MLKQRIPVWWRWYSWANPISWSLYGLVASQYGDIKQSIESTDGSSTTVEDFVRSYFGFRHDFLWVVAAVIVAFPVVFALMFAISVKMLNFQRR

SEQ ID NO: 241073 - protein, 63 aa, Glycine max
  Clone ID: PAT_MRT3847_59717C.1.pep
LVRIIICINNGLYSRFLNLSIHCNPSQLILNINSVFYSLLSLFLLLYLKTIISTIMICFLLTH

SEQ ID NO: 241074 - protein, 45 aa, Glycine max
  Clone ID: PAT_MRT3847_59718C.1.pep
MEKRGNQYVSYEKDNSDYISSTKGIMQSRHNNQRDNIIVNDGWLN

SEQ ID NO: 241075 - protein, 244 aa, Glycine max
  Clone ID: PAT_MRT3847_59719C.1.pep
SKSIKKDARSVQRSLDIFKDSENLLTCGSGGLLPITHELMKYISDNAIETKSRLNQASQGMLSPSVQVARIARLFERSLKANSKNYNNPSLGYVFILNNRSYIDRHVDPYGLGPIGYDWLQKNKRKIEKNYKLYLTKSWTKIFNFLKLDINEAEANVAVKLMTDKLRSFNQHFDDICNDQSTWLVFDKQLREQIIKSIENILLLAYGNFIGRLQDLLGNHANEYIKYGMIDVQDRLNNLFLVRE

SEQ ID NO: 241076 - protein, 74 aa, Glycine max
  Clone ID: PAT_MRT3847_5971C.1.pep
GACALLKEDHRGGTSALSSGEEAQHSLRIISRPSLSRHRINQKKAQRERENTREKKLKEEDSACLCETKRNIAC

SEQ ID NO: 241077 - protein, 63 aa, Glycine max
  Clone ID: PAT_MRT3847_59720C.1.pep
VITTPRSTATVPTNKYLNFTHTLNINTSIISPTPLSNILQPTPPPTKTIHHTKNTNTPNPTQG

SEQ ID NO: 241078 - protein, 95 aa, Glycine max
  Clone ID: PAT_MRT3847_59721C.1.pep
HVYCDKGTCMDTRYLLYVQRHIAGETRYYVGCNTMMAKNVHTDYIDIGSGHKICSFRALDNFLSEENACTTSPKAAVKSRTGEQRAFCVRNGQKG

SEQ ID NO: 241079 - protein, 265 aa, Glycine max
  unsure (1)..(265): unsure at all Xaa locations
  Clone ID: PAT_MRT3847_59722C.1.pep
TSRNLVKLLGCCLEGEEKMLVYEYMLNGSXDSFIFDEQRTGSLHWSKRFNIICGIAKGLLYLHQDSRLRIIHRDLTARVVLLVSELNPKISDFGMARIFGVDQQEGNTKRIVGTYGYMAPEYPPDGLFSVKSDVFSFGVLLLEIISGKRSRGYYNQNHSQNLIGHAWKLWKEGRPLELIDKSIEDSSSLSQMLHCIHVSLLCVQQNPEDRPGMSSVLLMLVSELELPEPKQPGFFGKYSGEADSSTSKQQLSSTNEITITLLEAR

SEQ ID NO: 241080 - protein, 150 aa, Glycine max
  Clone ID: PAT_MRT3847_59723C.1.pep
TSRYVQCLRNVCVLYVCIGTALNRSPCLPQKAFAISPSIHLFCSHQHLLRNQLGNLAIPIRTSHRVEGLSRLDARDDPGSNLGLRLDDPVHLGRREGKRERVGLNGIGLELGHGRLDSCADRSFRGARRRRSDRIGERGQVVRRRGGRHG

SEQ ID NO: 241081 - protein, 58 aa, Glycine max
  Clone ID: PAT_MRT3847_59724C.1.pep
PTPLGVSLALHVKPTLAPTFIFPINMHHRPSVTGHCAHPYRPEQHRTHPIHYDHHQLP

SEQ ID NO: 241082 - protein, 57 aa, Glycine max
  unsure (1)..(57): unsure at all Xaa locations
  Clone ID: PAT_MRT3847_59725C.1.pep
NSMEXLIASHVYTLENQPIWKKNPGRWDRMPGHQLLPMTGIWHMTCINSDMASEQNP

SEQ ID NO: 241083 - protein, 49 aa, Glycine max
  Clone ID: PAT_MRT3847_59726C.1.pep
PNWVIEYSFPFIFQVPTINRYYTTKLGFITFTFIFSIVFVFFFSGDPIL

SEQ ID NO: 241084 - protein, 76 aa, Glycine max
  unsure (1)..(76): unsure at all Xaa locations
  Clone ID: PAT_MRT3847_59727C.1.pep
FQICKIKSAKLVETKKCNTFDIVYRLLKLALVLPVAAASVEYVFSAMKFVKSXLCNKINDXWLNDSLVTFIERDVL

SEQ ID NO: 241085 - protein, 99 aa, Glycine max
  unsure (1)..(99): unsure at all Xaa locations
  Clone ID: PAT_MRT3847_59728C.1.pep
PQVGLRRDDVELVDVDDPFITTDYMTYMFKYDSGQGHWKRHDGTVSDEKTLHFGDKAVTALGHRDPEXMPWRSTGADIIVESTGAFTGKDKADAHLKGG

SEQ ID NO: 241086 - protein, 90 aa, Glycine max
  unsure (1)..(90): unsure at all Xaa locations
  Clone ID: PAT_MRT3847_59729C.1.pep
SCQVPLPHNNTVRFLVPKSPKSSSRVMEELXEVMKVSEAGVVFFIGLTVMRAQPGSXSIFKXIGTNLAYEFLIRNSRAPSWVIGVPHASV

SEQ ID NO: 241087 - protein, 46 aa, Glycine max
  Clone ID: PAT_MRT3847_5972C.1.pep
NEFLGETSVSRIFHNLLTFACVSILSFVTDYHNHEVFMFFLHFLID

SEQ ID NO: 241088 - protein, 136 aa, Glycine max
  unsure (1)..(136): unsure at all Xaa locations
  Clone ID: PAT_MRT3847_59730C.1.pep
KHSAHAEGQQLLCTEGQDQNQIVFSSIGKHGNSNEQEEKRSDTFRGVVQNEGXTREXEDDXXSGGEAPDTPTRTESSSRATRTQAGPGEKGRRTRERTAEEQKRAKRPENSXEPQAEKGNNRGPXATAQAEXRRHK

SEQ ID NO: 241089 - protein, 326 aa, Glycine max
  Clone ID: PAT_MRT3847_59731C.1.pep
FTIHAGVLLRYVPLTAKRMTGIVSRGGSIHAKWCLAYHKENFAYEHWDEILDICNQYDVALSIGDGLRPGSIYDANDTAQFAELLTQGELTRRAWEKDVQVMNEGPGHVPMHKIPENMQKQLEWCSEAPFYTLGPLTTDIAPGYDHITSAIGAANIGALGTALLCYVTPKEHLGLPNRDDVKAGVIAYKIAAHAADLAKGHPYAQAWDDELSKARFEFRWMDQFALSLDPMTATSFHDETLPADGAKVAHFCSMCGPKFCSMKITEDVRKYAAEHGYGTDEALQRGMDAMSAEFQAAKKTISGEQHGEAGGEIYLPEAYVRTKRTT

SEQ ID NO: 241090 - protein, 397 aa, Glycine max
  Clone ID: PAT_MRT3847_59732C.1.pep
MEEPVKEQPLSAGNSARPKLQRYALRSSSKSKENKQDTAPDLSISSESKRGLSTPHVSRSVGGLDFSGNKDKSTSAKPPRRLSNPVKAASPTPNPKLVGNITPISESRTMRSGKGQVSQSRSQTPASDISRTSSRMKFNLLSSSSYWLNQIKLSESADKHTVSLGFFKLASEARCEPFQKMKDELKSYVQRHQLAELGEVKELLQTYDIAENIEQPQVSESISQVPEEGTRSSDDEEVHCSSASTMETVKLKPEPLDTESTEPAPVIIESTKKETSQKKNPLDTESTQPTPVKIESIKKESSQKNNPGSRLRENLKKNSANSRPASDNGSSRLFKKPEKPTKQLTNKGKSEVKKEGKKSDVIKAPISPTHAENNNAQGNKENMDVQTTDEMSLTEIA

SEQ ID NO: 241091 - protein, 126 aa, Glycine max
  Clone ID: PAT_MRT3847_59733C.1.pep
MDADSEYRENSDSSFVWDENSQLYFHASSGFYHDPNAGWYYSNKDGAYYKFEDGNYVLLGTKEDDNVEMYQCKETTKENPQQIYDGNNNEDHPSFLESKFETNQQIGTLADEAPADTPNSVSSLTS

SEQ ID NO: 241092 - protein, 54 aa, Glycine max
  Clone ID: PAT_MRT3847_59734C.1.pep
IDCKNTVMYQPRHALIRLELSFLCYENETISTEGGLILAGRVGNAFSVLSSSIT

SEQ ID NO: 241093 - protein, 80 aa, Glycine max
  Clone ID: PAT_MRT3847_59735C.1.pep
LKPLKDINLHLHDLHIYSIHYGRVQFSFEKSLYVRYTKLKKMKVISPPPQNKKESYSVLEWHLILYGTICATYSGRCNSF

SEQ ID NO: 241094 - protein, 351 aa, Glycine max
  Clone ID: PAT_MRT3847_59736C.1.pep
MAASSSSSISNMLIIPFSKTHEPISFSFQLPHSKFPTSSPLTRTQQKSMKLVTRDNSSPTIGELVREQEQTTTHHLGYAVTRYLYATANINLPNFFKHSRWSKMWSKHANWAGYVAVSDDATTKLLGRRDITIAFRGTVTRLEWVADLMDFLKPISSNGIPCPDHTVKVESGFLDLYTDKEAGCGYAKYSAREQVLSEVKRLMEKYADEEVSVTITGHSLGSAMAILSAFDIVETGVNVGKDGRKAHVSVFSFSGPRVGNVRFKERLEGELGIKVLRVHNAHDMVPQSPGLIFNEDSPQWLLKLVEGWFPWCYLHVGEELQLDHKKSPFLNPDGDASCAHNLEAHLHLLDG

SEQ ID NO: 241095 - protein, 156 aa, Glycine max
  Clone ID: PAT_MRT3847_59737C.1.pep
LTGMGCSASLISLDIIRNIFKSQKNKIALLVTSESLSPNWYNGNDRSMILANCLFRTGGCVILLTNKRSLKQRAMFKLKCLVRTHHGAKEDAYSCCNQKEDEQGNLGFYLAKNLPKAATRAFVENLRMLSPKVLPTRELLRFMIVSLIKKLSQTSS

SEQ ID NO: 241096 - protein, 56 aa, Glycine max
  Clone ID: PAT_MRT3847_59738C.1.pep
KRFGMKLKIKKLVGKNSHNIIEAPFKVFAGAFGKATEYDPGPGGIIPSSKGVLSGS

SEQ ID NO: 241097 - protein, 35 aa, Glycine max
  Clone ID: PAT_MRT3847_59739C.1.pep
KKKKKKKKKKNKKKKKKKKKKEKNKKKSYIKKYKA

SEQ ID NO: 241098 - protein, 125 aa, Glycine max
  Clone ID: PAT_MRT3847_5973C.1.pep
GVRDHIQKIVPAVDRNANPYMFVGKNLLAGGIAGSITSCIVYPLDFARTRLGVDVGRQAGERQFNGVKDCLVKTYQSDGIKGLYRGAGASIIGIFMYRGLYFGVYDSGKPVVIKEGDSIVKKFFF

SEQ ID NO: 241099 - protein, 108 aa, Glycine max
  unsure (1)..(108): unsure at all Xaa locations
  Clone ID: PAT_MRT3847_59740C.1.pep
PTRTATTETTEXXHENRKGTKQKEXKPKXDKDESKTNNQEPKAGERRGGRGGNNGKTQTXXXRANREGTAGATKDKRQQAKXXGTRTQAAESRGGARQGEESHPEGRA

SEQ ID NO: 241100 - protein, 52 aa, Glycine max
  Clone ID: PAT_MRT3847_59741C.1.pep
FTEPLYTLGCIIPFLSDSLLRLNNISADSVVLWYHYLAGGPCYCTDFIKLIA

SEQ ID NO: 241101 - protein, 45 aa, Glycine max
  Clone ID: PAT_MRT3847_59742C.1.pep
GSSNTLLHSLLILTKTPTNRLCKLKTLHAPHTTIFTNFFLVNNPH

SEQ ID NO: 241102 - protein, 42 aa, Glycine max
  Clone ID: PAT_MRT3847_59743C.1.pep
GNRSYYHFSNLPPYRSSRALRHTSSMAIQWQNPHDPPPIRRP

SEQ ID NO: 241103 - protein, 75 aa, Glycine max
  unsure (1)..(75): unsure at all Xaa locations
  Clone ID: PAT_MRT3847_59744C.1.pep
AILRSDXLADLLTWGHFTARVALQRTHRXINGMITMVATVGIPENTRISLACAMHGASRGRSSSDIDTICSSDCE

SEQ ID NO: 241104 - protein, 89 aa, Glycine max
  unsure (1)..(89): unsure at all Xaa locations
  Clone ID: PAT_MRT3847_59745C.1.pep
RHGIRIRPWPHSDLGEVMKAHRISRECRKSRXALFGVKNPRTAITVMPTHVRTFQTLHLTGVMHTLMLVPYDLVWIVVEAGGVGGWRSL

SEQ ID NO: 241105 - protein, 358 aa, Glycine max
  unsure (1)..(358): unsure at all Xaa locations
  Clone ID: PAT_MRT3847_59746C.1.pep
DFFIWGDESEFADIFDLEHFKSVLVNDVRVVSALPSTHLMTRPVEGSPLPHATPSWIRSHYLRRFNREGVLLLRGLDSRLTKDLPPDLQKLRCKVAFQALRFAKPVQELGNDIAERMKSKGPYLALHLRMEKDVWVRTGCLPGLSPEFDEIVNNERIQRPELLTAKSNMTYHERKMAGLCPLNAVEVTRLLKGLGAPKNARIYWAGGQPLGGKKALLPLIHEFPHFYSKEDLALPGELQPFANKASLMAAIDYIVSEKSDVFMPSHGGNMGHAIQGHRAYXAGHKYVYXPHITPNKRQMLPYFLNSSLPEKEFNRIIKELHQDSLGQPELRTSKSGRDVTKYPVPECMCNDDSHHHSS

SEQ ID NO: 241106 - protein, 150 aa, Glycine max
  unsure (1)..(150): unsure at all Xaa locations
  Clone ID: PAT_MRT3847_59747C.1.pep
MDRPATGPGVDMPIMHESDRYEYFRDIRSGNYSVSRLMRDNPTPELAADKYIERRDKIDENVIREIINHRSITHPSIIRCKEVILTPTHLRLAMAYASGGELXEKISNAWHXNEDDARYFYQQLISGVSYCHARRVCHRDLKMENTMVDG

SEQ ID NO: 241107 - protein, 226 aa, Glycine max
  unsure (1)..(226): unsure at all Xaa locations
  Clone ID: PAT_MRT3847_59748C.1.pep
XQRAEALAALNNAFNSSPETTSSADKLNGLNRGGPRQRAEALAASPSXFNSSSGTKVYTPRPSGRGQGSQRAAAVAALSSVLTAEKKKTSPETSPVASTSPXVESGTFDTESESAPSESXVVEXVACGGETEVVALETGANGDSEQPKQENVEDGGNDSENNNQNFFSYEQLKTKSGSVVSGIDLKRREAYLSDKEFQAVFGMAKDAFSKLPRWKQDMLKRKVDLF

SEQ ID NO: 241108 - protein, 114 aa, Glycine max
  Clone ID: PAT_MRT3847_59749C.1.pep
WFFVCFLSFVQQQQLKMNKHQASEKKNDNMEKPLTPLMPPPPPTLERTTSIDDEPKTLLEEEMKVAREAALKIINSHSKEDALKIFLAGLVPVGTSSKQVKEDGVVSDYDDDDE

SEQ ID NO: 241109 - protein, 79 aa, Glycine max
  Clone ID: PAT_MRT3847_5974C.1.pep
VSVVVSPQSLAPNMLQSAPCLVHSAACGYDSLLTLRSARRNDVDASYGLKHPQIHAPPNAHSILIAPSSSCFASSIVRV

SEQ ID NO: 241110 - protein, 102 aa, Glycine max
  Clone ID: PAT_MRT3847_59750C.1.pep
MSNSFPLYQKLAIKKPIQRSVELLILILAISLLLYRLLYLQSHALLSLLAFFSELCFTFDWFLYLLLNWNPVDYKTYPQHFKQVHEVPAVDVLVTTADWKLE

SEQ ID NO: 241111 - protein, 84 aa, Glycine max
  Clone ID: PAT_MRT3847_59751C.1.pep
PTNTKLKYLHKKPTTSKWPPHITTNFTKSLLQTHFSLYDIKQPALKSITNVIHPKKQITQRKDNQTPPQSHERRTFRSPPHNHV

SEQ ID NO: 241112 - protein, 123 aa, Glycine max
  Clone ID: PAT_MRT3847_59752C.1.pep
KAEAINWASLEYGKDMLPPIINRPIVQSERSAYPSSKPRTRDWDKLEAQVKKEEKEEKLDGDAALSKLFRDIYQNADEDMRRAMSKSFLESNGTVLSTDWKEVGSKKVEGSAPEGMELKKWEY

SEQ ID NO: 241113 - protein, 58 aa, Glycine max
  Clone ID: PAT_MRT3847_59753C.1.pep
FTKSILIPISLKKKYENLFPYIFYNTIFHTVPSNPILFKHFYRRIFILKYVIFLFYMD

SEQ ID NO: 241114 - protein, 357 aa, Glycine max
  unsure (1)..(357): unsure at all Xaa locations
  Clone ID: PAT_MRT3847_59754C.1.pep
MATALEKKAKEAFFDDEFGLAVDLYSEAIRLDPNDANLFADRAQAHIKLNAFTEAVSDANKSIQLNPSLPKAYLRKATACIKLQEYHTAKVALQNGAAFAQDDSRFANLIQQCDRCIAEXESSERLLAPCLPHLSNKKSWDEXKKLKETVCFPKRMEPHYTNPCEGSNTTXHRNLDQDGAPFMMFHKLLQLMHQLLQVKDEHSQHVFPCLFGYMIIPNNCRVEVLSTKIEIRLAKAEAINWTSLEYGKNTLPPIINRPIVQSERASYPSPKPRTKDWDKLEAQVKKEEKEEKLDGDAALNKLFRDIYQNADEDMRRAMSKSFLESNGTVLSTDWKEVGSKKVEGSPPEGMELKKWEY

SEQ ID NO: 241115 - protein, 72 aa, Glycine max
  Clone ID: PAT_MRT3847_59755C.1.pep
SPEISGCLNVLTSPPLKRHSRCCPHIPRHLLCSSQKNFFKLVSLCSAVLAFATWHQVNGILSQLKNSVLPIN

SEQ ID NO: 241116 - protein, 80 aa, Glycine max
  Clone ID: PAT_MRT3847_59756C.1.pep
VIKLSKYILLAQACTGPGRLVHHNAMCISHRPILFFFEVRREIHCVMTGICFTTLSTWGQRVESVVMHASLVKGLKRVSG

SEQ ID NO: 241117 - protein, 86 aa, Glycine max
  Clone ID: PAT_MRT3847_59757C.1.pep
VINPESFKIQTNSLIALNPDLLFQQTSIFLFVVIQHELSISKQKLRGFAKQKHGAFKSTIPIPYRITYCPFGFTHMQGITQNWHSN

SEQ ID NO: 241118 - protein, 69 aa, Glycine max
  Clone ID: PAT_MRT3847_59758C.1.pep
DRLAGKVLIVGVCGRPRLGGAQANAFGIAFRTAAEEIGTEFFHELFESSWIVLDASAVNSFMVRLTKKL

SEQ ID NO: 241119 - protein, 126 aa, Glycine max
  unsure (1)..(126): unsure at all Xaa locations
  Clone ID: PAT_MRT3847_59759C.1.pep
KNGCIRSGRSFRWLKLEDSNDATLLGYPQALTKFCYFIMDALREKGAKMKPLICACVSQEXGKVLIVGVCGRPRLGGAQANAFGIAFRTAAEEIGTEFFHELFESSWIVLDASAVNSFMVRLTKKL

SEQ ID NO: 241120 - protein, 74 aa, Glycine max
  Clone ID: PAT_MRT3847_5975C.1.pep
RKPFSCGHKYCMTQRYIHTYIYSLVPIHALTLNIHDRDMKCNKLEVITMGSCSAGVEGWTTSCNMVVMNPLLPR

SEQ ID NO: 241121 - protein, 76 aa, Glycine max
  Clone ID: PAT_MRT3847_59760C.1.pep
YPLIHPRVLLSFLTISFSSSFALYIPVLRQQYPLQKHILSNPTSTNFLASTITTTYLQLCILYYSELIIIIYNAFH

SEQ ID NO: 241122 - protein, 440 aa, Glycine max
  Clone ID: PAT_MRT3847_59761C.1.pep
LEESTPIAGTTKARARRWTEEEDKLLSEKVKKHNGRNWKKIAAYLPGRTDVQCLHRWQKVLNPDLVKGSWTKKEDDRLIELVRKYGIKRWFFIAKYLPGRIGKQFGSRWHNHLDPTVKKDAWTEEEELILAYYYQIYGSKWAEIARILPGRTDNAIKNHWNCSMKKKLDASPLGCDIKVAPSGFCASGIRPEHVVAKVEGQSFNGMVSPKQSHWLNRSVDNILTKLILQNDSGEESCSASSRGTPTPRASRQFLDNSLDCLPLSSTVTDEAYESLKRQKVYFSDTELKVGDESDSPLLNLSYSKSANREKKGQAGNGGNYNSNNTMPHSVDEFSECLSPKTHMALACAYNNGCTPPTSILKNDTGDINPETLLRNLAMTYENVPSIIRKRTPKKASCCDRDQAPSRMIVNSPEAECVIGLDNLKLNRGFIPFLRRPNTQP

SEQ ID NO: 241123 - protein, 109 aa, Glycine max
  Clone ID: PAT_MRT3847_59762C.1.pep
LSLFFFFFFFLVVFFFFLLRKKKFLGFLNKFMGGGWMSPTGIIPCVLKGGSKFLLFFTNTHKKGVIILRGEEPPLSRPGLNRDKLKKIIMMINPKCSPGTVYKSRNNWC

SEQ ID NO: 241124 - protein, 53 aa, Glycine max
  Clone ID: PAT_MRT3847_59763C.1.pep
FMIINAEVFYIFEHLYMCSINYLHSMYFLWYCGCYRFLRVSCSALVSRLSAMI

SEQ ID NO: 241125 - protein, 32 aa, Glycine max
  Clone ID: PAT_MRT3847_59764C.1.pep
SRESCNQPSMYLYTVPSRLKLSMLILTKTRWF

SEQ ID NO: 241126 - protein, 113 aa, Glycine max
  Clone ID: PAT_MRT3847_59765C.1.pep
YTCITAGASGLVLTAIYYNVDIEHLRKPTVLLQWMGMNALVVYALAACDIFPAVIQGFYWHSPENNLVDASEALMQIIFHSKRWGTLAFVIVEILFWGLFAGFLHKKRIYIKL

SEQ ID NO: 241127 - protein, 89 aa, Glycine max
  Clone ID: PAT_MRT3847_59766C.1.pep
SAITTAIVDYGARFDALRLNLREPGARGGDVYNYLLGVTRIGEMLITATITTAITTASAPATERSRGLKVGSRAGTLGGGPGVVSCCAR

SEQ ID NO: 241128 - protein, 64 aa, Glycine max
  Clone ID: PAT_MRT3847_59767C.1.pep
PWFLYTNIGCLPEKIVFIKRKWSELTFIFFNPDPTGKSWDVFSPPVKAPFFHKRGGDFPIPPLG

SEQ ID NO: 241129 - protein, 76 aa, Glycine max
  Clone ID: PAT_MRT3847_59768C.1.pep
QSSNPALYQKGFASFFLHQEQIPQCITAKDSTIAHRINASTLQTPSVIAPNFSTLPRRMTAGVVAEKATKIAQIMQ

SEQ ID NO: 241130 - protein, 53 aa, Glycine max
  Clone ID: PAT_MRT3847_59769C.1.pep
GGLHTVVVKRFDSLNSRLDAMDARITGWDTRMTQLEEHMSYMRECFDLPPPYS

SEQ ID NO: 241131 - protein, 77 aa, Glycine max
  Clone ID: PAT_MRT3847_5976C.1.pep
NVLNDSNCNCYYFMHVVFDGCIKWDSIWSFCHSTEWIAHNTISQIKSGGTLIKAWKQLAKYGKITLSKIFEYVNQRK

SEQ ID NO: 241132 - protein, 79 aa, Glycine max
  Clone ID: PAT_MRT3847_59770C.1.pep
LPFFLGGFNKDFLPLPPPKILNKKLNYLNTSTGRPRDNLREVQQKRKPRLHQHQEKKKRPSRQQKNTLRDTPNTGGGKK

SEQ ID NO: 241133 - protein, 52 aa, Glycine max
  Clone ID: PAT_MRT3847_59771C.1.pep
RRHSSFNSIRGNVPLSDQVDITALIRCAKNRPRARAISVIRLCSDGLRNGSV

SEQ ID NO: 241134 - protein, 148 aa, Glycine max
  unsure (1)..(148): unsure at all Xaa locations
  Clone ID: PAT_MRT3847_59772C.1.pep
MESLTELHGAMAWDLGLLIWKLIDQRRDQERYILSYQLYXPRDERRLGTELCAKIIGRNMQWGLNEYKILLKAIVNSGIGEDTYAPTNVIEGRETNPTSDDSVTEMEAYFXDSIAKLLERXRDYGPDMIDVLIVNVAMYAVMFLFNFM

SEQ ID NO: 241135 - protein, 73 aa, Glycine max
  Clone ID: PAT_MRT3847_59773C.1.pep
LREDDRRGGLFPSQVKHARTIILFFLPFVQVNRQVILPNPYSSVYMLLSPVTAIFLQRMMSRLQNAPGLNHAG

SEQ ID NO: 241136 - protein, 374 aa, Glycine max
  unsure (1)..(374): unsure at all Xaa locations
  Clone ID: PAT_MRT3847_59774C.1.pep
IPPCRSTYNNLINACGSSGNWKEALNVCKKMAXNGVGPDLVTHNIILSAIKSGAQYSKALSYFELMKGTHIRPGTTTLNIVIHCLVKLRQYDKAIDIFNSMREKKSDCILDVVTFTSIIHLYSVCGRVENCXMMLAEGLKPNIVSYDALIGAYAAHGMDNEAHLVFNEIKXNGFCPDIVSYTSLLNADGRSQNPQKAREIFDRMKRNLLKPNLVSYNALIDAYGSNGLLADAIKILREMEQERIQPNVVSICTLLAACGRCSRKFKIDTVLTAADMRGIKLRGGAYNPPLESCMNVGEYDTQPKLVXNMRKKKIKTDSVTYPVLISGCCKMSKYGEALSFMEEMMHLKKKKKKKKKKKKGMSAALQQSNLRTRA

SEQ ID NO: 241137 - protein, 87 aa, Glycine max
  unsure (1)..(87): unsure at all Xaa locations
  Clone ID: PAT_MRT3847_59775C.1.pep
MEMQIELQQSMKQEVQTVKKEEKKSNNRTPKKGNCCICYEMKVDSVLYRCGHMCTCLKCANELQWNSGKCSICXAKIEDVVRVYVDG

SEQ ID NO: 241138 - protein, 94 aa, Glycine max
  Clone ID: PAT_MRT3847_59776C.1.pep
VCAPASPPASGDLAQHKVLCVLRLLFLFTDKTAAFECSFACVNSREIFPPQTLVFHTCVRVSLFFFFSPSPFIPSFFYVLKGATIFFVSFLCTC

SEQ ID NO: 241139 - protein, 68 aa, Glycine max
  unsure (1)..(68): unsure at all Xaa locations
  Clone ID: PAT_MRT3847_59777C.1.pep
DLMHTRTMAFAGGGAPLTKSRXKIPMGMNRDTYCFLLADLRWRLQFTRGIAGAVYIPIFAAPARPSSF

SEQ ID NO: 241140 - protein, 87 aa, Glycine max
  unsure (1)..(87): unsure at all Xaa locations
  Clone ID: PAT_MRT3847_59778C.1.pep
GIKKXIIPFKMKPYLRSIFLLFLILLDQSMAASAFFNGLXNIEKWPFSEKSLKWGKXGKETIDXXXDYLKKEXSPXRTTEHPXXEWG

SEQ ID NO: 241141 - protein, 322 aa, Glycine max
  Clone ID: PAT_MRT3847_59779C.1.pep
CPFDQSIIPGQPVVAFTSMASSNLFFDDIRSKVDVDPPQNEESTDVGELLNDPAQTALKPNGTVSSSVRELLECPVCLNAMYPPIHQCSNGHTICSGCKPRVHNRCPTCRHELGNIRCLALEKVAASLELPCKYQGFGCIGIYPYYSKLKHESQCAHRPYNCPYAGSECSIMGDIPYLVAHLKDDHKVDMHNGSTFNHRYVKSNPQEVENATWMLTVFSCFGQYFCLHFEAFQLGMAPVYIAFLRFMGDDDEAKNYSYSLEVGGNGRKMIWQGVPRSIRDSHRKVRDSFDGLIIQRNMALFFSGGDRKELKLRVTGRIWKEQ

SEQ ID NO: 241142 - protein, 147 aa, Glycine max
  Clone ID: PAT_MRT3847_5977C.1.pep
SIICFPSRAHLTLMPKPICSPARPSEPNKRHHNSHHHRKKSFSRGGGGGGGQASPLLWPKTKSMGSEISEPTSPKVTCAGQMKVRPKTTACRSWQSVMEEIEKIHTDKNQKMRLSWAETRRCKKEIMQNLTCWRSIMYDLRCVRGFV

SEQ ID NO: 241143 - protein, 52 aa, Glycine max
  Clone ID: PAT_MRT3847_59780C.1.pep
RTPFHWMRAPYMAFGSRWIPFSLSPLGRVQKKEVNGSNFSNKKKSPYGFQIL

SEQ ID NO: 241144 - protein, 98 aa, Glycine max
  unsure (1)..(98): unsure at all Xaa locations
  Clone ID: PAT_MRT3847_59781C.1.pep
ITQKKKKKKKKKKKKKNTSWWFYKPGITKFVAPFLLFYITVLTAMEGAGGKSKXSTPGIKENTWAPWGSDIPLPYCPRWRLGGEINPGXDLGLFXARR

SEQ ID NO: 241145 - protein, 50 aa, Glycine max
  unsure (1)..(50): unsure at all Xaa locations
  Clone ID: PAT_MRT3847_59782C.1.pep
RKTCHSPIPTIDLPSCTVDLNVLTNVKGPNVPSRPITLETSARLEPXSLE

SEQ ID NO: 241146 - protein, 205 aa, Glycine max
  Clone ID: PAT_MRT3847_59783C.1.pep
MAGQLHRIQQGVELIVGTPGRLVDLLMKHEIDLDDVMTFVVDEVDCMLQRGFRDQVMQIYRALSQPQVLMYSATMSNDLEKMINTLAKGMVVMSIGEPNTPNKAVKQLAIWVESKQKKQKLFEILASKKHFKPPVVVYVGSRLGADLLANAITGATGIKAVSIHGEKSMKEKKETMQSFLVGEVPVVVATGSLGKGVDLLGVRQV

SEQ ID NO: 241147 - protein, 54 aa, Glycine max
  unsure (1)..(54): unsure at all Xaa locations
  Clone ID: PAT_MRT3847_59784C.1.pep
PPKNGLSENGTMSRACALSLLDKMRRKFFQNGQKPPGXGLNWGVLFGFDPDLPL

SEQ ID NO: 241148 - protein, 62 aa, Glycine max
  Clone ID: PAT_MRT3847_59785C.1.pep
PTRPWVFGIKFSQGGGKRGGGVGRIRGIAFLVEVPVWGAERLSLFNALLKVACDESKPNQFF

SEQ ID NO: 241149 - protein, 48 aa, Glycine max
  Clone ID: PAT_MRT3847_59786C.1.pep
PKQHLVVVQVLAQILPPDYSETCSTKNSLALFSMFSPLGGGRNVFPSR

SEQ ID NO: 241150 - protein, 73 aa, Glycine max
  unsure (1)..(73): unsure at all Xaa locations
  Clone ID: PAT_MRT3847_59787C.1.pep
IVNIEGTSIPYIRCVVCLRLMILWKWPEWYLVFCHIIKESXXLVNKWNTRKYIICNXXAWFLTFLKKQKKXKG

SEQ ID NO: 241151 - protein, 66 aa, Glycine max
  Clone ID: PAT_MRT3847_59788C.1.pep
KLVSSSIKRHTASGVTPRFNSLAVFLLLPDWEFPDIHQLNRHAPYPPFASLLTYDWARSHDSPQEL

SEQ ID NO: 241152 - protein, 113 aa, Glycine max
  unsure (1)..(113): unsure at all Xaa locations
  Clone ID: PAT_MRT3847_59789C.1.pep
GSCAQFVLTXQPNSVSTNLGSTVKLSCKRSTGNIGSNYVNWYQQHEGRSPTTMIYRDDKRPDGVPDRFSGSIDRSSNSXLXTINXGQTENEXDYFCXSYXXWITVFGGGTKLT

SEQ ID NO: 241153 - protein, 60 aa, Glycine max
  unsure (1)..(60): unsure at all Xaa locations
  Clone ID: PAT_MRT3847_5978C.1.pep
GWPPPPPGWLFSSTKFXPGGGCLAHFPPAPPREYFIKIFGAFVPLRSQPKHSVLRTSSRV

SEQ ID NO: 241154 - protein, 47 aa, Glycine max
  Clone ID: PAT_MRT3847_59790C.1.pep
RCHHGFICSPSRAEEGNQIIVDPGLLHSITVAATGHNYANCAVTSSS

SEQ ID NO: 241155 - protein, 55 aa, Glycine max
  Clone ID: PAT_MRT3847_59791C.1.pep
IRPNDALNTYYLWFNYKLHQLGWHLTMRTNNNIELFFTTKLIFSIHYTKKTSMVN

SEQ ID NO: 241156 - protein, 236 aa, Glycine max
  Clone ID: PAT_MRT3847_59792C.1.pep
SLDSHLYADLGKNHKPLSWDLRLSIALDVARGLEYLHHGASPPVVHRDIKSCNILLDQSMRAKVTDFGLSRPEMIKPRTSNVRGTFGYVDPEYLSTRTFTKKSDVYSFGVLLFELITGRNPQQGLMEYVKLAVMESEGKVGWEEIVDPQLNGKYDVHNLHDMASLAFKCVNEVSKSRPSMCEIVQELSQICKRQIKDHGGTSPAALKEVSIEVGQTEIQDFSSIESSKMVRRLHSR

SEQ ID NO: 241157 - protein, 40 aa, Glycine max
  Clone ID: PAT_MRT3847_59793C.1.pep
TYIMTLASLKVITLYKDCQYICTCFSVYRLPLSSPLARAL

SEQ ID NO: 241158 - protein, 66 aa, Glycine max
  Clone ID: PAT_MRT3847_59794C.1.pep
QESPKPFSCPPFTSFVQNSHCNLLVSRHNLLVNARCRSHNLLVYVFLNLHIILLASCFYMKLRIRF

SEQ ID NO: 241159 - protein, 63 aa, Glycine max
  Clone ID: PAT_MRT3847_59795C.1.pep
EQLYSRSNNNYGVLYNQVTLGFVLTLLSSDNCSHLISRNHKEHIILFWKGKGYANYILLVSFY

SEQ ID NO: 241160 - protein, 105 aa, Glycine max
  Clone ID: PAT_MRT3847_59796C.1.pep
SDLPLKGVSKKTLDSYCPKPEISFSNHRRRDKLEPSKNLSKQDSDIELDNTRVSSDENRVPECVNDSDLDSEVDKKASEFIAKFKAQIRLQKMGSIERSKEQKIT

SEQ ID NO: 241161 - protein, 67 aa, Glycine max
  Clone ID: PAT_MRT3847_59797C.1.pep
VSDQSQNSTHPSSFKSEKEKVLYLNFCSFRITSRQTPWHFILYMIDLEPQLLHYFDGYKIETEAPQS

SEQ ID NO: 241162 - protein, 31 aa, Glycine max
  Clone ID: PAT_MRT3847_59798C.1.pep
INHIITNSIFYLSISLNPITLFIYNVYSIIT

SEQ ID NO: 241163 - protein, 130 aa, Glycine max
  Clone ID: PAT_MRT3847_59799C.1.pep
GSRWPETPSTRSPGASSCLKPPRTLKPVPTTHSQLRKSYKTSATAAYAWWMRTSSFALSLKLMRRRANWRSSASMSRPRCRNGTAKMRSNQMLRPRPRVSTRQSTAHRSSVEFWASKVKGRKNGIMFTRI

SEQ ID NO: 241164 - protein, 49 aa, Glycine max
  Clone ID: PAT_MRT3847_5979C.1.pep
GYLRWPFRVAFTEQGGGAKLGSSKSAPPLTNCAFVEKSLSNCGTIFCWH

SEQ ID NO: 241165 - protein, 343 aa, Glycine max
  unsure (1)..(343): unsure at all Xaa locations
  Clone ID: PAT_MRT3847_597C.1.pep
NSAPSNINLCSFNPTITIKRLHFTLLLPIHHVYGERVLAYYGGKVEPYGAIGGGGAPPPATATNKVVKAVPKVDAEGDAKSGVQKFRVKLLAESGGQSIIDVLCQIGLDGIRMLDPNTSRTLRIYPLENITRCDXDVEPGRIRLLSNRYTTNTLLDTVNAATIQYWQIVFVSQSQIHSSTRLPFKEMGGSRRPSESLRTNEQPTEKKRGFGDWMNLIKPADEEKDHWHHCRNCGDIFCDKCTRGRIALTSDEDALQVRVCDRCMAEVTLRLSNAKESSSKPVLQSHEDLAKKLQXSKSDGSGRRMKEVACPICTVHLQVQVPTSGSETIECGFCQHPFLVTAR

SEQ ID NO: 241166 - protein, 118 aa, Glycine max
  Clone ID: PAT_MRT3847_59800C.1.pep
LGRQMLHLTFHILIKAVKTLFHRTGFFMALVETRIKQELVQIVVKLEISAVGTPNKNGLGKTVLAVGLMILMRWRESAAGTVGNPHLVERNAYAIHSFLFTVVRSNRWNPPVKIPQHL

SEQ ID NO: 241167 - protein, 194 aa, Glycine max
  Clone ID: PAT_MRT3847_59801C.1.pep
SVQTMKKKKKGDDNTQAARQQRRGVATRVQRIDYNECHGEDDLEPRTRIGTTPFTTSKRRSGIYKLKSQRLYHRSRTSKLLVVGDRPWRRYVACDRRWRRIRNAIVADEVGELEAVTRRVRRRTQAKQNSRGGGGEGVEEEVVLFKPNKAEVGPGLTVALSTSQKPVMGGLSDPIPSTPGGWGQRNPEPNRFVY

SEQ ID NO: 241168 - protein, 70 aa, Glycine max
  Clone ID: PAT_MRT3847_59802C.1.pep
MGRKFFVGGNWKCNGTTEEVMKIVTTLDEAKVPGEDVVEVVVSPPFVFLPSVKSLLRPDFHVSAQNCWVR

SEQ ID NO: 241169 - protein, 132 aa, Glycine max
  Clone ID: PAT_MRT3847_59803C.1.pep
MGLFGSSDPAVQQEKLINKEAKNEEKSLKQAIKDVSSAEKEEAKAAKAESHSHASFEKAHKVEAKLANKLNQATAKHDQAVSKEVAAQNEAKAKEDAHQRAAAALQEKKAKLDQLQHAHHENDAVRAEKLDK

SEQ ID NO: 241170 - protein, 66 aa, Glycine max
  Clone ID: PAT_MRT3847_59804C.1.pep
IRREIQPARKIKDTYQYFSQQANNTVKNIKAIFSHKIRNLEQHSQFNLYHTQPQCYIRFSHINKGT

SEQ ID NO: 241171 - protein, 377 aa, Glycine max
  unsure (1)..(377): unsure at all Xaa locations
  Clone ID: PAT_MRT3847_59805C.1.pep
PRAWFGRFSSELLQFCMTRYEADHSVFSLHSPSGLCIYLVVYLDDIVITGDDFDGIHRLKSHLHNKFQTKDLGPPNYFLGIEVAQSSSGFLFPSRSXVLDILIETSMLDFRHSDTPMDPNIKLLPGQGEPLEXREDIXRLVGRLNYLTVTKPDIMYAVSVLSQFLNAPCDCHWNAVMRILRYIKDAIGHGLLNADKGNAKIVCYSNADWEGSPSNSRSTSGYCVLIGENLISWRSKKQNTFARSSAEAXYCAMTAAAIEITWPRQLLQQLRFGDTQATKLICHNQATLHIASTPVFHEQTTHRGRQXILKQKVLSIEITTEFVNSSDQLTDMFTKSLKGPRIDYICNKLGAYIYIYISIRGVLDLYVILYLLVDRNQ

SEQ ID NO: 241172 - protein, 67 aa, Glycine max
  Clone ID: PAT_MRT3847_59806C.1.pep
ALFVSFLHLAGFSLLFGMPWGPLVLHGSWFCSSVCGARSIVWGGFVGACLPYCFGPPLRLPRSRGQA

SEQ ID NO: 241173 - protein, 49 aa, Glycine max
  Clone ID: PAT_MRT3847_59807C.1.pep
MGFFFELNLMLRIFVLGHHLLVVDQRGVECGIFHRLIGDIVWHCLCWCC

SEQ ID NO: 241174 - protein, 57 aa, Glycine max
  Clone ID: PAT_MRT3847_59808C.1.pep
MGIAGKVGDYAFKAFTATLGVATIYLTATFSVNVYRGLSWHNAQTKLDKQDADEQAP

SEQ ID NO: 241175 - protein, 54 aa, Glycine max
  unsure (1)..(54): unsure at all Xaa locations
  Clone ID: PAT_MRT3847_59809C.1.pep
LEIFLRRRPPPIYIYIYIYIYIYKENMICSSKDFILYMLKINEERFGKLTAHQX

SEQ ID NO: 241176 - protein, 41 aa, Glycine max
  Clone ID: PAT_MRT3847_5980C.1.pep
NQGLRLQETHALYQIHKRGEKRLIQRFNRREFNIVRASIQQ

SEQ ID NO: 241177 - protein, 84 aa, Glycine max
  Clone ID: PAT_MRT3847_59810C.1.pep
ARIVKSRPRRTLHLHPARIACRPSKTTHPKTVVLLQLASHPCTSTITVITQTHSINSRKSTDSNINQDQPLNLFFTPNTITTSC

SEQ ID NO: 241178 - protein, 115 aa, Glycine max
  Clone ID: PAT_MRT3847_59811C.1.pep
SQGGAPPVFKCVCVTPVDKGGKNKYAYQPVVKIGAHFFKGFFYDQGVEAKKGSPNLFELHLRGGGGGNVPSESNGGKNGIFFSSPRVDRFHNVKPPSGGGLLLGGSSNYGIHPIN

SEQ ID NO: 241179 - protein, 71 aa, Glycine max
  Clone ID: PAT_MRT3847_59812C.1.pep
ATFFRFLLLENSFLSACGKFFHVFICRSTQVIIAICLQNVLLGLQINELLVSSNSHRVDIGASDDVPCAVS

SEQ ID NO: 241180 - protein, 78 aa, Glycine max
  Clone ID: PAT_MRT3847_59813C.1.pep
NALSLNGGGRKGHYQEGEIGSNYPPKALPKKNPGEPGPDLNRLGPRGPLCSTPWGHRRNPGGGALPPGEGPIRGEGKG

SEQ ID NO: 241181 - protein, 236 aa, Glycine max
  Clone ID: PAT_MRT3847_59814C.1.pep
MASRALGYGEPWYWDNRYSNEPGPFDWYQKYLTLAPITNLYVPPAQPVLVVGCGNSAFSEGMVVDGGYTDVVNIDISSVVIKAMKTKHQDCPKLKFMKMDARDMSDFESGSFGAVIDKGTLDSILCGNNSRQNATKMLEEIWRVLKDKGVYVLVTYGAPLYRLRLLRESCSWTIKLHVIEKLASEEKSDNPVWELTKPVPLNDDGSSVEEALGQNPDVHYIYICTKEVSANSNTNA

SEQ ID NO: 241182 - protein, 126 aa, Glycine max
  Clone ID: PAT_MRT3847_59815C.1.pep
TRQIVPNDLKALAGSFMAKVNQGLEQAHGTGYGGSGFKFNEEEDEVRKAAKKAQAKEYGFEEEKSDSEDEDEGIRKAGGDISQHSAFAQIIAATKGNAPALPTPILLPSLQVLPGAGLPLPANDGA

SEQ ID NO: 241183 - protein, 85 aa, Glycine max
  Clone ID: PAT_MRT3847_59816C.1.pep
HLSHSHMMSVPCLIFIFIFYISNFVPSNYGSLLQYLMSSSSFITLPVSQVVLGPPSMLALLLHLPVSLLVKTHTLVLEAFPSFPT

SEQ ID NO: 241184 - protein, 296 aa, Glycine max
  unsure (1)..(296): unsure at all Xaa locations
  Clone ID: PAT_MRT3847_59817C.1.pep
SHCPCAFINVLRYSMAAILAGMEAPLFALGITHILTAFYSPQGSKIKQXVDRVAFIFLGVAVITKSIYLLLHYFYTLMGERLTARVRLLMFSAILNNEVAWFDKDENNTGSLTAMLAADATLVRSALADRLSTIVQNVALTVTAFVIGFTLSWKLTAVVVACLPLLIGASITEQLFLKGFGGDYGHAYSRATSLAREAIANIRTVAAFGAEDRVSTQFASELNKPNKQALLRGHISGFGYGITQLLAFCSYALGLWYASVLIKKNESNFGDIMKSFMGLIITSLGIAETLALTPDI

SEQ ID NO: 241185 - protein, 37 aa, Glycine max
  Clone ID: PAT_MRT3847_59818C.1.pep
RWCIVHAFFDIQALEILFLATLVPERVNVIKCHTKRG

SEQ ID NO: 241186 - protein, 60 aa, Glycine max
  Clone ID: PAT_MRT3847_59819C.1.pep
ASVWHEDCLPLIYSIVALSLSDVGLEFFSTHVDHWFISYSAHHLTFIFLVHLCSYVLTLN

SEQ ID NO: 241187 - protein, 44 aa, Glycine max
  Clone ID: PAT_MRT3847_5981C.1.pep
LQLLRVVPFPDPPLSQSRLPSVTCNMRLTIIEGDQVQFQSQRLV

SEQ ID NO: 241188 - protein, 43 aa, Glycine max
  Clone ID: PAT_MRT3847_59820C.1.pep
LPSSRGRGPNISNALSPEVSGPSHRRVVTPSSSLARRSLRLAS

SEQ ID NO: 241189 - protein, 124 aa, Glycine max
  Clone ID: PAT_MRT3847_59821C.1.pep
SFLVGGEGREKKCLFLTSGLWAGKFGKTGVVKFWGKGKWAPPPPPLWGIRILIGFCPREPGFPVPVMDPPRLFRGFPPFGFTPPKIFFFGGKKKMGNCLFPSPLWGFPGGININWGNKKKNFSG

SEQ ID NO: 241190 - protein, 69 aa, Glycine max
  Clone ID: PAT_MRT3847_59822C.1.pep
KGQSSSFIRSESFCIDVELEFLVFTFTVDQIYFKIFLRSYGSCNAIIYFFDARNIVLTSLLVYSCSLGR

SEQ ID NO: 241191 - protein, 66 aa, Glycine max
  Clone ID: PAT_MRT3847_59823C.1.pep
VLTHIILAAGVVSMEVLYLAENGDSATLFLPSLSPTKTTMACLIFPTSPPLIQFFLPSINLTSYVS

SEQ ID NO: 241192 - protein, 56 aa, Glycine max
  Clone ID: PAT_MRT3847_59824C.1.pep
PDRMNTTQRLHTPFMLNNVLPGSTTRALGLKPILLWKKILLSHGKGHPTDHVHWKF

SEQ ID NO: 241193 - protein, 72 aa, Glycine max
  unsure (1)..(72): unsure at all Xaa locations
  Clone ID: PAT_MRT3847_59825C.1.pep
YYREIQLTIVGKNGLPTSXSLGRALFAVPIQIWDSDTRNVSSWATSFKFNIFLPNISNLSDGLSFLLSPLRS

SEQ ID NO: 241194 - protein, 68 aa, Glycine max
  Clone ID: PAT_MRT3847_59826C.1.pep
MPSMNLQCNIIFRPEPLGVFELHTFARSFLSHTAICVAVIQIPISKILRCTICTMLKVNDPCKISPPQ

SEQ ID NO: 241195 - protein, 101 aa, Glycine max
  Clone ID: PAT_MRT3847_59827C.1.pep
FGCFIFSRIYFPMFILNIDLTGKEALDQIQLSYSVFPLSSSSSQERHVQQSMHAPPFVSGSHSVDSTISLADQPLDFAPRFNRDSDLQMQSTYNHHDSSSS

SEQ ID NO: 241196 - protein, 76 aa, Glycine max
  Clone ID: PAT_MRT3847_59828C.1.pep
HELSSVNYFFSSILLSIFFSPQLFFPFPCCTVCPTSQRQMIRYPPKTKTKKTRQQKDKRQITSKVSSRRLSFPFHG

SEQ ID NO: 241197 - protein, 72 aa, Glycine max
  Clone ID: PAT_MRT3847_59829C.1.pep
TRANTTRRAFAVTEHATITKTHFWVIYVITLDSSNILGGICLLLCTDARISNCHMQLSGMHHDWPCLRVTPL

SEQ ID NO: 241198 - protein, 124 aa, Glycine max
  unsure (1)..(124): unsure at all Xaa locations
  Clone ID: PAT_MRT3847_5982C.1.pep
GVCVFCCLAGGGGKVYKPGPHGTYDLGPGGEAVSGGHRPVLGASMLFCGGGGLQYPRGXSHASGRVAGHFSRSGGLALGAATRWAFGVSGLSWARPGSLPLRASPGPXLSVHRLLSGSGGGNWL

SEQ ID NO: 241199 - protein, 48 aa, Glycine max
  Clone ID: PAT_MRT3847_59830C.1.pep
MASMATFFTQTSFPSHSVSKTLDTHFAPFPKSNVFANFPARKHVGVRV

SEQ ID NO: 241200 - protein, 356 aa, Glycine max
  Clone ID: PAT_MRT3847_59831C.1.pep
MMRRHSLVTASPKQVSLFFVGHKSNPTTIHPHTHTLLTPSPKQDPQNHNQWWGHPKTIKPSFNHSRIRFNTLHTGSTEEQVETGEVEVDVWTKMQEEAKLDVTEEPILSNYYNTSILSHKTLETALANHLAINLSSTSLPSSTLSDLFVTVLETDQAIMDAVKCDLRAVKERDPACISHVHCFLNFKGFLACQAHRVAHKLWLQGRKILAVMIQNRVSEIFAVDVHPGARIGSGILLDHATGIVVGETAVIGNNVSILHSVTLGGTGKVSGDRHPKIGDGVLIGAGTCILGNIKVGDGAKIGAGSVVIKDVPPRTTVVGNPAKLVGGKNNPVKLDKIPSFTMDHTSHIADFYDYCV

SEQ ID NO: 241201 - protein, 133 aa, Glycine max
  Clone ID: PAT_MRT3847_59832C.1.pep
MENNQSAAGTQDSSMMKSVDQRARSKGRNDIMTQRLKNRERQRRYRARKRLEAETKKSFVVEETPAVQVELQPNRNPNNNFVTRIYCKRDWKKDARRAHILKHQQMNGFIDRPAITMVLGRRDWKAEARRKKN

SEQ ID NO: 241202 - protein, 163 aa, Glycine max
  Clone ID: PAT_MRT3847_59833C.1.pep
MAMLAYEAAIIAAFFCFLYFFHRRQCCRHPLFTDFPILGMLPQLLFNLWRAHDYSTQVLKQRGGTAEFTGPWFTKMNCLVTGDPINVHHVMSKSFPNYVKGPVFREIFQAFGDGIFTADSEAWKYNRNLFHSLFKHRSFEVFLEKTIHNKVQNTLLPMLDNLQ

SEQ ID NO: 241203 - protein, 33 aa, Glycine max
  Clone ID: PAT_MRT3847_59834C.1.pep
LKETLTLGTLLPFYLTKLTMPMHQQTTMLFKTS

SEQ ID NO: 241204 - protein, 38 aa, Glycine max
  Clone ID: PAT_MRT3847_59835C.1.pep
NARAHMRTRTATASPKTLPKTRRETRREGETLVSITIH

SEQ ID NO: 241205 - protein, 204 aa, Glycine max
  Clone ID: PAT_MRT3847_59836C.1.pep
MESDDDFELLPPSPVQERKLKRLKKAARVPEPSHPPISPPNFSVSGNGEEHLTEPNGESGPEFETLTPSPSPSPSPSPSPNPQSDTPKGVTVDDDGLGAKRVLDFDSFGEELGKVVEETEEVRDLKTNEEIRDLNTDEVERKRRGLDDLPEKNEKKKRIKDDSDSSEKKPKVSGTNKREAEKERRDTLKQLQAESQRLLRETRD

SEQ ID NO: 241206 - protein, 56 aa, Glycine max
  unsure (1)..(56): unsure at all Xaa locations
  Clone ID: PAT_MRT3847_59837C.1.pep
XXIXEXEXHXYYYPLPPVXGXXFXXIFCVXQXXXPXQXLSPMTNSHFSXFLTXXLP

SEQ ID NO: 241207 - protein, 162 aa, Glycine max
  Clone ID: PAT_MRT3847_59838C.1.pep
NTGDDDDNNDEEENQNPASEAWITKNKKSPWAGKKEGLQGELTEEQQKYAEEYAKKKGEEKSGFGGEKVEVVKDKSTFHGKEEKDYQGRSWIAPPKDAKASNDHCYMPKRLIHTWSGHTKGVSAIRFFPKYGHLILSAGMDTKIKIWDVFNSWQCMRTYMGH

SEQ ID NO: 241208 - protein, 252 aa, Glycine max
  unsure (1)..(252): unsure at all Xaa locations
  Clone ID: PAT_MRT3847_59839C.1.pep
ARIGLPCLLIMRAFMGIGCXRPAMNNMLSKWIPVSERSRSLALVYSGMYLGSVVGLAFSPLLIQKFGWPSVFYSFGSLGSIWFALWLRKAYSSPKDDPDLGVEEKRLILEGNVSNAPVSSIPWKLILSKAPVWALIISHFCHNWGTFILLTWMPTYYNQVLKFNLMESGLLCVLPWLTMAAFANIGGWIADTLVRKGLSITVVRKIMQSIGFLGPAFFLXQLSHVRTPAMAVLCMACSQGSDAFSQSGLYSI

SEQ ID NO: 241209 - protein, 99 aa, Glycine max
  unsure (1)..(99): unsure at all Xaa locations
  Clone ID: PAT_MRT3847_5983C.1.pep
XTYXYVSXEFGTXERHHXQVPXXXXKKSXXXAXXKEXXXANPXNTKAXIVRRIXXXLFXXXTXXXVXXLDXNXALXXXXXRLXXQXXXEKNFXIWXXXS

SEQ ID NO: 241210 - protein, 377 aa, Glycine max
  Clone ID: PAT_MRT3847_59840C.1.pep
MMACQDWPEPVIRVQALAESGLTTIPERFIKPKSQRPTNNNNYAPKVNFSQIGQQENTTTTHHNNTNITVIDMKHIYGGDERRRAETLRLVSEACREWGFFQVVNHGVSHELMKGAREVWREFFQQPLEVKEVYANTPLTYEGYGSRLGVNKGAILDWSDYFFLHHMPCSLRDQAKWPALPTSLRNIISEYGEQVVMLGGRILEILSINLGLREDFLLNAFGGENDLGACLRVNFYPKCPQPDLTLGLSPHSDPGGMTILLPDENVSGLQVRRGEDWITVKPVPNAFIINMGDQIQVLSNAIYKSIEHRVIVNSNKDRVSLAFFYNPRSDIPIQPAKELVTKDRPALYPPMTFDEYRLYIRTRGPSGKAQVESLTSE

SEQ ID NO: 241211 - protein, 350 aa, Glycine max
  unsure (1)..(350): unsure at all Xaa locations
  Clone ID: PAT_MRT3847_59841C.1.pep
WRPASGVSLAAASLMYSRSLSERFQQSTXGPTLWVLVQYRMHPQIRDFPSRYFYQGRLTDSESVAKLPDEPYYKDPLLRPYIFYDIRHGRESHRGGSVSYQNIHEAQFCLRLYEHVQKTVKSLGLGKITVGIITPYKLQLKCLQREFDEVLNSEEGKDLYINTVDAFQGQERDVIIMSCVRASSHGVGFVADIRRMNVALTRARRALWVMGNANALLQSEDWAALINDAKSRNCYMDMDSLPKDFLVSKAPVYTSLPGKPSSNMRGMRSGGPRYRSMDMHMESRLGPPSEDDENMGAPVSSRNGNHRQLRYSMENSLDDVEHGGDKSRDAWQYGIQKKHNSSGTMGKRDV

SEQ ID NO: 241212 - protein, 91 aa, Glycine max
  Clone ID: PAT_MRT3847_59842C.1.pep
ESQGWWLTATKACGVVFNRSAGSSSPPNDMCHSLEHFMVPNAWMSDFSWGALRVYKGSKNLTLRPSYFQIERTYSVCFQKFSIVYTLSVSR

SEQ ID NO: 241213 - protein, 154 aa, Glycine max
  unsure (1)..(154): unsure at all Xaa locations
  Clone ID: PAT_MRT3847_59843C.1.pep
QYVTGKVLFQGLLCGLFGGSLLQGFYVKSLALTTAVYVTAMLNLIPAVTYILSVTLRLEKSNLGTAGGMTKLLGTLTGIGGAMILTFYKGRRLCLWSTNIALLHREPSSHDAPIGSLLLGCILAXAAALSYSVWLIIQTKMSEKXPWHYSIAAL

SEQ ID NO: 241214 - protein, 66 aa, Glycine max
  Clone ID: PAT_MRT3847_59844C.1.pep
AHQCLLSLTTYLDSLTIRTMNLAKTGAQFIIPFNLSFQLSECHRQRRSEGLCQAYERRAAPAADEP

SEQ ID NO: 241215 - protein, 73 aa, Glycine max
  Clone ID: PAT_MRT3847_59845C.1.pep
SLIPVEFRYWVSFLFPFLSLFRVGPLTNAKFVILINDHLSVTILMFFFSSSACNFFVSSLDSPFSVLISTIPS

SEQ ID NO: 241216 - protein, 53 aa, Glycine max
  Clone ID: PAT_MRT3847_59846C.1.pep
IFFKVQPWFPFFLFLRILNFWGEGFAFPPPPGENFVGGKEIILPVRFSPPPLS

SEQ ID NO: 241217 - protein, 71 aa, Glycine max
  Clone ID: PAT_MRT3847_59847C.1.pep
QIFSVVLLVIGVEDNVTPWSLPQSRLYLASGENDLANGGGLRKPRMFNSMSDGFFSNTSKSITSWLLASNV

SEQ ID NO: 241218 - protein, 304 aa, Glycine max
  unsure (1)..(304): unsure at all Xaa locations
  Clone ID: PAT_MRT3847_59848C.1.pep
MDLPPAPIRWRATAIPFFVAVLFVSTISPSRAIYCDEDDCYDLLGVSQSANASEIKXYYKLSLKYHPDKNPDPESRKLFVKVANAYEILKDEATREQYDYAIAHPEEVFYNTARYYRAYYGHKTDPRAVLVGLLLILSGFQYLNQSTRYNQAVAMVKKTPAYKNKLRALELERSGGVTNKKKSQKNMDKKTEEDLSKELDLQITGAEMPSVWKLLGVRFVLLPYTLGKLLLWTACWFWRYKVKKYPYSLEDASYLTQRSLSIPLDRWRNIDEATKEDLVLRRLWEKSNLENYVAEMRKESKRRR

SEQ ID NO: 241219 - protein, 50 aa, Glycine max
  Clone ID: PAT_MRT3847_59849C.1.pep
TAMLPFKLKKCTLSHVLQLTNQFTHLFLFFLLIPYSKFEKMNYPSNYIYF

SEQ ID NO: 241220 - protein, 38 aa, Glycine max
  unsure (1)..(38): unsure at all Xaa locations
  Clone ID: PAT_MRT3847_5984C.1.pep
MYSXQFPALRXXXKXSAEXAAXEPXMEXPRSAGSVRFA

SEQ ID NO: 241221 - protein, 241 aa, Glycine max
  Clone ID: PAT_MRT3847_59850C.1.pep
MGCDFSKYTVCCTGSEQDGPAAEAQVDGGNEDNVVEGVDLPWFHEFTIEQLRKATSGFAIENIVSEHGEKAPNVVYKGKLDNQMRIAVKRFNRNAWPEAQPFLEEARAVGQLRNQRLINLLGCCCEGEERLLVAEYMPNDTLAKHLFHWETQPMRWAMRMRVALCLAQALEYCTSKGRALYHDLNAYRVLYDDEYNPRLSCFGLMKNSRDGKSYSTNLAFTPPEYLRTGRVTPESVTYSFG

SEQ ID NO: 241222 - protein, 65 aa, Glycine max
  Clone ID: PAT_MRT3847_59851C.1.pep
GVKGGGKKKIFNKPPPVGKKGEKKEGEKSQRGYMGAKKSPGPANKGFLPSGKTKPQGPLLRKENF

SEQ ID NO: 241223 - protein, 132 aa, Glycine max
  unsure (1)..(132): unsure at all Xaa locations
  Clone ID: PAT_MRT3847_59852C.1.pep
XDGRYKHWTKHEKNLAVTEEEMMEVIRNRGIPADVVAKRAHEFEKHGAHESLTDQITAVDTKDSTKANKIAQIMNLRQSVDGDPKLLTDGKXHEGKHIPGSNISAGENHVVQIPLMAHEEILCSSASDFRTA

SEQ ID NO: 241224 - protein, 114 aa, Glycine max
  Clone ID: PAT_MRT3847_59853C.1.pep
IDTAGGTPGTPSAPGNGSPVTSRAKGKRRERDRDGKGHSREALTRNGTTKDGRPASSSAKGDRKPKTKPKQKATHNTVTVKGPLGKQTEQPKPAMPPVPKTNEKPTKSNAKEKD

SEQ ID NO: 241225 - protein, 129 aa, Glycine max
  Clone ID: PAT_MRT3847_59854C.1.pep
APSLEHIEKPSNTSQNMSPKYMSLFLLVILGMAFLATTSLADRRFLSVEDGHDHHHHHPPKKHWPPTTQNEPSNVENKENTEVEDGHDHHHHYPPKKHWPPTTQNEPSKVENKDGHYKPPHKKHPPSGN

SEQ ID NO: 241226 - protein, 72 aa, Glycine max
  Clone ID: PAT_MRT3847_59855C.1.pep
SKTQRISKRPNWLPRLLKRSPLKMLPGRLFTGDFFSNFDLGAKHLWKVKILVPKGWVDPRAEIFSGTWGEHF

SEQ ID NO: 241227 - protein, 88 aa, Glycine max
  Clone ID: PAT_MRT3847_59856C.1.pep
FCYLQRCLILPLVSGRWKKRCNVSSIMLEMDRILRPGGRVYIRDSLDIMDELQEIAKAIGWHVMLRDTEEGPHASYRVLVCDKHLLLS

SEQ ID NO: 241228 - protein, 42 aa, Glycine max
  Clone ID: PAT_MRT3847_59857C.1.pep
DYIVRFWSRRTTHAISCMQRSCSSIRTSILRSKPDILQDNCR

SEQ ID NO: 241229 - protein, 197 aa, Glycine max
  Clone ID: PAT_MRT3847_59858C.1.pep
MSKMMGLLGGTKKPHAVLIPFPSQGHINPFLKLAKLLHSNGFHITFVNTDFNHQRLVKSRGPNALIGFPNFQFETIPDGLPPSNMDSTQSIPALCDSTRKHCLIPFCNLISKLNHSHAPPVTCIFSDGVMSFTIKASQQFGLPNILFWTHSACAFMSFKECKNLMERGLIPLKDANYLTNGHLDSAIDWIPGLKTSL

SEQ ID NO: 241230 - protein, 85 aa, Glycine max
  Clone ID: PAT_MRT3847_59859C.1.pep
ASRAVLLVSFNVHVVTVVSSTYVPLKPHPKTPKHPPVPKPPSPKQASCPKDTIKFGVCAAVLSLINVQLGQPPKTPLCNLIEGLA

SEQ ID NO: 241231 - protein, 75 aa, Glycine max
  unsure (1)..(75): unsure at all Xaa locations
  Clone ID: PAT_MRT3847_5985C.1.pep
EVHHNDIFIFGIDNTVLSNIPYYEKHGSGVEESNEGLXGEWVTKGDEQELTETPQPSTRSPPAPPCAHPLNRRKK

SEQ ID NO: 241232 - protein, 86 aa, Glycine max
  Clone ID: PAT_MRT3847_59860C.1.pep
PMAEPRIHEHCVLDVVHTATALYKDPLGPLLLSCQYPPGPVPDTKVPTEETNAPWKANRERGIRRNSMQLQPPGAAVPNSYGHPAS

SEQ ID NO: 241233 - protein, 209 aa, Glycine max
  Clone ID: PAT_MRT3847_59861C.1.pep
MLHSLFTQQFFIILFFKIDSGSMFLIMVFHSQDPVLCSVTVGVSHFDRCALWVQVLYYPFYGSGAVGDYEGDYAEEDPQIMRQKRSLRPELGEPVILRCQPYKIPLTELLLPHQISPVEFFRLWPSLPAIVEYTGTYTYEGSGFKATAAQQYGASPFLSGLKSLSSKPFHIVCSHIIRTVAGFEVCIYYLLCLSEIVKDKSMFVFAVEL

SEQ ID NO: 241234 - protein, 63 aa, Glycine max
  Clone ID: PAT_MRT3847_59862C.1.pep
ASVSLAVPKGLYKCCSGPFFIYDFKPVVSFPLLGRQNGCIKLRFNCPVWEYSNLDRDTKNFLS

SEQ ID NO: 241235 - protein, 58 aa, Glycine max
  unsure (1)..(58): unsure at all Xaa locations
  Clone ID: PAT_MRT3847_59863C.1.pep
YVVWNLKGGRRGELRVLAVLKRGDGGNGSVSXSATSSGGFDPCLIHWIAXSSRPWVNI

SEQ ID NO: 241236 - protein, 154 aa, Glycine max
  Clone ID: PAT_MRT3847_59864C.1.pep
PHPPTTLSTTYNQSGPKFCWPYSYHYMPTTYTYLRTANWYLGAHATKDTSVPKCPGHFPLFSKFPRSYTLWSGIPTVNVRPILFFSCLIHIYYGVCFLLTQNPNSLRVCTALYYIAVSSTLMVSFVILFMWGFIKPLAIFPPPPPKEGQRHTVI

SEQ ID NO: 241237 - protein, 46 aa, Glycine max
  Clone ID: PAT_MRT3847_59865C.1.pep
MKGPFVQSINESVDKYHGVNLYLKNSDDTIRDEKLNELFAEYGTIT

SEQ ID NO: 241238 - protein, 60 aa, Glycine max
  Clone ID: PAT_MRT3847_59866C.1.pep
NDWLNQVLHPVSEQDRVSVQVSLLMSALNAASNAPACALECMLSSWSFSIGVTIDGSVEI

SEQ ID NO: 241239 - protein, 344 aa, Glycine max
  Clone ID: PAT_MRT3847_59867C.1.pep
MLRSARSSSIRSVLAAQAQRGYATEAGAIKTLLFLEHRDGKINPGSLNALSAATALGGDVVGLVTGEGDAAQKVADAAKSLPLKSVILQKSEKLAHGLPEPLAPLLVDLIKSGNFTHLVGAHTALGKNAFPRAAALLDVAPISDVQKVISGDTFERPIYAGNAVATVRSKDAIKIFTVRTAAFDAAAESGSGASVEDGSGKEGELQSEWISEELTVSSRPDLGSASRVVSGGRGLKNKENFDKIMEPLADALGAAIGASRAAVDSGYADNSLQVGQTGKIVSPDLYLAVGVSGAIQHLAGMKDSKTIAAINKDPDAPIFQVADVGLVGDLFELTPELTQKVSQK

SEQ ID NO: 241240 - protein, 36 aa, Glycine max
  Clone ID: PAT_MRT3847_59868C.1.pep
QLNYVTHKGPAGIGVFLKIHVALCCDLSTRNTHRKR

SEQ ID NO: 241241 - protein, 119 aa, Glycine max
  Clone ID: PAT_MRT3847_59869C.1.pep
YSNFGLYRPRPIEKSWISGAGCMVAAICGSTQKEPVVVGKPSTFMMEFLLKKFNVSCSKMCMVGDRLDTDVLFGQNAGCKTLLVLSGCTTQSALQDPSNNIQPDYYTSKISDMLDLSGA

SEQ ID NO: 241242 - protein, 211 aa, Glycine max
  Clone ID: PAT_MRT3847_5986C.1.pep
MKTASLASLVLILLALSSQSLLGEVETSPEQVLDTSGKVLREGVNYNILISMPYTSCRSPQGLGLSKIGNSCPLDVVVVDINHRLPLRFIPVNPKKGVIRVATDLNIMFPDRNVTCPHHSTVWKVDNFHVSKGHRLVTTGGVVGYPGRETIGNWFKIEKYDGAYNYKLVYCPSVCPSCKHECKNVGMVVDQNGNQRLALSDVPYQFRFFKA

SEQ ID NO: 241243 - protein, 54 aa, Glycine max
  unsure (1)..(54): unsure at all Xaa locations
  Clone ID: PAT_MRT3847_59870C.1.pep
MFHFALNFQEWXXEEYPIYANGPGYIXSADIAQFIVSEFEKRKLKYVCNHLFHL

SEQ ID NO: 241244 - protein, 70 aa, Glycine max
  Clone ID: PAT_MRT3847_59871C.1.pep
YTQDSTPASANTNSTPLATTSLCFIRPFVLSFLFRSANRSINPSPAYNATHCQQHSPHLHPTNVTYPLPH

SEQ ID NO: 241245 - protein, 38 aa, Glycine max
  Clone ID: PAT_MRT3847_59872C.1.pep
PRVRTGARKRQKGSGAKSDQKGHDISWKGFLKRLNLKR

SEQ ID NO: 241246 - protein, 158 aa, Glycine max
  unsure (1)..(158): unsure at all Xaa locations
  Clone ID: PAT_MRT3847_59873C.1.pep
TAHIASPVLNGHLCITYFLXANVPCCGPXANWLPTFLPTTPCGPSHTRRITTSIRSLTSPNCTNPFTVAALPLYITLIYNFFQRLPTSLHSINSSPLSTRPSTSNCSLVLVNVTLYNLIYVIRPCFSSRIYNTRHRVRYITPPPPPPPPKEGGRHTVM

SEQ ID NO: 241247 - protein, 40 aa, Glycine max
  Clone ID: PAT_MRT3847_59874C.1.pep
FSAHHFYMLFGCKTVLSVIISIIGGPLIPVETLSSVQTLF

SEQ ID NO: 241248 - protein, 115 aa, Glycine max
  Clone ID: PAT_MRT3847_59875C.1.pep
MAAKLTLSSPLSFKTSFLPKSPSFSPGLCSPRTNVTGVKVHAKLGGGDEQAKNGGKKKFITREEEPQQYWQTAGEREGENPMKTPLPYIIIFGMSTPFVILAIAFANGWIKVPVR

SEQ ID NO: 241249 - protein, 126 aa, Glycine max
  Clone ID: PAT_MRT3847_59876C.1.pep
MRPHLQHKNINMAAKLTLSSPFSFKTSFLPKSPSFSLGLYSPRTNVTGVKVHAKLGGGDEQAKKGGKKKFITREEEPQQYWQTAGEREGENPMKTPLPYIIIFGMSTPFVILAIAFANGWIKVPVR

SEQ ID NO: 241250 - protein, 87 aa, Glycine max
  Clone ID: PAT_MRT3847_59877C.1.pep
GFPSRAVVHFRPVPSLDFVWSSSSLSSAPWSASSSLVTGCLTSAVLLLTEHRERGHQFIGSRGLLSRGLMVFSAHQAPCRRITCAAG

SEQ ID NO: 241251 - protein, 49 aa, Glycine max
  Clone ID: PAT_MRT3847_59878C.1.pep
PQARLAIPPPINKMLYIYIYKYKYICICGLSFSSFRHLKKKFFFLFKLE

SEQ ID NO: 241252 - protein, 50 aa, Glycine max
  Clone ID: PAT_MRT3847_59879C.1.pep
NGLFSAPIFNDVLPYPGLATEKIRVVLNTVGGLPRSSNRVTQCSLLFFIR

SEQ ID NO: 241253 - protein, 216 aa, Glycine max
  Clone ID: PAT_MRT3847_5987C.1.pep
MQPQSGGKFRPRLNTGEIPHFLSQIKTLESIIFHYNNFSGNLPPWLPSLPNLYRVSLDGNRISGTIPDSFGSFSDSLKLMTFSDNRLTGEIPATLAKLDFDFVDLSQNMLEGDASVLFGSEKHTLQINLANNSFAFDFGKVRVSKTLLILYLSHNRLYGALPEGLTSLKNLGTFDVSYNELCGKIPRGGRLQKIDVSSYSHNKCLCGSPLPKCKHL

SEQ ID NO: 241254 - protein, 122 aa, Glycine max
  unsure (1)..(122): unsure at all Xaa locations
  Clone ID: PAT_MRT3847_59880C.1.pep
FIMSALNTCGYVSTLFWVPLITETETETICGEPVDLEGQRWPASSRRRVLTSLGICALLRFLAVTPKPSLAQSLLCLFYPFFCLLNRNLIMHFVPIAFSIQASVLLTVXSLFLGIFLGKQNS

SEQ ID NO: 241255 - protein, 106 aa, Glycine max
  Clone ID: PAT_MRT3847_59881C.1.pep
LVGKPPGGFFLGGPNLSFRGPFSFNAKWERNLIWGSFSPLRGGLGESKKLFFFFFKDRVFHGGFGGAKKPIPGQITGTLIPWGWESKIKKLGPFFFFCFWGGHFSF

SEQ ID NO: 241256 - protein, 110 aa, Glycine max
  unsure (1)..(110): unsure at all Xaa locations
  Clone ID: PAT_MRT3847_59882C.1.pep
KEPGMLHRIDDTLHVRSGTQXMSTKVEHHGEHKSEHRGEHHGEQKXNTTGHQHHGEPMDRLVHRIKDKSHGDGHDEGEKXKRKDKKKKEHGXHDHDGHISSKDKRLRSYM

SEQ ID NO: 241257 - protein, 54 aa, Glycine max
  Clone ID: PAT_MRT3847_59883C.1.pep
LESSSGRVASRDIVQFVPFRDVQSGEISVVQALLAELPTQFLSYMRSRNILPNS

SEQ ID NO: 241258 - protein, 131 aa, Glycine max
  Clone ID: PAT_MRT3847_59884C.1.pep
PPLPKLFSPFILLSLFPLPPSLPFFLFLPASPSSNPPSGACPLLVLVVKLRIRRLLPGVAHHVQPSPRLRPRRISVVVRRLRPILTAPLVDILLHIVKLVQRLGRWLAIGLIVVVVHLRAFCPRLDEDCLR

SEQ ID NO: 241259 - protein, 58 aa, Glycine max
  Clone ID: PAT_MRT3847_59885C.1.pep
LLFSFYVTLFRMNIVTYRISTPNTHSKTNDNPFKNNTQLYLPFITTLNNLITNSIPIP

SEQ ID NO: 241260 - protein, 46 aa, Glycine max
  Clone ID: PAT_MRT3847_59886C.1.pep
CYLGGLLLGHDINQSLPLVKSPLVLMSPQCLSCMSLNINRIFIVLV

SEQ ID NO: 241261 - protein, 64 aa, Glycine max
  Clone ID: PAT_MRT3847_59887C.1.pep
ITLACVQHLLQAYAVTAHSNSLKTPRKNQSLFDTDTISEDDNLTTSESDPDDYDDNALIVVADP

SEQ ID NO: 241262 - protein, 165 aa, Glycine max
  Clone ID: PAT_MRT3847_59888C.1.pep
MIYSCSWPVYQIYNGMQPNFTAIIEHCNLWRNFDDIQDSWASLESIIDYYGNNQDVIVPNAGPGHWNDPDMLIIGNFGLSYEQSKVQMAMWAILAAPLLMSVDLRTIRPEYKAILQNRKIIAVDQDPLGIQGRRIYKHKGIEIWARPITPISQHFFSYAILFLNR

SEQ ID NO: 241263 - protein, 41 aa, Glycine max
  unsure (1)..(41): unsure at all Xaa locations
  Clone ID: PAT_MRT3847_59889C.1.pep
NRWMGKLSFPQGTFRSVKRMPLSIGGGAGPKXRYLMNMPNA

SEQ ID NO: 241264 - protein, 117 aa, Glycine max
  unsure (1)..(117): unsure at all Xaa locations
  Clone ID: PAT_MRT3847_5988C.1.pep
GVKRAIFALFQALLCPCSIPFKIGFCAPLKGCCGTWFVEPTSXLCNSHSPGLCFSASQYGFADSVHPSRAVNQVRVGALIQQGISLVTQRSGFYFCVTICSGNLLFVKVVLKFAVFL

SEQ ID NO: 241265 - protein, 98 aa, Glycine max
  Clone ID: PAT_MRT3847_59890C.1.pep
LHWAFGEYIQEWTHHLPNEVMSSPMGALILPMMHNLETTLKSGGVPKEPQLKPATALNVSANTQKNSCAFNSSNENGVSRPVNTEGTGNDENYKAVPW

SEQ ID NO: 241266 - protein, 146 aa, Glycine max
  unsure (1)..(146): unsure at all Xaa locations
  Clone ID: PAT_MRT3847_59891C.1.pep
KLQQKISVLKINLEKEDLVLYTRGYTAPEYAMQGQLSEKADTYSYGIVVLEIISGQKSTNVKIDDEGREYLLQRAWKLYERGMQLELVDKDIDPNEYDAEEVKKIIEIALLCTQASAAXRPTMSELVVLLKSKSLVEQLRPTMPVF

SEQ ID NO: 241267 - protein, 397 aa, Glycine max
  Clone ID: PAT_MRT3847_59892C.1.pep
GLPDNQTINIRPYLKEGGSSKKWAIIGGVVGGVVLLLVLFACRLFTKQKRVPKADILGATELRGPVNYKYKDLKAATKNFSVDNKLGEGGFGAVYKGTLKNGKVVAVKKLMLGKSSKMEDDFESEVKLISNVHHRNLVRLLGCCSRGPERILVYEYMANSSLDKFLFGSKKGSLNWKQRYDIILGTARGLAYLHEEFHVSIIHRDIKTGNILLDDYLQPKIADFGLARLLPRDRSHLSTKFAGTLGYTAPEYAMQGQLSEKADTYSYGIVVLEILSGQKSTNVKVDDEGREYLLQRAWKLYERGMQLELVDKDIDPNEYDAEEAKKIIEIALLCTQASAAARPTMSELIVLLKSKSLVEHLRPTMPVFVETNMMNQEGGSSPGTSNATISISVLSAR

SEQ ID NO: 241268 - protein, 130 aa, Glycine max
  unsure (1)..(130): unsure at all Xaa locations
  Clone ID: PAT_MRT3847_59893C.1.pep
TIQKLMLSSGTAIDDQLTERHDLDATEIGKAHGYYXHRALDGITQTILWTVLEHCGEHDQHDDVVDDRLKSVAIHRTTSXNVRYEXVRGRGTYERARMYASLDTLLQEDLLTADGVDTILLLNVYLTEYR

SEQ ID NO: 241269 - protein, 353 aa, Glycine max
  Clone ID: PAT_MRT3847_59894C.1.pep
LHHNSLNLLYHYYLFSDGSGKPVDFCHSRGVTHRDLKPENLLLDENEDLKVSDFGLSALPDQRRSDGMLLTPCGTPAYVAPEVLKKKGYDGSKATDIWSCESHWHLHYTPIQHYGENVMRIYSKSFKADYAFPEWISPAAKNLISNLLVVDPQKRYSIPDIMKDPWFQIGFLRPIAFSMKESALEDNIDFSGDDVPSPGSDDGNSSSNNEDGELTGAKPARPSYNAFEIISSLSHGFDLRNLFETRKRSPSMFISKFSASAVMAKLEGVAKKLNFRVTGKKEFMVRMQGATEGRKGKLAMTVEVFEVAPEVAVVEFSKSAGDTLEYLNFCEDQVRPSLRDIVWSWQGDANCHQ

SEQ ID NO: 241270 - protein, 125 aa, Glycine max
  Clone ID: PAT_MRT3847_59895C.1.pep
TLNQLFIINAGSGFRMLWKAVKTFLDVRTVAKIHVLGFNYLSVLLEAIDSSNLPTFLCVNCTCSDYGGCLMSDRGPWKNPEVLEMIQVVNLREEIDGKSEDGDVDIEDSSMPKKVDMQNKDGNSL

SEQ ID NO: 241271 - protein, 166 aa, Glycine max
  Clone ID: PAT_MRT3847_59896C.1.pep
IDFSGDNVPNGSDDGNSSSSTNDDGELTGAKPARPSYNAFEIISSLSNGFDLRNLFETRKRSPSMFISKFSASAVMAKLEGVAKKLNFRVTGKKEFVVRMQGATEGRKGKLAMTVEVFEVAPEVAVVEFAKSAGDTLEYIKFCEDQVRPSLKDIVWSWQGDANCHQ

SEQ ID NO: 241272 - protein, 59 aa, Glycine max
  Clone ID: PAT_MRT3847_59897C.1.pep
EGKPLHYIGSSFRRIIPGFMLNGGDFTHGYGMGGESIYGKKFADENFMLKHTGTGLLSL

SEQ ID NO: 241273 - protein, 129 aa, Glycine max
  unsure (1)..(129): unsure at all Xaa locations
  Clone ID: PAT_MRT3847_59898C.1.pep
FTRTATRTDHRGGHHRTQTKENKTLSQHSHGGTPVLFSNPGFTGQTGLXQFNEFVRKTRGTGKGRTNMHRTDESAPYSIWYGPDRSKNLGPLSEHVASYLTGXLPGDYRWDTVGLLADAETLVGTCSWK

SEQ ID NO: 241274 - protein, 215 aa, Glycine max
  unsure (1)..(215): unsure at all Xaa locations
  Clone ID: PAT_MRT3847_59899C.1.pep
CAGARARAAPPPAATPAGGERRPLPPPLPYPSYPGSFFGDFPGFYFGGAFXPPPRPFFGRFPGFSGPFAPPDYSPPYGSQPQGSQMGLGAGLPVGAVSGALGGLAFQEGVYFQEGQIPGRVWNPVPSAKVAAGRAQFRGFRVGFLIGPLPPAWGCSQALNFKGVSLWVPSNGFPGYKNMSMEIVPPGVGIKGGDLVFPPFCLWGFETLPGPLFLK

SEQ ID NO: 241275 - protein, 87 aa, Glycine max
  Clone ID: PAT_MRT3847_5989C.1.pep
MTKMVKHVIHIEVLEAPSLSKHTIYKAPKNLRKVKEDAYTPQCISIGPIHLGKQELEKMQEYKVTYFFFLLKVRLKRANHECLQTLP

SEQ ID NO: 241276 - protein, 54 aa, Glycine max
  Clone ID: PAT_MRT3847_598C.1.pep
SSDFRESGFFSDDLYDVYNRHLVCLYKDVTNQSTFNNFPVVLYVFKAGPFPFRM

SEQ ID NO: 241277 - protein, 301 aa, Glycine max
  unsure (1)..(301): unsure at all Xaa locations
  Clone ID: PAT_MRT3847_59900C.1.pep
MAPAMRIVFGLLTFVTVGMIIGALSQLAIIRRLEDSYGTDSLPFRRLRGLDTDRHLQLPRGVPFWNNDKEAEILRLGYVKPEVLNWSPRIILLHNFLSMEECDYLRALALPRLHISTVVDTKTGKGIKSDVRTSSGMFLNSKERKYPMVQAIEKRISVYSQIPIENGELMQVLRYEKNQYYKPHHDYFSDTFNLKRGGQRIATMLMYLSDHIEGGETYFPLGNAVLCCCGGLLGQALPVRPLGGCAVLSGGMGPAGQSDPAGVPXGCEVISRLVRSPAKWSRLASPPRFLCWRHLVRCVSA

SEQ ID NO: 241278 - protein, 132 aa, Glycine max
  unsure (1)..(132): unsure at all Xaa locations
  Clone ID: PAT_MRT3847_59901C.1.pep
EKKEQAKRVAAENGVVNPSGAMIAAFAPMYXAAIPVTSYLTKPNSVMQSLVHALIKLIPGVTTTAITSGRAIPALSAIYLFWTFGASGALSAAGQAMGREEGLDIEHSRKHIHKLDGLPLRLRSAHYALMEN

SEQ ID NO: 241279 - protein, 245 aa, Glycine max
  unsure (1)..(245): unsure at all Xaa locations
  Clone ID: PAT_MRT3847_59902C.1.pep
MLGGFVKKFASTMGGCASKPNRKSNVHKREHKKFRKHASLGDITKKRHSNASATRRKSDVSNMKLHLAQLQYQSHSKKDASGKTHEDAWFDSVSIIESESDDDFISVLGDGFPFVTNNALGSVPNTQLLQHENASCLVDSGCKYDRLCDSYFKAGVPERFLCRPRAGLQILNTTQEKPCPSSWSAVSPSVFNLRGEKYFRDKQKCPAPDFSPYIPIGVDLIASPRXVNHIAQHLELPSAKSMRKY

SEQ ID NO: 241280 - protein, 50 aa, Glycine max
  unsure (1)..(50): unsure at all Xaa locations
  Clone ID: PAT_MRT3847_59903C.1.pep
IFVFSFITLLFRSALKRSLPLWKRIFLQIPPNMIDANSLKRIQALCYNXP

SEQ ID NO: 241281 - protein, 104 aa, Glycine max
  Clone ID: PAT_MRT3847_59904C.1.pep
RTGGLFYYPKAFFGLKVKELKTGRLALFSMFGFFVQALVPGKGPLENLPVPLVGPVNNNAWAFAPPFVPGKWGSKNEKKFEGFLICVWGRPSDNVNFFGGPNPP

SEQ ID NO: 241282 - protein, 105 aa, Glycine max
  Clone ID: PAT_MRT3847_59905C.1.pep
HLWLLWLSTPFLRRNARFYFGAKCYFYARPGSFFDTGGPASLRYTLGGPIPTRWDKKGTRGTLFMAEIGVVNTTASLGHHPGMRQLLTGGLLPTPGVGLVDGPNS

SEQ ID NO: 241283 - protein, 209 aa, Glycine max
  Clone ID: PAT_MRT3847_59906C.1.pep
MARSKRRRFTSGSNVRPGTMTFEPILEEGVFRFDCSVNVRDAVPPSISFLNTNDRDISIYSEKVPLYTPTFACRSEKQVVKLELPVGSSLYGTGEASGELERTGKRVITWNTDAWGYGPGTTSLYQSHPWVLAVLPNGEAIGILADTTRRCEIDLRKESTIQFVAPSAYPVITFGPFASPTAVLISLSKAIGTVFMPPKWSLGYHQCHS

SEQ ID NO: 241284 - protein, 104 aa, Glycine max
  Clone ID: PAT_MRT3847_59907C.1.pep
MALVSGGRSTLNPNAPLYIPAAFRQVEDFSPEWWQLVTTLTWYHDYWLSQQHDDGAFYGEDGFDGNDVVDLLPDSFDFDAGEDLFEEFIRSSESQEETGPKGTA

SEQ ID NO: 241285 - protein, 110 aa, Glycine max
  Clone ID: PAT_MRT3847_59908C.1.pep
NQVLPTVFTFPQFPTISSPNNLILASKPFAGNSRYKHSKTPLHLTTFSGQSKVITYLSKHKADVGASAMDYMAAIHFSSHKGHFEVVLALLSTCAFLKTVTLKSMTSLHY

SEQ ID NO: 241286 - protein, 115 aa, Glycine max
  unsure (1)..(115): unsure at all Xaa locations
  Clone ID: PAT_MRT3847_59909C.1.pep
SRIGYIDGAGDLLHTGHVEILRIAGDHVDLLFVGIHTDQTVNASRGSDRSIMNLHXGSINVLTXSILDYVINGAEWXISQDLLTTFNMSLIVHGTIALRNDCLKVKCNPCADTIS

SEQ ID NO: 241287 - protein, 80 aa, Glycine max
  Clone ID: PAT_MRT3847_5990C.1.pep
EDEEQVEIENLNARVSDVDDKGDNQTRLSETADRSVQEALESGATQHASDDDLVESSSAIAPGYVPSELDERIVLELPSS

SEQ ID NO: 241288 - protein, 54 aa, Glycine max
  Clone ID: PAT_MRT3847_59910C.1.pep
VALALACLCFQPKSRPSMQQVAQELCASKLPPPLPFYKISIAQLMTPDILLSFI

SEQ ID NO: 241289 - protein, 44 aa, Glycine max
  Clone ID: PAT_MRT3847_59911C.1.pep
EGRTVLRSYNVPPESTRVRMILWGPLMGGSSLALRMRELPPGIP

SEQ ID NO: 241290 - protein, 75 aa, Glycine max
  Clone ID: PAT_MRT3847_59912C.1.pep
LIGCAISAFMDELHCFCSRTHRSLCHLLSCIYHFPSYHITISCIYHFPSDHPLLCKEAVFRFELMNPQVTITTFT

SEQ ID NO: 241291 - protein, 154 aa, Glycine max
  unsure (1)..(154): unsure at all Xaa locations
  Clone ID: PAT_MRT3847_59913C.1.pep
RNPSFDLRARASLPGKDPATARAILTRAAAGTTPSNXPTPXAEAGPQKDRGATAEHPGRTAHRAQNXKQPQEKEQAEGNPPPDHKPXARPEKSTPTKAQXERGKTPKNDRTGAGPHPPKEHXEKEDQEKPKKKDARPRQKKNPQXKEDQAQKET

SEQ ID NO: 241292 - protein, 68 aa, Glycine max
  Clone ID: PAT_MRT3847_59914C.1.pep
DREEESVINRKRCVICHDMVRMRFPMAGVGNIDGTFSPSPPRFDRHDIIMVEKEMLFEEVIYVQKLKK

SEQ ID NO: 241293 - protein, 56 aa, Glycine max
  Clone ID: PAT_MRT3847_59915C.1.pep
RKLGGTTPKTRVSFVIFSDVVKRALVATAVAATVAAASTPTARHSQNLWIEFHKLK

SEQ ID NO: 241294 - protein, 57 aa, Glycine max
  Clone ID: PAT_MRT3847_59916C.1.pep
TIKHLSFRKKNEKKCQVWDLKGPINQGCYSNPLILFFRQVFFQLNVKKTPVKKKTWG

SEQ ID NO: 241295 - protein, 80 aa, Glycine max
  unsure (1)..(80): unsure at all Xaa locations
  Clone ID: PAT_MRT3847_59917C.1.pep
KLQTEARPATTAKQRETRXPNNXENTTQAAGDRXTTDPPTKPNRNGRKHTRAHPKKHTPEDPXPREKKRNAKTRAPKEKA

SEQ ID NO: 241296 - protein, 67 aa, Glycine max
  Clone ID: PAT_MRT3847_59918C.1.pep
LTAAFSLFFFFFFFGDWAAPAPFKMMFGPWVEPSCRIESHAQAPINPSCHLLGKQGIDSFLSEPLLN

SEQ ID NO: 241297 - protein, 53 aa, Glycine max
  Clone ID: PAT_MRT3847_59919C.1.pep
MFLAFWSPFLIHFTSTVKKPHLRVIMAFKRGGEIFNSAEHSHQRGDAYFSLLM

SEQ ID NO: 241298 - protein, 139 aa, Glycine max
  unsure (1)..(139): unsure at all Xaa locations
  Clone ID: PAT_MRT3847_5991C.1.pep
GICNSFILLIALLTQYTFNTSIVVVSKIQDRLLYVREQLFILDFKDLCNSLILENHCTPTLSHSSIKPTMARLATSFFWPNMYKDTKXFLHLCVICQHNKYPPQKQMGLLQPLPIPKKVWEDLTMGFHHSFTYFGSYYY

SEQ ID NO: 241299 - protein, 360 aa, Glycine max
  Clone ID: PAT_MRT3847_59920C.1.pep
ASQTASGVLSGSGVLNARPGSATSSGLLSHMVSSLNAEVAREYLEKVADLLLEFAQADTTVKSYMCSQSLLSRLFQMFNRVEPPILLKILRCINHLSTDPNCLENLQRAEAIKYLIPNLGLKEGSLVSEIHHEVLNALFNLCKINKRRQEQAAENGIIPHLMQFITSNSPLKQYALPLLCDMAHASRNSREQLRAHGGLDVYLNLLEDELWSVTALDSIAVCLAHDNDNRKVEQALLKKDAVQKLVKFFQGCPEQHFVHILEPFLKIITKSARINTTLAVNGLTPLLIARLDHQDAIARLNLLRLIKAVYEHHPQPKKLIVENDLPEKLQNLIGERRDGQVLVKQMATSLLKALHINTVL

SEQ ID NO: 241300 - protein, 90 aa, Glycine max
  Clone ID: PAT_MRT3847_59921C.1.pep
MMITKDDDKGDDKTLKDQSKNNSSESKINQRTTQVNQEEFKTQEESLESRIKIQGSRSQESRFKVQDLKNQDQGSIKISMKSFSQKLNST

SEQ ID NO: 241301 - protein, 177 aa, Glycine max
  unsure (1)..(177): unsure at all Xaa locations
  Clone ID: PAT_MRT3847_59922C.1.pep
FFQVDSLQFRLAYVAPESRVVGAGELVDHPKKIALHYLLXSFVIDLFVVLPLPQIFILFVQPKHLGSSGANYAGFFLPKHLRIVIIVQYIPRLCRFLPMLISPTGLIFESPWASFFINLFTFMLSGHVVGSWWYLFGLQGGYRRPRVVCQFLFQGHPVSANFFVCGHGHAAVKFSLN

SEQ ID NO: 241302 - protein, 98 aa, Glycine max
  unsure (1)..(98): unsure at all Xaa locations
  Clone ID: PAT_MRT3847_59923C.1.pep
FFXXTIXXAWQCHAYYMFPLRMNTGYFSLTPEKKYASWTLAVEAHNIFGFETIPEESLXSTKEYIHCEQYISHSQTVNQQSYFYSHNLQXHPKDTFLF

SEQ ID NO: 241303 - protein, 50 aa, Glycine max
  Clone ID: PAT_MRT3847_59924C.1.pep
KNPFLKKKELEVLLLNKSCRRKQQKKKVGASKMMKLLYEIIRTTPVILRG

SEQ ID NO: 241304 - protein, 139 aa, Glycine max
  Clone ID: PAT_MRT3847_59925C.1.pep
DIFLCCSDRIADHSNGDVAIDSYHRYKEDVAMMKDIGFNAYRFSISWPRILPRGNLQGGVNQEGITYYNNLINELIANGQQPLITLFHSDFPQALEDEYERSLSPKIEQDSANYAKVCFKEFGDRVKHWITLNEPVLYS

SEQ ID NO: 241305 - protein, 56 aa, Glycine max
  Clone ID: PAT_MRT3847_59926C.1.pep
SFRSIKRALVVKNNRHNSVLCNCVQSLICYVSLYLFFRVIFYLMKYEHDSFCSMGQ

SEQ ID NO: 241306 - protein, 337 aa, Glycine max
  unsure (1)..(337): unsure at all Xaa locations
  Clone ID: PAT_MRT3847_59927C.1.pep
MWVKVVLLLLAALSLFHLAAASLNRSSFSADFFFGTASSAYQYEGAAREGGKGPSIWDTFTHSHPDRIADHSNGDVAIDSYHRYKEDVAMMKDIGFNAYRFSISWPRILPRGNLQGGVNQEGITYYNNLINELIANGQQPFITLFHSDFPQALEDEYGGFLSPKIEQDFANYAEVCFREFGDRGKHWITLNEPVLYSNGGYGSGXSPPNRCSKWFANCTAGDSTTEPYLVTHHLILAHAAAVKVYREKFQASQKGQTGVTLNSAWVAPLSQSKEDREAGYRGLASMYDWIMEPLYFGTYPGVMANRVGXRLSKFTKREYLMAKGSYDFXGGNYYTST

SEQ ID NO: 241307 - protein, 55 aa, Glycine max
  unsure (1)..(55): unsure at all Xaa locations
  Clone ID: PAT_MRT3847_59928C.1.pep
PGRPTRNKPXXQHNXAIFFTYTPISSARLFINMIPHQTFTLXSTFHSSSIIPSYL

SEQ ID NO: 241308 - protein, 85 aa, Glycine max
  unsure (1)..(85): unsure at all Xaa locations
  Clone ID: PAT_MRT3847_59929C.1.pep
GDGADGRPEGPYLYADELIEASKKTHAYGTCRYRIYHLEAGEIGSVFYGMLTAHCNIYATTCTNGKESNWGXTYCPGEYPNPAPE

SEQ ID NO: 241309 - protein, 94 aa, Glycine max
  Clone ID: PAT_MRT3847_5992C.1.pep
FFWFFFPTHVSSGCTLEAIGFSVFFGVPKSPCLLFLSDLCSLFFIISRPVCLPLWLPFVLSGVDTFVFAIHLICSLCFCTQKKKKKAVRLRFQA

SEQ ID NO: 241310 - protein, 46 aa, Glycine max
  unsure (1)..(46): unsure at all Xaa locations
  Clone ID: PAT_MRT3847_59930C.1.pep
WICLRLEFKAFLDASGGLWETQQLAGKLVGIFYSTRSXGGGQETTA

SEQ ID NO: 241311 - protein, 61 aa, Glycine max
  Clone ID: PAT_MRT3847_59931C.1.pep
RRELGASREGLRFFYRRLNIGAFVPKGNDYMLPRGGTPPFLIYDFPPLVGQKGGPSPGNSI

SEQ ID NO: 241312 - protein, 323 aa, Glycine max
  Clone ID: PAT_MRT3847_59932C.1.pep
AAAALRTGSRKFNVGGRVMETTSTTLANAGRNSMFGAMFDDNWNLIPNNDDNNNNERFIDRNPDCFAILLDLLRTGELYVPPDIPEKLLYREALYYGLLDHVRAAKWGPFDGNRLRLSRSLQGQAPGDGTAIRAGPDGGCCVAHGSMVHVYDWMLDEHPPLNLDYQRVNDVGWVDSDNMVIGVSERLGRGDGGMGLFSSHTGELRYKFHVCHDNQVKSYTAGALSFSSDYKIFSSCKGRSNEYGVGVWDQVTGKQIDFFYEPLGWSLGDADKLQWMEWSNCMLVATMFSRKDNCYICLLGFKDKKMEWCWPDVLAPFAVHEKR

SEQ ID NO: 241313 - protein, 74 aa, Glycine max
  Clone ID: PAT_MRT3847_59933C.1.pep
PIPQFKPKPNRIFPLDKRQSTLNTQSTITTNLRINPREDNIPLLQPNNWPNHFFVATGQGGGLLHLNLITLSRL

SEQ ID NO: 241314 - protein, 49 aa, Glycine max
  Clone ID: PAT_MRT3847_59934C.1.pep
VWCSMMGFMTRWTSAGVGNIWETYSYVRIYAEVIVVSVFVAYSIPLAYS

SEQ ID NO: 241315 - protein, 48 aa, Glycine max
  Clone ID: PAT_MRT3847_59935C.1.pep
FFNSQYFFVFLYNLLNKLKNRLIFLYLYLFFIFFIILLFPHSKTKDTY

SEQ ID NO: 241316 - protein, 131 aa, Glycine max
  Clone ID: PAT_MRT3847_59936C.1.pep
MHICTSVVADTCVAMDGWVQNPTAHTALDEILPCVDNATAQETLFRTRDVTHQLANLVDNIVSNVTNRNLPPAAGPLYYNQSGPLMPPLCNPFNNDLTNRSCADGEVSLDKAAEVRDYLRFLKVNLYQTKA

SEQ ID NO: 241317 - protein, 129 aa, Glycine max
  unsure (1)..(129): unsure at all Xaa locations
  Clone ID: PAT_MRT3847_59937C.1.pep
MKPFLLSHPDTMYNCSQVYCSHSLAHTSYPCGDPYFGSSIVAYGTQAITQQMVPQMLGLASTRIALPVELAEDGPIYVNAKQYHGILRKRQSRAKLKAQNKLIKSRKPYLHEFSHRHXLKKVRGTGKRF

SEQ ID NO: 241318 - protein, 233 aa, Glycine max
  Clone ID: PAT_MRT3847_59938C.1.pep
MKPFLSNHTDSMYNCSQVGCSHPMAHTSYPCGDPYFGSSIVAYGPQAINQQMVPQMLGLASTRIALPVDLAEDGPIYVNAKQYHGILRRRQSRAKLKAQNKLIKSRKPYLHESRHRHALKRVRGTGGRFLSAKQLQQFNAELVTDAHSGPGPVNVYQKKDASEAESHPSRTGKNASITFTAISGLTSMSGNSVSFRRPEHNFLGNSPNIGGSSQCSGGLTFGGGARQCTSVGR

SEQ ID NO: 241319 - protein, 70 aa, Glycine max
  Clone ID: PAT_MRT3847_59939C.1.pep
KGTKDIYWIKQKRKGIEVRYNKSKKKIRFQLEGICISLLKNRYYLHKAEGSLFKSPKNTGKMKTEKKRCK

SEQ ID NO: 241320 - protein, 64 aa, Glycine max
  Clone ID: PAT_MRT3847_5993C.1.pep
NLKEMLSYSPTTACSLNKTNLKFHCPQCKVRFDKTGCGDSYANIPTKFHSQSLKEVYYRCPPAE

SEQ ID NO: 241321 - protein, 73 aa, Glycine max
  Clone ID: PAT_MRT3847_59940C.1.pep
MLWPKMADIVTGVCNDIPAWPGREREDISEKRAYFGIKTTDRTIEFECGSKGDKQFWLEGIQYMLNCRVKVTL

SEQ ID NO: 241322 - protein, 59 aa, Glycine max
  Clone ID: PAT_MRT3847_59941C.1.pep
PTRPQTHRVSHSSFIIGIFRVLPGTLLPSIIYVSILKSLKRCSYNMALLVKPLITYHKI

SEQ ID NO: 241323 - protein, 101 aa, Glycine max
  unsure (1)..(101): unsure at all Xaa locations
  Clone ID: PAT_MRT3847_59942C.1.pep
PWHVDQMQSPRIDFSKCVFLEGFLDGQFXQLQLLKHESNPDYAVXGASLFFEESEWLIRDLTFALHKNGHDYRKVEAHVHQLIGRSSSXGSHTVKPACFAF

SEQ ID NO: 241324 - protein, 39 aa, Glycine max
  Clone ID: PAT_MRT3847_59943C.1.pep
YRYSRVYTRLRINYSYSTPVASLNLSVSRATLNSTGRVG

SEQ ID NO: 241325 - protein, 73 aa, Glycine max
  Clone ID: PAT_MRT3847_59944C.1.pep
VGWFPPGVCLDLAPGGAVVLVLVFGSAPVGTALRGGSSICLVLVGCGRVLRFVVVWGFSVLCCPLPLFGFVWG

SEQ ID NO: 241326 - protein, 47 aa, Glycine max
  unsure (1)..(47): unsure at all Xaa locations
  Clone ID: PAT_MRT3847_59945C.1.pep
VVVLVCLVPLVVPIPVMFLAXFTSLIQALIRATLAAAYIGESMEGHH

SEQ ID NO: 241327 - protein, 89 aa, Glycine max
  Clone ID: PAT_MRT3847_59946C.1.pep
VNTMTLKIILQFLYSSSEIIKVGLRKKSDIATKSESRESGVIYNIMALNDFFAGEIATKLLKMRINISRAPTSSSATSTTSYPPSRKSS

SEQ ID NO: 241328 - protein, 113 aa, Glycine max
  Clone ID: PAT_MRT3847_59947C.1.pep
EFLMSKEMDEGAVERVEGCNGSDTAVEIKDGEFSWDDVDGNAALRVEEMEIKKGDHAAVVGAVGSGKSSLLASVLGEMFKISGKVCSSSGLLIYICCFFIYFVGIQVGVSRFL

SEQ ID NO: 241329 - protein, 175 aa, Glycine max
  Clone ID: PAT_MRT3847_59948C.1.pep
MGSSSDETESCSPPGQLIFEYFEHETPYNREPLANKISDLERQFPELKTYWSCDLSPASWVSFAWYPIYRIPTGPTLQSLSACFLTFHSLSTALQSSNTDGLHNHYSRGRDISKLSLPIFGLASHKFKVSIWDPDGVSECQKANSLSRAAENWLRLLRVNHPDYNYFMSHYAYVR

SEQ ID NO: 241330 - protein, 83 aa, Glycine max
  Clone ID: PAT_MRT3847_59949C.1.pep
SYQSLQGPDTLGRRYFLRPRGVHFATWFASCLSSRLWSSTGLFVCRVSKRVNNEYMSFRGLPVSLRISFRVGHPARPCSGILG

SEQ ID NO: 241331 - protein, 59 aa, Glycine max
  Clone ID: PAT_MRT3847_5994C.1.pep
RGRFFFFFFFFVLASNINFFGMGGTAQETPSSSFTKKEPPHFIKLGRRAFNWFPKNKIS

SEQ ID NO: 241332 - protein, 120 aa, Glycine max
  Clone ID: PAT_MRT3847_59950C.1.pep
NNYYFIFHTSCFIFFMLFSTFIFFVGKRGQTKTIFMSYYFQFLIDNLTFCRLINKTKLYTCSIKAIVNFFFNLTKVYSSISIRKLIKCLFLTLLLIVPLEIKKTRYNLFNKNTDPNFNRF

SEQ ID NO: 241333 - protein, 80 aa, Glycine max
  Clone ID: PAT_MRT3847_59951C.1.pep
KLRVGQRERERERERERVGVWDIAVHGGAGVDPNVPLERQEEATQVVTRCVNVGVCALNSSVRGIDVVELVERELETGAL

SEQ ID NO: 241334 - protein, 87 aa, Glycine max
  unsure (1)..(87): unsure at all Xaa locations
  Clone ID: PAT_MRT3847_59952C.1.pep
HRFSPFSFSXRHQMMETTAXXXAVVAPIAAXLLXVLXAAIXXVEAQENXXVKTXVQXLXGXHXGTPXWECKXXXIYSXSXXNXXXFP

SEQ ID NO: 241335 - protein, 115 aa, Glycine max
  Clone ID: PAT_MRT3847_59953C.1.pep
LLLCYLGVSTGPSNFPYPEIPVAAFCLPSFVVKVYWFACSFLHGSRFLKDLLLVTLRFSSCRSASFFFLSFQVGYFSWFSLPFSLYCYPRVSFSFSLWFAPFEASLILFLPLAFL

SEQ ID NO: 241336 - protein, 76 aa, Glycine max
  unsure (1)..(76): unsure at all Xaa locations
  Clone ID: PAT_MRT3847_59954C.1.pep
IGIYRQHKFFFSFLMTAYSSLLSQYIFTLDSXXGFSLIESLKYAFHMTCLVIFLVSRTANMFWWLLAVLRQFNSHY

SEQ ID NO: 241337 - protein, 68 aa, Glycine max
  Clone ID: PAT_MRT3847_59955C.1.pep
QDQVRGSFPGSRDYQWPTARKLLEAHLESCSAHSIDLYMSELHLHVVLECLGTLTVPAMESLSALEQL

SEQ ID NO: 241338 - protein, 97 aa, Glycine max
  Clone ID: PAT_MRT3847_59956C.1.pep
WANRGCTARGFNWGPAGVWQARWCGSPASGLGLRGSLDMLSVAGNRQQAWFLSCGGPLAVGRFGFFFFGPPRLLGFHGVFRVLWWLINAILATHGLS

SEQ ID NO: 241339 - protein, 211 aa, Glycine max
  Clone ID: PAT_MRT3847_59957C.1.pep
MAKPQNTKPGCFSFSSFLRVFLCAGNGTTPPVHPYHITESEESENAHFTKEKMVVNDNDDIASAPGVVARLMGLDSLPNPKWVVKCGTPDSVPRSRSVNFVDYLLEFDASHVSSHRRVKTSASFREVPSLVQNQKGNGYGNGNNLFVFCMAGDNNMREEQEGRNEMREVEKLRQRKRQKESVSVKKERNQGKKNKKISKLKNEPREVPSSS

SEQ ID NO: 241340 - protein, 80 aa, Glycine max
  Clone ID: PAT_MRT3847_59958C.1.pep
SKGLLPFLFFSQNMLKFLCTLNQQSLSNRIMYRKDQCPVNGTLTVSQRSLVKMPIPSTNVTRIETDPADRRQLRMTVALG

SEQ ID NO: 241341 - protein, 91 aa, Glycine max
  Clone ID: PAT_MRT3847_59959C.1.pep
MASSVMACVALKPAPFTVEKCSVRGLTSLSRNSFSFIVEASGGKKIKTDKPYGINGGMALREGVDASGTKGKGKGVYQFVDKYGANVDGYR

SEQ ID NO: 241342 - protein, 38 aa, Glycine max
  Clone ID: PAT_MRT3847_5995C.1.pep
LHARVVARFVGQMLAHSHANMLYHCEMRQWPITASESI

SEQ ID NO: 241343 - protein, 151 aa, Glycine max
  Clone ID: PAT_MRT3847_59960C.1.pep
SITIKSKDAAQSPLRKALSPININGNQKPLESQTPFLATCSTNKGPQKNDTPLGKFSTRIGKFSTRSFTLKNCLVQEYIDFLNNASREELLELKGIGEKMAEYIIDLREESPLKSLNDLEKIGLSSKQAHNLFTKAAKTLFEDKAEDSILG

SEQ ID NO: 241344 - protein, 104 aa, Glycine max
  unsure (1)..(104): unsure at all Xaa locations
  Clone ID: PAT_MRT3847_59961C.1.pep
LLQNGITYYMSPIIXAAVFLIKLDSPLKKICPLTLFQSPNYLYNTIALFFTSPLHTLFIAKRYPLSINFGSFTLITLCANIPTYFAIVQIHFLQTFKLSSRDTI

SEQ ID NO: 241345 - protein, 151 aa, Glycine max
  Clone ID: PAT_MRT3847_59962C.1.pep
SRQSQSFVAQNFMCKQELEADNLSCMLQDPFVQLPQLESPSLPLVKRPSTVSLVSDNNEDEDIQNRLLSNNNNTKKVTTDWRALDKFVASQLRQEVDSHESNGVPSSFQPHDDNHDMALLLLQSSRDEGNRLSPFLNTSSDCDIGICVFEK

SEQ ID NO: 241346 - protein, 147 aa, Glycine max
  Clone ID: PAT_MRT3847_59963C.1.pep
MFTLSGYDSWVVRHPSALNSFDRLMKAASGKRIIVFLDYDGTLSPIVNDPDRAFMSDEMRAAVYEVATYFPTAIISGRSRDKVKGFVKLNNLYYAGSHGMDIMAPSMAVTSSDGKHFDIARNTNGTEVPFQPAKKFLPAIGEIIRVL

SEQ ID NO: 241347 - protein, 145 aa, Glycine max
  unsure (1)..(145): unsure at all Xaa locations
  Clone ID: PAT_MRT3847_59964C.1.pep
MSGASSTIRLSPMVSVSPNCNCSSMMVMKKTTTAVAPLWMKSKSARGGIRCEVAINAVDESTTSPESKIGARVKVTGXLKVYHVPKVGELDLTGLEGEIKQYVGLWNGKRISANLPYKVQFLTDIPGRGPVKFFAHLKEDEFDYL

SEQ ID NO: 241348 - protein, 73 aa, Glycine max
  Clone ID: PAT_MRT3847_59965C.1.pep
TAARRRQKGGHLTKIFKPKVLLSSVWSLSLAIRLPIHTSFNYNSKKLISHPPCFNIQKNPCYLHFTLCNCFTH

SEQ ID NO: 241349 - protein, 153 aa, Glycine max
  Clone ID: PAT_MRT3847_59966C.1.pep
MGSTSASALRLSSMVSVSPNCNCSSMTLMKKTAMAMAMAPFSLAMKIKSKRGGIRCEVAINAVDEESRTSPEETKIGARVKVKEAGLKVYHVPKVGELDLTGLEGEIKQYVGLWNGKRISANLPYKVQFLTDIPGRGPVKFFAHLKEDEFDYL

SEQ ID NO: 241350 - protein, 114 aa, Glycine max
  unsure (1)..(114): unsure at all Xaa locations
  Clone ID: PAT_MRT3847_59967C.1.pep
RVRLLLLLCFSAPHASAQSSQARSLDAILQEYAFKAWVKPRTGTIYNATATQLPSNLTGVKISALRLRSGSMRRKGFPSYNEFEIPIGVIXQPYVKRLVLVYQNLGNWSNSYYP

SEQ ID NO: 241351 - protein, 104 aa, Glycine max
  unsure (1)..(104): unsure at all Xaa locations
  Clone ID: PAT_MRT3847_59968C.1.pep
SGLYNQIPTAFHPFADANADDFCAXSKDFLHIRVHQPNGRNNLTTVQVLKKEFSFNKILKDFKKELWCNGTLVXKPITXQVIQLKGDQRKNLSTILAQAGFGKK

SEQ ID NO: 241352 - protein, 196 aa, Glycine max
  unsure (1)..(196): unsure at all Xaa locations
  Clone ID: PAT_MRT3847_59969C.1.pep
RERREEEERLNNPEEQRRMQLLEQQEAERMQRDMILFREREKAWMDTVITQKQQQQQQQQQEDEDDEYEYVEEEGPPEIIWQGNEIIFKKKQLRVRVTDRDKPKPNETNQNDHQQEEDNKPTSNPLPPESLTLENVAQQIPNFGTEQDKAHCPFHLKTGAWSFGIRCXRVHLYPDKSSTLLIKNMYSGPGLACDQD

SEQ ID NO: 241353 - protein, 89 aa, Glycine max
  Clone ID: PAT_MRT3847_5996C.1.pep
CLPRLPSLTSGAFGDIIWNVNPCCQEVIGTVSRWMPLSLYWGKLGMHFWTAVSFGYLFTVLESIRCALAGMYADIPFICDAAYIQIPYD

SEQ ID NO: 241354 - protein, 50 aa, Glycine max
  unsure (1)..(50): unsure at all Xaa locations
  Clone ID: PAT_MRT3847_59970C.1.pep
YSIQLESSYPYFLLXPXSVYFLASHQVNKGTSSYTXDLSAIYLQDCFIQR

SEQ ID NO: 241355 - protein, 69 aa, Glycine max
  unsure (1)..(69): unsure at all Xaa locations
  Clone ID: PAT_MRT3847_59971C.1.pep
MEETFVPLRGIKNDLKARIPCYRQDWTSGFQAGXDGSLTAVQTLASTALCGIIHSIIGGQPLLILGVAE

SEQ ID NO: 241356 - protein, 155 aa, Glycine max
  Clone ID: PAT_MRT3847_59972C.1.pep
DILSQSPNSSPFSFAPFEMLLNFEFIPTYFTSMNGFFVPIFAFFVIQLHFASADPFAQGNLALVFDAKSGRSSENSAQIANLSALWCQATFDGSDQLPIKSARFIQLHPPPLRHHQARLSPEGNRAFLDFGLVPISVIGKYRCEITTEDDKLVTG

SEQ ID NO: 241357 - protein, 63 aa, Glycine max
  unsure (1)..(63): unsure at all Xaa locations
  Clone ID: PAT_MRT3847_59973C.1.pep
AQEKKIPNGKMATFPFLGFIVPXNVTAXGPLYKMLKHLFDPWPENLKKAAWRNYGGAASNCIE

SEQ ID NO: 241358 - protein, 120 aa, Glycine max
  unsure (1)..(120): unsure at all Xaa locations
  Clone ID: PAT_MRT3847_59974C.1.pep
MKGLAVLYAELVVVAWPCHGSRYQRFPPRMTTGYXERSSEVKGASFRLAREAHNIRTFETIPEECIEPTKDYINGEQXRSDSKTCXQQASLYASEREVHHNDIFIFCIXNTVLSKIPYYE

SEQ ID NO: 241359 - protein, 67 aa, Glycine max
  Clone ID: PAT_MRT3847_59975C.1.pep
PAQGPVLFFIPQPLEPLPFELKNFSSVCNTNLEAKAREEGQEEKPPGFLISIVTKEPKVVLYCMSES

SEQ ID NO: 241360 - protein, 93 aa, Glycine max
  Clone ID: PAT_MRT3847_59976C.1.pep
YNRDGKIIRGIRVLKTFSFDPLTFFLFNLKCNYTSDFLLPVCWKKLGVSHIIPLVKVTFFSRCVRGCQFQTNITIKHFVCLFRQWNAHCRAVL

SEQ ID NO: 241361 - protein, 56 aa, Glycine max
  Clone ID: PAT_MRT3847_59977C.1.pep
VPQKYKGVEFIYHKERSRLRDSLEGEHEFVSPISADIDNDIYGLCRGVATAREIAS

SEQ ID NO: 241362 - protein, 49 aa, Glycine max
  Clone ID: PAT_MRT3847_59978C.1.pep
TPAGTFPFPGTSPLSFSHPGRKNSGNGTLNYISLAPNIITNDKVYSIKD

SEQ ID NO: 241363 - protein, 56 aa, Glycine max
  Clone ID: PAT_MRT3847_59979C.1.pep
TKLKLLMGFNTKTREVAFLLKGMASHQAIIHEQCLLLTSTLSQTLHFNRRTFKIRE

SEQ ID NO: 241364 - protein, 273 aa, Glycine max
  Clone ID: PAT_MRT3847_5997C.1.pep
MIQNGCIVSQGCAPLNSRSRNHVIPSTSVFRCASRMPPKVAVSNIRSFWGHNLEFQSLLPRGMTLSNTFTASSLRVSEGQNFLFRVLPLLPHLRKSNMVPRASKDVPTSFRYPPMTKKPQWWWRSLACLPYLMPLHETWMYAETAYNLHPFLECFEFYTYPFLMAIGSLPSWFLMAYFFVAYLGIVRRKEWPHFFRFHVVMGMLLEIALQVIGTVSRWMPLSLYWGKLGMHFWTAVSFGYLFTVLESIRCALVGMYADIPFICDAAYIQIPYD

SEQ ID NO: 241365 - protein, 63 aa, Glycine max
  Clone ID: PAT_MRT3847_59980C.1.pep
AYASVATLPAFPCIVSQNTQGINTMTSEVQRLTKNNVSDQTHSIDCINPEKHPLILFASDFDD

SEQ ID NO: 241366 - protein, 128 aa, Glycine max
  Clone ID: PAT_MRT3847_59981C.1.pep
FNFVASDVLTYCTVDDDDDFRGPVSAHFIRPDRLSDSGVSDDVTMDSTAFSLHYRSLARSDSGDIKTRQFAGITTPSSQGSYMELTEAKKRPGQVVLDADSAGRDSNDMSIDGDHQMSFGYDILSRTR

SEQ ID NO: 241367 - protein, 60 aa, Glycine max
  Clone ID: PAT_MRT3847_59982C.1.pep
METKPTEISSGKMFGGYNKRFRHFSPTLGCSMNFHIYFPPSPSPSHKFPVLYFLSGLTCT

SEQ ID NO: 241368 - protein, 49 aa, Glycine max
  Clone ID: PAT_MRT3847_59983C.1.pep
FGFFFFFFFLLPLLQYTGYNLPPQVISKQAGVSPHLLVREPIPLPRLST

SEQ ID NO: 241369 - protein, 75 aa, Glycine max
  Clone ID: PAT_MRT3847_59984C.1.pep
LIRAEHEAGRPSPVNMPMPVMIWGKLNLAHSHNTYSCTSLLSCSLQYYNHRQHRHGDSAGRGGAGWSYTGSTMTE

SEQ ID NO: 241370 - protein, 60 aa, Glycine max
  Clone ID: PAT_MRT3847_59985C.1.pep
ILIFFFFFFFFYFFFFFFNRTKLCYCLTTQHFRIQKPHKFISNLFLYTMHITTTLYALIT

SEQ ID NO: 241371 - protein, 77 aa, Glycine max
  unsure (1)..(77): unsure at all Xaa locations
  Clone ID: PAT_MRT3847_59986C.1.pep
NQGLPQHTGSLVPPPXXCYDSXSGCXXLDXVIRGTINSXVTLHDYVXXXXPXVQDHFTXKAVKQFKQCXLXQTDKIW

SEQ ID NO: 241372 - protein, 314 aa, Glycine max
  unsure (1)..(314): unsure at all Xaa locations
  Clone ID: PAT_MRT3847_59987C.1.pep
KCXVRXIKLCIPTRPVDSAENDEGVVSCPASSQICSPSRGLSDLEEPPLSSHSYPMEIKSNEVELTQIAMVTNAEKSENQSAPLLDVASSDVVNSSLSNITKLEESLSTFADSQKKEIEVDEAVARDSLTELEEQKIVDQPEIASVDVQLNLNKLVPFDLPDSEICNNIQKSSPREKFQHGAFVDDAEMVPKFLGLDAQQSESLSYGLHDPLQNDRDGFSSPSGNQLEPETDLDLFSKSQIGEQDAEFPLREEKNFASEKPHFSRCRNINWSKKALMLLLTAYQKSMQMSHHHFIPCHSHLARRIMLQNVSWIH

SEQ ID NO: 241373 - protein, 78 aa, Glycine max
  unsure (1)..(78): unsure at all Xaa locations
  Clone ID: PAT_MRT3847_59988C.1.pep
SALSSVSLQNGQLGSATKKSRLPRLTLAGNLSIITLHANIAILGGIFSFHNSSNAPXWFYTGISPLMTWWQIWPSSDQ

SEQ ID NO: 241374 - protein, 305 aa, Glycine max
  Clone ID: PAT_MRT3847_59989C.1.pep
MRCNACWREVEGRAISTTCGHLLCTDDANKILSNDGACPICDQVLSKSLMKPVDVNPNDEWVNMAMAGVSPQILMKSAYRSVMFYLGQKELEMQFKMNKIVAQCRQKCEMMQEKFTEKIEQVHTAYQKMAKKCQMMQQEIESLTKDNQELQEKFAEKSRQKRKLDEMYDQLRNEYDSVKRSAIQPADNFYSRNEHDLFSNPPNIMDGREMGRKGGLVFTPATPGPREDVWPARQNSNNSGHFDLSVGSPAKQTVIAGDAGNRRAGAHPVFGPGATNNPSMTLRNLILSPIKRPQLSRNRPQLFTL

SEQ ID NO: 241375 - protein, 137 aa, Glycine max
  Clone ID: PAT_MRT3847_5998C.1.pep
MADKAVTIRTRKFMTNRLLSRKQFVVDVLHPGRANVSKAELKEKLGRMYDVKDTNTVFVFKFRTHFGGGKSTGFGLIYDSVENAKKYEPKYRLIRNGLDTKVEKSRKQMKERKNRAKKIRGVKKTKASDAAKAGKKK

SEQ ID NO: 241376 - protein, 98 aa, Glycine max
  unsure (1)..(98): unsure at all Xaa locations
  Clone ID: PAT_MRT3847_59990C.1.pep
RREKSGGEGXDVSLXANKFXEXQPIXTEAQSQXDGKXXQXXAPXLLVDPTXFTXWSFYRAGIXEFVATFXFLYITVLTVMGVXGAKSXCSXVGIQGIA

SEQ ID NO: 241377 - protein, 184 aa, Glycine max
  Clone ID: PAT_MRT3847_59991C.1.pep
NSITKFNDWIHELELIEAPWIRRKYTWFRPNETSRSRIDRFLVSHEWLDRWPGSYQSTLARNFSDHCPILLRSKLADWGPKPFRILDCWLSDKSFKEVVHQCWTSHQQLGWGGFVLKEKIKRLKQRLKIWNQEQFGDTLKRVKKIEAELNKLEENTSHRELSSQKVTKRKQLQEALWVVAQAHV

SEQ ID NO: 241378 - protein, 81 aa, Glycine max
  Clone ID: PAT_MRT3847_59992C.1.pep
GEKQKAPAGGINKKKSFFFLGIGGCAPKFFFRTWFCFKIFPSHLPLSWGFPSPGQKDWKPQRGGPLMNPKNPNKKGFFFFF

SEQ ID NO: 241379 - protein, 59 aa, Glycine max
  Clone ID: PAT_MRT3847_59993C.1.pep
MWGGGGDLCFVCPPCCPFFFPDPFFPYPLSLPKKKKKKKKKKKKKKKKKKKKKKKKKKK

SEQ ID NO: 241380 - protein, 85 aa, Glycine max
  Clone ID: PAT_MRT3847_59994C.1.pep
RGNSILRTETRWVEWHGQKKKITCSRNAYNNMEKESGIVFLYWLVQLNSINLSLLLSFLSFQDIFCKGVLYKLKGDHLLMVQWLV

SEQ ID NO: 241381 - protein, 123 aa, Glycine max
  unsure (1)..(123): unsure at all Xaa locations
  Clone ID: PAT_MRT3847_59995C.1.pep
MKMKVLVLFDATLLVAWQCHAYDMFPLRMNTGYGARTSEGRRTTWRLAVEAHNIYGFETIPEXECVVPTKEYIHGEQYRSDCKTDNQHAYFYAIDLEVHSKDTFVFSIHGTVLSNMPYLQKHG

SEQ ID NO: 241382 - protein, 37 aa, Glycine max
  Clone ID: PAT_MRT3847_59996C.1.pep
KHYIDTPSYATLTPLTSEATIMDKKVRGVCVITQNLV

SEQ ID NO: 241383 - protein, 179 aa, Glycine max
  Clone ID: PAT_MRT3847_59997C.1.pep
MSYMQLSQKFYDAFKLCGSPPIARKLHAQLILSGLDASLFLLNNLLHMYSNCGMVDDAFRVFREANHANIFTWNTMLHAFFDSGRMREAENLFDEMPHIVRDSVSWTTMISGYCQNGLPAHSIKTFMSMLRDSNHDIQNCDPFSYTCTMKACGCLASTRFALQLHAHVIKLHFGSPKPA

SEQ ID NO: 241384 - protein, 119 aa, Glycine max
  unsure (1)..(119): unsure at all Xaa locations
  Clone ID: PAT_MRT3847_59998C.1.pep
STRPIRAYRHVNPFNPLHKGTVTGPLHTGTSVENFQRGTSIIKSHGGNILTSVSGLXANXKFLQPTIVDISADAPVDNQXLFTPVLNVMKLQTLYXAYAFNNSVPHGLXSHIFTQIPGT

SEQ ID NO: 241385 - protein, 132 aa, Glycine max
  Clone ID: PAT_MRT3847_59999C.1.pep
MQQAPTTLTGLLHRVAGIFPSRRAVSVSGKFDLTHSRLHHLVELAASRLLSAGIKPGDVVALTFPNTVEFIITFLAVIRARATAAPLNAAYTAEEFEFYLSDSDSKLLLTSKEGNEPAQAAGFKLNIPHATA

SEQ ID NO: 241386 - protein, 36 aa, Glycine max
  Clone ID: PAT_MRT3847_5999C.1.pep
CCPIREAFVSAISQFVDILCPTPRELGFVRIFRMIR

SEQ ID NO: 241387 - protein, 120 aa, Glycine max
  unsure (1)..(120): unsure at all Xaa locations
  Clone ID: PAT_MRT3847_599C.1.pep
HLKTYLSLLLNGRYTISSRKLAYNPKLSDFFEILATSDDGDGKTILFTLRGMKYAVTVNLLQLKKNAYECATSLKAPHTHDAIKVTQSTADSLITEATICTDTPDADXVRDXLIYNYKPT

SEQ ID NO: 241388 - protein, 38 aa, Glycine max
  Clone ID: PAT_MRT3847_59C.1.pep
APSKSVKMGIDLDRHHVRDGHRKVPKSTNPYGRLLVPL

SEQ ID NO: 241389 - protein, 199 aa, Glycine max
  Clone ID: PAT_MRT3847_5C.1.pep
SHARVRKLGIRLEISNILNKEEGLIQRLKNGLQDCSTHTQPFWNALTHRTRTPSVQVAQTAPFNTREPVMLACYVWGFYPADVTVVWMKNGQLVTSHSNKEKTAQPNGDWTYQTVSYLALTPSYWDIYTCVVQHSGTPEPIRANWTPGLSPIQTVKVSVSAATLGLGFIIFCLGFFRWRKSHSSSYTPLPGSTYPEGRP

SEQ ID NO: 241390 - protein, 158 aa, Glycine max
  Clone ID: PAT_MRT3847_60000C.1.pep
WGWCRNSNLISGFTCFLFLICKGSDKCMMGNNCVGSKTSNDALFPYVLPGSFWWLHQTSVTEISDAPSLVTKIQDTNFLENVQENPPQVVKINHEEMKLKPTVPKHDKETNMPSEEQTRHMQKMPHKVKRLPIGLQAESILKRKMVTLRSTITWDKSL

SEQ ID NO: 241391 - protein, 70 aa, Glycine max
  Clone ID: PAT_MRT3847_60001C.1.pep
VSLGALSTPLTIRHDKIHQCPPIRFNQRSVDHGATVLHSWPHFTRANDQRVGSINGFGTILGVGSSFVSC

SEQ ID NO: 241392 - protein, 94 aa, Glycine max
  Clone ID: PAT_MRT3847_60002C.1.pep
NNGSPWQNKTWGWNGILWQLQKCLFKMFQKVRPLMVPWWNSSPKYSIYATAPRSPKGKAFLYFLNFGKSLNLKRKFKRKDLGLVQPPIQIDEWK

SEQ ID NO: 241393 - protein, 91 aa, Glycine max
  unsure (1)..(91): unsure at all Xaa locations
  Clone ID: PAT_MRT3847_60003C.1.pep
KHGSSLFQFLHTLPSPFTITPXFFXXCSSHHLCFKXKRDSAPEXLEXXRISTXXRXTXSVIVSAXAEXASSAVEGXSPPPPPAXXEKXXGA

SEQ ID NO: 241394 - protein, 55 aa, Glycine max
  unsure (1)..(55): unsure at all Xaa locations
  Clone ID: PAT_MRT3847_60004C.1.pep
HPNTWLGTPXNVSRTGGLYMTGSSCALIDEVRLRLISTDANHLAKDWWNVSAGPR

SEQ ID NO: 241395 - protein, 103 aa, Glycine max
  Clone ID: PAT_MRT3847_60005C.1.pep
KGKTKTRKGPNTLKRGTPKKGKNPQKKKPPSGKPALITQGHNTDPKKNPPFKTTSFQHPKIELRKTHYPTMEKSRQTKTPPIKSPPGPLSLQPEPSTYKNPVG

SEQ ID NO: 241396 - protein, 56 aa, Glycine max
  Clone ID: PAT_MRT3847_60006C.1.pep
LNTLNSLYWHKNWMLIFTLINRKYTISACQPDIISDRYLDRLLLIKVKSSIQFLCQ

SEQ ID NO: 241397 - protein, 339 aa, Glycine max
  unsure (1)..(339): unsure at all Xaa locations
  Clone ID: PAT_MRT3847_60007C.1.pep
MDQELSSIFQLETRRLLWLIGITVAMVLAFQYLELPYGGIQRIVFSANKIPTSDSIRFQAADLPSESERFNNMTFLNQANSTGESATVNETRTSEEKDNVSGTGLISELGRESSRSLGFNETEESSTVQSTRISNESTHAGNLGLSSYNDTISHSPSRAIIPTNLAPPLSPTKVSPNITPPMSSNDHEETDFAEDEKLRPVQDDVNILRHNSPINSVAPKKTKGSQKPLPEVTTISEMNELLLQNRASFHSERPRWSSIVDQELLQARSEIENAQIVNDDVNLYAPLFRNVSRFKRSYELMERTLKVYVYRERRXAIMHSPILSGLYAXRGWFMKHMGA

SEQ ID NO: 241398 - protein, 85 aa, Glycine max
  Clone ID: PAT_MRT3847_60008C.1.pep
LVLVLELGLESSILFGREMYIASMGRSFKDSLKLLEADIHHANTLLVSLFFLSFFHHSFHFSFFFHTRCRKISSFDQVCIFVFKC

SEQ ID NO: 241399 - protein, 80 aa, Glycine max
  Clone ID: PAT_MRT3847_60009C.1.pep
FEHMPSRPYSETSLNMMLVILYTETHARNALDCHCYPSNTPLGGTMALDDAKYVKRKLWTRLPMYTGAPHLSEHVVSGHY

SEQ ID NO: 241400 - protein, 137 aa, Glycine max
  Clone ID: PAT_MRT3847_6000C.1.pep
MADKAVTIRTRKFMTNRLLSRKQFIVDVLHPGRANVSKAELKEKLGRMYDVKDTNTVFVFKFRTHFGGGKSTGFGLIYDSVENAKKYEPKYRLIRNGLDTKVEKSRKQMKERKNRAKKIRGVKKTKASDAAKAGKKK

SEQ ID NO: 241401 - protein, 67 aa, Glycine max
  unsure (1)..(67): unsure at all Xaa locations
  Clone ID: PAT_MRT3847_60010C.1.pep
FFLFSGSYFNELKEHILRMGXNIKTIASEVLIPFAFMSSFDKAYRTSSKSFCVPAMVEGLKILFNVK

SEQ ID NO: 241402 - protein, 93 aa, Glycine max
  unsure (1)..(93): unsure at all Xaa locations
  Clone ID: PAT_MRT3847_60011C.1.pep
LALLKKMDHLLFQLQMLSSSTSETKRECEGVQSIAAWERNHMHXRSDVPFSNAEKPMKKMRTDDMYNTNHMTMRDGSSSLGHFYGSGKANVGA

SEQ ID NO: 241403 - protein, 34 aa, Glycine max
  Clone ID: PAT_MRT3847_60012C.1.pep
ISPFLANRPLIRGLLLPMSFCKQLIPRRKQVNIC

SEQ ID NO: 241404 - protein, 91 aa, Glycine max
  unsure (1)..(91): unsure at all Xaa locations
  Clone ID: PAT_MRT3847_60013C.1.pep
MVSGNIFHCRKYFMPRHEFIRPYTLHLVEYXGXATPEHVWRRRXYSHAKLLKELRAILMVAIKLVRSGYLKLNYVREEAFHGTKGPLDAFT

SEQ ID NO: 241405 - protein, 82 aa, Glycine max
  Clone ID: PAT_MRT3847_60014C.1.pep
MKLNISFPATGCQKLIEVDDERKLRTFSEKRMATEVAADALGEEWTGYVVRLSGANDKQGLPMKQGVLTHGRVRLLLSKGHS

SEQ ID NO: 241406 - protein, 57 aa, Glycine max
  unsure (1)..(57): unsure at all Xaa locations
  Clone ID: PAT_MRT3847_60015C.1.pep
GATSGPAFXQCVFDHWEMMSYDPLEAGSQAARLVSRIHKKKGLKGQMTPLSEFKAKL

SEQ ID NO: 241407 - protein, 78 aa, Glycine max
  Clone ID: PAT_MRT3847_60016C.1.pep
NSNGGLIFVDRKVYTMEEFVYLIRLINCLDVGDNQKWVVRMDYQWMNHDNFLECLIIRFVKKCERISGRIVLILQDVD

SEQ ID NO: 241408 - protein, 49 aa, Glycine max
  unsure (1)..(49): unsure at all Xaa locations
  Clone ID: PAT_MRT3847_60018C.1.pep
VNLKXXSLSLIFLWLSNSSKDRILXSIFTKLXLAQFFLQKICILLFSIX

SEQ ID NO: 241409 - protein, 170 aa, Glycine max
  unsure (1)..(170): unsure at all Xaa locations
  Clone ID: PAT_MRT3847_60019C.1.pep
GKSYPTVSADYQKAVEKAKKKLISFITEKRCSPLMLRLAWLSAXTLDKGTKTGGPFGTIKHPAKLAHITNNRLYIAVRLLHPLKAELRILSYANFYQFTGLGGVDVTGGPEVAFHPXIRDNPKAAPGYQWANTTKGVYHVRNICADVLRLTDEDVLPGSRDYTCGSYGHK

SEQ ID NO: 241410 - protein, 201 aa, Glycine max
  Clone ID: PAT_MRT3847_6001C.1.pep
KPNALRERRYVKCINGVGTRVYLFTNPAFNNAPNRSLFPKLNRTLSVSFSDRLRDDYVRVDAPRSKEVVPATRGGDGGEAILASSPSADNSGTLQLKPLMFRNRFLNFARLGSVINGAAESFFKSEIRRRLFVTAVLIVISRVGYFIPLPGFDRRLIPEDYLSFVAGSSLLADELGDFTAELKLSIFQLGISPQIINRVHY

SEQ ID NO: 241411 - protein, 142 aa, Glycine max
  Clone ID: PAT_MRT3847_60020C.1.pep
GRVGNYTVHAFMYSYYALRAMKLRLPKWFAMMITVMQIAQMVVGVSLAFITLYLKLGGMESCQCTWTNLYASFILYGSYFLLFCNFFYQTYLRRGNRYANKSKAKGGKAAAESVVHANGTANCLINDESAKTNGSVCHHQQQ

SEQ ID NO: 241412 - protein, 76 aa, Glycine max
  Clone ID: PAT_MRT3847_60021C.1.pep
WMTAYGCKPKICHIHMVDLWQKQWWTKKKYRQKLKKSINKFKKKTEESYTKFQENIITFIKDIMVIKKDSYKLTIK

SEQ ID NO: 241413 - protein, 37 aa, Glycine max
  Clone ID: PAT_MRT3847_60022C.1.pep
STLIKTFPLDFLSLFGCQKIQLVLHFIYSDSYLKPEL

SEQ ID NO: 241414 - protein, 118 aa, Glycine max
  unsure (1)..(118): unsure at all Xaa locations
  Clone ID: PAT_MRT3847_60023C.1.pep
CSNYNLACFQPFYSFSFYRSRNQVLERSCLEMIITXDPKSSIIFVRQKVVLKVELHDDKIKKKAMKAVSGISGMESQHPIIFVNCHVNYIHLFLCLANYSRLKNQMVHKIECFWGDFF

SEQ ID NO: 241415 - protein, 127 aa, Glycine max
  Clone ID: PAT_MRT3847_60024C.1.pep
GKLPVPLLTAKYGLDSIILCLYEPTSYPSETPPLPNIALQISIPKKKSPTQHTLIKPNPTLFSLTLNFNSYSHKSIIFIATPTTKQHIKKISTRPPITTESMTDEPQPYKILSKTQSIKPNIYKQIK

SEQ ID NO: 241416 - protein, 54 aa, Glycine max
  unsure (1)..(54): unsure at all Xaa locations
  Clone ID: PAT_MRT3847_60025C.1.pep
GGTFLWDLDRLLYLETTNSFKLLTAKPDVYLVNMTEKDYQRXNNMFLPKIHAWC

SEQ ID NO: 241417 - protein, 50 aa, Glycine max
  Clone ID: PAT_MRT3847_60026C.1.pep
MWTGCLVEGDLTVALALCGGGDGKTWLKGWRGVGGGCGDVIVGGLFWRLG

SEQ ID NO: 241418 - protein, 131 aa, Glycine max
  Clone ID: PAT_MRT3847_60027C.1.pep
MEEGKEWSVKEKNETTTRPSLKSDVPFNKYELWKHKLRDNCYKRVREDRTRLLWKFRYNQQEEEDIVKCAFQDIVSDELNKIKRTDELLWEYEGPHQGECQDILLEMQRIFYQDLNSQSTIQDLECDIETW

SEQ ID NO: 241419 - protein, 243 aa, Glycine max
  Clone ID: PAT_MRT3847_60028C.1.pep
MACINVSEQQTHEPSSTVIATTNRFKLHKNFFNNCNGASVPRKLRSVTKKRGRESMLLDSEKLKHTMHGIESLKKESLKKSKKQGMWRDCSPREGASGPITKDEQEVAETLYALAGMFPHNASNHNSTDLDGKFLPDNSSVLQDLEDNASAAALQDSILASATAPVASPSYHESSAGEASKISWLNEAVGQKQPDFPESATLLMPSHSTSITINLQTMPVAAKRENSNKAALHDSVCLAMGFN

SEQ ID NO: 241420 - protein, 71 aa, Glycine max
  Clone ID: PAT_MRT3847_60029C.1.pep
TEGAFIIKGYIHNLHSHIFISLQILPIIKGVQFPALMAIFCREGLNANHSFDSKIFWLRFSHTFKKTRSPH

SEQ ID NO: 241421 - protein, 55 aa, Glycine max
  Clone ID: PAT_MRT3847_6002C.1.pep
VTTFFPAHGVTVLMSCPFGLQHIPDAFHLCRHRFTKLYKSAESACSWLHQKRSSW

SEQ ID NO: 241422 - protein, 76 aa, Glycine max
  Clone ID: PAT_MRT3847_60030C.1.pep
EAEEKRQARLEKELLEEEERKQRKRFEAIEMQKLRKTATRRCRNCLNPYRDQNPGGGRFMCSYCGHVSKRPVLDLP

SEQ ID NO: 241423 - protein, 32 aa, Glycine max
  Clone ID: PAT_MRT3847_60031C.1.pep
GHELLVKLIQLCGFIVMLETSLCCFLFRGFNK

SEQ ID NO: 241424 - protein, 74 aa, Glycine max
  Clone ID: PAT_MRT3847_60032C.1.pep
MPLKSEQLLNNSDCLLHITRLFSETRELFIKVYLDQGLKQFVSQEHWLILICQWLLSVFYGRVSLFKRKRHKSE

SEQ ID NO: 241425 - protein, 172 aa, Glycine max
  unsure (1)..(172): unsure at all Xaa locations
  Clone ID: PAT_MRT3847_60033C.1.pep
LRVRIPLRTLPSRSDSQNDPDSQATSLLASSRYDDHDRDYDYRHPDTARSQRRRSYSGSESSWTDTGDIGEQLADNDPVRLQLSTEIEDELLAGVQRRHKNHNQKRVRIQDSHHRHHSRSHSVLIDKEAIEVPDFNPRPPTRGERIIGAIMSGRSGSIHXLTGKPLLYFTSI

SEQ ID NO: 241426 - protein, 149 aa, Glycine max
  Clone ID: PAT_MRT3847_60034C.1.pep
GMEKLVEYIKIRYRNMPMYITENGYSPPPKPDVTIHDSLQDFKRIDYHKAYLAALLRSIRKGADVRGYMIWSLMDNFEWASGYDIRFGLYYVDRQTLERIPKLSVQWFSSFLNNTSHTNKQPLSEQYVRSKDVPPLVSKLFEQPKMHGY

SEQ ID NO: 241427 - protein, 184 aa, Glycine max
  Clone ID: PAT_MRT3847_60035C.1.pep
MVRYGASSIDGAKSARARGSYLRVSFKNTRETAQAVNGWKLDRALTYLGNVLEHKEAIPMRRYAGSTGRTAQGKAFGVSKARWPVKSAEILIGLLKNAEANADTKGLDTSNLIIKHIQVNQAPKQRRRTYRAHGRINPYMSNPSHIELILTEAAEVVQKSPQTLERRLNSRQRGRAVRKAITAS

SEQ ID NO: 241428 - protein, 334 aa, Glycine max
  Clone ID: PAT_MRT3847_60036C.1.pep
VNHSFIFGFKKGTDLSYHQVFFFSFVLAALALTSVLANLDMQIDPETKEYKAFTELLPLILVLVLIAILLCPLNIVYRSSRMFFLTCLIHCICAPLYKVTLPDFFMADQFTSQVQALRSFEFYICYYGWGDFKQRETSCKSNRIFIAFSFIVAVIPYWSRFLQCLRRLFEEKDKMQGYNALKYFLTIAAVCLRTAYTLHQGMGLKVMAWIFSISTAIFSTYWDLVLDWGLLQRHSKNRWLRDKLLVPQKSVYFAAMVLNVLLRFAWLQTILNLNFSSLHRQAMVSIVANLEIIRRGIWNFFRIENEHLNNVGKYRAFKSVPLPFNYEEEEDKDE

SEQ ID NO: 241429 - protein, 155 aa, Glycine max
  Clone ID: PAT_MRT3847_60037C.1.pep
MSMSCNSLLLLFSSIFLTYFPGLIISADVTLSSIEIFTTHEFLKATPTVYFLCKGDNKTQLPDIKKPHVFYSFKGEESWQPLTNFSGKKCKRCGIYEEDKFLSDDVFDVWEFCPSDFTTPDGRYVHFKEKEFNARFLCPECLSLSGGGSLATFFL

SEQ ID NO: 241430 - protein, 58 aa, Glycine max
  Clone ID: PAT_MRT3847_60038C.1.pep
TATDGPSDRTHRASTCSRGSAAALGQVAQLVALAAHSYIGGRRAGDHPARMQFLNHPR

SEQ ID NO: 241431 - protein, 48 aa, Glycine max
  Clone ID: PAT_MRT3847_60039C.1.pep
YLRNKIIINQQLQGKKTAELINIKQCFRTSGVTKRLIAWFLILPGRVI

SEQ ID NO: 241432 - protein, 95 aa, Glycine max
  unsure (1)..(95): unsure at all Xaa locations
  Clone ID: PAT_MRT3847_6003C.1.pep
SGIIHNIDETLHVGWLIIEEHNGEHLGELIGEHLGVLPCEHXKVISNDXHHHVEHIEGLVGKIIDIIHGDCLDYGDNMIENDYIMKEHGLDHYGH

SEQ ID NO: 241433 - protein, 81 aa, Glycine max
  Clone ID: PAT_MRT3847_60040C.1.pep
HPADPRMRPRLLLPLHTTILFKQCLKGYVLFSPKIFPTLITPLQISPIFMSSSKNFYFLFLLFYTSSHNSYPYSIYTTKLS

SEQ ID NO: 241434 - protein, 274 aa, Glycine max
  Clone ID: PAT_MRT3847_60041C.1.pep
IRLEKTWGGFSFECFTQWKSLLNLAIPSCVSVCLEWWWYEIMILLCGLLVNPKATVASMGILIQTTSLLYIFPSSLSFSVSTRVGNKLGAQKPSKARLSAIVGLSCSFMSGVLALFFALMVRNTWASMFTKDKEIITLTSMVLPIIGLCELGNCPQTTGCGVLRGTARPKVGANINLGCFYLVGMPVSIWLAFFTGYDFQGLWLGLLAAQGSCAVTMLVVLCRTDWEFEAQRAKKLTGMGVDHNHHEVDDPEKPLKHESKEDSLLLADSDENEQ

SEQ ID NO: 241435 - protein, 113 aa, Glycine max
  Clone ID: PAT_MRT3847_60042C.1.pep
MAKTKLTLLIISFFTTFSVVCLSSPADFFLYGGCTQQRYTSNSPYESNLNSLLTSLVNSATYSSYNNLTVVGSSQSDAVYGLYQCRGDLAMPDCAACVSRAVSRAGQLCPATC

SEQ ID NO: 241436 - protein, 49 aa, Glycine max
  Clone ID: PAT_MRT3847_60043C.1.pep
AKNLMASFLSFIQDRHGRYAPAWYHVYMPFFSLSHPLLGAGGEDIRAAR

SEQ ID NO: 241437 - protein, 43 aa, Glycine max
  Clone ID: PAT_MRT3847_60044C.1.pep
QQQVLMLHHMGDIKGIALNSSTLNTCNCPPLKRYKHYIYCAHS

SEQ ID NO: 241438 - protein, 84 aa, Glycine max
  unsure (1)..(84): unsure at all Xaa locations
  Clone ID: PAT_MRT3847_60045C.1.pep
XXSDRRRTPXARXVXXXSTFSDXXSGAXPTGRIIIXRPXLILPGXSXXLXXSXXFXACAFXXEADALKKTLGHERLTPVIXAIL

SEQ ID NO: 241439 - protein, 86 aa, Glycine max
  Clone ID: PAT_MRT3847_60046C.1.pep
WIQTMPTESDLAPTDTTHYQVYYHLHQTPQFKIITINIHIVVVLYIFIYIYIYICMYVYTSKQKQGTLYIVRIDGSTPAEGKFNTS

SEQ ID NO: 241440 - protein, 86 aa, Glycine max
  Clone ID: PAT_MRT3847_60047C.1.pep
SHKRHNQVLYGSLTCVELSAITHNEESADSIGADAKLFCPYSDRFRCYATSDNKCSSRRLQLFTSDDIHLFVSSGDYLIGGDAVTS

SEQ ID NO: 241441 - protein, 96 aa, Glycine max
  Clone ID: PAT_MRT3847_60048C.1.pep
SQMLKKAYLTLEVSYCTVITLRRKARELKEENAISGLVARDGEYAPGAVCTPVLPNDIPTYAIDSLGREISACTIGGTKAKVDRDELLFHVVTSVV

SEQ ID NO: 241442 - protein, 115 aa, Glycine max
  Clone ID: PAT_MRT3847_60049C.1.pep
QRRLLYRCFPINMVESRVCLLHSFPCTGKCFTSVTRVSITPHNSSFYHKGGDSTPCGHIYKYTRSIRHICIYKYILQTSCNSDHASCMSISSQPVVCPCNNTNNFRYSSCGSIQV

SEQ ID NO: 241443 - protein, 85 aa, Glycine max
  Clone ID: PAT_MRT3847_6004C.1.pep
IANCKIFKGSVNYAWATVPAYVSGAIGFMLCSPEGPPVNFKHPINKLNPEKNGVAKGPPKFYNSEIHATAFFCEQGWLIQQDIHK

SEQ ID NO: 241444 - protein, 100 aa, Glycine max
  unsure (1)..(100): unsure at all Xaa locations
  Clone ID: PAT_MRT3847_60050C.1.pep
MPRSRGSELPQRQSPRGPHQHRTSSSDSDPLHHRLIADRSPKLGDRRSPRGTQSEGLNQKKLGTRIADLESQLGQAQVELKXCKDQLASGEAPREMLKMS

SEQ ID NO: 241445 - protein, 127 aa, Glycine max
  Clone ID: PAT_MRT3847_60051C.1.pep
QLREELETSKANADKLDEKLKSVEAEKEGLESEMKKLRVQTEQWRKAADAAAAVLAGGVDMSARIPERCGSMDKHFGGTFETPAGRYNGYVGSPGMADDLDDGFGGGKRKGSGIRMFGDLWKKKSQK

SEQ ID NO: 241446 - protein, 78 aa, Glycine max
  Clone ID: PAT_MRT3847_60052C.1.pep
MPRSRGSELPQRQSPRGPHQHRTSSSDSDPLHHRLIADRSPKLGDRRSPRGPQSEGLNQKKLGTRIADLESQLGQAQV

SEQ ID NO: 241447 - protein, 506 aa, Glycine max
  unsure (1)..(506): unsure at all Xaa locations
  Clone ID: PAT_MRT3847_60053C.1.pep
DSHKVVQCLVDVLSTKNTWLFKVAQHFLKQLSDWVGDDDVRRVSVIVAIQKHSNGKFDRITRTKHVKDFMSQFKTEPGCMLFIQNLMNLFVDEGNALEEPSDQSQTTDENSEIGSIEDKDSPRTNGNSDFLKSWVIESLPSILKFLKLDHEEKFRVQKEIMKFLAVQGLFTASLGSEVTSFELQEEFXWPKSPTSNALCKMCIDQLQLLLASAQKGEGSCPLANSVEPNDLGSYFMKFFGTLCNIPSVSLFRSLDDVDQKAVKKLQAMETRLSREERSRDCSTDANRLHALRYLLIQLLLQVLLHPGEFSEAASELVICCKKAFSTSDLPESSGEDDVEVDDAPELMDVLVDTLLSLLPQSSAPMRSSIEQVFKYFCGDITNDGLMRMLRVIKKNLKPARHPDAANADDDDDEDDDFIDIEEEEIDQAETGETGESDGQTDDSESVVEVEETDHGHSEASDDSDSGIFDDLEICLFRIDTYLAQMFKEKKNQAGGETAHSSLGWST

SEQ ID NO: 241448 - protein, 377 aa, Glycine max
  Clone ID: PAT_MRT3847_60054C.1.pep
MPRSRGSELPQRQSPRGAHQHRTSSSDSDPLHHRPIADRSPKLGDRRSPRGTQSEGLNQKKLGTRIADLESQLGQAQVELKVLKDQLASAEAAKKEAQDELVKKAVQSVVPVVEKLQEKSTSKNAPETNKTESKSQDIIPDDNQQETDVFEVPIEKLTIEFSKPADQSEKETQPSEDSNAPAISKPSVDEHELTLKNDEIALLKTGLEEKGKELESMTNEKENLKNQLNEAVSKVSAAQTKEEEMTLQLNQLREELEASKANGDKLDEKLKSMEARKEGLESEMKKLRVQTEQWRKAADAAAAVLAGGVDMSARIPERCGSMDKHFGGTFETPAGRYNGYVGSPGMADVLDDGFGGGKRKGSGIRMFGDLWKKKSQK

SEQ ID NO: 241449 - protein, 109 aa, Glycine max
  unsure (1)..(109): unsure at all Xaa locations
  Clone ID: PAT_MRT3847_60055C.1.pep
MVVALGPGKFYGTSLPRPRIYTDVKFNDHRVDPPVPVNDPLMSWAEEAHWSMGGLSFKRLRLQGKIEGNVXRLRSQREKIQARSASPPARSDLRRSKRAASPLTQRVRS

SEQ ID NO: 241450 - protein, 151 aa, Glycine max
  Clone ID: PAT_MRT3847_60056C.1.pep
KLTCLDLSFDNDGIKKDTVPFDFLQKVPSLEHLRVERCYGLKEIFPSQKLQVHDRSLPALKQLTLLDLGELESIGLEQHPWVKPYSEKLQILTLWGCPRLEKLVSCAVSFINLKDLEVIDCNGMEYLLKCSTAKSLMQLESLSIRECESMK

SEQ ID NO: 241451 - protein, 73 aa, Glycine max
  Clone ID: PAT_MRT3847_60057C.1.pep
DLKPRRRRYSHLFFWLSHHCSFPPGHEGPSPHQISFFKFHLYLCIFLIIIIRFKGKKSRFLILYSLYAERFDS

SEQ ID NO: 241452 - protein, 365 aa, Glycine max
  Clone ID: PAT_MRT3847_60058C.1.pep
MDFTTFANSISSSHAIPPIHTYRLQPSPFPLHLPFSNLKRSGLVKNRLIARCTSMSDEFGSVNGLQFSPNKLFVEEAIGAEYGEGFETFRADGPLKVDVDYLNEKLQDGFLQRIRYAMKPDEAYGLIFSWDNVVAGTRALKRKAWEQLAFEEGKDIPEGDMHKLLFYAGADYVLHKFFLSDKAENELNRLKLRFSQIYYDNLVRLEKPMDGLNDWLEAVYTARIPCAVVSSLDRRNMLEALERMGLSKYFQAIVTEEDGMESIAHRFLSAAVKLDRKPSKCVVFEDDPRGVTAAHNCTMMAVALIGAHPAYDLGQADLTVANFSELSVINLRRLFANKGSSFMDLQKQIIEKAPPKRKLTIDTIF

SEQ ID NO: 241453 - protein, 43 aa, Glycine max
  Clone ID: PAT_MRT3847_60059C.1.pep
KPWEIISPLSSLTYKQSRMALLKEDAILSVLNTNFDSKALETT

SEQ ID NO: 241454 - protein, 235 aa, Glycine max
  Clone ID: PAT_MRT3847_6005C.1.pep
MNEQKNRMASGKEVNCYFDYLVSEAKELTEDQISMLIWETIIETSDTTLVTTEWAMYELAKDKTRQDRLYEELQYVCGHENVIEDQLSKLPYLGAVFHETLRKHSPAPIVPLRYAHEDTKLGGYHIPAGSEIAINIYGCNMDNNLWENPNEWMPERFLDEKYDHMDLYKTMAFGAGKRVCAGSLQAMLIACTAIGRLVQQFEWELGQGEEENVDTMGLTTHRLHPLLVKLKPRIK

SEQ ID NO: 241455 - protein, 183 aa, Glycine max
  Clone ID: PAT_MRT3847_60060C.1.pep
MAKCFSFSLSRFLIFSFVLLQTQTGNGSNATPIKLRVGVPKRDGFRQFVDVVPSDSHEKKYNVSGYCMDVFNAVVTRLPFKDSLHIQQPYGIESSEISGTYDALLHQIPAKYDVVVGDVTILANRSNFVDFTLPYTGSGVKMLVPAQHGRQQAMWIFVEPFSWELVLSIVIISTFIGFSILIM

SEQ ID NO: 241456 - protein, 91 aa, Glycine max
  Clone ID: PAT_MRT3847_60061C.1.pep
LESVCGGVPMICWPFFAEQQINCRFCCKEWGIGLEKMVRELMDGENGKKMKDKVLQWKELAKNATSGPNGSSFLNLDNMVHNILLGKIVKN

SEQ ID NO: 241457 - protein, 99 aa, Glycine max
  Clone ID: PAT_MRT3847_60062C.1.pep
LRLVPVRIAYPNLEAVPHDHSMNQHSHRVLPYLISSNSHVLSIDMCKLLVMRSFLVGTESPLVRIVILGFSVHCPGEHPIHRSFSCMSALVIYTGIKNA

SEQ ID NO: 241458 - protein, 51 aa, Glycine max
  Clone ID: PAT_MRT3847_60063C.1.pep
KGLPLKKCCKKWGKPYTNWQSGSPIRLDQAEFRLHMRPKGCHPDRGIRKHA

SEQ ID NO: 241459 - protein, 43 aa, Glycine max
  Clone ID: PAT_MRT3847_60064C.1.pep
NASFLCMVCLCYRCRWSLIQLALLWAFWHWTHGCLCSVTHCTC

SEQ ID NO: 241460 - protein, 117 aa, Glycine max
  unsure (1)..(117): unsure at all Xaa locations
  Clone ID: PAT_MRT3847_60065C.1.pep
STFHISLYITDCXPANGNLKLCPXPCDLKGTADIGGRHSIPKSEIYILEEYIKSGLNHGDMLVEGLQGAYYLRTCDXAYVKQTIMAIKDVIYYITYMEARTCAHDERVNISDTHNWG

SEQ ID NO: 241461 - protein, 114 aa, Glycine max
  unsure (1)..(114): unsure at all Xaa locations
  Clone ID: PAT_MRT3847_60066C.1.pep
MEFRSKSCRDERLQIERYCGGKVAPTSMQDLRCYSANNAAYANQIGSKEVKEKKGKSTVTKPSKSWSFSDPELQRKKRVAGYKIYAAEGKMKGSLRKSFRWIKNAXTQALYGWW

SEQ ID NO: 241462 - protein, 60 aa, Glycine max
  unsure (1)..(60): unsure at all Xaa locations
  Clone ID: PAT_MRT3847_60067C.1.pep
MVLKTDLCRFSGAKIYPGKGIXFVRGDSEVFLFANSKCKRYFLNRLXKPLKLTLTGMCRM

SEQ ID NO: 241463 - protein, 124 aa, Glycine max
  Clone ID: PAT_MRT3847_60068C.1.pep
MTLQWAAVATFLYAEIGLILIFCLPFIPPQRWQKIFSFNVWGKIATFWNKAFLTIIILLIVLFLDAVREVRKYSSVHTIEKSSTSRPDAYEHTQMKLFRSQRNLYISGFSLFFWLVLRRLGGIH

SEQ ID NO: 241464 - protein, 73 aa, Glycine max
  Clone ID: PAT_MRT3847_60069C.1.pep
FCMSASVALRVVYMNHKLTDGLFPPANPLPIPSSECLQILSYIRHMATPPFIHARCAYSPRISNRNSKGASQQ

SEQ ID NO: 241465 - protein, 114 aa, Glycine max
  Clone ID: PAT_MRT3847_6006C.1.pep
RLAFFHWVFIVLKSLMFQFKRDLELNGEPILKPLLTLHKFNPAKFASPQKVSPIKGAVPLCQPFLNPQFFNALLFVCCSGLIGVKIFENPKYFPCQMLLILNPIMGLIKIMIGL

SEQ ID NO: 241466 - protein, 97 aa, Glycine max
  unsure (1)..(97): unsure at all Xaa locations
  Clone ID: PAT_MRT3847_60070C.1.pep
TGCINPKHGSLDSEQLIYSNAQDRSNAIALVDAYNYSDHYLGXTLGRYDGYVYTKLAKEAWKDPDDDPVDTDGFKECIRPMLNHQLPNATLALSLWQ

SEQ ID NO: 241467 - protein, 60 aa, Glycine max
  Clone ID: PAT_MRT3847_60071C.1.pep
SQPYITHKLGLLKLISRGYHWPMTRIKLLIIIILRMPYRHHTKTLNFKNKKTDNQIILMK

SEQ ID NO: 241468 - protein, 598 aa, Glycine max
  unsure (1)..(598): unsure at all Xaa locations
  Clone ID: PAT_MRT3847_60072C.1.pep
MKKVIGQTVRDLKREVNKKVLKVPGIEQKVLDATSNEPWGPHGSLLADIAQATRNPHEYQMIMSVIWKRINDTGKNWRHVYKALTVLECLVAHGSERVIDEIREHAYQISTLSDFQYIDSSGRDQGNNVRKKSQSLVVLVNDKERIIEVRQKAAANRDKFRNSTAGGMYRPGSYSSSGAYGDRYDDDRYGSREEDRNGYGYGKEREWGNRDDDRHSRDGDRYGRDYEDRYGRDGYRDDDYRGRSRSVDYQYDTRSRSSDRDRYDDDGQHSSRGSNAKAEDQSLEARLERKLSEQNMGAPPSYEEAVSESRSPVHSERDVETSAAPAPRDSSPHVNDNPSQTSAYTGSXFHCDYRFESPTLRHCSESSPLYVCFSLSCPDFFGPGGPASAAPATTSNVEMDLLGSLSDSSSSNALSLVPAASATAAPDANAGSTASFAAPPSGSNNFDQSLEDPFGDSPFKAFTSTETAPSQPQTYQSIEPSQSNGLNAETNSNFGFGDSFSVVPYSAPVSSDAQPFSTNSQFPSQDMSSSQPETDILADILPQAPLSEMHSQQNIPVPTDQFSQQPFSAPNGQPRQVQSSFSSPSSQYAQPPFSSNRW

SEQ ID NO: 241469 - protein, 88 aa, Glycine max
  Clone ID: PAT_MRT3847_60073C.1.pep
LLSQLTNSRNAFFDLYNQMLSQPFSHNHYTFTHALKACSFHNARSKALEIHAHLVKSGRYLDLFLQNSLLHFYLAHNDVVSASNLFRS

SEQ ID NO: 241470 - protein, 409 aa, Glycine max
  unsure (1)..(409): unsure at all Xaa locations
  Clone ID: PAT_MRT3847_60074C.1.pep
TRDCRGSRGGPQGVLIAEHWIQRSAIHSALWPDSSGEINFQGEGSVLHYGQIVQYSTLAPLWNELKLSCDFAKAREEVDQFNSHNRWRKRGIAMIPNKXYTDGTVLVTHGGVEMGQGLHTKVAQIAASAFNIPLSSVFISDTSTDKVPNASPTAASASSDMYGAAVLDACEQIMERMEPIASKHNFNSFAELVGACYAERIDLSAHGFYITPDIGFDWTIGKGKPFRYFTYGAAFAEVEIDTLTGDFHTRVANIFLDLGYSLNPAIDVGQIEGAFIQGLXGWVALEDLKWGDEAHKWIPSGCLYTCGPGAYKIPSVNDVPFKFNVSLLKGHPNVKAIHSSKAVGEPPFFLASAVLFAIKDAIIAARAEMGRNEWFPLDSPATPERIRMACLDELTSSFVNSDFHPKLSV

SEQ ID NO: 241471 - protein, 67 aa, Glycine max
  Clone ID: PAT_MRT3847_60075C.1.pep
AQGKREGAQFPEDFRFFIMNKNSFYYTLVSSISFDCSSFGGKWSRKRLCKNLEFSRDGYGSSKYNKS

SEQ ID NO: 241472 - protein, 54 aa, Glycine max
  Clone ID: PAT_MRT3847_60076C.1.pep
SAARRQQKGREDGVFNLAPDRIRGILNSLSLFSKQRLYYIPSSYSDLRCVPNTN

SEQ ID NO: 241473 - protein, 93 aa, Glycine max
  Clone ID: PAT_MRT3847_60077C.1.pep
RIWVRGSGVALRTYANTLSVASYDHCQAPTWAYEGSGSDQGLWDDAGLMEYPHAIANDLFGKSNVLLEICDVTPPLGATCTNRWARLAVFKPP

SEQ ID NO: 241474 - protein, 117 aa, Glycine max
  Clone ID: PAT_MRT3847_60078C.1.pep
ASSQNNLAFHTPSTPNPTLVHRRHCLLLHSLPPHTHLFLTSHRNAWLAEEKCLRHQIDATTDEITHLCGLNENYFSGEFLASVAFLHRVKVIALSQNHISGAIPASLLNLRPLYVLY

SEQ ID NO: 241475 - protein, 111 aa, Glycine max
  Clone ID: PAT_MRT3847_60079C.1.pep
KLQWYSIVRHFAECRHLKICKSHKINTVDLHNFLRFVEVPDVNKHRFQHSINCYRGPENPKEVGSHGILHYLLGSGIVLSHIKLCHLTYLTLHYGELILVAKECLLIVVLS

SEQ ID NO: 241476 - protein, 39 aa, Glycine max
  Clone ID: PAT_MRT3847_6007C.1.pep
VPIIHVGLFLFNVSHDVHVAGAVEFSDAPLAGKSIDYSV

SEQ ID NO: 241477 - protein, 52 aa, Glycine max
  unsure (1)..(52): unsure at all Xaa locations
  Clone ID: PAT_MRT3847_60080C.1.pep
IIDGPGTVQDFAKMELQEIXQDNIRSRMNKIFLHMEDVRRLTIRHRISNAVL

SEQ ID NO: 241478 - protein, 122 aa, Glycine max
  unsure (1)..(122): unsure at all Xaa locations
  Clone ID: PAT_MRT3847_60081C.1.pep
MGTSPGAPTYDPYAGYPVQPVPMPTLATTPGPSTYGPDQTNTDYLSCHTLIIGNXTENIGVEQLQGLXRAQPGAILLKSSGQEPHTSGVMLPENTNRSATGLHKLREPALPMRALMGMQIHF

SEQ ID NO: 241479 - protein, 47 aa, Glycine max
  unsure (1)..(47): unsure at all Xaa locations
  Clone ID: PAT_MRT3847_60082C.1.pep
ELNSILAQLPKKCFALLGLKTKCFFKFPPXNVIKGGRKYYELVNPGI

SEQ ID NO: 241480 - protein, 45 aa, Glycine max
  Clone ID: PAT_MRT3847_60083C.1.pep
INQVLARPLAPQGEPFALMLMSLKDEFLLDNSKCFVFKKKKKGRP

SEQ ID NO: 241481 - protein, 82 aa, Glycine max
  unsure (1)..(82): unsure at all Xaa locations
  Clone ID: PAT_MRT3847_60084C.1.pep
GRVGGRVGVRLGSKSSLRXLAIGRERDTEFENSSKNSPSLRGATLTSALRTVSDHSLSLLVLVISDVYESHLMCEYVTLNLF

SEQ ID NO: 241482 - protein, 55 aa, Glycine max
  Clone ID: PAT_MRT3847_60085C.1.pep
SLTNLTGPISSSKPVFEPKVRSDTPNESLCMRIMKMIAAWVILHYKVEPLNTFMI

SEQ ID NO: 241483 - protein, 155 aa, Glycine max
  Clone ID: PAT_MRT3847_60086C.1.pep
MRLRSRAIFALVRTTAITTSAVCSPPAVLSVCHALRERRRFTEDDVAAYAAVSGDRNPAHLDDAVARELSGFQRGRVAHSMLAASLLPSVIAASFPGAAYASQTLKFDAPVYVGDEVVDRVKALNIRMIGTTNCSSTSRYLGKFATKCFMDKEEG

SEQ ID NO: 241484 - protein, 50 aa, Glycine max
  unsure (1)..(50): unsure at all Xaa locations
  Clone ID: PAT_MRT3847_60087C.1.pep
VDQAVDTELSCXIAMILVLIYQLYARVRLVHNEVALRAFSFGHLLLALHF

SEQ ID NO: 241485 - protein, 91 aa, Glycine max
  unsure (1)..(91): unsure at all Xaa locations
  Clone ID: PAT_MRT3847_60088C.1.pep
TSRRFQEGLKRPIDESIAKPPLVTTVNNIGKKLPAIERXTHACQIIHRLTENNPIQILVEAIADYGPQQDSTRVGAARHVEQQAGDVYQLK

SEQ ID NO: 241486 - protein, 155 aa, Glycine max
  Clone ID: PAT_MRT3847_60089C.1.pep
GGRRLTSAYINWHNGVGDKIPKGPLQGITLYVTKVATQWLKEDKLSSRFASLFIQFSFYKCYEAVCARCLSATATVLPLMPSLLFVGGILTPPGFRLISPLEKHLSCMGAPGCLFILDNCVGGPFRSIKCEVTRHLNYAGRPFVCGAWVITHNNI

SEQ ID NO: 241487 - protein, 232 aa, Glycine max
  unsure (1)..(232): unsure at all Xaa locations
  Clone ID: PAT_MRT3847_6008C.1.pep
EELKKQEGPRVREELKELEGEKGKEELKELEGEKGEEELTELEGEKGNVELKEQKGDKGKEKLKEQEPEKAKGEETNLFGHEENSESFGVEGEAQLQKEDANPIKDGGEGPKIGENSDLGEQGKVELVEDPEENPEEDPEEPPEETSALEEEHRELEAIANQRKIKKEHEIFVGGLDRDATEEDLRKVFQRIGEIVEVRLHNNSSTNKNKGYAFXEFSDKEHAKKALSEMKN

SEQ ID NO: 241488 - protein, 67 aa, Glycine max
  Clone ID: PAT_MRT3847_60090C.1.pep
PTLFFYSKDPFEGIDGVSVSFQMLPSSLPNQSFPWTLSSLSLNLRPLLPLGGRPFWGRVRRWNIARP

SEQ ID NO: 241489 - protein, 47 aa, Glycine max
  Clone ID: PAT_MRT3847_60091C.1.pep
ITCVALHSNFESLVATGKSNNLNQVNNPNLAALLLTSNKEFDISWEV

SEQ ID NO: 241490 - protein, 216 aa, Glycine max
  Clone ID: PAT_MRT3847_60092C.1.pep
DFTLIISVLPFFFLLPLFPVLTFTTSIIVHFSIAPATLVTSDDPLSSLGKYFGQQIFFCNISVFHSISNFNPLGVSFHSDVATRMDNQKGMSISFETFTWKIENFSKQNTKKLQSKTFRIRGYKWRIRLYPLMKNVDHFSLYLMVADSLPPYGWNRNTHFKLALVNQLDGNKSVVKETQHEFYGGYRSWGSLFVNLSDFYDSKQSYLLNDTCIIEA

SEQ ID NO: 241491 - protein, 51 aa, Glycine max
  Clone ID: PAT_MRT3847_60093C.1.pep
TLGSSGNISKPFHFPYTLKVTAFRIDIIIRSMLFHAYADKNFDEVWKTTCI

SEQ ID NO: 241492 - protein, 80 aa, Glycine max
  unsure (1)..(80): unsure at all Xaa locations
  Clone ID: PAT_MRT3847_60094C.1.pep
VLKGLKIGIILFITSRSFFFFILFXAFFHSSLSPDIFIGQKXPCKGIKRFNPISIPLINTLILLSSGVTLTVSHHFIILG

SEQ ID NO: 241493 - protein, 107 aa, Glycine max
  Clone ID: PAT_MRT3847_60095C.1.pep
LAPVVGTVETFLGRPWKEYSRTVYMQSFMDSLIAPAGWHEWNGNFSLSTLYYAEYDNTGPGSNTANRVNWPGYHVIDATDAANFTVSNFLVGNDWVPQTSVPYQTSL

SEQ ID NO: 241494 - protein, 75 aa, Glycine max
  Clone ID: PAT_MRT3847_60096C.1.pep
RATSKIRWLNSTIVLSWRSFQLYDILMMIPLLLNAFQILSTKTQIQTITWKKTLRHILCLLMELWIIGFDMLITV

SEQ ID NO: 241495 - protein, 75 aa, Glycine max
  unsure (1)..(75): unsure at all Xaa locations
  Clone ID: PAT_MRT3847_60097C.1.pep
GGFFNGSKGWWVLDLDSTFWPFYWEGRSKHDTPFLFQHXKGIWLALNQERMDVAMVSKWPTPDMEPPFLAKLRIR

SEQ ID NO: 241496 - protein, 317 aa, Glycine max
  unsure (1)..(317): unsure at all Xaa locations
  Clone ID: PAT_MRT3847_60098C.1.pep
MSSSSNSPCAACKFLRRKCTQECVFAPYFPPDNPQRFAYVHKVFGASNVAKLLNELSAAQRDDAVKSLAYEAEARLRDPVYGCVGLISVLQHKLRQIQVELSNAKKELANYIGPQALQGIPAPMLQQHPNNPFPGAMYGNMPTATASVHGGQLVIRDAQPVPHHHHHHQQQILEAQQLAAAVAAREQQEMFRSYEHQQQQEFLRFSGGFDVGGFFCGGFSQVSPAAASAGVLXLSLALGVFDNASDMQQQPQQGGSHHHHHPHHIPLAAQLLLPPQQKQQTHHESQLPLHRQHSESEECCWSILVDFPIQLCAFFVF

SEQ ID NO: 241497 - protein, 84 aa, Glycine max
  Clone ID: PAT_MRT3847_60099C.1.pep
VIHTLWHLKATTQVISGKFPTVRPPPPQGHLGAQAQGEGRGQLQWNLPSRLLNQEKQHGSWGFLDAWPRTSCSQGTLRAAMRVQ

SEQ ID NO: 241498 - protein, 96 aa, Glycine max
  unsure (1)..(96): unsure at all Xaa locations
  Clone ID: PAT_MRT3847_6009C.1.pep
MRXIXSIXIGXAGIXVGNXXWEXYCXEHGIQXDGMMPSXSTFGVAHXAFNTFFSEXGSXKXXXRAVFXXLXXSVXXXXRXGTYRQLFHXXQLXXXX

SEQ ID NO: 241499 - protein, 72 aa, Glycine max
  Clone ID: PAT_MRT3847_600C.1.pep
NNCSWCFFSLVKFEWSLSMIQFSCMPFDGISTHQAYNLHLSCIFGQCQWIGIVDIKYSYVNYLFVSSRKLNC

SEQ ID NO: 241500 - protein, 60 aa, Glycine max
  Clone ID: PAT_MRT3847_60100C.1.pep
MSSSSNSPCAACKFLRRKCTQECVFAPYFPPDNPQRFAYVHKVFGASNVAKLLNELSAAQ

SEQ ID NO: 241501 - protein, 96 aa, Glycine max
  Clone ID: PAT_MRT3847_60101C.1.pep
MTLPIFFFSFILFPLFFFFFLSLFFFYLISLLFFPSSYLTFLPFNFLFSFFSSFFFSIHPYFFCFDSSPLILLFFFIFFILLLIFIFYYSYFFYFL

SEQ ID NO: 241502 - protein, 64 aa, Glycine max
  Clone ID: PAT_MRT3847_60102C.1.pep
HRCHYRSRRGYSSGGTTWCPQFTLSLIPYFCQILFVLPFITPAIIPFKSQPVFLHFVSFYFSSD

SEQ ID NO: 241503 - protein, 46 aa, Glycine max
  Clone ID: PAT_MRT3847_60103C.1.pep
MLHLKTYLFALPRVTTLWTEALSALLIEINHFFPNSFIFPFFSFYL

SEQ ID NO: 241504 - protein, 61 aa, Glycine max
  Clone ID: PAT_MRT3847_60104C.1.pep
VNLTLFIRKTYQKVLFHSKNIESIFPHNGCFGLNYYSAASTCKNVSVGFIFSKEKITPSSN

SEQ ID NO: 241505 - protein, 118 aa, Glycine max
  unsure (1)..(118): unsure at all Xaa locations
  Clone ID: PAT_MRT3847_60105C.1.pep
TRPLSHPLIFKRASLTHSFDAFNSEGKGLITHNRLSYWEGYKPLTGERFFFFNHYSMCIPHDKPILSWGSFNVELFIAFETFYGPFLNIARXALQFGLTGSALGALFTACVTMKYSNS

SEQ ID NO: 241506 - protein, 165 aa, Glycine max
  unsure (1)..(165): unsure at all Xaa locations
  Clone ID: PAT_MRT3847_60106C.1.pep
AISHFTNRIVALIAQVYTLNDFLLLKREEGEEICPLSLRENPSKVHIRRTLQDTTNTPTTVFPTNPTPPSPVITPPDTPTIITVPSTNPVTVSPTNPASTPVTVPSTTPVVPLPPTNPANPVTNPVASYPPPSSGSVPVTSALLSPSTNAQAMPAGQSWCVAKTX

SEQ ID NO: 241507 - protein, 274 aa, Glycine max
  Clone ID: PAT_MRT3847_60107C.1.pep
MGRKANCDNQYAMNRGPWSAEEDKILMNYVQVHGEGKWRELSKRAGLKRCGKSCRLRWLNYLKPDIKRGNISSDEEDLIIRLHKLLGNRWSLIAGRLPGRTDNEIKNYWNTYLRKKAEHKHDKIPSHNDNIPIKLRIESPGCSKNSFGNVLDPTKSPHPMRCTKVMMPVNDSVNTTNLITTSWDNHNPSSASMQLDDYNHCLTGVLQEFDISDLLMSYEDDFRFNGYACVEIPQHIFEDETCRLDDSLGEEAWYENWKNDPYFPQDQDMGFSSF

SEQ ID NO: 241508 - protein, 60 aa, Glycine max
  Clone ID: PAT_MRT3847_60108C.1.pep
SINVITNKKLFLSIVRIGKSCNNFNLNKITLFLGKPCCFKIEFCIIQSFYLRVELKSYPH

SEQ ID NO: 241509 - protein, 39 aa, Glycine max
  unsure (1)..(39): unsure at all Xaa locations
  Clone ID: PAT_MRT3847_60109C.1.pep
MSLKNCILVLRASCVALIYLXGLHAARMELSFSNSDQSL

SEQ ID NO: 241510 - protein, 82 aa, Glycine max
  Clone ID: PAT_MRT3847_6010C.1.pep
SGSSRSPPSPPMGSGHFAKKVFPKASYFRNMQVVDWDNNLIPLSNLKVLADHPNCYDIQGGVNNAWGNYFYYGGPGRNVKCP

SEQ ID NO: 241511 - protein, 66 aa, Glycine max
  Clone ID: PAT_MRT3847_60110C.1.pep
FQECLNIFLLLCVRFHKGKKSTLCAGHRLRESFDFPLLAYLLNTLLFDIGLRVRFKLLLTLSQICG

SEQ ID NO: 241512 - protein, 270 aa, Glycine max
  unsure (1)..(270): unsure at all Xaa locations
  Clone ID: PAT_MRT3847_60111C.1.pep
NSSSVPGDPLESTCSNDESTQKNHPTKVCCYLPIIPMLKXFFANGDNIKDHMXHANGRKGDELLXHPVDSLQWKIIDHLFPNFGKETRNLRLGLAXDGINPFGNLSTNHSLWPVLLMIYNQPPWLCMKXQYIMLSLVIEGPRKPRNDIDVXISLFIEVLRRLWVDKVDVFDGNRQETFKLCGTVFYTINDFLAYRNLSGYSIKXHYACLICEKETSYVQLKHGKKIVYTRHKRFLKPYHPYQXLKKXAFNGIHEHESAPKSLAGKKXMSR

SEQ ID NO: 241513 - protein, 101 aa, Glycine max
  unsure (1)..(101): unsure at all Xaa locations
  Clone ID: PAT_MRT3847_60112C.1.pep
IYYYIGESKKAVENSPFLEKLKKKGYEVLYMVDAIDEYSVGHLLEFEGNKLVSASKEGLKLDYSEYENNKHEELNDILDILCXVINDVLGDNVHNCKDSDR

SEQ ID NO: 241514 - protein, 68 aa, Glycine max
  Clone ID: PAT_MRT3847_60113C.1.pep
MADHVPASLYFSDVSYTLEGRQILSEIVGGAQPGQVLAIMGASGAGKSTLLDLLARKQKRGAVTGQIL

SEQ ID NO: 241515 - protein, 79 aa, Glycine max
  unsure (1)..(79): unsure at all Xaa locations
  Clone ID: PAT_MRT3847_60114C.1.pep
SRVSTALLTIGYKCLHSSPMKRPSIGEVSQGILRIKLXLLMKEQPMSFASSNFSRTVSQIDECQVELCSIIIMIHREMG

SEQ ID NO: 241516 - protein, 46 aa, Glycine max
  Clone ID: PAT_MRT3847_60115C.1.pep
NIYGGKHYQKNIVLGKVVKYKCPISIQYYFSQNVDKCMWGTPSVVS

SEQ ID NO: 241517 - protein, 81 aa, Glycine max
  Clone ID: PAT_MRT3847_60116C.1.pep
KLSPVASFLSHIALYLLRTHLVLWNHSHPHCHHRNTVIRHIHKHRDAYGYLEITFILQLDEIPICIFRKEKSNMKNSTHGF

SEQ ID NO: 241518 - protein, 73 aa, Glycine max
  unsure (1)..(73): unsure at all Xaa locations
  Clone ID: PAT_MRT3847_60117C.1.pep
MAQGAAQWFQXTNNLNEHLRAAYTSASFRHMSVHDMYSDLATDHLLDCHLYNASKHISKPVQEPLVLLEVFGS

SEQ ID NO: 241519 - protein, 58 aa, Glycine max
  Clone ID: PAT_MRT3847_60118C.1.pep
PDRKLNLFPSLLLCNQYKDYFTIKYLLGNDTHTHPFFIHLYAKKNHAVTKFLFPRLKL

SEQ ID NO: 241520 - protein, 50 aa, Glycine max
  Clone ID: PAT_MRT3847_60119C.1.pep
YVVWRNRGAGGVSHRERRGRLLIVLLRRRRLPRREAGDVRAPALPCPPLP

SEQ ID NO: 241521 - protein, 80 aa, Glycine max
  unsure (1)..(80): unsure at all Xaa locations
  Clone ID: PAT_MRT3847_6011C.1.pep
MLINKMELIRRTYIKFGPYQIFLWMXYPLSGQEDHPCRFQACWFRNFPWLEYSLEGAFFCFQCYIFSKKSSPFTSKGFKN

SEQ ID NO: 241522 - protein, 65 aa, Glycine max; identical to SEQ ID NO: 159300
  Clone ID: PAT_MRT3847_60120C.1.pep

SEQ ID NO: 241523 - protein, 54 aa, Glycine max
  Clone ID: PAT_MRT3847_60121C.1.pep
ASRGDLSVEKEQGHHHHLEMEFDSIRSSKQGLNSIIWLHIKSCYSPRLDIRARN

SEQ ID NO: 241524 - protein, 200 aa, Glycine max
  unsure (1)..(200): unsure at all Xaa locations
  Clone ID: PAT_MRT3847_60122C.1.pep
MALSATFVKTNRSILPFHQNSSPNHGRIKQLCVRASASSLDDDEDRTVVRKEKDGWKIKFSSQKPATPLLDTINYPAHMKNLSLQDLEQLAAELRADVVHSVSNTGGHLSSSLGVVELTVALHHVFNTPEDKIIWDVGHQAYPHKILTGRRSRMHTIRKTSGLAGFPKREESVYDXFGTGHSSTSISAGLGMAVARDLLG

SEQ ID NO: 241525 - protein, 161 aa, Glycine max
  Clone ID: PAT_MRT3847_60123C.1.pep
MTKKWSDNDAYQKDEPLQTDWEITAASEKLAECQETILNLGKQLKALAAPKDASLFDNAIAAQRHTVTDTNTVPLKDMKVKNRSSLFDQMLADDDTKAKVSKASERGSSPTSIPGFKLPLEKILLLNGLKGQDDSASVDSMAIVPAKKSSGRNFWRRLFGR

SEQ ID NO: 241526 - protein, 118 aa, Glycine max
  unsure (1)..(118): unsure at all Xaa locations
  Clone ID: PAT_MRT3847_60124C.1.pep
EEVLQYYPQGYHGVDKEGRPVYIERLGKAHPSRLMHATTIDRYLKYHVQEFERTLQEKFPACSIAAKRRISSTTTILDVQGLGMKNFSRTAANLLSAVTKIDSSYYPETLHHMYVXNA

SEQ ID NO: 241527 - protein, 60 aa, Glycine max
  Clone ID: PAT_MRT3847_60125C.1.pep
QNRKSFSLSLQYFAEACEGFAHCFSVLIHSRCFNRQFFFICFDFVKLFLGRSNGFSANAV

SEQ ID NO: 241528 - protein, 310 aa, Glycine max
  unsure (1)..(310): unsure at all Xaa locations
  Clone ID: PAT_MRT3847_60126C.1.pep
SRRPTRPWNDPDIMKLVHNEEATFVRQITRMPNGQHTFDSYQIPRLKERSSDTSTAESGSDMNDYSSPNRHRSCPCPHLAPVHEEVKAPDLNGYYSCDDSALAVEKVIESDHFHLNREQPLQTNDIGNVACRTDSGGIVMKFWFSIVKEKVEKINVLCVARVMTFFMEKLVTLFRYLTFEXWRTQNNVHPSITMEHNINNYSATVETASERDHIFRCMQRLERLEKTFGELSHKPAGIPLEKEHMLTNSLDRIKSVEFDLEKTKRVLHATVMKQLEIAELLENLQASKSQVNCISQRRLFRRKIQVSATS

SEQ ID NO: 241529 - protein, 418 aa, Glycine max
  Clone ID: PAT_MRT3847_60127C.1.pep
VVPTISPALITFFLYIYTSLSLYQIYKVNLYCTAANLLSAVTKIDSSYYPETLHHMYIVNAGSGFKKMLWPATQKFLDSKTIAKIQILDSKSLYKLLEVIDSSQLPDFLGGSCTCAAEGGCLRSNKGPWNDPDIMKLVHNEEATFVRQITRMPNGQHTFDSFQMHPLKERCSDTSTTAESGSDMNDYSSPNRHRSCPYPHLAPVHEEVKAPDLNGYYSCDDSALAVEKVIESDHFHLNREQPLQTNNIGNISCRTDSGGTYVNSWFSIVKEKIEKINVLYVARVMTFFMEKLVTLFRYLTFEFWRTQNNVHPPITMEHNINNHSAAVETASERDYILPCVQRLQRLEKVFEELNNKPDGMPQEKEQMLMDSMDRIKSVEFDLEKTKRVLHAAVMKQLEIVELLENLKKSNCRQRSLFC

SEQ ID NO: 241530 - protein, 63 aa, Glycine max
  Clone ID: PAT_MRT3847_60128C.1.pep
PKGEGNFVLELNFKPFNISLPNQTLNKSTGNGIKFLNLQLLEQFFHDKESMLPLFDFLKLDSY

SEQ ID NO: 241531 - protein, 120 aa, Glycine max
  Clone ID: PAT_MRT3847_60129C.1.pep
FISGTEALFADLAHFPVSSVQIAFTLLVFPCLLLAYSGQAAYLMHNLDHSKDAFYRSIPGLLYLSHSILEFPLVIHLCCLEYDQQPYIDTRVLSTLFLTHIPLLVVTCNLLKAIKFGKNH

SEQ ID NO: 241532 - protein, 90 aa, Glycine max
  unsure (1)..(90): unsure at all Xaa locations
  Clone ID: PAT_MRT3847_6012C.1.pep
FIHNDIAYNGGVLYMSYRXGGQLIKMDPFNAITLFIKGPSFSFFFGKKNNPPPAFFFTKTNHPPGACLFYLATKKYIFICQAGLPPPSIF

SEQ ID NO: 241533 - protein, 35 aa, Glycine max
  Clone ID: PAT_MRT3847_60130C.1.pep
SLFVVTPVECCLGIQKTDYLKFSTATVAAKNTNLC

SEQ ID NO: 241534 - protein, 68 aa, Glycine max
  Clone ID: PAT_MRT3847_60131C.1.pep
YSITIHHSLCNRIIHNLLKVAANNQFYLGALDGSLCLLTPLTRTIRCMMMKSMCSLRIKPRVRVTERK

SEQ ID NO: 241535 - protein, 61 aa, Glycine max
  Clone ID: PAT_MRT3847_60132C.1.pep
KKKPLLGAEKGKYFFSGGTHSTMYSKSDTSKKTLWMFLMLQISSIVGKEKDIFYCVSLGIK

SEQ ID NO: 241536 - protein, 84 aa, Glycine max
  Clone ID: PAT_MRT3847_60133C.1.pep
RRSRSGIPGWPNGSDHPRAPTSEFFFFPFFWGFTLAIGAHRIWINYRALGDNLSPPAGVGNSSGTQTPSSPVEYYRDRDLGGFR

SEQ ID NO: 241537 - protein, 90 aa, Glycine max
  Clone ID: PAT_MRT3847_60134C.1.pep
MGKRKAKAKPPPKKRMDKLDTVFSCPFCNHGSSVECRLDMKNLIGEAICGICQESFSTTITALSEPIDIYSEWIDECELVNHPDDDGAEH

SEQ ID NO: 241538 - protein, 111 aa, Glycine max
  Clone ID: PAT_MRT3847_60135C.1.pep
MLLIITLFITLYNQPFYPNNNHTTMKYMLQQKTPEEKASTNISHLLFGIGGSSATWQTRRQYSELWWRPGATRGFVWLESHPPDNTTWPETSPPYRVSGDTSVFKYTCSYG

SEQ ID NO: 241539 - protein, 72 aa, Glycine max
  unsure (1)..(72): unsure at all Xaa locations
  Clone ID: PAT_MRT3847_60136C.1.pep
PQLVFPHRPETYGAXGDPPENQAPRCTVHSFQHIIDHGWPWPRPELEGWLEKTPAEVNAYWSNPREYTNARK

SEQ ID NO: 241540 - protein, 45 aa, Glycine max
  unsure (1)..(45): unsure at all Xaa locations
  Clone ID: PAT_MRT3847_60137C.1.pep
CLVXXXXXCXSCCKXXKAPNXPTXXKKXXKITTTVRLFLHXHLLL

SEQ ID NO: 241541 - protein, 121 aa, Glycine max
  Clone ID: PAT_MRT3847_60138C.1.pep
KKKKKTRGGGPKTHFFPPNPENWLGGGAPKPPHPKKNRGGGKKKKRQPVSPKENTPTFTGGGAGRAKTKKGEGGAPPPPPEGGAPPPPKRKANPSEQGGRECPPEKKSPGGRALRPPPGRG

SEQ ID NO: 241542 - protein, 46 aa, Glycine max
  Clone ID: PAT_MRT3847_60139C.1.pep
KLREVLQKPTSPDHTSGGSKVYNVRKGNNSSYFATSITTAMCCFDR

SEQ ID NO: 241543 - protein, 227 aa, Glycine max
  unsure (1)..(227): unsure at all Xaa locations
  Clone ID: PAT_MRT3847_6013C.1.pep
MDFTSFLTSLGTSFVIFLVLMIVFAFLSSRPGNNVVYYPNRILKGLEGGYKSRNPFSWIKEAVSSSXRDVIAMSGVDTAVYFVFLTTVLSILFLSGVILLPVLLPLSVTDHGMKAHSKTQTSSNGTFSELDKLSMANITASSSRLWGFFIACYXVSIVTFVLLWRAYKHVSCLRAEALKSPDVKPEQFAIVVRDIPHAPHGQTTNEQVDYYFRTIYPETFYRSMIGT

SEQ ID NO: 241544 - protein, 90 aa, Glycine max
  unsure (1)..(90): unsure at all Xaa locations
  Clone ID: PAT_MRT3847_60140C.1.pep
ECGILSGFTLTVGVDSICGEMLITYSYEKLLLQAKASSMILQSFKNIDFMCVYSDDYIISVQXYVKPYFIVFILKYLLSXHYITITVVID

SEQ ID NO: 241545 - protein, 71 aa, Glycine max
  unsure (1)..(71): unsure at all Xaa locations
  Clone ID: PAT_MRT3847_60141C.1.pep
GNKELPPSRYQYXXTPKYYRGPLHPHQPPPASDPSSRLFQPGPFSLPRIXQTYQSTIAGDXLAXTYQXIXG

SEQ ID NO: 241546 - protein, 124 aa, Glycine max
  Clone ID: PAT_MRT3847_60142C.1.pep
DIQNSRLFFIYIFSHALYFVDALVSSFTPTLFVYFVFWYCYFRYIVKKDAPGLTVTKMENKIGLRIVQNGDIVMGKVFVPDDDRLEGVNSFQDTNKVLAVSRVMVAWQPIGLSMGIYDMCHRYL

SEQ ID NO: 241547 - protein, 229 aa, Glycine max
  Clone ID: PAT_MRT3847_60143C.1.pep
MASASGEAPPPQPTSTEAAPASGSSAPAISAAAPQPGGSSPAPPSRYESQKRRDWNTFLQYLQNHKPPLTLARCSGAHVIEFLKYLDQFGKTKVHITGCPYYGYPNPPAPCACPLKQAWGSLDALIGRLRAAYEENGGRPESNPFGARAVRIYLREVREGQAKARGIPYEKKKRKRTTVVMVSSGGGGSSGAVASPSGGGDTAIGGGAGSSASLTSSATATANDTTTTV

SEQ ID NO: 241548 - protein, 86 aa, Glycine max
  unsure (1)..(86): unsure at all Xaa locations
  Clone ID: PAT_MRT3847_60144C.1.pep
ARGEVTDPIYPGGSLDPLGLADDPEAFAELKVKELNNGRLAMISMFGFLVQAIVNGKGXLENLADHLADHVNCITWAYATNLDPGK

SEQ ID NO: 241549 - protein, 65 aa, Glycine max
  unsure (1)..(65): unsure at all Xaa locations
  Clone ID: PAT_MRT3847_60145C.1.pep
RMSNSEQXWKKHCPSGLRGVXNKNKKXIAPXXIQXXRXYXKXELTXXKEKKXXXQKIHLXKXPXF

SEQ ID NO: 241550 - protein, 161 aa, Glycine max
  unsure (1)..(161): unsure at all Xaa locations
  Clone ID: PAT_MRT3847_60146C.1.pep
PTPAIRHIXITALGIHFYQHATGVDADDLYRPRIFETDGITNDTHKLVATVAAGFDKNELILAATITLDRVRRSPLLLGSVGGMVLSLLTLAISLTVIEHSERKVLRAGGSIIANVLPYVGTFCIGAGSIKWVYRSDILPAMLRAQGSAEGAAGNKTSNGV

SEQ ID NO: 241551 - protein, 92 aa, Glycine max
  Clone ID: PAT_MRT3847_60147C.1.pep
SFVLVRMALRFSCTHRDCRMPISSSLVMHSSSDTRWHGRPMVSQLYAPGSSGVNQQQHRWCLHHGDLTLRVVSENPVFGATGKVVNGSAMCV

SEQ ID NO: 241552 - protein, 52 aa, Glycine max
  Clone ID: PAT_MRT3847_60148C.1.pep
RWFRDRFRYQGPSPFPSHGFKRAAKTPPFLLWKGRVNIISSELEVYYELTSR

SEQ ID NO: 241553 - protein, 150 aa, Glycine max
  unsure (1)..(150): unsure at all Xaa locations
  Clone ID: PAT_MRT3847_60149C.1.pep
AKAYTRNEVLDMEKLMMNILQFKLXMPTPYMFMRRFLKAAHFDKKLELLSFFLVELCLVECKMLKFSPSLLAAAAIYTAQCSLYQFKQWTKTPEWYTDYSKKKLFECSRLMVTFHQKAGSGKLPGVYRKSNTWKYGCAPKIKPALFLLDN

SEQ ID NO: 241554 - protein, 81 aa, Glycine max
  Clone ID: PAT_MRT3847_6014C.1.pep
CLSVCFFSHVRKFCCRDNRRCCTARNMLNQVQEQHDCSNTYSTLWSNNSVNLGKVVTSVNAQFDSAQIGVHTEKDGCKYRT

SEQ ID NO: 241555 - protein, 73 aa, Glycine max
  Clone ID: PAT_MRT3847_60150C.1.pep
SNSGRAHYSCDATFFFLIKRIISWPVNMYRGGSHIPCAKCSTDILFPLLASRFLLCTYRNRPVCRPVLLQVLY

SEQ ID NO: 241556 - protein, 528 aa, Glycine max
  unsure (1)..(528): unsure at all Xaa locations
  Clone ID: PAT_MRT3847_60151C.1.pep
HTLVRVARATLGLTHPSNIETPKISFGAKDVDVTEWKGDILAVGVTEKDLARDANSKFENVILSKIDFKVGXGYLAEASSEEDFSGKVGQSTVLRITGLGSKRVGLIGLGQSPSTPAPFKSLGEAVVAAAKSSQASXAVALASSEGLSAQSKLSTAYAIASGAVLGLFEDNXRYKSEAKKSTLRSIDIIGLGTGPELEKKLKYAADVSSGIIFGRELVNSPANVLTPGVLAEEAAKIASTYSDVFTAKILNAEQCEELKMGSYLGVAAASANPPHFIHLCYKPLSGPVNVKLALVGKGLTFDSGGYNIKTGPGCLIELMKFDMGGSAAVFGAAKALGQIKPLGVEVHFIVAACENMISGTGMRPGDIVTASNGKTIEVNNTDAEGRLTLADALVYACNQGAEKIVDLATLTGACIIGLGSSIAGVFTPSDDLAKEVFDASEASGEKLWRLPLEESYWESMKSGVADMVNTGGRPGSAITAALFLKQFVDEKVQWMHIDMAGPVWNEKQRCATGFGVATLVEWVLRNAS

SEQ ID NO: 241557 - protein, 88 aa, Glycine max
  Clone ID: PAT_MRT3847_60152C.1.pep
AGFSFLTSSSREPERDLIVEIPIVTGPAGGNRFHFRSLLGGANRKSGDLVFSTLLSLSVYSSTFPSRLGSPLLSSSHDKHINQPKGSK

SEQ ID NO: 241558 - protein, 86 aa, Glycine max
  unsure (1)..(86): unsure at all Xaa locations
  Clone ID: PAT_MRT3847_60153C.1.pep
XXXXXXXXXXXSXXXTXXXXHDXHXAXXXXXXYXNXHRIXDXXXXXVXSCAXXVXFXIXYVVWNGECEGXXXARAEXRAYVRVXAT

SEQ ID NO: 241559 - protein, 48 aa, Glycine max
  Clone ID: PAT_MRT3847_60154C.1.pep
VNCHSLIGRLIEVLVKIQTHCTIVCLVPPPFFKHYSTLIYALKYSRAL

SEQ ID NO: 241560 - protein, 306 aa, Glycine max
  Clone ID: PAT_MRT3847_60155C.1.pep
MAMMAATTLTLTPPRWSWRPTRRSFCRQMHPGLRGLGMYRNGGSNELNVSAWDDKPFEMLPSGNKAYLDEQDVVTFLDPPKDLIPFDPSSYNPAAYLWKKIEDIPQERRHRLLRLLKPRLVSIAWQIAGTRFDDPKLVKKSASTLLSSSTNDGIMLECYNCTSSGGPMSISWINSFRKAIFTGKDGQAYGRIISGSVLTAFADSFAPLYFTVRELKEVMSTEQPCDLAYEFGDGLHDIKELPLGFPRPVKHPYPFNDQIVVYVRYLGPGVSVGQAWQEGTKLEQVPRKLCGEILMVKDYTSLQEDQ

SEQ ID NO: 241561 - protein, 148 aa, Glycine max
  Clone ID: PAT_MRT3847_60156C.1.pep
ITKCQFIMSGTKNTLFKIQRLKKIFFNFQGLQNFFPEFQGLKQYLKKTKKKKPPGGFSFKQLIFSNLTFFNSHPPSISSLIFPPGFFPWPKHRLGEGITFYKPGLFFAQKFFFIGRGVNFPLHKIQPPPLGGEKKRNLILAPPFWGWE

SEQ ID NO: 241562 - protein, 71 aa, Glycine max
  Clone ID: PAT_MRT3847_60157C.1.pep
GERPRTHARRKAEQHPKTCAPRERVYTIKALKTPKQDRGSPGHLQEERECDSAGARVSDLPQTKKKKTNRK

SEQ ID NO: 241563 - protein, 70 aa, Glycine max
  Clone ID: PAT_MRT3847_60158C.1.pep
KFETMNFILFRGSNVFFIKMTHSLGIINFFMEKALVYFGLGKWAPSGKEKPKFLSGEVNALTFLVYKNRR

SEQ ID NO: 241564 - protein, 51 aa, Glycine max
  unsure (1)..(51): unsure at all Xaa locations
  Clone ID: PAT_MRT3847_60159C.1.pep
PGXGFFFFLGNQTFSSLYSLLHLLSLYHDLGALSIFNSSTWGPNFVKVPNQ

SEQ ID NO: 241565 - protein, 296 aa, Glycine max
  Clone ID: PAT_MRT3847_6015C.1.pep
MSGTMSPKGSFKKKAINASNMLRNSLTRKGRRSSKVMSVEIEDVHDAEELKIVDEFRQALILDELLPAKHDDYHMMLRFLKARKFDIEKTKQMWSEMLKWRKEFGADTITEDFEFKELDEVLQYYPQGHHGVDKDGRPVYIERLGQVDATKMMQVTTMDRYIKYHVKEFERTFDVKFAACSIAAKKHIDQSTTILDVQGVGLKSFSKHARELVTRLQKIDGDNYPETLNRMFIINAGSGFRILWNTVKSFLDPKTTAKINVLGNKYDTKLLEIIDASELPEFLGGTCTCADQGGCM

SEQ ID NO: 241566 - protein, 47 aa, Glycine max
  Clone ID: PAT_MRT3847_60160C.1.pep
VGASKSRCQFIIFIKTMYDRWFLRITPPVTNKISPSENPFQQLVRAV

SEQ ID NO: 241567 - protein, 96 aa, Glycine max
  Clone ID: PAT_MRT3847_60161C.1.pep
MLQELLPDATIESPEDAVMKQHMRKDVHDLLKGLNLRERKILTLRFGLNDNQPRSLQDIGTLFKVSKERIRKIEKKALTKFKNEATISKLHYYLDL

SEQ ID NO: 241568 - protein, 91 aa, Glycine max
  Clone ID: PAT_MRT3847_60162C.1.pep
LLLLPHHEFHLLGSFLWAKPWRSLLIRTAVPLMITTLTTSNAAETVGRNQTRTEMFQMMGTITLKVFFISIANPRVIIMLGSAAAPLYQTI

SEQ ID NO: 241569 - protein, 86 aa, Glycine max
  Clone ID: PAT_MRT3847_60163C.1.pep
YTTIISCFKPCEENIFMNLPFFLCSYILFPFDGCLFLLSIRRTINPRFDHTFASYSHNTFRSFFSMKIRIISNLDSLIRNNIASVV

SEQ ID NO: 241570 - protein, 52 aa, Glycine max
  Clone ID: PAT_MRT3847_60164C.1.pep
RFQIYCWSFQSSSLYYVYIGIYIYIYIYVYIYIYIYIYIYIYIYIYISSLTL

SEQ ID NO: 241571 - protein, 70 aa, Glycine max
  unsure (1)..(70): unsure at all Xaa locations
  Clone ID: PAT_MRT3847_60165C.1.pep
QKXRXXQXLCQCALILSLIVWPQVHVXXXVLSSLSLSLSDXFLLLLVWSSRSGEVGSLCSASXMAASAVF

SEQ ID NO: 241572 - protein, 48 aa, Glycine max
  Clone ID: PAT_MRT3847_60166C.1.pep
IKKTNIFTSKGVTYSLAQLNKLILQSTDHLINKISPSPKQRQVSHFPI

SEQ ID NO: 241573 - protein, 49 aa, Glycine max
  Clone ID: PAT_MRT3847_60167C.1.pep
TNGANPFDHLYPFFKAFVFQALYKCAHFLNNILNNLLYLPMQTQTVSKD

SEQ ID NO: 241574 - protein, 66 aa, Glycine max
  Clone ID: PAT_MRT3847_60168C.1.pep
FLQSKSPLCLIATYEDVTPFKTGKWCSPFFISLSVSRAYIHLLYPVNWTLNPWWSRTTTCLGVYIL

SEQ ID NO: 241575 - protein, 168 aa, Glycine max
  Clone ID: PAT_MRT3847_60169C.1.pep
LIPSSRSSSSPTNSPPHSPSPPNTAKTNANAIFNTPIPSPAPRTPSATPSSCPPPPSSGSPASWSPSSSAATPPPSSTPSTSPPAPASPSASPVSPRARTTNKSPPASPSPTPSLNSASSNSAACSAPTSASGSPSPPLPTSPPSPNPSNPSPASPIAVAPSYAPALI

SEQ ID NO: 241576 - protein, 52 aa, Glycine max
  Clone ID: PAT_MRT3847_6016C.1.pep
YHYLVPILCVILFWQKVFFVVNASKTYENGFLSTHKLRLPNFGESKSLVAAC

SEQ ID NO: 241577 - protein, 132 aa, Glycine max
  unsure (1)..(132): unsure at all Xaa locations
  Clone ID: PAT_MRT3847_60170C.1.pep
ASTLRFLHHHVVTPHVNAISPSLRILDCTNPDQLDRNALAQHPPLDDFDVSQISRRLALSELIGALDGGWNAPSADAFYREAVDVSGKPDTYTYFLPIXGDGCRLSISFSGSPAYTLSLXGQVATYEDPFDS

SEQ ID NO: 241578 - protein, 70 aa, Glycine max
  unsure (1)..(70): unsure at all Xaa locations
  Clone ID: PAT_MRT3847_60171C.1.pep
LTAIXPVXXXDQXFFRXPVTKPVMXDSQKLHSEDDYWLTLXXVXXXLISSXTDXXWLRGSMPLXLLDVXS

SEQ ID NO: 241579 - protein, 211 aa, Glycine max
  Clone ID: PAT_MRT3847_60172C.1.pep
MSSSSGQSSGYDLSFKILLIGDSGVGKSSLLVSFISSSAEDLSPTIGVDFKIKTLTVGGKRLKLTIWDTAGQERFRTLNSSYYRKAQGIILVYDVTRRETFTNLSLVWSKEVELYSTNQNCVKMLVGNKVDRDSERVVSKEEGLALAEELGCLFFECSAKTRENVERCFEELALKIMEVPSLLEEGSTAVKRNILKQQQQPQASEFGGCCS

SEQ ID NO: 241580 - protein, 211 aa, Glycine max
  Clone ID: PAT_MRT3847_60173C.1.pep
MSSSSGQSSGYDLSFKILLIGDSGVGKSSLLVSFISSSVEDLSPTIGVDFKIKTLTVGGKRLKLTIWDTAGQERFRTLNSSYYRKAQGIILVYDVTRRETFTNLSEVWSKEVELYSTNQDCVKILVGNKVDRDTERAVSREEGLALAKDLGCLLLECSAKTRENVEQCFEELALKIMEAPSLLEEGSTAVKRSVLKPKQESQASQNGGCCS

SEQ ID NO: 241581 - protein, 98 aa, Glycine max
  Clone ID: PAT_MRT3847_60174C.1.pep
MRMEKPPIYGAASDCKPLTTFVQTNSDAFREVVQRLTGPSEASAAKEGDAKKVATMKRTTSKLHERRKYMKPKVEIVKPTFNYKTGACLSPSKSRSLA

SEQ ID NO: 241582 - protein, 40 aa, Glycine max
  Clone ID: PAT_MRT3847_60175C.1.pep
AEDSAPDPSVIHCQMPTSLVPETTACFDINHFEDDFSTSS

SEQ ID NO: 241583 - protein, 78 aa, Glycine max
  Clone ID: PAT_MRT3847_60176C.1.pep
SNAGRKTFEKILINLPRFFLPYFIRVHQACIPWLDPVPFDLHSPLTSTHPTILAAIAAFTFAICVYRSIISGTVLHSL

SEQ ID NO: 241584 - protein, 94 aa, Glycine max
  Clone ID: PAT_MRT3847_60177C.1.pep
NSGQKNLDGGPSSKCHSLFVFFVGGGISMPLCFFFPFETILNQPFFFQLFSPRGVWPFELKVSFPLPKVWFFCNPIGPKGVGCDVFKKIPRFEC

SEQ ID NO: 241585 - protein, 71 aa, Glycine max
  Clone ID: PAT_MRT3847_60178C.1.pep
YASLLSCLFQLSASKGVIVEEWNNVLASMTPDLIIVVVALGGVVSDNFSPCWCCFWYSKGTLLHVSCLIYA

SEQ ID NO: 241586 - protein, 115 aa, Glycine max
  Clone ID: PAT_MRT3847_60179C.1.pep
QSMSFNFKVLLHGLRQTNNVGSITPPRFCPYIQLSQPFWVLIRVATVCLQLVLYCFCHYFLFCFLSHHYCGFPRLRAFYYPLFILSHLPMGSFYHAPPPPPPPPPQRRRTSYSDD

SEQ ID NO: 241587 - protein, 43 aa, Glycine max
  Clone ID: PAT_MRT3847_6017C.1.pep
LKAKAGSKAHCKILLLLRVSKAKGKKIHSINHIIRSRRSSKIN

SEQ ID NO: 241588 - protein, 97 aa, Glycine max
  Clone ID: PAT_MRT3847_60181C.1.pep
KERVTQTLSPLEKRGRKNILAPPSKSPEPKRATKLKNPFFAKKSAKNFPQEEKDLPCSCGVANMKPTIQPGAPKKKRTSPTISASKKSVVFFKKNPT

SEQ ID NO: 241589 - protein, 126 aa, Glycine max
  Clone ID: PAT_MRT3847_60182C.1.pep
MLHPFLLLSGGRTNIQFMAAAKLQALWNHPAGPKTIHFWAPTFKWGINIANIADFSKPPEKLSYPQQIAVTATGIIWSRYSTVITPKNWNLFSVNIAMAGTGLYQLSRKLRHDYSSEAEVKAVTKE

SEQ ID NO: 241590 - protein, 108 aa, Glycine max
  Clone ID: PAT_MRT3847_60183C.1.pep
QCSGQLLHQGGGPPKGFLFKKLPRLSGFPPLNPLKFFLGPLRLLWGGKSFFFFPQIKVPFVFFSCPKIWSQWVLFFHNLSLTFPFWGETFKFPLGNPPIAPGGFRVGL

SEQ ID NO: 241591 - protein, 267 aa, Glycine max
  Clone ID: PAT_MRT3847_60184C.1.pep
MTKQSSRLEGKVALITGAASGIGEETVRLFAEHGALIVATDIQDEQGHRVAASIGSERVTYHHCDVRDENQVEETINFTLEKHGRIDVLFSNAGVIGSLSGILDLDLNEFDNTMATNVRGVAATIKHTARAMVAKSTRGSIICTTSVAATIGGTGPHGYTTSKHALLGLVKSACSELGAYGIRVNSISPFGVATPLACKAFNFEPEQVEANSCSQANLKGVVLKARHIAEAALFLASDDAAVYISGHNLVVDGGFSVVNRSYSFTPA

SEQ ID NO: 241592 - protein, 61 aa, Glycine max
  unsure (1)..(61): unsure at all Xaa locations
  Clone ID: PAT_MRT3847_60185C.1.pep
RIGSGCSXRXPTPFRRRXRXRXLMLHLNLRXLAAXKXXITDEKLDTRNNXKKKLNPNRTAF

SEQ ID NO: 241593 - protein, 63 aa, Glycine max
  Clone ID: PAT_MRT3847_60186C.1.pep
LWVEEGTRNQRISCFVSVYRWVCLCPIVSKERPTPLPFSLSYIYHSHHSLCPFNSLPIPFSYS

SEQ ID NO: 241594 - protein, 133 aa, Glycine max
  Clone ID: PAT_MRT3847_60187C.1.pep
KEDDSKIWHVTYMGPLFSRSSDPERKFGRILLQHISEPPSPGPAVGSPTHSLAPSPESSLAPSSEPSLAPSPFAPTPLVHRPLHNSLPPTSFFPKLTPPAASEISAPPPSDINKQEEKHSNKKTVVLAVVITA

SEQ ID NO: 241595 - protein, 78 aa, Glycine max
  Clone ID: PAT_MRT3847_60188C.1.pep
KALIFFYPWVLRKTGQNMEPIASSLSRNLVAFPYVSSPVPFWAPSKEGPLTLISKGRVNFSNPYTGGPPFFPFKWENF

SEQ ID NO: 241596 - protein, 46 aa, Glycine max
  Clone ID: PAT_MRT3847_60189C.1.pep
QRKQGMPEKEVILVSKCSYTIILLLCFIGNSNAGMKFQFLFNYAPE

SEQ ID NO: 241597 - protein, 334 aa, Glycine max
  Clone ID: PAT_MRT3847_6018C.1.pep
MPSTTYCLEGEQIKSPSIMKQDVAQDNTNSYSKNSIPPYMKAISGSLGGIMEASCLQPIDVIKTRLQLDRSGNYKGILHCGATISRTEGVRALWKGLTPFATHLTLKYALRMGSNAVLQSAFKDPETGKLSGYGRILSGFGAGVLEAIIIVTPFEVVKIRLQQQRGLSPELLKYKGPVHCARMIIREEGFRGLWAGVAPTVMRNGTNQSAMFTAKNAFDVLLWKKHEGDGRVLLPWQSMISGFLAGTAGPICTGPFDVVKTRLMAQTREGGGVLKYKGMIHAIRTIYVEEGLLALWKGLLPRLMRIPPGQAIMWGVADQIIGLYERRYLHHSTL

SEQ ID NO: 241598 - protein, 97 aa, Glycine max
  Clone ID: PAT_MRT3847_60190C.1.pep
YSFGFYLSSLLVSMVNNISSSSSTGGWLHDNDLNKDKLDFFYWLLAALSFLNFLNYLFWSRWYSYKPSQSQGDTNANESINLFGHSSKNYSEDDNIP

SEQ ID NO: 241599 - protein, 66 aa, Glycine max
  Clone ID: PAT_MRT3847_60191C.1.pep
GGGGGGGTCIFGNQNPILGARTTPAPSLKLRTSRAAALLFFFFYCIYLSEPGTYLIAFIHFAFGSG

SEQ ID NO: 241600 - protein, 104 aa, Glycine max
  Clone ID: PAT_MRT3847_60192C.1.pep
PMPLICRAMVPNIFEEKLRVRPEMTLLTRQLLKKTHVRHLNSRERVNFSLCDQHHHLNYDQLLLHILYHVPLVPLNHNRDHRLPRLRVCKCREETYEHLLMVQP

SEQ ID NO: 241601 - protein, 120 aa, Glycine max
  Clone ID: PAT_MRT3847_60193C.1.pep
SPKRGFSHRRAPARGSSTIYPSVFPQSHLVQGYSQMSSAPAPSKLSRERISTVGSYKSTDKTEQLEDKVAFHSNQKEHALSVSNRTHATRKRVHRISRVSTCGSWICLSRGKCYLSNENK

SEQ ID NO: 241602 - protein, 77 aa, Glycine max
  Clone ID: PAT_MRT3847_60194C.1.pep
ILEQYNLLGLYQKSERPGMFELPISCSNSLRDSSHCCVSISNLLISTSPRSTAKGIKSKDYVRTRSINIYIFAREGY

SEQ ID NO: 241603 - protein, 48 aa, Glycine max
  Clone ID: PAT_MRT3847_60195C.1.pep
QVSKVINLSHQIVSIYEVINHQIPNSLSKFSLSPKRLRNLNYLSTNSK

SEQ ID NO: 241604 - protein, 41 aa, Glycine max
  unsure (1)..(41): unsure at all Xaa locations
  Clone ID: PAT_MRT3847_60196C.1.pep
HXXAHSQAQTDLKNILREMAYQAWIIIKPYGVLTKIFLYQN

SEQ ID NO: 241605 - protein, 75 aa, Glycine max
  Clone ID: PAT_MRT3847_60197C.1.pep
LSVHPAGSDTGPGVTITKCVVVGIGPSHSASARAIVAAHPCSLFPEPSPSLQVERGVGRVGHSGKAGPVPQPPSF

SEQ ID NO: 241606 - protein, 56 aa, Glycine max
  unsure (1)..(56): unsure at all Xaa locations
  Clone ID: PAT_MRT3847_60198C.1.pep
IQLADSDLAEFDIKKAFELEPNHRDVSXENGTLKETMKEYTKKEARFYENMFNKLH

SEQ ID NO: 241607 - protein, 372 aa, Glycine max
  Clone ID: PAT_MRT3847_60199C.1.pep
KDLTAMAKAGKLDPVIGRDDEIRRCIQILSRRTKNNPVLIGEPGVGKTAISEGLAQRIVHGDVPQALMNRRLISLDMGALIAGAKYRGEFEDRLKAVLKEVTESDGQTILFIDEIHTVVGAGATNGAMDAGNLLKPMLGRGELRCIGATTLDEYRKYIEKDPALERRFQQVYVDQPTVENHISIRGGLRERYELHHGVRISDSALVEAAILSDRYISGRFLPDKAIDLVDEAAAKLKMEITSKPTALDEINRSVLKLEMERLSLMNDTVVDAAILSDRYISGRFLPDKAIDLVDEAAAKLKMEITSKPTALDEINRSVLKLEMERLSLMNDTDKASKDRLNRLETELSLLKENRDELTGQWEHEKSVMTNLQ

SEQ ID NO: 241608 - protein, 104 aa, Glycine max
  Clone ID: PAT_MRT3847_6019C.1.pep
PMLGPCPMARGLPQLPFHTGRLMLSTNDLEGVLVIVNYYYLQLWAYLYHRECVYPKREKILGETVRERLKQHAVELCVFQSAVRSKDMVIRRRDLVGLQCFVPV

SEQ ID NO: 241609 - protein, 94 aa, Glycine max
  unsure (1)..(94): unsure at all Xaa locations
  Clone ID: PAT_MRT3847_601C.1.pep
GYLSQPVSFRWGLSFGRGFAVVAPWVCSCLHRRERASEGWCMLCFSPSSVCVLPPPRAVLGVPPPCVFCLPPSVVCRRRRXGRRPRGSPRFFRG

SEQ ID NO: 241610 - protein, 45 aa, Glycine max
  Clone ID: PAT_MRT3847_60200C.1.pep
RDQGKNILFYGGTKRKRVGVNNAIDTRSLSVMNQLLHKVKLGDDT

SEQ ID NO: 241611 - protein, 165 aa, Glycine max
  unsure (1)..(165): unsure at all Xaa locations
  Clone ID: PAT_MRT3847_60201C.1.pep
GKKRFALSNDPVGFAFELIIDVPPXPLSQVVLLVADXKRSFKIYEKTLPLRLINKTDLPEYKLTIDMLEYAXDNETTGLKLTYNFCVTEYTKAYANAQGDIGTADAYKSAEDXQRITQELACKTTRRQRPGPGLNTESTXFLNPEGWRTVMVENNIIVMNWTKQF

SEQ ID NO: 241612 - protein, 57 aa, Glycine max
  unsure (1)..(57): unsure at all Xaa locations
  Clone ID: PAT_MRT3847_60202C.1.pep
NGTXKVRNSETGIXNQNFGSKKPKSSPNYKKXQXKIKPPTKKKNENFELISESKTQK

SEQ ID NO: 241613 - protein, 154 aa, Glycine max
  Clone ID: PAT_MRT3847_60203C.1.pep
GSCVIWDFETRGIAKELRDNECSSPITSVCWSKCGHRILVSAADKSLLLWDVMSGNTTSLKVSILEISNNGPTPTSRNKCADGITSFSPTAACFSKYGNLVYVGNSKGEILVINYVDGEVRAMVPIPGGSVVKNIVFSRNGQYLLTNSNDRIIR

SEQ ID NO: 241614 - protein, 65 aa, Glycine max
  unsure (1)..(65): unsure at all Xaa locations
  Clone ID: PAT_MRT3847_60204C.1.pep
VNLKLTRTKDAGIIGGNMGHKIKGNLVIMRKNVLDINSITSVKGDIGXTGINIIWRKSSTPLPDL

SEQ ID NO: 241615 - protein, 53 aa, Glycine max
  Clone ID: PAT_MRT3847_60205C.1.pep
PQTNILTMGTNLCHIYYLSINTISGDVSVHLHTYLLCTHLRLPNIVGTLKFQH

SEQ ID NO: 241616 - protein, 194 aa, Glycine max
  Clone ID: PAT_MRT3847_60206C.1.pep
MNAPIIDPLQGDFPEVIEEYLEHGCMKCIAFNRRGTLLAAGCNNGSCVIWDFETRGIAKELRDNECSSPITSVCWSKCGHRILVSAADKSLLLWDVMSGKRITRIVLQQTPLQARLHPGSSKPSLCLACPLSCPPMIVDLNTGNTTSLKVSILEISNNGPTPTSRNKCADGITSFSPTAACFSKYGNLVYVGNS

SEQ ID NO: 241617 - protein, 171 aa, Glycine max
  unsure (1)..(171): unsure at all Xaa locations
  Clone ID: PAT_MRT3847_60207C.1.pep
RTRGERDDLALFYSASPFQQKDKVVTISSAGDIEVGSNAARMKNDISTDSSKDSAGSTDLISGRAKEDLHRGHRRAASASADIGSWSMSIPNEXKATTEQLWIGSYKLPLRKIVKTXFSMAPCXSKTRTKWKNGAVSWAGTDQHDVEEAIPLNTSQLSQGLEECFERTRVA

SEQ ID NO: 241618 - protein, 93 aa, Glycine max
  Clone ID: PAT_MRT3847_60208C.1.pep
VRFITFTSVLRPPPVTTTTLLTIVPGYRPPTRFSSNTWPLDPVADNTILAVTHPNSLQYTFGLLEGCAGLILSSLGTNQAARHLPSCFSVTRI

SEQ ID NO: 241619 - protein, 140 aa, Glycine max
  unsure (1)..(140): unsure at all Xaa locations
  Clone ID: PAT_MRT3847_60209C.1.pep
MAGKGEGPAIXNQSXTTYSCVGERQRDRVEIIANVQRYRTTPTYVGFTDTERLIFDAAKNQVVMNPINNVFDAKRMIGRRCSDFSVLSDIKLGPIKVIDGAADKPMNRVNYKGEEKPFAGXRNFFLVLIKMREIVDAHLG

SEQ ID NO: 241620 - protein, 126 aa, Glycine max
  Clone ID: PAT_MRT3847_6020C.1.pep
MEEEAGIYRLAEDSLRQIFCRLPLREIMICRSVSKFFLQLLSTPSFLQVLSSSHPPLQLLALRNRHHTPSHTSLPLFDPATKSWLHFPLDFLPFHSPPPVASSLGLLYLWAHNNFNFNSKSLICCY

SEQ ID NO: 241621 - protein, 75 aa, Glycine max
  Clone ID: PAT_MRT3847_60210C.1.pep
CKRIKVSHSSTAKPIITPRFNTTLNMERREAIKGRARNKSRVDEHTRWGPTLVFCMFFIFDFFFFFFVFFFFFIF

SEQ ID NO: 241622 - protein, 107 aa, Glycine max
  Clone ID: PAT_MRT3847_60211C.1.pep
SGQYTTRLVFICVSYSLFIYEPPHEMEPEWSFRLCSLHWRVVLWYQFSMSLSSIAYYSMLLGKLFVLPRFDNSILSTIIWQCSWLIICVHMVLSRKISSRNVFGLFI

SEQ ID NO: 241623 - protein, 134 aa, Glycine max
  unsure (1)..(134): unsure at all Xaa locations
  Clone ID: PAT_MRT3847_60212C.1.pep
QQPPPPHPPYQLPXLPKPSPTPTNPSPCGPDNHRTAAPPPTAFXSKHNPTAFPIISSATAFSYQNRNSTLLLRLFSSTINXXTXTXXEQIEPQPLGGTAWLLXXXQKKMVVPPPRLLLGLPPSXSASGXPPPPA

SEQ ID NO: 241624 - protein, 312 aa, Glycine max
  Clone ID: PAT_MRT3847_60213C.1.pep
MEEPNSDCWLPPGWTVEVRVRKNGKRDNIQKISPNVIVEKAIAEGLPPGWVKKTRITTNGDSVRRDTSTSVTVKPTLSISMGQSSDMDMIANDQQIPRSASSEEYMSVPISECISNQCVVGAKLTSSVLSLAKSSDKKQGKVGVAQSASVSGCTNKDAEEKQLQENSETKHGTEKAQAKDPQCKNKHKKEINLPRRASKRLAGIKVDPVPELKIRNRARRVAVKQSEEEETITNVDKSANSLLDGLAIQKLNNEDTDKTLEVQRSDKEKECFSFSSLENNATVEECVRVIENGDKVDAKLDYTLDFPLRELL

SEQ ID NO: 241625 - protein, 206 aa, Glycine max
  Clone ID: PAT_MRT3847_60214C.1.pep
VSLKCASYTSDETLHISTFVVTCSLIWVCMIRLEESKGNYVAQDYAEFCHLVFLADCRGRPEFSLPSTYFGNCLTTCFVAMKRSEIVGENGIIGVAKAIERQIRDLKSDALRNAERLMSYYRELGKPGKSVLVVAGSPKLGVYHTDFGWGKPKKSEAAHIESSGSISLSDCRDENGGIEVGLALERIQTNNFFNILEEQLNNINKF

SEQ ID NO: 241626 - protein, 193 aa, Glycine max
  unsure (1)..(193): unsure at all Xaa locations
  Clone ID: PAT_MRT3847_60215C.1.pep
PASAQTHSVEVRVRKNGKRDXIIVEKAIVEGLPPGWVKKTRITTNGDSVRRDTFYIDPVNGYTFCSIEDVDHYLETGKIGRNEFTSKDKDGSDMELKADKSPSRSVTMKPTLSVSKGQSSDLDMIANDQQIPRSASSEEYLDVPISECISNQCVVGAELTNLVISRAESSDQKQGKFGLAQSASVSGCTNKDV

SEQ ID NO: 241627 - protein, 76 aa, Glycine max
  Clone ID: PAT_MRT3847_60216C.1.pep
MASISPSSSNTSPSAADLTKQLRLHEVAIAELNNQPSSRAVYQRDGNIFFRTTIQTATATEQKQLESAQAKLKSLN

SEQ ID NO: 241628 - protein, 48 aa, Glycine max
  Clone ID: PAT_MRT3847_60217C.1.pep
KWKHLLAEALANNIGRIVRVFMGFLSDILKSIVVPGRPLLIRLDSHRV

SEQ ID NO: 241629 - protein, 68 aa, Glycine max
  Clone ID: PAT_MRT3847_60218C.1.pep
ILAAHNNLKKKKISFVLDTKTRPFFTFKNDIHLAGLVYFVLLKKPILFPSSWVTKVTSLGGNRNCCGS

SEQ ID NO: 241630 - protein, 38 aa, Glycine max
  Clone ID: PAT_MRT3847_60219C.1.pep
GVRPRERTLIRQMNIIGSPDPEHQYRTLHCHYSITTIT

SEQ ID NO: 241631 - protein, 53 aa, Glycine max
  Clone ID: PAT_MRT3847_6021C.1.pep
QIFFLRMTHQESVISHIQSFNILIQKLFMFHSIKKSCCQDTTELIFISLAPPN

SEQ ID NO: 241632 - protein, 133 aa, Glycine max
  Clone ID: PAT_MRT3847_60220C.1.pep
PIQYPGTCLVVQRATSVCSLDPKLRLLAVLYSGVFGSAFQVGIICWCLHQTGPVFVSMFKPLGILISVVLGVLFLGDAFYLGSLIGATVIVVGFYSVLWGKAKDIEDAGLSLESKGKQAPLLEENSHEDIQGH

SEQ ID NO: 241633 - protein, 91 aa, Glycine max
  Clone ID: PAT_MRT3847_60221C.1.pep
SQFSLNEEDGPYPKNKCQCRQWRRHLACRSCGKFAALIKILKVFSNFTEVSTFTKFLLGCVESLILSRVTVHILAPMFFSWPPVYSWLSVC

SEQ ID NO: 241634 - protein, 89 aa, Glycine max
  Clone ID: PAT_MRT3847_60222C.1.pep
SILGSGLKRMKRLHVHFCCGVPTDGEVISGMRQDVNVLIFLDVRKALEESMKLYISDNKVILTEGFDGVVPPKYFERIESWPSRQPISF

SEQ ID NO: 241635 - protein, 120 aa, Glycine max
  Clone ID: PAT_MRT3847_60223C.1.pep
SQTTPSAARMKEQVKQITNILVAQQSSCKSIDTHSKKITSEHPKIPVITSQPLNQINQKLTEIFLDSHHLRILIRDLPAYPSWHSQQHLLQRPNNHHEGTTRQKVVEDSSNTEGPCHHLQ

SEQ ID NO: 241636 - protein, 68 aa, Glycine max
  Clone ID: PAT_MRT3847_60224C.1.pep
GKTITLKVESFDPIANVRAKIQAKEGIPRDQQRLIFVGNQFKNERTLVDSNIQKESTLHLVLRLRGGF

SEQ ID NO: 241637 - protein, 142 aa, Glycine max
  Clone ID: PAT_MRT3847_60225C.1.pep
NRRTNKRDRERQGRRRKRFQNRCLVIEALITKTQKPKRDSVVGQMVLCFPSTPKKLAMTIAVSLSGASILAVGMHLSYVNVEPQRARTRDRDAFVMETLNKKYGYTSAYEKLARNGSSVERSQESSMRENYARARNDLVKET

SEQ ID NO: 241638 - protein, 818 aa, Glycine max
  Clone ID: PAT_MRT3847_60226C.1.pep
DEIYAQMTLQPLNSEREVFPISDFGLKHSKHPSEFFCKTLTASDTSTHGGFSVPRRAAEKLFPPLDYTIQPPTQELVVRDLHDNTWTFRHIYRGQPKRHLLTTGWSLFVGSKRLRAGDSVLFIRDEKSQLRVGVRRVNRQQTTLPSSVLSADSMHIGVLAAAAHAAANRSPFTIFYNPRACPSEFVIPLAKYRKSVFGTQVSVGMRFGMMFETEESGKRRYMGTIVGISDVDPLRWPGSKWRNIQVEWDEPGCGDKQNRVSVWEIETPESLFIFPSLTSGLKRPLPSGPLENEWGTLLTRPFIRVPENGTMELSNSIPNLYSEHMMKMLFKPQLINNNGAFLSAMQQESAATRGPLQEMKTTLAAENQMLLKNLHPQSIPDQPNALNMQSLLKNDQPEKFHPLAKIDNHLPSGIVIDKPKLECEVLPDRVIDYPSMEGCNNEKVAVNPVNQQGLATQLPFHNQNQSPLLPQSSPWPMQPLIESSMPHPQMIGMAQADSAMVNGLFPQLDIDEWLAYASSQPFAGQNRPTGPFSDLQEHNSLQPQVVNPPLPSMNNEVWDHYVKNFKFLSQADQLTSICQPGMYGLNGVPSSNNLRDLSAESNNQSEICVNVDASNSVGTTMVDPSTSSTILDEFCTMKDGEFQNPQDCMVGNLSSSQDVQSQITSASLAESHAYPLRDIPDNSGGTSSSHVDFDESSFLQNNSWQQVPAPIRTYTKVQKAGSVGRSIDVTTFKNYEELIRAIECMFGLDGLLNDTKGSGWKLVYVDYESDVLLVGDDPWEEFVGCVRCIRILSPSEVQQMSEEGMKLLNSGALQGMNV

SEQ ID NO: 241639 - protein, 605 aa, Glycine max
  Clone ID: PAT_MRT3847_60227C.1.pep
RSPFTIFYNPRACPSEFVIPLAKYRKSVFGTQVSVGMRFGMMFETEESGKRRYMGTIVGISDVDPLRWPGSKWRNIQVEWDEPGCGDKQNRVSVWEIETPESLFIFPSLTSGLKRPLPSGLLENEWGTLLRRPFIRVPENGTMELSNSIPNLYSEHMMRMLLKPQLINNNGAFLSAMQQESAATRGPLQEMKTTLAAENQMPLKNLHPHSIPDQPNALNMQSLLKNDQPEKLHPLGKIDNHLSSGIVIDKPKSESEVLPDHVIDYPSMEGCNIEKSPLLPQSSPWPMPPQIELSMPHPQMIDMVQADSAMVNGLFPQLDINEWMSYASSQPFAGQNRPTGPLSDLQEHTSLQPQVVNPPLPSMNNEVWDHYVKNLKFLSQADQLTSICQPGLEICVNVDASNSVGTTVVDPSTSSTILDEFCTMKDREFQNPQDCMVGNLSSSQDVQSQITSASLTESHAFPLRDIPDNSGGTSSSHVDFDESSFLQNNSWQQVPAPIRTYTKVQKAGSVGRSIDVTTFKNYEELIRAIECMFGLDGLLNDTKCSGWKLVYVDYESDVLLVGDDPWEEFVGCVRCIRILSPSEVQQMSEEGMKLLNSGALQGMNV

SEQ ID NO: 241640 - protein, 45 aa, Glycine max
  Clone ID: PAT_MRT3847_60228C.1.pep
IENWVNLVKPARSVGDIILTPRAGIMGPEKARRKHVSGKIPGFVY

SEQ ID NO: 241641 - protein, 92 aa, Glycine max
  Clone ID: PAT_MRT3847_60229C.1.pep
LVMGFGMSSGGKRPFRFFFKLGRDFFLRGGIPPKKFFVFFLMGVNPSDQRVKLLGFFLAFKPSPPFFVKLDPWLNLGKGSQRFYIFLFPRPP

SEQ ID NO: 241642 - protein, 35 aa, Glycine max
  Clone ID: PAT_MRT3847_6022C.1.pep
SSGMLLSNNKLFFLIHQIPIINISFLIALKAVLLQ

SEQ ID NO: 241643 - protein, 76 aa, Glycine max
  Clone ID: PAT_MRT3847_60230C.1.pep
HSNYNQIFGSAPTITATIARAGSFWSSKIPSAIQRAPYRFTCCGSFRYDRMRKKKVEPILTSLNLLQKQTEKMMSC

SEQ ID NO: 241644 - protein, 415 aa, Glycine max
  Clone ID: PAT_MRT3847_60231C.1.pep
MPGSLEPLDLGVHIPYHFRCPISLELMRDPVTVCTGQTYDRASIEAWVSTGNSTCPVTRATLTDFTLIPNHTLRRLIQEWCVANRAFGVERIPTPKQPADPALVRSLLNQASSGSAPAHLRLSSIRRLRQLARDSDKNRSLIASHNVRQILLPIVFNNGSDELKNESLALLVMFPLGESECASLASDSVKIGYLSRMLTHNSFDVRVNSAALIEIVVAGTHSPELRAEVSSVDEIYDGVVDLLRSPISHPRALKIGIKALFALCLVKNTRQKAVDAGTPAVLVDRLADFEKCDAERALATVELLCRIPAGCEAFAGHALTVPMLVKIILKISDRATEYAAGALLSLCSESERCQREAVAAGVLTQLLLLVQSDCTERAKRKAQMLLKLLRDSWPQDSIGNNSDDFACSQVVVVPF

SEQ ID NO: 241645 - protein, 87 aa, Glycine max
  unsure (1)..(87): unsure at all Xaa locations
  Clone ID: PAT_MRT3847_60232C.1.pep
PKNRRGLFPPAQALFXKKGVRGVCPPFAVNQGLFFXKVVFRKPKVGRPKGAPGNQGGNGAKGPGKKTKNRPLLPSGGQKVGEPFLKK

SEQ ID NO: 241646 - protein, 152 aa, Glycine max
  Clone ID: PAT_MRT3847_60233C.1.pep
PRVRKNTRQKAVAAGAPAVLVDRLADFEKCDAERALATVELLCRIPAGCAAFAAHALTVPMLVKIILKISNRATEYAAGALLSLCSESERCQREAVAAGVLTQLLLLMQSDCTERAKRKAQMLLKLLRDSWPQDSVGNSDDFACSQVVVVPF

SEQ ID NO: 241647 - protein, 80 aa, Glycine max
  Clone ID: PAT_MRT3847_60234C.1.pep
RVMRARETMDCKEHIPMLRTVVLTVSWLLLITLPYCEAAYNYSECKEQTYKCGSLINISYPFWGHDQRDSECGGGDLFEL

SEQ ID NO: 241648 - protein, 72 aa, Glycine max
  Clone ID: PAT_MRT3847_60235C.1.pep
CNHEDHTIAGPSDRRVLIGSQCRPINDILPTLRITREFRAGPCTRPRCPHSECVISYSSRGHACLRLEIEIR

SEQ ID NO: 241649 - protein, 206 aa, Glycine max
  Clone ID: PAT_MRT3847_60236C.1.pep
TAARRRQKGGVKIVKLEDATQSLLDGLKAEGITVNVEEVGDYKLENDTGGHVPFQRNEDTRHSIDAQSLSKGNKDALGASGFKLELENEIINLDDDDDDDDDDDDDDDGCTSKGLHGKKVISQIIAENEHPSSSDAIQHKSIFTEAQRFEAIKRKCLSDTQSSTSTSSDDDDSFEFDEGNPPKRRKTAPDSFGVNSLPSYFLTRKI

SEQ ID NO: 241650 - protein, 131 aa, Glycine max
  unsure (1)..(131): unsure at all Xaa locations
  Clone ID: PAT_MRT3847_60237C.1.pep
DGTMSPMKFWVTQPNKQHAVKLTQLKLELGLFGARLGAANDKVAFEITGIATKKEKSKPKTTPLPLVPFSKRRHTHCHTTCSRRFLSSKSPSLVWDARDLCGFIXSSKTTPSMFATSHFMSYMERENRKRK

SEQ ID NO: 241651 - protein, 124 aa, Glycine max
  Clone ID: PAT_MRT3847_60238C.1.pep
MPISFFFQKREGTLLGHSVSYTRVKLMQVIMTYKRWGEGTTQRMPRWKHGQDQVENIDYTHWQMNAIGRGANPTINSQGIRYNAPTKPFATEVTKRVKSAETQWKVGYCTPVEDLGLNGAYYNY

SEQ ID NO: 241652 - protein, 212 aa, Glycine max
  Clone ID: PAT_MRT3847_60239C.1.pep
MATRVHQFFDELEAKKTILAKCTDLFTTLSTHFSSLQHSISEKSQSLDSNLQSLDSLSKETLESLHRRETSIPERESAAAARIEEQREAALADLRATHPPDPDLSATLKSLWRKMDAPALLRFVVSKRKESASLRAEIAAAMAEAVDPARLVVEAVEEFLKSKVAKSGVTDKRWACGLVIQALMVSESESREYSRRISERGRSGVEMWKEHL

SEQ ID NO: 241653 - protein, 52 aa, Glycine max
  Clone ID: PAT_MRT3847_6023C.1.pep
KTTEVLHIHILYTLATTDIKSLYIANTLLTGLWTSYCKRRLHWHLLQRQRPT

SEQ ID NO: 241654 - protein, 298 aa, Glycine max
  Clone ID: PAT_MRT3847_60240C.1.pep
AGEPIAKTGNSGHWTTGAHLHFQVEKGRHNDITNQNTVNPLKWLKGHGGGKVGGSGSANARRAIQRAQSILGGRYKSSYITEQMMRVAKRESNFQADAVNNWDINARMGDPSKGMFQMIGSSFRAYAKPGHGNILNPTDEAISAMRYIVGKWVPIMGSWRSAFKRAGDYAYATGGVINTSGMYQLAEGGYPEIVIPTDPSRQSDAMKLLHLAASKISGNNRNKRPNQLRTPSVTSNTVDNAELLLQMIENQQKQINVLMEIARSNENIEKQPKGFSERDVSQAQGSRLRLAAYSQGGL

SEQ ID NO: 241655 - protein, 57 aa, Glycine max
  unsure (1)..(57): unsure at all Xaa locations
  Clone ID: PAT_MRT3847_60241C.1.pep
VTFIIKGQMCGYPEPSDXEAASTSQASSGRGGLARGMPFIRDQVGGGCLARGNQRSL

SEQ ID NO: 241656 - protein, 100 aa, Glycine max
  Clone ID: PAT_MRT3847_60242C.1.pep
GKDKKWGIFFEKIGECTQKRCFWCWGAVLIFWEFFCDQEAVKSVPYGKGVVPILKAKNGGGGLFFFSNKDGKKSGPPSFSKFKLGWRLFPPGGGLKPVGG

SEQ ID NO: 241657 - protein, 85 aa, Glycine max
  Clone ID: PAT_MRT3847_60243C.1.pep
SFSGSQMSTFKKAIEDMAADSLRCVAIAYRSYEMKNVPTSEEELSHWSLPEDNLVLLAIIGLKVIFPLQIILSWSWEPMNKRVGT

SEQ ID NO: 241658 - protein, 52 aa, Glycine max
  Clone ID: PAT_MRT3847_60244C.1.pep
GVGMGYHRSIYVAFNIARKHAGQYRKDKHETKDEDERRCFVNYHLAIYSLEN

SEQ ID NO: 241659 - protein, 39 aa, Glycine max
  Clone ID: PAT_MRT3847_60245C.1.pep
VGRLQGTGENCRVYPRDRVYVCSFYNWNITKGFRLIFNE

SEQ ID NO: 241660 - protein, 68 aa, Glycine max
  Clone ID: PAT_MRT3847_60246C.1.pep
VSSKNVFSLRVINVRMLFPNYSSLVSNNVPFFKLVPFLGSYPSPPNWFSRLSHPPSKVCPYYLSPFKV

SEQ ID NO: 241661 - protein, 56 aa, Glycine max
  Clone ID: PAT_MRT3847_60247C.1.pep
KKVKDHCSKHSPCQKGGTCVNMPSGPHCLCPQHLTGNHCQKEKCFEPQLLRFFHTT

SEQ ID NO: 241662 - protein, 148 aa, Glycine max
  Clone ID: PAT_MRT3847_60248C.1.pep
RLSNVIKNCENLEFLSLESWHKYTSLESLYIGDSCHSLVSFPFDCFPSLQYLHIWGCRSMEAITTRGGMNAFKLSHLNVTDCKKLRSLPEQIDLPALQALHFYELPELTSLPPRCLPSSLQSLSVNVGMLSSMSKHELGFLFQRLTSL

SEQ ID NO: 241663 - protein, 55 aa, Glycine max
  Clone ID: PAT_MRT3847_60249C.1.pep
PRASSKGAGLLKGSSGHYVDRHWTDTDLNNLIQTQLKFLAEEMQAINKGLEKVVH

SEQ ID NO: 241664 - protein, 110 aa, Glycine max
  Clone ID: PAT_MRT3847_6024C.1.pep
QCSVRSGCTSVAIGSAECGSGYSFSQTSVSACRSPGMSTTSIPKQHFCLYVWMVVDPCGPCLTVSRAYLGHGYIMQWFQQGLSVVCVTSVRCEHFLVVLHHITLPCPSPL

SEQ ID NO: 241665 - protein, 74 aa, Glycine max
  Clone ID: PAT_MRT3847_60250C.1.pep
TYCLCQFSIRSFFFGCDQPYLFLRHKPVNMITIYFGAKSVDTKPKNTRTYLKKYKTTTDRRMTKKLETCNHPTR

SEQ ID NO: 241666 - protein, 61 aa, Glycine max
  Clone ID: PAT_MRT3847_60251C.1.pep
PCLYLLRIILYFPFSLSPIRWRRTSRRFSVLCLLVSTMISLHALYNCDAYIFCLQNRIYEH

SEQ ID NO: 241667 - protein, 63 aa, Glycine max
  Clone ID: PAT_MRT3847_60252C.1.pep
STRTQDNSTASEAPEAPFTKWSMSPQFLFPKSLFHNQERIRVFQRGKPIHLGEPIKLKLGVYE

SEQ ID NO: 241668 - protein, 154 aa, Glycine max
  unsure (1)..(154): unsure at all Xaa locations
  Clone ID: PAT_MRT3847_60253C.1.pep
VAAXXHGRKSKXXKXXMKXXEMLEDNLXXEKDVQDKXHGENGGVXDRRHGRKRKTLKEDDGELPADSPGSGIQKHYSLRAPKVNTEAVMPNISKKDPKCIKEESLMCHQCQRNDKGRVVRCTSCKRKRFCVHCIENWYNIASVSFFSLLFLCQL

SEQ ID NO: 241669 - protein, 157 aa, Glycine max
  unsure (1)..(157): unsure at all Xaa locations
  Clone ID: PAT_MRT3847_60254C.1.pep
VXXXXXLKWKFRGNXXVQVDGVXVQISWDLYTWLMDKNTRRAGLRRSGGIGTTWLRCGIWGLRNGARLGPLLRCRLPVGLSVEAPPSWNGPVWRRMSWSFLLVSLCSFTLGNAEGVLLEFSIGFLLLCTANSLEFRMHVCDISPTNPFVSWTYIIRD

SEQ ID NO: 241670 - protein, 48 aa, Glycine max
  Clone ID: PAT_MRT3847_60255C.1.pep
MFPFQRIFLARVLAVLNLIAVLPKDRSGLCISLSQALQGLISLGLMWG

SEQ ID NO: 241671 - protein, 53 aa, Glycine max
  Clone ID: PAT_MRT3847_60256C.1.pep
MLFSLLDTFIHNLFLTFLCVGLWVYPFIRLNIFISITLAFCPTLMDAEQNGLI

SEQ ID NO: 241672 - protein, 101 aa, Glycine max
  unsure (1)..(101): unsure at all Xaa locations
  Clone ID: PAT_MRT3847_60257C.1.pep
PPDWKNPFVPLFNCLGGHPLFPSWRITQKARTMGPSHELPIMNGKWDAPCKGALIAGGGVVTPLLTVTLAISLPPGRLASFLSFXAAFSGFPIKGLNGGLP

SEQ ID NO: 241673 - protein, 104 aa, Glycine max
  Clone ID: PAT_MRT3847_60258C.1.pep
RSSKYQPHGCREWRLGQSFLPSQVAPPAASAAPLSRQSHATPCQCLCCCWCRERRRGSGVRGLREPFLAPSEATETLRRARRLGLCRFAYWDSVILTLCSGTVR

SEQ ID NO: 241674 - protein, 203 aa, Glycine max
  unsure (1)..(203): unsure at all Xaa locations
  Clone ID: PAT_MRT3847_60259C.1.pep
MKGVTVKVEETMAYANAASTSPTTSSNLSPQPMEGLHEVGPPPFLTKTFDVVEDPSTNDIVSWSRSRNSFVVWDSHKFSTTILPRYFKHNNFSSFVRQLNTYGFRKIDPDKWXFANEGFLAGQRQLLKTIKRRRHVTVTQTQSHEGGSGACVELGEFGLEGEMERLRRDRTVLMAEIVRLRQQQHNSREQLGEVEERQDSVDG

SEQ ID NO: 241675 - protein, 44 aa, Glycine max
  Clone ID: PAT_MRT3847_6025C.1.pep
TLVWLTREGSIKLLVDVFFLYLELVTLGNPVCFQNRLRKRDHHA

SEQ ID NO: 241676 - protein, 157 aa, Glycine max
  Clone ID: PAT_MRT3847_60260C.1.pep
FLQRNAQNKELQGARRKRRLTATPSVENLQQDHFALSIEEGSATIESQMESFFSAACNDPLESNSELKDPILSSVPVASGSNLGEVSDSVWEDLLNQDLVAGDPEEEVVIGDFSQVDVPVEDLIADADEWSEDLQNLVDHMGYLGSKPFMKGRIVII

SEQ ID NO: 241677 - protein, 85 aa, Glycine max
  unsure (1)..(85): unsure at all Xaa locations
  Clone ID: PAT_MRT3847_60261C.1.pep
XIYTLRSATXAYYYFRPHNGVVVEFNTWRGGLSEKRQYFTMQTHGXSYAYAFQRVAWLLVLPXCXXPVDRPXGEXXGEVVSSNIX

SEQ ID NO: 241678 - protein, 38 aa, Glycine max
  unsure (1)..(38): unsure at all Xaa locations
  Clone ID: PAT_MRT3847_60262C.1.pep
LMXKNALCGLLIEVYHHNKTLNNVMYSQLSKNSSLFFQ

SEQ ID NO: 241679 - protein, 276 aa, Glycine max
  Clone ID: PAT_MRT3847_60263C.1.pep
MGTLGRAIYSVGNWIRETGQAIDRLGSRLQGGYYFQEQLSRHRTLMNIFDKAPVVDKDVFVAPSASVIGDVQLGRGSSIWYGVVLRGDVNIIRVGNGTNIQDNSLVHVAKSNLSGKVLPTIIGDNVTVGHSAVIHGCTVEDEAFVGMGAILLDGVVVEKNAMVAAGALVRQNTRIPSGEVWAGNPAKFLRKLTDEEIAFISQSATNYTNLAQVHAAENSKSFDEIEFEKVLRKKFARKDEEYDSMLGVVREIPPELILPDNVLPDKAEKALKKSGI

SEQ ID NO: 241680 - protein, 92 aa, Glycine max
  Clone ID: PAT_MRT3847_60264C.1.pep
AGNPAKFLRKLTDEEIAFISQSATNYTNLAQVHAAENSKSFDEIEFEKVLRKKYARKDEEYDSMLGVVREIPPELILPDNVLPDKAEKALKK

SEQ ID NO: 241681 - protein, 125 aa, Glycine max
  Clone ID: PAT_MRT3847_60265C.1.pep
MGTLGRAIYSVGNWIRETGQAIDRLGSRLQGGYYFQEQLSRHRTLMNIFDKAPVVDKDVFVAPSASVIGDVQLGRGSSIWYGVVLRGDVNIIRVGNGTNIQDNSLVHVAKSNLSGKVLATIIGDN

SEQ ID NO: 241682 - protein, 231 aa, Glycine max
  Clone ID: PAT_MRT3847_60266C.1.pep
MINFEETELRLGLPGGSASDHNESTTVKGSGGKRGFSETASVDLKLNLSSSDDSASDSPSSASTEKTTTAAPPPPSRANDPAKPPAKAQVVGWPPVRSFRKNIVQRNKNEEEAAFVKVSMDGAPYLRKVDIKLYKSYQELSDALAKMFSSFTIEKCGSQGMKDFMNETKLIDLLNGSDYVPTYQDKDGDWMLVGDVPWEMFVESCQRLRIMKGSEAIGLAPRAVEKCKNRS

SEQ ID NO: 241683 - protein, 82 aa, Glycine max
  Clone ID: PAT_MRT3847_60267C.1.pep
KDLKSDTVLILRSNILPSFLQKLEKDLAEIHKIAYVVDAYVSYGRSDDLNEKVTIASSGRLDAIARARPILSAMCENLFTFE

SEQ ID NO: 241684 - protein, 64 aa, Glycine max
  Clone ID: PAT_MRT3847_60268C.1.pep
GTPNGPSQNKVVIFYNGELPLKMGFLNFQQDLFKGVPGFLFNPFSRPPIFYKPVFKDPRLGVRF

SEQ ID NO: 241685 - protein, 56 aa, Glycine max
  Clone ID: PAT_MRT3847_60269C.1.pep
NTKQAKKPKSKTDRIELHLKTHDSLTAYSATTCTMPSMPLNKLLHIPNPILQTLFY

SEQ ID NO: 241686 - protein, 64 aa, Glycine max
  Clone ID: PAT_MRT3847_6026C.1.pep
GFGSPQKFPKFPALRGLEKKYLFLKFLALPTLAGFCGFFFNKFFLLGVFLTSGTPFWYCGVKKF

SEQ ID NO: 241687 - protein, 45 aa, Glycine max
  Clone ID: PAT_MRT3847_60270C.1.pep
VPFSPLEALPFSGHSAASREIPLVGSVAQIRCMRYDKFIPFSQPF

SEQ ID NO: 241688 - protein, 41 aa, Glycine max
  Clone ID: PAT_MRT3847_60271C.1.pep
DSGNKGLHVCFLTIVLIIEGKGNIMASVIYPLKKNLWFLVS

SEQ ID NO: 241689 - protein, 364 aa, Glycine max
  Clone ID: PAT_MRT3847_60272C.1.pep
LYDILVFFYFKGKLIGRGSSGSVYHATNLETGASCALKEVDLFPDDPKSADCIKQLEQEIRILRQLHHPNIVQYYGSEMVGDRLYIYMEYVHPGSLHKFMHEHCGAMTESVVRNFTRHILSGLAYLHGTKTIHRDIKGANLLVDASGSVKLADFGVSKILTEKSYELSLKGSPYWMAPELMKAAIKKESSPDIAMAIDIWSLGCTIIEMLTGKPPWSEFEGPQAMFKVLHKSPDIPESLSSEGQDFLQQCFKRNPAERPSAAVLLTHAFVQNLHEQDVQVHSQGQSCPRGDAGPGDDSRRHSPSNSSRNSRGVVSASFRARLFNKIHNLIGPQSPLKPSAHNLMTVTNPSNIPLSAVMKIIRNM

SEQ ID NO: 241690 - protein, 84 aa, Glycine max
  Clone ID: PAT_MRT3847_60273C.1.pep
LLRFRLRGCGKGPREHLKAHFIRITLNYPLVGQGMTDNPMNAIFVPSSVPVEVFLFEVVGITSFGSFIEAASGENFACGSSKDY

SEQ ID NO: 241691 - protein, 141 aa, Glycine max
  unsure (1)..(141): unsure at all Xaa locations
  Clone ID: PAT_MRT3847_60274C.1.pep
HKPCKPKFTIPLKQQTLTTTNDTHWIPNLITHDNNPFNSPEPPEGVAAPPYLDNRPMETDDEISAAYNELXYXPRYTRCNNPSATKSTVMDTNVNKETGSRVSVPEKEKVMDGFTERMVHVTRATNVVNGGKHFMVLANFD

SEQ ID NO: 241692 - protein, 218 aa, Glycine max
  Clone ID: PAT_MRT3847_60275C.1.pep
MDSDISQWVTEFLLRSSVPDSLIQKTLAALPLSTASPRLKKTLLLRTLQTLLRTATLSETALDILELLAPVSDAHRRAYCAVAVECTVKYLAACPEVIDGEYAGAVRRIWRGRVAALQARRSGLVSGELVRWRDEIENALGEDSRAARERLAGLNSRRDAMNEVRVYLKEAWEMMGPSFLETVAATEKKNDEGACDNGSGNGNDDDHDDGACMEDVAM

SEQ ID NO: 241693 - protein, 36 aa, Glycine max
  Clone ID: PAT_MRT3847_60276C.1.pep
CLEENTRIHTISSPCNTLVVKLAVQELSRLNIKMNF

SEQ ID NO: 241694 - protein, 120 aa, Glycine max
  Clone ID: PAT_MRT3847_60277C.1.pep
RQKNGNFINWNQKTGWISFPSRWGIGGENSMVGTCSSTGGLFGPSPWRKKTGKVLPLWKKPLITDKGKWGAMEKPFTSGHKLSMRGLKSSRATFSSEILFGFRKHWMLQALPPFFGSSLG

SEQ ID NO: 241695 - protein, 39 aa, Glycine max
  Clone ID: PAT_MRT3847_60278C.1.pep
DDGLRSWCYKDIVFVIFLIFMLLVLVILFQYKQYYILKA

SEQ ID NO: 241696 - protein, 197 aa, Glycine max
  unsure (1)..(197): unsure at all Xaa locations
  Clone ID: PAT_MRT3847_60279C.1.pep
GIRHEGGSPFPLKRRDQLLDYILTLMGRDDEDGFADYNDLLRTQALAISACTTLVSVEPKLTVETRSHVMKATLGFFAIPNDPVDVVNPLIDNLITLLCAILLTGGEDGRSRAELLMLILRQIDQFVCSPVEYQRKRGCLAVHEMLLKFRMICVSGYXCTGLSWEVVHITKQWTELYMGNXSKLPSAFVLPSREALC

SEQ ID NO: 241697 - protein, 219 aa, Glycine max
  Clone ID: PAT_MRT3847_6027C.1.pep
MDAASEAAAAVAAPQAEGSPAAAAAPSRYESQKRRDWNTFLQYLRNHKPPLTLARCSGAHVIEFLKYLDQFGKTKVHIAGCPYFGHPNPPAPCACPLKQAWGSLDALIGRLRAAFEENGGRPESNPFATRAVRIYLKEVREGQAKARGIPYEKKKRKRTAVTTSVTSAATVMSTLTGSSPNNTITNGAGSTTGNTTNGAGVSVPSVAATATPNVTATAV

SEQ ID NO: 241698 - protein, 29 aa, Glycine max
  Clone ID: PAT_MRT3847_60280C.1.pep
AAEQSSNLMVRTYSLITNTSFLLSNHVQS

SEQ ID NO: 241699 - protein, 125 aa, Glycine max
  unsure (1)..(125): unsure at all Xaa locations
  Clone ID: PAT_MRT3847_60281C.1.pep
WLNEGTRKASSDYSSTSKKNVKPLLTFDSCFWANVEEALLSCKXLNVVREKEETLKKLVIFEEYVYGLVKNYAVSPEIFLAQSSYMCWWNEYXAIKGAFYNSALSNFMSDARKREQYALGVYDFP

SEQ ID NO: 241700 - protein, 62 aa, Glycine max
  Clone ID: PAT_MRT3847_60282C.1.pep
VAAPYLNITIYCGVRHTCHREERLRWNWSGDKTARMFNHECFRTTSYFGQRVKFPCKKVWEK

SEQ ID NO: 241701 - protein, 263 aa, Glycine max
  Clone ID: PAT_MRT3847_60283C.1.pep
NSARDEMYQVNLILDNLPAIRFTQKEGYFLRWTGYPGGIKIEDAYYVFNHLKFNVLVHKYEETNVARVMGTGEGAELIPVVKQGSSEKPGYMVVGFEVIPCSIMHNADSAKTLKMYEKYPSSIRCDPATVAMPIKEGQPVVFTYEVTFEESDIKWPSRWDAYLKMEGAKVHWFSILNSLMVITFLAGIVLVIFLRTVRRDLTRYEELDKEAQAQMNEELSGWKLVVGDVFRTPTNPALLCVMVGDGVQILGMSVVTILFAALG

SEQ ID NO: 241702 - protein, 248 aa, Glycine max
  unsure (1)..(248): unsure at all Xaa locations
  Clone ID: PAT_MRT3847_60284C.1.pep
PPSALHARLPPHSRAPPPGIMPEAPMAPEDVLQEVVKMGFYNMQXVSLLGFLVXHEGMVNNNVDNNNFFGDDSNIIENDVVDTMDSGLNQMHSLELASXVVCACSSNGVESTVSFLGSMCCFPCTAALALQSRAHPREIMTEVLKALQELNVCWKKIGHYNMKCRWVAGIPGHHEGMVNNNVHSNHYFGDDSNIIENDAVSTSNVVKFEVQLYKTREEKYLLDLQRVQGPQFLFLDLCAAFLAQLRVL

SEQ ID NO: 241703 - protein, 53 aa, Glycine max
  Clone ID: PAT_MRT3847_60285C.1.pep
FAEILSKDALKFNAELQPEFKSDIYHALHSTRDAKTNAHAGTLPVFDPSTHHI

SEQ ID NO: 241704 - protein, 93 aa, Glycine max
  unsure (1)..(93): unsure at all Xaa locations
  Clone ID: PAT_MRT3847_60286C.1.pep
NREKLMKMAGSVRTGGKGTMRRKKKAVHKTRTTDDKRLQSTLTRIGVNAIPALEGXNMVRNDVXIQFLSPQVQASVADDTGVVRGCSQTKKEQ

SEQ ID NO: 241705 - protein, 63 aa, Glycine max
  Clone ID: PAT_MRT3847_60287C.1.pep
KLVVVQVLAGENSLGTIWGEKGYIRMKRDIRRQERFYVKLLPMLLIQLFECCYESIIYKPLTV

SEQ ID NO: 241706 - protein, 87 aa, Glycine max
  Clone ID: PAT_MRT3847_60288C.1.pep
SYVFITILRERHLYILISYLFPYICTLLFLYMLIVSLHCHSISHVYIFKSSIIKCARMIAERTMYRVRQWSGIIFFCDMHHTVLCTC

SEQ ID NO: 241707 - protein, 109 aa, Glycine max
  Clone ID: PAT_MRT3847_60289C.1.pep
MSGVWVFKNGVVRLVENPGGEAVEGSRGGRRKVLVHRASNEVITSYAVLERKLYSLGWERYYDDPDLLQFHKRSTVHLISLPRDFNKFKPMHMYDIVVKNKNAFEVRDM

SEQ ID NO: 241708 - protein, 408 aa, Glycine max
  unsure (1)..(408): unsure at all Xaa locations
  Clone ID: PAT_MRT3847_6028C.1.pep
FTRPIGNYSDGNLVASLLAYKMGVTQCTIAHALEKTKYPDSDLYWKKFEDKYHFSCQFTADLIAMNNADFIITSTYQEIAGTHPXLKNTVGQYESHAGFTLPGLYRVVHGIDVFDPKFNIVSPGADMSIYFPYSEKQNRLTALHGSIEQLLFAPEQTDEYIGLLKDKSKPIIFSMARLDRVKNITGLVESFGKNSKLRELVNLVIVAGYIDVKKSSDREEIAEIEKMHELMKKYNLVGDFRWIAAQTNRARNGELYRYIADTQGAFVQPAFYEAFGLTVVEAMNCGLPTFATCHGGPAEIIEHGISGFHIDPYHPDQASQLLVEFFQKSKEDPSHWKKISDGGLQRIYERYTWKIYSERLMTLAGVYSFWKYVSKLERRETRRYLEMFYILKFRDLANSVPLAKDDAS

SEQ ID NO: 241709 - protein, 223 aa, Glycine max
  Clone ID: PAT_MRT3847_60290C.1.pep
LKGYCRHGNDRLLIYSYLENGSLDYWLHECVDENSALKWDSRLKVAQGAARGLAYLHKGCEPFIVHRDVKSSNILLDDNFEAHLADFGLSRLLQPYDTHVTTDLVGTLGYIPPEYSQTLTATFRGDVYSFGVVLLELLTGRRPVEVIKGKNCRNLVFWVYQMKSENKEQEIFDPVIWHKDHEKQLLEVLAIACKCLNQDPRQRPSIEIVVSWLDSVRFDGSQQ

SEQ ID NO: 241710 - protein, 183 aa, Glycine max
  Clone ID: PAT_MRT3847_60291C.1.pep
FHRKPLILLEISQLWSEFVALSGGTTLSASGMLVPDTLCDAQVAGCLYGDNCEDRVLVVTVASVVEPFLSPQQRDNIPQGRPDLISGVRIDVMTEEANEKSNQGTPCWLAAELLSLVDIPASSNCLQSLIEASLGLPEHEWEERLGVGVSNSASLMYKSLTRMQIWEVSLSFRDLLDSKVSAM

SEQ ID NO: 241711 - protein, 48 aa, Glycine max
  Clone ID: PAT_MRT3847_60292C.1.pep
YVGKAQQKSEREQELKGPSEHNRKEAADEYTSENLYLTNWDDTISNEQ

SEQ ID NO: 241712 - protein, 57 aa, Glycine max
  unsure (1)..(57): unsure at all Xaa locations
  Clone ID: PAT_MRT3847_60293C.1.pep
QSIPGAQGLVQPFPFSSHPNGKTRKIGIQGIFLLRKGNGWSPRRLSQSSXNQNNFAK

SEQ ID NO: 241713 - protein, 714 aa, Glycine max
  Clone ID: PAT_MRT3847_60294C.1.pep
MVLSDAVNFARNFAVMVRVRGPDPKGLKMRNHAFHQYRSGETTLSASGVLVPDTLCDSQVATRLNGDNCEDRVLVVTVASVVEPFLSPQQRDNIPQGRPDLIAGVQIDVMTEETNEKSNRGTPCWLLAQLLSLVDIPASSNCLQSLIEASLGLPEHEWEVGWSLASYNNDSQPSKDFFQTHPRERLAAGGSGSASLVYKSLTRMAILSVSLSFRDLLDSKVSAMNKRGDFLLAVGSPFGVLSPMHSCISISVGCIANCYPPHSSDGSLLMADIRCLPGMEGSPVFSEHACLIGVLIRPFRQKAYGAEIQLVIPWDAIVTASSGLLHKRPQNTQKDVCSRNKHEHLYFGSSSPLPIEKAMTSVCLVTIGDGVWASGVLLNSQGLILTNAHLLEPWRFGKEHVNGGGYGTNSEKISSMLEGTAYVVNRVESNQVSQTSPLKMPILYPFAANEQGGYKSSPTYDNHRNIRVRLDHIKSWVWCDAKVVYVCKGPWDVALLQLESVPDDLLPITMNFSRPSTGSQAFVIGHGLFGPKHGFFPSVCSGVVAKVVEAKTPQSYLSVQPEHLHNHEHFPAMLETTATIHPGASGGAVINSDGHMIGLVTSNARHSGGAVIPHLNFSIPSAALAPVFNFSKAMEDLSLLRILDEPNEYLSSVWALMRPSYPNPHPMHDPPQSVTDNKSKEKGSRFAKFIAERKDIFNAGKSGVISKEVIASKL

SEQ ID NO: 241714 - protein, 65 aa, Glycine max
  Clone ID: PAT_MRT3847_60295C.1.pep
RDWVSCLTVLRVSFYYLLGIVVHSVLIGLSLEASVNRAPLVLSHCCATLIKKLINKKISSKILQQ

SEQ ID NO: 241715 - protein, 58 aa, Glycine max
  unsure (1)..(58): unsure at all Xaa locations
  Clone ID: PAT_MRT3847_60296C.1.pep
KTKRALTNFHNQLDLRWXXLPRLHGQWLDVIPAQFSNAVVSHSPTCTFLGFALNESPV

SEQ ID NO: 241716 - protein, 104 aa, Glycine max
  Clone ID: PAT_MRT3847_60297C.1.pep
EEGKWKRVESLQGCKLRQINPLVLKNPSTFHVKPKLPEPDFNGERVEPKDPRRFLHRKGLEDVMQLFIVGAITLVLRPLIKGKWLPQHTDAACGDLYLVDSLVK

SEQ ID NO: 241717 - protein, 157 aa, Glycine max
  unsure (1)..(157): unsure at all Xaa locations
  Clone ID: PAT_MRT3847_60298C.1.pep
GRATRPPTRPDSVRWQFLIYIPVAQGGDVLLKGGKPXVADFVHGKDGLGNTFLPPPXAIKRDSSFASKVKRIVILGGAFFALGNVNPAAEANIHGDPEAAYIVFTSGADIVVIGINITTQVQFTDADLLELKESKGKYAPFLSDICKFYRDFYVKSD

SEQ ID NO: 241718 - protein, 334 aa, Glycine max
  Clone ID: PAT_MRT3847_60299C.1.pep
MASLVNNANGAVNGFPGISQKLIIDTDPGIDDSMAILMAFQSPDVEVLGLTTIFGNTTTELSTLNALLLCEMAGREDIPVAQGSHEPLKGGKPRVADFVHGKDGLGNTFLPPPKGEKIEKSASEFLVEKVSEYPGEVSVLALGPLTNLALAIKRDSSFASKVKRIVILGGAFFALGNVNPAAEANIHGDPEAADIVFTSGADIVVIGINITTQVQFTDADLLELKESKGKYAPFLSDICKFYRDFHVKSDGVHGIFLHDPVSFVAVVRPDLFTYKKGVVRVETQGICVGHTLMDQGLKNWNTSNPWTGYSPVAVAWTVNLEEVLDYIRELVMKP

SEQ ID NO: 241719 - protein, 567 aa, Glycine max
  Clone ID: PAT_MRT3847_6029C.1.pep
TAERVLEMMHLLLDILQAPDPSTLETFLGRVPMVFNVAILSPHGYFGQANVLGLPDTGGQVVYILDQVRALENEMLLRIKKQGLDFTPRILIVTRLIPDAKGTTCNQRLERVSGTDHTHILRVPFRSESGTLRKWISRFDVWPYLETYAEDVASEIAAELQGYPDFIIGNYSDGNLVASLLAYKMGVTQCTIAHALEKTKYPDSDLYWKKFEDKYHFSCQFTADLIAMNNADFIITSTYQEIAGTKNTVGQYESHAGFTLPGLYRVVHGIDVFDPKFNIVSPGADMSIYFPYSEKQNRLTALHGSIEQLLFAPEQTDEYIGLLKDKSKPIIFSMARLDRVKNITGLVESFGKNSKLRELVNLVIVAGYIDVKKSSDREEIAEIEKMHELMKKYNLVGDFRWIAAQTNRARNGELYRYIADTQGAFVQPAFYEAFGLTVVEAMNCGLPTFATCHGGPAEIIEHGISGFHIDPYHPDQASQLLVEFFQKSKEDPSHWKKISDGGLQRIYERYTWKIYSERLMTLAGVYSFWKYVSKLERRETRRYLEMFYILKFRDLANSVPLAKDDAS

SEQ ID NO: 241720 - protein, 233 aa, Glycine max
  unsure (1)..(233): unsure at all Xaa locations
  Clone ID: PAT_MRT3847_602C.1.pep
MKFGSAFREYLQEEREWLVDQKCAHVEYIRLKKVLKTCQKDTSSSDNKDQLCHCQSCPLCDQQFFSELMKEASDVVGYFSSRVKNLLHLHIATGMQRYVLRLRQCFKDDRQALTQEGRILIEYIAMNAIAXRKILKKYDKVRSSLNGENLKSRMHAEHIEILHSPWLIELGAFYLNSSGLDSCDLDGVYGRFSCELNITKAVMTLVLPDSINLEHDLTCAICLDFVFNPYALS

SEQ ID NO: 241721 - protein, 157 aa, Glycine max
  Clone ID: PAT_MRT3847_60300C.1.pep
LFYLQIHGDPEAADIVFTSGADIVVIGINITTQAHCLLISDADLLELKESKGKYAPFLSDICKFYRDFHVKSDRVHGIFLHDPVSFVAVVRPDLFTYKKGVVRVETQGICVGHTLLDQGLKKWNTSNPWTGYSPVAVAWTVNVKGVLDYIRELLMKP

SEQ ID NO: 241722 - protein, 185 aa, Glycine max
  Clone ID: PAT_MRT3847_60301C.1.pep
MASLFNNANGVLGKSEKLIIDTDPGIDDSMAIFMAFQSPDVEVLGLTTIFGNTTTEVSTRNALLLCEIAGRENIPVAQGSPEPLKGGTPRVADFVHGKDGLGNTFLPPPKGEKIEKSASEFLVEKVSEYPGEVSVLALGPLTNVALAIKRDSAFASKVKRIVILGGAFFALGNVNPAAEAHIHGD

SEQ ID NO: 241723 - protein, 65 aa, Glycine max
  Clone ID: PAT_MRT3847_60302C.1.pep
TGRPRLRSGAMAFFAPSMALALPVRAVFSVGLVVSQFYIRIFHGSILCQCFMVHDALRLCVETML

SEQ ID NO: 241724 - protein, 51 aa, Glycine max
  Clone ID: PAT_MRT3847_60303C.1.pep
PSSKRCSTTLRCSLSQSFFVNSSLLIECMKQCLSREYLLIEILARLLLASL

SEQ ID NO: 241725 - protein, 61 aa, Glycine max
  Clone ID: PAT_MRT3847_60304C.1.pep
RHFHRIMQRFDLLPVIHTRRRQKLSADYQYPDKNLTLPPLSLRPSAGGHARFFRPKPLTRV

SEQ ID NO: 241726 - protein, 114 aa, Glycine max
  unsure (1)..(114): unsure at all Xaa locations
  Clone ID: PAT_MRT3847_60305C.1.pep
XXXXXTGXXXDKXXXXXXXDXXXXXTXXXXXXXXIXXPXXXEXSXXTGTGXTXXTXERDXXTXXHXXHXSXXXXTXXXXRAXRDERXQXXXEMXXXXXEEXRXXSXHKXALXXX

SEQ ID NO: 241727 - protein, 54 aa, Glycine max
  Clone ID: PAT_MRT3847_60306C.1.pep
PSSIPLSILTFHITTTTIKRHLLLEKSSLTFTTKYHTIHSIIYQPLHLFNIHIL

SEQ ID NO: 241728 - protein, 84 aa, Glycine max
  Clone ID: PAT_MRT3847_60307C.1.pep
GKHKDLPSYAYSHPSIQRETALNKFRLKWKDRCYEKKDPYESINKLAQQRSILKGQAVLEAHSHPFAAEKDGKEHDHSHISHTL

SEQ ID NO: 241729 - protein, 42 aa, Glycine max
  Clone ID: PAT_MRT3847_60308C.1.pep
MQRKDEDVNVRANNFSETQPIRTAAQGGGDKAYKDVPPPPLF

SEQ ID NO: 241730 - protein, 59 aa, Glycine max
  Clone ID: PAT_MRT3847_60309C.1.pep
PTRAHTLGTSRPCFMDPDHSSSSSKGSPSAKFHAPRISLQSSSGTRFQDLQTKLSFPAN

SEQ ID NO: 241731 - protein, 812 aa, Glycine max
  unsure (1)..(812): unsure at all Xaa locations
  Clone ID: PAT_MRT3847_6030C.1.pep
MSTQPKLGRIPSIRDRVEDTLSAHRNELISLLSRYVAQGRGILQPHNLIDELDNIPGDDQAIVDLKNGPFGEIVKSAKEAIVLPPFVAIAVRPRPGVWEYVRVNVSELSVEQLSVSEYLSFKEELVDGKXNDNFVLELDFEPFNATFPRPTRSASIGNXVPFLNLHLSSIMFRKKDSLQPLLDFLRAHKYKGHALMLNDRIQTISKLQSALAKAEDYLSKLAHDTLYSEFEYVLQGMGFERGWGDTAERVLEMMHLLLDILQAPDPSTLETFLGRVPMVFNVVILSPHGYFGQANVLGLPDTGGQVVYILDQVRALENEMLLRIKKQGLDFTPRILIVTRLIPDAKGTTCNQRLERVSGTDHTHILRVPFRSESGTLRKWISRFDVWPYLETYAEDVASEIAAELQGYPDFIIGNYSDGNLVASLLAYKMGVTQCTIAHALEKTKYPDSDLYWKKFEDKYHFSCQFTADLIAMNNADFIITSTYQEIAGTKNTVGQYESHAGFTLPGLYRVVHGIDVFDPKFNIVSPGADMSIYFPYSEKQNRLTALHGSIEQLLFAPEQTDEYIGLLKDKSKPIIFSMARLDRVKNITGLVESFGKNSKLRELVNLVIVAGYIDVKKSSDREEIAEIEKMHELMKKYNLVGDFRWIAAQTNRARNGELYRYIADTQGAFVQPAFYEAFGLTVVEAMNCGLPTFATCHGGPAEIIEHGISGFHIDPYHPDQASQLLVEFFQKSKEDPSHWKKISDGGLQRIYERYTWKIYSERLMTLAGVYSFWKYVSKLERRETRRYLEMFYILKFRDLANSVPLAKDDAS

SEQ ID NO: 241732 - protein, 74 aa, Glycine max
  Clone ID: PAT_MRT3847_60310C.1.pep
QMNHKKYYKNHKKYFRHEVCQNLSIIKAFQLSSCHLKTNPVLFCVVNSKVVTTHATCFTCKCKLKFFITQVLCP

SEQ ID NO: 241733 - protein, 113 aa, Glycine max
  unsure (1)..(113): unsure at all Xaa locations
  Clone ID: PAT_MRT3847_60311C.1.pep
MAKDALKSPTADTTPFRGYQDEEDDDDLHLREPCAKRKRSKRPSYKSDEEYLALCLMMLAQNGNNSNTQLLATSQSHKEASPQXNYXHTCSICIKALSYYQTLSGHKVNHRKD

SEQ ID NO: 241734 - protein, 43 aa, Glycine max
  Clone ID: PAT_MRT3847_60312C.1.pep
FRLQMLNVHGERDKDSDLIILSLSIKCVFRKGFLFQGFSYAIP

SEQ ID NO: 241735 - protein, 77 aa, Glycine max
  unsure (1)..(77): unsure at all Xaa locations
  Clone ID: PAT_MRT3847_60313C.1.pep
VAGVSCVVRPSCPCFRWPFLPLLVRLPSPCSCVLSVACSVVSCPSVVGPGPLLGPARRWFFVXPPPPCVCCSLASLV

SEQ ID NO: 241736 - protein, 82 aa, Glycine max
  unsure (1)..(82): unsure at all Xaa locations
  Clone ID: PAT_MRT3847_60314C.1.pep
SEFGSSVKALEESEGRLDRPTLEDMDIAVRTHLCQWREAFVNEVKXIRELTESFDAYNNQQHGXHPGPMHENLWCYRDILKS

SEQ ID NO: 241737 - protein, 619 aa, Glycine max
  Clone ID: PAT_MRT3847_60315C.1.pep
TFSCRYKYEARMQAMTKPTYTAIVQHAKNGKPALVFVPTRKHVRLTAVDLITYSGADSGEKPFLLRSAEELEPFLDKITDEMLKVTLREGVGYLHEGLNSLDHDIVTQLFEAGWIQVCVLNSSMCWGVTLLAHLVVVMGTQYYDGRENAQTDYPVTDLLQMMGHASRPLVDNSGKCVILCHAPRKEYYKKFLYEAFPVESHLHHFLHDNLNAEIVAGIIENKQDAVDYLTWTFMYRRLTQNPNYYNLQGVSHRHLSDHLSEMVENTLSDLEAGKCITIEDDMELAPLNLGMIASYYYISYTTIERFSSSVTSKTKMKGLLEILSSASEYAQLPIRPGEEEVVRKLINHQRFSFENPKVTDPHVKANALLQAHFSRQFVGGNLALDQKEVLLSANRLLQAMVDVISSNGWLSLALLAMEVSQMVTQGMWERDSMLLQLPHFTKDLAKKCQENPGKSIETVFDLLEMEDEERQKLLGMSDLQLLDIARFCNRFPNIDLSYEVLDSDNVRAGEVVTVLVTLERDFEGRTEVGPVDAPRYPKAKEEGWWLIVGDTKTNLLLAIKRVSLQRKLKAKLEFDAPADAGRKSYSLYFMCDSYLGCDQEYGFTVDVNADGGDEDSGRD

SEQ ID NO: 241738 - protein, 113 aa, Glycine max
  Clone ID: PAT_MRT3847_60316C.1.pep
MASFDQAPPGDVKSGDKIFRTKCAQCHTVEKGAGHKQGPNLNGLFGRQSGTTPGYSYSSANKNMAVTWEEKTLYDYLLNPKKYIPGTKMVFPGLKKPQERADLIAYLKESTAQ

SEQ ID NO: 241739 - protein, 167 aa, Glycine max
  unsure (1)..(167): unsure at all Xaa locations
  Clone ID: PAT_MRT3847_60317C.1.pep
TFYSKXQREPDMKTRYQLMSTTTKGEGVQGKDLATVKDKAAXLLVAGTSKYTPTPKEESGSQKRKGGNGENFGRKANHGQNGKQPQEKKKAEGKNPXEKKPAPKWKKGPPTKGQIGEGKNPKKKKKGAGKKTQKKSPEEGEQENPKKGRPKGKKKKTPKQKGGKAQG

SEQ ID NO: 241740 - protein, 113 aa, Glycine max
  Clone ID: PAT_MRT3847_60318C.1.pep
MASFDQAPPGDVKSGDKIFRTKCAQCHTVEKGAGHKQGPNLNGLFGRQSGTTPGYSYSSANKNMAVTWEEKTLYDYLLNPKKYIPGTKMVFPGLKKPQERADLIAYLRESTAQ

SEQ ID NO: 241741 - protein, 85 aa, Glycine max
  Clone ID: PAT_MRT3847_60319C.1.pep
GRGGALAALTTYSGQRMWWLYQPKLAVEHCSLSPGDMGWPYTGTLWPFVYACISMVPDGFIFDLVYSIWTNCYVHYHDYWKARDN

SEQ ID NO: 241742 - protein, 92 aa, Glycine max
  Clone ID: PAT_MRT3847_6031C.1.pep
IFISITYSFPIKNLNKICRTYVHNYFKTNVFHVAELLYIFHSSIYTEPFMHPSYPKFEFVRLQLHLHNALVILHLVNTKNHLMINSIIIKTN

SEQ ID NO: 241743 - protein, 53 aa, Glycine max
  Clone ID: PAT_MRT3847_60320C.1.pep
GLQHRFITFVVSDVVKTCYIFYDGRVNRLSMCIILRRCLRSIVLEYYAFYVSH

SEQ ID NO: 241744 - protein, 88 aa, Glycine max
  unsure (1)..(88): unsure at all Xaa locations
  Clone ID: PAT_MRT3847_60321C.1.pep
MKRQTAVLAYLTAESHSFTSLSSSFVVCSVCFFSHLTMPSCACNCGCASACKCLNXCSGCKMYPDLLYTPXTTTDTLLMGASPVKAQF

SEQ ID NO: 241745 - protein, 902 aa, Glycine max
  unsure (1)..(902): unsure at all Xaa locations
  Clone ID: PAT_MRT3847_60322C.1.pep
MFFAFSVPLDRSDDEVVISLCLEGFRYAIHVTSVMSMKTHRDAFVTSLAKFTSLHSPADIKQKNVDAIKAIVVIADEDGNYLQEAWEHILTCVSRFEHLHLLGEGAPPDATFFAFPQNDSEKTKPAKSARVPVLKNQGPGRMQYAAATLMRGSYDSAGIGSNGSGVTSEQVNNLVSNLNMLEQVGSSEMNRIFTRSQKLNSEAIIDFVKALCKVSMEELRSPSDPRVFSLTKMVEIAHYNMNRIRLVWSSIWHVLSDFFVTIGCLANLSIAIFAMDSLRQLSMKFLEREELANYNFQNEFMKPFVIVMRKSNAVEIRELIIRCVSQMFLSRVIIIISARDVLFMLINTLRLAGWTNFATFTWKIWVKINRAYLDLGTFIVSTILFKILYCLSSSSNYRSIIEYGIVXIVVREFCATKLAEGDLGSSSRNNDKESYGKISAPSPRTGKEGKQDNGEVTDKDDHLYXVWFPLLAGLSELSFDPRPEIRKSALEVLFETLRNHGHLFSLPLWERVFESILFPIFDYVRHSIDPSGSSSPINEVEADGELDQDAWLYETCTLALQLVVDLFVNFYDTVNPLLRKVLMLLVSFIKRPHQSLAGIGIAAFVRLMSNAGELFSDEKWLEVVLSLKEAANATLPNFSFLDSGNFVTVNHEYASMAEDDRDPAESGSHDNLESPRTQNLYAYFSDAKCRAAVQLLLIQAVLEIYNMYRTQLSAKTILVLFEALRDVALHAHKINSNIILRSKLQEFGSMTQMQDPPLLRLENESYQICLTFLQNLVVDRPTSYEEVEVETRLIRLCQEVLEFYIEVAGSGTVSESSHGKQLHWLIPLGSGKRRELAARAPLVVTTLQAICNLGEISFEKNLAHFFPLLSSLISCEHGSAEVQVALSDMLSLSVGPLLLRSC

SEQ ID NO: 241746 - protein, 69 aa, Glycine max
  Clone ID: PAT_MRT3847_60323C.1.pep
LRSLALMRFIGALLALVAFIIASHSTQAESVALNEATFDHQTSNDVWFVKFYAPWCSHCKKLAPIIDEL

SEQ ID NO: 241747 - protein, 120 aa, Glycine max
  Clone ID: PAT_MRT3847_60324C.1.pep
SYEADEVELHLIRLCQEVLEFYIEVAGFGQKSESSHGRQQHWSIPLGPGKRRELAARSPLIVATIQAICSLGDTSFEKNLSHFFPLISSLVRCEHGSKDLQVALSDMLSLSVGPVLLQSC

SEQ ID NO: 241748 - protein, 69 aa, Glycine max
  Clone ID: PAT_MRT3847_60325C.1.pep
LANLRRLIFEISRFPRALSLISDCGVECLKGEYACLTGEALRLDLLQVLLKLRYYISDDPDFFSGLLKK

SEQ ID NO: 241749 - protein, 52 aa, Glycine max
  Clone ID: PAT_MRT3847_60326C.1.pep
EFPIKSFFLLTRNKLGIHGKKKSHPPGIFYSVTNLGLYPLKKKLIFFKGSKR

SEQ ID NO: 241750 - protein, 57 aa, Glycine max
  Clone ID: PAT_MRT3847_60327C.1.pep
CGGVCSPTPTACTPSARVPRSLEARSLAVAMGDMVVEPATLKPTSEPTPSPSGNNGG

SEQ ID NO: 241751 - protein, 49 aa, Glycine max
  Clone ID: PAT_MRT3847_60328C.1.pep
VALTLSFIRFIVAIVRFTDYWIATVLSLMHSTALSSPEAEGSHPMYHPL

SEQ ID NO: 241752 - protein, 40 aa, Glycine max
  Clone ID: PAT_MRT3847_60329C.1.pep
INQELFNRIFYKLKSQSLMSIFMANVYLLTYIFSSSIFFF

SEQ ID NO: 241753 - protein, 131 aa, Glycine max
  Clone ID: PAT_MRT3847_6032C.1.pep
EKTAKVFAGEFQPLFFQNYPSPISFQRFFGAIGPFPRAKPFRFQFFFFLTQFWQISFETFGQQFFCSKKSSSHRKLTKKRGLSKRFGPKPICCFNFNNFNPLTGDFAPPSGVLTSFSLAHKKIERPSSIFK

SEQ ID NO: 241754 - protein, 168 aa, Glycine max
  Clone ID: PAT_MRT3847_60330C.1.pep
GILLNAVATQLKKEGSSGRVVGLDRTKRTTLSTLRAAKMEGVGEYVTCREGDARRLPFPDNYFDVVVSGVFVHTVGREYGARTAEAAAERMRAVAELVRVMKPGGVAVVWDLLHVPEYVLRLQELKMEDVRVSERVTAFMVSSHIVSFRKPSQHVHGPAEVRLDWRLC

SEQ ID NO: 241755 - protein, 249 aa, Glycine max
  unsure (1)..(249): unsure at all Xaa locations
  Clone ID: PAT_MRT3847_60331C.1.pep
MGSRIPSHKLSNGLYVSGRPEQPKERTPTMTSTAVPYTGGDIKKSGELGKMFDIPVDGSKSRKSGPITGAPSRTGSFGGAGSHSGPMQPNAAARATYTSGPMTSGGMAGSTSMKKSNSGPLNKHGEPVKKSSGPQSGGVTPVGRQNSGPLAPVLPTTGLITSGPISSGPLNSSGAPRKVSGPLEATGSMKLQGSAAVHXQAVTVLSQGDDSFRRNFPKAVLWXLILLFVMGFIAGGFXILGAVHNAILL

SEQ ID NO: 241756 - protein, 59 aa, Glycine max
  Clone ID: PAT_MRT3847_60332C.1.pep
RVRTRPRGLLNETLPVWSLRTFTAILFILRLLILTLPLTNRNIILLIGSEQSCWKNLWL

SEQ ID NO: 241757 - protein, 113 aa, Glycine max
  Clone ID: PAT_MRT3847_60333C.1.pep
QPFANKASIMAAIDYIVSEKSDVFMPSHGGNMGHAIQGHRAFAGHKKYITPNKRHMLPYFHNSSLPEEEFNRIMKELHQDSLGQPELRTIKAGRDVTKFPIPECMCNDSNAQS

SEQ ID NO: 241758 - protein, 58 aa, Glycine max
  Clone ID: PAT_MRT3847_60334C.1.pep
RGFMEKIKIRAVVLVKKIGFWGDNAYSQYRDRGVNRVEKEMIDRVNGRVIGRVTSWLE

SEQ ID NO: 241759 - protein, 260 aa, Glycine max
  Clone ID: PAT_MRT3847_60335C.1.pep
MQKLLRPSSSPVAILSISVTVATPFLSLPPKVSNLVPMSAAFTSSSLNPQLSYSRYLALSTNTCSVCRCLSLTHSHTRNNNKTLLLLNPSRNLSLHSASEGSFITQHDPVEYGSLVDSKEKPFNSRLNRRQKGSTSSSPAPSNPDLLAIPGVGPRNFRKLVQKGIAGVAQLKQLYKDKFFGKSSDKMVEYLQNSVGIIHKNHAESITTFIKQSVDEEELEDNSSSSVQKKRLTFCVEGNISVGKTTFLQRIANETIELRD

SEQ ID NO: 241760 - protein, 67 aa, Glycine max
  Clone ID: PAT_MRT3847_60336C.1.pep
SSLIPRHRLFGVSACIRHSRGNFIAARTQCYQGDLSPQEAEEIALLTVVSWYHFCIWIYNVIFEIDC

SEQ ID NO: 241761 - protein, 93 aa, Glycine max
  unsure (1)..(93): unsure at all Xaa locations
  Clone ID: PAT_MRT3847_60337C.1.pep
VXRAXXAXEGDLDKAAESLRELKLXRPSGPPKXEEIGXLPSLXNKQXVAVNQNARTQXKPXLSPNQXXXDVXDFNYXKQAVMLGXSTESXNRL

SEQ ID NO: 241762 - protein, 48 aa, Glycine max
  Clone ID: PAT_MRT3847_60338C.1.pep
MLIKFALCALLLVALDAAEVWPLVEAVATCYSTLAYSCDPAMESGSAS

SEQ ID NO: 241763 - protein, 52 aa, Glycine max
  Clone ID: PAT_MRT3847_60339C.1.pep
SLVAGLISHDIVNRCWNSCVTMPKVSLNYAIVVFNNGSVNCRYDLILKSRGP

SEQ ID NO: 241764 - protein, 104 aa, Glycine max
  Clone ID: PAT_MRT3847_6033C.1.pep
KRFPKKRRGKQPWKGPRAGKFNTPIPKGLLFCEGLPFFMGPGAPYLKIQGGRNPGIFRIFFLPKVKRKNGKGFFFFFLGILFYPLYPRIKPLSLMGIFLGQGFF

SEQ ID NO: 241765 - protein, 208 aa, Glycine max
  Clone ID: PAT_MRT3847_60340C.1.pep
MAAQGPVVVASLLIFCLAGSCYGKVHFSSLKRTLDVTASPKQEQVLEAGLDKITVTWALNKTLPAGTDSAYKTIKLKLCYAPISQKDRAWRKTEDELKRDKTCQHKIVAKPYDASNKTVQRFEWLVERDVPKATYFVRAYAFDSNDEEVAYGQTTDAKKSTNLFEINAVSGRHASLDICSICFSAFSVVSLFVFFYIEKRKGKASSSK

SEQ ID NO: 241766 - protein, 87 aa, Glycine max
  Clone ID: PAT_MRT3847_60341C.1.pep
DTSYIFFLFFFFIFFFFDFIFFFFFFFLFFFFFRTKRPNSHSWFTGWQKRKWCFLYKNSGRISYTWPLLIVREHTRKPLQNAWKDAW

SEQ ID NO: 241767 - protein, 101 aa, Glycine max
  Clone ID: PAT_MRT3847_60342C.1.pep
RRNPLYTDHPDDETITIEMIGECRYNEHTNAHGGCYVVTDWLWPYHNIFRYATNPRHNPTYTYAKTPTRTRSSRPCSHEFLAMTEPPLPLLPDTGVLYTIK

SEQ ID NO: 241768 - protein, 82 aa, Glycine max
  Clone ID: PAT_MRT3847_60343C.1.pep
GQETAATDRRAFLSLASPQPSHRCALHPRSASTSGCSYYRSLQTGSGIMVLREKKKTDSEEYYKIYDIESFVECCNTRKKER

SEQ ID NO: 241769 - protein, 51 aa, Glycine max
  Clone ID: PAT_MRT3847_60344C.1.pep
SIKETVCNIDASVKAGMEKTIATVHEKALRMTGRDSLPNELASHNKDAKND

SEQ ID NO: 241770 - protein, 61 aa, Glycine max
  Clone ID: PAT_MRT3847_60345C.1.pep
CVECKHTHTQFGYNVVLFFYTILGYLSCVRFRDLFYFLADLPSFIDIPTMLQLSIGCFESR

SEQ ID NO: 241771 - protein, 153 aa, Glycine max
  Clone ID: PAT_MRT3847_60346C.1.pep
MEEHKKEGFFLPTPVAKLISFQTDLIYNGLVSLFSPIHSLFSVASKSYHRAEETKDSVESAVQRALSHQITHGSALLLKKLGLCFLSVAYVCMVMILALILAAVVGVALVRLWVEEPVSVKDNLHFDYTEAHPTAVFSFNGVRSLKGHLKKST

SEQ ID NO: 241772 - protein, 107 aa, Glycine max
  unsure (1)..(107): unsure at all Xaa locations
  Clone ID: PAT_MRT3847_60347C.1.pep
GSTGAPFAGNNMLVWNSCPAPSKSTSKHLVQVXLHNEHPVPLPGCDGSDFCPFEVFKEKIVAPHQKHAYHTVCNAKLEQEPSGSKVFQIFKWLSSLGKGDKYPKDEF

SEQ ID NO: 241773 - protein, 138 aa, Glycine max
  Clone ID: PAT_MRT3847_60348C.1.pep
DRCQGAFLSSIIPLQLLWSTVSKSALLVQSRDWTFSRCDKSGVLRINLVRTFEHQVPAQCQCYHLESATRMKASRPLNACALHIRLLTTDHRLQLVNNRAILLLLTLVIRTMRAPQGTVRNIHGITPLGPERDGSARS

SEQ ID NO: 241774 - protein, 83 aa, Glycine max
  Clone ID: PAT_MRT3847_60349C.1.pep
VASFGRGSIVTFPKAFFPRGQRNFKVHPFPGSFLASVPGKPRQRCTWPVNRRGIRRVEIIGTNIYEWVLELASKLNGIVWCCC

SEQ ID NO: 241775 - protein, 92 aa, Glycine max
  unsure (1)..(92): unsure at all Xaa locations
  Clone ID: PAT_MRT3847_6034C.1.pep
SQHKPYHPGKKLNCILIXEDVVTQGKXXXKXQEXVLCSXPSXLXLSDELDKLQXPLAIAXFXDLQINXXSSQNPCXETETXTKRXHPXXLVX

SEQ ID NO: 241776 - protein, 34 aa, Glycine max
  Clone ID: PAT_MRT3847_60350C.1.pep
FFGCYHSFKQHTTGFTSIHQSKIRSKLTNKSYLE

SEQ ID NO: 241777 - protein, 131 aa, Glycine max
  Clone ID: PAT_MRT3847_60351C.1.pep
MSSWERRLEGHKVLAKEQNDPESRRSLQGPGERPRECLGCPRLLLPFFQAMAMPFFSNGRGWRVCGICLQLQPALSLLGYFQLRRGEYRKNAFLKRLQHDQGVSSPPHKLYSSFATSNHHRVFKCKSIGQC

SEQ ID NO: 241778 - protein, 42 aa, Glycine max
  Clone ID: PAT_MRT3847_60352C.1.pep
FVRERLLCIVPKLYPFILTLSTDESLPKIEFDYTLIEVGIQN

SEQ ID NO: 241779 - protein, 74 aa, Glycine max
  Clone ID: PAT_MRT3847_60353C.1.pep
CWGCFTLERSTSLFGKCITSFTFIQLNIYGIFSPITTVLIMCAKTTSYYLILSKTMWFTFLGMSTTMNVTSPMK

SEQ ID NO: 241780 - protein, 58 aa, Glycine max
  unsure (1)..(58): unsure at all Xaa locations
  Clone ID: PAT_MRT3847_60354C.1.pep
GGCVEGPLSTRACVESHGHRYIVTDDNXRPDTDPDTHIANAHRITSTPCRPAYVHGDR

SEQ ID NO: 241781 - protein, 86 aa, Glycine max
  Clone ID: PAT_MRT3847_60355C.1.pep
PRVLPLFLSLFFKIIFLSRRRRVIQSVREANLKKACYHTWEKLILKDPQDPSTPNAVSYKTSAREKLIRQGYNIVGIIGDQWSDLL

SEQ ID NO: 241782 - protein, 59 aa, Glycine max
  Clone ID: PAT_MRT3847_60356C.1.pep
WGRASHTLARFEEFRKAMKARATAGLAEGNDDEENTWCIADGNEVMWFHCLIQSNISEK

SEQ ID NO: 241783 - protein, 139 aa, Glycine max
  Clone ID: PAT_MRT3847_60357C.1.pep
MDIRRKIAIEKGYEDQPQAVVNMSALWLLPRQILNGLAEALGVVGQNEFFLTELPQSMSSLASTLNGLGSSVANLVASFILSVVDNVTGGGGHESWLSSNINKGHYDYYYTLICALCFVNFVYFLYCSKSYGPCKNRGK

SEQ ID NO: 241784 - protein, 64 aa, Glycine max
  Clone ID: PAT_MRT3847_60358C.1.pep
TEKEDTGRGSHEEEAGVEKEKDKVAKQTVGPPEEDCEKNPEGSERTDKINEGLDLDAKEKGATN

SEQ ID NO: 241785 - protein, 84 aa, Glycine max
  unsure (1)..(84): unsure at all Xaa locations
  Clone ID: PAT_MRT3847_60359C.1.pep
INKKKKKKTTPPLKQARGKKKKXNFFLKNTKQKKPPPLFLKTPPXPPHTPTLTKYIIHHPSLFFKINTNFTTPIHKSHILTQNN

SEQ ID NO: 241786 - protein, 82 aa, Glycine max
  Clone ID: PAT_MRT3847_6035C.1.pep
SDKGMARILTEMERTKESGTFASRNSRPGKKRQSADRIEENGSGMQITLLTELTCLHWYLKRDRISPLYYSVIYQEDYSSRI

SEQ ID NO: 241787 - protein, 560 aa, Glycine max
  unsure (1)..(560): unsure at all Xaa locations
  Clone ID: PAT_MRT3847_60360C.1.pep
MLGMATRPGCLKATRESSQQVGLFKDINRDMVNNNVRDIPETSYTHNRDILSGGISAPIKINEKNSRGAKGHKVVSDLVKPIDVVPGSEPEIQAPFTVSNGSENLVESSIIKEGLLVEVFKDEEGFKAAWFSANILTLRDDKAYVGYTSLVAAEGAGPLKEWVSLVCDGDKHPRIRTARPLNTLQYEGTRKRRRAAMGDYAWSVGDRVDAWIQESWQEGVITEKNKKDXNTFTVHFPASVEXTKLVRAWHLRPSRFWKDGKWIEYPKVGTNDSSTHEGDTPNEKRPKLGSHAVDVKGKDRMSKGSDAVESAKPDEMKLLNLAENDKVFNIGKSSKNENKFDAHRMVRTGLQKEGSKVIFGVPKPGKKRKFMEVSKHYVAHENSKISDRNDSVKLANFLMPPSSGPRGWKNSSKNDAKEKHGADSKPKTSHTERIKDSSNQFKNASQSESKVERAPHSASDGATGSILFSTLATSVDAHPTKRASSSRASKGKLAPAHIKSGKGEMEKALNDNPMKSASDVVEPRRSNRRIQPTSRLLEGLQSSLIISKIPSVSHNRNTKS

SEQ ID NO: 241788 - protein, 82 aa, Glycine max
  unsure (1)..(82): unsure at all Xaa locations
  Clone ID: PAT_MRT3847_60361C.1.pep
QAVAERVNNLKKKLTEGDFSVLKEIRETVLQLNAPSQLVEELKTKMKSSGMPWPGDEGEQRWEXSLIAIKKVKTSLDVNYIA

SEQ ID NO: 241789 - protein, 68 aa, Glycine max
  Clone ID: PAT_MRT3847_60362C.1.pep
TLPICKTTTPTAFFFSKNPNIHLVVYHIGSGGVTLTHHHTLYPHKRLDPFLKIQHPISPLKLILPLLT

SEQ ID NO: 241790 - protein, 122 aa, Glycine max
  Clone ID: PAT_MRT3847_60363C.1.pep
VTCVKSLVVVLIIEHVISRVSSNSYTSCKVRNNAASEWSNLGFSSISYCRKYGMLESIGFAVIFECVMTYIRAIILIRKPLISCRCWNIFIAATMYIFLLLFVLHVSLIRYPLDSQKKHNVT

SEQ ID NO: 241791 - protein, 82 aa, Glycine max
  Clone ID: PAT_MRT3847_60364C.1.pep
FQGVNGGASNDHPILLFFFNHFNEPSTNPFFNYYKHWLIFKGGNSHHWWKRICFEFTSLNLVWFPLLIGGTKFIHLTIQTKR

SEQ ID NO: 241792 - protein, 86 aa, Glycine max
  Clone ID: PAT_MRT3847_60365C.1.pep
EPGPVPLEAIGKLNHHLAIFVFSLSLGQIPFLAWATKTFYSVEPSPPTLIPKTIPKLLNSLRGGGFHGFPLNGWNGLQNKKRGTLA

SEQ ID NO: 241793 - protein, 366 aa, Glycine max
  Clone ID: PAT_MRT3847_60366C.1.pep
MSRDCDSLPENTIVVGCGAAGVDFLATVATYPKPDDKIRSTSFKIQGGGNAGNALTCTARLGLKPRIISKVADDTQGREILHELEVDGVDTSFMAVSKEGTSPFTYIIVDSQTKSRTCIHTPGFPPMKPDDLPESNLLTALNGARIVYLDGRLHETALVVAHEAVKKNIPILIDAERLREGLDDLIKLADYVVCAARFPQAWTEASTVSKALVCMLLRLPNIKFVIATLGKDGCIMLERCVNEDPSAEEVVVDKLLESLEMRKNGSTHIPTCISSPVTKLHAEGIGTVCSRLYIGTAKNIPPSELIDTTGAGDAFIGAVLYAICANFEPEKMLCFAATVAASKCRALGARSGLPYRIDPCLASFMQ

SEQ ID NO: 241794 - protein, 48 aa, Glycine max
  Clone ID: PAT_MRT3847_60367C.1.pep
NLHGECGHKIHYLFKGGLARDSPGGKNQLLGRFCKNQLNVYFKGTIGG

SEQ ID NO: 241795 - protein, 158 aa, Glycine max
  Clone ID: PAT_MRT3847_60368C.1.pep
HAFVHASGEGKVKMKKMVAAMMLFLLISTQMKSVEPDAADCLDGCSTACVQSDSRLQARCERKCSIPKKCFKVFFLKKCVRPKREKTGYRREGKVKMKKMVAAMMLFLLISTQMKSVEPDAADCLDGCSTACVQSDSRLQARCERKCSIRMRRRWWLQ

SEQ ID NO: 241796 - protein, 93 aa, Glycine max
  unsure (1)..(93): unsure at all Xaa locations
  Clone ID: PAT_MRT3847_60369C.1.pep
MLASLISSGDNRLTEKTNFYLLSIXILVVYYPIATXFRKFLPHYIRWLSDTXSIYILPFFLTAELXYKRNLSHIYISRFFYDGXINSWTNHHK

SEQ ID NO: 241797 - protein, 85 aa, Glycine max
  Clone ID: PAT_MRT3847_6036C.1.pep
KAELMNASWTRLTLTHQSRVCTRVYEILYCIVLHTLPPRHTDCCLLSVVALIMNATLKAAETALDVAKRSASPELGLLLSAASTA

SEQ ID NO: 241798 - protein, 87 aa, Glycine max
  Clone ID: PAT_MRT3847_60370C.1.pep
FLRKWRALSPMLQIAWMVALLPVFKATRGFKHGVIASAALYLVIFYKREANALYCNYTWECCSSKITPQQMFTFIRWFIKPMYYSPG

SEQ ID NO: 241799 - protein, 230 aa, Glycine max
  unsure (1)..(230): unsure at all Xaa locations
  Clone ID: PAT_MRT3847_60371C.1.pep
ICDTKIGSSIFIYGQFCFVTAEFVTGSTAWLGRGLSCVCAQRRESDARPSFDLTPAQEECLQRLQNRIDIPYDGSIPEHQDALRALWSAAFPEEELHGLISEQWKNMGWQGKDPSTDFXGWGGFISLENLGGFLXEFPGMGSFYFXSHILTSQAALVXATFLKFLAENGSAFDFXYCITFKLMDHQWLYGCLIMDFNAVMKETRRQLEKELLIEDIAQLEDLPSYKLLSR

SEQ ID NO: 241800 - protein, 63 aa, Glycine max
  Clone ID: PAT_MRT3847_60372C.1.pep
DHYGDDDDEDEDDMIPPHEWIARKLARSQISSFSVCEGIGRTLKGRDLSKVRNAILTKTGFIE

SEQ ID NO: 241801 - protein, 74 aa, Glycine max
  Clone ID: PAT_MRT3847_60373C.1.pep
LLSVACDYDFCTNKLLSISKSFKSDSIRGTLTRGLQILQRIVGNALQSPGTNLNMVILVIMMLCQVRDQGTIEM

SEQ ID NO: 241802 - protein, 41 aa, Glycine max
  Clone ID: PAT_MRT3847_60374C.1.pep
APPFLPMSFVNWVSLQTLVDIDQRRRKYREGSLNQAARASR

SEQ ID NO: 241803 - protein, 81 aa, Glycine max
  Clone ID: PAT_MRT3847_60375C.1.pep
SFMYEGLVTLLLGLFAIGTLCPSLFMFSVAWALLMLFAAPCVVFPASTSLSVHFIQNINFKNLSILAIEMHPPSGWHFQLF

SEQ ID NO: 241804 - protein, 146 aa, Glycine max
  Clone ID: PAT_MRT3847_60376C.1.pep
ALKDPKSKVKVPPADSARAARERPGRSTIQFLPKVSLSHLRNPRTAKALKDPKSKVKVNPSESNRGSKERSDRKTNKFQSKVSNSNQKKPMNSKREQERRRREEVAGKGEEEEEHAGRGHERRKEEEETARREQEQEQAERQQQKR

SEQ ID NO: 241805 - protein, 59 aa, Glycine max
  Clone ID: PAT_MRT3847_60377C.1.pep
RLREDDRRAAQCMRLLKRSKVGRYLQANPQPKQQGLPLGTVFNHNNSFFFSHPLSCKKV

SEQ ID NO: 241806 - protein, 113 aa, Glycine max
  unsure (1)..(113): unsure at all Xaa locations
  Clone ID: PAT_MRT3847_60378C.1.pep
KKKKGAQNKFFPPPGGNPKMPRVKTPGDPQRGPKNCFPRGPPFCPGPNFGANPPPLGAPGPTPGPKRXLKRPLPRNNTPKKKPPPGNRPLGXSPPPGAPPGIRARPPGAPNFP

SEQ ID NO: 241807 - protein, 54 aa, Glycine max
  Clone ID: PAT_MRT3847_60379C.1.pep
TSILLSLLSSPLGAVTTSYRPSAIDDFVLHNESNPLENAGTYYIASDITSMMVE

SEQ ID NO: 241808 - protein, 335 aa, Glycine max
  unsure (1)..(335): unsure at all Xaa locations
  Clone ID: PAT_MRT3847_6037C.1.pep
DLAITPETIRQSXPKVNWNLMASLFVRGRSAAVRVSSRSYGGDPLINQGAWTNEEDKSLLLIVQDIGIRNWFDIATSLGTSRTPFQCLARFQRSLNPSMLNSEWTEEEDSQLCSAVASFGARDWQSVASVLERRTGTQCSNRWKKSLCPEKKGSFTREEDIRITVAVMLFGRKWNQIANYVPGRIQSQCRDRYLNCLDPSLKWGGWTEEEDLRLEAAVVKHGYCWSKIAEEVPPRTDSQCRKRWKVLCPEYVPLLQEARKKQRSIIGCNFVDRESERPAITLNDFLPLPVPAPKSDVGASNLRKKAKSSNVPKEMSKKCKKSSTSYQGSTRYRGI

SEQ ID NO: 241809 - protein, 31 aa, Glycine max
  Clone ID: PAT_MRT3847_60380C.1.pep
TTRSKKIIRILYSQTQIIIQGADNHYCWICT

SEQ ID NO: 241810 - protein, 68 aa, Glycine max
  Clone ID: PAT_MRT3847_60381C.1.pep
ITGSFFLGTIPHTIGQDTVWNEMATVRTPLNFDSSKQSFCQYSIDLLGGCIFVVKTGDWIILIQNFPN

SEQ ID NO: 241811 - protein, 60 aa, Glycine max
  unsure (1)..(60): unsure at all Xaa locations
  Clone ID: PAT_MRT3847_60382C.1.pep
GPPPPKKCAAVFALLASSSREVPCSLRWGLMGWLGCKCQSDTXGCRKGLYIFSXALTSRR

SEQ ID NO: 241812 - protein, 177 aa, Glycine max
  unsure (1)..(177): unsure at all Xaa locations
  Clone ID: PAT_MRT3847_60383C.1.pep
RAAQIVMRGVQAIARTGRTVLCTIHQPSITIFELFDALLLLQRGGYTAYFGDLGKDSVVMLEYFASIPGTEEIRPQYNPATYMLDVIGAGIGRNSKDYSVEYAKSALCKANNERTLALSQPSPEFIPFSTLKFDPIAXGFWNQFXELTXKQRLTYWRNXXYNVMRLFPSLSDIFAFY

SEQ ID NO: 241813 - protein, 59 aa, Glycine max
  Clone ID: PAT_MRT3847_60384C.1.pep
CPPPTNYDYGYYLNSKCKMISPLGNQNKKLLGVIIMLNCNLFKQLSSLVKKSFHSLSYF

SEQ ID NO: 241814 - protein, 83 aa, Glycine max
  unsure (1)..(83): unsure at all Xaa locations
  Clone ID: PAT_MRT3847_60385C.1.pep
MVLHYYNIFHVDNSAKDYDLNISYTKLPIIWHSDLIPINKIXADTHFQQISESYHVLXDPHNIAIYDHYVQHLLNVQFTASDS

SEQ ID NO: 241815 - protein, 96 aa, Glycine max
  unsure (1)..(96): unsure at all Xaa locations
  Clone ID: PAT_MRT3847_60386C.1.pep
KRGNWKNLAVPKLNRFEENPLFASWLKTKKARTNRLSKNLPTLNGKWNPPXNRPINPGGCXLTPRGTVKFARALGPVLLVFFLSFLATLAGFPGKA

SEQ ID NO: 241816 - protein, 118 aa, Glycine max
  Clone ID: PAT_MRT3847_60387C.1.pep
MAATASNSLLCTKTLVPTLPSSSNNLNNSNLCSSFPRPRPRPIQALNNSVTVITDKKCEAKWVVDSWKSKKALQLPEYPEQEKLQSVLKSLEAFPPIVFAGEARNLEERLAQASMGNA

SEQ ID NO: 241817 - protein, 224 aa, Glycine max
  Clone ID: PAT_MRT3847_60388C.1.pep
GSKNDVKLLSFLLSPVGHRVEWALKLKGVEFEYVEEDIFNKSNLLLELNPVHKKVPVLVHHQKPIAESLIIVEYIDQTWKQHPLLPQHPYQRALARFWGTVADKLVKTSYVAMCSSGDEQEKSVKEAKEVMDKIEEEIIKGKKFFGGDNIGYLDLAFGWIPYWLPIWEEVGSMQIVDPLKHCAISAWNTNFLSHPIIKDCLPPRDKMLVYSHRRKNEFSSTLRR

SEQ ID NO: 241818 - protein, 81 aa, Glycine max
  unsure (1)..(81): unsure at all Xaa locations
  Clone ID: PAT_MRT3847_60389C.1.pep
GIFMSGCQTDQTFVYASPAGNFASGYGGFSNAIQAVIXESDGAVPNQKIVFKAREKLKRGGFXQRPGLFCSDGPVDGPFVG

SEQ ID NO: 241819 - protein, 60 aa, Glycine max
  Clone ID: PAT_MRT3847_6038C.1.pep
FNFLKHLSVSPRSDIVYVNELGLGRSGGCGSFKIAASLKQSYHPLINGCLSGTIVSHFCK

SEQ ID NO: 241820 - protein, 266 aa, Glycine max
  unsure (1)..(266): unsure at all Xaa locations
  Clone ID: PAT_MRT3847_60390C.1.pep
LWERPFPLRKPGSTHASVLLILLLLLHLTAIPPFKQEKISHSFLFLLHAAITTQPCLRSLSLTLTPPNLLPRRKTKTQSLTDPDLDGVSGKKTKKRKASDLEQEAMPPAAYNNDGDDETSSDLVQPEPASREDDNKNKKKKKKKVVKSEEKEQPLVTEANGEKKEDPNALSNFRISEPLRQKLKEKGIESLFPIQAMTFDTVLDGSDLVGRARTGQGKTLAFVLPILESLINGPTXASRKTGFGRTXSVLVLLPTREMACQVHADF

SEQ ID NO: 241821 - protein, 54 aa, Glycine max
  Clone ID: PAT_MRT3847_60391C.1.pep
IHAKISYYIDNKYNNLQVDGRNLMVIIYCFETLWLSGGASLGRRREALLYHHCS

SEQ ID NO: 241822 - protein, 360 aa, Glycine max
  Clone ID: PAT_MRT3847_60392C.1.pep
KLIEISIFYYFCYIFLINKWLEHKVSLPIGSCKLALPLWEQVVDEVYELSKIEKSVESRRRIKREAYATVLHSSEAYVCGAITLAQSLLQTGTKRDLILLIDKFISVRKREALSEAGWKIRIITRIRNPKAEKGSYNEYNYSKFRLWQLTDYDKVIFIDSDIIVLRNLDILFHFPQITATGNDQSIFNSGIMVIEPSKCTFRTLMRHRDDVVSYNGGDQGFLNEVFVWWHRLPRRVNFLKNFWANTTVEARAKNALFAAEPAEVYAIHYLGWKPWHCYRDYDCNWDTPEQRVYASDVAHRRWWKVHDAMEEGLQRLCRLTKRRRSELNWERRKASKMRLPDGHWKINITDPRRFASLFMD

SEQ ID NO: 241823 - protein, 31 aa, Glycine max
  unsure (1)..(31): unsure at all Xaa locations
  Clone ID: PAT_MRT3847_60393C.1.pep
AINYSHFYEGKRMLNDYLKHXHAAGWRDPDH

SEQ ID NO: 241824 - protein, 49 aa, Glycine max
  unsure (1)..(49): unsure at all Xaa locations
  Clone ID: PAT_MRT3847_60394C.1.pep
GTLGLVDSAEIRLIPVKEYMXITYKPVVGTLHEHAHAYCDSSAATDRDA

SEQ ID NO: 241825 - protein, 70 aa, Glycine max
  Clone ID: PAT_MRT3847_60395C.1.pep
SPNFPHIQTIFNTNQPQHINTLYPSKPISHIFLYPLNIINNKKIFALLNNNLTHYLHTSTYPTSSKYTTT

SEQ ID NO: 241826 - protein, 66 aa, Glycine max
  Clone ID: PAT_MRT3847_60396C.1.pep
VLDLGCWRVKRPQYWPWLAKWPFWWKIWDLDNFQFPFLNWGVLLPWSVTLGAMVACSGYIPNLNFR

SEQ ID NO: 241827 - protein, 61 aa, Glycine max
  Clone ID: PAT_MRT3847_60397C.1.pep
ISSTFDIIKHSFYNFGFLSYFFSFLFLFFYLSYLFILFFIVFFFFFLFFFLFIFFFLFFLF

SEQ ID NO: 241828 - protein, 67 aa, Glycine max
  Clone ID: PAT_MRT3847_60399C.1.pep
VGRKPLVCVVGVPNHMTYADFCQFCGSFIQHMLEMRIVRMDGMEDQYSVLVRFDDQDSTDSFYKHYN

SEQ ID NO: 241829 - protein, 63 aa, Glycine max
  Clone ID: PAT_MRT3847_6039C.1.pep
DDMWLQSSALNCRSNGTITSTQSESESVRGIVVRLSLKCCHDDSNDENKDHNVYHNVYRHIDQ

SEQ ID NO: 241830 - protein, 111 aa, Glycine max
  unsure (1)..(111): unsure at all Xaa locations
  Clone ID: PAT_MRT3847_603C.1.pep
MQCGCVSTCERTASACKIYMLNRNLQEQRRVRPTLSAEXIYDGSLLSRCSNHFICFYDWAACMMIYRIDGNVNNLYWADSGVLVTMASDTSFYILTYSGDVAESRLEGGGP

SEQ ID NO: 241831 - protein, 50 aa, Glycine max
  Clone ID: PAT_MRT3847_60400C.1.pep
HWLPFCCYQFKLGTDKPVVNILIALSIQEKSLVIVKLRIQITIHYQQEIY

SEQ ID NO: 241832 - protein, 46 aa, Glycine max
  Clone ID: PAT_MRT3847_60401C.1.pep
DMHQVYKYYLSFNFHSYLIVRFPHLHLSLQHLNNCYNDYLYIAIHD

SEQ ID NO: 241833 - protein, 48 aa, Glycine max
  Clone ID: PAT_MRT3847_60402C.1.pep
ELTYMSITKILISYSPKLKLQFTIITSNFWGFYSHIAFAKNCLRFYIM

SEQ ID NO: 241834 - protein, 58 aa, Glycine max
  unsure (1)..(58): unsure at all Xaa locations
  Clone ID: PAT_MRT3847_60403C.1.pep
NRPTLPRRYIPAEGTPXHDDMVKNPPQAYLTTITLNFDTLIDLSVIPILTTHAPDSIY

SEQ ID NO: 241835 - protein, 41 aa, Glycine max
  unsure (1)..(41): unsure at all Xaa locations
  Clone ID: PAT_MRT3847_60404C.1.pep
PNXIPXPLESRLIIKRKDSSSMPPFFSQNKILFLLLFPLRN

SEQ ID NO: 241836 - protein, 75 aa, Glycine max
  Clone ID: PAT_MRT3847_60405C.1.pep
KNDRWDHLLLTKPFHTTQYLYTFSSPYPSTLCGGGYLFSNNTYRFLYFHYYSFHSCFIFYLFPHIIIYCHRINLT

SEQ ID NO: 241837 - protein, 100 aa, Glycine max
  unsure (1)..(100): unsure at all Xaa locations
  Clone ID: PAT_MRT3847_60406C.1.pep
NYGPDNEFITPSNECLKANICXLLACYVPAHDACYHQIGRPFLSTHAFVRPFAIASLLXLTPKHNIYALLLPHYHCNNTVDTLPHKVLVNAHFVIWKTFL

SEQ ID NO: 241838 - protein, 76 aa, Glycine max
  unsure (1)..(76): unsure at all Xaa locations
  Clone ID: PAT_MRT3847_60407C.1.pep
WKKCFHAFNYLLLQILSTTHLKFYFLLHIVMQETIQLWRMWVSXNVHREVNSITLXLFALSVDTNVQNEVNWKKXK

SEQ ID NO: 241839 - protein, 249 aa, Glycine max
  Clone ID: PAT_MRT3847_60408C.1.pep
MKFMKLGSKPDALQSDEKSIRYISSELVTDIIITVGEVKFHLHKFPLLSKSNRLQKLLSKANEENADEIQLDDFPGGPKAFEICAKFCYGMTVTLNAYNVVAARCAAEYLEMTEDIDRGNLIFKIEVFLTSSIFRSWKDSIIVLQTTKSLLPWSEDLKIVGRCIDSIASKTSVDPANITWSYTYNRKLSELDKIVEDKITPQEKIEPVPKEWWVEDICELDIDLYKRVMITVKSKGRMDGVVIGEALKI

SEQ ID NO: 241840 - protein, 428 aa, Glycine max
  Clone ID: PAT_MRT3847_60409C.1.pep
MDAETLTLQKEVVFNQTSKQVMASSDDDAKVPFVEPVCKTMVIEQGSVGNGQHHDEVKEENSGPARLYLNPSNSLVYMKNGPAIGIAMSPTEEVREVYLKNMFMMPPNHGFYCPNCHIDINKVLFCTTRQQDEFEIKSPGMLLKGPPILPTFTQPPVTTEPTVTTPTLIEPEQDNECLVRCSTCFSLLIQKGKEFFTGLVSRAPQELESGQGDQHVVPIPDSSPIMPQGPPFTITRPESTKGWEILKSIVYGGLAELLASLSVVTSAASVDATTLSIVALGVANLIGGLSVLGHNLRDLKASQPRQGSETQAQEDKYYELLGKRENFYLHAFFAILSFLIFGLVPPIAYGFSFRESNDKDLKLAAVAVASLICITLLGMAKAHIQRSNTFMTYFKTVTFYVTSGVLASLLTYEAGALMKKLVEQLGWV

SEQ ID NO: 241841 - protein, 97 aa, Glycine max
  Clone ID: PAT_MRT3847_6040C.1.pep
MDISEKLLQYRYHITIAIVVSLSFSLFLYAAPHFLTILAYFWPLFASTTVFLVAIIAFGGVSKLSNEDHGEKAGEGLLDYVAERTEHTQEAQTLLSE

SEQ ID NO: 241842 - protein, 61 aa, Glycine max
  Clone ID: PAT_MRT3847_60410C.1.pep
KLALHARAIMATINDLLPQLLLLSNASSPRWEAHSLTLNPSMSSPPSRPPMTSPTLLSTLE

SEQ ID NO: 241843 - protein, 52 aa, Glycine max
  unsure (1)..(52): unsure at all Xaa locations
  Clone ID: PAT_MRT3847_60411C.1.pep
QFLKYMKVIQVLTFLFIRDGFIKDRYVGSVKRRLIGXILRTKGVRVTYLFSH

SEQ ID NO: 241844 - protein, 76 aa, Glycine max
  Clone ID: PAT_MRT3847_60412C.1.pep
MKMFQVLNLTELELNRVDVRVGLSGALYYMDGSSQAVRQLRGLVSQVASPLKCIFCFTHFELFLHLCLPSYFFFLL

SEQ ID NO: 241845 - protein, 62 aa, Glycine max
  Clone ID: PAT_MRT3847_60413C.1.pep
SITAVHHIHNHPYHFEYSCNHHNHQKHFHDNRYHHHLHNHSHLQHHIDQSRRHHHHIHEVFH

SEQ ID NO: 241846 - protein, 92 aa, Glycine max
  unsure (1)..(92): unsure at all Xaa locations
  Clone ID: PAT_MRT3847_60414C.1.pep
ADLAASIVSKSGLALAFRQIAAMAHIKLDGLLASFNQLARTGKHXTYAETDKARYGDQPPXTLYLLVASNTLSSILDDKETLRLNTTLEPEY

SEQ ID NO: 241847 - protein, 209 aa, Glycine max
  unsure (1)..(209): unsure at all Xaa locations
  Clone ID: PAT_MRT3847_60415C.1.pep
PRGAGRPPLTWAGGPRSPPYPLPAPPXRPPPGGGSALPRGRPCFFPPVSPPPPGFPPLGGPPRGRPFPPFPGPGGKGQPRLSGPRGKGKPPGGPNCHPPPPGGGAPPLCRXPPGFPPGKRAVGPPPVMGGGPPLWGPRPSPFXPPGRFLGGVLGGFPFPPGDRFSPGFPPPSXRPPFGETGPPPGARPGFPGGPPGPGPGPEYPRGGAI

SEQ ID NO: 241848 - protein, 79 aa, Glycine max
  Clone ID: PAT_MRT3847_60416C.1.pep
KIKPEERKFYGPFWAETKRTWAFWAFKASTLFFFFLAQPFLGAFKPPWFFSEQRGLQIFFFLDPNPFSLWGGSPSPFSG

SEQ ID NO: 241849 - protein, 274 aa, Glycine max
  Clone ID: PAT_MRT3847_60417C.1.pep
MSFVFRGSRGDIESGFSEYVPERTLMRVHPARPVNGNSLAFLITVILIFMILNSPQMLHHFLLWVVLAIFVMATSLRMYATCQQLQAQARAHAAAASGLLGHTELRLHMPSSIAIATRGRLQGLRLQLALLDREFDELDYDTLRALDSDTASSTRSMTEEEINALPIHTYKVPVPPKDGSAGLASSSGAAEIKQASGGTEAGAKGSEDELTCTICLDQVKRGELVRSLPCLHQFHANCIDPWLRQQGTCPVCKLRIGSVSGGNRESESDGSDIA

SEQ ID NO: 241850 - protein, 46 aa, Glycine max
  Clone ID: PAT_MRT3847_60418C.1.pep
VRLKYFFFPTIFLEKGTVCVDWFVKHNTHETPPIRFGTITQSKCIY

SEQ ID NO: 241851 - protein, 185 aa, Glycine max
  Clone ID: PAT_MRT3847_60419C.1.pep
SRPAVQLVLSVGVLFGVGGVGALPGLVPLVICGLINVPFAKILQHCMAQFMISQDERLRSTSEILNSMKIIKLQSWEDKFKNLVENLRAKEFIWLSKSQMMKSYGTFLYWMSPTIVSAVVFLGCALFNSAPLNAGTIFTVFATLRNLSEPVRMIPEALSMMIQVKVSFDRLNTVLLDEELDSMQC

SEQ ID NO: 241852 - protein, 54 aa, Glycine max
  unsure (1)..(54): unsure at all Xaa locations
  Clone ID: PAT_MRT3847_6041C.1.pep
VLLGYLCXICXAXXYXLXLXXEKESRXKXXRXRWVAXVSHGNWRIIQSFXRVRL

SEQ ID NO: 241853 - protein, 54 aa, Glycine max
  Clone ID: PAT_MRT3847_60420C.1.pep
STHSSECIYRLNANFQITISKVNQSSYKKKSSLYHKYHTLPTHSKINKKKDSQY

SEQ ID NO: 241854 - protein, 62 aa, Glycine max
  Clone ID: PAT_MRT3847_60421C.1.pep
ASIHRLNSVLFFLLLALGISSARRALLTLDGGYGVGPGIGGGYGGYGGGSGSRQGGGVRYVW

SEQ ID NO: 241855 - protein, 121 aa, Glycine max
  Clone ID: PAT_MRT3847_60422C.1.pep
KEKKSLLQTHLKHWKIGLSLYKFRAIDNPIDSVVPPNKKNPTTLVGPTSSGASWGGSSFEIFDWVMATPNGQTNLAVFSGLAKLQTYILLSSSQDRMGDDSLKNSNFFLKASPPKFRLFNS

SEQ ID NO: 241856 - protein, 57 aa, Glycine max
  Clone ID: PAT_MRT3847_60423C.1.pep
VFEASIMVTALACKKALFWQLLQPEWPDTIENCPLFESHSSSRPQATSLCYSTIACY

SEQ ID NO: 241857 - protein, 40 aa, Glycine max
  unsure (1)..(40): unsure at all Xaa locations
  Clone ID: PAT_MRT3847_60424C.1.pep
YLQKGKKNRLIWRWIKQNSXKXHLRNKMHXXPEXVDQPNA

SEQ ID NO: 241858 - protein, 153 aa, Glycine max
  unsure (1)..(153): unsure at all Xaa locations
  Clone ID: PAT_MRT3847_60425C.1.pep
ARKGGGRISSRGRGGQQKRHIIAAYRAQGNPCLLAEREFRTALGRKKSKPQAAAMHVGAIEIIMERGASTDCSIVGAMLQPDPDETTPEDAXGHMIVAPLRGGRPKRRATYPNTIVQIEPDMSPRLQLVSTTTNGEPVQGKDLAMVKATVAWA

SEQ ID NO: 241859 - protein, 67 aa, Glycine max
  unsure (1)..(67): unsure at all Xaa locations
  Clone ID: PAT_MRT3847_60426C.1.pep
FYRXRTLVFWVAVVPFFFFSCFFSVSLEKPGIFNPVFNPNNLNLLWGLLEPGGGGEPPFFRPKGFFV

SEQ ID NO: 241860 - protein, 112 aa, Glycine max
  Clone ID: PAT_MRT3847_60427C.1.pep
MKMKAETLTLVLVNLAGIMERADESLLPGVYKEIGAALNADPTALGSLTFFRSIVQSLCYPLAAYLATRHNRAHVIALGAFLWAAATFFVAISSTFLQVLTSLSISYPLLIV

SEQ ID NO: 241861 - protein, 53 aa, Glycine max
  Clone ID: PAT_MRT3847_60428C.1.pep
PSLRLALQIYFHRKITLLVPATGQEALTSSPLYITQNKASYIYSYNTAIMTDN

SEQ ID NO: 241862 - protein, 179 aa, Glycine max
  Clone ID: PAT_MRT3847_60429C.1.pep
MKSCISLKLRLSLPPAKKAWKSITSTLGKLHRSKSKAMKKPRKHYSKTTTKKVTKAPPKFLATKRFRRKRLALATVRSFIFGFHKKPAPVYIDKLFREPSCDLVGHLKPQTAQKPRTERLSGGEGTTKGGGSCTSESDGMWESLAQASAQMQGIDERAEEFITRFRQEMAEQEMIARNF

SEQ ID NO: 241863 - protein, 80 aa, Glycine max
  unsure (1)..(80): unsure at all Xaa locations
  Clone ID: PAT_MRT3847_6042C.1.pep
RTTPRLAQGXXRXPRNAGNLSPVSHHLINIDRSFLKLQTGKILNLYLKREILFGTKNNKQVIHLHFLILTFKHGEGDLSS

SEQ ID NO: 241864 - protein, 100 aa, Glycine max
  Clone ID: PAT_MRT3847_60430C.1.pep
AGFPHVLSRRSGFKGKRRFVSGDGEEMTLIPGTSVEEAYNKLIVELEKSVPTLVGIECPKDETLARCKILDKPKTRCFTILPMEANLVVTSQVSFLAKQF

SEQ ID NO: 241865 - protein, 163 aa, Glycine max
  unsure (1)..(163): unsure at all Xaa locations
  Clone ID: PAT_MRT3847_60431C.1.pep
CLKFSQEEFLTAWSTQVRPATTLSADGCPYLNAMEPESGSATXPQRRQNAKITAYNEQYAKTMAALSAGAYAPSPNECIRRWMPKSSLWRVLTXAPPGLRSCRADLCLIYIGLVGGGISVDRTGEWITLIQNSSIKDLMRVAAWKKGCLMVKIVMSGNAAVKR

SEQ ID NO: 241866 - protein, 80 aa, Glycine max
  Clone ID: PAT_MRT3847_60432C.1.pep
KKEGFYHPLYPISNYGPYKTKSRTISPKNDILHNLKLSVHYQFFFSNQKHPCFHLTTPFLKNKNSPFFTLSGKNFPFPKT

SEQ ID NO: 241867 - protein, 60 aa, Glycine max
  Clone ID: PAT_MRT3847_60433C.1.pep
LESNQLVMSSYGAAALICPYNSRCHAPSYSRYMSSNGGAGSIGALVVSRAWSYLEVVLLG

SEQ ID NO: 241868 - protein, 72 aa, Glycine max
  unsure (1)..(72): unsure at all Xaa locations
  Clone ID: PAT_MRT3847_60434C.1.pep
FXTPKKXMGVVFFSNHPSTTTYLIYYXLKDMLVSICSILHLLHLATTIINAFVTFYHDNKDAPNSFLIQYIT

SEQ ID NO: 241869 - protein, 55 aa, Glycine max
  Clone ID: PAT_MRT3847_60435C.1.pep
FLVSNKRVGKFSFGGNSHPSYAARTGITGITPSGSQWMAKQHFHLYFQEGANSYN

SEQ ID NO: 241870 - protein, 114 aa, Glycine max
  Clone ID: PAT_MRT3847_60436C.1.pep
VEHSRLGLKKGGHRGVQYSGSLGHKLFKKPGGHSSFFALTIGTKGRNFLFFLFKDLWNPRQFFFGQKAKPKFSTSLKKPGPNSPPKKHWGGALGQNAPYCCKDQNGKGIIFLVP

SEQ ID NO: 241871 - protein, 268 aa, Glycine max
  Clone ID: PAT_MRT3847_60437C.1.pep
LRKYSLGERVQNSTNLVDASGLRQLRLVSQVSPDLDSKLDELRSGKSGSGPVNINFEQNQGSVAVQQTRGTQDGGEITTSGLRDGSSDDMHRDGGLVKVNGISDTNGSGHQLDSVEETRDAINSRLQDSNHLVIKEKVGAEDALANGFPSSGPSFNAGQVIEQSTKTLDNKPNTTDSSQERTAQGLEQEECQTLRESTEVPDVIGDDSVADRVASGSQNSSSMYEVQHDTSQPGVELGLPATPTSIAKQKGRRITTRYNRRGRSKGVK

SEQ ID NO: 241872 - protein, 293 aa, Glycine max
  Clone ID: PAT_MRT3847_60438C.1.pep
MILNCVRVTAMPMMAVPSWRSTCCCASSSSSVSTINTDQLRSQLDQLHSEADATRTKATNARLRFLRLSEVAEKLQKQAAISIQKGQENYAREMLFQRKKVLQALDKSKRRIEVLDELSSKLSEAISLKESQLIGNVTVKIEDSTEDASSPVRIIAPKEEVQNDVTKDESDPDTMEFSDIQDVQLSIESEGSPLDDKETQHLLESLSISTSNEEYIARNLSEISSYEDFMEHIDKKLSEIEAELVTVLNVSTLVLDNEERPKNSRLQQTIELLESIHGIRQRIRSTKEAKLRI

SEQ ID NO: 241873 - protein, 89 aa, Glycine max
  Clone ID: PAT_MRT3847_60439C.1.pep
NTTDSSQERTAQGLEQEECQTLRESAEVPDVIGDDSVAGGVVSGSQNSSSVYEVQPGVESGLSTTPTSIAKQKGRRIATRYNRRGKGVK

SEQ ID NO: 241874 - protein, 314 aa, Glycine max
  unsure (1)..(314): unsure at all Xaa locations
  Clone ID: PAT_MRT3847_6043C.1.pep
MPVTFPHENAPSSISNHIPLLQSQNKTSRSIGIKTQNIPPIPPTKTLSPKTKSHKPKTTKKMTTITTTSLASLESWAILPFFIMFLSIYLIGYFLIFRKQTPKIRPEFSSCLISLFHGTPAAILGFAALLSDSHRGFAAPNTAFQKLVLDYSAAYFLTDLLHYVFFYPSDVLYIAHHVATLFVVLTCRHAVSHGAFAVLVLLVLAEVTSACQNAWTIAGARKGEDARARRVHDALXPPFYAAYSVVRGLVGPYFVYRMVVFYASGGARGLVPVWAWASWVLVVVMAIGVSILWICNLWVQFFRERRLKLEEKIR

SEQ ID NO: 241875 - protein, 87 aa, Glycine max
  Clone ID: PAT_MRT3847_60440C.1.pep
MAAPLLSENIVLKRVKKLTRPLSDRILSVKTNWGRPKGIDCSFWRKLRGCTLMPNIAYCPDKKTRHYLPSGLKRSADHSRKDSVLLM

SEQ ID NO: 241876 - protein, 180 aa, Glycine max
  unsure (1)..(180): unsure at all Xaa locations
  Clone ID: PAT_MRT3847_60441C.1.pep
MVKGRSEMDGVEVPEAMIDTLNRTLESLQQLETQLPQFLSLXPDFLAELPLVERAHSLFSLAKLTSTLFSLKLRCRGVNPNGHPVKSELDKINVLQKKLERLPRFTEAQEQDTRNISEEEEPEMNYQERTSQKRKYPSSEEQFVQIDAVGSLVKVKEEHVGDNNGNIKEAIVIDISDDDE

SEQ ID NO: 241877 - protein, 43 aa, Glycine max
  Clone ID: PAT_MRT3847_60442C.1.pep
NKALNGTLTTGTRMMYRSSMSYITSTTKLCTYAQSICIPNSSH

SEQ ID NO: 241878 - protein, 55 aa, Glycine max
  Clone ID: PAT_MRT3847_60443C.1.pep
GIITMGQSLLKQTFRGALEEIKHQFNDTSSKYGHGCFQTTQEKQEVLGRLKAKFW

SEQ ID NO: 241879 - protein, 56 aa, Glycine max
  Clone ID: PAT_MRT3847_60444C.1.pep
HSNISSISFKKKEHFLHFYLISIYLTFYLILLNVYYSVYYLSFYATSNLYNIKLKW

SEQ ID NO: 241880 - protein, 115 aa, Glycine max
  Clone ID: PAT_MRT3847_60445C.1.pep
KPRSPRANSSYMEGSSDGSDSGSDSDSSNFLPDFLQKDNKTDTRLNEDGKRGVVDQVKDYKDNAKHLHRKNRGMMQWKGPRTMAWMKHVGERGKNKVGGLFKHHERTGSGIETEA

SEQ ID NO: 241881 - protein, 77 aa, Glycine max
  Clone ID: PAT_MRT3847_60446C.1.pep
MKSRWKFNAHLPSWMDSLIIPSIMKKPPTSQNPFPATSKSVLNHADLSSLLSVCGRDGNLNLGSSIHARIIKQPPSF

SEQ ID NO: 241882 - protein, 118 aa, Glycine max
  Clone ID: PAT_MRT3847_60447C.1.pep
KKSWKRMITKPTFVGPGFTRRPVKYERFIRPMGLRYKKANVTHPELSVTVQLPIISVKKNPQNPLYTQLGVLTKGPIIEVNVSELGLVTAGGKVVWGRYAQITNNPENDGCLNAVLLV

SEQ ID NO: 241883 - protein, 94 aa, Glycine max
  Clone ID: PAT_MRT3847_60448C.1.pep
TRFPLFQKQIWGLKPLSFLAGNCFPVIPIPEASPPFFCGGFKSFFFGQGLRKFMFLGPLGSPFFGFEMLEEGLAKPVGFFKKAFAGWVIFPPCS

SEQ ID NO: 241884 - protein, 54 aa, Glycine max
  Clone ID: PAT_MRT3847_60449C.1.pep
YTVAQALTRSAYFAAMRSRPIRPTSNCSQLLLSLEAFLTAVAPSVLSRPVTDGL

SEQ ID NO: 241885 - protein, 406 aa, Glycine max
  Clone ID: PAT_MRT3847_6044C.1.pep
MARNTADLATNFNVAHHFPHDSLLRYCSSHVSGFPHPPTHFTVSQFGHGQSNPTYLLEVGSYGSVVKRYVLRKKPPGKLLASAHAVDREFHVFSFYIVLHALGTHTKVPVPKVFCLCNDPTVIGTAFYIMEYLEGRIFLDPKLPGVTSQKRRAIYRATAKALASLHSANVDSIGLGNYGRRNDYCKRQIERWAKQYVASTREGKPASYPKMFALIDWLRHQIPLEDTSGATGGLVHGDFRIDNLVFHPTEDRVIGILDWELSTLGNQMCDVAYSCMTYIADIGPEKVHEGIEHFGLPEGIPSLPEYLADYCSLARRKWPVAEWKFYVAFSFFRAASIYAGVYNRWVKGNASGGERARHTEVLTNGLIDTAWKFIEHKSVLPQHPPSDANAQDYSKELPNGNDIQEL

SEQ ID NO: 241886 - protein, 42 aa, Glycine max
  Clone ID: PAT_MRT3847_60450C.1.pep
PPPPPYSLREPPAPRECKSPPPNGPLEVLYYVGGWRLLLFLL

SEQ ID NO: 241887 - protein, 336 aa, Glycine max
  unsure (1)..(336): unsure at all Xaa locations
  Clone ID: PAT_MRT3847_60451C.1.pep
MKASISSNGDFLKIAFFFLFVAFTFFFVGKHFSDSSSQQLIFFSATTAAVSTTTTAEVTISPNFNQFFNVAALIEAQTPKTNPSQQPPPPPPPPELLDTIKRFGILNDNGTMSDDFEIGHFEEGLPEDWGNDTVVEDSVSAPRIAVSKFGMWKYKMCDVRMVDYVPCLDNVKTMKKLESLRGEXYERHCKGMGLKCLVPPPKGYRRPIPSQKQRRGTIPDXLWFSNVPHTRLVEDKGGQNWISIKKDKFVFPGGGTQFIHGADKYLDQISEMVPEIAFGRNTRVALDVGCGVASFGAFLMQRNVTTLSVAPKDFHENQIQFALERGVPAMVAVFAT

SEQ ID NO: 241888 - protein, 158 aa, Glycine max
  Clone ID: PAT_MRT3847_60452C.1.pep
MDRGVGIFLCLLLVTMDISAGILGIEAEIAQNKVKHLRLWIFECKDPSHKAFMLGLAAAVLLALAHVIVNLVGGFNCLCSQPEADKASPNRQLSMASLILTWIVLAVGLSMLVIGTSSNNKSSGSCGFTHHHFLSTGGILCFVHALFSVVYYVSATAS

SEQ ID NO: 241889 - protein, 95 aa, Glycine max
  Clone ID: PAT_MRT3847_60453C.1.pep
MARSFSNLKVLSALVADGFSNTLTRRGYAVATQSATRGGAASISGKSGEDKVLGGGAEKVSWVPDPVTGYYKPENIKEIDVAELRATVLGKKFNH

SEQ ID NO: 241890 - protein, 43 aa, Glycine max
  Clone ID: PAT_MRT3847_60454C.1.pep
YWVPKTVVFEAFPKTATGKIQKHILRAKAREMAPVKLSRLYTY

SEQ ID NO: 241891 - protein, 91 aa, Glycine max
  unsure (1)..(91): unsure at all Xaa locations
  Clone ID: PAT_MRT3847_60455C.1.pep
AMDFHVPVLLILXXGXDEXMXHLASIPITATGINPARSYSAAVIYIEDKTWDDQWIFWLAPIVGSLSPAFHPHFILISSPMKVLGSFTTNA

SEQ ID NO: 241892 - protein, 169 aa, Glycine max
  unsure (1)..(169): unsure at all Xaa locations
  Clone ID: PAT_MRT3847_60456C.1.pep
NFSRCMPSRSDLSKNIAPLPSFRRLSFSDLSRSSSTRINEDLAQXFGSDLVDFQLIELRAITQNFSSNFLLGEGGFGTVHKGYIDDNLRLGLKAQPVAVKLLDIEGLQGHREWLAEVIFLGQLRHPNLVKLIGYCCEDEERLLVYEFMPRGSLENHLFRRLTSLPWGTR

SEQ ID NO: 241893 - protein, 60 aa, Glycine max
  Clone ID: PAT_MRT3847_60457C.1.pep
TTSIFTITTSFFYIQICFVCYQKKCVESMPCVEVDEHPVLQNTDCSGTWIGYRTEDSAYT

SEQ ID NO: 241894 - protein, 70 aa, Glycine max
  unsure (1)..(70): unsure at all Xaa locations
  Clone ID: PAT_MRT3847_60458C.1.pep
VKKLKEDPKEAIYKAHPDAETNGKEVGCTATGSHGKVALKIVENPXVSRIGEKGIGKSGKFSYHKGSLPY

SEQ ID NO: 241895 - protein, 42 aa, Glycine max
  Clone ID: PAT_MRT3847_60459C.1.pep
HCWDQFMTNESLSLKATNRKAVPLSVLVPCRTFRRFVPLTTV

SEQ ID NO: 241896 - protein, 80 aa, Glycine max
  unsure (1)..(80): unsure at all Xaa locations
  Clone ID: PAT_MRT3847_6045C.1.pep
WGXGRFXVAPVGWGSGLGLGGAALGCARGGXPRGXGLVSGGXVLPACRLLGPGRPWGGGRXGVVVGPWCRALPPLSPAFA

SEQ ID NO: 241897 - protein, 98 aa, Glycine max
  unsure (1)..(98): unsure at all Xaa locations
  Clone ID: PAT_MRT3847_60460C.1.pep
RLEFEPQKAQEYQLLIRNFIYTGCYGYGIDEHINLGGKYXPSTDIYRMDIFVDLQRTGYHVKHRQTCKSRVXIQHLLTKEDAMKWFQVKYDGVILNKF

SEQ ID NO: 241898 - protein, 130 aa, Glycine max
  Clone ID: PAT_MRT3847_60461C.1.pep
ITFNTVYWFLTWTATSEEKELAKNPSKMKQLVLRKVEKMPSDIKTFIEKTETKDILTSPLKYRHEWELMLGKISKGNVCVVGDAFHPMAPDLGQGGCCALEDGIILARHLAEAFTKKTGKHVAKEMGEEG

SEQ ID NO: 241899 - protein, 225 aa, Glycine max
  Clone ID: PAT_MRT3847_60462C.1.pep
MTDANADSFEAFLQGWRVRQRGYLDELLSAQQHYHELQDDDVKQLINRVVCHYGQYFEEKSKIAHQNVLLVFSPPWFSSLERTFLWVGGFKPGVAFQVVNAALEVLSEEQKERLSLLNQETKVKERALNDELAKLHESVAAPPLVDMARSHGRVCFSRSFMADGGSSTLENLEANADALRTNTSLKILQILRPSQLVSFLVAVAELQIRIGSWGLDKDALNGGQG

SEQ ID NO: 241900 - protein, 60 aa, Glycine max
  Clone ID: PAT_MRT3847_60463C.1.pep
EFGTRVGRRRFLSFPMVIGAVIIGVVSGKAIFGPPLDEYWKKKQQEEAAAASKENDSTST

SEQ ID NO: 241901 - protein, 79 aa, Glycine max
  unsure (1)..(79): unsure at all Xaa locations
  Clone ID: PAT_MRT3847_60464C.1.pep
KCRSQCITPNMCLQSFEHLVYLCVDGDHDLISVHEYVKPYFRESKLXKSFLSGHNITITDGMDKTSATLQLGLFAYFDF

SEQ ID NO: 241902 - protein, 32 aa, Glycine max
  Clone ID: PAT_MRT3847_60465C.1.pep
KVYITHNKHFNNAPSVFNVPHKLISHYFPSQM

SEQ ID NO: 241903 - protein, 80 aa, Glycine max
  Clone ID: PAT_MRT3847_60466C.1.pep
YLPWLCVMTINAFTLKSNGYDIRKKGTPYCIHEDQSGSRECFLYKPTAKSGCRKNTIYASIVLLCNLYNIESDQKNTWFL

SEQ ID NO: 241904 - protein, 67 aa, Glycine max
  Clone ID: PAT_MRT3847_60467C.1.pep
LGSPWFFPSGGCFSLACALGFGAPFLGLCRCPPGFVFLVFLGGPPGLALCVFFFNCFLFFFFAFSFF

SEQ ID NO: 241905 - protein, 64 aa, Glycine max
  Clone ID: PAT_MRT3847_60468C.1.pep
KKHAQHWGKMRFFFGNPNLHGGPDKFHIKKFPPLPQWPDWFYIAIFFIFQIAANNPATVFVGGV

SEQ ID NO: 241906 - protein, 88 aa, Glycine max
  unsure (1)..(88): unsure at all Xaa locations
  Clone ID: PAT_MRT3847_60469C.1.pep
NFIFLSLVTNLSGWLVGKISTQIGVHATAAKWFNLFTTQSYYVQHLTDRLHLTKLHHREKSLFNXSIKHSYFTTNGQISTSFIEYQIL

SEQ ID NO: 241907 - protein, 167 aa, Glycine max
  Clone ID: PAT_MRT3847_6046C.1.pep
MLVLISGVLQNFTNYATMLVLTSEVLQNFTDFAKMLVLRVPKGANKTCSPLADEGADNHEMTMLVSACYRTLESDGRNENFSRSRPEDADISRKGADDDKTLTSPGMVQMTTLVSACYRTLESDGRNETFSRSRPEDADISEKEDADISGKVQMMTLVSACYRTLGS

SEQ ID NO: 241908 - protein, 156 aa, Glycine max
  Clone ID: PAT_MRT3847_60470C.1.pep
IFLYIPKKPNKKGVFRRFWLMGRRGIKLFDEERNGLFSISNFGSQWGGVRGDGVQDPVNLAVYASISQMGMGFGVQEPNPSSSSSDGDNSQHNGGMSMRMRIPCTELYVRYVQSEGKVKILGVPEEEEEEVVKGVRKKRGGGAWWGVQGGGRGGGG

SEQ ID NO: 241909 - protein, 267 aa, Glycine max
  Clone ID: PAT_MRT3847_60471C.1.pep
MGRRGVKLFDEEKNGLFSISNFGSQWGGGGVHDPVNLAVMASISRMGMGFGVQQPNPSSSDDNNSQHNGGMSMSMRIPCTELYVRYVQSEGKVKILGVPEEEEVVEGVKKKKKGGAFKGLRIKVKNPSLRRLVSGAFAGAVSRTTVAPLETIRTHLMVGGSGNSTGEVFRNIMKTDGWKGLFRGNFVNVIRVAPGKAIELFAYDTVNKNLSPKPGEQPKLPIPASLIAGACAGVSSTICTYPLELLKTRLTIQRGVYEIKPKLMFPS

SEQ ID NO: 241910 - protein, 104 aa, Glycine max
  unsure (1)..(104): unsure at all Xaa locations
  Clone ID: PAT_MRT3847_60472C.1.pep
MSPTHLNIKGLDKTIXHSTVKPIFERTRQSNEYKDSIFPKSETXYLDLNLIHLNNQKLLNNYIKLQVXNYTGKYTXSNLHNKKLKTTINNESSQIIRMFNTEFN

SEQ ID NO: 241911 - protein, 74 aa, Glycine max
  unsure (1)..(74): unsure at all Xaa locations
  Clone ID: PAT_MRT3847_60473C.1.pep
GLQCKGGHVSGYAAADAVLALXFVDAFWGVVLFGEFRSSSRSTYILLGSVMVMFIVAGAGQMASSGRRISPGKQ

SEQ ID NO: 241912 - protein, 354 aa, Glycine max
  Clone ID: PAT_MRT3847_60474C.1.pep
MGAERFSHDHAPLILGLQPSALVDNVATVDWSLLHRIPGERGGSIPVQIEELESILREVKSKSHDDIKTLAGGSVANTIRGLSRGFGISTGIIGAYGDDHQGQLFLTNMTFNSVDLSRLRQKKGHTAQCVCLVDDMGNRTMRPCLSNAVKVQAQELVKEDFKGSKWLVLRYAVLNLEVIQAAIHLAKQEGLLVSLDLASFEMVRNFKLPLLKLLESGNIDLCFANEDEAAELLRDEQKDDPIAAVEFLSKYCQWAVVTLGANGCIAKHGKEMIQVPAIGETKATDATGAGDLFASGFLYGVVKGLSLEECCKVGTCSGGSVIRSLGGEVTSENWQWMYKQMQINGLPTPPGLCK

SEQ ID NO: 241913 - protein, 147 aa, Glycine max
  unsure (1)..(147): unsure at all Xaa locations
  Clone ID: PAT_MRT3847_60475C.1.pep
MLKDNCLSITSTLLKLLYSLGLLVESRGSILAXGLPWGKCLLLQHASGIMSQESSLRALNSLYQLIESRVSTFKSAIQLSSCLDTLHIGAIDEEEDEGEMVPVIYEDKDSSDEESDDTMETDPDEQQPEEQFHAARYIDASDDDMSD

SEQ ID NO: 241914 - protein, 84 aa, Glycine max
  Clone ID: PAT_MRT3847_60476C.1.pep
GMMDKLENITSPKPSDLILLNLLSMYHLFDQGNEIMLINQSSEQLEQSLLPPPWAVFRYDENDIKTWAVFSYDENEYKRRKINT

SEQ ID NO: 241915 - protein, 133 aa, Glycine max
  Clone ID: PAT_MRT3847_60477C.1.pep
LGAKITARSADPSVSLPFLFFLITLTNYHHSQISQDHNNPIKTHFGLDSTINIENINNHRKPIQHIYYSHPVSKKKTPPLLYRARRNGRGKGKTLVPPPPESGREEPETFRFRARTNIPSMIKGGLLIINNNN

SEQ ID NO: 241916 - protein, 28 aa, Glycine max
  Clone ID: PAT_MRT3847_60478C.1.pep
NDQYMLLKSARINKKAPHLAKESCIAIP

SEQ ID NO: 241917 - protein, 166 aa, Glycine max
  unsure (1)..(166): unsure at all Xaa locations
  Clone ID: PAT_MRT3847_60479C.1.pep
MHGRAREKRGLDSASAEEGQPDRKRPALASVIVEALKVDSLQKLCSSLEPILRRVVSEEVERALAKLGPAKLNTGRSSPKRIEGPDGKNLQLHFKTRLSLPLFTGGKVEGEQGTAIHIXLIDANSGHIVTSGPESCVXLDVIXLXGDFNNEDDDNWDEEEVDSHIX

SEQ ID NO: 241918 - protein, 24 aa, Glycine max
  Clone ID: PAT_MRT3847_6047C.1.pep
PLSHVSHHQHYLDLELLCAPNLTI

SEQ ID NO: 241919 - protein, 44 aa, Glycine max
  Clone ID: PAT_MRT3847_60480C.1.pep
VLKTIKGYQVFCWAKYMILGTSGTRLGQVPETIERYQVFSWVEY

SEQ ID NO: 241920 - protein, 59 aa, Glycine max
  Clone ID: PAT_MRT3847_60481C.1.pep
VKNYKFKSTCHCFLIHDVKLFTCNDVLWGRIALCAHEYSTNVCVISFRTKIGQAKIGKF

SEQ ID NO: 241921 - protein, 32 aa, Glycine max
  Clone ID: PAT_MRT3847_60482C.1.pep
LILYTNYYSLVHVWVCIHETQFEGPFQILKHA

SEQ ID NO: 241922 - protein, 32 aa, Glycine max
  Clone ID: PAT_MRT3847_60483C.1.pep
PIRGRELLEYCLYPYNIGFLVIREVFKGSFQH

SEQ ID NO: 241923 - protein, 214 aa, Glycine max
  Clone ID: PAT_MRT3847_60484C.1.pep
MVAGTATLKLSLSAFSSPMSNFSASSSFPSRLPMRTPSSSKPRFLRIYALTSNDIKVGTNLEVDGAPWRVLEFLHVKPGKGAAFVRTKMKNYITGNTVEKTFRAGSSIEQADVFKETKQFTYKDGAQFVFMDLNTYEEFRLGEKEIGDRTKWLKEGMDCNLLLWNGKVIDVELPITIKLAVVDVDPGLKGDTAPGGTKPATLDTGAVVIVALFV

SEQ ID NO: 241924 - protein, 56 aa, Glycine max
  Clone ID: PAT_MRT3847_60485C.1.pep
GCLMVHIQHSNKIDFTSQTREPKLRNRIQKHVYNKNLYKVKISLYINEIYLTNDSC

SEQ ID NO: 241925 - protein, 41 aa, Glycine max
  Clone ID: PAT_MRT3847_60486C.1.pep
AEQEAHGSRSLFTEIIAAVSDIPSGKDGIPILRRDYMTLRV

SEQ ID NO: 241926 - protein, 106 aa, Glycine max
  Clone ID: PAT_MRT3847_60487C.1.pep
ECQKLSSISDLLQLSIRAPDNINVISVHCVCNSSHHCSPIHAFPDTHAYHDDSILLSEFAQQFPALSNCPHACSLQTSSADIRSAAIINFESMGLFKGICLVLFMR

SEQ ID NO: 241927 - protein, 316 aa, Glycine max
  Clone ID: PAT_MRT3847_60488C.1.pep
FSSLMVCGQEGVVFVLPGFVNPERGMLRSRAMEMGAEYKPDWNSDCTLLVCAFPNTPKFRQVEADCGTILFKDWIIECYTQRKLIEIDSYLLHAGKPWRKGNGSLEVNEDKKPSVPKKLLKHVEREQPSASTASIKSKGKDTDVARKCFEPSEVKKWAIDDLNKTIQWLESQEEKPDPGELTKIAAEGILTCLQDAICSLEEKQDIRKGTEDWMFLPRVVEELAKFDVVGNKGSLLKEDLQRRALDCKRIYEEELNGLDHERKTNSKVNKEQRSKTRRTNAMSSGAVEYDSDETIEMTEQEIDLAYKALSSNICHL

SEQ ID NO: 241928 - protein, 96 aa, Glycine max
  unsure (1)..(96): unsure at all Xaa locations
  Clone ID: PAT_MRT3847_60489C.1.pep
LIPSXCSSVESIPAPPWSHTQHLQNIKICWKTWKRAFHQLQMWKENESEYRFHIWTVVTNLFPDEKNLIWWFLPCPHICLIDIMSHVRTMHPFHWI

SEQ ID NO: 241929 - protein, 36 aa, Glycine max
  Clone ID: PAT_MRT3847_6048C.1.pep
YNDQRISNSIIPMSSVVLSLAVSSLSSCSSRSSRSY

SEQ ID NO: 241930 - protein, 73 aa, Glycine max
  Clone ID: PAT_MRT3847_60490C.1.pep
LPTLSLLRIIVIIIWGTPLAPSNRPTIFADSWWITQCRSRDYSGAQELTDASEARKHVLAEDDSGVDEETSVR

SEQ ID NO: 241931 - protein, 132 aa, Glycine max
  Clone ID: PAT_MRT3847_60491C.1.pep
NSQTCTSLPIETSNLYLHLLFLIHRISTTKCFVTKIMVNPANEHSILVPTIKYVYSGPRNQIQWKGCIVLTCDMIDETDMWARQKPPDQIFFIRKQICNHSPDVKSIFTFIFLPHLQLMKGSLPGLPANPRA

SEQ ID NO: 241932 - protein, 382 aa, Glycine max
  Clone ID: PAT_MRT3847_60492C.1.pep
FPACAEFSCSEPSPQARTILHCLLRHLLQRDKIEEALRLAELSAEKPHFSHCLEWLLFTVFEADISRPNVNKNQISVVEHAKRSLLEKTCDLIRNFPEYLDVVVSVARKTDGRHWADLFTAAGRSTELFEECFQRRWYRTAACYILVIAKLEGPAVSQYCALRLLQATLDESLYELAGELVRFLLRSGREYDQASNDSDKLSPRFLGYFLFRSSEQKQSLDKSTSFKEQSAHVTSVKNILENHASYLMSGKELSKLVAFVKGTQFDLVEYLQRERYGSARLENFASGLELISQKLQMGTLQSRLDADFLLSHMCSVKFKEWIVVLATLLRRSEVLFDLFRHDVRLWKAYSTTLESHPAFTEYQDLLEDLEERLSSVANVEGK

SEQ ID NO: 241933 - protein, 68 aa, Glycine max
  Clone ID: PAT_MRT3847_60493C.1.pep
TSDWIVRALTIIITLYLEVSTTVCYIYDNMCPGAAQINTWIIPPCKCCENFSVFWSCMHDHSNYCMSV

SEQ ID NO: 241934 - protein, 121 aa, Glycine max
  unsure (1)..(121): unsure at all Xaa locations
  Clone ID: PAT_MRT3847_60494C.1.pep
LQVKEEVEAALKRHLTSMKQTCGKEFHTTELRNLQLQFENSICLPVFTGARIEGEDGSNLRISLVDALTGKVVSTGPESTAKVEIVVLEGDFEEESETRLPEEFKSNIXVREREGKMPLLT

SEQ ID NO: 241935 - protein, 101 aa, Glycine max
  Clone ID: PAT_MRT3847_60495C.1.pep
MRTEDEAKVLDLMVQEGEEPGTLTYNVVVNGLCKEDRVDDALRVVEMMAKKGKKPDVVTYNTLLKGLCGAAKIDEAMELWKLLLNEKFHVKLDVFTFNNLI

SEQ ID NO: 241936 - protein, 116 aa, Glycine max
  unsure (1)..(116): unsure at all Xaa locations
  Clone ID: PAT_MRT3847_60496C.1.pep
YTKKKTQTRKIKKFSTNPTPLFYPKSYLSLPNNSIHLNPLSTRPSLYLTLPSHTRLSLVFKASFIXLPLLVNTSPDFXSQAAFDQDFINVXLSDYILKKFVXLFFYPFDFTFCCPT

SEQ ID NO: 241937 - protein, 721 aa, Glycine max
  Clone ID: PAT_MRT3847_60497C.1.pep
VYGDIGTSPLYVYASTFTKKINNNDDILGVLSLIIYTIVLIPFLKYVFIVLWANDNGNGGAFALYSLICRHIKMSLIPNQEPEDRELSNYKLETPSTEFKRAQKLKQKLEGSHVARVVLILLAIVGTSMVIGDGILTPSISVLSAVSGISTSLGQDAVVGITIAILAVLFYVQRFGTDKVGFAFAPIILVWFLFIGGIGLYNLFKYDIGVLRAFNPKYIYDYFKRNGKEGWISLGGVFLCITGSEAMFADLGHFNVRSIQISFSCITFPAIVAAYIGQAAFLRKFPEKVANTFYDSIPDPLYWPTFVVAVAAAIIASQAMISGAFSIISQALSLGCFPRVRVVHTSIKHQGQVYIPEVNYMFMIACIVVCAAFKTTEKISHAYGIAVIGDMMITTTLVSLIMLVLWKKSLWRVGLFFLGFGFVEIVYFSSQLTKFTGGGYLPIVSAMFLTAVMGIWHYVHKERYMCELKNKVSSAYLNELANNPDVRRVPGIGLLYSELVQGIPPIFQHLIDNIPSIHSIIVFVSIKAIPVSRVASEERFLFRQVEPRDYRVFRCVVRHGYNDVLEDPAEFESHLIQNLKAFVQHENYMLEVDGTEHASAETEMIAAVGKGSSNRIIPDQAAASSDSIRSLGASATKSSSFISPPIQGAEDEIKFIDKALEKGVVYMLAEAEVVAHPSSSILNKIVVNYVYSFFRKNFRQGQNSMAIQRNRLLKVGMTYEI

SEQ ID NO: 241938 - protein, 50 aa, Glycine max
  Clone ID: PAT_MRT3847_60498C.1.pep
SSCNGGGCGRARHREWLKNHSVGIGGHTLDGCCEFMAAVMEGTHDAPKCA

SEQ ID NO: 241939 - protein, 397 aa, Glycine max
  Clone ID: PAT_MRT3847_60499C.1.pep
MPTQSIFTIKSSTTSTCLLASPMIGRTSLHSRMLRYLLVFFLLGLGTRVESHEESGHWSCESESEIRVETEFKPGVITLDGHADDWKDIDGSYFPLLPALDPDAENEFKGGKMSVKSVHDGRDIFFLLQVDGDYAYSKGESNKCPSVALMFQIGDSASYHDMGGCKEHSTSCTDKTCKGHEVDIMHFSIGSAIPGRLYGGNPLDNRDGNGGDRFGHLVDLYAWNPHCRYLDGIGPPGSANDSSAQNDWKGAWWHSSFTVHSGFVEDESPYADNGKKGTYFFEFSRSLRTMDHLQQDVQFNIGGSSKMSVAFWYPVDGQPWHGSGHYSVYCDWVPIDISVGKSLNGKSVDAASNSSWNVASAFSVILSVAALCVSVFVSYRVFSPKSVSFTPIENNNL

SEQ ID NO: 241940 - protein, 58 aa, Glycine max
  Clone ID: PAT_MRT3847_6049C.1.pep
NFGGATASLRPSPPKNACLALSVYVCNRCIPFHYKATSPVFFFYFFFILYFFLFFFFF

SEQ ID NO: 241941 - protein, 85 aa, Glycine max
  unsure (1)..(85): unsure at all Xaa locations
  Clone ID: PAT_MRT3847_604C.1.pep
RAPPFXVFFFFFFFFFFFFWLGFFFFWFVFFLGLGFFLPRSKVGHHYFLKEGGQDEHETPFILPCGTKTSLSYICPPLLTKKKWG

SEQ ID NO: 241942 - protein, 112 aa, Glycine max
  unsure (1)..(112): unsure at all Xaa locations
  Clone ID: PAT_MRT3847_60500C.1.pep
AFANKIVFNDKLGLANTHEFFDGNHPGDSWVPIFVNCLYPVREXPSEAGVVNDTCGSGRGGLHTTAWISSAGDNCCSDINRKMSAALGKGLKTDPLTREDPSTGALVVDLLG

SEQ ID NO: 241943 - protein, 88 aa, Glycine max
  unsure (1)..(88): unsure at all Xaa locations
  Clone ID: PAT_MRT3847_60501C.1.pep
CVSYLDRTVQGPVTTQLVSKEGLSLQYCIDEYSVHGNQLGTCGHNHPQPARIINQVAHAQHXSGAYNLMHRALHTIAESTGQRAAQAD

SEQ ID NO: 241944 - protein, 103 aa, Glycine max
  unsure (1)..(103): unsure at all Xaa locations
  Clone ID: PAT_MRT3847_60502C.1.pep
YIVGGEHYKTGCLTEEEXMEGIRNRGIPADGLAKRAHEFEKHVGHESFKDQIPAGDKLYSTKVNQFAKIMNLRQSCXGDHKLLTDGKLNDGEHISVSNTRAGE

SEQ ID NO: 241945 - protein, 163 aa, Glycine max
  Clone ID: PAT_MRT3847_60503C.1.pep
ITNLFEKFPNPDDVSEADIGDLQAFYKASKVRFDSDPEFKLRAQQAVVRLQSGEIKYRKAWKQICDVSRAEFDKVYQRLGVQLEERGESFYNPYIPGVLEKLDNLGLIEESDGARVIYVEGVDIPLIAVKRDGGYNYFTTDLASLWYRLNEEKLEWIVYVTDI

SEQ ID NO: 241946 - protein, 102 aa, Glycine max
  unsure (1)..(102): unsure at all Xaa locations
  Clone ID: PAT_MRT3847_60504C.1.pep
FAWIIWPDLVIVGSLIVTCECVMKTRYXSLISRWCPQEQXLTHTSIAVYLTHCGWNSPTEGVCAGLPMLCWPFCAEQPTHCRYICNEWEIGMDIDTSAKRRR

SEQ ID NO: 241947 - protein, 220 aa, Glycine max
  unsure (1)..(220): unsure at all Xaa locations
  Clone ID: PAT_MRT3847_60505C.1.pep
KEMHVGHLRSTXIGDTLARMLEFSRVECVIRRNHVGDWGTQFGMLITNLFEKFPNPDDVIEVKQRISNAFYKASKVRFDSDPEFKLRAQQAVVRLQSGEIKYRKAWKQICDVSRAEFDKVYXQRLGVQLEERGESFYNPYXSXVLEKLDNLGLIEESDGARVIYXEGVDIPLXCXVKEMGGYNYFTTDLASLXWYRLNEEKLEWDXYVTDIGQQQHFDML

SEQ ID NO: 241948 - protein, 61 aa, Glycine max
  Clone ID: PAT_MRT3847_60506C.1.pep
MVLRRVIASSPVRHHPYTLQRTKRSSTSRSLLILIPQSLSVSHAPGVYPCNRQNNPPPHAC

SEQ ID NO: 241949 - protein, 84 aa, Glycine max
  unsure (1)..(84): unsure at all Xaa locations
  Clone ID: PAT_MRT3847_60507C.1.pep
YQKVPLELRDMSSLSDGGMRRSRRCGSARRXGHGDTGYGGRTNDSGYCVRGNDAGYSGISSDSNYRGTETAASSRRGGCGIDHD

SEQ ID NO: 241950 - protein, 92 aa, Glycine max
  Clone ID: PAT_MRT3847_60508C.1.pep
CLKALEALDNKDELTLLGKAMAHYPLSPRHSRMLLTVIKNTRHEHKCNPNMLLAYAVAAAAALSLSNPFVMQYEDDSSRDLEMVEKSSLGDG

SEQ ID NO: 241951 - protein, 42 aa, Glycine max
  Clone ID: PAT_MRT3847_60509C.1.pep
FNKHKSVTKNHIPTASEQPKSLAYLHDCSHKKSRVNHRPYLQ

SEQ ID NO: 241952 - protein, 125 aa, Glycine max
  unsure (1)..(125): unsure at all Xaa locations
  Clone ID: PAT_MRT3847_6050C.1.pep
GGAIGGHLFDAGHTFYLLKDVPGIDSNNIDVALSEAYNPLNILEYKSIFRNVHHGGPANLDPEYQKLGHKPVEKKATRDELSEYGNMQSARELLIWDEKMRKXSANVPKSTSXGLEWGGLFGFRH

SEQ ID NO: 241953 - protein, 116 aa, Glycine max
  Clone ID: PAT_MRT3847_60510C.1.pep
MAFENGSKKELQKVGLKISKSFPLTRTTLASMESLSLPVVQEIVLSADMQCEKCQKRVADIITKMNAETESVVVNVLEKKVVLTFRLPTIGKVISQQITPVPKVAIIRRIFRSSRS

SEQ ID NO: 241954 - protein, 53 aa, Glycine max
  Clone ID: PAT_MRT3847_60511C.1.pep
STKSRRNGTTLPPSNCKRQEGATYGALYLTRITPEQWNLALVHMKYRLNPRSK

SEQ ID NO: 241955 - protein, 100 aa, Glycine max
  unsure (1)..(100): unsure at all Xaa locations
  Clone ID: PAT_MRT3847_60512C.1.pep
YILAHPHPLTXYYLLXNSFXYNXIYNVMLSQFYENCVVKGAVDVDIFANPSADGGEYXGVHDATVKFVYIFDTFRLHDQPAFYKKHFVTFIKKFIKNFTP

SEQ ID NO: 241956 - protein, 57 aa, Glycine max
  Clone ID: PAT_MRT3847_60513C.1.pep
KMAITVVIMLNYFKVHEQIVKNYLKFKTRGIYIRSELGKDSEQCFTRLASFPTIAGN

SEQ ID NO: 241957 - protein, 111 aa, Glycine max
  Clone ID: PAT_MRT3847_60514C.1.pep
RYDLVDLTRQIWAKYANELFFKVIEAYQSHDIHGMTLLSQRFLDLVEDLDTLLACHDGFLLGPWLESAKQLALNEEQERQFEWNARTQITMWFDNSDEEASLLRDYGMKNS

SEQ ID NO: 241958 - protein, 59 aa, Glycine max
  Clone ID: PAT_MRT3847_60515C.1.pep
MAFLIKTLPLCFAQLKNLFASPSEHLDFFGSLQELPMLSSLLPFSRNIFSYESIPVAPS

SEQ ID NO: 241959 - protein, 92 aa, Glycine max
  Clone ID: PAT_MRT3847_60516C.1.pep
MLILLIFVCKKFKPVTSLLFSGLLYNLDFVPFRLANTKLLWIRIRVTMFSSNTNNPILGYFDFALPLPRISNNKAKLLPILMGTHGRALNHF

SEQ ID NO: 241960 - protein, 78 aa, Glycine max
  Clone ID: PAT_MRT3847_60517C.1.pep
KFWRVKIFHRETVLPLFYQGLKRPPLGKKCTPRGSRPEINPRVTSLIMCGPCFFFFFSVCFLSLSRSRTRAARADSAR

SEQ ID NO: 241961 - protein, 35 aa, Glycine max
  Clone ID: PAT_MRT3847_60518C.1.pep
SRYCRTKSFLYLLDMTSCGIELARLECEYFFNQMR

SEQ ID NO: 241962 - protein, 74 aa, Glycine max
  Clone ID: PAT_MRT3847_60519C.1.pep
SVEHRVIVISDKERVSLAFFYNPKSDIPIEPIKELVTPKRPSLYPAMTFDEYRLFIRMRGPRGKSQIESLKSPR

SEQ ID NO: 241963 - protein, 122 aa, Glycine max
  Clone ID: PAT_MRT3847_6051C.1.pep
MATTLMFFRPTMIRASAGSPAKPDPRNRKPVSSNWWAPLFGWPADPDYMGPLQKASEKSDPEREVGLDLGRPRSKFTAGCFTEKKAKELRKKTVETSTFHDIMYHSAIASRLASDVSKGYEK

SEQ ID NO: 241964 - protein, 74 aa, Glycine max
  unsure (1)..(74): unsure at all Xaa locations
  Clone ID: PAT_MRT3847_60520C.1.pep
NPEFLFFGYRIHSLFRXKRCFSSLKLXLTHIFIICNSASSTYYVTYTNPLNQGGFASTAKKKTNRWFSGFVLAQ

SEQ ID NO: 241965 - protein, 160 aa, Glycine max
  Clone ID: PAT_MRT3847_60521C.1.pep
MLKNQPQPDWPEPIVRVQSLSENCEDSIPERYIKPSTDRPSIKSCNFDDANIPIIDLGGLFGADQHVSASILKQISDACKEWGFFQVTNHGVNPDLMDKVRETWREFFHMPMEVKQQYANSPKTYEGYGSRLGIEKGAILDWSDYYFLHYLPFSLKDYNK

SEQ ID NO: 241966 - protein, 362 aa, Glycine max
  Clone ID: PAT_MRT3847_60522C.1.pep
MMLKNQTTQDWPEPIVRVQSLSENCKDSIPERYIKPSTDRPSIRSSNFDDANIPIIDLGGLFGADQRVSDSILRQISEACKEWGFFQVTNHGVSPDLMDKARETWRQFFHMPMEVKQQYANSPKTYEGYGSRLGIEKGAILDWSDYYFLHYLPLPLKDYNKWPASPPSCRKVFDEYGRELVKLCGRLMKALSINLGLDEKILQNGFGGEDIGACLRVNFYPKCPRPELTLGLSSHSDPGGMTMLLPDDQVPGLQVRKCDNWITVKPARHAFIVNIGDQIQVLSNAIYKSVEHRVIVNSDKERVSLAFFYNPKSDIPIEPIKELVTPEKPSLYPAMTFDEYRLFIRMRGPRGKSQVESLKSPR

SEQ ID NO: 241967 - protein, 52 aa, Glycine max
  unsure (1)..(52): unsure at all Xaa locations
  Clone ID: PAT_MRT3847_60523C.1.pep
ITRPEPQKKTGTVYEGPTATHPEQRPRKTTSTPNXKRQNEEPPGRPPEAEGP

SEQ ID NO: 241968 - protein, 44 aa, Glycine max
  Clone ID: PAT_MRT3847_60524C.1.pep
TAYHAVIRFEDKLLILMMRDILTNTYHIQCTHQVLRLHNTDTRM

SEQ ID NO: 241969 - protein, 122 aa, Glycine max
  Clone ID: PAT_MRT3847_60525C.1.pep
NITFVSRKQISKQRRGNTKMKKGLSFVLLLILVIIHYKVVNANNNNCVTEDCLIGHSLESEFSFGSHVARMLYDVSQSVSGQTGNSNNAAVNCPESNGYRSCLPSQNGGGPNQNCGDYTRTC

SEQ ID NO: 241970 - protein, 108 aa, Glycine max
  unsure (1)..(108): unsure at all Xaa locations
  Clone ID: PAT_MRT3847_60526C.1.pep
EPLFGFLDNWGQERWPNCHFVKGEXRFNVXLLGTFPVNSFMEVWXTSYVIITGLIAIMIPFLKDWLCLRGSLTFWPXTDYFPIEMDIXQSKILKMSFSWTWLKILSWA

SEQ ID NO: 241971 - protein, 166 aa, Glycine max
  Clone ID: PAT_MRT3847_60527C.1.pep
PKHERRWASDTVPEMAFVSAGTSPGTEYNSVTDEYVEVTLDVQDDHTIVLRDVEPVTVVNVDDGVATSGNETPTSSAWSPSIRRSSPNRWRQFSQELKAEAVAKARQFSQELKAELRWFSWSQGGSEAALVARDLRKQRAQLERNRSDTKKALRGLKFISSKSNGV

SEQ ID NO: 241972 - protein, 114 aa, Glycine max
  Clone ID: PAT_MRT3847_60528C.1.pep
KISHSFHFFSFFFLRKKTPPLPIISLIKGGGVIFFMALNPQTRGRAQFFFLIQTIPHFKKISVSTCGTEFPFLKNSRQSLKNKKFPKKNFTLYTDWDGNSRNSFAIWFLLATQN

SEQ ID NO: 241973 - protein, 66 aa, Glycine max
  Clone ID: PAT_MRT3847_60529C.1.pep
VRVILCIRLPATLRYERITDLIKFHCSHFGVSELEHLSVTDLMELEKLVHSALSRIRSAKVLHSVH

SEQ ID NO: 241974 - protein, 186 aa, Glycine max
  unsure (1)..(186): unsure at all Xaa locations
  Clone ID: PAT_MRT3847_6052C.1.pep
IPXVDPRVRGQIHLYLPELLCFRQTSLPCKLSPSLLFHPFLYSISITNPNSLSTDSFGNTFSNFQHTPTMGYEDNPYRDEDGEPLMDYDDVQSDREPSPEPRHQLDDFEEDVDEWRGRDRSQTPVYDTDPSRSKPRKRLIKKSDPGKQAVEPELEDEDVEGYVPEGGFDEGDAGRKRKKGKEGGEW

SEQ ID NO: 241975 - protein, 57 aa, Glycine max
  unsure (1)..(57): unsure at all Xaa locations
  Clone ID: PAT_MRT3847_60530C.1.pep
QXXCIGVXXXGVQHGSPXXCRAXHXXWQXLDXSKSRDCSXETGNRXLIYEXXRRMXC

SEQ ID NO: 241976 - protein, 72 aa, Glycine max
  unsure (1)..(72): unsure at all Xaa locations
  Clone ID: PAT_MRT3847_60531C.1.pep
MDDQRDLISNHEQLPILGQRARAPESNCNRGVLYTSVSVLVALLLAGQATTAYFLXQQQGRLDKLXVTSXNL

SEQ ID NO: 241977 - protein, 263 aa, Glycine max
  unsure (1)..(263): unsure at all Xaa locations
  Clone ID: PAT_MRT3847_60532C.1.pep
MGSLMASATLTLVLAIVSLSLPTQILADNYLYSSPPPPKKYPPVSPPYHYPSPPPPPKYYYHSPPPPSPSPPKKPYYYHSPPPPSPTPPKKPYYYHSPPPPPPKKKPYYYHSPPPPLPPPPKKPYYYHSPPPPSPSPPKKPYYYHSPPPPSPPPPYKKPYYYHSPPPPPKKPYYYHSPPPPSPPPPYKKPYYYHSPPPPPKKPYYYHSSAPPSPPPSKKPYKYPSSPPPVHHYSXPHPPFDHYSPPPSTKKPYMYPSPPPPVH

SEQ ID NO: 241978 - protein, 127 aa, Glycine max
  Clone ID: PAT_MRT3847_60533C.1.pep
DIKCITFRFFFEQVWKNYICEVSSSDICKTPGRMTPTVYGQMEAAVNVSYGLYHYGPFLVGLQDCTFVRKIFTDISNNPCPGLQRNSQLIYIGLVLVSAAVMLSLIFWVIYARERRHRVYTKQFIEG

SEQ ID NO: 241979 - protein, 64 aa, Glycine max
  Clone ID: PAT_MRT3847_60534C.1.pep
HVVRYYQNSKANSETVGPLNLWDGAFRVNNFRDRVGCFSNLPTRKQRRIDPRMSFLYGEVNHHQ

SEQ ID NO: 241980 - protein, 49 aa, Glycine max
  Clone ID: PAT_MRT3847_60535C.1.pep
SGHRNEIITAAAESRRFNRTKKILTQGIILQMGRPFFRTQLYGPGCGHV

SEQ ID NO: 241981 - protein, 83 aa, Glycine max
  Clone ID: PAT_MRT3847_60536C.1.pep
ALKAIKEGGKVVTIAPPATPPAIPFFLTSDGAVLEKLQPHLESGKVKPVLDPKSPFPFSQIVEAYSYLKTNRAIGKVVIHPIP

SEQ ID NO: 241982 - protein, 115 aa, Glycine max
  Clone ID: PAT_MRT3847_60537C.1.pep
WFFSRVDILLTPKTLDIDSLPEQSLLSCYPKIGRPNTGEKGKQTQTFTGGANALNNSKCAYTDGSHDMGTTTIHEILNPTVHYHTPNNQLISTSSITYAHDSCALSTWDHAWRSP

SEQ ID NO: 241983 - protein, 54 aa, Glycine max
  Clone ID: PAT_MRT3847_60538C.1.pep
VMVLYVVPVCYPFDILLGLSVFEERYTSLVQFVFMGCISLRWSGSSAMLCMYRD

SEQ ID NO: 241984 - protein, 63 aa, Glycine max
  unsure (1)..(63): unsure at all Xaa locations
  Clone ID: PAT_MRT3847_60539C.1.pep
VGGRPVXILFFLFFVGSIKFFFFFFKNRQISMQIRRPKELTIFATEFISVPHQIISRTKCDQI

SEQ ID NO: 241985 - protein, 138 aa, Glycine max
  unsure (1)..(138): unsure at all Xaa locations
  Clone ID: PAT_MRT3847_6053C.1.pep
VLFQTVNASKVXLIEGGWRYMVMAKEVDALGNKTSEKKSLVNEGFYRAFWDIPTIIDDNAGLDSDXLIFKIRGEHQKEGCTSGKDVISGSVGNMDESEKYGAFKVKQNVLLCSAEAAEMIFKVDDIFPCVPSRREVRM

SEQ ID NO: 241986 - protein, 46 aa, Glycine max
  Clone ID: PAT_MRT3847_60540C.1.pep
QNIRVCVDCHTAIKFMAKIVGREIIVRDNSRFHHFKNGSCSCGDYW

SEQ ID NO: 241987 - protein, 119 aa, Glycine max
  unsure (1)..(119): unsure at all Xaa locations
  Clone ID: PAT_MRT3847_60541C.1.pep
HKSDVYSFGIPISTCLXGKAPLQSPGPDDMVRPPRWVQSVVREEWTAEVFDVELMRYQNIEEEMVQMLQIAMACVAKMPDMRPSMDEAVRMIEEIRQSDSENRPSSEENKSKDSNVQTP

SEQ ID NO: 241988 - protein, 64 aa, Glycine max
  unsure (1)..(64): unsure at all Xaa locations
  Clone ID: PAT_MRT3847_60542C.1.pep
HASALLPVFANTYALPNATNGAXIMVNLGLHSRRFGHWLIQSTCGISGEGRYWGLVWLSSEHSI

SEQ ID NO: 241989 - protein, 93 aa, Glycine max
  Clone ID: PAT_MRT3847_60543C.1.pep
VLYGKLVYLKKRSILQQFVSSVKQMKSLKFEYTLAKGSLKSLQVHLHAIHENSEFAEKLNAVESKAEKDKQKQKTISDFQSSTGPTLLLSTLL

SEQ ID NO: 241990 - protein, 70 aa, Glycine max
  Clone ID: PAT_MRT3847_60544C.1.pep
SRSQPCELSSLYPVPFRPVGRSICLPRSSFSWRRYRRWLVFRRLGLCSMCASHCMRSTEPIEATVELLWD

SEQ ID NO: 241991 - protein, 90 aa, Glycine max
  Clone ID: PAT_MRT3847_60545C.1.pep
HFHRYTGLTHLISIGGAPSSGTIIKQSTVDDHVIGVVLHQRQVGPIFCQENVPPARTTTDLCYARLRSTSVLRRRRYGYLKVIKSIHIGV

SEQ ID NO: 241992 - protein, 102 aa, Glycine max
  Clone ID: PAT_MRT3847_60546C.1.pep
STNPYKKCSVPLEIPIHVNIQTINVIDKLLMGEIPPSLGHLKRMQDLRLNNNSFDGECPESLANMAQLAFFDLSYNNMSGPIPKILAKSFSIVGNPLVCATK

SEQ ID NO: 241993 - protein, 80 aa, Glycine max
  unsure (1)..(80): unsure at all Xaa locations
  Clone ID: PAT_MRT3847_60547C.1.pep
VDQAVRTLLADGCPYTNAMGHDSSAVTIPRDFGIGVKLTTINNVGAYGLRYWISGSSILGTIPXHILQQTDWNQRATVRT

SEQ ID NO: 241994 - protein, 47 aa, Glycine max
  Clone ID: PAT_MRT3847_60548C.1.pep
QAHSVTSNSYEPQATRPRCDDSKKLVEGRPKRGSHTRSYLKDYVLEA

SEQ ID NO: 241995 - protein, 260 aa, Glycine max
  unsure (1)..(260): unsure at all Xaa locations
  Clone ID: PAT_MRT3847_60549C.1.pep
FLSVRYSFTLFFILLLLSPSHIASTTPTLAHTLTQSATKIAITNRNIHSLNNAGRGTKITGISQFKRYLHRFGYLQNNNISFSDEFDAVLESALFRYQRNLGLQVTGKLDSNTVSQMITPRCGDPDTNTTPHHHNHVHKTRLTKNFVFFPGKPRWSRSMPMTLTYAFSRENMIHSLSMKEIREAFQRAFTRWASVIPVSFVEVSDFELTDIKIGFYNGEHGDGEPFDGVLGXLAHSFSPEIGRLHLDAAETWGGLPVDHV

SEQ ID NO: 241996 - protein, 85 aa, Glycine max
  Clone ID: PAT_MRT3847_6054C.1.pep
LSQPRSGQSSSRQHASRPEATPLDFVVRPQSKIDPEEIRARAKQAAQDQQRMKMNKKLQQLRAPKKKQLQATKLSVEGRGMIKYL

SEQ ID NO: 241997 - protein, 56 aa, Glycine max
  Clone ID: PAT_MRT3847_60550C.1.pep
NKLPYRQSLYIYIYRYRYIYSRSLALKREQNAIYAYVHGDTPPRIHGWGSLCELMT

SEQ ID NO: 241998 - protein, 181 aa, Glycine max
  Clone ID: PAT_MRT3847_60551C.1.pep
MVGQNWSGCRSWEEDIYWSHFQFLHFVQFLRADYDQHLALPKAFSDNLKKKLPENVTLKGPGGVVWNIGMTTRDDTLYFVHGWEQFVKDHCLKENDFLVFKYNGESQFDVLIFNGGSLCEKAGSYFVRKCGHTGIEHAGGSLNKKRDTDNNSLERGNIPPSNAGVECALHEKSVHANGTKE

SEQ ID NO: 241999 - protein, 135 aa, Glycine max
  unsure (1)..(135): unsure at all Xaa locations
  Clone ID: PAT_MRT3847_60552C.1.pep
LGSPAGXVVSPAFVGASXSGXFXAXAGLALRASFVXPVSWXAPAWGSRPRXLALXGPLALVGAPXWPRXVSVVLPFLLXXFXLGRGFGCAFGFGLPPPPLXGXXXPSCPLXXXXXXXXSWFRALXFPXWXFXSSF

SEQ ID NO: 242000 - protein, 84 aa, Glycine max
  Clone ID: PAT_MRT3847_60553C.1.pep
SPFFTFQGKFCKLHLYHVKFCLVIASHSSPACSKKNCSFSSSVKNIQLSACLSVFILQLMTCLSIYPWHVPFVMVSIQNAEIHE

SEQ ID NO: 242001 - protein, 265 aa, Glycine max
  Clone ID: PAT_MRT3847_60554C.1.pep
MSCYFLKQFYALVLLLLHAAVSILGFNSLPNSAEIKCIETERQALLNFKHGLIDDYGILSTWRDDDSNRDCCKWKGIRCNNQTGHVEMLHLRGHGTQYLIGVINISSLIALENIEHLDLSNNAFEWSHIPELMGSFTNLRYLNLSHCLFVWIIPSDLGKLTHLLSLDLGGNSYLHGQIPYQLGNLTHLQYLDLSYNDFDGELPYQLGNLSQLRYLDLGGNSFSGALPFQVGNLPLLHTLGLGGNFDVKSKDAEWLTNLSSFDKLS

SEQ ID NO: 242002 - protein, 39 aa, Glycine max
  Clone ID: PAT_MRT3847_60555C.1.pep
CWKFEHILFAIGSKLKCTLIKNVEMLYLHFFGNWFMLTF

SEQ ID NO: 242003 - protein, 73 aa, Glycine max
  Clone ID: PAT_MRT3847_60556C.1.pep
HDPHLPLPYSGHLASFHPPLFKSVPLLLMYTNPTKPWILVMASLRTPVKGEVAHICERDRASLRYATIIVLDR

SEQ ID NO: 242004 - protein, 57 aa, Glycine max
  Clone ID: PAT_MRT3847_60557C.1.pep
NNTVHDHDFDSNTHILVGTAIHHEHVVQLQCNLLKIAEHSTTTYTLDAVYAIHRLQF

SEQ ID NO: 242005 - protein, 102 aa, Glycine max
  Clone ID: PAT_MRT3847_60558C.1.pep
GPQTGFYQKQHTWKALFFQIKGIKIYPLGNMKFFCPHKLHVNLPNPSNQLGYKAIFFVPAQKNAGVVQFTKKYHGQSAIEKGKEGFPMPNSYLEISTPNKLS

SEQ ID NO: 242006 - protein, 40 aa, Glycine max
  Clone ID: PAT_MRT3847_60559C.1.pep
SWSVTRSLGGSRSAPLKLNFLSINFIGGRAASAGRCRLHH

SEQ ID NO: 242007 - protein, 508 aa, Glycine max
  unsure (1)..(508): unsure at all Xaa locations
  Clone ID: PAT_MRT3847_6055C.1.pep
MGYEDNPYRDEDGEPLMDYDDIQSDREPSPEPRRQDDDFDEDVDEWRGRDRSQTPVYDTDPSRSKPRKRLIKKSDAGKQAVEPELEDEDVEGYVPEAMFDEADTGRKRKKGKEGGSGKKEKRMKGEKSFGSSGGKSGSKFGSGKKGFGGKAGKDHDGEVKEMWDTIAGGDSEDDQEGVRNVDDDNFIDDTGVEPAYYGSDEPRSPVDAPQAEEGEEDEEIKDLFKIGKKMXELNRQGKPAGILLRDLNRXHEVTAEEDAELNRQGKPAINKLKKLNLLTEVLSKKQLQQEFLDHGVLTLLKNWLEPLPDGSLPNINIRSEVLKILNDFPIDLEQYDRREQLKKSGLGKVIMFLSKSDEEISANRKLAMELVDKWSRPIFNKSNRFEDMRNVEDDRVPYRRPSVKKPANKSAGMESRDSDLDLELSQPRSGQSSSRQHASRPEATPLDFVVRPQSKIDPEEIRARAKQAAQDQQRMKMNKKLQQLRAPKKKQLQATKLSVEGRGMIKYL

SEQ ID NO: 242008 - protein, 45 aa, Glycine max
  Clone ID: PAT_MRT3847_60560C.1.pep
FHYQYAQTRTHSLPIRKINVLCWNFHARCRLVIDRLQHNRTSCPA

SEQ ID NO: 242009 - protein, 135 aa, Glycine max
  Clone ID: PAT_MRT3847_60561C.1.pep
MGDDNLKKESDMEGDLQRSLSLRLNRRGDRSNQNPAKDFEVGFFSSGRVPQDYPMKIVWKKGFVRLVLVAGILWMLLILLALLFHIWSCQTSVSFLSDICGEAGIRLPLLNTSITAVYMMRLIKQEAKAICSAPY

SEQ ID NO: 242010 - protein, 49 aa, Glycine max
  Clone ID: PAT_MRT3847_60562C.1.pep
VCSAMLPTSTMIRTLEFSSSIIDKGRKIQGDRPPRSLSYTALAIQALDR

SEQ ID NO: 242011 - protein, 82 aa, Glycine max
  unsure (1)..(82): unsure at all Xaa locations
  Clone ID: PAT_MRT3847_60563C.1.pep
VPHIKTHHPAFSRQHYSFSCGAVTPTATDGTRXKICVAVDLFYESAYAVRWAEQHYIRPGDAEILLHFSATNRLVGAHWGSI

SEQ ID NO: 242012 - protein, 67 aa, Glycine max
  Clone ID: PAT_MRT3847_60564C.1.pep
RTLVINFIFHYIVQKRRVLVYFHNNNVSRIWILVKDISQTTTCSSHIQIERERERERKVLLLSTSTF

SEQ ID NO: 242013 - protein, 74 aa, Glycine max
  Clone ID: PAT_MRT3847_60565C.1.pep
LKLSCIHINVCCSLHDTKTDAGPLHYHDVYYVTVATLICPDITRPIRDPRYGELIVREHHIPSNSRNTSIHRPS

SEQ ID NO: 242014 - protein, 77 aa, Glycine max
  Clone ID: PAT_MRT3847_60566C.1.pep
KKKTKRFGFKINCLRPNCKSRHPFYDKLSLHFVSSSRPNISGNCNGFYISICSKTQVFLDSENNIKIWGFLFPKLYT

SEQ ID NO: 242015 - protein, 57 aa, Glycine max
  Clone ID: PAT_MRT3847_60567C.1.pep
GWLKSSQCLKRKEKVKKKKKNLSKEERVAYNMVSDASLGLSPELSYWYIMSCPLQDA

SEQ ID NO: 242016 - protein, 198 aa, Glycine max
  Clone ID: PAT_MRT3847_60568C.1.pep
MTPLRVSLCFILLFLTTTSAQAPVYSYNSCMNSTSISPTYKTNVKSLLSWITNDSSISKGFNYTTISSNNGGDNDGYGDAVYGLYSCRYDITGYFCQFCLTTAVNEISRLCPDSVTAILWYDVCILRYSNQSFHGKVSLSPTWNVTGPRKIKNSTETKRIEDAMEGLITKATIETKQFWAVEEFDWGDNETLYGWVQC

SEQ ID NO: 242017 - protein, 105 aa, Glycine max
  unsure (1)..(105): unsure at all Xaa locations
  Clone ID: PAT_MRT3847_60569C.1.pep
PTRVLSPGRKRTRGILDVGCXGVANLGGWLSDIEVRVDANSSMGLTIAHQVQFALERRMTAASAAKGTKRLPLRMKVLDVQHCARCIAPRNIQSGKLVLELTREL

SEQ ID NO: 242018 - protein, 90 aa, Glycine max
  Clone ID: PAT_MRT3847_6056C.1.pep
AWPPPLPYGLGLPSRAARPPPPPPPPPPPPPPPPPPPPPFFFWKIQLTHTQKDPAKNLSLFLKKTGPFKKKKKNPLFLIFWKKRIPPTGK

SEQ ID NO: 242019 - protein, 83 aa, Glycine max
  unsure (1)..(83): unsure at all Xaa locations
  Clone ID: PAT_MRT3847_60570C.1.pep
LKPPPFMYPFLFSXCSKQKPTXXXKTTNXGSKXXKFPFKIXXXXKXXIXXLIXXLXIFSXLPQXXXXXXXVPKXYXGGSSXRR

SEQ ID NO: 242020 - protein, 130 aa, Glycine max
  unsure (1)..(130): unsure at all Xaa locations
  Clone ID: PAT_MRT3847_60571C.1.pep
NVNESPQRNYNNEYLDHSGLLPPACWTRACQISWQCQRTKSLNTIHSSNNRXSADGSITYGTGFTIYNSSLSDVHYKSXIQFAGNASYNKIGRTMALLNVLLNFIHAAMRQSKVIILTYPVPDLSLQRNG

SEQ ID NO: 242021 - protein, 40 aa, Glycine max
  Clone ID: PAT_MRT3847_60572C.1.pep
LLVVPSDAFLFNPSNAAVTLHLAWTRNVSFHFNSKHVWRS

SEQ ID NO: 242022 - protein, 41 aa, Glycine max
  Clone ID: PAT_MRT3847_60573C.1.pep
THAYGRLKTTDWKGQDCSTIWKLGYRSANINFPVKDHAALG

SEQ ID NO: 242023 - protein, 38 aa, Glycine max
  Clone ID: PAT_MRT3847_60574C.1.pep
GYYIVIRTSHLPWANEPVDAQRLTSSSAPSVILIHEVR

SEQ ID NO: 242024 - protein, 44 aa, Glycine max
  Clone ID: PAT_MRT3847_60575C.1.pep
GVRGCAARCSSPQRRSSNIIYCQESLVCVTSCLIHSLCQRPDTC

SEQ ID NO: 242025 - protein, 92 aa, Glycine max
  Clone ID: PAT_MRT3847_60576C.1.pep
LGLGKLSVGAPYFDAVMAPLLLPALLLMIPATRLRWGRDEGPALWRRLRPVVLVMGPAAVALPLLLEAGFARISWGAALTLWLATGLLIATL

SEQ ID NO: 242026 - protein, 73 aa, Glycine max
  Clone ID: PAT_MRT3847_60577C.1.pep
QRKMNYAWGYIKSPKSIACIDNPYSAKPLEVLLASLEVWTNWIGTICILEGFFATRRMKGGDYHMQLSNGVTP

SEQ ID NO: 242027 - protein, 41 aa, Glycine max
  Clone ID: PAT_MRT3847_60578C.1.pep
MFFIASVDQSSSQSASLQESIQLLLHTVKCHSMPQVGTPAI

SEQ ID NO: 242028 - protein, 144 aa, Glycine max
  Clone ID: PAT_MRT3847_60579C.1.pep
STFAIAMASSALTQSSSFSYDVFLSFHATDTRSNFTDFLFQALIRKGIVAFKDESRAPDQAIEDSRLFIVVLSKNYAFSTQCLHELSQIFHCVEFSPRRVLPIFYDVDPSDVRKQTGWYEKAFSKYEERFLVNKKGMETVQTWR

SEQ ID NO: 242029 - protein, 49 aa, Glycine max
  unsure (1)..(49): unsure at all Xaa locations
  Clone ID: PAT_MRT3847_6057C.1.pep
LNIVSNSRAVRRLCFLVFVEAVVGKQXXXXXXXXHAHSSVFLSGSIGID

SEQ ID NO: 242030 - protein, 361 aa, Glycine max
  unsure (1)..(361): unsure at all Xaa locations
  Clone ID: PAT_MRT3847_60580C.1.pep
MYLPPIQYFPMGSWIWALCYTEIGYGRYLNCLNAFWHPECFRCRACNLPISDYEFSTSGNYPYHKSCYKESYHPKCDVCKHFXHPFWIQKYCPTHEHDGTTRCCSCERMESQEAGYIVLKYGRKLCLECLDSAIMDTNECQPLHADIQRFYESLNMKLDQQIPLLLVERQALNEAREGEKNGHYHMPETRGLCLSEELSTFSRRPRLGTTMDMRAQPYRPTTRCDVTAILILYGLPRLLTGSILAHEMMHAWLRLKGYRTLSQDVEEGICQVLSHMWLESELSSASGSNFVSASSSSASHTSRKGKRPQFERKLGEFFKHQIESDISPVYGGGFRAGQKAVSKYGLQRTLHHIRMTGTFPY

SEQ ID NO: 242031 - protein, 116 aa, Glycine max
  unsure (1)..(116): unsure at all Xaa locations
  Clone ID: PAT_MRT3847_60581C.1.pep
LAHKISQAWLRLKGXRTLSRDVKKVLXVLPKCGWILTXWASGSTFVSPSSSFASHTSRKGKRPQFERKLGEFFKHQIESDISPVYGDGFRAGQKAVRKYGLQRTLPHIRMTGTFPY

SEQ ID NO: 242032 - protein, 171 aa, Glycine max
  Clone ID: PAT_MRT3847_60582C.1.pep
QSLNLESPPRYGNENMYQPPIQYFPLGSRICAGCYTEIGFGRYLNCLNAFWHPECFRCRACNLPISDYEFSTSGNYPYHKSCYKESYHPKCDVCKHFIPTNPAGLIEYRAHPFWIQKYCPTHEHDGTPRCCSCERMESQEAGYIALKDGRKLCLECLDSSIMDTNECQPLH

SEQ ID NO: 242033 - protein, 64 aa, Glycine max
  Clone ID: PAT_MRT3847_60583C.1.pep
ECNLRGPGEWVNYNVGDFVVEKPKEPINIKFSLAQIDCTHTKGGLCVDSAIICPTEFKERLKQS

SEQ ID NO: 242034 - protein, 92 aa, Glycine max
  unsure (1)..(92): unsure at all Xaa locations
  Clone ID: PAT_MRT3847_60584C.1.pep
PAYGARRVISTIVTGDRCTAHVYRETEDSLTHNAFYSAGSDKGPVAGVADYEHHQGGEIVDRHHFSVRXNNSSYXCDFPLALETDKKQSWAI

SEQ ID NO: 242035 - protein, 127 aa, Glycine max
  Clone ID: PAT_MRT3847_60585C.1.pep
CSRAHSLFIIRYVLDIIHARSSVYHRLSSAIHIWYQAFSLVPLYLGIRTVSPSITDSDMGFRSFLCKSGTSSRSLLELSSVEVLGCGSTSVVCDVGTFLSGVMRDIRGASRIALCETRLLSERRASS

SEQ ID NO: 242036 - protein, 33 aa, Glycine max
  Clone ID: PAT_MRT3847_60586C.1.pep
YNYLIRLVLIRNSSIKKSCLLITSRDNSYVTAT

SEQ ID NO: 242037 - protein, 58 aa, Glycine max
  Clone ID: PAT_MRT3847_60587C.1.pep
GGGGGGGGGLGIGPIGGYGYKRALGENLVQFLKAGYWAQGGKKNPIEGPRGLLPNCPP

SEQ ID NO: 242038 - protein, 104 aa, Glycine max
  Clone ID: PAT_MRT3847_60588C.1.pep
SGSDAFRWILSSFSPCKLDLPQSVAQWVAPQRHVTASEPSVSSTLSDLGSRVTQGSPAMSRASRRLGDASAACRVPIPRPSALRFYLKEDCTEKCHSGYRRARA

SEQ ID NO: 242039 - protein, 122 aa, Glycine max
  unsure (1)..(122): unsure at all Xaa locations
  Clone ID: PAT_MRT3847_60589C.1.pep
WLGTFGLIYVLGEKMIEGDSEIESGPSERLAPSRLPTSCYYYYYYYCRPKKTLTRNTVTGRFEEVIYFDMPKVGPVEPTLIPTPAPVGLGLGTVHNKSIDNGVXIFVGSTLVLTVYVPVSPA

SEQ ID NO: 242040 - protein, 47 aa, Glycine max
  Clone ID: PAT_MRT3847_6058C.1.pep
SFASYIGPPPFLGFFAIAENEFIGRDPSPFMQKMPPPCGSPPQKEED

SEQ ID NO: 242041 - protein, 89 aa, Glycine max
  Clone ID: PAT_MRT3847_60590C.1.pep
GRGRPFFFFFGLHICSSYIIISVILYSLLSTGDIKSDTNSPTFIGQCGILNLAGADPCPQNRQTTRNMKFGPVIPLPATAIHYQVQKRI

SEQ ID NO: 242042 - protein, 36 aa, Glycine max
  Clone ID: PAT_MRT3847_60591C.1.pep
FRRGYALSSKSSILGSGCDNLYDITREDLASGGSWG

SEQ ID NO: 242043 - protein, 110 aa, Glycine max
  Clone ID: PAT_MRT3847_60592C.1.pep
KMTNIELLSAVVKSLTRDTEERREAVGLLLELSALPAVRRKIGRIQGCIVMLVSILNGVDPVSSRDAAKLLDILSNNTQNALLMAEAGYFGPLVQYLNKGDASFFNTLLL

SEQ ID NO: 242044 - protein, 55 aa, Glycine max
  Clone ID: PAT_MRT3847_60593C.1.pep
DDHKFILLVEELEIKTTVCCQQRMHARLQVPRCLIQVSYIFVMATAEVPRDPSLS

SEQ ID NO: 242045 - protein, 62 aa, Glycine max
  Clone ID: PAT_MRT3847_60594C.1.pep
PPSFIKPSFLPLKPNPIIFFFLFKITHFFFSSIPTKLFHNIIFSFSTINLPPSFQFSPSHFL

SEQ ID NO: 242046 - protein, 76 aa, Glycine max
  unsure (1)..(76): unsure at all Xaa locations
  Clone ID: PAT_MRT3847_60595C.1.pep
MAAASSMALSSPFFXXXGVKXGXXAXEVGRXSMRKTVTKQVSSGSXXYGPDRVKYWALLWRAPXYLTGXFPGDYGW

SEQ ID NO: 242047 - protein, 110 aa, Glycine max
  unsure (1)..(110): unsure at all Xaa locations
  Clone ID: PAT_MRT3847_60596C.1.pep
RYQQAYRAFNRIRNTELISARELFYAHCQIVAETEIFGGKSLGRRVLELFTVPRIKXATVSSSIIVIAQQFSGINIMAFYSSTIFQEASYSVKQSLLASFGFGLVTFVFA

SEQ ID NO: 242048 - protein, 47 aa, Glycine max
  Clone ID: PAT_MRT3847_60597C.1.pep
NNTYFEIIFFLLHIIIMRRKSIIYKPMYYIIIVINNCMIVLSASVTA

SEQ ID NO: 242049 - protein, 51 aa, Glycine max
  Clone ID: PAT_MRT3847_60598C.1.pep
PACGGCKQNTHWSATKVLTLKGNNYTFVAFISTLTLFLFLRSRQDHLSTGE

SEQ ID NO: 242050 - protein, 195 aa, Glycine max
  unsure (1)..(195): unsure at all Xaa locations
  Clone ID: PAT_MRT3847_60599C.1.pep
YDVYGPYNDSVMQGKXMPSRTDLEANPGGSELVIVNQTIDPALEELIQIAQCIALDCPVSSLVQRLAELVTSHMGGPVKDAGIMLARWTETRAELRTSLHTIVLPLGSLNIGLSRHRALLFKVLADNINMPCRLLKGSHYTGVEDDAVNIIKLEGEREXLVDLMAAPGTLIPADILSTKDSAFKSYNPKILPSLP

SEQ ID NO: 242051 - protein, 108 aa, Glycine max
  Clone ID: PAT_MRT3847_6059C.1.pep
LRAPDSYYVELKRDYIAKRAILVEGLKAVGFKVFPPNGTFFVLADHTHFGMENDVAFCKYLHKEVGVVAIPCSVFCLNPEEGKNLVRFVFCKDEETLRAAVERMKEKL

SEQ ID NO: 242052 - protein, 62 aa, Glycine max
  Clone ID: PAT_MRT3847_605C.1.pep
QINGNYQCTHSTMCSCLTTSVVANYGLLMTTAFAPSPSSYRRLLLDTSTRRRYPSLLSLMVT

SEQ ID NO: 242053 - protein, 43 aa, Glycine max
  Clone ID: PAT_MRT3847_60600C.1.pep
DLKPVGHRRQTLRVLKVMQPKKPDLVLCQVMRHSERMFHNCRV

SEQ ID NO: 242054 - protein, 86 aa, Glycine max
  unsure (1)..(86): unsure at all Xaa locations
  Clone ID: PAT_MRT3847_60601C.1.pep
YSLLSXNCSXRNIMVQVHRXXXXFXLXXTXAEKDQQHLHXLLXRIXXHXSHXHSXFVXLPLTXXSXXXMXLDRXSXXIXXXDXVXX

SEQ ID NO: 242055 - protein, 176 aa, Glycine max
  unsure (1)..(176): unsure at all Xaa locations
  Clone ID: PAT_MRT3847_60602C.1.pep
FVVGWNRIVRKERLDGIVMFADDSNMHSMELFDEIQSVKWIGAVSVGILVHSGGADESSTLQGEEEAPPMPVQGPACNATNNLVGWHTFNKLRYAGKSAVYIDDLAPVLPRKLEWAGFVLKSXLLWEDLDDKPDWIKDLGEVEGIDEGLERSTSLLKEDYVDDPLAGCRSQXLLWW

SEQ ID NO: 242056 - protein, 85 aa, Glycine max
  Clone ID: PAT_MRT3847_60603C.1.pep
MSEDKYDVLLYYKYVEIPNLNDLLTFYHSNCSCLRLLGRVRLSSHDVNVTVGGNLSSLKNDIEALKAYRTLFHHTDFKLDTSHHP

SEQ ID NO: 242057 - protein, 253 aa, Glycine max
  Clone ID: PAT_MRT3847_60604C.1.pep
MEVEVMVPPVDFNFDSNCSSPFITAPSSPQFFASNKPNFFFSAPTSPTRGTSSFFHDSPSSSSVLPHEEQQDFEFNFSGHLDRPSLSAAELFDGGKIRPLKPPPRLQTPVTSPRSKLSPRKKKKDFDPFAEAMKETLKREEQEETQRRRERVSVSGRKGSRSLSPLRISDIVVCDSEDKSVSSSTSNNNSKTSSFLSSIPFTRKWRFRDFLLFRSASEGRATDKDPLRRKYAVLSKNNNEDVPNCIFRSTESD

SEQ ID NO: 242058 - protein, 134 aa, Glycine max
  unsure (1)..(134): unsure at all Xaa locations
  Clone ID: PAT_MRT3847_60605C.1.pep
LMFNLLGLLRVRVKRGVNLAVRDVRSSDPYVVIKMYNQTVYDHDTFSKDDKMGDAEFDIFPFIEALKXNEXGLPNGTVVTRIQPSKHNCLADESCITYSNGKVVQVMILRLQNVECGEVEIQLQWIDLPGSKGL

SEQ ID NO: 242059 - protein, 86 aa, Glycine max
  unsure (1)..(86): unsure at all Xaa locations
  Clone ID: PAT_MRT3847_60606C.1.pep
MDPCLELEFEHXFMYREHNRSPGXIDERFWTMWKLPMFGANDGSQVLKEFQEVKNAYPKGFIRIIGLDNVCQVQCIRFIGYKPPGF

SEQ ID NO: 242060 - protein, 176 aa, Glycine max
  Clone ID: PAT_MRT3847_60607C.1.pep
MEESDSTPKSLMENLLGLLRVRVKRGVNLAVRDVRSSDPYVVIKMYNQKLKTRVIKKDVNPEWNEDLTLSVINPNHKIKLTVYDHDTFSKDDKMGDAEFDIFPFIEALKMNLTGLANGTVVTRIQPSKHNCLADESCITYSNGKVVQDMILRLQNVECGEVEIQLQWIDLPGSKGI

SEQ ID NO: 242061 - protein, 107 aa, Glycine max
  unsure (1)..(107): unsure at all Xaa locations
  Clone ID: PAT_MRT3847_60608C.1.pep
ARRQQKEGVGTKGCFQHAGGAYTQLPWITGVWRDYIHDACSTGGKNNASPMKRRXELGLRASGGKLSSNKTWRRIRVQGGNGKSGGLXWDTGNYSLGSEAATSKTHV

SEQ ID NO: 242062 - protein, 159 aa, Glycine max
  unsure (1)..(159): unsure at all Xaa locations
  Clone ID: PAT_MRT3847_60609C.1.pep
SPPTRSLIGSLCSRGMLDSALEFKNQLLKENCKPTVVTYTILIEASLLQGGIDEXMKLLDEMLEINLEPDMFTYNSIIRGMCREGYVDRAFQIISSISSKGYAPDVITYNILLRGLLNQGKWEAGYELMSDXGARGCEANVVTYSVLISSACPDGKGEE

SEQ ID NO: 242063 - protein, 100 aa, Glycine max
  Clone ID: PAT_MRT3847_6060C.1.pep
GGIEQSVRCVWRFVLLVRYLGRFWSFGVPPLHLGGMWFWWLVASEFAVGSDNTGPGWRYGMFGFWVFHASSGMTFWFPHLGPFWARLGQFWERSVRKGLL

SEQ ID NO: 242064 - protein, 89 aa, Glycine max
  Clone ID: PAT_MRT3847_60610C.1.pep
ITIKDASKNGTHCKKWRKTRTREKNEECRTRIERTAPNRIQVQTERGTAREDGPRKGIRFIILLCYPFFFFFFCFFFFFFFFFGSSSSR

SEQ ID NO: 242065 - protein, 84 aa, Glycine max
  unsure (1)..(84): unsure at all Xaa locations
  Clone ID: PAT_MRT3847_60611C.1.pep
DQYSANDCVLKGPCKLKLALAXTENQRIEELDVYDFTGAGCIALSMHNTDEFILAFAESSMNSAYQRKRPIYLSTKNTILKNYY

SEQ ID NO: 242066 - protein, 151 aa, Glycine max
  unsure (1)..(151): unsure at all Xaa locations
  Clone ID: PAT_MRT3847_60612C.1.pep
DXDDGEVDXGDESXNEEIEXXXXSXDPTLGPDSDYDYDDLDEVADEEDEDLIGDVSDAEMNMDIXXDMEEEEVDASPPDDDDIDIQVGDVDDASDGDEEEAGKRKRKHESGGKKGVSPFASYEEFEHLMEDDDHAEKKSYPKKTKXKKRKG

SEQ ID NO: 242067 - protein, 71 aa, Glycine max
  Clone ID: PAT_MRT3847_60613C.1.pep
PPPPQNNKPHLRQFFPLHHPSTTSRNKVMGRKNLANLASGYFQVFSSPPTLPVLIYASFPPHKIFHLPVGF

SEQ ID NO: 242068 - protein, 177 aa, Glycine max
  unsure (1)..(177): unsure at all Xaa locations
  Clone ID: PAT_MRT3847_60614C.1.pep
KKSHAPIFGNQKIIKGRLPWNFFFSKKNFPCEXYKNNNXTVNXXXIELTIDXIDWDDHXEKRKDQSIFGXLNKKKLXGKFQVLKGRXKXXKANIQKTSSKEKPQDEQAGSVDQIKXKYXFSSSNETSVXKLAESKXQXNXKKXQGINLRTTEMQDKAKSFSTLANQVLWTAEQERRN

SEQ ID NO: 242069 - protein, 71 aa, Glycine max
  Clone ID: PAT_MRT3847_60615C.1.pep
MINNDCSWLENIEAYVQIFVVRIHGACHHPFLYDSKFSSALQTHFMFHCKGHKYYFVCDICQTSREAQPRA

SEQ ID NO: 242070 - protein, 85 aa, Glycine max
  unsure (1)..(85): unsure at all Xaa locations
  Clone ID: PAT_MRT3847_60616C.1.pep
GKLSLQKNRRISWHLASDLVEEEPEKGLVEEKEETVFQKKXGFALPLPEGIVGEICQLARNLTXNLTLEEALAEYEGRVSEKDCW

SEQ ID NO: 242071 - protein, 78 aa, Glycine max
  unsure (1)..(78): unsure at all Xaa locations
  Clone ID: PAT_MRT3847_60617C.1.pep
CRSRCDPTLVHPCTXGSHVTCDCNNNLIQATLGRXNISGTLRPELGQLHHMQNLELYMKEVTRKIPIELEYLKPLISM

SEQ ID NO: 242072 - protein, 210 aa, Glycine max
  unsure (1)..(210): unsure at all Xaa locations
  Clone ID: PAT_MRT3847_60618C.1.pep
KGLVDSLFQAPQDAGTHYAIISSYKYLSTGLHQYLNNKMDGFYITPAFINKLIIHICKNFITLPNIKVPLILDIXESKGQRKSFQCKLIFAKIEINPIIISTKECKSENTEDPAKLIRQKYHNTTEXIKKERIHSLINNLDAELXSSSKTTQYTMNNQXINTTLMNITNNPTNVPLXNIVNRKENPRVXIMVAGDNFSTLYAPLMRNKRV

SEQ ID NO: 242073 - protein, 64 aa, Glycine max
  Clone ID: PAT_MRT3847_60619C.1.pep
VQQRTSYEHYLENKERLLNILRTRTVALGTESNHFPTLRPRNYITRTKRVMDHTQIYYSGSLAP

SEQ ID NO: 242074 - protein, 60 aa, Glycine max
  Clone ID: PAT_MRT3847_6061C.1.pep
QRNITPGLNKKTIQISTKSPFLKVHCQRWESLITEKLWDPLLKIPVLPNTNIRDKKESLY

SEQ ID NO: 242075 - protein, 58 aa, Glycine max
  Clone ID: PAT_MRT3847_60620C.1.pep
MSALFNFHSFLTVILLGICACTYFKMQFPAILDQKTGFRGFFWKAARIGASVLCLTAV

SEQ ID NO: 242076 - protein, 81 aa, Glycine max
  unsure (1)..(81): unsure at all Xaa locations
  Clone ID: PAT_MRT3847_60621C.1.pep
MSALFNFHSFLTVILLGICACTYFKMQFPAILDQKTGLDGMTYMLSXRFRGFFWKAARIGERLSPWVAAGCFMMGVSIIFF

SEQ ID NO: 242077 - protein, 70 aa, Glycine max
  Clone ID: PAT_MRT3847_60622C.1.pep
MSALFNFHSFLTVILLGICACTYFKMQFPAILDQKTGFRGFFWKAARIGERLSPWVAAGCFMMGVSIIFF

SEQ ID NO: 242078 - protein, 1084 aa, Glycine max
  Clone ID: PAT_MRT3847_60623C.1.pep
MWRPTAAVAIASLLTLPSALAEISLSSQKSFVRTENLFASDPYLSIYGDRPDDCPPCFNCNLDDFTCLQFANCTKSSGKCSCPPGFGGEDCSQPLCGSLPEGKDRLPRQGKECECHEGWEGINCNVCKTDNACNAMMPNGEDGVCYREGLVVKENYQMCDITNRKIMDQLKEKKAQATFSCNAERGECNFQFWVDQRESFYCGLENCEWSAEATESKNTTSYKCKDIKCACIPDRFLCGEDGSVDIGDFLDQEIKGPASFSSVSTASGSHSAFSEPAMNGLIQNIFGDESITLNCGSGECLYKTEVPGYERPVKKINTPLIAGVIAGCGLFVVAVILIVFFLARRNSRRYGPIQLGEEEEDDAAKLLADHKPASLAFENVSYHLKGRQILSDISGAVHPGELMAIMGASGAGKTTFLDLLARKNKRGTGLGDFWVNGEKITDDDFRSAIGFVDQDDTMLPTLTVHETIMDSALLRLPKDMSWAVKAQKVEDVEKQLGIYHIRHQLIGSEEGSGRGISGGEKRRVGIACELVTSPSILFLYEPTSGLDAYNAFNVIECLVTLVKSYNRTVVFTIHQPRSNIVALFDQLVLLAQGRTVYSGPFSKCQNYFDSIGYSCPPGFNIADYLVDLTMHASRPDNPIPEDSHTYGEDLDGRATVASSTMAVKSIPSIISNPSIEEGRPKNKRKSSIRQQQERQLFSRKSTDRAPAPASLRSDGDSILDKDNKWVKMARQNAQGSSINEDGHDLPPDAGNNTNLDVLVSSYEASDVKAELHSDIESAISDASESNGNPLHAPNGNSSGKVRGYRKPMLPTQFLILSRRTWRNLYRNPQLMLTHYAIAILLAVFLGFLFYGLTDDLKGFQNRLGFFFFLLALFGFSTLTSLTTFAPERLLFVRERAKGYYTPLAYYLAKVVFDIVPLRILPPAIMGCIVYPMTGLVPTAPEFGKFMLLLVLFNLAAAMICLFLGIVVRNQGVANLLGVLVMLFSLLFGGFLLNHETIPKGLLWLQSLSIFHFGFEGLIVNEVRYLSLVDKKYGLNIEVPGSAILSSFGFDVLALWRDVAGLGVVSGAFFVLGFAALHFLLVERR

SEQ ID NO: 242079 - protein, 360 aa, Glycine max
  Clone ID: PAT_MRT3847_60624C.1.pep
MDSESSNSDSQPHPLSNPIDDACHDMSSLEELANRGAWRSIIDKVSRARALSLLHKPHDHLTYLAFNALSFTKLRRFNEASAELDSLEDLDSSHYRYETYPKIYPNRIGSMVPFSLRWLHALIPIKLGQRQQGMDRFYILLDFVRGKIKEKEKLSNLGVSLNLWRKREVFVVNCIIGNHLSQKEFGVCLSLMKELLSRDCSDPLLVSQLGYMQLQIGDLEGAKVSFLKVEELGKSNGSLSEVEFRNLVNRNKALVYLVGKDYVSAVREYEECIERDSADVVAVNNKALCLMYLRDLSDSIKVLESALERVPTVALNETLVVNLCSMYELAYVNHSDIKRTLSNWIARVAPDDFDASCTRT

SEQ ID NO: 242080 - protein, 55 aa, Glycine max
  Clone ID: PAT_MRT3847_60625C.1.pep
LLSHAKAVELYRKHFQAKQGGTIGIVAFSFMYDPLRDEECDRQAVSRGLAFDIAW

SEQ ID NO: 242081 - protein, 60 aa, Glycine max
  Clone ID: PAT_MRT3847_60626C.1.pep
YSARLALPGPEEKHIVSMHVPIAAERNYFVNENPMGLPRLENNLSRQVSPQSWHGSSGSS

SEQ ID NO: 242082 - protein, 48 aa, Glycine max
  Clone ID: PAT_MRT3847_60627C.1.pep
FWVVRLDLKPFFCIFSVWANLSLFFFSFNDPFFVGLTQAIIIIKFGKY

SEQ ID NO: 242083 - protein, 96 aa, Glycine max
  unsure (1)..(96): unsure at all Xaa locations
  Clone ID: PAT_MRT3847_60628C.1.pep
IATCHPHHKPLAATPIRHFPYADIDCAVNGFFSDTLLGRGRHGRVYRATLDAXKLLAVVKTTKLVATSTSKNHAPKCTGCGNCTSPAENEIEILFQ

SEQ ID NO: 242084 - protein, 328 aa, Glycine max
  Clone ID: PAT_MRT3847_60629C.1.pep
MPLDLGNLALLLDLTSPRSVILERKARPAGSDVVLCAPPSKRDYPSSSSYAVVARGKSNSEKNGVDFDSDEEEEEEEEGGGGGGGFVDWETEMRQRVREFEERRELEKKAEELQSRVGEEGEEEETEEEKRMRVRKELEKVAKEQAERRATAQLMFDLGQKAYGKGSYGRAIEFLEAALTIIPGPTLFGGEIQIWLAMAYEAHNRHKDCIALYRQLEKTHPSVSIRRQAAELRYILQAPKLKISQEEMVTIPLIGSTYDSYAATWSDKYKDNDKKISGSVTNQLPSSKDYLGDFLVWKPPVGLGKNRAFWVGLTIWLGLVGAALFIQR

SEQ ID NO: 242085 - protein, 123 aa, Glycine max
  unsure (1)..(123): unsure at all Xaa locations
  Clone ID: PAT_MRT3847_6062C.1.pep
ERAYNNMGPVQQLTKLEEGNEYRTLPTGEQSTKEPRAPNPNKLTQRLKRSKNNLEGWXALLGFRALVLPPVEMXTWLKFASLCRKSGRISQAKSTLVKLLQYDPEKSPENVRYHGPPQVMLAY

SEQ ID NO: 242086 - protein, 58 aa, Glycine max
  unsure (1)..(58): unsure at all Xaa locations
  Clone ID: PAT_MRT3847_60630C.1.pep
RMXRXRKAREFGSXXNSXXQXSYXXPXSXXXGXXXLRLAXSVXAQVYNRSRPCGSVSV

SEQ ID NO: 242087 - protein, 56 aa, Glycine max
  Clone ID: PAT_MRT3847_60631C.1.pep
IICLLFILSTAVATTITDHEPSSLAPHVLDYTTSTFYYYTEKDNDDLFHDQNKSSI

SEQ ID NO: 242088 - protein, 66 aa, Glycine max
  Clone ID: PAT_MRT3847_60632C.1.pep
TFKLMKNQGVSVSITNEGILSGIGANLRKIHKSRDYQLEKIRIMISTINVIFQLIFLITLQLLTFS

SEQ ID NO: 242089 - protein, 61 aa, Glycine max
  unsure (1)..(61): unsure at all Xaa locations
  Clone ID: PAT_MRT3847_60633C.1.pep
PFTLSLSSLXLLLLSSACFAFSSSKLNECXLNNLNALEPVHRVESEGGVIHPWYSQHPELY

SEQ ID NO: 242090 - protein, 114 aa, Glycine max
  unsure (1)..(114): unsure at all Xaa locations
  Clone ID: PAT_MRT3847_60634C.1.pep
PFVLNRWMGKLTIPQGTFRSVKRMPLSIGGGAGAKNAILMNMPNAVLSMWRYFDGDLVFEASKMTNPYIKCAVSFSIACGNWGEDTINXEAFPHMLVQCGEIQEQVRFELSQEE

SEQ ID NO: 242091 - protein, 104 aa, Glycine max
  Clone ID: PAT_MRT3847_60635C.1.pep
ILLFFFFIFFSLHTASYIHMVQHLIEKCLIFHMTKEECMEALSKHANINPIITSTVWKELEKENKEFFEQYMKSKAKDDRMSQEETSQIIQKMMSDSSKDEPLN

SEQ ID NO: 242092 - protein, 145 aa, Glycine max
  Clone ID: PAT_MRT3847_60636C.1.pep
VLRAFQNAMANPIPIRPWSRLASLRSSPAPESHPKPHTAEPSLKTTNIFSNDNNESATKSLSPTPPDVHIPIQQNLKPTTPITFPPTKLKAQAQLQTKISEEEGNIEKPNGNGNGIGQKNEKEMTTTENELKKEKGIQTKISGSG

SEQ ID NO: 242093 - protein, 68 aa, Glycine max
  unsure (1)..(68): unsure at all Xaa locations
  Clone ID: PAT_MRT3847_60637C.1.pep
ACSCTRACTXXGXXXPXAXXPIXAPXGPSRXSXXXXLXSXGXXHLMAXSTAXXSFXSSQERXLIXXSX

SEQ ID NO: 242094 - protein, 88 aa, Glycine max
  unsure (1)..(88): unsure at all Xaa locations
  Clone ID: PAT_MRT3847_60638C.1.pep
ASGAXXEEPXXDHSWQPFFTHPTQXSISXYYXCRHXXXXXXXXNNNTCCEXLXAPLRAXXPISXXXXXXXXKXRXRXHAXTCGDTLMN

SEQ ID NO: 242095 - protein, 108 aa, Glycine max
  Clone ID: PAT_MRT3847_60639C.1.pep
EDHRRGPLQRRYSCGSKYNPPSHPSSAAHLILMHTQPRHTAPAPSSGSREIVIARGPDPPQLTPPTAPFAPHRPFPALPRTEERDRPYRSAPSPQFASCQRRNTLVPN

SEQ ID NO: 242096 - protein, 54 aa, Glycine max
  Clone ID: PAT_MRT3847_6063C.1.pep
GSAFERDQAACIEDLCLLQVACTTPTGVVVSQATIPGPALIAYLLSMHYSHSIH

SEQ ID NO: 242097 - protein, 70 aa, Glycine max
  Clone ID: PAT_MRT3847_60640C.1.pep
VAAPTNINLIGALVGSPNTLPNRTQTQINGARFSSSLPGKTLRLPLNPPCENHPCCHYWHHNLAPVRFPP

SEQ ID NO: 242098 - protein, 80 aa, Glycine max
  Clone ID: PAT_MRT3847_60641C.1.pep
TWMSSSALTFFNAKGFFNIKHFSHVRVVLVVSVAPKNTSSTVGLGTSSRFFFFFFFFFFFFFFFFFFFACKQLHFIISSK

SEQ ID NO: 242099 - protein, 88 aa, Glycine max
  Clone ID: PAT_MRT3847_60642C.1.pep
IIKQPHGPPRGPNGHAQIPNAPSFKGRLCMISSLQCKEFGILYPMAPRKGASFRPYALAPGEKSSPWNPQTPSLFYPFIESYLCFLSQ

SEQ ID NO: 242100 - protein, 127 aa, Glycine max
  Clone ID: PAT_MRT3847_60643C.1.pep
GMMVQSVPFGTKTKSYTLRIRIPGCVLKTPPLVKTPKQPKKKNPAYKNLHVQSKPSGEQRGGEPPGRGSHVPNTTIGGGGFTRRGCRSPREIRVGTRENPKPLYIIFGEPHLSRPCGNWRGHNSIFN

SEQ ID NO: 242101 - protein, 78 aa, Glycine max
  Clone ID: PAT_MRT3847_60644C.1.pep
TESDNILVKTGPYDAKPPHALNAKEITKEPHTATPAHAFLAPSMLHSTYEYHTIELMTYNSYQIQYVYGHYKADPTRC

SEQ ID NO: 242102 - protein, 46 aa, Glycine max
  Clone ID: PAT_MRT3847_60646C.1.pep
PKLILVLSNYPQYINHLFRSLSKENLNTLPFINYTVAQDLSTNKST

SEQ ID NO: 242103 - protein, 119 aa, Glycine max
  unsure (1)..(119): unsure at all Xaa locations
  Clone ID: PAT_MRT3847_60647C.1.pep
ALHPDTIFCLTDLVGSVNTLLWEIVTTLRVLCTIYATAFDLMTGYLGMIAPITTGFIVCANILMRGAFYPTIINHTVTFMPCXLSWNWTNQLIYXTVPLIRSXTAGLIYYVGYITHTHE

SEQ ID NO: 242104 - protein, 84 aa, Glycine max
  Clone ID: PAT_MRT3847_60648C.1.pep
NNHMWRVKDIMGKICYIIQGKKGGVLQFVLLMGGNFNMKKIMFFFEDQGEWKVKKVNNCCGSLLGIILIGMFGFFERNSWELSI

SEQ ID NO: 242105 - protein, 86 aa, Glycine max
  Clone ID: PAT_MRT3847_60649C.1.pep
NSLSQAWSPLVGQLQVDRRLSYAQYIECVSPVYTPVWSFASNVGVSVIPRFFRRGTSTSILQSPDRLFFSRVWLICPKGPPWYMVY

SEQ ID NO: 242106 - protein, 63 aa, Glycine max
  Clone ID: PAT_MRT3847_6064C.1.pep
MQGKLSLICYITDYMKPDTETYNWVIQAYTRAESYDRVQDVAVLLGMMVEDHKRIQPNAKTHA

SEQ ID NO: 242107 - protein, 36 aa, Glycine max
  unsure (1)..(36): unsure at all Xaa locations
  Clone ID: PAT_MRT3847_60650C.1.pep
SAAYDTKTYRRQMLIGGNYVLLSTTIYLCYXDYYSA

SEQ ID NO: 242108 - protein, 80 aa, Glycine max
  unsure (1)..(80): unsure at all Xaa locations
  Clone ID: PAT_MRT3847_60651C.1.pep
ILIIIRYWYRRRHHHLKQKNTRQIQPPHCLSLSCLQIPPQQWFIVLLFQPTWEKRTRXQEGGRFFFCPPVKRTEFSSPNA

SEQ ID NO: 242109 - protein, 50 aa, Glycine max
  Clone ID: PAT_MRT3847_60652C.1.pep
LLYTLLNLSISTIDSFLLSLYIPNFTSYKPSTPNKHQTCFHNLKISLLNY

SEQ ID NO: 242110 - protein, 57 aa, Glycine max
  Clone ID: PAT_MRT3847_60653C.1.pep
KKKNHNTHVRDTHQRRLTRIIISPQNVASFTLLLFHLLLFIWSFLCHNLPTKSYLIS

SEQ ID NO: 242111 - protein, 60 aa, Glycine max
  unsure (1)..(60): unsure at all Xaa locations
  Clone ID: PAT_MRT3847_60654C.1.pep
TFKLTASRSIPRSQLANLQFHLLRHGRFLNADQYPXRLRADTPVHLSAQLDYLTPYVTEF

SEQ ID NO: 242112 - protein, 105 aa, Glycine max
  Clone ID: PAT_MRT3847_60655C.1.pep
NKFSAYNKFVEAHSLTLSCAFSFSSSSSPFLKCSLNSSPKRKIISFITASWQELSGVLLFSSIPFTCLKAISNNPLRESLYKKMDERNTFAVKNSSTFNALTVNS

SEQ ID NO: 242113 - protein, 163 aa, Glycine max
  Clone ID: PAT_MRT3847_60656C.1.pep
AASAITPPNVSAANLNGEAGGGPIGVLSTSSPTNTGCKLDEKKSEKKEKKSGLLKLLAGASTKKKSRSPPSVSPTHDPQVAVDALLQGAVGPEVSSLSIHGRAGSCPIESEMQGAMGMEPLHRKAGSLDLNFTSPSRQAPLSMAAIRPEPKLLPRERYRVVVS

SEQ ID NO: 242114 - protein, 52 aa, Glycine max
  Clone ID: PAT_MRT3847_60657C.1.pep
FLRNIVSANCIVGFRSNRPSWACHIRMRSAIARFHDVEGTFPTIDLTWQPCL

SEQ ID NO: 242115 - protein, 680 aa, Glycine max
  Clone ID: PAT_MRT3847_60658C.1.pep
MEKIAALAANTIHTPLLPNNTTLPKTSSFQPFFSNQLLGLPLSSSSSSASSLTAAKRFSCRPIKCSVSEATEPKTEKKRQLLRRGDVRNIAIVAHVDHGKTTLVDAMLKQTKVFRDNQFVQERIMDSNDLERERGITILSKNTSVTYKDAKINIIDTPGHSDFGGEVERILNMVEGILLVVDSVEGPMPQTRFVLKKALEFGHSVVVVVNKIDRPSARPEYVVNSTFELFIELNATDEQCDFQVIYASGIKGQAGLTPENLAEDLGPLFESIIRCIPGPRIDKDGALQMLVTNIEYDEHKGRIAIGRVQAGVLEKGLDVRVCTSDDSCRYGRVTELYVYDKFNRVPANKVEAGDICAVCGITDIQIGETIADKVSGKPLPSIKVEEPTVKMSFSINTSPFVGREGKYVTSRNLRDRLYRELERNLAMKVEDGETADTFVVSGRGTLHITILIENMRREGYEFMVGPPKVINKKVDEKLLEPYEIATVEVPEEHMGAVVELLGKRRGQMFDMQGVGLEGTTLLKYKIPTRGLLGLRNSILTASRGTAILNTVFDSYGPWAGEISTRDQGSLVAFEDGTSTSYAISSSQERGQMFIGPGVDVYKGQIVGIHQRPGDLSLNVCKKKAATNIRSNKEQTVILDTPLDYSLDDCIEYIQEDELVEVTPASIRMSKNPKITNKKTR

SEQ ID NO: 242116 - protein, 23 aa, Glycine max
  Clone ID: PAT_MRT3847_60659C.1.pep
DHITSSATYSKSSGAIIKQNSKS

SEQ ID NO: 242117 - protein, 65 aa, Glycine max
  unsure (1)..(65): unsure at all Xaa locations
  Clone ID: PAT_MRT3847_6065C.1.pep
QLAPMSCLCKGYLDALLIRNGFKDAEYISLALGGTNLXINTVXSVDHAEAVDLSFEMRTKLYFKP

SEQ ID NO: 242118 - protein, 46 aa, Glycine max
  Clone ID: PAT_MRT3847_60660C.1.pep
GASLSSSLTTAPLRKHRSEVFGIYIPSASYDIPLLGRLMIVIGILN

SEQ ID NO: 242119 - protein, 78 aa, Glycine max
  unsure (1)..(78): unsure at all Xaa locations
  Clone ID: PAT_MRT3847_60661C.1.pep
WGVTSPPPALIARFQGPSLSPFGLANCWKGHSFGPSSLXRQLSKGGCVPRGLGWVPPGFSQSRRCKPRAGDLILGAPI

SEQ ID NO: 242120 - protein, 165 aa, Glycine max
  Clone ID: PAT_MRT3847_60662C.1.pep
RNRWHCPHCYCYRNNAGIFGTPFMLSEDNIELQFATNHIGHFLLTNLLLDTMKKTTHESKKQGRIVNVSSQGHQFTYREGILFDKLNDQSSYQAFRAYGQSKLANILHANELARRLKEDGVDITANSLHPGAIATNIHRYNSVLTGNCRIVLLKRKQCLYVTLNR

SEQ ID NO: 242121 - protein, 319 aa, Glycine max
  unsure (1)..(319): unsure at all Xaa locations
  Clone ID: PAT_MRT3847_60663C.1.pep
MWWPFSRKEKEGSGFSSSSTAEEVTEGIDGTALTAIVTGASSGIGAETTRVLAMRGVHVIMGVKNMNAAKNIKETILKXIPSAKVDAMELDLSSMTSVRKFASEFISSSLPLNILINNAGIFGTPFMLSEDNIELQFATNHIGHFLLTNLLLDTMKKTTHESKKQGRIVNVSSQGHQFTYREGILFDKLNDQSSYQAFRAYGQSKLANILHANELARRLKEDGVDITANSLHPGAIATNIHRYNSVLTGLPGVVKKLLSYVVKNVQQGAATTCYVALHPQVRGISGEYFADSNIAKANSQGRDIDLAEKLWDFSMNLTK

SEQ ID NO: 242122 - protein, 48 aa, Glycine max
  Clone ID: PAT_MRT3847_60664C.1.pep
IRRLQSRRFSEPSSRSLKCRDHPIDIIVIEPLLEHHLISLVVRRNLPL

SEQ ID NO: 242123 - protein, 118 aa, Glycine max
  Clone ID: PAT_MRT3847_60665C.1.pep
MLCSLIRIRRHAPFHHTLRSLLPINRFSSSSSSSASAAAAAAMVAHAKDEAYLSAAIPKRVRLFETIQAEQRTQRLSLSPDPIKVTLPDGNVKDAKKWLSTPLDVAREISKNLANSAL

SEQ ID NO: 242124 - protein, 94 aa, Glycine max
  Clone ID: PAT_MRT3847_60666C.1.pep
SGRFFFFFFFFFFPAKDQAVGIMYPDLIKIPFKSHTTNENGKWNQFLGKTNFPKVRGNRIKTFTLKLKLWRWGVPGGQFLPPLILVLKLPLAPN

SEQ ID NO: 242125 - protein, 49 aa, Glycine max
  Clone ID: PAT_MRT3847_60667C.1.pep
MKKVLANGRLALLAILGFIVLHCVTGKGPFYPLFDPLYDPWPSSFLQSI

SEQ ID NO: 242126 - protein, 80 aa, Glycine max
  Clone ID: PAT_MRT3847_60668C.1.pep
MASLAAFGASAYLGMTKMLGNPINLTCATRPATYDYIPAFFKTVTLTSKKKAAPIKKAADAAPAYDELAKTLGPDLMIFL

SEQ ID NO: 242127 - protein, 94 aa, Glycine max
  Clone ID: PAT_MRT3847_60669C.1.pep
THAVEKGWFIIAQTRNGTQVVGSQWRFIAGFNSIIFLLAKVKFGSNENGKDLLVEKVAQNIPPRMNLHSKLIDKNGQIKKGYVFNLRPVNTIVL

SEQ ID NO: 242128 - protein, 161 aa, Glycine max
  unsure (1)..(161): unsure at all Xaa locations
  Clone ID: PAT_MRT3847_6066C.1.pep
FYPQYNEVQAQMETNLNNSPLDDVETPKGSMLDLKICQSKRALSKNTGGGTFLRSDLLANFLTEGNYRASDDLHPTHRIKGMNKMVATGGIPENTGIAWACAMNSSFRGRASYDIYTMCYQDCELWNSAXTRAITMXLNPNPCAVAWSMEILKLTGFHCDI

SEQ ID NO: 242129 - protein, 68 aa, Glycine max
  Clone ID: PAT_MRT3847_60670C.1.pep
WICDLSLQYRSGNPDLKDMTKVQSSECNAWLLYSPGSPVIISCCTCEVNGNKKYKDGGNQEKLSLLGA

SEQ ID NO: 242130 - protein, 69 aa, Glycine max
  Clone ID: PAT_MRT3847_60671C.1.pep
GGGSHFALYLEGDLLNGSSSVSETYGNPCLAHSQEFEVKEVELWGFVFPSKYEEIVELSRTEAPGICRW

SEQ ID NO: 242131 - protein, 44 aa, Glycine max
  Clone ID: PAT_MRT3847_60672C.1.pep
ERNPTAPIPHAGNKDVSDRSLSISKRIRTLPYLEPGLRTLTLII

SEQ ID NO: 242132 - protein, 88 aa, Glycine max
  Clone ID: PAT_MRT3847_60673C.1.pep
ESRRTSKPTMQARSTISSAHCDPISISFCSPNISWPSLCQKRYKEEYSNVNVKDFCCPKEKKVTHAFSKLLISHSITKFLYACRCAVR

SEQ ID NO: 242133 - protein, 97 aa, Glycine max
  Clone ID: PAT_MRT3847_60674C.1.pep
APGRTRGRTRGRTRGRTRGFTTQKVTSYSWHFTTPTTTQYTAYNLYSSLPTITLICYYRSRRHSLTLIHCRNHKEKKRKRNECAQHHRHPPPLSMID

SEQ ID NO: 242134 - protein, 77 aa, Glycine max
  Clone ID: PAT_MRT3847_60675C.1.pep
KKKKKKKKKKKKKKKKKKKKKKKKKKKKGGRHLLGRPPPFILFAPVFYSVPVPPGVPAFPFGSLFRPWRFLGHSFFL

SEQ ID NO: 242135 - protein, 50 aa, Glycine max
  Clone ID: PAT_MRT3847_60676C.1.pep
LKCQIKFLKKKKLIFRFTFHSSLQLKDKLLCYLIYCCLIFTEQVLSLIDS

SEQ ID NO: 242136 - protein, 75 aa, Glycine max
  Clone ID: PAT_MRT3847_60677C.1.pep
ASSSYVIIISRSLLLLSANYQVYLFSLNMFFFPLLCHTPPPSLWRGLGPNIYSIIVTPHSYTFIISYINTIFLHY

SEQ ID NO: 242137 - protein, 38 aa, Glycine max
  Clone ID: PAT_MRT3847_60678C.1.pep
MAGLAPEGSQFDARQNDTKMNELLTSDGQDLFTSYDEV

SEQ ID NO: 242138 - protein, 103 aa, Glycine max
  Clone ID: PAT_MRT3847_60679C.1.pep
FLIPGLWLFFLGWRGCFSVGPFWALISLGGGLGPFFFLFPGFFFSHQNLFKIEKFGLHEIPKMTPFLPGSGGVVFTPPLIRNLLVCGSSSKGALPLGIKFRLC

SEQ ID NO: 242139 - protein, 119 aa, Glycine max
  unsure (1)..(119): unsure at all Xaa locations
  Clone ID: PAT_MRT3847_6067C.1.pep
ADQGSGGFRTLIQLLPVLXVLLLNFCASSEPIYALSRSYPYEFQFTTQKGVNFFVKSTNFEEKYPPGSPDRIAIDRHIERDYFNILAQNCRVEMQRQQWGFIRETPYCDMLQKFQTAAS

SEQ ID NO: 242140 - protein, 44 aa, Glycine max
  Clone ID: PAT_MRT3847_60680C.1.pep
DGLPKWFCWSTRCSQLASGFTIGDPIRHIPGCVSVYVILGPLES

SEQ ID NO: 242141 - protein, 38 aa, Glycine max
  Clone ID: PAT_MRT3847_60681C.1.pep
SPRQIMSSFLKKRFPRGCTYKLDFNCWVMAPSHASLNV

SEQ ID NO: 242142 - protein, 168 aa, Glycine max
  unsure (1)..(168): unsure at all Xaa locations
  Clone ID: PAT_MRT3847_60682C.1.pep
DDSTRHVVRALLRNCSYEVTAVSNGLQAWKXLEDPENGIDLVLTEVAMPILSGIGLLCKIMSHKTLKNIPVIMMSSHDSMGIVFKCLSKGAVDFLVKPIRRNELKNLWQHVWRRCHSSSGSGSESATHTRKFAKSKKXDACENNSDSSDENDYGSRNLSVRDGKWHSV

SEQ ID NO: 242143 - protein, 85 aa, Glycine max
  Clone ID: PAT_MRT3847_60683C.1.pep
QKTTQRANQKALRIHNQPLKQKWVLGHIQPPLVKITRPTITNFAKVLNLDNKNFKEITFEGLPNLNLKLKNWVQPPKWVPLVDFF

SEQ ID NO: 242144 - protein, 238 aa, Glycine max
  Clone ID: PAT_MRT3847_60684C.1.pep
MGSSEEVVGKEEVIAKLKDDGDFDRLRLKIVRKLKDNEELRQHITSIVKQSVALNRAGAENMKPRQLSDAIHEEVGDKVMSQISDSLWQIIRSGDDMKSEIMETVQSVYDKLANPKGKDEVMMSMSDVMPIHRQGETASATEIDDTLHENEPDEPPGFTLLHNHLNNNYHEEQDKGKVQVQKQGFTAEQKEDSHPSQDTLGEDDVNSNAPPPGFSMDVEQKPSSDCSDEDPDVPPGFG

SEQ ID NO: 242145 - protein, 86 aa, Glycine max
  Clone ID: PAT_MRT3847_60685C.1.pep
LSQALFYNTVLGSNPRNKHPVLCCPLIPALVHKNHINVTATKATLLVMHILCLIRRGLFSMLLPLFETPPNLTHYRRANDSLSYHG

SEQ ID NO: 242146 - protein, 63 aa, Glycine max
  Clone ID: PAT_MRT3847_60686C.1.pep
HSLCTCCRSPDGVPSWARSAHQYNMMNISASLFDRSQPCVAASTSFDSARTTHFAEQGVRSTQ

SEQ ID NO: 242147 - protein, 75 aa, Glycine max
  Clone ID: PAT_MRT3847_60687C.1.pep
MALGTKRKLKSTYMSPFAFERAFFLLRVYIFLVLFTVLGSDSSWMTCLASIPFSFLKTFQVYRMSKHGRGKKILM

SEQ ID NO: 242148 - protein, 53 aa, Glycine max
  Clone ID: PAT_MRT3847_60688C.1.pep
HADDYQDSYPISMVTHIPALTMDIVTITAHNHNNNYSSKSRLNVRIIESLQIS

SEQ ID NO: 242149 - protein, 463 aa, Glycine max
  unsure (1)..(463): unsure at all Xaa locations
  Clone ID: PAT_MRT3847_60689C.1.pep
MDCSNELEMQEPSIETDKLSYEIFSILESKFLFGYDDPKLEVPQANXPKPESHTPAVTAAVDCVSTVKNQRGKICILAIDGGGMRGILAGKALAYLEAALKKKSGEQNATIADYFDVAAGAGVGGIFTAMLFSTKDHRRPIFSADDTWRFLAEKGNKFYRAGGSASNRGLLKRLLSSGGSGSVSSATAGLEKAVKEAFTAENGGGSLTLKDTLKPVLIPCYDLSSTAPFLFSRADALETDSFDFRLWEVCRATSAEPGLFEPVQMRSVDGQTKCVAVDGGLAMSNPTGAAITHVLHNKQEFPFVRGVEDLLVLSLGTGQLLEVSYDFDRVKRWKAKDWARPMARISADGSSDLVDQAIAMAFGQCRSTNYVRIQANGSSMGRCGPNVDTDSSPGNVKMLVGIAEEMLKQENVESVLFGGKRIGEQSNFEKLDWFAGELVQEHQRRSCRIAPTVAFKQATPKAT

SEQ ID NO: 242150 - protein, 103 aa, Glycine max
  Clone ID: PAT_MRT3847_6068C.1.pep
STVPVLQKVFVTTLTILFLGILGYATPCFSSYNTHFVVYPFNPVNLLSSPTVPAPRAGPASSATASTRHRRKSPSSATKMRDSRSWRPRTSTTSSRTSLATAG

SEQ ID NO: 242151 - protein, 79 aa, Glycine max
  Clone ID: PAT_MRT3847_60690C.1.pep
MELHNIETALSNERDQHINEVKKLTAMLNEKEAALEEMKKELKARPTEKMVDDLRKKVKILQAVGYNSIEAEDWEVATV

SEQ ID NO: 242152 - protein, 53 aa, Glycine max
  Clone ID: PAT_MRT3847_60691C.1.pep
QIPLVEDAIIPPFSNAPHNRTPKNKTSLYLALIPTMKAVLPHMIRNTTWKHCY

SEQ ID NO: 242153 - protein, 215 aa, Glycine max
  unsure (1)..(215): unsure at all Xaa locations
  Clone ID: PAT_MRT3847_60692C.1.pep
MSTVAIFLIFLLLLSRSKASSNIGVNYGQLGNNLPSPHRSIELLTTMKAGRVKIYDANPEILRLLSNTKLKVSIMIPNNEISGIAANQSIADEWVRNNVLPYYPNTMIRYLLMGNEVLSYNSEQGHQMWRDLVPAMRSIERSLRAQNIXDIKIGTPLAMDVLQSTFPPSSSAFRSDIRDSVMVPMLKFLDQTKSFFFIGVYPYFPWSMNSYNISL

SEQ ID NO: 242154 - protein, 60 aa, Glycine max
  Clone ID: PAT_MRT3847_60693C.1.pep
VHKCVLSSTAVVLMYHNNVLQFQHKEQLLVQNYPTRRAVLASGAILVVVLASPSVVFSQP

SEQ ID NO: 242155 - protein, 77 aa, Glycine max
  unsure (1)..(77): unsure at all Xaa locations
  Clone ID: PAT_MRT3847_60694C.1.pep
MLCYFHNALREQRFGREVTIQYNLCNEPWIKYRISTGADKGLKKALYTSPPLKXGEVLYLETHLCRYELCFTGEKML

SEQ ID NO: 242156 - protein, 80 aa, Glycine max
  unsure (1)..(80): unsure at all Xaa locations
  Clone ID: PAT_MRT3847_60695C.1.pep
VCFGVSLLGPLCAGGFSSAGGFFGWFFCWAFVSRALLLSRRLGCSFPAPLSVXXXPLVVVVVVLGSFSRPGGGPSSLSNY

SEQ ID NO: 242157 - protein, 61 aa, Glycine max
  Clone ID: PAT_MRT3847_60696C.1.pep
KIKVLMLLFKLHTPKFHQITQSYKYHIPLITYKKPSPQHQNNNILYIIKHIIAPSQPQNIK

SEQ ID NO: 242158 - protein, 42 aa, Glycine max
  Clone ID: PAT_MRT3847_60697C.1.pep
HFLYFSVFSWSYFFLVVFFSIFFLLLVMRDAIVYDTLSKHIV

SEQ ID NO: 242159 - protein, 62 aa, Glycine max
  Clone ID: PAT_MRT3847_60698C.1.pep
CKKSRRRLMVKLRLVPCSHFGKSTDPPPYVPNPGRSCSKIKLFFPNEEFTLIYKIWKLFPCS

SEQ ID NO: 242160 - protein, 59 aa, Glycine max
  unsure (1)..(59): unsure at all Xaa locations
  Clone ID: PAT_MRT3847_60699C.1.pep
SXIXXIQXFPENFXNQKEMXDNKASXXVNSIINKKWELVLHXFDTXRPIQLNCXLIQFQ

SEQ ID NO: 242161 - protein, 179 aa, Glycine max
  Clone ID: PAT_MRT3847_6069C.1.pep
ERKKERKMLEEQPVVLFRKSPSRRRLRSAFATDDRGWTSLHVFARKGDLKLVKKLLNEGMDVNVSAWGPKSKGVTPLHLAAEGGHIGVMDVLLECGADIDARTKGACGWTPLHIAAKERRRDAVKFLIENGAFMPPDISDSRFNPPLHYCPGLEWAYEEMKRLRQEDLSAGETCYSSES

SEQ ID NO: 242162 - protein, 79 aa, Glycine max
  Clone ID: PAT_MRT3847_606C.1.pep
QKTRVGFNSPYKIQNNCIFWPTTYRGDSLNKKNPNPFLPVPVVLKEWAFFQQTGDKPKIRHSVDRFKHHIGFQIPFLKN

SEQ ID NO: 242163 - protein, 68 aa, Glycine max
  Clone ID: PAT_MRT3847_60700C.1.pep
TLSNSPGISKGKKFRTNFQFTIFHQKGPTHPEKNPPDTGFVQIPPFTPAQRPARRLKRGPHRGTRGIR

SEQ ID NO: 242164 - protein, 83 aa, Glycine max
  Clone ID: PAT_MRT3847_60701C.1.pep
TYNINNYIFSPHSQIHSSHVIATLLMKSSQKATDLAYLLVLLLLIVYKDGDNITSTSNSSNNSQKRNREIARTRRRDADPDPP

SEQ ID NO: 242165 - protein, 66 aa, Glycine max
  Clone ID: PAT_MRT3847_60702C.1.pep
VHVIHNVVFVYCSASRDINFGWIRVVRCMLRIVIFSKCAVMAFNSASERVMIQKCVDSQFCVRCQI

SEQ ID NO: 242166 - protein, 156 aa, Glycine max
  Clone ID: PAT_MRT3847_60703C.1.pep
MAQRSKSFRFRIPWLSVPSESFARRTRERPKSPPHSDTSVPIHRPSKPSVIAPSELSPLSPTKTEEAPRAEPQKESPPHPTPPPSTSESIESPVKVQPKPKPLSPQPPLRPSSHADSPSQVHVAPSSPKTHLASDNGAMKVPKLVAEETTPPASSF

SEQ ID NO: 242167 - protein, 71 aa, Glycine max
  Clone ID: PAT_MRT3847_60704C.1.pep
VRKLHQLLLFISNQSTHTAIIGTYAYPRYFGSEANNELKRTSLHIYALAIRPPHGKLDPLHFLFSPFLPFL

SEQ ID NO: 242168 - protein, 110 aa, Glycine max
  unsure (1)..(110): unsure at all Xaa locations
  Clone ID: PAT_MRT3847_60705C.1.pep
XXXXXXXXXVXAXXGXXARLGVGGXWXXXAVXXRGXXXXXGXGAGGGXXRXXXGXXGGXGSXGXXXGFXGXVGARXAXVXXLXXGLXLFXXXXRSXXXXLXXAXXXRVXX

SEQ ID NO: 242169 - protein, 43 aa, Glycine max
  Clone ID: PAT_MRT3847_60706C.1.pep
VKNVHNLWVTYQSYLFDNTSDSYLVIRIYFTYHIAWGYGMIQS

SEQ ID NO: 242170 - protein, 54 aa, Glycine max
  Clone ID: PAT_MRT3847_60707C.1.pep
MADSVISIQYLKDFVNSQIYDDEKWAFNAKLLRAAGLFAGSILLMRNYGDLMAI

SEQ ID NO: 242171 - protein, 76 aa, Glycine max
  Clone ID: PAT_MRT3847_60708C.1.pep
FIRTPAFFFFAFGFIFGLFFFLFFNFFFFPFKCNIFIIINILFKVLSSTFIRIITPEQRYRGCLFYTRRVVVRVGR

SEQ ID NO: 242172 - protein, 45 aa, Glycine max
  Clone ID: PAT_MRT3847_60709C.1.pep
LEDPLTEKAQLLSSFCSLTISSRNKPYLKPFNNCSTLYFYHVSLQ

SEQ ID NO: 242173 - protein, 172 aa, Glycine max
  Clone ID: PAT_MRT3847_6070C.1.pep
MLEEQPVVLFRKSPSRRRLRSAFDTDDRGWTSLHVFARKGELKLVKKLINEGMDVNVSAWGPKSKGVTPLHLAAEGGHIGVMDVLLERGADIDARTKGACGWTPLHIAAKERRRDAVKFLLENGAFMPPDISDSRFNPPLHYCPGLEWAYEEMKRLRQEDLSAGETSYSSES

SEQ ID NO: 242174 - protein, 94 aa, Glycine max
  unsure (1)..(94): unsure at all Xaa locations
  Clone ID: PAT_MRT3847_60710C.1.pep
PTHYPTPWSVASTAGETTKRGNYNXTRGGTHATPHEKKEGRGQGRGYIIAEGNKAPYRGLGIGTKLTNHGLDPCSKQNMDDGYXHGQTNNQAAI

SEQ ID NO: 242175 - protein, 134 aa, Glycine max
  Clone ID: PAT_MRT3847_60711C.1.pep
PGWEKTPPGGEKPPRVKKHHGGKGPRGGRPPGYRPPGGKGPRFKAPREKPPGIKPPGGKPPGGKPPEKKPPGFKPPGREPPGFKPPGGEPPIFKPPGEKPPGFKPPNGKPPNPRGPPTGGPPFLRRAKGGLGKS

SEQ ID NO: 242176 - protein, 51 aa, Glycine max
  unsure (1)..(51): unsure at all Xaa locations
  Clone ID: PAT_MRT3847_60712C.1.pep
FIGQIAKLCGGGGGGRPNFAQAXGGRKPENLASALDKARSELIATLCEKGN

SEQ ID NO: 242177 - protein, 88 aa, Glycine max
  unsure (1)..(88): unsure at all Xaa locations
  Clone ID: PAT_MRT3847_60713C.1.pep
MDSVPFRDGNIHTILDSRYLHSPLDVNHSLHTHSSLIRRLSQERELEGHTGCVNAVAWNSKGSLLISGSDDQRINIWSYSGXKLLHSI

SEQ ID NO: 242178 - protein, 390 aa, Glycine max
  unsure (1)..(390): unsure at all Xaa locations
  Clone ID: PAT_MRT3847_60714C.1.pep
RLEGDHGYLYISKGENQPKAVVEILDVQKSFGNIFVHKGTVQKGVVEVGKEVEAAVDVKLRQRAKVHHTATHLLQAALKKVIGQETSQAGSLVAFDRLRFDFNFHRPLRDSELAEIEVLINGWIFCSSXGRKPENLASALDKARSELIATLCEKXELNXVHLADRSFYAKAAENIDSLLSKNSSQNNSQAKGAEAAEVLTSXGEASIEYINARDFYLKQLCSTLKVKXEEVTTRIENLLEELRAVRNENSAVHAKAXAIYKASVIASKVMLVGNSKQYRVLVECFDDADAESLKSAAEYLLETLTDPAAVVLGSCPGEGKVSLVAAFTPGVVDQGIQAGKFIGQIAKLCGGGGGGRPNFAQAGGRKPENLASALDKARSELIATLCEKGN

SEQ ID NO: 242179 - protein, 94 aa, Glycine max
  unsure (1)..(94): unsure at all Xaa locations
  Clone ID: PAT_MRT3847_60715C.1.pep
AKTICYVPSALSVFMVKKEGNPLEEGGTYYDLKDITRXGGIRALQTGGERSQMTVVQCIHELDIRRGALTSYPHLIIVFVISHSLRLNQTHIGS

SEQ ID NO: 242180 - protein, 49 aa, Glycine max
  unsure (1)..(49): unsure at all Xaa locations
  Clone ID: PAT_MRT3847_60716C.1.pep
SXLXTXMVFLPTPXRRSRAXXKSPDXRRXPLXSSPQEIYXWXWXXSFXF

SEQ ID NO: 242181 - protein, 64 aa, Glycine max
  Clone ID: PAT_MRT3847_60717C.1.pep
HYVRTWIDLSPLRQPLFFFCVFCCFSVFTCFFFFFSLLVFLILVFPSPFCHLLTTIKHINQPKG

SEQ ID NO: 242182 - protein, 62 aa, Glycine max
  Clone ID: PAT_MRT3847_60718C.1.pep
QNIVVPLPPALDSGVAFMTVMLYFSLGLENKSLNWWGNDGEHCPLAACPTAKGIIVDGCPAN

SEQ ID NO: 242183 - protein, 82 aa, Glycine max
  unsure (1)..(82): unsure at all Xaa locations
  Clone ID: PAT_MRT3847_60719C.1.pep
AAVCYLSPLIVFQVLGHELCXXXKLXXXXXXXXXXXXXXXXXXXKGKPILKXVLFXNINXHLGILMLRCKPIFNIVFYYINF

SEQ ID NO: 242184 - protein, 52 aa, Glycine max
  Clone ID: PAT_MRT3847_6071C.1.pep
LFKGVKSVQGSRIVLAVPVLKKQERFDGASFCGISTLSPSSTLGADERVSSV

SEQ ID NO: 242185 - protein, 80 aa, Glycine max
  unsure (1)..(80): unsure at all Xaa locations
  Clone ID: PAT_MRT3847_60720C.1.pep
SGSNMGMGAYLIATTIAATMSSPDMAXWMMRLRTERTWLPLGLSINLIDXILQGVXNLIWALYFDYASTLEKDEETGLCV

SEQ ID NO: 242186 - protein, 58 aa, Glycine max
  Clone ID: PAT_MRT3847_60721C.1.pep
NKFSSVHLLVIRMIQVRTQKKGHLINLDALNIHPYATILSHQFLRTKPLLAPYPFCRL

SEQ ID NO: 242187 - protein, 45 aa, Glycine max
  Clone ID: PAT_MRT3847_60722C.1.pep
SPSNSFGILANGTAAGCKLLLSDVARPWHSVIMSLLTDVVGHINN

SEQ ID NO: 242188 - protein, 88 aa, Glycine max
  Clone ID: PAT_MRT3847_60723C.1.pep
GITHASLFRVSLGLFHYHLSDRNILLTADLTGPLSDPAMKLKGPEVRLLNQIQHSRKRLCYYLRHTWCSLGMDFHTTSSEHAFTSSRL

SEQ ID NO: 242189 - protein, 59 aa, Glycine max
  Clone ID: PAT_MRT3847_60724C.1.pep
AAFFPISVKSSSTVSNKLPPLNLVSSSPSDDSAAIFEPYFSLFSFSPAPDLISSFDYFL

SEQ ID NO: 242190 - protein, 61 aa, Glycine max
  Clone ID: PAT_MRT3847_60725C.1.pep
HTRAPSYLAEVSKFRTLLILRGLNFWQLRPKPSSFTILSSSTFLLLSSSIVLLTITYHLNI

SEQ ID NO: 242191 - protein, 84 aa, Glycine max
  Clone ID: PAT_MRT3847_60726C.1.pep
VNLIPRPRENLEGKNMIFFLVKRARLPSLEPVGQILFPTLGIKKALFGKVFGPLVGQKPPPKKKKGGFSPRKIWDLKKKKLFGI

SEQ ID NO: 242192 - protein, 69 aa, Glycine max
  Clone ID: PAT_MRT3847_60727C.1.pep
YRRGTYKGSPHNEQANLFYFLFYFLIRQNTNRRTSVGCSFCTPGIATGTSKHTSLMQETYCSHDKNHII

SEQ ID NO: 242193 - protein, 95 aa, Glycine max
  Clone ID: PAT_MRT3847_60728C.1.pep
YQTSGQKMPSHNYDPVPCPYVHLVWMLTEHILQHTLPNGKMIFTKTQLKCVRRQMTVHIHKLEMLIGERGNGGQNGWIHGKFSLCTDYIQNLLLP

SEQ ID NO: 242194 - protein, 87 aa, Glycine max
  Clone ID: PAT_MRT3847_60729C.1.pep
NSIPKVNKDRILVACIHASVALFLSSAGSLGNVQSEILLRKDKSTFTFDKGWAFPRRIYFNGDNCVMPPPDAYPWLPNASSKLVFSL

SEQ ID NO: 242195 - protein, 48 aa, Glycine max
  Clone ID: PAT_MRT3847_6072C.1.pep
VISTIIRKDNKYKSNQKFVKPIHLYYSYYTLAEHPMKMKFEMKHAIQS

SEQ ID NO: 242196 - protein, 101 aa, Glycine max
  Clone ID: PAT_MRT3847_60730C.1.pep
PTWTTTRARYNSRLDPTIFHSTSKTIIFTYLHPQTHQNLNYYILYKPVTTTGTLHILKHQHDPKTNEIDKELKSEQGTQRLIIYEKKAIYRQRPLLLSKTL

SEQ ID NO: 242197 - protein, 106 aa, Glycine max
  unsure (1)..(106): unsure at all Xaa locations
  Clone ID: PAT_MRT3847_60731C.1.pep
GLPPGCAPPFRPGLPLWPRGCCPPRAPRSPAAXFSALXRPPPRPARWGGPAPLSASLRCFXCCRLAWXRGSXVRFCVRCCLAPGLVVSRPPPGXCFGSGSXRSRRV

SEQ ID NO: 242198 - protein, 114 aa, Glycine max
  unsure (1)..(114): unsure at all Xaa locations
  Clone ID: PAT_MRT3847_60732C.1.pep
CETTFKRSRASMVAPFTXLKSMDGLPHYEXTNNDITSIANNGERVQCMLLCAPIDNNEVQTLSYLPXLDDAQLGKEGXYLLRKGWIPCLEFELXHGFMYREHNRSPGXYYDGRY

SEQ ID NO: 242199 - protein, 89 aa, Glycine max
  unsure (1)..(89): unsure at all Xaa locations
  Clone ID: PAT_MRT3847_60733C.1.pep
ILLFLLXPVXNVFPVNLELKTLPPSYPHPHPVHSPTPAPLHPPANASNPHHHHHHHHPSAPAPVPSPSHHNYPPTPAPAKPPTHHHHHH

SEQ ID NO: 242200 - protein, 104 aa, Glycine max
  Clone ID: PAT_MRT3847_60734C.1.pep
TQLEGETVWTDAGGYARGSTATPNGVKGTFPNPGVQEDPSWGPLLDAPAIKENHPPMPTQDNLVKNPGFEEGPFPIFNSTNGVLLPPQQQEGLSPPPGWIIESP

SEQ ID NO: 242201 - protein, 334 aa, Glycine max
  unsure (1)..(334): unsure at all Xaa locations
  Clone ID: PAT_MRT3847_60735C.1.pep
LVCLLLAGSLAHNSWVTTISWLLFAFDSSNPQILLASGSSDGSVKIWLADNDKLLKSSKVDQTSFSLLKEXSVLSVTTHVQYPSKMLLATGKVSGSFEIWLCDISSGEFDKLGSYNAHDLVVSFLTSVYFXFFWVILGKKGFIXSWILHVFQFDKVTRLTDMPHDSSICISREAFDSCFGVAVSPGNLVIATVHCLDVEKLNRMYEGRILRAAIEYFWIGGLQVDVQLKSPFSCYIEGNSSYVEKELTYWGTNIIWSLNQYQCHDKPLVLWDIIAALSAFKDNNLKYAEHLLIEWISSSFLQLDMDLSPEKVXSFFSSSLSDIPSRLLHLLNII

SEQ ID NO: 242202 - protein, 247 aa, Glycine max
  unsure (1)..(247): unsure at all Xaa locations
  Clone ID: PAT_MRT3847_60736C.1.pep
MAAYKLVLIRHGESAWNLENRFSGWYDADXSAGHEEAKRGGQALRDAGYEFDICFTSVQKRAIRTLWTVLDAIDQMWLPVVRTWRLNERHYGGLTGLNKAETAAKHGEAQVKIWRRSYDVPPPPMEPDHPFYSNISKDRRYADLTEDQLPSCESLKDTIARALPFWNEEIVPQIKEGKRVLIAAHGNSLRGIVKHLEGLSEEAIMELNLPTGIPIVYELDKNLKPIKPMQFLGDEETVRXAMGAVAA

SEQ ID NO: 242203 - protein, 83 aa, Glycine max
  Clone ID: PAT_MRT3847_60737C.1.pep
RLREDDRRALSTVYAINNFTHCTTLFSPLLSFFNFVSLLLSSIQPFFSILRKVINVLPPFPSSLHFPTFLTIQLFFSFLIVFI

SEQ ID NO: 242204 - protein, 99 aa, Glycine max
  unsure (1)..(99): unsure at all Xaa locations
  Clone ID: PAT_MRT3847_60738C.1.pep
SSMASQLKSTFTKTLVASKGXSGFSPLHLLASKKQFNFTGKAIPSEKPTYSVIQPINRDPFIGSLETPVTFNPLDGLYLLNLPAYRTAVNPLLRRIXVG

SEQ ID NO: 242205 - protein, 46 aa, Glycine max
  Clone ID: PAT_MRT3847_60739C.1.pep
QPNKISKTNLNTRLLLYTFTSYLPSTTSHNLLYININPIQNYYIYY

SEQ ID NO: 242206 - protein, 208 aa, Glycine max
  unsure (1)..(208): unsure at all Xaa locations
  Clone ID: PAT_MRT3847_6073C.1.pep
MLPFSTLFQTPLTTEYWYNHPTTTLLAFLLISLVTCYAWLKPKAQRLPPGPSGLPFFGNLLSLDPDLHTYFAVLAQIHGPIFKLQLGSKLCIVLTSPPMARAVLKENDTVFANRDVPAAGRAASYGGSDIVWTPYGPEWRMLRKVCVAKMLSHATLDTVYDLRREEVRXTVSYLHDRVGSAVNIGEQVFLTVINVITNMLWGGVVERA

SEQ ID NO: 242207 - protein, 72 aa, Glycine max
  Clone ID: PAT_MRT3847_60740C.1.pep
CVNQTFDSSIYTPRALYLTHCVDYLHCETSILYDRVHTLHTRQTEKGVSGFQMNHLKGEASSVAYITAAAPI

SEQ ID NO: 242208 - protein, 162 aa, Glycine max
  unsure (1)..(162): unsure at all Xaa locations
  Clone ID: PAT_MRT3847_60741C.1.pep
SRQKSYQNKKRKDLEFEVGDHVFLRVTPWTRVGHALKSXKLTPHFIGPFQILKRVGPVAYQIALPPSLSNLHNVFHVSQLCKYIHDPSHVIEMDDIQVKENLTYESLPLRIEDRXTKHLRGKEIPLVKXVISGGASGEDAMWELESQMRAAYPSLFESDKFR

SEQ ID NO: 242209 - protein, 172 aa, Glycine max
  Clone ID: PAT_MRT3847_60742C.1.pep
MDHDKTGCQAPPEGPILCINNCGFFGSAATLSMCSKCHKDMMLKQEQAKLVASSIGNIMNGSSSSSGNEPVVATSVDVSVNSVESKIISAQPLVASGSDESDEAKPKDGPKRCSNCNKRVGLTGFNCRCGNLFCSEHRYSDKHNCPFDYRTAARDAIAKANPTVKAEKLVKI

SEQ ID NO: 242210 - protein, 172 aa, Glycine max
  Clone ID: PAT_MRT3847_60743C.1.pep
MDHDKTGCEAPPEGPILCITNCGFFGSAATMNMCSKCHKDMMLKQEQAGLVASSIGNIMNGSSSSSGNEPAIATSVDVSVNSIEPKIIPAQPLGASGSEESDEAKPKDGPNRCSNCNKRVGLTGFNCRCGNLFCSVHRYSDKHNCPFDYHTAARDAIAKANPAVKVEKLDKI

SEQ ID NO: 242211 - protein, 358 aa, Glycine max
  unsure (1)..(358): unsure at all Xaa locations
  Clone ID: PAT_MRT3847_60744C.1.pep
MGCIASKSAAVEDSREGVAREFTSSSKRAASKMKASVLNSEKRIADAWADAWVLDGADMKVSLIDKGSSGSMRSSNNKNGKKKKEKPELAVLDHPGLGRVPKGLEGEQVAAGWPTWFSSVAGEAVQGWIPRKADTFERFHKIGQGTYSTVYKARDLTDQKIVALKRVRFDNCDAESVKFMAREILVLRRLDHPNVIKLEGLITSKTSRSLYLVFEYMEHDLTGLASSASIKFSXPQGKCYMQQLLSGLDHCHSRGVLHRDIKGSNLLIDNNGILKIADFGLANFIDPHHKVPLTSRVVTLWYRPPELLLGASNYGVAVDLWSTGCILGELYRSRPILPGKTEVCSMLLQNLVFIIYSQ

SEQ ID NO: 242212 - protein, 109 aa, Glycine max
  Clone ID: PAT_MRT3847_60745C.1.pep
AVGYCSPVTHPHHPLVHQQHWPPHQVTRRLTWRGRVHWPTVPTVPPHRQQHNYINKARLVIGVTYCVHLVRDISDLPQLHSTLQPLGGGSGRPGFHVYGTLVHWLAIRS

SEQ ID NO: 242213 - protein, 108 aa, Glycine max
  Clone ID: PAT_MRT3847_60746C.1.pep
NMKKQKRKHKSKYLLLNKSGDNFLCHAQYHSKVKIHINLAKPHQHNGKQLANPSGLIFNSYPAQPPAPPLLCINHQTIDQKKKVLNQLLVLCCSACAHVVHQYTSNAA

SEQ ID NO: 242214 - protein, 65 aa, Glycine max
  Clone ID: PAT_MRT3847_60747C.1.pep
VGGRLAPFASLRFCFRFKFSVEQALGVVLAVARPCHPMAESKGLTCPYLVSEGRRRSQGRQFALA

SEQ ID NO: 242215 - protein, 90 aa, Glycine max
  unsure (1)..(90): unsure at all Xaa locations
  Clone ID: PAT_MRT3847_60748C.1.pep
XXAXXRKXEXXXXRKPXXLXVESXLDXPKXXXIXPXQXIXXQXXXXXXFXXXMXHXXGXXXXVEXVRWXXGGGXGXEGXXXXRXXXXXPX

SEQ ID NO: 242216 - protein, 62 aa, Glycine max
  Clone ID: PAT_MRT3847_60749C.1.pep
QPRGFYLRNIGPLHTFKHPNSFHTKIFSTNCPTEPIKSTIRHYKTYHDKIPQALYTRILPSL

SEQ ID NO: 242217 - protein, 64 aa, Glycine max
  unsure (1)..(64): unsure at all Xaa locations
  Clone ID: PAT_MRT3847_6074C.1.pep
SVPGXGKVAVPALSRRNGSLSQCLKAGXRXRXRXIAPPQRSSFXXKXXDLDPCSSDSLXFXGPL

SEQ ID NO: 242218 - protein, 67 aa, Glycine max
  Clone ID: PAT_MRT3847_60750C.1.pep
DFLVSTIHELTCTIAYFSPTHTSIYIQNFNLLFLFYFIYHIALPNFFQLSYFLVTSLIIILGIQNIF

SEQ ID NO: 242219 - protein, 35 aa, Glycine max
  Clone ID: PAT_MRT3847_60751C.1.pep
VTVTLMYSHAVVPPCTINDQFFPLIYTMCKIMSLG

SEQ ID NO: 242220 - protein, 31 aa, Glycine max
  unsure (1)..(31): unsure at all Xaa locations
  Clone ID: PAT_MRT3847_60752C.1.pep
FFTQIGIDLLFCRRKSIPICVKIYDXXIXKF

SEQ ID NO: 242221 - protein, 100 aa, Glycine max
  Clone ID: PAT_MRT3847_60753C.1.pep
SSTSVGVGALSSGNNNNNNLSNATNSSTEWAQRTGTITNNDCDHGGGGALSGTINYSDTNGKVHYSASSSDFHGEKGPDFTVTATRTQGMVESWINCSSD

SEQ ID NO: 242222 - protein, 50 aa, Glycine max
  Clone ID: PAT_MRT3847_60754C.1.pep
MWRARVRVRSSLETAESTKTVTHVTDDNKDTSWPIDKAAMDKTVGLDMYT

SEQ ID NO: 242223 - protein, 86 aa, Glycine max
  Clone ID: PAT_MRT3847_60755C.1.pep
YDDAYPAVNHSISSHVSVCTPRGSNGHSGHNAMDDPRFRGARGTSRMMYEEIADVHSDGSSFQIAMTLAIGISVGWMYDFSASLAN

SEQ ID NO: 242224 - protein, 86 aa, Glycine max
  Clone ID: PAT_MRT3847_60756C.1.pep
RGMNRFLNERNLLTENLRAESIEETPYPMERESRNRKKRHTTRLIDSIPQKKHKSKHSKKKKKLLMEKPGGAALGNYTRRSVVFGS

SEQ ID NO: 242225 - protein, 57 aa, Glycine max
  Clone ID: PAT_MRT3847_60757C.1.pep
FVSMRVMQCFIVQMKHHSLFVFDLWKLVQHFIFIFYGLIYEGLNHCCWMPRGSVMKA

SEQ ID NO: 242226 - protein, 51 aa, Glycine max
  Clone ID: PAT_MRT3847_60758C.1.pep
IPRSLPRAPISSPSPSLSRTTTTPSSSHGRFFSLISLFLFSLSDLFSRINN

SEQ ID NO: 242227 - protein, 57 aa, Glycine max
  Clone ID: PAT_MRT3847_60759C.1.pep
IRGYFPYLCHLNYMYNFCIILKDHTIHVTIFQLTIFHLPSNPKQGLNFHNMVYMYVC

SEQ ID NO: 242228 - protein, 82 aa, Glycine max
  Clone ID: PAT_MRT3847_6075C.1.pep
ADGIQSLTNNLCYTYARCTRSVSVVPPAYYAHLAAFRARFYMEPDLQQENGSSGGGSRATRAGGVKPLPALKENVKRVMFYC

SEQ ID NO: 242229 - protein, 101 aa, Glycine max
  Clone ID: PAT_MRT3847_60760C.1.pep
IAFEQHLALAANIGTLLQHKCYWYPDGIPAKHSTNQILKVHLKDVAFLCFKHNFDSLTSWKWRMPWNNLSQSLQSPESLQVQSFHSPNQCTLFDTVSLWLC

SEQ ID NO: 242230 - protein, 87 aa, Glycine max
  unsure (1)..(87): unsure at all Xaa locations
  Clone ID: PAT_MRT3847_60761C.1.pep
MLESVQAPPPTESGPVVKRYAPPNXGNRSAYRLXSGDRLARTHSIASDXDQSLGAHSRGVHISDHGDAGSSNLLNENHYSRLIRLEG

SEQ ID NO: 242231 - protein, 190 aa, Glycine max
  Clone ID: PAT_MRT3847_60762C.1.pep
MEGNKDEALRCVRIAEEAIASGNKDRALKFLRIAQRLNRDLPLQSLLEKCDRFDSHSAAAAACGGSGASPANGHSPRREGLNGERNYTEENVQLIREIKGKSDYYAILGLEKSCSVEEIRRAYRKLSLKVHPDKNKAPGSEDAFKKVSKAFKCLSDDGSRRMYDQTGTGTDDYESTEVNTFWRRKRRRTT

SEQ ID NO: 242232 - protein, 71 aa, Glycine max
  Clone ID: PAT_MRT3847_60763C.1.pep
GGSPVGKKISFKNLTLNKRVHWWCCQFFNKNYGSSPIGTWGHVENCWQHFLNNSGFRCIFCFPQKWDRFGT

SEQ ID NO: 242233 - protein, 73 aa, Glycine max
  Clone ID: PAT_MRT3847_60764C.1.pep
VYFLGLKRFSPMFKLFTVVLIYGAHCSHSSFANWSSAIVILPVEALFRSFILILWWDVYQSWLLLVIIQHSQS

SEQ ID NO: 242234 - protein, 272 aa, Glycine max
  Clone ID: PAT_MRT3847_60765C.1.pep
MGIVEEAHNVRIVGKGNEIVILAHGFGTDQSVWKHLVPHLVDDYQVILYDNMGAGTTNPDYFDFERYYTIDGFVYDLLAILQELQVQSCIFVGHSLSAMVGLLASISHPHLFTKLILVSASPRFLNDSEYFGGFQQEDLTQLYDGIRSNYKAWCSGFAPLVIGGDMDSVAVQEFSRTLFNMRPDIALSLAQTIFQFDMRPILCHVTVPCHIIQSTKDLAAPVVVAEYLQQNLGGKTIVEVMPTEGHLPQLSSPDIVVPVLLNHIRHNLAEDK

SEQ ID NO: 242235 - protein, 117 aa, Glycine max
  unsure (1)..(117): unsure at all Xaa locations
  Clone ID: PAT_MRT3847_60766C.1.pep
MSSSSGQSSGYDLSFKILLIGDSAVGKSSLLVSFISNSAEDIAPTIGVDFKIKMLTVGGKRLKLTIWDTAGQERFRTLTSSYYRGAQGIILVYDVTRRDTFXNLSLVWSKEVELYST

SEQ ID NO: 242236 - protein, 73 aa, Glycine max
  Clone ID: PAT_MRT3847_60767C.1.pep
EDPRSHPANPPVFTLFMLPMAEGLASENCGELVKAAPTSATFSAVSFGGICGKPITNIQFSNVDLDQRKEMKN

SEQ ID NO: 242237 - protein, 37 aa, Glycine max
  Clone ID: PAT_MRT3847_60768C.1.pep
LTTNTRGDLLHSFLVFYKFYKLFNVLQPLNLPINPKK

SEQ ID NO: 242238 - protein, 62 aa, Glycine max
  unsure (1)..(62): unsure at all Xaa locations
  Clone ID: PAT_MRT3847_60769C.1.pep
FFFSTSRGLSSFEHPXNXVQPVPRVDSSGQVVWTTSKLDAKAKKQASGNARVGSQANWWSNI

SEQ ID NO: 242239 - protein, 275 aa, Glycine max
  unsure (1)..(275): unsure at all Xaa locations
  Clone ID: PAT_MRT3847_6076C.1.pep
GRSGGGGNVFPFYFYIFSVLFLTLYLPPPSLAANHTVPCPLHVDVLREVGGGRRPKFDSGTQCHYILQALHLLQADYLRRSSLFVPPLNSSESCWKTFQSFINEFDPSITDIRASCGFRTEWISQGCMNFTTKQEFEEIVPPNAIQPVVADCNQPLDNNAPCALCITKLSSMLSYLTGTTVGNVTDCRAYTQIYAASLSDQYGASDPGTAKCLFGLDFSSSGSGGKRRKILIAVVSVFCVLALAVFAGLXAYLRFKKRKEVAGTLSLGLGSGLDS

SEQ ID NO: 242240 - protein, 139 aa, Glycine max
  Clone ID: PAT_MRT3847_60770C.1.pep
VELKLFIYGKVGDTINGKLDESLILEVVADGGKVHVLLADGDLTVKMKLHSLKIKDELQGRLSVAPRYLAVSVLQSETSSSDMYDSHGKEVSHDDDDSFTDALSEFISQTDGGYCLHNMDLDHQGLVGIASDFESLENK

SEQ ID NO: 242241 - protein, 60 aa, Glycine max
  Clone ID: PAT_MRT3847_60771C.1.pep
GVHISLKNRIKTYLNIINIRRHICNFFKLKKIMCMFFYKKKICNFFKSRAEICNLLKFKA

SEQ ID NO: 242242 - protein, 440 aa, Glycine max
  Clone ID: PAT_MRT3847_60772C.1.pep
GGNAPSVANRTSYSQKNVHGQNFTIPVQPVNFSFKPSATSDIVGNGGCFGDKQQQQQALKGGVENIPSQAFAISFAAFNGTSVPSNLNFSSMAQNPVILQSLPDMAWQGYQAASTPQTTQQKTYSITEAKSGGNSSHQDDEKKISRAQSSSNGPTTLVFDNSSKNLNFMLSTANGNWSNHTIASTAITSVPLSSNALSSQQPPHLLQLPKQHAMQQQQAAMATRYKAPPANNTPAAKFGNNAPVFSQTPSQCKSSNQASHTKASSRTADSHIHHSSVITSNAPTLKSFSQEQGRVLPGHMQISFGGNYITPLPPQGQPLLNNNHPLCATAQGTPYSGGNAKSNSEGSKVSSSVNASQLQQTENSAGSGQKSSPSLWEKCPVNIKFMPQPPIRAKVLETKSYTAPPLRLKEFLAIALLIICSGGPCCSASCSTTIQAAQKD

SEQ ID NO: 242243 - protein, 31 aa, Glycine max
  Clone ID: PAT_MRT3847_60773C.1.pep
GFSFKDGDPLLMKTNLESISHSQFHIKMICS

SEQ ID NO: 242244 - protein, 185 aa, Glycine max
  Clone ID: PAT_MRT3847_60774C.1.pep
TLVFDNSSKNLNFVLSTTNGNCTPAAKFANNAPVFSQTPSQCRSSNQASHSKASGRTTDSHVHHTSIITSNAPTLKSFSQEQGRVLPGHMQISFGGNYITPLPPQGQPLLSNNQPLCTTAQGTPYSGANAKSNLEGSKASSSVNASQLQQTENSAGSGQKSSPVCGRNVPSILSSCPSHLSELKY

SEQ ID NO: 242245 - protein, 62 aa, Glycine max
  Clone ID: PAT_MRT3847_60775C.1.pep
PTRSVTRAFETPFSYITQTYLCYLCTPPASILVKWTHLHQNQLNLIYSPPIFCAYDSILLSK

SEQ ID NO: 242246 - protein, 65 aa, Glycine max
  unsure (1)..(65): unsure at all Xaa locations
  Clone ID: PAT_MRT3847_60776C.1.pep
KILGXXXCGVIXNYVXXXXIXXXXXLVCXCVXKXLXXXXFXXXKXXXXXXXXXSXXXXXXDLXXX

SEQ ID NO: 242247 - protein, 145 aa, Glycine max
  Clone ID: PAT_MRT3847_60777C.1.pep
QIGVFFILKALHFQAEPSSVAVANSIIILLSSPYPNLSDHPSPSPNFSPFPPNHPSPSTLTLNSTLSQNPITQFKLLLHQYHHHHHHHHHHHHHLFSVQNPILSFFPYSSFLFFPFIFPNLLYTSSISFIYLSFSFLFISSFLTP

SEQ ID NO: 242248 - protein, 192 aa, Glycine max
  Clone ID: PAT_MRT3847_60778C.1.pep
MEISVKMSYDHLENGPLIPSRLRVRSMGHQPLIMDLVKYCFGLGILEGVYSLGEARGKISTSIQKLKNSGLVLDGSSSIHFNMHDLVRDAALSIAQKEHNAFTLRNGKLDDWPELERCTSIFICNSVIIDELPNVINCPQLKFFQINRDDPSVKIPESFFNEMKGLGGLMLTGVHLESLPPSIQCLSNLRLL

SEQ ID NO: 242249 - protein, 61 aa, Glycine max
  Clone ID: PAT_MRT3847_60779C.1.pep
PPLSTIGKTPLAEWLVDSVNQMEGRVFCVFSGQGAQPNEWMLGHSVGSPGLTPYVSGSYAE

SEQ ID NO: 242250 - protein, 91 aa, Glycine max
  unsure (1)..(91): unsure at all Xaa locations
  Clone ID: PAT_MRT3847_6077C.1.pep
VLSGVDVGAGWQSLVACINIVXYYLVGLPARIILGFKLGLGAEGIWSGMIAGIVLQTTILIIVTSIRNWKKEAEEAESRVRKWGGAISYDQ

SEQ ID NO: 242251 - protein, 41 aa, Glycine max
  Clone ID: PAT_MRT3847_60780C.1.pep
MARDIIDAGPPEERPSPSARDMSREDASILPREDAHDRGLC

SEQ ID NO: 242252 - protein, 98 aa, Glycine max
  Clone ID: PAT_MRT3847_60781C.1.pep
KTKPLLATVEGFNLSRAAKNTRPFVTIHQSKNFMEKTNEGPQGGLGDQDFFFGPIPGARIKAPNHPIFVFRPVGKALSPPTIIYFGREHTLVSKFSCS

SEQ ID NO: 242253 - protein, 53 aa, Glycine max
  Clone ID: PAT_MRT3847_60782C.1.pep
VDSIFTNKYLGNQLVQVYGFWKKPVSDLFVLGGQEILEHVLFLFIHIQLLLVK

SEQ ID NO: 242254 - protein, 76 aa, Glycine max
  Clone ID: PAT_MRT3847_60783C.1.pep
PGKSAEIPRKGYTRSGKEKREMLKILEQKPPRLGRRQTLECFRGTQRFTPFLPTLKKKKTYFGLQAMKNSGPTSTE

SEQ ID NO: 242255 - protein, 91 aa, Glycine max
  Clone ID: PAT_MRT3847_60784C.1.pep
ATEWGNIHSCSLLSYNQGFPSSQGSFRSRIIYLWEWGTGITWISDRDRAQARTGAICNHKYDGLIPEQLMEQDAQVAHDISLILCGTRSMM

SEQ ID NO: 242256 - protein, 59 aa, Glycine max
  Clone ID: PAT_MRT3847_60785C.1.pep
SRVFFFFFCTNNCSLQNKLLIFTGITTQDKKYFSKVTETKTRRMYLSMGRIQIFIGPCS

SEQ ID NO: 242257 - protein, 62 aa, Glycine max
  Clone ID: PAT_MRT3847_60786C.1.pep
NESVLGNGQRRTRGACIHPIPVARTSQERRIVLHIYSCGLDSLLHHSLPMKLPTSCKVCSND

SEQ ID NO: 242258 - protein, 74 aa, Glycine max
  Clone ID: PAT_MRT3847_60787C.1.pep
QNEDGSYPCNIYVLHYRFQNRGSDQKIRCRRYVLRIRNTVCFLFNPLCGCMRNYHGTFVLLYIFAVVIFLEVPV

SEQ ID NO: 242259 - protein, 44 aa, Glycine max
  unsure (1)..(44): unsure at all Xaa locations
  Clone ID: PAT_MRT3847_60788C.1.pep
NGKSCLSLLLYSRLGKGEKLSLGXKKARATQLGERLTLRLEKLK

SEQ ID NO: 242260 - protein, 36 aa, Glycine max
  Clone ID: PAT_MRT3847_60789C.1.pep
NFISTIFYNLEICYTFKIFVSITNLNNLKFLFELFL

SEQ ID NO: 242261 - protein, 58 aa, Glycine max
  Clone ID: PAT_MRT3847_6078C.1.pep
SNSERADNSAVAVVVGYFHAASPSHMLITPLASILWVILSLLDETAWTEANHEIVDPH

SEQ ID NO: 242262 - protein, 129 aa, Glycine max
  Clone ID: PAT_MRT3847_60790C.1.pep
MDVTSLGSNSNTQTDQHPLLMEQPETHNGHQHVIDITRNGEALTTSSRNDQYSEMHLPQNEDQAAGDAQNSSHQTSSSSAPRLNSRNSASLRRGDGYGHRGRSPLNSGLWISVELVVTVSQIIASIVVL

SEQ ID NO: 242263 - protein, 73 aa, Glycine max
  Clone ID: PAT_MRT3847_60791C.1.pep
FYVLFIYFVFFIFFLKNHNFYYSLHMFLSVKITTETVYFYLHDLILFINNTKVIPPHCSIHPPHDQALGLTGK

SEQ ID NO: 242264 - protein, 225 aa, Glycine max
  Clone ID: PAT_MRT3847_60793C.1.pep
PTRPPTRPEFTGLDVEMEIKKHYFEVMDIVDRLFVAMFDSLNQNCKKDLEAVGSQYPFEPLKYLRTTLRLTYEEGIQMLKDVGVEIEPYGDLNTEAERKLGQLVSEKYGTAHESVHRYPLAVRPFYTMPCYDNPAYSNSFDVFIRGEEIISGAQRVHVPEFLEQRAAACGIDVKTISTYIDSFRYGAPPHGGFGVGLERVVMLFCGLNNIRKTSLFPRDPLRIAP

SEQ ID NO: 242265 - protein, 90 aa, Glycine max
  Clone ID: PAT_MRT3847_60794C.1.pep
VFRAVASPLGCCPFACSAWLCVVFLGLCGCGPVLCSFGGRSRLFLWLVFGGHSRSFSPASFWGRWGLVSGLPVPLPRRVRGRGRWLLRGS

SEQ ID NO: 242266 - protein, 69 aa, Glycine max
  unsure (1)..(69): unsure at all Xaa locations
  Clone ID: PAT_MRT3847_60795C.1.pep
DXKLXXYFFRTKXSSXYXFXTHLHYPTRTQAXSLSLXIEXVKTXXCSXSXGPWXPWIINXXVPLTAXWR

SEQ ID NO: 242267 - protein, 73 aa, Glycine max
  Clone ID: PAT_MRT3847_60796C.1.pep
SGWRITEEAIEFCSKYIEKAKPVGFLESRHDERVRGKDSRELHVITLSLEELQQTHLYILNNRNEVLPYIVCH

SEQ ID NO: 242268 - protein, 66 aa, Glycine max
  Clone ID: PAT_MRT3847_60797C.1.pep
KRSLALYYTRVRKLTYLPSPGIVSKTKPSGHKIDNWTAALTLGLRELMAALAISFYPPSRLRGCNL

SEQ ID NO: 242269 - protein, 75 aa, Glycine max
  Clone ID: PAT_MRT3847_60798C.1.pep
SLKWCHPNACMKAIVVGEFYLSYPNFVRGLLLEGIQPLIDRFKVLGTFCCIICEVPRRAENQKEAWLRNPWNSVM

SEQ ID NO: 242270 - protein, 142 aa, Glycine max
  Clone ID: PAT_MRT3847_60799C.1.pep
MREERAALPVRVKREARSDMDPDALAKAFVEHYYSTFDTNRNNLANLYQEGSMLSFEGQKIQGSHNIVAKLTSLPFQQCQHSITTVDSQPSGVNAAMLVFVSGNLQLAGEQHALKFSQMFHLIPTPQGSYYVLNDIFRLNYA

SEQ ID NO: 242271 - protein, 61 aa, Glycine max
  Clone ID: PAT_MRT3847_6079C.1.pep
MPLFHLPNQYSFIFEVLSVTFTFEHLVIMVSHYPESYELLDSHRSFQPGRQKSHTCFVFLR

SEQ ID NO: 242272 - protein, 57 aa, Glycine max
  Clone ID: PAT_MRT3847_607C.1.pep
MTIKVKLGISFLVVLLTGCVLLLVLARPYECEIRVPHAFPRANLVEALGEFTVTLQY

SEQ ID NO: 242273 - protein, 94 aa, Glycine max
  Clone ID: PAT_MRT3847_60800C.1.pep
RMKVFLQFRVAAYLQTIFLPELSLLIYVRFLSYLFFNLRISFTIFRNKTTTRKQRCRINGVARRFGNTVISGSLLMLCLSTGVSSTIDVWILLT

SEQ ID NO: 242274 - protein, 28 aa, Glycine max
  Clone ID: PAT_MRT3847_60801C.1.pep
GSSLHKPGVTTWMPATLPHIRRTRIHKL

SEQ ID NO: 242275 - protein, 87 aa, Glycine max
  Clone ID: PAT_MRT3847_60802C.1.pep
PPKPSPYRDGSELSTRDLQKMVQALPQYTEQVEKISLHVEIAGKINKIIRETDLRELGQLEQDLVFGDAGAKEVINFLRTKQNTSPE

SEQ ID NO: 242276 - protein, 104 aa, Glycine max
  Clone ID: PAT_MRT3847_60803C.1.pep
FLFIGFVFAGEWSVGRVAVILVGLVACVMVGVGFKAKWSAIILVTILSVFNVFVNNFWTLHEHHPHKDFAKYDFFQILSIVGGLLLLINMGPGQVSFDEKKKVY

SEQ ID NO: 242277 - protein, 82 aa, Glycine max
  unsure (1)..(82): unsure at all Xaa locations
  Clone ID: PAT_MRT3847_60804C.1.pep
PPNKQPPPPKPPTHHQQIAPAQPRVIKRPTGAIVSPXQAVQPRKDRTDLPALRFAWSEQLHPAACQPLXGDXKERTGAXPCG

SEQ ID NO: 242278 - protein, 100 aa, Glycine max
  unsure (1)..(100): unsure at all Xaa locations
  Clone ID: PAT_MRT3847_60805C.1.pep
MASSSYSNSPYDACKFLRRKCMLDCIFSPYFPPKEPQKFTNVHKIFXSKLLNEVQPHQREDAVNSLPYEAEARIEDLVYGCVGDFYRLGRVKRLKNHLVQ

SEQ ID NO: 242279 - protein, 68 aa, Glycine max
  Clone ID: PAT_MRT3847_60806C.1.pep
TLGNLGYLFSSPPSPHLKKLDLTTGHFGFCMLIDTPIWCVVPSSINLQQHQTLNGNTLLLLSPLQVII

SEQ ID NO: 242280 - protein, 135 aa, Glycine max
  unsure (1)..(135): unsure at all Xaa locations
  Clone ID: PAT_MRT3847_60807C.1.pep
LSPIISPFHARHSYLPLCLERSCLLLHPQVSFLFLFLSFFFFESESCSVAQAGVQWCDLGSLQAPPPGFMPFSCLSLPSSWDYRHLPPHPANFFVFFSRDGVSLCXPEWSXSPDLVIRPPRPPNSFLIFKGFIFW

SEQ ID NO: 242281 - protein, 113 aa, Glycine max
  unsure (1)..(113): unsure at all Xaa locations
  Clone ID: PAT_MRT3847_60808C.1.pep
PREHGTGPRNNTPAKIKPTQDTTTRARKPERPPGPAHQATATAPPGKANWEKENPKHNKXHQSRNSERDPHRNQARHARCNHPKEEKEEREEGEKPRPRPRPQHPEREPQQPG

SEQ ID NO: 242282 - protein, 228 aa, Glycine max
  unsure (1)..(228): unsure at all Xaa locations
  Clone ID: PAT_MRT3847_60809C.1.pep
MGSMNLLGFSLSPQEHPSSQDHSQTAPSRFCFNPDGISSTDVAGDCFDLTSDSTPHLLNLPSYGIYEAFHRSNNIHTTQDWKENYNSQNLLLGTSCSNQNMNHNHQQQQQQQPKLENFLGGHSFGEHEQPYGGNSASTEYMFPAQPVLAGGGGGGSNSSNTSNSSSIGLSMIKTWLRNQPPHSEXNNNNNNESGGNSRSSVQQTLSLSMSTGSQSSTSLPLLTASVDN

SEQ ID NO: 242283 - protein, 51 aa, Glycine max
  Clone ID: PAT_MRT3847_6080C.1.pep
SCICLHIPVKCPSLSYQILLMTTPKAPKIELNNRSVTITPRQRKKIKTTKS

SEQ ID NO: 242284 - protein, 62 aa, Glycine max
  Clone ID: PAT_MRT3847_60810C.1.pep
GVRPLGSGPVSSDRSSLFPHPQHSVCAEAAPMLRETKVVSVYDVLLCVCQTPHFKFNPSPVP

SEQ ID NO: 242285 - protein, 180 aa, Glycine max
  unsure (1)..(180): unsure at all Xaa locations
  Clone ID: PAT_MRT3847_60811C.1.pep
LSTVYSDYLASSGKNLRCRTRNVPRAEVVSXAKTHGAYLVRDKPSATIYMVPYGARWXTKIHHMRESIVSVKENPSFRNCRGAYATSLTSKTSEPSLLTGALDDRPNAYEDXPDERHNYNQTEPTPYNNAPLIGILARLCAGHRDYDQHLPLAVQLLRLLEPSLNQPAFTRHTPTTATWS

SEQ ID NO: 242286 - protein, 43 aa, Glycine max
  Clone ID: PAT_MRT3847_60812C.1.pep
DHLPTDNFQYMIKKPFFLLQSSGPILRHSSNSKLHILSALSSL

SEQ ID NO: 242287 - protein, 82 aa, Glycine max
  Clone ID: PAT_MRT3847_60813C.1.pep
KISDINRYVLRGIPRLRKVIEKTKLSSPLLRVKQPKTMSSLHNKTERAVEPNWDTNSEFASRAYIPKKPSSIAISFSNGSKY

SEQ ID NO: 242288 - protein, 68 aa, Glycine max
  unsure (1)..(68): unsure at all Xaa locations
  Clone ID: PAT_MRT3847_60814C.1.pep
IKNCNADGIWAWDLVVGNCAICRHHVMDLCVDCLANQASSTSXECTVARGVGNHALHLHCICRWVKTR

SEQ ID NO: 242289 - protein, 44 aa, Glycine max
  Clone ID: PAT_MRT3847_60815C.1.pep
KMRSCIPQYLHLGSSLNPKACTSLLCIFRLRAVSSTHNHIERAP

SEQ ID NO: 242290 - protein, 60 aa, Glycine max
  Clone ID: PAT_MRT3847_60816C.1.pep
GSKRGIPDIIFTFFFFLNHMYFPLKLILFESDNIIMNNKILVQLNYISKLEPKLKQLHLS

SEQ ID NO: 242291 - protein, 114 aa, Glycine max
  Clone ID: PAT_MRT3847_60817C.1.pep
EEAFADVEVISPFAQLDIPLIGQECLRQSYMIFLAKLKKHHFSPGPESSACQLFPLDDIPFNSLSFSSMVVTLSLYVEDIKAGKLKFHYGTINKRPGTSPSDIRAYTLDHHMHS

SEQ ID NO: 242292 - protein, 144 aa, Glycine max
  unsure (1)..(144): unsure at all Xaa locations
  Clone ID: PAT_MRT3847_60818C.1.pep
ASGQASGLDGDSLRGAKYFGRSSGAVKGDCNNRTLTGGLVTEHINAVMHIILCSELKXTSTQVADSKLLGDTTRGDTSHINSDATCPAVRCEILRXNSMDISGEQHLDIRHNIVTKRIVANGNVIAERQEGIGARQIERSLQKH

SEQ ID NO: 242293 - protein, 244 aa, Glycine max
  unsure (1)..(244): unsure at all Xaa locations
  Clone ID: PAT_MRT3847_60819C.1.pep
MLSPNPLSLLCALLLCLPLAIRPTTDTTHTATTTPIMFHIPMPLPRNISIQENPNKNLTSLSPLLSSLNIQDDKPHKVTTRVKGRPIKPNQKQLSTLLLSSLPSPLRQNPDDALFKAAMRVKSKPTRPKKVAFMFLTTKPLPFAPLWESYFNQTPTSKNLFNIYVHADPSFSYHAPFSGVFSNRVISSQSTRRFSPTLSAAARRLLAHALVDDMSNFXFVLISPSCIPXHSLKFTYHVLLRQGK

SEQ ID NO: 242294 - protein, 93 aa, Glycine max
  Clone ID: PAT_MRT3847_6081C.1.pep
MTTYSDKGAKPERGRFLHFHSVTFSVGNAKQAASFYCSKMGFEPLAYRGLETGSREVVSHVIKQGKIVFVLSSALNPWNKEMGDHLVKHGDGV

SEQ ID NO: 242295 - protein, 94 aa, Glycine max
  unsure (1)..(94): unsure at all Xaa locations
  Clone ID: PAT_MRT3847_60820C.1.pep
RFLISRATIFPKGKGADNTLVAKFYNHLIYEIIAHRSKPSVTLLHLHLPQAXDDEYXRLLTPQEVQDFRNYADYRFTTFVDLVQHCVTLNEPYC

SEQ ID NO: 242296 - protein, 150 aa, Glycine max
  unsure (1)..(150): unsure at all Xaa locations
  Clone ID: PAT_MRT3847_60821C.1.pep
FKKGMLEIKSCKYLPYFLSXLSKDQMIXSFHQNKNTVWGGIALGSMSVGVLGYAVVRNWNKWKQWKQQRQLQQQRQAVSDVEPQMDDEIEDAPDGQLCVICLMRRRRSVFIPCGHLVCCQGCAISVEREVAPKCPVCRQEIRDSVRIYES

SEQ ID NO: 242297 - protein, 508 aa, Glycine max
  Clone ID: PAT_MRT3847_60822C.1.pep
MAAKSSSSSTTTNVVTLKAAWVLPQRTQNIREVYEVGRKLGQGQFGTTFECTRRASGGKFACKSIPKRKLLCKEDYEDVWREIQIMHHLSEHANVVRIEGTYEDSTAVHLVMELCEGGELFDRIVQKGHYSERQAARLIKTIVEVVEACHSLGVMHRDLKPENFLFDTIDEDAKLKATDFGLSVFYKPGESFCDVVGSPYYVAPEVLRKLYGPESDVWSAGVILYILLSGVPPFWAESEPGIFRQILLGKLDFHSEPWPSISDSAKDLIRKMLDRNPKTRLTAHEVLRHPWIVDDNIAPDKPLDSAVLSRLKQFSAMNKLKKMALRVIAERLSEEEIGGLKELFKMIDTDNSGTITFDELKDGLKRVGSELMESEIKDLMDAADIDKSGTIDYGEFIAATVHLNKLEREENLVSAFSYFDKDGSGYITLDEIQQACKDFGLDDIHIDDMIKEIDQDNDGQIDYGEFAAMMRKGNGGIGRRTMRKTLNLRDALGLVDNGSNQVIEGYFK

SEQ ID NO: 242298 - protein, 72 aa, Glycine max
  Clone ID: PAT_MRT3847_60823C.1.pep
YIILGLVVQQGVDTSNPCSPCWLPCRKRRYRRTGVGLRSLKGGSRRRPAARDCYPFLRGEEREMDPDMSAFS

SEQ ID NO: 242299 - protein, 82 aa, Glycine max
  Clone ID: PAT_MRT3847_60824C.1.pep
MTSRIGVVKFSQLIKFKKWIVSLVCVVVQSKKRPRFFWVSAMAPLTSVILGSLLVYFTHAEKHGVEVVSISFSCYYLCLSLS

SEQ ID NO: 242300 - protein, 76 aa, Glycine max
  unsure (1)..(76): unsure at all Xaa locations
  Clone ID: PAT_MRT3847_60825C.1.pep
ALQRKIQALINDIQRLAGMNVVLKQDLIATQEELRSLYANATMVKANRYAXVREIYXKSLTVYAHVRVVTGMSSEL

SEQ ID NO: 242301 - protein, 618 aa, Glycine max
  Clone ID: PAT_MRT3847_60826C.1.pep
MSGGRLCTLLGELGYEGWEALDPDSFEWPFQYEDTRPLLHWICSNLRPSNVLSLGELNQYEQFKQEGKLLEGEDLDFAYDSISAFSDRRDNQEAVFGTEEGLKDIKEATLAYREEALALQRQLRHLQSQFDMLSGQASTLTQGRRARLAATSIVNGHLANIDDSLSVRNLQMNGVLERIASTAHELAHYHSGDEDDIYLAYSDFNQFLLGDSSCLKDLNHRFAKQLDTGPFRLVAEEGKSKCSWVNLDDISNTYVRDLEKSHHQRVSELRRLRSIFGVSEKQWVEAQVENAKQQAILMTLKSQVSSDEAHIHLDLHSLRRKHSELKGELSNLYNHEEKLLSETISDLCWELAQLQDTYILQGDYDLKVMRQEYYINRQKAFINHLINLLARHQFLKMACQLEKKHMLGAFSLLKVIESELQAYLSATEGRVGRCLALIQAASDVQEQGGVHDSDHFLHAIRDMLKIYSNTQAQATLSTYVSAPGIVQQISALHSDLLSLQSDLENSLPEDRNRCINELRNLIKNLQKLLFASSTTAQPILTPRPLMKELDEMEKINAKLSVAVEEVTLEHVKKNEIVKHHKQEIGLQRRVFVDFFCNPERLRSQVRDLTDRVRAMQIS

SEQ ID NO: 242302 - protein, 62 aa, Glycine max
  Clone ID: PAT_MRT3847_60827C.1.pep
NRILVCLQKHGLITDSRIIIHEKDKSMHDDLISYFPLLCSFLCMHTQQQHLLLTTMTIIYAQ

SEQ ID NO: 242303 - protein, 62 aa, Glycine max
  Clone ID: PAT_MRT3847_60828C.1.pep
RRQLNTVVGTTVHGSKKECPTGRGDDGVEIQREGHGSAYVCYPTSNNPHDMRVVVALIGRIR

SEQ ID NO: 242304 - protein, 222 aa, Glycine max
  Clone ID: PAT_MRT3847_60829C.1.pep
MEYKVKTTTSTPSPPIPIHVPTMLSNSPPSSSSSPPSQSPTPFPSPSLGSPSAAPPSPPPPLPPVVVSPCAACKILRRRCVEKCVLAPYFPPTDPLKFTIAHRVFGASNIIKFLQELPESQREDAVSSMVYEANARIRDPVYGCAGAICQLQKQVSELQAQLAKAQAEVVNMQCQQANLVALICMEMSQSQEQHVLQPQTHVDMSCFIEDNSFGTAWEPLWT

SEQ ID NO: 242305 - protein, 104 aa, Glycine max
  Clone ID: PAT_MRT3847_6082C.1.pep
MSFNFNSSSHWNPENSGGKKRHRTKFSHEQKEKMHNFAEKLGWRMQKGDEGLVQDFCKEIGVSRGVFKVWMHNNKNTSGRKKSLEPGERINGTGSDSTDNNNNH

SEQ ID NO: 242306 - protein, 65 aa, Glycine max
  unsure (1)..(65): unsure at all Xaa locations
  Clone ID: PAT_MRT3847_60830C.1.pep
ECLFFLLAFHLGLSNFLSRLAYGSVCSNFICSSDLHXNTLTDIVHDDLIEAHILISFIFWHWYGI

SEQ ID NO: 242307 - protein, 25 aa, Glycine max
  Clone ID: PAT_MRT3847_60831C.1.pep
GGVRKFAQQDLWAFGVSVKILRLVY

SEQ ID NO: 242308 - protein, 50 aa, Glycine max
  Clone ID: PAT_MRT3847_60832C.1.pep
VRHIDSRRFSRTIVKVSFPGSTQVCFPFGISNSSGNPFDCARRKKVEDRC

SEQ ID NO: 242309 - protein, 52 aa, Glycine max
  Clone ID: PAT_MRT3847_60833C.1.pep
QWSMQYNFLLMTRASRMKYGVKVGTPRRYYFEVHKPPHLLKFCNIEQLEAFS

SEQ ID NO: 242310 - protein, 89 aa, Glycine max
  unsure (1)..(89): unsure at all Xaa locations
  Clone ID: PAT_MRT3847_60834C.1.pep
FVIPLQTLEGLYMKLTLEKPGLEMGTVESELXMSYRQCYXTINLPEAYERLIVDSLTGXTHFVRRDELQGPWEIFTPLLYQIDKGGFKG

SEQ ID NO: 242311 - protein, 100 aa, Glycine max
  unsure (1)..(100): unsure at all Xaa locations
  Clone ID: PAT_MRT3847_60835C.1.pep
RLYVRNSLSHHIRFHLYSFVFSFPPFYFTAAYYSKRNLINIHIXSGLFYDCTYILWSSHEKNLALTEEELTGVIRNRGIPADVFKASFXFEKHVAHEMPK

SEQ ID NO: 242312 - protein, 62 aa, Glycine max
  Clone ID: PAT_MRT3847_60836C.1.pep
FPPLSSPSSPPPHFSSSLQVTVPTTPWRCQLSRHLQHECLSASYPGRGHSPMSTAPRCSFPP

SEQ ID NO: 242313 - protein, 623 aa, Glycine max
  Clone ID: PAT_MRT3847_60837C.1.pep
MEGFFGNCFNMILLMLCFTNLSIAFAQSHMNGFGEQPLAKIAIHKTVLALHSSASIIAVPFVLGTKGEDTQWVTVELESPIPSVDDWVGVFSPANFNSATCPDTDGIGWVEEPYICTAPIKYKYANYSNRNYAKTGKAILKFQLINQRADFSFALFSGGLSDPRLVAISNSISFANPKAPVYPRLALGKSWDEMTVTWTSGYDINEAVPFVEWGPKGGKKTRSHAGTLTFNRNSMCGEPARTVGWRDPGFIHTSFLKELWPNFRYTYKLGHMLSNGSYVWSKKYSFKASPYPGQNSLQRVIIFGDMGKAERDGSNEYADYQPGSLNTTDQLVKDLENYDIVFHIGDMPYANGYISQWDQFTAQVQEISSTVPYMIASGNHERDWPNTGSFYDTPDSGGECGVPAETMYYFPAENRAKFWYKADYGLFRFCIADSEHDWREGSEQYKFIEHCLATVDRKHQPWLIFSAHRPLGYSSNLWYGMEGSFEEPMGRESLQKLWQKYKVDIGFYGHVHNYERVCPIYQNQCVNEEKHHYSGTVNGTIHVVVGGGGSHLSDFTPSPPIWSLYRDVDYGFGKLTAFNHSYLLFEYKKSSDGEVYDSFTISRDYRDVLACVHDGCEKTTLAT

SEQ ID NO: 242314 - protein, 96 aa, Glycine max
  Clone ID: PAT_MRT3847_60838C.1.pep
GFLIANPHRFPVFDIFLGIFQDFENGGKNFRPAFFVPQGTARFFEKGESSAGFGKWGFFRLVGCLIQKRELDMPLLLGKLCLFEKFPPSFKCCKNV

SEQ ID NO: 242315 - protein, 62 aa, Glycine max
  Clone ID: PAT_MRT3847_60839C.1.pep
RSLAFCFAHLIIPLPYVGPVARSPTGCDIAAKDYNLLLIFTLWLSHLLSSHQSFPFTNAHRD

SEQ ID NO: 242316 - protein, 62 aa, Glycine max
  Clone ID: PAT_MRT3847_6083C.1.pep
LTNHTHRLTTGRLIHPHSLLTDRALLLTRKARACSHTLKSAGKLATCNFYRLARSIKSLGCN

SEQ ID NO: 242317 - protein, 59 aa, Glycine max
  Clone ID: PAT_MRT3847_60840C.1.pep
CCTAARRRQRGGQFEKRILLFPTTEDTRVVRSGRTMTGGQNGTRTAQGCPFRRPTSLPG

SEQ ID NO: 242318 - protein, 450 aa, Glycine max
  Clone ID: PAT_MRT3847_60841C.1.pep
LEQRRENPLDDRHKASVGSSTDVKPLLSSLGKSSVLTPTDASSTNKLHSTVSTSSMLSSSSPGFVRPSRGTTSARFGSALNIETLVAAAEKREIPIEAPGSEVQDKILFIINNVSAANVEAKAKEFTEILKEQYYPWFAQYMVMKRASIEPNFHDLYLKFLDKVNSKALNKEIVQATYENCKVLLGSELIKSSSEERSLLKNLGSWLGKLTIGRNQVLRAREIDPKSLIMEAYEKGLMIAVIPFTSKVLEPCQSSLAYQPPNPWTMGILGLLAEIYSMPNLKMNLKFDIEVLFKNLCVDMKDVTPTSLLKDRKREIEGNPDFSNKDVGASQSQIITDIKSGLVPPVNQVELPLEVTNPSNTGAHPHILSQYGGPLHISSGALMEDEKVTPLGLSDQLPSAQGLLQANPAPAPFSISQLSTQIPNIGTHVIINQKLSGFGLQMHFQRAVPI

SEQ ID NO: 242319 - protein, 79 aa, Glycine max
  Clone ID: PAT_MRT3847_60842C.1.pep
GNDKLALVHCSHIIMSRAISEVRRNAHKGKFMISPLVLLARLVKLIGRDLRRPPFSRTTVPQLSPTLFFSSSPPPPPPP

SEQ ID NO: 242320 - protein, 69 aa, Glycine max
  Clone ID: PAT_MRT3847_60843C.1.pep
KETLLYFPEPMKLLSYSSLLGTILSAIVSGIVERDINAWKIKRNKDVILIVLTVSINISFNMILIYIIK

SEQ ID NO: 242321 - protein, 105 aa, Glycine max
  Clone ID: PAT_MRT3847_60844C.1.pep
TSTFSSSLTCTCISLSMSKTKTNAANAKTTETKPKEKDEDGVSGTGGGCTNNNENELGGGRVRVLASALSREGKSVTGTGTLAHVHTETAIPEAEADPVLLILIL

SEQ ID NO: 242322 - protein, 35 aa, Glycine max
  Clone ID: PAT_MRT3847_60845C.1.pep
IILDIIHTFLSWAQGVYRVSSSSISVNNTSSHLSH

SEQ ID NO: 242323 - protein, 63 aa, Glycine max
  Clone ID: PAT_MRT3847_60846C.1.pep
LFSIIHVFCSCFQSVFSCISDTTQTSLSSQVHHCQYSFLIYILQIHFPSIFSLSTVIIYFFLS

SEQ ID NO: 242324 - protein, 542 aa, Glycine max
  unsure (1)..(542): unsure at all Xaa locations
  Clone ID: PAT_MRT3847_60847C.1.pep
MLFDLQQREIQELRHSLHSTKDGMQFMQMKFHEDFSNLGTHIHGLANAASGYHRVLEENRKLYNQVQDLKGSIRVYCRVRPFFPGQSNHLSAVENIEDGTITVNIPSKNGKGRRSFNFNKIFGPSATQAEVFLDMQPLVRSVLDGFNVCIFAYGQTGSGKTYTMTGPKEITEKSQGVNYRALSDLFLIADQRRDTVHYDVSVQMIEIYNEQVRDLLVTDGTNKRLEIRSSSQKGLSVPDASLVPVSSTIDVIELMNLGQRNRAVGATALNDRSSRSHSCLTVHVQGRDLTSGAILRGCMHLVDLAGSERVDKSEATGDRLKEAQHINKSLSALGDVIASLAQKNSHVPYRNSKLTQLLQDLLGGQAKTLMFVHISPESDAIGETIRTLKFAERVATVELGAARVNKDSADVKELKEQIASLKAALARKEGESEHSFLGSSEKHRTKASELSPYHINQRGPDAVDQLGCRQPMVEVGNIELRSNTTVRLXTQSFDXDEISANSPSWPPVNNSLAXNYXEDDKESGGSGEWVDKVMVXADVNKT

SEQ ID NO: 242325 - protein, 75 aa, Glycine max
  unsure (1)..(75): unsure at all Xaa locations
  Clone ID: PAT_MRT3847_60848C.1.pep
AFTPTCSQKHIPGFMEKSKELKAKGINTITYISINNAFVIKAXKEDLKVNKKVLLLSNNNKTFTKAIKIKLNLSN

SEQ ID NO: 242326 - protein, 54 aa, Glycine max
  Clone ID: PAT_MRT3847_60849C.1.pep
PIPTLTTGAIPRFLIAILIAFDPAGNRAWTTALCGTFGGFAYRRSILWEHFRSV

SEQ ID NO: 242327 - protein, 79 aa, Glycine max
  Clone ID: PAT_MRT3847_6084C.1.pep
GPAGFHWRQRHLALIQSQQAVDSRLCLLSTGIDSVASQLVKPGQWTEHVRSHVRDRSHTTVSCHGRRVPHISAIGSVTP

SEQ ID NO: 242328 - protein, 83 aa, Glycine max
  Clone ID: PAT_MRT3847_60850C.1.pep
KKATKSPLEMFISNWVAKKKKRRGPSWDYLFLGKKVVKLFNQALLPDFSIKKQGVCFFTKIIKTTDAKKRVLFVKKKLGKTNL

SEQ ID NO: 242329 - protein, 69 aa, Glycine max
  unsure (1)..(69): unsure at all Xaa locations
  Clone ID: PAT_MRT3847_60851C.1.pep
MPTSDIAISWPKEATHPDTLNAGQADVISTLILLFDESCSCIVYNKLTDIGADTTDGHMCDXIAHAFDL

SEQ ID NO: 242330 - protein, 86 aa, Glycine max
  Clone ID: PAT_MRT3847_60852C.1.pep
SHINLLIRSVYLSRYITDGLCFFYAAGSINVSNILTGKCLAKIKASDGFPGDALFCDEERNEVYTVNRNGLVHVWSKCTPNKRQKI

SEQ ID NO: 242331 - protein, 35 aa, Glycine max
  Clone ID: PAT_MRT3847_60853C.1.pep
SFSVSQLGGVTFKQHKFAKDQPTLLDLKTGYRSHY

SEQ ID NO: 242332 - protein, 67 aa, Glycine max
  Clone ID: PAT_MRT3847_60854C.1.pep
CKYDNESSHDYHIWRRSSLLYKSLHSASVRKSMLCSLSLSLSSMVVISCTMQSQMSLDPTIRKVHTN

SEQ ID NO: 242333 - protein, 386 aa, Glycine max
  Clone ID: PAT_MRT3847_60855C.1.pep
DVLEGNDGNDKSNPSRDSSSCSSSISVSKEPVHEAWPLHRKKIRKVVIRKDKRARKKEESFEKALSRVRTRTKVDVAWQDGTIERGLNSTSLIPIDNPGDHEFVSEQYVVEKTSDDGESISEARRVGVVRSVNAKERTACVRWLKKVARAEDPREFDKEEVVSVYELEGHPDYDYCYGDVVVRLSPVSVCLETASVGESTEKSIQKIEESGIKIDVNIQTGETFVQFSDLSWVGNITGLKNGDIEVTWADGMVSMVGPQAIYVVGRDDDDESIAAGSEISDAASWETVNDDEMEVLEDSREDIERENSSSVTSEAEESGENDFGRTAALSVPLAAFRFVTRLASGIFSRGSRNLDSIPLEIKAEREHPSPVVNDESTSQKHIAIDA

SEQ ID NO: 242334 - protein, 102 aa, Glycine max
  unsure (1)..(102): unsure at all Xaa locations
  Clone ID: PAT_MRT3847_60856C.1.pep
SVTSVMEAEPDKYKMINFEETELRLGLPLXGSASDHNESTTVKGSGGKRGFSETASVDLKLNLSSSDDSASDSPSSASTEKTTTAAPPPPSRANDPAKPPAK

SEQ ID NO: 242335 - protein, 52 aa, Glycine max
  Clone ID: PAT_MRT3847_60857C.1.pep
LQIAIATHDVQGGSFSAKDYHDPPRAPLIDAEELTQWSFYRDLIAELIATMI

SEQ ID NO: 242336 - protein, 79 aa, Glycine max
  Clone ID: PAT_MRT3847_60858C.1.pep
GGARSQLTWSPTCCLNQLQGKALLTNTLDWLVISGHGAKNSIITLHENTGSTGSSVSTAFTLKYTPYYSAVKLSMCVPG

SEQ ID NO: 242337 - protein, 121 aa, Glycine max
  unsure (1)..(121): unsure at all Xaa locations
  Clone ID: PAT_MRT3847_60859C.1.pep
LSRGKDLGVVKEDVAXGAVGLSSRNTTTTSLEYGGQKDNGGIVEDYGRRMYYADNDDHPQQKDXLEGKNSFYNKKRSRREKDVSTNEQHVGGKTSKKDEIGAGXHYSEDYPVEEDHQEPTK

SEQ ID NO: 242338 - protein, 217 aa, Glycine max
  unsure (1)..(217): unsure at all Xaa locations
  Clone ID: PAT_MRT3847_6085C.1.pep
IIISTMRSAGANTPTQKEPYIRTRENPYFDGLLRSDGQIPLKSQLEFTYIGETRPKNFVSDISEEVMELSPENSAVSGLNSKSSEHSSSEKWLKTSKIAPFIQLDILSELIEPDNPKHHHLGYGQSPRTPEQSPAIHNTEKTYTVIRRKEKLSSILLPLSAASYYIGVSPEMEIVESCESIDKLNAFLKARKDDVNAGVPGKFYMLXWVQMVLTWEL

SEQ ID NO: 242339 - protein, 122 aa, Glycine max
  unsure (1)..(122): unsure at all Xaa locations
  Clone ID: PAT_MRT3847_60860C.1.pep
LKIWLKVGNTRXKGSTKKKVYIKKKIPPKSRIFLPLIQHVLKNHNFLTTTKHFFFKRNPCLTISRQAWRASKHAFKEAGGKHGFTVNISVIGGLYVVSNLIYSLKMRHSSKKNNTRGKINMN

SEQ ID NO: 242340 - protein, 50 aa, Glycine max
  Clone ID: PAT_MRT3847_60861C.1.pep
CANIHKINKFIKRMSKLNALLVSKKINLLIKVLNQPSYIIDQMFGMFKKK

SEQ ID NO: 242341 - protein, 217 aa, Glycine max
  Clone ID: PAT_MRT3847_60862C.1.pep
MSTTKCNKLSSTSPTIHQRRLTRQRKLRYTSDKDAALHSTTSLPASPLPSFKSASSSDHWSSSAVPQPLPRPDSPWIRRHDHHHLGSPPFEHPAFSFRRRAVDHDAVRSLRSASNLGRPSFDPVTPNAKYDLRVNIPPARVLAGNTSSCKDHRELSHDHDSENVYNLRLHFADKSAPNSIFSSPVTSPRTSSNADFYDILKVSPAQTAHSPDRSSLL

SEQ ID NO: 242342 - protein, 111 aa, Glycine max
  Clone ID: PAT_MRT3847_60863C.1.pep
GCEKTTEGGEERKLVTAGGIFHLKAQLQIEEMEKGAKSEAAASLRRCAKAALLLHSLNSPISQNQWKREIHDLKIELLKERFMRKKMKLCAITELFVQLLLLLSVCNFVLL

SEQ ID NO: 242343 - protein, 75 aa, Glycine max
  Clone ID: PAT_MRT3847_60864C.1.pep
NCERCRQNAFLCQVCMVTDDLLFPFQTEPCYRCNGCGSLPHWKCSRKVPNDGQPEEEVTCEKCQRIRRKKSLIKK

SEQ ID NO: 242344 - protein, 46 aa, Glycine max
  Clone ID: PAT_MRT3847_60865C.1.pep
RSWDAHPVMSWAVNPRRTSLVLYLVFTMDVSVGFLTMAVVSMMEGF

SEQ ID NO: 242345 - protein, 61 aa, Glycine max
  Clone ID: PAT_MRT3847_60866C.1.pep
SHTHTLTPCQPLGAIFQLCIDVMPLYLITYSFSILLSCKTVNNLNTFTPDSGYPRVLLVCN

SEQ ID NO: 242346 - protein, 61 aa, Glycine max
  Clone ID: PAT_MRT3847_60867C.1.pep
HSEPVMVACAAVGCDYLDFSNESKFIERMEATHHKRTVETAHSSSLTAVASPNLSRTITAT

SEQ ID NO: 242347 - protein, 40 aa, Glycine max
  Clone ID: PAT_MRT3847_60868C.1.pep
SIEYFQLWEWCNLFLDLAVKIVGVQSFMYIMPSCMQYYLR

SEQ ID NO: 242348 - protein, 61 aa, Glycine max
  Clone ID: PAT_MRT3847_60869C.1.pep
RHRKSAPIFFSNWGNFKKPQNQKKRKKAYKIGWGPTRTVGHTLLGKGSLPSSIPHWEHPTF

SEQ ID NO: 242349 - protein, 35 aa, Glycine max
  Clone ID: PAT_MRT3847_6086C.1.pep
PILKRIKVGVAHGYLLVGTFVKNGPISNNEITGHS

SEQ ID NO: 242350 - protein, 42 aa, Glycine max
  Clone ID: PAT_MRT3847_60870C.1.pep
VSTDFKGICSNVDEIAFIRYTCYSKGCNHNALKNGNPHCNCK

SEQ ID NO: 242351 - protein, 60 aa, Glycine max
  Clone ID: PAT_MRT3847_60872C.1.pep
TIPTMVPNISQFHFLLFYHKLKHNLGKDKIKLTKKQKGLCSFTSYHCSPLLPPLFRKQIF

SEQ ID NO: 242352 - protein, 73 aa, Glycine max
  unsure (1)..(73): unsure at all Xaa locations
  Clone ID: PAT_MRT3847_60873C.1.pep
TTKGTHLPLEVNPQHTLAVVKKNIESGHGVDVYPAAQQMLIHXGKELNDAATLEENKVDDNNFVGIMLRRNKG

SEQ ID NO: 242353 - protein, 195 aa, Glycine max
  Clone ID: PAT_MRT3847_60874C.1.pep
MLKSEHENDSIPAEEAHSITNISETDREPDKDSSELKYLLLTSQSFIGHAEELLNLDVDCPKILPRSKTKEIANLRLYLDCANELTERKSLQGTQAVHPLLLTCAGHSRYHISLGRLVDEVYSAIEHLTSYSEKLASDNIYAMMERDIKSNNGLINGIWNWGWRHGFSADEAEQVVNEVENLVLGELIEEVIVNL

SEQ ID NO: 242354 - protein, 260 aa, Glycine max
  Clone ID: PAT_MRT3847_60875C.1.pep
MALEALNSPTAATTPFRGYQEEEEDEEADLHLREPWAKRKRSKRPRFETEEEYLALCLIMLAQSGNTRNIHNNNTQLPSSSLSDKEASPPVKLTHRCTVCNKAFGSYQALGGHKASHRKASSESNPTASVSALANDSVSASTVGGGRMHECSICHKSFPTGQALGGHKRCHYDVRLREDTEGANGNNSSGATTSDGGAASSSHTLRGFDLNLPAPLTEFWSPMGFDFGKKKVGGEQEVESPLPVTAKRPRLFTGEDDETA

SEQ ID NO: 242355 - protein, 56 aa, Glycine max
  Clone ID: PAT_MRT3847_60876C.1.pep
GFFAFKTHEVLVPLLVKDTLPLIPTQKLFLLILQPQGFLNENDPNNTTIFVGKLYP

SEQ ID NO: 242356 - protein, 83 aa, Glycine max
  unsure (1)..(83): unsure at all Xaa locations
  Clone ID: PAT_MRT3847_60877C.1.pep
KLKNLLHKELESVKFAYENDQCAIPSNIKKXKVVHLXRLVRNKIGLXMNLFLKKQSPGKECDKVFSVMKQGKFIDQLFRYLRS

SEQ ID NO: 242357 - protein, 58 aa, Glycine max
  unsure (1)..(58): unsure at all Xaa locations
  Clone ID: PAT_MRT3847_60878C.1.pep
MNVTKFNLLAVNLHKCDWKNLKFTKLNSLVSNSPFANLGNTEXAQNDLTSKNLQNMNG

SEQ ID NO: 242358 - protein, 145 aa, Glycine max
  Clone ID: PAT_MRT3847_60879C.1.pep
KKKPPLGPNTETPSPRVLAFSLIKLAPRFFPLLRGLCAPPLYLGLGPPLGPPGFTLFSSGFFFLWDFFPIPLFPRVHFFPYFPPSLISPPIKKVVSPPRPASNFPVFPPGPEFAPFFGKSLFCFFLQKIFLGGFFLPQKINILKL

SEQ ID NO: 242359 - protein, 59 aa, Glycine max
  Clone ID: PAT_MRT3847_6087C.1.pep
HDLLYIHLLPSNHYLHNLNPESFSNDLVCIDYTSGIEVRSLPNSALILTKCKYIMDLSR

SEQ ID NO: 242360 - protein, 58 aa, Glycine max
  unsure (1)..(58): unsure at all Xaa locations
  Clone ID: PAT_MRT3847_60880C.1.pep
XTWDRWLVLLXLCGXRVGPFXRVXXIXVXXKKFKLVKNLDSRCSEXIXSPXAVYLXLX

SEQ ID NO: 242361 - protein, 80 aa, Glycine max
  unsure (1)..(80): unsure at all Xaa locations
  Clone ID: PAT_MRT3847_60881C.1.pep
QELLELPLNVQWSTQRDQRRCEPLAXNTCHTRHLATRXRRLAWCLQECMASSGALNLAYRKASHAVYIISRWLEHMNASV

SEQ ID NO: 242362 - protein, 334 aa, Glycine max
  unsure (1)..(334): unsure at all Xaa locations
  Clone ID: PAT_MRT3847_60882C.1.pep
MSPLSKLSLLILMVFISSAMASSDERVSELLSLQSRSKSGVIRLNDQSLARFLTSVKTPRPYSILLFFDAAQLHDKPELRLTELRNEFSIVSSSFLANNPSNTKLFFCDIEFKESQLTFSQFGVNALPHIRLIGPTAGLKDSEPMDQGDFSRLADSMAEFVESKTKLSVGPIHRPPLFSRNQIILLTVFILIWIPFFLKKVIAGQTILHDPKVWLAGSVFVYFFSVSGAMHNIIRKMPMFAHAHXDPSKLVFFYQGSGMQLGAEGFAVGFLYTVVGLLLAFTTHGLVRVSNVSVQRVVMIFALLVSFLAVKQVVYLDNWKTGYGIHGFWPSSWN

SEQ ID NO: 242363 - protein, 130 aa, Glycine max
  unsure (1)..(130): unsure at all Xaa locations
  Clone ID: PAT_MRT3847_60883C.1.pep
AAASFMAFSYPSLAGKAVKLGPSDPXVGRVIMRKIRTKHAYSGSPWYGPYRVKYLGPFFGEPPYYLIGXFPCDYGWDTVGLTADPXTFVINRELEVIHSMWALLCALGCVFRELLYRNWVIYGETEWLKA

SEQ ID NO: 242364 - protein, 177 aa, Glycine max
  Clone ID: PAT_MRT3847_60884C.1.pep
MKVNIPSKGLKGARETCPDDDDYKTEDKKAEKGAENMMEETTESREEKDSSTRTDAGRKDGRVLSDADAAVLIQAAYRSYLVRKWEPLKKLKQIDEVRKEVTRVQGRVQAFERSPELQNDDKQKIAIEETIMKLLLKLDTILVLVRLPYLLMMKSVVHFLIFFDSLTINITQNIKVF

SEQ ID NO: 242365 - protein, 336 aa, Glycine max
  unsure (1)..(336): unsure at all Xaa locations
  Clone ID: PAT_MRT3847_60885C.1.pep
MSPFSKLLFLILMVFVSSAIASDDERVSELVSLQSRSKSGLIRLNDQSLARFLTAVKTPRPYSILLFFDAAQLHDKPELRLTELRNEFSIVSSSFLANNNPPNTNKLFFCDIEFKESQLSFSQFGVNALPHIRLIGPNMGLKDSESMDQGDFSRLADSMAEFVESKTNLSVGPIHRPPLFSRXQLVLLTVFILLWIPFLLKKLLAGQTILHDPKVWLAGSVFVYFFSVSGAMHNIIRKMPMFLVDRNDPSKLVFFYQGSGMQLGAEGFAVGFLYTVVGLLLAFMTHGLVRVSNVSVQRVVMIFALLVSFLAVKQVVYLDNWKTGYGIHGFWPSSWN

SEQ ID NO: 242366 - protein, 39 aa, Glycine max
  Clone ID: PAT_MRT3847_60886C.1.pep
YESLMRMVEFMGQKGGLNSGNFFICGILGFKGDWSIIGF

SEQ ID NO: 242367 - protein, 42 aa, Glycine max
  Clone ID: PAT_MRT3847_60887C.1.pep
HPSTSHLKTSIYIPDAYRTLSALVLRSLSFVCDSQYNGLALR

SEQ ID NO: 242368 - protein, 139 aa, Glycine max
  unsure (1)..(139): unsure at all Xaa locations
  Clone ID: PAT_MRT3847_60888C.1.pep
LAGPTRAFSYASGRLDPSTRTIRSLDSQISSGCEACRIGALSQLLLRXEQIARPRLLIGQAGALPYIXKALYAFADPYQEDARYHSYLIISNYRKRRPLCSHGGALDGIRPVMFHHHTTYYCAEGHSDDVTVHSLVYQY

SEQ ID NO: 242369 - protein, 492 aa, Glycine max
  Clone ID: PAT_MRT3847_60889C.1.pep
MGACVSTPQGCVGGRLSSSKKKTRKRRREGLRRRVTSRLWLPDCSFANPTFQGSIEEAWFDSIAVFDSDCDDDYQSVPDDVVSLSGIEGGSVSSFPSSRDATRGVSTDHVQKQKELLAGSEAARNVIDSQREPVFLDEISSVDANSNKDDGLLDNCGILPNNCLPCLVSTIPSVEKRRSSSSSPPNARKKPTTKLSFKWKEGHGNATLFSSKMLLQRPIAGSQVPFCPIEKKMLDCWSQIDASTFKVRGVNYFKDKKKDFAPNYPAYYPFGVDVFLSPRKVDHIARFVELPVMSSSAKFPPILVVNVQVPLYPATLFQGETDGEGMSIVLYFKLSESYSKELPQTFQESIRRLMDDEVEKVKGFPVDTIAPFRERLKILGRVVNLQDLHLSAAERKLMQAYNEKPVLSRPQHEFYTGENYFEIDLDMHRFSYISRKGFEAFLDRLKVCILDVGLTIQGNKQEELPEHVLCCIRLNGIDYMNYQQLGLTQDPL

SEQ ID NO: 242370 - protein, 53 aa, Glycine max
  Clone ID: PAT_MRT3847_6088C.1.pep
KKQDLYVFMFPKKEILPHFHCNPLSGGEDLTRSRVRFYSRFKGVLPAFQRFGI

SEQ ID NO: 242371 - protein, 115 aa, Glycine max
  unsure (1)..(115): unsure at all Xaa locations
  Clone ID: PAT_MRT3847_60890C.1.pep
SXHAYVSSXFGSXSLVXVQGXXXNXXXXXLRQPLXHXXGXXXMXFXXXAXXXXSCXXLGDXXXXXXXXLXXXDSXXXXXPXNXXVXXHTXAXDXXRXDXANRXXXCSXAXXXANT

SEQ ID NO: 242372 - protein, 111 aa, Glycine max
  unsure (1)..(111): unsure at all Xaa locations
  Clone ID: PAT_MRT3847_60891C.1.pep
MKMTVLAFFLAISLEARDSHAXDTFPHRIKTGERARTPEVTCASWMLAVETQTIVGIEIIPDECVQPTNAYIDSNQYQSHSKLVNQHTYIXATYIYIQRTDTCVFNIEGNV

SEQ ID NO: 242373 - protein, 124 aa, Glycine max
  Clone ID: PAT_MRT3847_60892C.1.pep
MANSTIITFNIILFFVLISQGCSQCSLKDLHVGQFLSGNIVNGMPEWNVLVSNWCRCVQTNVMLNCTGFESIEPIDPRLLKFQPLQGVCLVNSGKPIGKDVFEFQYAWDVPFPFSPISSVISCS

SEQ ID NO: 242374 - protein, 108 aa, Glycine max
  unsure (1)..(108): unsure at all Xaa locations
  Clone ID: PAT_MRT3847_60893C.1.pep
EDDRRAAGAERKSRTGWTASRRAYEYRTRRRSRQLREAVRALRTERPELGQQSYCALTHRGELTAVPNRSNSYHGIYSPIETNHRYVPVSLRIQPHKXTTHPQPTLQE

SEQ ID NO: 242375 - protein, 54 aa, Glycine max
  Clone ID: PAT_MRT3847_60894C.1.pep
KTHKVLFENKSESFCTSDKVDLFNSRCHPYSALPILSQMKHTISYKDIGISQGL

SEQ ID NO: 242376 - protein, 121 aa, Glycine max
  Clone ID: PAT_MRT3847_60895C.1.pep
LSLFWFLGYVVFFFTRITLVFFGLGRKNTTDLIWKEWATRVGFYKGEMKRASGGGTDHTFLVWGEHQSPPRPFQKRGETIPPPVEKNNNGGMATGCLNQKSEATSFLVFTENLKKTFLRAL

SEQ ID NO: 242377 - protein, 84 aa, Glycine max
  Clone ID: PAT_MRT3847_60896C.1.pep
LCQPYLLGIDPDLTISHQSHVKPTTDLRSSASSSGDGVEVQVYLSPRKDKPACHSALLSHCTHMYAVMPYVTVTLSAQDVAYAA

SEQ ID NO: 242378 - protein, 82 aa, Glycine max
  Clone ID: PAT_MRT3847_60897C.1.pep
MHNLTDFGISITFSTHLTHLCIGASDISMMDRTVVSVLVIAMTLVDMNCNCTSVGHMPLTKADGHDLHEASSRSTQTGIKAI

SEQ ID NO: 242379 - protein, 78 aa, Glycine max
  unsure (1)..(78): unsure at all Xaa locations
  Clone ID: PAT_MRT3847_60898C.1.pep
LERIGSGRTKKPTILRATETWFASVDGFRHTAMDAIGMXNWFPSRSEQHLINDFYSLRLMGVIAQDMGCGLPIPVFYH

SEQ ID NO: 242380 - protein, 70 aa, Glycine max
  Clone ID: PAT_MRT3847_60899C.1.pep
VALTVFYDTSWTSAQELSQLMMEKCMMILIKLLLLQNTLLCFGRMGPSKMNRILPTIVVRLRLCPKIADP

SEQ ID NO: 242381 - protein, 276 aa, Glycine max
  Clone ID: PAT_MRT3847_6089C.1.pep
MKSLLNPKFSALSPKASPFALFSLPSSRFSFRSNPRRIPNRLLRLNPSPCSSNNFCCTIQNRSLQTEPSPPPSGEIHVIVGPMFAGKTTSLLRRIQSETTNGRNVAIIKSSKDTRYGLDSIVTHDGAELPCWALENLSSFKQKFGIDAYEKLDVIGIDEAQFFDDLYEFCLQAADHDGKTVIVAGLDGNYLRRSFGSVLDIIPLADSVTKLTARCEICGKRACFTLRKTQDKQIELIGGVDVYMPVCRQHYVSGQVAMEATRHVLESHKVECASHT

SEQ ID NO: 242382 - protein, 110 aa, Glycine max
  Clone ID: PAT_MRT3847_608C.1.pep
EKPLKTGNTEGQTQGNPKKATKDSFSTTPLNKKGGGGPKWGDPPNRGGKKETKHKGQGEKKRRFLQRKNGHPTKKDGLKRPPTGGKKKKKGGGPPPGGYSPWGKKKNLGG

SEQ ID NO: 242383 - protein, 56 aa, Glycine max
  Clone ID: PAT_MRT3847_60900C.1.pep
KLTHNRVLYCIPGGYNYSNNWIKHSLGISNPFYRTTYWTAELSEGISQMRTLKGGN

SEQ ID NO: 242384 - protein, 120 aa, Glycine max
  unsure (1)..(120): unsure at all Xaa locations
  Clone ID: PAT_MRT3847_60901C.1.pep
LNMESESKQVKXKLGVLDILKGAGTFYVSNINFIIFTFLNSLPFFFVMLYFEILFQQTIVETPEIFSLLPFNERNHAYELDVIYDYGTXIPSRKFRKNYLPDKSFSKDYLPVLILLGFIY

SEQ ID NO: 242385 - protein, 68 aa, Glycine max
  Clone ID: PAT_MRT3847_60902C.1.pep
IKSPPPQIVACIVEKTIWYGPASNIGCQQETLLVTYVHYFMQRQPQHKFLKKKKERAAAYRIKAYVEA

SEQ ID NO: 242386 - protein, 188 aa, Glycine max
  Clone ID: PAT_MRT3847_60903C.1.pep
ATACVRLREDDRRATLQASAIVIQSGLRALAARNEYRYRRRTKASTKIQTQWRRAQALSDYKQQKKATVTLQCLWRAKVARKELRKLRMAARETGALKEAKDKLDKLVEELTWRIDIEKHMRTDLEEAKGQEIAKLQNALQEMKAQLDEAHAAIIHEREAAKIAIIGDPLKQKRLIFLIKLHMLSDHL

SEQ ID NO: 242387 - protein, 71 aa, Glycine max
  Clone ID: PAT_MRT3847_60904C.1.pep
HHVRTCMDLSPLRQPPFFFFFFFFFSGRVWYGNFFFCMRVWFGCSVLLRSPFRTFFFLLFVFCRRGAPFFC

SEQ ID NO: 242388 - protein, 295 aa, Glycine max
  Clone ID: PAT_MRT3847_60905C.1.pep
NSARGETGALKEFKDKLDKLVEGLTWRIDIEKHMRTDLEEAKGQEIAKLQNALQEMKAQLDEAHAAIIHEREAAKIAIEQAPPVIKEVPVVDETKLELLTNKNEELETEVEELKKKIKEFEESCSEIENENQERLKEAEEAQLKATQLQETNERLELSLSNLESENQVLCQKALEESKNEELFEEIKILKDQIANLQSENESLRSQAAAVAFEQKVHPEKIESDHSAASLEQKVQPEKIEPGHSACFRAESSSRKNRTRPFSSCSRAESSSRKNRTRPRSCCCREDASAAKSYCR

SEQ ID NO: 242389 - protein, 253 aa, Glycine max
  Clone ID: PAT_MRT3847_60906C.1.pep
GSGPVLFNSDDNVLVAAPTGSGKTICAEFAILRNHQKGPDSVMRVVYVAPVEALAKERYRDWERKFGGGLKLRVVELTGETATDLKLLEKGQIIISTPEKWDALSRRWKQRKHVQQVSLFIIDELHLIGGQGGPILEVVVSRMRYIASQVENKSRIVALSTSLANAKDLGEWIGATSHGLFNFPPGVRPVPLEIHIQGIDITNFEARMQAMTKPTYTAIVQHAKNGKPALIFVPTRKHVRLTAVDMITYSGAD

SEQ ID NO: 242390 - protein, 112 aa, Glycine max
  Clone ID: PAT_MRT3847_60907C.1.pep
MASFDEAPPGNSKNGEKIFKTKCAQCHTVDKGAGHKQGPNLNGLFGRQSGTTPGYSYSTANKNMAVIWEEKTLYDYLLNPKKYIPGTKMVFPGLKKPQERADLIAYLKESTA

SEQ ID NO: 242391 - protein, 125 aa, Glycine max
  unsure (1)..(125): unsure at all Xaa locations
  Clone ID: PAT_MRT3847_60908C.1.pep
MTEAGPVLSMCLAFAKEPMQVKSGACGTVVRNAEMNIVDPRTGASLHRNQAGEICIRGNQIMKGYLNDQEATQRTIDMEGWLHTGDIGYXDDDDELFVVXSVKDLNVYERDRVNPAELEAILIAH

SEQ ID NO: 242392 - protein, 47 aa, Glycine max
  Clone ID: PAT_MRT3847_60909C.1.pep
YLFLCLFFTTFIFFLCNHYTLFRYFLAIFMEPASGELRLNITILLYV

SEQ ID NO: 242393 - protein, 80 aa, Glycine max
  Clone ID: PAT_MRT3847_6090C.1.pep
MLSATAIGALLGLGTQMYSNALRKLPYMRHPWEHVVGMGLGAVFVNQLLKWEAQVEQDLDKMLEKAKAANERRYIDGDDD

SEQ ID NO: 242394 - protein, 63 aa, Glycine max
  unsure (1)..(63): unsure at all Xaa locations
  Clone ID: PAT_MRT3847_60910C.1.pep
VFDFLGKKKDEEDKPHPQEEVFATEFLKVTVLDQGENXHSLLVKLHRSHSSSSSSSEEVGEDG

SEQ ID NO: 242395 - protein, 745 aa, Glycine max
  unsure (1)..(745): unsure at all Xaa locations
  Clone ID: PAT_MRT3847_60911C.1.pep
MSMSERKTIDLDQGWDFMQKGILKLKNILEGLPEPQFSSEDYMMLYTTIYNMCTQKPPHDYSQQLYDKYRESFEEYIVSTVLPSLREKHDEFMLRELVKRWANHKIMVRWLSRFFHYLDRYFIARRSLPPLNEVGLTCFRDLVYKELNGKVRDAVISLIDQEREGEQIDRALLKNVLDIFVEIGMGQMDHYENDFEAAMLKDTSAYYSRKASNWILEDSCPDYMLKAEECLKREKDRVAHYLHSSSEPKLLEKVQHELLSVYANQLLEKEHSGCHALLRDDKVEDLSRMFRLFSKIPRGLDPVSSIFKQHVTAEGMALVKLAEDAVSTKKAEKKDIVGLQEQVFVRKVIELHDKYLAYVNDCFQNHTLFHKALKEAFEIFCNKGVAGSSSAELLATFCDNILKKGGSEKLSDEAIEETLEKVVKLLAYISDKDLFAEFYRKKLARRLLFDKSANDDHERSILTKLKQQCGGQFTSKMEGMVTDLTLAKENQTSFEEYLTNNPNADPGIDLTVTVLTTGFWPSYKSFDLNLPAEMIRCVEVFKEFYQTKTKHRKLTWIYSLGTCNISGKFDPKTVELIVXTTYQASALLLFNSSDRLSYSEIMTQLNLSDDDVIRLLHSLSCAKYKILNKEPNTKTISSTDYFEFNSKFTDKMRRIKIPLPPVDEKKKVIEDVDKDRRYAIDASIVRIMKSRKVLSYQQLVMECVEQLGRMFKPDVKAIKKRIEDLISRDYLERDKDNANLFRYLA

SEQ ID NO: 242396 - protein, 181 aa, Glycine max
  unsure (1)..(181): unsure at all Xaa locations
  Clone ID: PAT_MRT3847_60912C.1.pep
HASGQVLFAEFYRKKLARRLLFDKSANDDHERSILTKLKQQCGGQFTSKMEGMVTDLTLAKENQTSFEEYLSNNPNADPGIDLTVTVLTTGFWPSYKSFDLNLPAEMIRCVEVFKEFYQTKTKHRKLTWIYSLGTCNISGKFDPXTVELIVTTYQASALLLFNLSDRLSYSEXMTQLNLSR

SEQ ID NO: 242397 - protein, 132 aa, Glycine max
  Clone ID: PAT_MRT3847_60913C.1.pep
TPSPTCGIVIAYFADTQLYEFVSRNNKLKGLGKPVVSVLDSGLWYYCRHPNYFGEQLWWWGLVVFAWSLGVGWTFIGAFVNTMCLAYVTRLVEDRMLKQESRAEAFRVYQNTTSVWIPWFKSSPSGVKNKNA

SEQ ID NO: 242398 - protein, 374 aa, Glycine max
  Clone ID: PAT_MRT3847_60914C.1.pep
MGEIRKKGSVTSPASLFPVQEAQRSDKRVENALPDKQKEPVRPRSFTTDNNNLINLVHKLPEQLSHDIMVPFGKAAFFPGRLIHTNEFLVLLGEGYYAERTSKQTVEILQRRGKSLDSQVDSLEANIKDLEAEASFFNATASQVAEGLVEIREDYLEKDSNEGEFKSFHLQQATPNLGNATADDGVPARMLAIMDELEKEELAAEFSAEMHNFDDGNWDFHDISYQEHIDNKLQNSKDVHQSELLDQINNKIITADLPKKQNRKEDITDQLNFASLAVESRVKERENFVEYIDPSEKIPARSKERSVQATTASKTEVRHQTSQPSFDSRKAFTGSIIEHAENIKPTTRQQSSASSQDSGSQSSKPVSRFKMQRR

SEQ ID NO: 242399 - protein, 192 aa, Glycine max
  Clone ID: PAT_MRT3847_60915C.1.pep
HEGNILLDGELNPKISDFGMARIFGGNDIQTNTRRVVGTFGYMPPEYAFRGLVSEKLDVFSFGVLLLEIISGRKISSYYDHDQSMSLLGFAWKLWNEKDIQSVIDPEISNPNHVNDIERCIHIGLLCLQNLATERPIMATVVSMLNSEIVNLPRPSHPAFVDRQIVSSAESSRQNHRTQSINNVTVTDMQGR

SEQ ID NO: 242400 - protein, 89 aa, Glycine max
  Clone ID: PAT_MRT3847_60916C.1.pep
VPVGKAAFFPSCLIHTNEFLVLLGEGYYDERTSKQTVEILQRRGKSLDSRVDSLEVNIKDLEAEASFLNATASFLVARFFWEKGIMLNF

SEQ ID NO: 242401 - protein, 45 aa, Glycine max
  Clone ID: PAT_MRT3847_60917C.1.pep
LKELVHRLESIHLEVITYSNYHHSLLCKIAVSSIHVWLYEIPVPF

SEQ ID NO: 242402 - protein, 37 aa, Glycine max
  Clone ID: PAT_MRT3847_60918C.1.pep
LLFLSMGALITAYSSCVVSMAHSMCGNPTPWHHRPLL

SEQ ID NO: 242403 - protein, 27 aa, Glycine max
  Clone ID: PAT_MRT3847_60919C.1.pep
MNFHGSENAGNKQHQNIASNGTSSVVD

SEQ ID NO: 242404 - protein, 80 aa, Glycine max; identical to SEQ ID NO: 242393
  Clone ID: PAT_MRT3847_6091C.1.pep

SEQ ID NO: 242405 - protein, 74 aa, Glycine max
  Clone ID: PAT_MRT3847_60920C.1.pep
LKKGRDLHERGGVCLSPRFEGDHAIQRDREAWLAQRPTVRDARDQIREHKRPQDKPLEIPLNDVNLIGDIENGP

SEQ ID NO: 242406 - protein, 355 aa, Glycine max
  unsure (1)..(355): unsure at all Xaa locations
  Clone ID: PAT_MRT3847_60921C.1.pep
MGGQRSGYGKRPHSQSDHDNGPNKRRNHGDDREQFVIDLEDTVYRYVCPGRKIGSVIGRGGEIVKQLRVETKAKIRIGETVPGCEERVVTIYSPSDETNAVEGGGNYVSPAQDALFKVHDRVVAEDFHGDQDDDGGQQVTAKLLVPSDQIGCVIGKGGSIVQNIRSETGAQIRILKDDHXLCALSSDELVQITGDASVVKKALCQIASRLHDNPSRSQHLLTSAVPGVYPAGGSLIGPGAGAPIVGIAPLVGAYGGYKGDTGDWPPRSMYSAPRDEASTKEFSVRLVCPTGNIGGVIGKGGMIINQIRQDSGATIKVDSSTIEGDECLIAISTKKFYEETSSPTKEAAVPLHPPC

SEQ ID NO: 242407 - protein, 39 aa, Glycine max
  Clone ID: PAT_MRT3847_60922C.1.pep
PVGERPQRRLDTLGKDTYGASHQLTRALHIIYTAACNNM

SEQ ID NO: 242408 - protein, 101 aa, Glycine max
  Clone ID: PAT_MRT3847_60923C.1.pep
LGHAWRLWTEGRPTDLMDAFLCERCTSSEVIRCIHVGLLCVQQRPEDRPDMSAVVLMLNGDKLLPQPKVPGFYHGSDKAYLSGKFKSFSYNDVSLTVLGAR

SEQ ID NO: 242409 - protein, 50 aa, Glycine max
  Clone ID: PAT_MRT3847_60924C.1.pep
VAKGFFCTQAGWKSHPNVMYIPSSFLFLCDLFHSEIVVNVTKRCSLLEPN

SEQ ID NO: 242410 - protein, 82 aa, Glycine max
  Clone ID: PAT_MRT3847_60925C.1.pep
MLFQGHRAYAGHKKYITPNKRQMLPYFLDSSLPEEEFNRIIKELHQDSLGQPEFRTSKSGRDVTKYPVPECMCNDDSHHHTS

SEQ ID NO: 242411 - protein, 81 aa, Glycine max
  Clone ID: PAT_MRT3847_60926C.1.pep
VKYHAMHASTIRMSISQFSSIGCGALADARVLSQNIMATQPYSPACSQKSFERRCEHVLNVSFVRAKEFKTAMMIKAMMFS

SEQ ID NO: 242412 - protein, 59 aa, Glycine max
  Clone ID: PAT_MRT3847_60927C.1.pep
TRSGDGLISIAQLKQNLSFYNAGAHRKIKHNETICLYFLGKKVGIVLLHTQCHLKLLLP

SEQ ID NO: 242413 - protein, 139 aa, Glycine max
  unsure (1)..(139): unsure at all Xaa locations
  Clone ID: PAT_MRT3847_60928C.1.pep
ARERERVCERERETERARXGKKEKKIERVRKRERECECESERESECEWERETQTRTHTHTQTRXMDTERDRKRXVRVRERGGGRARXAGRWRERYRNRYCVSPRERERDRERERERERERERERERERERERERERERD

SEQ ID NO: 242414 - protein, 81 aa, Glycine max
  Clone ID: PAT_MRT3847_60929C.1.pep
VTSDCCPGCKSPLILHSEHCKFFSFRLGRLFPLLCSYFRGRCISPPPCLILYLIRFKYVYLKICNLLIHLCLKNKYLYRIC

SEQ ID NO: 242415 - protein, 57 aa, Glycine max
  unsure (1)..(57): unsure at all Xaa locations
  Clone ID: PAT_MRT3847_6092C.1.pep
NFPLACFPGFDLRFGWRPNYVFPEITGALGTXVPMFNMPSGRLQASLNKVEAILTPH

SEQ ID NO: 242416 - protein, 47 aa, Glycine max
  Clone ID: PAT_MRT3847_60930C.1.pep
YLAFPLSNLQLEIKHRFVCHTKVSDIEYIFYPTVAPKTPDHIYKLVP

SEQ ID NO: 242417 - protein, 81 aa, Glycine max
  Clone ID: PAT_MRT3847_60931C.1.pep
NPLGGVLSCLSLLHYMLTTPSKFDPPDRGTTQFLKACSNKGNTHFFLFYKPPEAFSFPKTLTLRDWDEKTPPLRGKEAHQT

SEQ ID NO: 242418 - protein, 69 aa, Glycine max
  unsure (1)..(69): unsure at all Xaa locations
  Clone ID: PAT_MRT3847_60932C.1.pep
KFCRLSYGTGSGFAISKLXKNIQVLSSSFVNKQEQYTVQGVQNLGDQAEMCHDLNFRTAVFYCHKARET

SEQ ID NO: 242419 - protein, 116 aa, Glycine max
  unsure (1)..(116): unsure at all Xaa locations
  Clone ID: PAT_MRT3847_60933C.1.pep
AKNTFYTLLYLTEPDDAPLSQEVXYFLMKGSIPCLQYNLEHGFVYRELNRSPGYYDGRYWTMLNLPMFCCTDASDVLKELQESXTALLVGLMRIIXSYNVRPTAGNYFITYYPPGF

SEQ ID NO: 242420 - protein, 147 aa, Glycine max
  Clone ID: PAT_MRT3847_60934C.1.pep
MNASNHEICYSPTYNSFPSSTTFRLEGVHDAEGSLACKREHPKVEREVHAPPAWKRYRGVRRRPWGKFAAEITDPKKNGARIWLGTYETEEEAGLAYDRAAFEMRGSKAKLNFPHLIGSHAPLKPIRVLTKTLKQNLLESDLSYSSA

SEQ ID NO: 242421 - protein, 397 aa, Glycine max
  Clone ID: PAT_MRT3847_60935C.1.pep
MAATCCNFTQASSSFKKLHENIQLQSYFTRCQQRSTCSVEKNFHRGYGGRLQVERWHQYQYVLCARGVELSPSVNEEVGEETEEDISKETLIWRAIKLPIYSVAFVPLTVGSAAAYFQTGIFSARCYFVLLASSVLAITWLNLSNDVYDFDTGVDKNKKESVVNMVGSRKGIFIAAYSCLALGFLGLTWTAVVERNLRSILFLVCAIICGYIYQCPPFRLSYQGLGEPLCFAAFGPFATCAFYLLHASARVKNHFPLSGTVLSASILVGFTTSLILFCSHFHQVEGDKEVGKMSPLVRLGNKKGAEVVKGAVFMLYALLVAFGLIKALPLTCISLCTLTLPLGNLVVRFVEDNYKDKNKIFMAKYFCVRLHAMFGVALALGLVLARNTKFTSWPILS

SEQ ID NO: 242422 - protein, 97 aa, Glycine max
  Clone ID: PAT_MRT3847_60936C.1.pep
VLIKPTHGGGGKGMRIVHAPNEFVESFLAAQREAAASFGVNTILLEKYITPPRHIEVQIFGDKHGNVLHLYEPECNVPRKHPKIIEEAPTSNISGHL

SEQ ID NO: 242423 - protein, 452 aa, Glycine max
  Clone ID: PAT_MRT3847_60937C.1.pep
MLVALLLLVALSNAVRVNGDGGQCGSNPTLDPRPHSVSILEFGAVGDGKTLNTIAFQNAIFYLKSFADKGGAQLYVPPGKWLTGSFNLTSHLTLFLEKGAVLIGTQDPSHWDVVEPLPSYGRGLEVPGGRYQSLINGYMLHDVVVTGNNGTIDGMGMVWWDWYSTHSLNHSRPHLVEIVASDYVVVSNLTFLNAPAYSIHPVYCSHVHIQNVSISTPPESPYTVGIVPDSSDNVCIEDCIVAMGFDAISLKSGWDEYGIAYGRPTENVHIRRVHLHAFSGSALAFGSDMSGGISNVLVEHAHLFNSKSGIEFRTTKGRGGYMKEIVMSDIQMENVHTAIAATGNCGSHPDDKFDPNALPHLDHITLKDVTGTNISIAGNIAGIEESPFTNICLSNITLSTNSVSPITWECSNVSGFSDSVLPEPCPELGNPSYDSSSSCFYLLSVSGKTVVQ

SEQ ID NO: 242424 - protein, 120 aa, Glycine max
  unsure (1)..(120): unsure at all Xaa locations
  Clone ID: PAT_MRT3847_60938C.1.pep
SHFHQVEGDKEVGKMSPLVRLGTXKGAEVVKRGSLYASMLFWVAFGLIKALPLRWKFLCALTLQMGNLVVRFVEVNYKTKNKIFMAKYFCVRLHALFGVALALGLVLARNTKFTSWPILS

SEQ ID NO: 242425 - protein, 142 aa, Glycine max
  unsure (1)..(142): unsure at all Xaa locations
  Clone ID: PAT_MRT3847_60939C.1.pep
LENLESRKGTFYSAYLCLAIGFLGLTWTAVVERNIRSILFLVCAIICGYIYQXCPPFRLSYQGLGEPLCFAAFGPFATCAFYLLHGSSSVMNHFPLSGTVLSASILVGFTTSLILFCSHFHQVEGDKEVGKMSPLVPALSLN

SEQ ID NO: 242426 - protein, 73 aa, Glycine max
  Clone ID: PAT_MRT3847_6093C.1.pep
CFSPAPPIYGPFSCGPVFQGFFFYPPFLKEFFFPPLSKKSRGCVSLLKISNFVSWSNNCYLLVFGPLKLKYKD

SEQ ID NO: 242427 - protein, 30 aa, Glycine max
  Clone ID: PAT_MRT3847_60940C.1.pep
MASSWTPRQNKLFEEALAIHDRETPDRWQN

SEQ ID NO: 242428 - protein, 535 aa, Glycine max
  Clone ID: PAT_MRT3847_60941C.1.pep
MSAIAILPFLLHVLMAASESEPFQDSILQCLSLYSDPSLPNPISAVTYFPNSPSYPPILDSYIRNLRFSSSTTPKPSFIVAPTHVSHIQASIICCKSFNLEIRIRSGGHDYDGLSYVSEAPFVILDMFMLRSVKVNLDDDDDTAWVDSGSTIGELYHAIAERSKIHAFPAGVCHSVGVGGHFSGGGYGNMMRMFGLSVDHVLDAIIVDAQGRVLDRKLMGEDLFWAIRGGGGASFGVVVSWKIRLVPVPEVVTVFRVERTLEQGATDVVHKWQYVADKLHDGLFIRVVLSSVKRKGVKTIRAKFNALFLGNSQELLGVMNKSFPELGLVAEQCIEMSWIDSVLFWDNYPVGTSVDVLLQRHNTQEKYLKKKSDYVQQPISKTGLEGIWNKMMELEKPALALNPYGGKMGEISEVETPFPHRAGNIYKIQYSVTWKEEGEDVANRYLDRIRRLYDYMTPYVSSSPRSSYINYRDVDIGVNGPGNASYAEARVWGEKYFKRNYDRLVEVKTKVDPSNFFRYEQSIPSLASGLSIMSE

SEQ ID NO: 242429 - protein, 83 aa, Glycine max
  Clone ID: PAT_MRT3847_60942C.1.pep
FSNFFNFLPQTHLRAPCYFTSFTQQTTANKSYKKNYHLLSDPNQMYTLNQIIYLILILLYMSYLFQIYLKYTLNLGCYKNFLL

SEQ ID NO: 242430 - protein, 129 aa, Glycine max
  Clone ID: PAT_MRT3847_60943C.1.pep
IRLEVRSYVVASQTQRAKEAPNFGQHKGYPVIDHEFDAVVVGAGGAGLRAAFGLAEGGLKTACITKLFPTRSHTVAAQGGVNAALGNMTEDDWRWHMYDTVKGSDWLGDQDAIHYMCREAPNTVVELEH

SEQ ID NO: 242431 - protein, 106 aa, Glycine max
  Clone ID: PAT_MRT3847_60944C.1.pep
RKDSTGGQPTTCALVEGLAGYAAIRVISLGKVWRYSGGCGTSTSFCTRYIQHQTRRGSRHVVISFRYSRRESYLIAASRLSGQPLVRFSGSPSVNTVASCPIVLEP

SEQ ID NO: 242432 - protein, 91 aa, Glycine max
  unsure (1)..(91): unsure at all Xaa locations
  Clone ID: PAT_MRT3847_60945C.1.pep
ARNSARXAFLAQGSLLNMRSFLGVSAPHAAPXGPHVTAPPPPQLPVQVATGVLHGEKASXSSSPALXERDLVTRPDSPPQQLKSPFQPVRD

SEQ ID NO: 242433 - protein, 76 aa, Glycine max
  Clone ID: PAT_MRT3847_60946C.1.pep
DRPKWKEQLEQNSKFKILMAPFLLKKRNEVCLNFVLTFLSNNFIDINHSSKFIHVAVDHYFIPIASAQNYCTYIYK

SEQ ID NO: 242434 - protein, 162 aa, Glycine max
  unsure (1)..(162): unsure at all Xaa locations
  Clone ID: PAT_MRT3847_60947C.1.pep
MEGGEGGEGLNQAVQQQLNLKQVKTRAISLFKAISRILEDFEAYGRTNSTPKWQDILGQYSMVNLELFNIVDDIKKVSKAFLVHPKNVNADNATILPVMLSSKLLPEMETDDTAKRDQLLLGMQNLPIATQIEKLKARLDLISAAWDCADEVLAXTRKAYWF

SEQ ID NO: 242435 - protein, 99 aa, Glycine max
  Clone ID: PAT_MRT3847_60949C.1.pep
DSFFEALMPISQEIAEIEKGKVDIINNVLKGAPHPPSVVMADAWTKPYSREYAALPAPGLGTAKFGRTTERVDNVYGDHNLMCTIIPASQGVEDQANTT

SEQ ID NO: 242436 - protein, 68 aa, Glycine max
  Clone ID: PAT_MRT3847_60950C.1.pep
KDLSAQVSSVMLHFSSCQRRLLNRLLHANPTYLYVAELQTPTVFLKCSGPPKTGPEYTEPCRSYLGNY

SEQ ID NO: 242437 - protein, 100 aa, Glycine max
  Clone ID: PAT_MRT3847_60951C.1.pep
KYLNVTSLSRTCKLQPPNDRNTYLFTRRQTKLPQAKAPHHNYNGRVCSGYTFQPCPVREWIRTTMGGTDPTQQTAQILPFLGVVSVTRQKSVGAGSYVGG

SEQ ID NO: 242438 - protein, 56 aa, Glycine max
  Clone ID: PAT_MRT3847_60952C.1.pep
TYTLIYKNSSNSSIFPSSSQLHSNSLTHNINHSNHQPLQQHQITHPQSLHKTLYLI

SEQ ID NO: 242439 - protein, 66 aa, Glycine max
  Clone ID: PAT_MRT3847_60953C.1.pep
ILSALPGRCNSPYMEVSSSIPNPEGLHPVHIVTSSQAVKVVKCTFQCHKCRWREHNMRYSDKANGP

SEQ ID NO: 242440 - protein, 62 aa, Glycine max
  Clone ID: PAT_MRT3847_60954C.1.pep
IRSLNFPIDVSCNANRLVCYNFGTGGGIFHLKGCWMSLFILFKFIYLPFEVIFHHDFAAPPM

SEQ ID NO: 242441 - protein, 275 aa, Glycine max
  Clone ID: PAT_MRT3847_60955C.1.pep
SARALLDRMEVVAIAGYITDEKMHIARDYLEKTTREACGIKPKQVEVTDAAILALIENYCREAGVRNLQKHIEKIYRKIALQLVRQGEMIDATVEPIKENIDSDEFGQNTVQNKNSELVEGSDPEKEGETSDKVDKVQTDLSSDESQCLEVAKESEEDKEIKTKTIEKVLVDESNLTDFVGKPVFHAERIYDQTPVGVVMGLAWTAMGGSTLYIETTLAEEGEGKGTLHPTGQLGDVMKESAQIAHTVARAILLEKEPENPFFCNSKLHLHVPAW

SEQ ID NO: 242442 - protein, 31 aa, Glycine max
  Clone ID: PAT_MRT3847_60956C.1.pep
LIIIVNEIRSCVLLISHVWEVKDVVLTSTRL

SEQ ID NO: 242443 - protein, 139 aa, Glycine max
  unsure (1)..(139): unsure at all Xaa locations
  Clone ID: PAT_MRT3847_60957C.1.pep
FLAETIRSHQHFLATQLGLKQWLSVWDPGCXCDTIASKSLALILTVSTXLNNVEYHTTXDDWNSVIIGGSWTRLVIYVKAXFIKMPLPDNRLDAAYATESTFHAPYAYGSYKQIVRVLNPGQWLAAYEWCMTDSFDPQT

SEQ ID NO: 242444 - protein, 118 aa, Glycine max
  unsure (1)..(118): unsure at all Xaa locations
  Clone ID: PAT_MRT3847_60958C.1.pep
ARGSRSRAAALYFFFFFFFLIISFFSIFFHSFLFXFNSSFFFFDYNRSEETALDSRPTRIIXGGHSNPRDWDYXRFTEIANNCGALLFCDRAPPRGRASIKKXNSRFECCHHVTTTPH

SEQ ID NO: 242445 - protein, 377 aa, Glycine max
  Clone ID: PAT_MRT3847_60959C.1.pep
MASSVIPLLAMIIVQLGYAGMNITSKLAIQSGMHPLVLVAYRQIFATISLAPFAFWLERNTAPRMTKHIAFQILLSSLTGVTGNQILYFLGLKYSTPTIACALNNLLPAFTFILAVLSRQEYLRIKTRAGVAKALGTVLSVGGAVLLSFYHGKVLGLGESKIHWRYAENMQRESSSSGGGRNHLLGPVAVIVSALVWAVWFIVQKNMSKSYPAPYTSTFYMCLMASIQCVVIALAAEHNVSAWSLHSTIRLTSALYAGTISTALAYVLLAWTIERKGPLYVSVFSPLLLVIIAVASWAFLHEQLYVGTVIGSLLIVLGLYFVLWGKNKEMNKIDVVEVEGTVMEAIKDSEKDEVKDLELQPYEYDPSNVNGYHHDAN

SEQ ID NO: 242446 - protein, 96 aa, Glycine max
  Clone ID: PAT_MRT3847_6095C.1.pep
LFCNLTPHTQKNPRKPQGSGAKSPLESFIGEKPPQPIQKKRNPSPDKTPPPPGGPPLEAKKNLRLFFPPPPGGFTPGPPKFNQNYLSPPFCKKVPK

SEQ ID NO: 242447 - protein, 154 aa, Glycine max
  unsure (1)..(154): unsure at all Xaa locations
  Clone ID: PAT_MRT3847_60960C.1.pep
MTGKEIERALLMEGIRNTTIQVCEHHAAIDLLTCEDRSEMIELVVDTLNSKTARAIXVMRFYSKVTQLASGVAGHIYTKTTNPVVTTGEGIAIEHRDXDEISNMEFVQFHSTALADEGLTIKRTKPRENAYMITELVTGDGGILYNLGMERVMP

SEQ ID NO: 242448 - protein, 76 aa, Glycine max
  Clone ID: PAT_MRT3847_60961C.1.pep
SENTTKLMRRYGCGAKVLFYYRHKIRDPYVNLQLRDCSLISMLAINLSRVKDVVKILGSVNDRSILRTNVILPMHA

SEQ ID NO: 242449 - protein, 114 aa, Glycine max
  unsure (1)..(114): unsure at all Xaa locations
  Clone ID: PAT_MRT3847_60962C.1.pep
SXPXVRKXGFGSXXLPIXWVFXEKXXXXXAXDXLXXKIXINXXXLCXVXHASXQLXXXAKXXSIQXQXXXXVCAXSXXXXVRXXXXTGXXXRPXRXXKXSXMXSTRXXXTTXTP

SEQ ID NO: 242450 - protein, 371 aa, Glycine max
  unsure (1)..(371): unsure at all Xaa locations
  Clone ID: PAT_MRT3847_60963C.1.pep
MGFLRRIFGAKKPSDSKSAKKRWTFLKHTVRNKSLPPPPPPSAVPPSLTLIPQXPLDANKHAIAVAAATAAVAEAALAAAHAAAEVVRLTSGNLGVSRHPGPTPLCGCGAMATTAAVETIGKVPAFGLGRNVLKAINAIGGVASIGVGXMARNLRADMPCRMLLSTATPAFLTCLSLKNFNTLLVVSFDGSIFIRCSSNANFRDIDVEKARFGSHWLDIGRLDDEKSDKILEVDTWKPHLNSHHSSGSSYQTSSHHYFPQAFSASSRLGSGGARRGPFTPTKSECAWSFFSGYPGHPNYMANTESSRAKVRSHSAPRQRMEFERYGHSTRRSLQGLWEAEPSSDRDSDFRSQAYATTTSSSLNRIGSANLR

SEQ ID NO: 242451 - protein, 170 aa, Glycine max
  Clone ID: PAT_MRT3847_60964C.1.pep
MDWKQYRLVPKNKNMDYGFLLLLLFFHIFLPHSSGKPSGVCVSQGGRFPPFKSEGSTPKKGPKDLTLCRIFRKKTCCDVTHTHPALLSVRKLASTGEASQECLHLWELLECSICDPRVGTQPGPPLICASLCERIYEACSNAYFSMDVKTQVPGPFGVTDFEIVDSAEWV

SEQ ID NO: 242452 - protein, 74 aa, Glycine max
  Clone ID: PAT_MRT3847_60965C.1.pep
TETRFYFKTIMLLDYMPNRGHELSLGIIHWFDEPPYECKHWLWGDSVGAKTLHIIVVIYLLLNLSIFYVYFLDV

SEQ ID NO: 242453 - protein, 102 aa, Glycine max
  Clone ID: PAT_MRT3847_60966C.1.pep
MSDERAVHPDCRNASNPYHECSDYCFRVIAEAKIRSQQQESEVGQASGGSNSKQAIPDESYLGEEIHDDRPDLEENSDSDPDQPVLHEAEQEEVDYTKTFAR

SEQ ID NO: 242454 - protein, 61 aa, Glycine max
  Clone ID: PAT_MRT3847_60967C.1.pep
SIPLRRQVKKYITISYSEALIMSPESHIPASSCDTPSMPYLPSNGGSSLSTKRGRIVLSPQ

SEQ ID NO: 242455 - protein, 36 aa, Glycine max
  Clone ID: PAT_MRT3847_60968C.1.pep
CQSKLYVFIFLYGPNLFLLNSFVIYLNLYIFLKFFI

SEQ ID NO: 242456 - protein, 132 aa, Glycine max
  Clone ID: PAT_MRT3847_60969C.1.pep
NLIEVVTNQADSAAKLAPLDPVTPNSLDSMYYKDFVTILGCDQSDQALLGGSTTASVVKKHSKWHIMFLRDFGISMKKMGRIGVLTGSQGRIRTNCRAVGEKYIRPFAFARCRHSDNCCYNAVLQLYKCMIM

SEQ ID NO: 242457 - protein, 70 aa, Glycine max
  Clone ID: PAT_MRT3847_6096C.1.pep
TLSPRVGGGPLQIFFWGFPPLFFVSLTEFSCAVGLLGMKGPALSPSAVSVVVLCLPAVTIQCAFINVGLI

SEQ ID NO: 242458 - protein, 216 aa, Glycine max
  unsure (1)..(216): unsure at all Xaa locations
  Clone ID: PAT_MRT3847_60970C.1.pep
MEKFLCELLLDSSQPISERFRALFSLRNLKGPVPRNALICATRDSSNLLAHEAAFALGQMQDLEAIPALASVLNDLSLHPIVRHEAAEALGAIGSDGNVPFLKSSLDLDPAEEVRETCELALQRIQNLKDAGNTDELSANGVSPFKSVDPAAPAISGSSVDQLRQVLLDEEKGMYERYAALFALRNDGGNEAVTAIIDSLGSXSALLPHEVAYVLG

SEQ ID NO: 242459 - protein, 130 aa, Glycine max
  unsure (1)..(130): unsure at all Xaa locations
  Clone ID: PAT_MRT3847_60971C.1.pep
EDFNHPYPFWKNKEYFVDLPFRLNEDINPTKTTHPGMTPSDLQAXQECQDLLRQGLIEPTRSXWACQAFYVGKKSXKKLRGKKRLVIDYKPLNHSLKDDKFPIPKASSLPTLIRESNLFSKFDLKSSFWQ

SEQ ID NO: 242460 - protein, 67 aa, Glycine max
  unsure (1)..(67): unsure at all Xaa locations
  Clone ID: PAT_MRT3847_60972C.1.pep
NGLPCSXHIXXSILQGXKPNKLIIIKKTTHKEREKQIXKGCXMIWHQILYADXHFLNFCLYASQVNI

SEQ ID NO: 242461 - protein, 97 aa, Glycine max
  unsure (1)..(97): unsure at all Xaa locations
  Clone ID: PAT_MRT3847_60973C.1.pep
WSLFSPRLGDPTESTSRSFFKSGIVXIEPTFLSLYTTVLTIMEGPCSKAKCTTHGIQGTFWPFGGMIFALVYCTAGISGGHINPAATLLLFLATKLL

SEQ ID NO: 242462 - protein, 51 aa, Glycine max
  unsure (1)..(51): unsure at all Xaa locations
  Clone ID: PAT_MRT3847_60974C.1.pep
AARAGXPXYSNLVLIHLXFLISFFTMSLAGKITTEIGVHATATKWINLCAT

SEQ ID NO: 242463 - protein, 52 aa, Glycine max
  Clone ID: PAT_MRT3847_60975C.1.pep
DGTSLRVTSVSTGKYLCAKPGGGNVLLANGTSASTAWETITLWRINEDTFRL

SEQ ID NO: 242464 - protein, 67 aa, Glycine max
  Clone ID: PAT_MRT3847_60976C.1.pep
YLMPGSNSTPKPLVEKRKFQINKEGKDSAIVLSSKKYKYIQYYGALHILVKSRITKHLQNAESPCSH

SEQ ID NO: 242465 - protein, 92 aa, Glycine max
  Clone ID: PAT_MRT3847_60977C.1.pep
ELRISCTSCKACGVGAMPLRRSIIPHCGIANRDFLCSVGLIHHQRHSHTDPRAFVCIFSCSRAPSGDIVCPQDPLTSTLVSLYGPTRPNTRA

SEQ ID NO: 242466 - protein, 40 aa, Glycine max
  Clone ID: PAT_MRT3847_60978C.1.pep
YRRTVFWENVKKQKGCCLSLDYSKNTLKNALFYHILHPCK

SEQ ID NO: 242467 - protein, 63 aa, Glycine max
  Clone ID: PAT_MRT3847_60979C.1.pep
NVTKSSIRCPSFNTVVIVLNLGSSKIPSLLPLLPFCSRSSYWRAPFFSPGPAFLPLHWENPPF

SEQ ID NO: 242468 - protein, 42 aa, Glycine max
  unsure (1)..(42): unsure at all Xaa locations
  Clone ID: PAT_MRT3847_6097C.1.pep
SPSXXNQWQWWYGSAALXILXPSKVSXTXVQXXXLTXXXXAS

SEQ ID NO: 242469 - protein, 40 aa, Glycine max
  Clone ID: PAT_MRT3847_60980C.1.pep
IYIQHLYIPLIFFCPTIYRFGGSIDTAALLDFGDSGHDLI

SEQ ID NO: 242470 - protein, 59 aa, Glycine max
  Clone ID: PAT_MRT3847_60981C.1.pep
FGVGFVIKTLVWLVALLVPSSVFLHAFIYYFGLPLNVYQLYEQARIKPLIPVFNKVRLS

SEQ ID NO: 242471 - protein, 56 aa, Glycine max
  Clone ID: PAT_MRT3847_60982C.1.pep
FYFFFENKNNFIQQYNCLKKLTFKAIHTEIPQLFYGTYIISPPQLLGFKFYFHCKT

SEQ ID NO: 242472 - protein, 303 aa, Glycine max
  Clone ID: PAT_MRT3847_60983C.1.pep
GPEFPSTHASASFRRVFRTYGPGLAKNRYEYINAALYLIASLVLLSGLAAQLSSEARSGLVLIIAALAIILLVNLHDLFAHLVGIDFRLPLIAFDLQLAFVEFAVPVIQMFGTLLAFLGVFFLFIQEEKGYGYFKLEKHALNMLVAGPVLWVIGSIHNSCQIYERADGHVQILQQCVYIPFLMGSLSFMLSAILNYHEKSRDIHHGLHLLGGTWIWLGIFGSLMFFIGGLTNLIKVFKMQQMNGIRLEKLRGEAHERLLSARKAQIPLIMEHQTNISHHPQETKVTLPLPTPYKDVLIGQTKS

SEQ ID NO: 242473 - protein, 42 aa, Glycine max
  Clone ID: PAT_MRT3847_60984C.1.pep
VRGKMLRPFLLSNKNKAHKTTAQLSQHPTGNEERIASRAFCI

SEQ ID NO: 242474 - protein, 31 aa, Glycine max
  Clone ID: PAT_MRT3847_60985C.1.pep
KRIKCIDFFLYKLKPTYALLIFILSFNSFKN

SEQ ID NO: 242475 - protein, 124 aa, Glycine max
  Clone ID: PAT_MRT3847_60986C.1.pep
LANSLAVCSYGYSILRRFLPEEKVEAVKGLSLTADGNGVVFDVPAKDLDIYLNGQENASNVSLEVVKTLPQLQQKEQHQRGGRFGDGGGRGYRFGGRGGGGRNGRFSNGGGRGGRGGNWGGKRW

SEQ ID NO: 242476 - protein, 64 aa, Glycine max
  Clone ID: PAT_MRT3847_60987C.1.pep
EKGGSDTSPDSAADIYDGEENSSVVAADKQSNLISHESRHHFKIDIYSHDTLEKMDTWSTSIFT

SEQ ID NO: 242477 - protein, 119 aa, Glycine max
  unsure (1)..(119): unsure at all Xaa locations
  Clone ID: PAT_MRT3847_60988C.1.pep
FSLLVNTRVFTVLKLGFLTVPLVLLVVFSSFSFECKSFVFSLSLGLFINNNNIEGYRVQIRVSTGRVTVTIPSGKSVPKNIRVQGINSLVTGWYWPSSHHISVIRVXTDTPAXAWSYNS

SEQ ID NO: 242478 - protein, 54 aa, Glycine max
  Clone ID: PAT_MRT3847_60989C.1.pep
MALVSGGSSTLNPNASLYIPIVFRHVDDCYSEWRQLVTSLTLFYDYCLKLHYVD

SEQ ID NO: 242479 - protein, 91 aa, Glycine max
  unsure (1)..(91): unsure at all Xaa locations
  Clone ID: PAT_MRT3847_6098C.1.pep
MRLENNMVVLKVCLWLLLLSSTTAARMELSFIKSDHSSSYDYDDYSIPCXESXLCTLSMPTQCSXEYIMLNSRHSYYLNYMSTHSQSGHYR

SEQ ID NO: 242480 - protein, 55 aa, Glycine max
  unsure (1)..(55): unsure at all Xaa locations
  Clone ID: PAT_MRT3847_60990C.1.pep
KTRADRRVRSQIPIILPTYFFSQXSQFNIDPIFTTATPSTTFSFILTRLLKAHSF

SEQ ID NO: 242481 - protein, 53 aa, Glycine max
  Clone ID: PAT_MRT3847_60991C.1.pep
FLLEQGFIWLLHSFWGCEMSKKDLFFLLFFFERINSALFKHTFYYTTYICCEN

SEQ ID NO: 242482 - protein, 48 aa, Glycine max
  Clone ID: PAT_MRT3847_60992C.1.pep
PRVRAVKKIEDNNTVDLIVDLRADKKKIKDAVKKMYDIETKKVNTLIR

SEQ ID NO: 242483 - protein, 39 aa, Glycine max
  Clone ID: PAT_MRT3847_60993C.1.pep
TPPLDHFFYILFLRKNTITYAHHKLVIEIVLFPSKVLIG

SEQ ID NO: 242484 - protein, 711 aa, Glycine max
  unsure (1)..(711): unsure at all Xaa locations
  Clone ID: PAT_MRT3847_60994C.1.pep
ACVLVSSLLTWFCFVAGLKDDDLYRELWKLCAGPLVDVPRNGDRVFYFPQGHMEQLQASTDQELNQEIPHFNLPAKIFCRVVNIQLLAEQDTDEVYACIALRPESDQTEPTNPDPNVVXPQNYIISKLEVXLTASDTSTHGGFSVLRKHATECLPELDMTQSTPTQELAAKDLHGFEWKFKHIYRGQPRRHLLTTGWSTFVASKRLVAGDAFVFLRGEHGQLRVGVRRLARQQSPMPSSVISSQSMHLGVLATASHAVMTRTMFLVYYKPRTSQFIVGLNKYLEAVNNKFSLSMRFKMRFEGDDSPERRFSGTIVGVGDVSAGWSNSQWRSLKVQWDEPATIPRPDRVSCWEIEPFVASTALNVTQPAVKGKRSRPADVLSSAASGFWYHGSSNELSQLGAAAEVQSKENQVVPCSLRQKDIINSNPINANNSSISTRVRMEGVWPSSPHLNATPNLFSDPNNNNSNNGVSARSLISGYPNVPSRSSDGPTCDGVEDGKKTENSLDCWLFGVNLTNNCSNVITTPSEREQRGPSSSVVLSGPKESIPAAACETERVQTPNYSLSNKGQKQIISEASPNQWQNKQATVLSMRTRTKVQMQGVAVGRAFDLTTLSGYDDLIDELEKLFEIRGELRSQDKWAVTFTDDENDMMLAGDDPWPEFCNMVKRIFICSREDLKKMKCCKLPASSSEVEEILLSPDSQNRDETQQSHMP

SEQ ID NO: 242485 - protein, 157 aa, Glycine max
  unsure (1)..(157): unsure at all Xaa locations
  Clone ID: PAT_MRT3847_60995C.1.pep
SSKAMAFLNCFDMLVLLLLLVNMSFYGNVDAQKNGLGASFIFGDSLVDAGNNNYLSTLSKANIPPNGIDFKASGGNPTGRYTNGRTIGDLVGEELGQPNYAVPFLAPNATGKTILSGVNYASXGGGILNATGRIFVNRIGMDVQIDYFSITRKQIDK

SEQ ID NO: 242486 - protein, 54 aa, Glycine max
  Clone ID: PAT_MRT3847_60996C.1.pep
IPVFILLILVFFIRIIDNCYGLLLGISLFFILLIRIIVRYDPTNKGLFVFYFIN

SEQ ID NO: 242487 - protein, 75 aa, Glycine max
  Clone ID: PAT_MRT3847_60997C.1.pep
VNWNIHKENGLDFRIKHSLCNFLSSYWSFQTCKLQIATNGPSLLVVLLSFTFAEPTVSEACKEAVKYQLIVNSDF

SEQ ID NO: 242488 - protein, 76 aa, Glycine max
  Clone ID: PAT_MRT3847_60998C.1.pep
KPFLFFPGPGAIAPSFKARPLGAKKKPPFPPWVGPFFKGVGRLFFPFANGVFPSTNLFFLSSPLRYVGFPLSASGL

SEQ ID NO: 242489 - protein, 78 aa, Glycine max
  Clone ID: PAT_MRT3847_60999C.1.pep
MKKKISHKKFEHPTHGSLGFLSKKRAALHKGKKKAFPKDDPFKAPKLTAFFGYKAGMTHIVREVEKPRSKLYKKETCE

SEQ ID NO: 242490 - protein, 93 aa, Glycine max
  Clone ID: PAT_MRT3847_6099C.1.pep
KKKKKKKKKKKKKREKKKKKKGKKKNKKKKKKKKKKKKKKKKKKGRPPFRGLLTPGINPGPVPVGVQIFLIGGRFKPWQNKGKNCSLGKMVFR

SEQ ID NO: 242491 - protein, 105 aa, Glycine max
  Clone ID: PAT_MRT3847_609C.1.pep
KNSTPPRGRNNNVSPAAIEFWERLFYHGYKADVCINTDNGGVVYAHSNILAMSTPVFRGMLKQANCHRRWRTISITGVPHDAVHSFIRFLYTSRYKKEEMDEFVL

SEQ ID NO: 242492 - protein, 182 aa, Glycine max
  Clone ID: PAT_MRT3847_60C.1.pep
MLGDFIIRCLILILGYAYPGFECYKTVEKNRGDNGELRFWCQYWVIVALFTVLENFTDVIIGWWFPLYGELKLALFIYLWYPKTKGTGYVYNTVLRPYVSSHENDIEKKFREWRARAWDLAIFYWKNCTELGQATTFQILDYLAAQSKKFSSKSYSEKKDSWVQLQVPHHYLHFEKLSLRTT

SEQ ID NO: 242493 - protein, 60 aa, Glycine max
  Clone ID: PAT_MRT3847_61000C.1.pep
CPRAKKKEVGKLGKKFLGGPKGKHFRKKVLGLKRKAKGVPQPGGCSTHDLGQVFKGGLLN

SEQ ID NO: 242494 - protein, 74 aa, Glycine max
  Clone ID: PAT_MRT3847_61001C.1.pep
RPVMKEHMKYIIDHAEEIEKLIKVKAQVSEVKSIMLENIDKVCSCFRVRHGIFFRSSVISPRASLRAMGKVLPL

SEQ ID NO: 242495 - protein, 98 aa, Glycine max
  Clone ID: PAT_MRT3847_61002C.1.pep
NVKYLMKIKKERRRWVPYAQRIFVGSGSELGSVEDFVRIRTTQTISLIFLSLKHQSIYRFQVLQEQPIPSLIAPTLLHFSILCNFKTYTSSLCFSSLS

SEQ ID NO: 242496 - protein, 71 aa, Glycine max
  Clone ID: PAT_MRT3847_61003C.1.pep
GKGDSNQKKKVLMGETINQAPEGDHLGKKNQSRGGGACLDAITLLIKLGCPPGLPHVGLINGHFHSKKGLG

SEQ ID NO: 242497 - protein, 279 aa, Glycine max
  Clone ID: PAT_MRT3847_61004C.1.pep
MLLAQPIFLSRNFPTLNNRNSRTSLQLHNPPALIRVSPQRTPIIASSGCFGCFVKPLDVRTKTSLGAFFKKRKGCAHICHSLKEESEVGGNGNNGRDWTTSILLFLLWAALIMLLLPTGRSSKNNIPVWPFLILSCFGGAYVLLPYFVLWKPPAPPVEEIHRLSFNSIVHKSIETAMISLAAGVAIITYAGLAGQDVWKEFYQYFRESKFIHITSIDFIILSTFAPFWVYNDMTARKRFDKGSWLLPISLIPFLGPGLYLLLRPSLSTVAISQTPVEPE

SEQ ID NO: 242498 - protein, 253 aa, Glycine max
  unsure (1)..(253): unsure at all Xaa locations
  Clone ID: PAT_MRT3847_61005C.1.pep
VEAGLAPLLLKLLSSSDSLTQENAAAALLNLSKCAKSRSVMVEKWGLELIIDVLRKGLKIEASQHVAAVLFYLSAEYGNLIGEEPEAIPSLIRLIKDGSYRSKKNGLVAIFGLLKHPENHRRVLEGGAISSLVDILKGCEKEDLITDSLAILATLAERSEGMLAILHGEALHVAXVKFLSCSTSRVGKEHCVALLLSLXYMGGEDVVAYLVKRTSLMGSLYSQLSEGTSRASKKATALIRVLHDFYERRSSGF

SEQ ID NO: 242499 - protein, 207 aa, Glycine max
  Clone ID: PAT_MRT3847_61006C.1.pep
MQIDDDDDHVQETEEHAQKPSHEGLHHSQSNNPSDTQKTIEDTEAGGTIRTADLLTSEVAGSRACSTAPFLHGENESPRSKDNNEGSGALHDSIIVVAVAESQNTTSDAAVARQNERRVLSEMIGIVAPDLREQFEGSAYDCDQERENHGGSSDSDTKSCSNTSIDNRADAKGGSISDEETQLSDHDEEDQKQGDAMDNDDEDTEED

SEQ ID NO: 242500 - protein, 199 aa, Glycine max
  unsure (1)..(199): unsure at all Xaa locations
  Clone ID: PAT_MRT3847_61007C.1.pep
MNEVLVSLWYLMGLWPLVYSMLLLPTGRRSWFHIFHLLFYSSKNNIPVWPFLILSCFGGAYVLLPYFVLWKPPAPPVEETQLKTWPLNFLESKVTAMISLAAGVAIITYAGLAGQDVWKEFYQYFRESKFIHITSIDSIILSTFAPMWVYNDMTARKRFDKGSWLLPLXLIPFLGPGLYLLLRPSLSTVAISQTPVEPE

SEQ ID NO: 242501 - protein, 56 aa, Glycine max
  Clone ID: PAT_MRT3847_61008C.1.pep
CFLMLFLFLMRLVLFVSPNGLDPSYCLGDIYRALRFKRVCVWNEFVLALSFICPPL

SEQ ID NO: 242502 - protein, 85 aa, Glycine max
  Clone ID: PAT_MRT3847_61009C.1.pep
MLLLFRLAEIFCEACLVSSSTLFICFKDPAKCFSTIIKVFVLIFFRIVLSRYLFLTVLSKGNHSDLVLFKIFDWVILESAYDFIK

SEQ ID NO: 242503 - protein, 37 aa, Glycine max
  Clone ID: PAT_MRT3847_6100C.1.pep
EMEQTVYQRLGVPAVPTVTILGTPRMRDKSMLLNIKR

SEQ ID NO: 242504 - protein, 73 aa, Glycine max
  Clone ID: PAT_MRT3847_61010C.1.pep
CYLANHGNPSYSGYATTYDMRSAITLLQEYEKTWFCTILPYFAMKMTVAGRSLVYQGYHALAGHSMLGEACSK

SEQ ID NO: 242505 - protein, 163 aa, Glycine max
  Clone ID: PAT_MRT3847_61011C.1.pep
LPNRLVASICESMGNCCKPASSMEWDGEDWSDLTSKKTRSSKVFEEAHTHGHGHWLNLGKVQKEKLMEALRVSPNANGKVKIKISKKELAELLEKQQHVNKKQVGRASAEQVLLRLINARNHDARHSVSRPGLGRPPLQGLPVDDDEIDRLVVLKGCIHIYIY

SEQ ID NO: 242506 - protein, 155 aa, Glycine max
  Clone ID: PAT_MRT3847_61012C.1.pep
PELTDSYGDVSTQGRRTKATESSKGQTSFAKLENSRRKHVEPDVAVRMDESSARLISSHQVLENAADSNSNHDESRSGVMGEEFASVVGADGMQMMHQEEQDLLNMMASPTAQGFSGQTHVPMNIAPGHLPFHFPPSILASMGYAQRNMGNIPFI

SEQ ID NO: 242507 - protein, 62 aa, Glycine max
  Clone ID: PAT_MRT3847_61013C.1.pep
YLDPAVTITKLLGLHNLILVLDNEHHLFFMTNIPSFVNPILLFPTLCIFPLKEKVPSILHIA

SEQ ID NO: 242508 - protein, 79 aa, Glycine max
  unsure (1)..(79): unsure at all Xaa locations
  Clone ID: PAT_MRT3847_61014C.1.pep
GFPYDTIGAVCAXISTVAPNLVKKDXKKPSPFPFFFRPTFFXKVGPPPFGAGVENFFMADALSRASKIMGQFSALLFKK

SEQ ID NO: 242509 - protein, 170 aa, Glycine max
  Clone ID: PAT_MRT3847_61015C.1.pep
IYAVVGANKPLQMVDSRVSVKDDGVILIRFESITGSPVVSGICIRRATKASVPQVTRDYIKCSSCAAQIEIPSSQMKVMQAKSTAKYKSKIKELTMQCDLKAKECYEAWMSLTAKNEQLEAVQMELDKVTFKLLTTDQTVEKQAESLRNISNRYELDKKKWAEAINNLLT

SEQ ID NO: 242510 - protein, 81 aa, Glycine max
  Clone ID: PAT_MRT3847_61016C.1.pep
CTKKIIIVHGNSLHFHVHEGICATSAYATSNYPSTISTICANHRKRSIYDSLYIIGHNKTRFANYYFLQVWPLEITVITRG

SEQ ID NO: 242511 - protein, 46 aa, Glycine max
  Clone ID: PAT_MRT3847_61017C.1.pep
SSTEIHHRTLGSLTRTNLSPDYHIFRHYSSMLPSFIINGIQFLFLC

SEQ ID NO: 242512 - protein, 49 aa, Glycine max
  unsure (1)..(49): unsure at all Xaa locations
  Clone ID: PAT_MRT3847_61018C.1.pep
LYTPLFPKKETLFLHXDLHATIETTIFYNLKLGXIVTTIRTIGFNVETE

SEQ ID NO: 242513 - protein, 36 aa, Glycine max
  Clone ID: PAT_MRT3847_61019C.1.pep
CLIKNFVLYLQGKINWGIFPKKKKTQRQMGLIKCLG

SEQ ID NO: 242514 - protein, 128 aa, Glycine max
  Clone ID: PAT_MRT3847_6101C.1.pep
VFRQGKMSLGYCTIRSTPRKFGISFTVPDRVTAEINDKKRVIGKHPLRITRIPSGGPSEFHRIMQEVEKGPSSTLTLKKRKNYDDDDTKEEYLVSHKRAYHRSRFNDWYVRVFYFENCGQNQPSEPNT

SEQ ID NO: 242515 - protein, 180 aa, Glycine max
  unsure (1)..(180): unsure at all Xaa locations
  Clone ID: PAT_MRT3847_61020C.1.pep
MQKVRSDIMTHRGSHYDLGVKTALWLQTTPLLKNRNKEWRKRIPRFDIDVKETYDIFQIYSPQIWEEIIGMQDVLNLPTKQMILNFGHYRFTPLKPXGCTVYKGRDFLVRNSPYHKATYDGRYLLFQPNDGGLSQIGPTSRVTGRMDGMNEYGLVMAYNFMHRNTPANGFVCYMVGRLTT

SEQ ID NO: 242516 - protein, 150 aa, Glycine max
  Clone ID: PAT_MRT3847_61021C.1.pep
MENNHSAAGTQDSSMMKSVDQRVRSKARNDIMTRRLKNRERQRRYRARKRLEAETKKSFVVEETPAVQVELQPNRNHNNNNNFVTRIYCKRDWKKDARRAHVFKHQQMNGSIDPPTIISVPEVTCLAINKPETVPEREIKSGSSGVVVLI

SEQ ID NO: 242517 - protein, 77 aa, Glycine max
  Clone ID: PAT_MRT3847_61022C.1.pep
KMDNLLKGSLDSYRSLKNLYRARVHRKDRMFPSNKNAKVGILDQDEKQTRKEKHAFYIKHLMEKMIVEHSQKNGCKK

SEQ ID NO: 242518 - protein, 66 aa, Glycine max
  unsure (1)..(66): unsure at all Xaa locations
  Clone ID: PAT_MRT3847_61023C.1.pep
GAVEHEVELKGIFLQEVDSEGPDEGVFMRDEVCDVGKQXKVVRWSHWRIGFAVGLETQVTIQGAAR

SEQ ID NO: 242519 - protein, 50 aa, Glycine max
  Clone ID: PAT_MRT3847_61024C.1.pep
NEKEPSEEAPNYHDSTITIIVLDNLRAQVMQMGPSGFPPHGFSIYSPSVV

SEQ ID NO: 242520 - protein, 149 aa, Glycine max
  Clone ID: PAT_MRT3847_61025C.1.pep
PTRPVLDSSNGILDKAGRWHVEVEFSPHSASQDHVNPQPSPESESNDIGTGFAMFSQNFGEFSSGSGPNQNLEVLKKADIYPTNMELLKFEGATPHGTIDSSLTSESNQPDGWNFGFNFNSSSVGEDNHSSDSYFKTKNNQDDNNRNNA

SEQ ID NO: 242521 - protein, 192 aa, Glycine max
  Clone ID: PAT_MRT3847_61026C.1.pep
MRYMKPLPLFHDLKNTTPQRGRLLGLDVGDKYVGLALSDFDNNIASPFNVLVRKKTNISLMASDLESLIAKYSLKGFVIGIPFDKHQVSSDAMQVKVFIDNLCRTKMLEGVKYTYWNESFTSKNVELLLKPLNLNHPVLSKTMLDKFAAVGILQGYLDFVNRKMKLKQRSKELLIILFFKPANVKACIRNHN

SEQ ID NO: 242522 - protein, 96 aa, Glycine max
  Clone ID: PAT_MRT3847_61027C.1.pep
RRRQQKLGEPLFSQVGCQGGEIATILSGDPPFSLGGGQSPKKRGEKEPPNNGEPQKKGPWSYPFQSTIFFFFPQIGGPRTKKWASFLCPQPSKTKP

SEQ ID NO: 242523 - protein, 293 aa, Glycine max
  Clone ID: PAT_MRT3847_61028C.1.pep
MLRRNIRLRREYLYRKSLEGKERLLYEKKRKIREALQEGKPIPTELRNEEAALRREIDLEDENTAVPRTHIDDEYAYAAEKDPKILLTTSRDPSAPLQQFVKELSFVFPNAQRMNRGGQVISEIIESCRAHDYTDVVLVHEHRGVPDGLIVCHLPFGPTAYFGLLNVVTRHEIKDKKAIGTMPEAYPHLILDNFSTKLGDRTANILKHLFPVPKPDTKRIVTFSNQSDYISFRHHIYEKHGGPKSIELKEIGPRFELRLYQIKLGTVDQAEAQIEWVIRPYMNTTKKRKFLSN

SEQ ID NO: 242524 - protein, 74 aa, Glycine max
  Clone ID: PAT_MRT3847_61029C.1.pep
LESLRLDVKTRTIAISWISDDTMTMTGFMVLCFTVACIAQTTSGGSGSTEAGDHITKVSDSLSGCPEYGSTDLV

SEQ ID NO: 242525 - protein, 77 aa, Glycine max
  unsure (1)..(77): unsure at all Xaa locations
  Clone ID: PAT_MRT3847_6102C.1.pep
APVTSPNTDGTGTMEILSKMLKIAEVKPYVVGQFHNDSFTGDVRERVXIIAKVGHLPLACITASVHGLPGGSERLAA

SEQ ID NO: 242526 - protein, 116 aa, Glycine max
  unsure (1)..(116): unsure at all Xaa locations
  Clone ID: PAT_MRT3847_61030C.1.pep
SCRVLKPELCQXSGAEIYRGXGIICCRSDSHVRLYWTDVRYVPHISLRPELVTWSALGRLHARADSRSEAGRARRHCWHXPYFKDIAGATLADSIKESWEAYAGDATWAADLLESH

SEQ ID NO: 242527 - protein, 73 aa, Glycine max
  Clone ID: PAT_MRT3847_61031C.1.pep
RVPITFKRGVWDQLVWGGTQAVTILLTAHRGGKKRRGGTPHLKLKGNYKIVPGFLLEKTSAKKGELLLKEKFQ

SEQ ID NO: 242528 - protein, 52 aa, Glycine max
  Clone ID: PAT_MRT3847_61032C.1.pep
VIGNMKKQAQQQTHPNNVHPLLTSMASSEIGKEAEKQVAAMLNKQHSSVYQS

SEQ ID NO: 242529 - protein, 398 aa, Glycine max
  Clone ID: PAT_MRT3847_61033C.1.pep
RNTIILGGVIFVVGGALNGGAENIGMLILGRVLLGFGVGFTNQAAPLYLSEIAPPKWRGAFNTGFQFFLGVGALIAGCINFATAKHTWGWRVSLGLAVVPASVMTIGALLITDTPSSLVERGKIEQARKALRKARGSSIDVEPELEELIKWSQIAKSMKQEPFKTIFERQYRPHLAMAIAIPFFQQMTGINIVAFYSPNLFQSVGLGHDAALLSAVILGAVNLVSPRGILPLFCRFGRRFLFVTGGICMFVCQIAVSILLAVVTGVHGTKDVSKGSAIVVLVLLCCYSAGFGWSWGPLTWLIPSEIFPLKIRTTGQSIAVGVQFIIIFILSQTFLSMLCHFKFASFVFYAGWIIVMTIFVIFFVPETKGIPLESMYTIWGKHWFWRRYVKDVEQENLP

SEQ ID NO: 242530 - protein, 106 aa, Glycine max
  Clone ID: PAT_MRT3847_61034C.1.pep
RRVFFPTGPLGRRTTPQRPSWFGDWSRICLSPPPTPVKKFFLWDYHKGPPGGRSKMVPSLDLDKGVIKELKFIFQVSGGGTKGQPLPIHFLNKNPIKKKRKVSFLF

SEQ ID NO: 242531 - protein, 49 aa, Glycine max
  Clone ID: PAT_MRT3847_61035C.1.pep
SSFSVMLSHSPLRSSRDSSCVGTEACMSNVLCKWLIHYEIPPKNIVPAS

SEQ ID NO: 242532 - protein, 221 aa, Glycine max
  unsure (1)..(221): unsure at all Xaa locations
  Clone ID: PAT_MRT3847_61036C.1.pep
MEFVLNYLNATAIGVLSITLFFLFLYNPFKFALGKKEAPKVAGAWPILGHLPLLSGSETPHRVLGALADKYGPIFTINNGVKKVLVISNWEIAKECFTKNDIVVSSRPKLLAIELMCYNQAMFGFAPYGPYWREQRKIVILEILYMSRXVEQLQNVRVSEVQSSIKELSNVCASNKNNESGYALLELNQWCSQLTCNRVLQMVAESDSKVPKLWMMARLYP

SEQ ID NO: 242533 - protein, 241 aa, Glycine max
  Clone ID: PAT_MRT3847_61037C.1.pep
MATYYTSSSNERDAVPMLCLREPLPDSYPETPILPSNMSLNMIQSSYTEALSGNSQPQNNCFVIPSPSVGASHSTPEQQEILANIGGFQTGVHDFSAWREGRSEMLVRQTMDGQNLQGQGLSLSLGTHIPSGIQMPSIHDRNHRPSFDSFLGTNPSSSGNEAAYQKGSSRDEGMRHSENLPPGLPEANQDLDKADFSIHRMSSVGRTVPSFKYLKAVQLLLDEVVDIRKAIKRPVVRSYST

SEQ ID NO: 242534 - protein, 405 aa, Glycine max
  Clone ID: PAT_MRT3847_61038C.1.pep
MATLFQGLGVVNPSLSSSNSNNFLLSSRTSLSERKDGIFVVRSDARVSSKVLKAGARKHELLVTNAVATKEGSPAASTSKSGHELLLFEALREGLEEEMERDPCVCVMGEDVGHYGGSYKVTKGLATKFGDLRVLDTPIAENSFTGMGIGAAMTGLRPVVEGMNMGFLLLAFNQISNNCGMLHYTSGGQFKIPIVIRGPGGVGRQLGAEHSQRLESYFQSIPGIQMVACSTPYNAKGLMKAAIRSENPVILFEHVLLYNLKERIPDEEYVLSLEEAEMVRPGEHVTILTYSRMRYHVMQAAKTLVNKGYDPEVIDIRSLKPFDLHTIGNSVKKTHRVLIVEECMRTGGIGASLTAAITENFHDYLDAPIVCLSSQDVPTPYAGTLEEWTVVQPAQIVTAVEQLCK

SEQ ID NO: 242535 - protein, 79 aa, Glycine max
  Clone ID: PAT_MRT3847_61039C.1.pep
INCEFMKPRQVSEQPQQKYRHILLLSTINLSLSSRTILLRTRAAHCVLGKATTHPNPFLQQQIESSAGSIHFNSSSLNC

SEQ ID NO: 242536 - protein, 147 aa, Glycine max
  Clone ID: PAT_MRT3847_6103C.1.pep
VVSRLSNHRVLPWMVCSTAAIRCYGAVSLSQKLSLHRHSKVPILLHVFLWDRTLASSLESTRLSSLSPSVLPLPLSQEVQLAPHSNESQIQSLPHEGFDAGGGVNSVGFQPMQLERDTIGDLSFRFPHFYKKKNAGYDIVLYIHNSL

SEQ ID NO: 242537 - protein, 273 aa, Glycine max
  unsure (1)..(273): unsure at all Xaa locations
  Clone ID: PAT_MRT3847_61040C.1.pep
RMLPPLTSCQKRMSPPPCVNYFCPMHLSDRGHPSLHLTHVTFSPDGHEVLLSYSGEHVYLMNVNHAGVNEMQYTSGDDSKLMTYSPTINGSEMQPCVSNVFPNGFPIKKNIAAKLDKCRKQIKYAKKSLDNGIPYYGIDACNEVLNGYSHIIGPALKHECLCTRAALLVKRKWKNDAHIAIRDCYAARVIDNSSYKALYYMSEALSQLGRHEDALEFAVASHSLAPSKSEVAERVANVXRDIALAEAEKSSQTNDGASRFDSRGGRILSLSDI

SEQ ID NO: 242538 - protein, 46 aa, Glycine max
  Clone ID: PAT_MRT3847_61041C.1.pep
DGPPEKSCNVGGQVGEQTWWCWPEWAKPARPAASKVLKNLAVVTMD

SEQ ID NO: 242539 - protein, 104 aa, Glycine max
  Clone ID: PAT_MRT3847_61042C.1.pep
FFLSVQERKEKEALAAEGGWTVVVHHKGRKKTTDSESGIAVGSVAQAAVENKMTKKKHKEVGQDFYRFQRREAQRNEIMTLQSKFEEDKKRLQQMRAARKFRPY

SEQ ID NO: 242540 - protein, 94 aa, Glycine max
  unsure (1)..(94): unsure at all Xaa locations
  Clone ID: PAT_MRT3847_61043C.1.pep
LGCRVGLGSAWCWSVXGGGFVXVXLVXXLXXGVLFXSLXFVLWGLXWSWXLRXRLSFSFSFSFSRGACXALWCVCGGWVSCSXYGXRRVPRSRG

SEQ ID NO: 242541 - protein, 41 aa, Glycine max
  unsure (1)..(41): unsure at all Xaa locations
  Clone ID: PAT_MRT3847_61044C.1.pep
MEEEKAAAYYDELARKGXGAARLKLGLGFSFSSPNDFVPKL

SEQ ID NO: 242542 - protein, 51 aa, Glycine max
  Clone ID: PAT_MRT3847_61045C.1.pep
KILDGCFIIKDTSFRYTTQLLKQKEENFPSINVNVVHVISRPLLSSECPYS

SEQ ID NO: 242543 - protein, 67 aa, Glycine max
  unsure (1)..(67): unsure at all Xaa locations
  Clone ID: PAT_MRT3847_61046C.1.pep
FEQSKADPSHWAKISPGGLKXYHEAYTWPIYSDRLLTLTGVYRFWKHVTNLERRASKRYLEMFYALQ

SEQ ID NO: 242544 - protein, 41 aa, Glycine max
  Clone ID: PAT_MRT3847_61047C.1.pep
GDNGAINLKLARLFSVGIMDFRVKTRTAGNRSLFLSSIICG

SEQ ID NO: 242545 - protein, 61 aa, Glycine max
  Clone ID: PAT_MRT3847_61048C.1.pep
MNFSCHPVSTSSFFEPGDELRIELEMIEQQYQDEIEDLLRRKQQDITETTRRHLQNNASIK

SEQ ID NO: 242546 - protein, 71 aa, Glycine max
  Clone ID: PAT_MRT3847_61049C.1.pep
GLELQKSNLVWGVLKTEMGTGTWVLGVIMGAFLCPYSLALTQDGVAVVEIKRTVNDAKIVLSNWQEFDESS

SEQ ID NO: 242547 - protein, 61 aa, Glycine max
  unsure (1)..(61): unsure at all Xaa locations
  Clone ID: PAT_MRT3847_6104C.1.pep
GTQTNVGLXKGVTCWFARAPKXLVMRGELIXDXLTLLVSILNAXIYYXTLPIIILYRVIVN

SEQ ID NO: 242548 - protein, 119 aa, Glycine max
  Clone ID: PAT_MRT3847_61050C.1.pep
ILSNVIPPNLLSNYCLINLLSNVLFLIPPRNNFYTGSFPIRLCSHSSNDYNTIQWCSSNCFGYSGRSHSLYHGNIHWSGYTVLRVLCYQLLHLDGRPCGQHIKCALRYLNSRMSSFNQR

SEQ ID NO: 242549 - protein, 72 aa, Glycine max
  Clone ID: PAT_MRT3847_61051C.1.pep
LKSRGTPGDWSHIIKQIGMFTFTGLNSEQVAFMRQEYHIYMTSDGRISMAGLSMRTVPHLADAIHAAVTQLK

SEQ ID NO: 242550 - protein, 94 aa, Glycine max
  unsure (1)..(94): unsure at all Xaa locations
  Clone ID: PAT_MRT3847_61052C.1.pep
GDLATQKAEMTLEEVRERLRNVLSLTEVTCFPIPKIPNAVIFVSATDDGYIPKHSVLELQKAWPGSEVRWVTGGHVSSFCXHGEFRRAIVEGLN

SEQ ID NO: 242551 - protein, 107 aa, Glycine max
  Clone ID: PAT_MRT3847_61053C.1.pep
CGPSQNRNALSFASPKRKNYSMGPARLYWCARKAGTQPIPLERGPVPCQITRIQSGKVDREKINLELGQARFGEKQRYKGLKFPLSHEHAKVLCKSCTLGFEPLINL

SEQ ID NO: 242552 - protein, 244 aa, Glycine max
  unsure (1)..(244): unsure at all Xaa locations
  Clone ID: PAT_MRT3847_61054C.1.pep
MAETSAALCFSTFRFSFAPSRSPSKTFFNNSSFHFPPPSSSHTCLLHFAPKASPSGNFSGDDSFGFFPWSDSDNNEIQWIPEERITLFTADGLIQIGGSMVPRRVSSSDKKHGKSKTAKKFQRFQESNYMNPNQGLCLGALFDIAATNGLDMGRRLCIFGFCRSIEMLSDVVEDTVLEHGGENQSYMXIIAAEKASKGDLHEKLTMTVAVPLLWGVPPAFETLHLAVKSGGGIVEKVFWQWAFL

SEQ ID NO: 242553 - protein, 71 aa, Glycine max
  Clone ID: PAT_MRT3847_61055C.1.pep
TSTSILTLVVIQVASLINSSHYHCLKYGHGIDAEDHSSNELSHCCKTHTMILTPFMIWQTLDLCSKETNYQ

SEQ ID NO: 242554 - protein, 85 aa, Glycine max
  unsure (1)..(85): unsure at all Xaa locations
  Clone ID: PAT_MRT3847_61056C.1.pep
XAFITHIFSHHYTRTQCESLRPSYKSPNNNQMTLTDFPTLQNILLLPNNIAVMFYYPLDSYLTYIPHLPIIDANQDITHTLSNNL

SEQ ID NO: 242555 - protein, 79 aa, Glycine max
  Clone ID: PAT_MRT3847_61057C.1.pep
MAIPHKLVHFWRDSGKFELKFSQEEFLTVWSTQVRTATTLLADEESILRMLTVHDTYQCSYNTHVDFCHWCLMLTTHNT

SEQ ID NO: 242556 - protein, 209 aa, Glycine max
  Clone ID: PAT_MRT3847_61058C.1.pep
CGAPSSPLPAAFSRVLQFGDASGIQSPVSFGGFGSLTRHLGRLSAGIHEAINGDYLDSYSLSLLNPYMPNLSASWLFQRAMSAKKQSNVPADFINELLYTNFSCMQRLGDPVLRPFLQDVVQFGPLSKTLGLVMLTNPKILPSIFKQVGIPVLLDWSRHFLGLGYYTFLSTFADPIVRPFLNTLPSKTSFQWKRHLEAWKYGAGLDYKL

SEQ ID NO: 242557 - protein, 41 aa, Glycine max
  Clone ID: PAT_MRT3847_61059C.1.pep
HATVMPRRHRMGRLASQQHCALASNSDVLVRLSRHFLYTLC

SEQ ID NO: 242558 - protein, 62 aa, Glycine max
  Clone ID: PAT_MRT3847_6105C.1.pep
SINYLVRSSISLYGSGKSGKKSTVKVRLKKVRTRRLVIPLFTPLHFCIYSCRRFVRLRGPVR

SEQ ID NO: 242559 - protein, 136 aa, Glycine max
  Clone ID: PAT_MRT3847_61060C.1.pep
ARNSARAPPAQKEAIEALPTVIINENSQCSVCLDDFEVGSEAKEMPCKHRFHSGCILPWLELHSSCPVCRLQLPLDESKQDSDLSRDSRSQREDESIEHDNDEERDGEGRNASGGRRFSFPWPFNGLFSSSNSSSS

SEQ ID NO: 242560 - protein, 83 aa, Glycine max
  Clone ID: PAT_MRT3847_61061C.1.pep
APFIDDHSRHQAQASRLNSVMCTPILSLKFAHSSAFSKVLIRKRHQGLNRSKRGRLVRRATRCRPSPRAMRYGASSIKNFIKQ

SEQ ID NO: 242561 - protein, 78 aa, Glycine max
  Clone ID: PAT_MRT3847_61062C.1.pep
GCEKTTEGDGCHKTTEGCGCEKTTEGYAMLTRRQKDTAARRRQKGTAARRRLMDTAVRDDRRGVLHMLNVYDALSHYR

SEQ ID NO: 242562 - protein, 51 aa, Glycine max
  Clone ID: PAT_MRT3847_61063C.1.pep
HVMGIMYLKFRYMCFRQSGRDMYNIFNNIMNIGRFLISVTDEGKFAVFHML

SEQ ID NO: 242563 - protein, 80 aa, Glycine max
  Clone ID: PAT_MRT3847_61064C.1.pep
MKVQASVQETLKKHELTRPLATKELEWFAASALLALPIILVARVFSAVFCSKKVSKPARNGNNHHARRKPKRGHLDKHTT

SEQ ID NO: 242564 - protein, 126 aa, Glycine max
  unsure (1)..(126): unsure at all Xaa locations
  Clone ID: PAT_MRT3847_61065C.1.pep
ASPYIDQICXAAKPHVXDKVQEVLKPYTXEVVRVYGKFLESATTYHRQVQASVQETLKKHELTRPLATKELEWFAASALLALPIVLMARVFSAVFCSKKVSKPARNGNTHHARRKPKRGHLDKHTT

SEQ ID NO: 242565 - protein, 89 aa, Glycine max
  Clone ID: PAT_MRT3847_61066C.1.pep
RVCVILCDDSNACLLNYPHTLPLHDNLISRVRPTPAYPSGVVLVIMSCHLTFHSWSFRFNLAYPSLTGFACGSPPPPPPPPPKKEDVIQ

SEQ ID NO: 242566 - protein, 91 aa, Glycine max
  unsure (1)..(91): unsure at all Xaa locations
  Clone ID: PAT_MRT3847_61067C.1.pep
SYFTQKKRSKIFKTPHDRKDTSPSISPVRTRKNYFKLSREKIKQEPTSLLGGLVLECPSLNVXRSVAWVIGFPFTKQSFISLFMLXKKTXA

SEQ ID NO: 242567 - protein, 193 aa, Glycine max
  unsure (1)..(193): unsure at all Xaa locations
  Clone ID: PAT_MRT3847_61068C.1.pep
ARADAQKSMLDDRFKWKVREMEKKKEGKPGEARANLRRSVRENGSDVAEQSGEMARSLTGPMLRKNYAQPDSNIDRQLMPHPMTVASGPTDWNEALDIISFGSPEQSVDGMKVVCHELAQATSDPEGSAMDELVKDADRLVSCLXNKVARTFDFSLTGWXPQSRSCXYVLNTLMQTFQNKRLAHAVKESTLDS

SEQ ID NO: 242568 - protein, 444 aa, Glycine max
  unsure (1)..(444): unsure at all Xaa locations
  Clone ID: PAT_MRT3847_61069C.1.pep
MAPPKLFVFALSVTLIFAIVGAEADVSVEGDTPEPDTSAIKIQLDQLNSKIQILESQIREKLEEVKKKDQIIAEKENSIEDKSITIQSFRRNXLQKKGSLDAEEQVGKAHARAGELQKQVDKLKRELETQNKEKVNWETRVPELENKIHDLNSKLEDLQKINEEQKTKIQKSERALKVAEEEMLKAKFEATAIKKELREAHGAWLPPWLAVHYIHSKSFVDSHWNKHGKPALEMVTQKALEKKAQAGKWAEPHVETIKTKWVPAVKEQWSVVKTNAEPHVQLLTTKTVEVYEASKNAISPHLSKAKEFVDPYYQEARKFSKPYIDQIAIAAKPHVDKVQVVLKPYTKEVVRTYGKFLESATTYHRQVQASVQETLKKHELTRPLATKELEWFAASALLALPIILVARVFSAVFCSKKVNKPARNGNNHHARRKHKRGHLDKHTT

SEQ ID NO: 242569 - protein, 48 aa, Glycine max
  Clone ID: PAT_MRT3847_6106C.1.pep
QLIQGIMSIERTRRGVKSRTILDEIKRAAEDIDDIASLGKCTFMVTIN

SEQ ID NO: 242570 - protein, 239 aa, Glycine max
  unsure (1)..(239): unsure at all Xaa locations
  Clone ID: PAT_MRT3847_61070C.1.pep
MAPPKLFVFALSVTLIFAIVGAEADVSVEGATPEPDTSAIKIQLDQLNSKIQILESQISEKLEEVKKKDKIIAEKENSIEDKSITIQSLQNEIASLQKKGSLDAEEQVGKAHARAGELQKQVDKLKRELETQNKEKVNWETRVPELENKIHDLNSKLEDLQKINEEQKTKIQKSERALKVAEEEMLKAKFEATAIEKELREAHGAWLPPWLXAVHYIHSKSFVDSHWNKHGNLLWEWLL

SEQ ID NO: 242571 - protein, 55 aa, Glycine max
  Clone ID: PAT_MRT3847_61071C.1.pep
AYTTKRNRSFPIDNPEQSTSWDERLAISKDVDIDGNTLKPALCVPQATARSYVYA

SEQ ID NO: 242572 - protein, 126 aa, Glycine max
  unsure (1)..(126): unsure at all Xaa locations
  Clone ID: PAT_MRT3847_61072C.1.pep
VVPFFLPDCGECFDCKSSKIYLCSKEPLEGPPCMPKNATSRFTDLKREIIPPLLPRKKNSHYSVVDIAHPKEIDPAVPPNRACLFCCXISQGKTCCLKKKKXDPWATLTLFGVGKNGLTIASGAKI

SEQ ID NO: 242573 - protein, 68 aa, Glycine max
  Clone ID: PAT_MRT3847_61073C.1.pep
ALHRCSVVSGNFWSVAAPSLRPPAARKSNVFFGARYGLGLRLGYGWVLGEFIYRSLALNTIHVLLPHF

SEQ ID NO: 242574 - protein, 81 aa, Glycine max
  unsure (1)..(81): unsure at all Xaa locations
  Clone ID: PAT_MRT3847_61074C.1.pep
WKVIAIKERDSTSVIGPXVVVVYAFNIHYFRKYNHYIIEPAHIDRPYHFIDLLRIFWLPIPIPPESLKSGFMDKLIPSASP

SEQ ID NO: 242575 - protein, 87 aa, Glycine max
  Clone ID: PAT_MRT3847_61075C.1.pep
LVTRGLKNLLCHLIVCCSSNLFEIIPQFPHSSFIQHKLYNPQLSYVFLTNPQYSGSLLGQPTSLFCSVLFFPFLACLFVFFNFLLFP

SEQ ID NO: 242576 - protein, 44 aa, Glycine max
  Clone ID: PAT_MRT3847_61076C.1.pep
TGAAGDRQHIPSLAEQMVSTFGMCASGPWSVMEPSAQGGDVIIR

SEQ ID NO: 242577 - protein, 64 aa, Glycine max
  unsure (1)..(64): unsure at all Xaa locations
  Clone ID: PAT_MRT3847_61077C.1.pep
VRDKPRSLLVXHRILYHKQSVLDYKNLSISIYLFEYELLRERKSLSVLATDFVNDLLFHSWLIG

SEQ ID NO: 242578 - protein, 66 aa, Glycine max
  Clone ID: PAT_MRT3847_61078C.1.pep
LHLTQGQLILQSCAYSLKDAIAGLFFRLPLLAEMHLQSLSLRPRHHQQAHLLLTLTLNKQAAHCKH

SEQ ID NO: 242579 - protein, 80 aa, Glycine max
  Clone ID: PAT_MRT3847_61079C.1.pep
ININWYQGSQNNSVLLKCVKIYYFIIFKHVLLYFLIKLFSFLLFKCTLYLFIEYDYDPQRNYRTCLENRTTVLYHEICAN

SEQ ID NO: 242580 - protein, 68 aa, Glycine max
  Clone ID: PAT_MRT3847_6107C.1.pep
PSGDLSFGLDGLRFMIYIMIEALFPENGCGDGRVINISKKYSLYVLVCIHCFLSLSPVFSCVYSRGGV

SEQ ID NO: 242581 - protein, 75 aa, Glycine max
  unsure (1)..(75): unsure at all Xaa locations
  Clone ID: PAT_MRT3847_61080C.1.pep
YIPDPEXXXPXGSXVIPKXLXXPXAXKPEGWDXEXXGEXXPPTXANPEYXGPWXAXXIXNPNYKGNGRHLDPFQD

SEQ ID NO: 242582 - protein, 144 aa, Glycine max
  unsure (1)..(144): unsure at all Xaa locations
  Clone ID: PAT_MRT3847_61081C.1.pep
HPHNPVMNPPRGVELTNFKHPSTACPRKDGKWKVQLVLKTEMNGXTLLYQSDDFVYWKAYPNAFYALDNTEACELTDLFPSYINGSLNGEDTSAQNPSVLHVLKINYLRTQHDYYFLGKYVSDHEHVIPDVMFTRTNSHLQLTM

SEQ ID NO: 242583 - protein, 39 aa, Glycine max
  unsure (1)..(39): unsure at all Xaa locations
  Clone ID: PAT_MRT3847_61082C.1.pep
GXXIHXXHQCXKXXKXALXSCIPVXTKPIXXCTXKVIYX

SEQ ID NO: 242584 - protein, 183 aa, Glycine max
  Clone ID: PAT_MRT3847_61083C.1.pep
MSSQSDAVGCNLKETELTLGLPGTKTNGTKRGFSDTLNTSHNKMLRPTSKEQVVGWPPVRASRKNAMKMSCKLVKVAVDGAPYLRKVDLEMYETYEHLMRELETMFCGLAIRNHLMNERKLMESGNGIEYMPTYEDKDGDWMLVGDVPWKMFVESCKRIRLMISSEAVGLGPRSTSSKCTGST

SEQ ID NO: 242585 - protein, 189 aa, Glycine max
  Clone ID: PAT_MRT3847_61084C.1.pep
MSSESHAVDCNLKETELTLGLPGTKTTATKRGFSDTLPPSQNKILRPTSKFPTPNREQLVGWPPVRASRKNAMKSCCKLVKVAVDGAPYLRKVDLDMYDSYEHLMRELETMFCGLAIRNHLMNERKLMDPGNGIEYMPTYEDKDGDWMLVGDVPWKMFVESCKRIRLMISSEAVGLGPRSTSSKCTGST

SEQ ID NO: 242586 - protein, 137 aa, Glycine max
  Clone ID: PAT_MRT3847_61085C.1.pep
MVNRISNYVPLFIILIVLVTGQKQVEGYKCLTDMGLCDERITSSECDLRCKSHYNDGEGHCDNMNICNCIHHCVSPQPNKDTEPIRKCTSGLGLCSIDHCYDDCCNSKCAKQFKEGIGHCEIVGSMGTILCTCDYVC

SEQ ID NO: 242587 - protein, 43 aa, Glycine max
  Clone ID: PAT_MRT3847_61086C.1.pep
RTYDSLTEDFSYALLLLTIVALVAAIFVTWVLSQRKDLQEKWR

SEQ ID NO: 242588 - protein, 134 aa, Glycine max
  Clone ID: PAT_MRT3847_61087C.1.pep
MVNRISNYVPLFIILIVLVTVQKQVEGLTCSRYFGLCSDTRNCDLRCKARNKHAEGHCDDDFNCTCIYPCDSPQPNKDTEPIRKCTSGLGLCSVDHCYDDCCNSKCAKQFKEGIGHCEIVGSMGTILCTCDYVC

SEQ ID NO: 242589 - protein, 41 aa, Glycine max
  Clone ID: PAT_MRT3847_61088C.1.pep
YNKSPHCAKWPPSKHVAHPQNSKPLPASLPNFPILTRIKAS

SEQ ID NO: 242590 - protein, 51 aa, Glycine max
  Clone ID: PAT_MRT3847_61089C.1.pep
GAWTPLKRPPPAHVSYFLAVPLFIVTSRLCSRACSSFLLDRSALEQYAYAW

SEQ ID NO: 242591 - protein, 132 aa, Glycine max
  Clone ID: PAT_MRT3847_6108C.1.pep
VITLPTTVAVSVPQNQNTNHGVESPKKNKIQVSNTKKPLFFYVNLAKRYIQQRNEVVLSALGMGITTVVTIAEILKNNGLAIEKKVSTSSVTMKDETKGRLVQKAKIEIVLEKTEKFDSLTAAANTEADVVE

SEQ ID NO: 242592 - protein, 93 aa, Glycine max
  Clone ID: PAT_MRT3847_61090C.1.pep
KLLLEDKPNPWPWAPSPSLNPPQTLQRSTFKKKHGPWKFLWANKGGFFFQRVQRLTPKKTGFSGAPGGILLKTLASNTKYGFLIPKTAFFGGG

SEQ ID NO: 242593 - protein, 94 aa, Glycine max
  unsure (1)..(94): unsure at all Xaa locations
  Clone ID: PAT_MRT3847_61091C.1.pep
MLFATVMGTVKIGINGFGTLGRMVAKVALHRDDVYLVSVNDAFINTDYMTYMFQYDXVHGHWKHHDVNVYDXKTLLFSDKPVTDSGHMNLDQIA

SEQ ID NO: 242594 - protein, 89 aa, Glycine max
  Clone ID: PAT_MRT3847_61092C.1.pep
KSQKKISTLAKSMEVLELKIKSSLETIKISTKTFIVRERILCDHVFHASQLTKHIAKMKKPLSEKILHMIDIHLRSVVAPPSVVFLEPN

SEQ ID NO: 242595 - protein, 143 aa, Glycine max
  unsure (1)..(143): unsure at all Xaa locations
  Clone ID: PAT_MRT3847_61093C.1.pep
EPIIIVKSCWGSRMDGKGVNTKYIVKRNAMGRSESTVPIFNMEDIYDGDEGYDDERTLLMSQNILDNRFCQCAFFIAATFMEHGGNAPXTDTATLLNESIXVMTCGYEDQSKWXNDMVWIYCCCADNLLPACHIADLQWIHIF

SEQ ID NO: 242596 - protein, 90 aa, Glycine max
  Clone ID: PAT_MRT3847_61094C.1.pep
GIGLGTQLSGARQITEGRLRAAAEGPATNMTDEDDQKGIMNPSIDCTRDGTAEEGAAAAHAFVAEKQAEGHGDVWFHELADRGKEETGEY

SEQ ID NO: 242597 - protein, 71 aa, Glycine max
  Clone ID: PAT_MRT3847_61095C.1.pep
RDNKGGPSKASADNVVAAVTLAAISDVYHIGVPSQRPSSMAIQRPGQRAHQKWKGPDKISRIYGDWIEDIE

SEQ ID NO: 242598 - protein, 868 aa, Glycine max
  Clone ID: PAT_MRT3847_61096C.1.pep
MLIGSLLNRRPKIKGTVVLMTKNVFDVNDFMATTRGGPAAVAGGIFGAAQDIVGGIVDGATAIFSRNIAIQLISATKSENALGHGKVGKLTYLEKHLPSLPNLGDRQDAFDVYFEWDESFGIPGAFYIKNYMQSEFFLVSFKLEDVPNHGTILFACNSWVYNAKLYKKDRIFFANKTYLPNDTPTPLVKYRKEELENLRGDGRGERKELDRIYDYDVYNDLGNPDENDDLARPILGGSSKHPYPRRGRTGRKPTKKDPRCERPTSDTYIPRDENFGHLKSSDFLTYAIKSLTQNVLPQFNTAFGFNNEFDSFEDVRCLFDGGVYLPTDVLSKISPIPVLKEIFRTDGEQALKFPPPHVIKVRESEWMTDEEFGREMLAGVNPGMIQRLQEFPPKSKLDPTEFGDQTSTITKEHLEINLGGLTVEQALKGNKLFILDHHDAFIPFMNLINGLPTAKSYATRTILFLQDDGTLKPLAIELSLPHPRGHEFGADSRVVLPPAAVNSAEGTIWLIAKAYVAVNDTGYHQLISHWLNTHATIEPFVIATNRHLSVLHPIHKLLLPHYRDTMNINALARQSLINADGVIERSFLPGKYSLEMSSAVYKSWVFTDQALPADLIKRGMAIEDPCAPHGLRLVIEDYPYAVDGLEIWDAIQTWVKNYVSLYYPTDDAIKKDSELQAWWKEAVETGHGDLKDKPWWPKLNTPQDLVHICSIIIWIASALHAAVNFGQYPYGGLILNRPTLTRRFLPEPGSKEYEELSTNYQKAYLRTITRKIEALVDLSVIEILSRHASDEIYLGKRDSDDWTDDQKAIQAFEKFGTKLKEIEAKINSRNKDSSLRNRNGPVQMPYTVLLPTSEEGLTFRGIPNSISI

SEQ ID NO: 242599 - protein, 81 aa, Glycine max
  Clone ID: PAT_MRT3847_61097C.1.pep
PGPESFRAPRGCMRPPTRRFIFLSPTFIRHIPWPLSKKGVSLDIHQTCIARSCLVQRCTTRRGTHPASTLCCRAEAISGES

SEQ ID NO: 242600 - protein, 45 aa, Glycine max
  Clone ID: PAT_MRT3847_61098C.1.pep
VINQTLSDTKKLGMKGELKKLVCVRVLEVFMHQNEEGRMGFSGFL

SEQ ID NO: 242601 - protein, 65 aa, Glycine max
  Clone ID: PAT_MRT3847_61099C.1.pep
YRLNDYTYLRLDNRTHIYSYKNYIIWIFGLTNTWHLHFHTYYLTATRAVRANAVRATLSLSIMLS

SEQ ID NO: 242602 - protein, 93 aa, Glycine max
  Clone ID: PAT_MRT3847_6109C.1.pep
TSSLPLLGYSFVSPDACSQGVVLLPCPKYPLIFLAGWLGLFSPRPLVAFQFFGFLLVIFAIEIAAAIWGYSHKDEVGFSHEISWVWELGDGGQ

SEQ ID NO: 242603 - protein, 81 aa, Glycine max
  Clone ID: PAT_MRT3847_610C.1.pep
MRSLGIAFYLSVIGAASFLSSMLITVVDHITKKSGKSWFGKDLNSSRLDKFYWLLAAIATVNLFLFVFVARSIFLTKMCKS

SEQ ID NO: 242604 - protein, 203 aa, Glycine max
  Clone ID: PAT_MRT3847_61100C.1.pep
QNTANVIRYFPTQALNFAFKDYFKSLFGLKKNDGYWKWFAGNIASGGAAGATSLLFVYSLDYARTRVANDNKSASKGGSRQFNGLVDVYRKTLASDGIAGLYRGFVPSVVGIIVYRGLYFGLYDSIKPVVLVGPLEGNFLASFALGWGVTTGAGLASYPLDTIRRRMMMTSGGSGPHYKSMMDAGSQIVAQEGVKSLFKGAAP

SEQ ID NO: 242605 - protein, 57 aa, Glycine max
  Clone ID: PAT_MRT3847_61101C.1.pep
VIKKKLLSRTCLDTRLKDQFLRASLCFSTHRSSQKHQYLYPNISIILVRNKLVPSTY

SEQ ID NO: 242606 - protein, 62 aa, Glycine max
  Clone ID: PAT_MRT3847_61102C.1.pep
SRSSDISAMEDSPERNKTRLKWAIGTHEMIKKSIFILCLIFITGKVYHLFLSLHIIMKIIIC

SEQ ID NO: 242607 - protein, 79 aa, Glycine max
  Clone ID: PAT_MRT3847_61103C.1.pep
PPKNKKNTVNHPSKNLPRLKKKTPLLTKTVTPERLIPAHKKLNVEGGGTLQVSFFYEEKTDEFFFRSPGDRKGNEPLFK

SEQ ID NO: 242608 - protein, 107 aa, Glycine max
  unsure (1)..(107): unsure at all Xaa locations
  Clone ID: PAT_MRT3847_61104C.1.pep
PFLFFPSTALHMKSFLYKKPFQYHXXXFXTISQFFAPIILXLXSISILQTLVISSNDTTPHLYYINIKLHNPIFNIYQFPSQFSTKFYQTQYHKPFIFFFHKYLLTF

SEQ ID NO: 242609 - protein, 69 aa, Glycine max
  Clone ID: PAT_MRT3847_61105C.1.pep
IFFLLFPNPFIFMLFDYMTISYFLSLIVFSCIFSYSLLLELSCCSSIQNIILKLLCTFVLLLANRVVLL

SEQ ID NO: 242610 - protein, 37 aa, Glycine max
  Clone ID: PAT_MRT3847_61106C.1.pep
QHLKHREPVKNVTCLIINQPCLSGYLQTLAMLRKWYW

SEQ ID NO: 242611 - protein, 57 aa, Glycine max
  Clone ID: PAT_MRT3847_61107C.1.pep
PENVICIGCLLCYCLHGDTSSYIINFTKKIFSSYIQNRLLIFSNNKKKTSNIYHSLI

SEQ ID NO: 242612 - protein, 188 aa, Glycine max
  Clone ID: PAT_MRT3847_61108C.1.pep
MRSYQEMVERKIKHINDDSRKLDYYKSMVAKEQIKSQVGADSLCKSSEKLSMTTEKNRVDQQDKEMDALEKNFQSQIQDIQQAIAAKEDKFVKLQLQAMQEKVKESCKESSEKEDKVENISSFLKPQDKEMKQFEAEREKIKKIHEEKKLALKKKQWQEQVELEKELENELTQLMDKYNCNQSQEKNC

SEQ ID NO: 242613 - protein, 61 aa, Glycine max
  unsure (1)..(61): unsure at all Xaa locations
  Clone ID: PAT_MRT3847_61109C.1.pep
IYNXFTLNXXIXQIFXNAFIQPTFXEIYSNFCKQQTPLLPHLSQDNXKITFKTLFLNNCHQ

SEQ ID NO: 242614 - protein, 86 aa, Glycine max
  Clone ID: PAT_MRT3847_6110C.1.pep
PLDNLPHRPPPPGDKNGPYEFAPPSQAIGRACGVTIPRSAWSGQTNARSQTNSRIRHRKHATQKLLISSTSNARTLWDCQCRRAPQ

SEQ ID NO: 242615 - protein, 66 aa, Glycine max
  Clone ID: PAT_MRT3847_61110C.1.pep
KNKPKHILKAGQLSYNSQYTHNLTVLVLSWVQTLYDFIDSLFLSISVCLCIVVSTVPVCLSLTPSI

SEQ ID NO: 242616 - protein, 171 aa, Glycine max
  Clone ID: PAT_MRT3847_61111C.1.pep
LSPRPNLLGTPLPTPTAALIVFLLESDKGSTATETFKGQKMLDSVLLALFLPCLGMSGVFIVYMCLLWYATTRHHQQPPIDGQPVKPVADKGLSALELEKLPKITGKELVLGTECAVCLDEIESEQPARVVPGCNHGFHVQCADTWLSKHPICPVCRTKLDPQIFTSQSPC

SEQ ID NO: 242617 - protein, 74 aa, Glycine max
  Clone ID: PAT_MRT3847_61112C.1.pep
NTGQDPLCTILAITRWFNKCRIRSAYFQATVLERSCRAAITSVGNFLAFIPSMLTALLFIFKNLVKVCLQYVFF

SEQ ID NO: 242618 - protein, 130 aa, Glycine max
  Clone ID: PAT_MRT3847_61113C.1.pep
MLDSVLLALFLPCLGMSGVFIVYMCLLWYATTRRNQPPIDGQPVKPVTDKGLSALELEKLPKITGKELVLGTECAVCLDEIESEQPARLVPGCNHGFHVHCADTWLSKHPLCPVCRTKLDPQIFTSQSPC

SEQ ID NO: 242619 - protein, 57 aa, Glycine max
  Clone ID: PAT_MRT3847_61114C.1.pep
KIRNFLENSIVMCNNCLDYSIGSVSDPNSHSYNLTIIRLKRKLRDEMGGASHGQNVS

SEQ ID NO: 242620 - protein, 52 aa, Glycine max
  Clone ID: PAT_MRT3847_61115C.1.pep
GTREGLNFYTSRELFVFQERLLMQNELRLLLLFKDCYFILEMLSLFNDFCKK

SEQ ID NO: 242621 - protein, 38 aa, Glycine max
  Clone ID: PAT_MRT3847_61116C.1.pep
DNDSYGLWLIHQSCVMRIEAWLVSWCRAVLAVMCMIEY

SEQ ID NO: 242622 - protein, 130 aa, Glycine max
  Clone ID: PAT_MRT3847_61117C.1.pep
MQCREPLITNIMWRNLIVQAAYQIAVLLVLNFCGESILPKQNTRADAFQVKNTLIFNAFVLCQIFNEFNARKPDEMNVFRGVTKNKLFVGIVGVTFILQIIIIEFLGKFTSTVRLDWKLWLASLGIGFVS

SEQ ID NO: 242623 - protein, 118 aa, Glycine max
  unsure (1)..(118): unsure at all Xaa locations
  Clone ID: PAT_MRT3847_61118C.1.pep
KXXFMGENMQVXXXKKPCTSASKAAXXKSNPXXDXQSVAAKNRRERISERLKILQELVPNGSKVDLVTMLEKAISYVKFLQLQVKVLAADEFWPVQGGKAPDISQVRQAIDAILSSQR

SEQ ID NO: 242624 - protein, 436 aa, Glycine max
  Clone ID: PAT_MRT3847_61119C.1.pep
AARSLRCVAIAYRSYELDKVPSSEQDLDQWSLPEHELVLLAIVGIKDPCRPGVKDAVKVCTDAGVKVRMVTGDNLQTAKAIALECGILASIEDAVEPNIIEGKKFRELSEKEREDIAKKITVMGRSSPNDKLLLVQALRKGGEVVAVTGDGTNDAPALHEADIGLSMGIQGTEVAKESSDIIILDDNFASVVKVVRWGRSVYANIQKFIQFQLTVNVAALVINVVAAITSGDVPLNAVQLLWVNLIMDTLGALALATEPPTDRLMHRSPVGRRESLITNIMWRNLIVQAVYQIAVLLVLNFCGESILPKQDTKADAFQVKNTLIFNAFVLCQIFNEFNARKPDEMNVFRGVTNNKLFMGIVGVTFILQIIIIEFLGKFTSTVRLDWKLWLASLGIGLVSWPLAIVGKFIPVPKTPLARYFLKPLRRLKRSRSRATQ

SEQ ID NO: 242625 - protein, 48 aa, Glycine max
  Clone ID: PAT_MRT3847_6111C.1.pep
DSGSTHASADAWVNIYIVSPISLMFTTLSSKFISLCVYSNPYYHYSHR

SEQ ID NO: 242626 - protein, 357 aa, Glycine max
  Clone ID: PAT_MRT3847_61120C.1.pep
FGSRECGILASIEYAVEPNIIEGKKFRELSEKEREDIAKKITVMGRSSPNDKLLLVQALRKGGEVVAVTGDGTNDAPALHEADIGLSMGIQGTEVAKESSDIIILDDNFASVVKVVRWGRSVYANIQKFIQFQLTVNVAALVINVVAAITSGDVPLNAVQLLWVNLIMDTLGALALATEPPTDRLMHRSPVGRREPLITNIMWRNLIVQAAYQIAVLLVLNFCGESILPKQNTRADAFQVKNTLIFNAFVLCQIFNEFNARKPDEMNVFRGVTKNKLFVGIVGVTFILQIIIIEFLGKFTSTVRLDWKLWLASLGIGFVSWPLAIVGKFIPVPKTPLARYFLKPLRRLKRFRSRATQ

SEQ ID NO: 242627 - protein, 51 aa, Glycine max
  Clone ID: PAT_MRT3847_61121C.1.pep
RPEGWKNLHGGSGWRTCWINARTSLRRNDYETNIGTRCNHLEQTLDYYTRL

SEQ ID NO: 242628 - protein, 222 aa, Glycine max
  Clone ID: PAT_MRT3847_61122C.1.pep
HCKMAEKVPKETCEVTMNFQNTISSNEKVSSSLTQDHRVEDSKVTLASECDLVINQTTISTTTSCDKRSVDPSAGATKEIKEFQDITKEILLTKSPKEIKDFQYISKEMPMIKSPKQAPPSSGEKSVHVEVSPVSEPDIVSQPALGCKSPGDDKFTVRERLSPAAETVPVVATTKLSSQKPAAETVPVVTTNKLSSQKVLHEKVTLLQVDSRGSPGTELEFV

SEQ ID NO: 242629 - protein, 45 aa, Glycine max
  Clone ID: PAT_MRT3847_61123C.1.pep
HAILSILILSFCRTLSDKKGFAGGRLSVGHLGIDISAAENVAAPS

SEQ ID NO: 242630 - protein, 163 aa, Glycine max
  Clone ID: PAT_MRT3847_61124C.1.pep
TRRKSGSEIDPKGNFLINHPSVVTDLSNPTTPASAFGIIIEALRLRRDAGIKPFTVMSCDNLRHNGDQAKKACISFARALDPQLADWISENVCFPNGMVDRITPATTPDIRTDLNSKSGIEDLVPVICEDFIQWVLEDKFSNGRPHYQVAGVTITDNVTPYEE

SEQ ID NO: 242631 - protein, 93 aa, Glycine max
  unsure (1)..(93): unsure at all Xaa locations
  Clone ID: PAT_MRT3847_61125C.1.pep
CQSQTPWILHFFXXQXLQDSIFLMRITAQKQSSGSKNSKKGSXSXPPSDEKIMSIGLIYVNEHYSGWKEQCLRVLQSKFDXQSRSFSPDQEIA

SEQ ID NO: 242632 - protein, 128 aa, Glycine max
  Clone ID: PAT_MRT3847_61126C.1.pep
MPPPTPLSSASAALRRRLQQSLRTRGGAESGPSRWTSPGHEERPKGYLFNRTPPPPGQSRKWEDWELPCYVTSFLTIVILGVGLNAKPDLTIETWAHEKALERLKIENSLAAAATNNNSESSSYDESD

SEQ ID NO: 242633 - protein, 99 aa, Glycine max
  Clone ID: PAT_MRT3847_61127C.1.pep
GGRFCLQSGYDRRVVEAAPLVDEVIETPDIEIQILTSPTRFAIRSVKEEFPKVTAASPFVTRHVSSCFLLPGAQPSPLNFEPPPPPSIRVHPSCEFGTR

SEQ ID NO: 242634 - protein, 66 aa, Glycine max
  unsure (1)..(66): unsure at all Xaa locations
  Clone ID: PAT_MRT3847_61128C.1.pep
DKNLRIRIQNAXQKHAREARAVSQISPQDPTKPCHHLLFSLNPKKIGPREIESDTHATVHPLHITI

SEQ ID NO: 242635 - protein, 40 aa, Glycine max
  Clone ID: PAT_MRT3847_61129C.1.pep
HASGYLIRCHMFRLYCRRRVKLKGCQPYLGHGSHKCTFQR

SEQ ID NO: 242636 - protein, 124 aa, Glycine max
  Clone ID: PAT_MRT3847_6112C.1.pep
MAFTTLPSIRNSISCPTMLVPDMPHNNISLRNKGFIYKGQHGINLRDFTKANVASPSLPVIAPPTPEERKETTADDRHHHHHHVAWTSIPQERWEGELQVQGKIPLWLKGTYLRNGPGMWHIED

SEQ ID NO: 242637 - protein, 54 aa, Glycine max
  Clone ID: PAT_MRT3847_61130C.1.pep
SAMASFGQPVHLLKEAGNFLMLLIFVPHFFFFLGDDSSCVKCRSRFLNAIRPIV

SEQ ID NO: 242638 - protein, 59 aa, Glycine max
  Clone ID: PAT_MRT3847_61131C.1.pep
GLWTMLPFLLLRLSFVVQKSNSFKGKIKSLSSLPFQSKPPSTLRSFYVFFIIIIINIAI

SEQ ID NO: 242639 - protein, 64 aa, Glycine max
  Clone ID: PAT_MRT3847_61132C.1.pep
RYRGTFRPLDRRWCKTKRWCRLACPSASPRGRSRRHLLLIAQSQISQIRRRRFFSPGGEPAQRN

SEQ ID NO: 242640 - protein, 43 aa, Glycine max
  Clone ID: PAT_MRT3847_61133C.1.pep
VFAYGTRYVKVALKPCPHRNRRSSHVSIAMTLSCQDGRCTRIE

SEQ ID NO: 242641 - protein, 283 aa, Glycine max
  unsure (1)..(283): unsure at all Xaa locations
  Clone ID: PAT_MRT3847_61134C.1.pep
MIVTARAMPKRVEGVVAMKQHFVLVHGIGGGSWCWYKIRCLMENSGCKVSCIDLKSAGIDQSDADSVLSFDDYNKPLMDFMSDLPENEQVILVGHSAGGLSITQACHKFANKIRLAVYVAATMLKFGFLTDQDLKDGVPDLSEYGDVYELGFGLGHDKPPTSALVKKEFQHKIIYPLSPHEQSNXQDSTLAAMLLRPGPLLALTSAQFREDGDGDGEVEKVCRVYIRTRHDKVVKPEQQEAMIKRWPPSTSYELDSDHSPFFSTPFLLFGLLLKAAAALDAIN

SEQ ID NO: 242642 - protein, 137 aa, Glycine max
  Clone ID: PAT_MRT3847_61135C.1.pep
MRGKNGECSADLQRAASLYNPQLEQMLLELNKKIGSDVFIAANTALMHNDFITNPNAYGFNTSKVACCGQGPYNGMGLCLPVSNLCPNRDLHAFWDPFHPTEKANKLVVEQIMSGSTKYMKPMNLSTILTLDARTHS

SEQ ID NO: 242643 - protein, 52 aa, Glycine max
  Clone ID: PAT_MRT3847_61136C.1.pep
TYLLHGPPVCRSLANTFTMVMGITSLLANFSHMGGSKLEIWGPGHSKWGMRN

SEQ ID NO: 242644 - protein, 350 aa, Glycine max
  unsure (1)..(350): unsure at all Xaa locations
  Clone ID: PAT_MRT3847_61137C.1.pep
MGEMSNFQLGVIGALFLSVASSVSIVICNKALMSNLGFPFATXLTSWHLMVTFCTLHAAQRLNLFVSKSVDLKTVMLFGILNGXISSPLLNLRLGFNSIGFYQMTKLAIIPFTVLLETIFLKKQFSSKIKFALFLLLVGVGIASITDLQLNFVGTILSLLAIITTCVGQILTNTIQKKLNVSSTQLLYQSAPFQAAILFVSGPVVDQMLTKQNVFAYKYSPVVLAFIILSCLIAVSVNFSTFLVIGKTSPVTYQVLGHLKTCLVLGFGYTLLHDPFTGRNILGILIAVFGMGLYSYFCTEDNKKKQLAGDLPLASQVKDKDSLPLLAGKNVGNQNEENHETNKLSKDSVI

SEQ ID NO: 242645 - protein, 50 aa, Glycine max
  unsure (1)..(50): unsure at all Xaa locations
  Clone ID: PAT_MRT3847_61138C.1.pep
NLFPAAXGXILETKPGSLLSDTLKNIIQDPIARYGTWSPTLEYGILVRGF

SEQ ID NO: 242646 - protein, 51 aa, Glycine max
  Clone ID: PAT_MRT3847_61139C.1.pep
YTPMSEGSSLCEVMEKGHYSQPYPCICKETISRFESMTNWSPRHKFATVPN

SEQ ID NO: 242647 - protein, 52 aa, Glycine max
  Clone ID: PAT_MRT3847_6113C.1.pep
RNLFPQGLPLYFLGVGKVRQGIKNGGPMKGLKGNKNSPFFPRVCCVIKKRKP

SEQ ID NO: 242648 - protein, 51 aa, Glycine max
  Clone ID: PAT_MRT3847_61140C.1.pep
FNWIISEDEYVQHVCRVSQQLHAHRYQYDAVDYIWYRSLNGDSNSLGVDEI

SEQ ID NO: 242649 - protein, 83 aa, Glycine max
  Clone ID: PAT_MRT3847_61141C.1.pep
PVWTTSDTSRRRPIAYQECAVSSPPTNLPRTTRATWKTSTTTVAASLPSTRSQTPAKTTQIGDEGIGRATRRLPSLRPRQKRL

SEQ ID NO: 242650 - protein, 182 aa, Glycine max
  Clone ID: PAT_MRT3847_61142C.1.pep
MSTSVLPSLLFFLVLILLLLDPSEPENVAIYWGQNADEGTLNETCATGTYSHVIIAFLSTFGNGQTPQLSLADHCDPSTNGCTKIGREIKNCQEQGITVMLSIGGGSGNYSITSDEDANNVSNYLWDNFFGGFFSSRPFGDAVLEGLDFDIALGDNTSFMAKFAQYLQIKFRFHRTIPTNNL

SEQ ID NO: 242651 - protein, 109 aa, Glycine max
  unsure (1)..(109): unsure at all Xaa locations
  Clone ID: PAT_MRT3847_61143C.1.pep
MEEPGWGISGENKETLHTLSPMKKAFDGTFIVAGGYDREEGNKAVTADKAYLVAYGXRMFLANSDLSKRLEVDEPLNTYNRDTFYTPDPDVGHTDYPFIERSVLKDHMS

SEQ ID NO: 242652 - protein, 44 aa, Glycine max
  Clone ID: PAT_MRT3847_61144C.1.pep
SRRWQAREVARALCRSGDEQPTTQLLVLSVLQIKHLRNGEYWIP

SEQ ID NO: 242653 - protein, 850 aa, Glycine max
  unsure (1)..(850): unsure at all Xaa locations
  Clone ID: PAT_MRT3847_61145C.1.pep
MNDFDGLFTSDFGLKPQGKSAPMAPQPKGSSNSASLNFDFGSRSARASSNFDDLLAGAGSEQSPXSDSPFDLDSMYGGPPARSANSPPPPVYDKPVYDDDIFDGVPGLKSTSKVKFDDVFATTTESGGGAPAFDDLLGGFGKESKSLDGKRSEKDEKGVSDFDDLLAGFGHSRSSSGGRHTPDIGLSSEPTASASKTIPTAAEDPFKVFESASAPVDSSAGHFMNPLEEISKFSSSGSTKNDSSSTSNGKVYEDIDPFDGLGKSVPAFSSERNSRKGSSSPRLNTSTSWTGDKEPVDKISGRSPERHTQNKIPVENDREFLHAPFHMPTYSSDSDKPVGQRSTSPPYNNVDFRQTNIQADMSPKYEDNLEASEDIWLTVSEIPLFTQPTTAPPPSRPPPPRPVHIPKSGTTSPASTNARKKTNEFSSFPGSTRFSQGPKSAPAAGRVSPSSQFDELDDFAMGRSRGNDNESANGLPDEELEMNSAAAAMKEAMDRAEAKFRHAKEVREREYSKAARSKEAVQMEKDERTVLEEQENQERFDRERQQKEKEGKEQRRLMKEREEKEREQQRLERERARQAVERATREARERAAAEARQRAERAAVEKANAEARGRAERAAVQRAQAEARERAAAEAKERAEKAAAEVKDRETRERATAARAEVEARVKAERAAVERAAAEARERAAAAARMNQQKNENDLESFFGMGARASSVPRPPRANSSDNVFESQFQSDVTRKSTSASTSMKKASSSTNIVDDLSSIFGAAPXLESFRKLKGKLKKGDEPGWSATTGLRSXAAKALAEKNQRDLQTQREQAERHRLAETLDFEIKRWAAGKEGNLRALLSTLQYVCT

SEQ ID NO: 242654 - protein, 33 aa, Glycine max
  Clone ID: PAT_MRT3847_61146C.1.pep
AKVIDQCVCTWRITYNRLMVFSKVPGRKVNCQT

SEQ ID NO: 242655 - protein, 45 aa, Glycine max
  Clone ID: PAT_MRT3847_61147C.1.pep
NCHQSPRTLNRYESQKRRECYTHDQDLKNQKPTNPLSQCYCNHVS

SEQ ID NO: 242656 - protein, 103 aa, Glycine max
  unsure (1)..(103): unsure at all Xaa locations
  Clone ID: PAT_MRT3847_61148C.1.pep
FSFSLAYHTYLSVDNINXVLLERLNTLVYLDHLYKRHRFTXQGDAHTFQSDCDTIYVTPPSLLGLVDHYNNRTIYSHYDAVSDAIVSNGSDITPIAVGGIIDD

SEQ ID NO: 242657 - protein, 48 aa, Glycine max
  Clone ID: PAT_MRT3847_61149C.1.pep
LHDEKRKEVRKFLKKYQGNFGIRITKVKMKKGKKWMRTTTYPQLLVVG

SEQ ID NO: 242658 - protein, 100 aa, Glycine max
  unsure (1)..(100): unsure at all Xaa locations
  Clone ID: PAT_MRT3847_6114C.1.pep
RPACAFLGXRGAIGLCLGGTXRAPVLIAVLVFCSWLRGPGPAGGEVEGEERGRAEMRQGMCWSYWHGLVIYLHLWCRFAGELCMWCGVVTPPTGXLGVVC

SEQ ID NO: 242659 - protein, 83 aa, Glycine max
  Clone ID: PAT_MRT3847_61150C.1.pep
KLRVHYKTNDKLNPQMTFTSLKSNKKTPRLQLNNPNQTETQFYMIQAMAIHVKIFTPLLFFEPLLFSILRGKGPKNKTFFWGP

SEQ ID NO: 242660 - protein, 82 aa, Glycine max
  Clone ID: PAT_MRT3847_61151C.1.pep
LKGGSHELIDPVRLFEDGLVCVSSFKWLPPGSTETAVAVRTSHKFLIASSSHSDNDPSTTRDLLDSAIFRTLQGLLVNMMLE

SEQ ID NO: 242661 - protein, 68 aa, Glycine max
  Clone ID: PAT_MRT3847_61152C.1.pep
CHNAKPITRGVWQTTTNESALLCSLSLPRSGTAKTSWYQPIGKLGPKTPQGLPGRGAWEFVARPTYWI

SEQ ID NO: 242662 - protein, 61 aa, Glycine max
  unsure (1)..(61): unsure at all Xaa locations
  Clone ID: PAT_MRT3847_61153C.1.pep
MSCCGGNCGCXDYANRLXGCGGCKMYPDLNYTDLTTTLHLWTLRLNKSMQKVQVLKWFVPR

SEQ ID NO: 242663 - protein, 80 aa, Glycine max
  Clone ID: PAT_MRT3847_61154C.1.pep
QGSTSFGTHSHKRKIGEKEGIVASLDKMTNSFDRMVEKMDGEVDDEDIQEVLREAALIPDLNRQQWAKAIKWLADDPKQL

SEQ ID NO: 242664 - protein, 101 aa, Glycine max
  Clone ID: PAT_MRT3847_61155C.1.pep
VEMVSFIKSLEGCFDLILAGRCHENDSSLFSGFNEWNEYPELGSVSDMLVSSDSTFDGSVLVVQQNRVGVGHHDLHLDNSFAAKHEPATIVDVHPKVMAFV

SEQ ID NO: 242665 - protein, 85 aa, Glycine max
  unsure (1)..(85): unsure at all Xaa locations
  Clone ID: PAT_MRT3847_61156C.1.pep
MHCGQQLKFTPCVVLTSTKPNMSNTWDNCDCADKTSCTKGNSSRVNVNNENSYIXTVVIDVRPADHDRKCQCSTNCTCTDCTCGH

SEQ ID NO: 242666 - protein, 101 aa, Glycine max
  Clone ID: PAT_MRT3847_61157C.1.pep
NFNSHLVSFFSRSGPSYSLTHHLGFSFPLRSYARSFSHSAFSRSNDAVLVSFSFVSFPDADSLLAFVSHAIVGGVVLRLLTEEVQLGFPQFGFGFGFVMGI

SEQ ID NO: 242667 - protein, 48 aa, Glycine max
  Clone ID: PAT_MRT3847_61158C.1.pep
LHRSRVHLNRNFKIISFQLRFQVQSISLRGIKVVTLHNFKNIIKTKIG

SEQ ID NO: 242668 - protein, 54 aa, Glycine max
  Clone ID: PAT_MRT3847_61159C.1.pep
PFGENFSPPRTPPGINSRVRGPLFGGPPFFFFFFFFFFFIVFYIHPELNLSSSL

SEQ ID NO: 242669 - protein, 44 aa, Glycine max
  Clone ID: PAT_MRT3847_6115C.1.pep
RLCLFVRILICIYYFIHNYEYMYIYIYIYIYIYILFFINILFYY

SEQ ID NO: 242670 - protein, 42 aa, Glycine max
  Clone ID: PAT_MRT3847_61160C.1.pep
LLERHSPPFLDSNPGAIIPEHERYFANLRCQRKSRFSFSREM

SEQ ID NO: 242671 - protein, 63 aa, Glycine max
  Clone ID: PAT_MRT3847_61161C.1.pep
KSHYAIGTANAPCLIGSRTSPRFLISNFYMLAEVTNEGLSLRNELLPMNGSKLTGCFKLFIHE

SEQ ID NO: 242672 - protein, 62 aa, Glycine max
  Clone ID: PAT_MRT3847_61162C.1.pep
NPPKKNLDNKPPPTSMKQRNSPPQQKKQGLPKAQANGYLSDLQKANVWISLRGHPVLASDYG

SEQ ID NO: 242673 - protein, 113 aa, Glycine max
  Clone ID: PAT_MRT3847_61163C.1.pep
EQGNPKKKKFKATKGGKQPGVNPLDRGGQNLTKKNFKGGKKGPGFPKRKKPPNSKQKPAKGKQPHGETGGPNQKAPGGERKTFGGAPNGKRGTPFLGPNLKNHISTRGFCPRG

SEQ ID NO: 242674 - protein, 63 aa, Glycine max
  unsure (1)..(63): unsure at all Xaa locations
  Clone ID: PAT_MRT3847_61164C.1.pep
VHVVYSAGTXARSELIGNLMMSTMILILHSQLIWSTQHLSNXXSSNATIGKXEMDXVQPVSTN

SEQ ID NO: 242675 - protein, 55 aa, Glycine max
  Clone ID: PAT_MRT3847_61165C.1.pep
FPGRPASATSPLLHKGGLASDANHQINQTPSLIEIIITKWGFVQLKFLGGFCKRP

SEQ ID NO: 242676 - protein, 111 aa, Glycine max
  Clone ID: PAT_MRT3847_61166C.1.pep
AKKKIFFFLKDPKTIFPQWGFHGVLSLRGSPGVKKSPNFRCSLGLNAPKDRWVFWRGGPNFFWTLRPFSPRPKARLKFFQNGFFFWGNSFKGGGNFLTFPKHEAGLEIWGV

SEQ ID NO: 242677 - protein, 231 aa, Glycine max
  unsure (1)..(231): unsure at all Xaa locations
  Clone ID: PAT_MRT3847_61167C.1.pep
ERSLPMPAAMRSERPGLWSASGAELVSTDPAKGMYGAVRNAEGIFTSTPDSYRPQQFDSPSKPRVHYETTGPEIWEDTRGKIDILVAGIGTGGTVSGAGQFLKQQNPKIQVIGVEPLESNILTGGKPGPHKIQGIGAGFVPRNLDQXVLDEVIAISSDEAVETAKQLALQEGLLVGISSGAAAAAALKVGKRPENAGKLIGVVFPSFGERYLSTILFQSIREECEKMQPEP

SEQ ID NO: 242678 - protein, 123 aa, Glycine max
  Clone ID: PAT_MRT3847_61168C.1.pep
EITGIAVNAAYDNTLRIDKSNASVDHSGPLSHFHSSIQLISHTHTLSLSYTHKVPSPNMAAIFSSSLFVSSPLPKPLSSSYSRIHKAPQLFRTRSSLLQDKEEKVIVQDSFPSKTFTLHSAGE

SEQ ID NO: 242679 - protein, 55 aa, Glycine max
  Clone ID: PAT_MRT3847_61169C.1.pep
FSIARRQQPIILDTGLDCAHPGKRIFTRDLWVQNHVGCHMTNQCTVNSNLESPIL

SEQ ID NO: 242680 - protein, 44 aa, Glycine max
  Clone ID: PAT_MRT3847_6116C.1.pep
FKGKQAYRLSHDLRVVPYVLDKISGVSESMILGRPCMGLVIMFI

SEQ ID NO: 242681 - protein, 49 aa, Glycine max
  Clone ID: PAT_MRT3847_61170C.1.pep
KLEKTMGINLILTPRQGPKKTINGSIILFYNRHGTLTFFFKKKKKGCPT

SEQ ID NO: 242682 - protein, 67 aa, Glycine max
  Clone ID: PAT_MRT3847_61171C.1.pep
LDLNLALKPKDWSRQGVDRGRYRPCDFRPHLQRQTERGDAAQQPLAARPLGCHSAGNHCHRRHQRLP

SEQ ID NO: 242683 - protein, 39 aa, Glycine max
  Clone ID: PAT_MRT3847_61172C.1.pep
FSVYAMTYETECNARITTPGNSHGNRDLIIEYRLLFKTV

SEQ ID NO: 242684 - protein, 113 aa, Glycine max
  Clone ID: PAT_MRT3847_61173C.1.pep
MEEVEQANRVAVESCHRVLSLLSQPRDQVQHRNLMVETGEAVVRFKKVVSLLHSGMGHARVRKVKNPQIPFSHQSIFLDNPNCRTINNHHFKNLQFPQTSFPDNSIQELGSTI

SEQ ID NO: 242685 - protein, 152 aa, Glycine max
  Clone ID: PAT_MRT3847_61174C.1.pep
MEEVEQANRVAVESCHRVLSLLSQPRDQVQHRNLMVETGETVVRFKKVVSMLHNGLGHARVRKLKNPQIPSSHQSIFLDNPNCKTLTNNNNNHHSKKNLYFPQTSYPDNSVQEHGSTIKNSLSLGQPSLELSSNGKSPLHLTQQGSSNHYHF

SEQ ID NO: 242686 - protein, 355 aa, Glycine max
  Clone ID: PAT_MRT3847_61175C.1.pep
MEEVEQANRVAVESCHRVLSLLSQPRDQVQHRNLMVETGEAVVRFKKVVSLLHSGMGHARVRKVKNPQIPFSHQSIFLDNPNCKTINNHHFKNLQFPQTSFPDNSIQELGSTIKNSLSLGQPSLELSSNGKSPLHLTQQASSNHYHFFQQQQQQQQQRLLLQQQQQQQQQMKHQAEMMFRRNNSGINLNFDSTSCTPTMSSTRSFISSLSIDGSVANLDGSAFHLIGAPHSSDQNSQQHKRKCSARGDEGSLKCGSSARCHCSKKRKHRVKRAIKVPAISNKLADIPPDDYSWRKYGQKPIKGSPHPRGYYKCSSMRGCPARKHVERCLEEPTMLIVTYEGEHNHPKLPTQSANA

SEQ ID NO: 242687 - protein, 114 aa, Glycine max
  Clone ID: PAT_MRT3847_61176C.1.pep
GIKLELCGEDRVGLLSDVTRIFRENGLSVNRAEVTTRGSQAMNVFYVTDVSGNPVKSETIETVRKEIGLTILHVKDDVCSKPPPQESGKFSLSNLFRSSSEKFLYNLGLMKSYS

SEQ ID NO: 242688 - protein, 72 aa, Glycine max
  Clone ID: PAT_MRT3847_61177C.1.pep
NSWDPRSTIRNHDGDDLEGINMHRHVDFDRRIALPILLPNFYLPRTMRTMSVRPEKSESVLLVASEAPSTLQ

SEQ ID NO: 242689 - protein, 85 aa, Glycine max
  Clone ID: PAT_MRT3847_61178C.1.pep
DGMLEYYNQWGTLVFKTIPTHFHRGILTYPIKMKVIKMFREHIQHYTAEIKNPHQRRTTKTRVDSLWMKPGGRNQSILLIFIGKN

SEQ ID NO: 242690 - protein, 71 aa, Glycine max
  unsure (1)..(71): unsure at all Xaa locations
  Clone ID: PAT_MRT3847_61179C.1.pep
PPPPTPPXPPRPTPRRTTPPTSPPPAPPPPPPHPHTPHPPPPPPPHTALPAPPGSPPCTQAPPPQSLESSP

SEQ ID NO: 242691 - protein, 34 aa, Glycine max
  Clone ID: PAT_MRT3847_6117C.1.pep
KKLLFISVTTILIIIALFTNKAKLFWHRFNHGGV

SEQ ID NO: 242692 - protein, 64 aa, Glycine max
  Clone ID: PAT_MRT3847_61180C.1.pep
KKSRKISNSLLEKRGSLKQTRFQCEEKSFDLQQAEREGAIKTVSQITKGSRPSRVALPKNSVCK

SEQ ID NO: 242693 - protein, 159 aa, Glycine max
  Clone ID: PAT_MRT3847_61181C.1.pep
AISCFHMDLLSEAEAALRPADEPGAEVPNGAAGHYLLGLIYRCTDRRKNAIQHFKQALSMDPLMWAAYEELCILGAAEEATVVFGEAAAFCLQKQYLNCSTSPNSHMSPEHSNEVAARPCMSEEASPRQLKQMQSLKDIATYHHGASILGGAAGQPINS

SEQ ID NO: 242694 - protein, 142 aa, Glycine max
  Clone ID: PAT_MRT3847_61182C.1.pep
TMTTNSHGILTWQRICAQQLLYHNWQYPLQTYWFRHVQHLFHSRTFVSQNIFFSILCRLVVNSSVPFTSNSTCLFVLSILYYHALSSASGFSRRVFLAATPIHAVFPSLWFLTVFLTPTAPPPPPPPKEGGRHTVMTGNLPG

SEQ ID NO: 242695 - protein, 44 aa, Glycine max
  unsure (1)..(44): unsure at all Xaa locations
  Clone ID: PAT_MRT3847_61183C.1.pep
XNLENSYKHXCKEEEERIIGAKPXCLRQNGITNNKXXXQAFSVK

SEQ ID NO: 242696 - protein, 114 aa, Glycine max
  Clone ID: PAT_MRT3847_61184C.1.pep
MVEPPAAAATSESDTTGNTNTPSPSSSSSSSSSKKRARDNNNNSNSSSNKHSVYRGVRMRTWGKWVSEIREPRKKNRIWLRNVAHTQMAARAHDVGALKIKGSPAFFNFPKLGA

SEQ ID NO: 242697 - protein, 47 aa, Glycine max
  Clone ID: PAT_MRT3847_61185C.1.pep
EYWKLNLPELFLDVMLMIFFSIHNYSNLLYSSFGPPHERVEFIYFVS

SEQ ID NO: 242698 - protein, 54 aa, Glycine max
  unsure (1)..(54): unsure at all Xaa locations
  Clone ID: PAT_MRT3847_61186C.1.pep
NXNMRIENSDCIISXLAVSQREDTCRPRHQRMDIDETWDMIISLGNPPLXVVFL

SEQ ID NO: 242699 - protein, 94 aa, Glycine max
  Clone ID: PAT_MRT3847_61187C.1.pep
KPGTRGGRVTSCETHAETPHMRASNHASHSIKAIIEGGVLCYCPHCKPTMPHKTLAKALVIGPTMHQWRGKGGATWAPRRHQDDQLRLEALEGP

SEQ ID NO: 242700 - protein, 202 aa, Glycine max
  Clone ID: PAT_MRT3847_61188C.1.pep
MATWGAHSMLLSHGEGTGTPKVCVKAGLTVRGDLRFHRTRGFKYAPSVVVLKVLATARKPTRLRLLRPYCSVRGQHDHGKGYFSPTNSQIPRQHILKFAADRMLAFLKDWSNLRITAVAGILVSVLMIIPPADAVDALKTCACLLKDCRIELAKCLSNPSCAANIACLQTCNNRPDETECQIKCGDLFENSVVDEFNECAVS

SEQ ID NO: 242701 - protein, 42 aa, Glycine max
  Clone ID: PAT_MRT3847_61189C.1.pep
TVGKCDQQCKCTVPCTGGSTFMCTNVRNTTGRGGYLTCPLRK

SEQ ID NO: 242702 - protein, 97 aa, Glycine max
  Clone ID: PAT_MRT3847_6118C.1.pep
AVWVPLCQKTRPTGCSTEKKVSPLWGAAPPLAWAYAPRPPFLGGPFLGPTPFCPLPGGFFGGFLFIGFSLSNRGPGPRFLFPPPYLFSVLKFPKNLF

SEQ ID NO: 242703 - protein, 82 aa, Glycine max
  Clone ID: PAT_MRT3847_61190C.1.pep
KVGFHPTCFVIKNYGLISLRFIDEQALYQIIESPRVYMCKMFFSPLTDWNHCLSVFKILAFILVFDEQTALIFKSTPKKKRR

SEQ ID NO: 242704 - protein, 69 aa, Glycine max
  Clone ID: PAT_MRT3847_61191C.1.pep
HYTPSMKDPPILHQCSTLSKCEASTLTSDKVNKKTKYSDPTLKLVTEYNISKSELSITISRSVKYRTKD

SEQ ID NO: 242705 - protein, 81 aa, Glycine max
  Clone ID: PAT_MRT3847_61192C.1.pep
LQRVANVIDTNSVTRRVVIHFQYFLVIVVSGECVDEIEIEVGIGAGVAFALGAGDAVFIVFPFPRHVLLEEKSSSRGTTQG

SEQ ID NO: 242706 - protein, 58 aa, Glycine max
  Clone ID: PAT_MRT3847_61193C.1.pep
APCWFIQTFDFCVVVSSANFPVPSPIVRSNLYSSRLFIGPICTGSYISKASYLLYLDY

SEQ ID NO: 242707 - protein, 61 aa, Glycine max
  Clone ID: PAT_MRT3847_61194C.1.pep
ALPPPLVLTMFTQFLIFSLFFTSFIFTGTHDTHGFVRTLKRKMVGLGQKAEKVNPFKIYWP

SEQ ID NO: 242708 - protein, 179 aa, Glycine max
  Clone ID: PAT_MRT3847_61195C.1.pep
PTRPPTRSYGCEKTTEGSSRNICILTANGAISNVTLRQPASSGGTVTYEGRFEILSLGGSFFLAGTERAGGLSVSLSGPDGRVLGGGVAGLLIAASPVQIVLASFVSDVRKHLKRAKKTENEKVSTAGGQSSSPSRGTLSESSGGVGSGSPLNQSTGACNNTMNNCTTPTQSFQGMPWK

SEQ ID NO: 242709 - protein, 48 aa, Glycine max
  Clone ID: PAT_MRT3847_61196C.1.pep
TESEHFHNSGRPTIKPRKVHLHKISGANAKTRPDYILITRVEPYTTTC

SEQ ID NO: 242710 - protein, 355 aa, Glycine max
  Clone ID: PAT_MRT3847_61197C.1.pep
MSGSDMAGREQFTVGMHKPQQQQQQQQQPQLHQNMRMDYAADGTAVFAPPTVTVNINGGDSSPAVPPGLGLPQPQPMMVNSPEPIKRKRGRPRKYGPDGGMTLGALKTTTPPGGGVPVGQSGGAFPAGPLSDSASAGTVKRRGRPRGSANKNKKNDSSNSSKYSGPRSWFTPHVITVNAGEDLSARIMTISQSSSRNICILTANGAISNVTLRQPASSGGTVTYEGRFEILSLGGSFFLAGTERAGGLSVSLSGPDGRVLGGGVAGLLIAASPVQIVLASFVSDVRKHLKRAKKTENEKVSTAGGQSSSPSRGTLSESSGGVGSGSPLNQSTGACNNTIENSTTPTQSFQGMPWK

SEQ ID NO: 242711 - protein, 83 aa, Glycine max
  Clone ID: PAT_MRT3847_61198C.1.pep
RNWHTENTRLLSRALFHKKIVAVISTFFSLSMLPSVAKHGPCELPDIGIKIGLICHYVGISMSIFCVPFLNFWFFLLFKSDQF

SEQ ID NO: 242712 - protein, 54 aa, Glycine max
  Clone ID: PAT_MRT3847_61199C.1.pep
IRVWVKCRRTRWLCSWWRTGALRGVRTQEALPLAISHFQCHRIRVLAKAWADAW

SEQ ID NO: 242713 - protein, 102 aa, Glycine max
  unsure (1)..(102): unsure at all Xaa locations
  Clone ID: PAT_MRT3847_6119C.1.pep
MLEEAQHSKGSVCFNGTQLQYHFDNLLKXGIKNSIVHINEXRWCNNVYSHLYHKDNTXGSSNLMNDLHFSTLFSTHHESNPYFYNLNRFHAKYSDHLSFTYD

SEQ ID NO: 242714 - protein, 73 aa, Glycine max
  Clone ID: PAT_MRT3847_611C.1.pep
VCVLGAMWGSCSLPFVGSELWARSHLAAPLCRRGSFAGGLVPLSSCCSSPWVVGGVCVSYLARGSAPGVPGRC

SEQ ID NO: 242715 - protein, 150 aa, Glycine max
  unsure (1)..(150): unsure at all Xaa locations
  Clone ID: PAT_MRT3847_61200C.1.pep
FLPDGFLERTKGRGFVVTSWAPQTQILSHVSTGGFLTHCGWNSALESIVLGVPMVTWPLFAEQRMNAVLLTEGLKVALRPKFNENGVAEREEIAKVIKGLMVGEEGNEIRERIEKIKDAAADALKEDGSXPKGTLPIWHSDGEISGTAVV

SEQ ID NO: 242716 - protein, 68 aa, Glycine max
  Clone ID: PAT_MRT3847_61201C.1.pep
MGSSVMASLALKPAPFTVEKSSVTGLPYLSRNSSSFRVVASGTNIKTDRPYAINGGMALTYGSDASVM

SEQ ID NO: 242717 - protein, 71 aa, Glycine max
  Clone ID: PAT_MRT3847_61202C.1.pep
HFQSFLSKYTRCFESFVSLQEFTENFTRMNKRMIHIDNFRIFFLQSFCYILSLSPSIHCLSMVGFFILFFV

SEQ ID NO: 242718 - protein, 103 aa, Glycine max
  Clone ID: PAT_MRT3847_61203C.1.pep
NALFFCSYAAANYVSSALVTTVHHVARTHSHPDWLTNDINAGRLDYFYYLVAGIGVLNLVYFLIVAQRYHYKGSGDLQDTTQDVELASQGELDYYSAKYENSA

SEQ ID NO: 242719 - protein, 88 aa, Glycine max
  Clone ID: PAT_MRT3847_61204C.1.pep
FPYYLFYFYSYQKSYWGALTKSVFIYPKCSISPTGLLQVFQLVKGAFPKQNNQDGRESEPILFFSTLLNYGDEKNYTILSLLQLNLSA

SEQ ID NO: 242720 - protein, 92 aa, Glycine max
  Clone ID: PAT_MRT3847_61205C.1.pep
KGARPFPLSKVQTCCLIFSPPPSPLRFIPLWGFIYSFIIRECRALFLPGYKKKKLVFKIRAGKRHLNNSFFFPPKKNIFLLLLGIPFQPQRV

SEQ ID NO: 242721 - protein, 93 aa, Glycine max
  Clone ID: PAT_MRT3847_61206C.1.pep
MTAHMQPHSRPANLLTHMDDPLLYSLLSLALANTIHNQVPRQGTHASTYSSTYSLAESTVTTTVTTHINSDSTLPAMHLHNHFHHCFDQCCHT

SEQ ID NO: 242722 - protein, 117 aa, Glycine max
  unsure (1)..(117): unsure at all Xaa locations
  Clone ID: PAT_MRT3847_61207C.1.pep
RGEGKKKKRNKKSVETYKIYMFKGLKQVHPDIGISSEAMGIMNSFINDIFEKLAQESSRLARYNKKPTITSRERGTAXRLXLPGGGGGGGGGGGGGGGRAGGGGGGGGGGGGGGGGG

SEQ ID NO: 242723 - protein, 74 aa, Glycine max
  Clone ID: PAT_MRT3847_61208C.1.pep
ELWYRRDIEKDRSREREEDRDRRQEKERDRSWDTVMERDRRREKERDRSRDRIRGGKRDKDPENERDDKHRARE

SEQ ID NO: 242724 - protein, 38 aa, Glycine max
  Clone ID: PAT_MRT3847_61209C.1.pep
KLICHPEGYWESFNREKKKKKDFLLKRKNQLLAEFWKN

SEQ ID NO: 242725 - protein, 136 aa, Glycine max
  unsure (1)..(136): unsure at all Xaa locations
  Clone ID: PAT_MRT3847_6120C.1.pep
LKSYGHCWYCPSCLCRVCLTDXDDDXIVLCDGCDHAYHIYCMKPPRTSIPRGNWFCRKCDAGIQAIHQAKKAYEFNKPRRNGEDAAKPNANLEKKXHNKRARELESGGAMDMLLTAANTLNFEEKEAASHIKLQRT

SEQ ID NO: 242726 - protein, 70 aa, Glycine max
  Clone ID: PAT_MRT3847_61210C.1.pep
ESMLRIGSEVLSRILQVNGRSLSRGSAKISTIQTFLVESAFYTQYDKVFRWSTRLRFEHISAELCIRYGL

SEQ ID NO: 242727 - protein, 69 aa, Glycine max
  Clone ID: PAT_MRT3847_61211C.1.pep
MAPEKDRLHHLASKTGKSGGGKQKKKKSSKGEHKEKVNTMVLFDQGTYDKLHSEAPRFKHLNTSLLSDR

SEQ ID NO: 242728 - protein, 98 aa, Glycine max
  unsure (1)..(98): unsure at all Xaa locations
  Clone ID: PAT_MRT3847_61212C.1.pep
VCDSPNAVLSITIAGDLSCYQITGFIDACTLFADDGVGRVSXPYELGTVMRLLGKLLTEALLHDMINXVYAAGNGTLYESXYLNLIDLKMNDTNWNDD

SEQ ID NO: 242729 - protein, 73 aa, Glycine max
  Clone ID: PAT_MRT3847_61213C.1.pep
AQWFPLLIAITVQNFFHFQKISFSESLFSHALLLKERSIEPKLGKAWYRSSSHKTKTRIKSNKPHIFKLKITN

SEQ ID NO: 242730 - protein, 39 aa, Glycine max
  Clone ID: PAT_MRT3847_61214C.1.pep
MVDFNLTLRLSQKSSASHMLIACVVLHFWFLIRDMVIGE

SEQ ID NO: 242731 - protein, 80 aa, Glycine max
  Clone ID: PAT_MRT3847_61215C.1.pep
TAARRRQKGYSVWNPFRSELAAVILGGVDNIWFGPGVRVLYLGSASGTTVSHVTDVVGPAGVVYAVQLSHSSGRDLASMA

SEQ ID NO: 242732 - protein, 46 aa, Glycine max
  Clone ID: PAT_MRT3847_61216C.1.pep
NSSKFKLCHVMYSYSINTYVTCQNISKKLQLFKVIQSSPVIRVLCS

SEQ ID NO: 242733 - protein, 104 aa, Glycine max
  unsure (1)..(104): unsure at all Xaa locations
  Clone ID: PAT_MRT3847_61217C.1.pep
YPXXPXXXDPRXXXFPFXXIDXKXFFPVXXXCNVCQXXYQTRPFLSFFNLSRPGSIFKYNFNKGGLSHSLVLLAPYDFLGGLNPGRLDLGIFLEPLFPLSFYFL

SEQ ID NO: 242734 - protein, 56 aa, Glycine max
  Clone ID: PAT_MRT3847_61218C.1.pep
RCGVQIFTTALRSLLGSSSRRLRFILSRSSSNHCRLHFSDIIRLYARNGEFIGSAS

SEQ ID NO: 242735 - protein, 129 aa, Glycine max
  Clone ID: PAT_MRT3847_61219C.1.pep
NNKVPTTANYCNQQAEVVQAEKKLLEAAIANWVLGSKTHLTSSFFCTSIFSFRTNKEAQETTFKFLSCTAPAFLKFIVLLSYSSATNIAISDMVDGRFSHSLYMKRCCLLWLRVGLPTKCMLIPRATRG

SEQ ID NO: 242736 - protein, 387 aa, Glycine max
  unsure (1)..(387): unsure at all Xaa locations
  Clone ID: PAT_MRT3847_6121C.1.pep
ENFQGMKPESVLDFSRVNSRMKEQAYEQSPTLFLSDIQQVWRKLQDAGNEIVALAKSLSNMSRTSYSELVGIPAQSTFQDEKQVEFDCCMKPEQTQACAMYKICSCKCCGEKADDTDCLVCDSCEEIYHVSCIEPAVKEIIPHKSWYCANCTANVIESLHENCVLCERLNDAKTLDDVIGDGSFPTIEETQNEFEENSNCTSDGIQVSIGEEKTPNCKICENEVDGGKIKICGHRFCSNKYYHVRCLTINQLKSYGHCWYCPSCLCRVCLTDQDDDRIVLCDGCDHAYHIYCMKPPRTSIPRGNWFCRKCDAGIQAIHQAKKAYEFNKPRRNGEDAAKPXANLEKKHNNKRARELESGGAMDMLLTAANTLNFEEKEAASHIKLQRT

SEQ ID NO: 242737 - protein, 66 aa, Glycine max
  unsure (1)..(66): unsure at all Xaa locations
  Clone ID: PAT_MRT3847_61220C.1.pep
LTTIYNMCAYGLNAGFLGAGLMLTIPETIPQQTVWIXKATLRTPLNFHSPXQSICQIFIDLLGSVL

SEQ ID NO: 242738 - protein, 45 aa, Glycine max
  Clone ID: PAT_MRT3847_61221C.1.pep
SFIAHDTYIYMSLILFLLNFCFVLLRKKKISLAANNLKHHGSQVS

SEQ ID NO: 242739 - protein, 67 aa, Glycine max
  Clone ID: PAT_MRT3847_61222C.1.pep
KMGIMHASGQTTYDNFDFWRGEQDKGRELKRAMVKIMCKHHNDCYTMNRAISLKSTITGACTVHDLQ

SEQ ID NO: 242740 - protein, 225 aa, Glycine max
  Clone ID: PAT_MRT3847_61223C.1.pep
MDSLPPAKRRRESKDGETEASTLSPVVIFAHGAGAPSSSDWMQRWKNMIKEALRAVDVVTFDYPYMSAKKKAPPKAEKLVEFHSNFVKETATKYPGHPLILAGKSMGSRVGCMVASMKDINVSAVVCLGYPLKGSNGAVRDETLLQLTVPTMFVQGSKDGLCPLEKLETTRKKMKAPNELHVIDGGDHSFKIGKKHLQANNSTQDEVEDVAVLAIAAFISRSLEG

SEQ ID NO: 242741 - protein, 379 aa, Glycine max
  unsure (1)..(379): unsure at all Xaa locations
  Clone ID: PAT_MRT3847_61224C.1.pep
MSSTLAAIFGGAAGAVALVGIAIILIWFCLSRQRNVSRTSETGSSDPSQVGRHGAMELPIRDTRRFEMEELSLATRXFSDKNLIGXGKFGEVYXGLLQDGMLVAIKKRRGLASQEFVDEVRYLSSIHHRNLVSLLGYCQENNLQFLIYEYVPNGSVSSHLYGAGQQPREKLEFKHRLPIAQGAAKGLAHLHSLSPRLVHKNFKTANVLVDENFIAKVADAGLRNFLGRVDIAGSSSQVATDEIFLASEVREFRRFSEKSDVYSFGVFLLELLSGKQATESPFPDSNQNLVEWVLSNQDRGMMSYIIDRRLESSFTAEGMEEYIMLIIRCLDPSSERRPAMSYVEMELVRILDKEMNLTTIMGEGTPTVTLGSQLFKSTK

SEQ ID NO: 242742 - protein, 102 aa, Glycine max
  Clone ID: PAT_MRT3847_61225C.1.pep
KMIEGGSTPEINLERKRERERKTVDISGGDVARLAATRDNKRGRIALRIGGLIRGRISAGTIIGGGDYAIRLRGEHRGRNLRLRFKIVVLGIGRRRGIDRLR

SEQ ID NO: 242743 - protein, 66 aa, Glycine max
  Clone ID: PAT_MRT3847_61226C.1.pep
NLGGCSPCKLMANHPARQSVKAVEFSSRNNKSNMEASLIFTRVSTYYLIAGRIRLGSSFRNHRKKQ

SEQ ID NO: 242744 - protein, 146 aa, Glycine max
  unsure (1)..(146): unsure at all Xaa locations
  Clone ID: PAT_MRT3847_61227C.1.pep
CKPGSEDGPLNVLVLEHVMGKTTQDSKDASTLAGNEXGTLRAPGSYDGQARICSSNGVLKSTLIXPNGPILSLEWNNKGDHPPYAVCVQTAIVSDVKAXTNANHTYVNILITGSEHFDVDWRINVSSLTSPTCDTIHGRQIAETHP

SEQ ID NO: 242745 - protein, 73 aa, Glycine max
  unsure (1)..(73): unsure at all Xaa locations
  Clone ID: PAT_MRT3847_61228C.1.pep
QTGRNQMATVRTPLNAYPKRRILCEPPIALFXGGILVAQPGDWITLMQKISXFSYSLRRASWKKTPINGHNCG

SEQ ID NO: 242746 - protein, 218 aa, Glycine max
  Clone ID: PAT_MRT3847_61229C.1.pep
TLQQITLRHPAVLAKLGLLDNSQKGASEQIAASKTAPSPGLQDNIPTAATKETVSPEKNPLDSPEKWHRIPIEEMSPKELVTLAVPFLNSDDKESAIPLLKLALDKDPDYVRALVLMGRVLLLKHVNDEANEYFERAISKLSLAGHSADAEEVDLLILSSQWAGIACERQGKRAEGRAHFERVANMQEPEDPTSKGYYFDGLLLLASTLFDASQKAEA

SEQ ID NO: 242747 - protein, 39 aa, Glycine max
  unsure (1)..(39): unsure at all Xaa locations
  Clone ID: PAT_MRT3847_6122C.1.pep
QXEXXXXXXKHRDGXKARPCPHXPXXVFQXSSGXLTXSA

SEQ ID NO: 242748 - protein, 47 aa, Glycine max
  unsure (1)..(47): unsure at all Xaa locations
  Clone ID: PAT_MRT3847_61230C.1.pep
NTTVMSPCIFRGPKWWFSQIKKYGLVVAVSYCCIPQTQQAKNSHKKX

SEQ ID NO: 242749 - protein, 63 aa, Glycine max
  Clone ID: PAT_MRT3847_61231C.1.pep
YQTSCTFTIYCSKWLTLPVYTNLGRALSVRYGALQLCDLIALCCTLYWLVTGLWTVATIDRVV

SEQ ID NO: 242750 - protein, 106 aa, Glycine max
  unsure (1)..(106): unsure at all Xaa locations
  Clone ID: PAT_MRT3847_61232C.1.pep
WHCPSARDKLLPLLINEANLLSDIPKEFADIKKVLDVIQAFLXDAYSMAANERDNTNDGIRTLVKELRDASFRIEDVIDEYSIYVEQHPYSLGCATLLFQIIHFIE

SEQ ID NO: 242751 - protein, 53 aa, Glycine max
  Clone ID: PAT_MRT3847_61233C.1.pep
ETHWEGIHTNRENMLLGDHGKNYERTCSKHTITIRRQTPRVETRAQPWILHIL

SEQ ID NO: 242752 - protein, 92 aa, Glycine max
  Clone ID: PAT_MRT3847_61234C.1.pep
PTYTIYFFLLPITLPLIFNNPTPFFILQFLYIFKTKNQKTCFVPFLKKQIPPFTLFTFHKSKSFLQPKTLHCILKPLTFTPLFFSSQTKKNL

SEQ ID NO: 242753 - protein, 55 aa, Glycine max
  Clone ID: PAT_MRT3847_61235C.1.pep
MPQIVLSTHDPTMLHVSKTHPLYTEVICPEANILLRPIGHAAHGKSTVAKAISCV

SEQ ID NO: 242754 - protein, 44 aa, Glycine max
  Clone ID: PAT_MRT3847_61236C.1.pep
RSRLIEVYYMKFVWLEVWLMYDMKDLMFKIGRVVMMLLLRMKNI

SEQ ID NO: 242755 - protein, 43 aa, Glycine max
  Clone ID: PAT_MRT3847_61237C.1.pep
REDDKNYVFILVSPFSLSYNHPLSGYYQEGCGLYIIKPIISTQ

SEQ ID NO: 242756 - protein, 30 aa, Glycine max
  Clone ID: PAT_MRT3847_61238C.1.pep
MLLKPPLLLIHFLFMYFLTYLVLNVVNPII

SEQ ID NO: 242757 - protein, 47 aa, Glycine max
  Clone ID: PAT_MRT3847_61239C.1.pep
KSPGPCSKTTQYVFWESVHPSQGATQVLGEALISQGISLVKKKPAIF

SEQ ID NO: 242758 - protein, 90 aa, Glycine max
  Clone ID: PAT_MRT3847_6123C.1.pep
ASTPVHFRFLIFSTKTKVLRIFSLFAISLSLCTFFLKFDLTSRIFQHFSLSICCFFFNIEMVCASSSLFALICFLICTCFFPFHMFNYLR

SEQ ID NO: 242759 - protein, 255 aa, Glycine max
  Clone ID: PAT_MRT3847_61240C.1.pep
MEVDFKSPSLEKTEAEPQVEENMRFHKSLQELRELQSQLHHAADYCETTFLKSEAKRDVLENTKEYICRAMVTVVDHLGNVSANLDDLISQTNAFSEAESRIRCLKQRLFSCEQYADKLALTKMRWREKLPRLHTRYLSSPPILERSSSEKLRDSKTEDTSKLDDKHILEKHEDLPLFLYTQKPHGDKNLKPTSFTTLKEHNLTMVVPIPDGLSVLTKVSNPTFHFQGSPKVARHRRSLHGSDILWFIRRTKRIQ

SEQ ID NO: 242760 - protein, 71 aa, Glycine max
  unsure (1)..(71): unsure at all Xaa locations
  Clone ID: PAT_MRT3847_61241C.1.pep
MPTFFFSTLLLLLIAVATFVFGRRDLLGDFFPLSSETDNHHHFXGAPGGPLLAGFHGYWDFTHQADVCDAP

SEQ ID NO: 242761 - protein, 69 aa, Glycine max
  Clone ID: PAT_MRT3847_61242C.1.pep
AGYSGLLGLQCPFGPARCCCSIDIIRLLAHEAIGNIVFHWILLVRRMSHKMLLPCKDLLWRATFGEPWK

SEQ ID NO: 242762 - protein, 60 aa, Glycine max
  unsure (1)..(60): unsure at all Xaa locations
  Clone ID: PAT_MRT3847_61243C.1.pep
HLHVPFGLGTVELVAGMESANAQIHCEVTNGLYYLRFSVXDAMAGCHGLMMVAASAARDR

SEQ ID NO: 242763 - protein, 160 aa, Glycine max
  Clone ID: PAT_MRT3847_61244C.1.pep
SGRVGGRVGGRVGGRVGGRVGGRVGASGSPFENVDLGNGEVGHVNQANNMYLFPGIGLGTLLSGARHITDGMLRAAAECAASYMTEDVQKGILYPSIDCIRDVTAEVGAAVVHAAVAEKQAEGHGDVGFKELANMSKEETVEYVRGNMWYPEYCPLVHEK

SEQ ID NO: 242764 - protein, 111 aa, Glycine max
  Clone ID: PAT_MRT3847_61245C.1.pep
EKPKGDVPKKKTKKPKPGPKKPKEKPGPVPLPGKPKKGAPKGVPVGKLYAPPPCKKKRPLGPGEKNGGPMFCYDGEKTRPVKKNYGGGKPCYVNRGDQNFSEKNPQGGKNM

SEQ ID NO: 242765 - protein, 155 aa, Glycine max
  Clone ID: PAT_MRT3847_61246C.1.pep
ASVCFINSFSAVLQGSLFGQLGTMPSTYSTLFLSGQGLAGIFAALAMLLSMASGVDAETSALGYFITPCVGILMSIVCYLSLPHLKFARYYLANKSSQAQAQELETKAELLQSDLADSAVPCVGLHSHPVRLPRHHSHGDQLHQSWEVESVLQPH

SEQ ID NO: 242766 - protein, 63 aa, Glycine max
  Clone ID: PAT_MRT3847_61247C.1.pep
PQGLVRSQLPTPLPDNLPSYRSKRLHYYLPPERVQARDCLRNDEARISKVTETPWITSKGSLQ

SEQ ID NO: 242767 - protein, 120 aa, Glycine max
  Clone ID: PAT_MRT3847_61248C.1.pep
LVSVPSSMSDSLLDPSRDSKIPSTFSADTESFGTSDKFPISAAQLSRSVRSSTSDSPLDPSWASKILSTFSDDTEGFGTSDTFPISAAQLLLSAPSSKSASPQDPSWASKIPSTSSADNV

SEQ ID NO: 242768 - protein, 102 aa, Glycine max
  Clone ID: PAT_MRT3847_61249C.1.pep
GHLILTLLKQCLAWKLSSPWLGHKVGLVPTAADSLNFKWPIHLFAVSFVSFERGKCYGLLCCLRDFSWVGELYTVSSVQFNLYLCIQTILIWNTLYAILPSL

SEQ ID NO: 242769 - protein, 68 aa, Glycine max
  unsure (1)..(68): unsure at all Xaa locations
  Clone ID: PAT_MRT3847_6124C.1.pep
RVVLYGXNHXXCHVTEHVIVXIXXLVXXXFXLXGCLLFXPIDXCWMXDXXXXDCKXXMXXCEXXXQXX

SEQ ID NO: 242770 - protein, 45 aa, Glycine max
  Clone ID: PAT_MRT3847_61250C.1.pep
PSTTTYTLVPHTPYVTSESLNNYVNIENTKTQPMIGILIDHQAFI

SEQ ID NO: 242771 - protein, 54 aa, Glycine max
  Clone ID: PAT_MRT3847_61251C.1.pep
QYTDAAYYSTLHRNAGAYYPRKFLEHREYKFRNLTQLHRICQPYREQFTKLKKI

SEQ ID NO: 242772 - protein, 119 aa, Glycine max
  Clone ID: PAT_MRT3847_61252C.1.pep
MNLLSQSTAPSTSLSPSCFLPRHPHGSTWFSSGTFKFLKKESRCLRKAGRTKITAKFELKPPPYPLVRSKICPLLQLLPVRINCASFDGVVLPFFLSNCPLSWLIFNGTYVSNETCQLP

SEQ ID NO: 242773 - protein, 90 aa, Glycine max
  Clone ID: PAT_MRT3847_61253C.1.pep
RLREDDRRGDIPNETESLKPVFPFLVIIGRKNTVPFIFYATNHVFLIYQNSMFGPRKVGPILMYTDSFSLAAQLASFCWCPSLLLSRNLF

SEQ ID NO: 242774 - protein, 107 aa, Glycine max
  Clone ID: PAT_MRT3847_61254C.1.pep
KLILKDPRSPSTPKAVSFTTAGRESPHKAGIRSLSGIIGDQRTDLLGGFRGESRTYEASIIPCTTISSSFTCKRYSLLLSIYMYIRCVQRGALASFYVVSAVCQQVM

SEQ ID NO: 242775 - protein, 176 aa, Glycine max
  Clone ID: PAT_MRT3847_61255C.1.pep
MPSGSRDPLVVGGVIGDVLDPFEYSIPMRVTYNNRDVSNGCEFKPSQVVNQPRVNIGGDDLRNFYTLIAVDPDAPSPSDPNLREYLHWLVTDIPATTGASFGHEVVTYESPRPMMGIHRLVFVLFRQLGRETVYAPGWRQNFNTKEFAELYNLGLPVAAVYFNIQRESGSGGRRLY

SEQ ID NO: 242776 - protein, 82 aa, Glycine max
  Clone ID: PAT_MRT3847_61256C.1.pep
NCSGYSWCTKRDMLFSLSAICYVRDMFSCFSVILLVDNWCWVGKEAMELMVCNYHRYFWYPIMQSFFADKKNPKFITFDAFF

SEQ ID NO: 242777 - protein, 80 aa, Glycine max
  Clone ID: PAT_MRT3847_61257C.1.pep
VATMAYPNHSFAFKPSRTCTISALLKDINPYSNRPEPPLIRANALLLSSYSPPLSRNARSTPRALLLLGVATYTAASLSR

SEQ ID NO: 242778 - protein, 54 aa, Glycine max
  Clone ID: PAT_MRT3847_61258C.1.pep
ALVRSANPLKLDHVISLKSFGAIRLTLARRWIAYERLAPSSPPPRISTFLTAIF

SEQ ID NO: 242779 - protein, 96 aa, Glycine max
  Clone ID: PAT_MRT3847_61259C.1.pep
AHVVSRVVSSAFAGRLFSMIPLVLRMLVRRCGPSGPKQGAFFGYGCPSPHASCSEYCALSSMSDIARVRMCLWKIRESEKRLRFLCYCDNIQEAHL

SEQ ID NO: 242780 - protein, 118 aa, Glycine max
  Clone ID: PAT_MRT3847_6125C.1.pep
RCILRQAHAVDLVCTLYSLWKGKPLWSIWFRLGRYEHILHETQSSHACSLIPFGFSMAGRWRDPGSICISAMPRNRPNLFCLHQSKCISCSRCRFYSRAPSLGPTHNRGGSPSKCMDA

SEQ ID NO: 242781 - protein, 339 aa, Glycine max
  Clone ID: PAT_MRT3847_61260C.1.pep
MGSKSETVCVTGASGYIGSWLVMRLIERGYTVRATVLDPADMREVKHLLDLPGAESKLSLWKAELTEEGSFDEAIKGCTGVFHLATPVDFKSKDPENEMIKPTIQGVLNIMKACLKAKTVRRLVFTSSAGTTNITEHQKPIIDETCWTDVEFCRRLNMTGWMYFVSKTLAEKEAWKFAKEHGMDFIAILPALVIGPFLLPTIPSSVISALSPINGIEAHYSIIKQAQFVHIEDICLAHIFLFEQPKAEGRYICSACDVTIHDIVKLINEKYPEYKVPTKFQNIPDQLEPVRFSSKKITDLGFQFKYSLEDMYTGAIDTCIEKGLLPKPAEIPANGIEHK

SEQ ID NO: 242782 - protein, 56 aa, Glycine max
  Clone ID: PAT_MRT3847_61261C.1.pep
EIKDMGGGSPAPASSLSPLRDRIIFRSRRCLPPVAQISRADEKVAGFPIGGKCNTK

SEQ ID NO: 242783 - protein, 43 aa, Glycine max
  Clone ID: PAT_MRT3847_61262C.1.pep
PAYDLSLRDRAQWQISGRAIRWIARPGDPFAPLEVSPASQKGA

SEQ ID NO: 242784 - protein, 39 aa, Glycine max
  unsure (1)..(39): unsure at all Xaa locations
  Clone ID: PAT_MRT3847_61263C.1.pep
QQTLILLLLANXSLLFNLALFIYIXIKXVCECKYPPTRQ

SEQ ID NO: 242785 - protein, 70 aa, Glycine max
  Clone ID: PAT_MRT3847_61264C.1.pep
MVNATKGVFISCDIPMAQYIINMNASLPASDKFIIHILDNTHMFVQPHVEQMIRSQIAKFREDNTYVKPN

SEQ ID NO: 242786 - protein, 108 aa, Glycine max
  unsure (1)..(108): unsure at all Xaa locations
  Clone ID: PAT_MRT3847_61265C.1.pep
VGVRIEVSGNACXKKSDWASLLQVFLSNNFSTEHFYACEWTKSEPHSWELILPVQVCGPNNGFEMWSSDRANQTSWHLSFLIDNPKQSTKFDILLGISQDFEIAWNTL

SEQ ID NO: 242787 - protein, 124 aa, Glycine max
  Clone ID: PAT_MRT3847_61266C.1.pep
RRTERRSKRLSCKMRLRSNTLSKKLLPPSSSSSSVSYYAVSRIALLCFCVYLFCLSFTSPTPNQLPHSLSITNHSSLELHSISSSNQSSLATSTELPRSIFITNHSSLFASPPPPPVYVYEEPC

SEQ ID NO: 242788 - protein, 108 aa, Glycine max
  Clone ID: PAT_MRT3847_61267C.1.pep
MARVLLARNNLCLWIHVYFLLLVHLHVGTSFYLPGVAPEDFHKGDLLRVKVNKLSSTKTQLPYSYYSLPYCHPGHIVDSAENLGEVLRGDRIENSPYVFKMREPQMCN

SEQ ID NO: 242789 - protein, 94 aa, Glycine max
  Clone ID: PAT_MRT3847_61268C.1.pep
LVLFRFPKHPGRWYLANLLFSSPKIVSTLSQPGPRSPFHAPNYILNRGILSLFPPSQKGVVSLTPLQLLKGGTLAPHRKNPFLVSAFHIRARVN

SEQ ID NO: 242790 - protein, 81 aa, Glycine max
  unsure (1)..(81): unsure at all Xaa locations
  Clone ID: PAT_MRT3847_61269C.1.pep
LEDYVHRIGRIGRAGAKGTAYPYFTAANARFAKDLIAILEEAGQKVSPELAAMGSGAPPPPFRSGXFQDRGRGYGSSRPRS

SEQ ID NO: 242791 - protein, 72 aa, Glycine max
  Clone ID: PAT_MRT3847_6126C.1.pep
ILKMMKQVLPYIFYLQNCYTDHQHAYKLHLSKPRPQINSCLSHQQEHHYHFLPYSQRWKNTIHTRVVTTCQE

SEQ ID NO: 242792 - protein, 39 aa, Glycine max
  Clone ID: PAT_MRT3847_61270C.1.pep
VNYAVLLLSSLKNHLRKRRWNCNPSSRFLFFLLYLTILV

SEQ ID NO: 242793 - protein, 486 aa, Glycine max
  unsure (1)..(486): unsure at all Xaa locations
  Clone ID: PAT_MRT3847_61271C.1.pep
MSFLQGIIDSFNSIFTHDNNNNYHNTNSPSSSSSTNRMEASPPPSVSNERVAYKLKGYFDLATQEIAKGVRAEEWGLIDDALLHYRNAHSILLEANKTPVPSYITTSAGXRVQSYREKISRXSDSHLTNSRPSSSSLSTNRLKAAPPTFPLPPSVSVRARGLQKIRYKSPLNAEDXVKEVGSPKSSQASWXNYDDKLVEMINTAIVDRSPSVRWEDVAGLEKAKQALMEMVILPTKRRDLFTGLRRPARGLLLFGPPGNGKTMLAKAVASESQATFFNVTAASLTSKWVGEAEKLVRTLFMVAISRQPSVIFIDEIDSIMSTRLANENDASRRLKSEFLIQFDGVTSNPDDIVIVIGATNKPQELDDAVLRRLVKRIYVPLPDENVRKLLLKHKLKGQAFSLPSRDLERLVKETERYSGSDLQALCEEAAMMPIRELGVDILTVKANQVRGLRYEDFKKAMTIIRPSLNKSKWEELERWNEEFGSN

SEQ ID NO: 242794 - protein, 44 aa, Glycine max
  Clone ID: PAT_MRT3847_61272C.1.pep
GVGPPFFNQKLSVHLLKKQKKLVPAIVIFPLNFTPQGKLKDGSH

SEQ ID NO: 242795 - protein, 208 aa, Glycine max
  unsure (1)..(208): unsure at all Xaa locations
  Clone ID: PAT_MRT3847_61273C.1.pep
MSFLQGIVDAFNSIFIPDNNNYHDTNSPSSSSSTNRMEASPPPPPLPPSVSNERVAYKLKGYFDLATQEIAKGVRAEEWGLIDDALLHYRNAHSILLEANSTPVPSYITSSEQQKVQSYREKISKWQSQVSERLQTLARRAGSSSANQSTSXLAQTVAVPIKPSSTRKNVLQKPPQRTGQVNKVGSPNLVKXSCVNYDDKLVEMITLP

SEQ ID NO: 242796 - protein, 68 aa, Glycine max
  Clone ID: PAT_MRT3847_61274C.1.pep
IPHHIIACILLQKKKKKKKKKKKKKKKKKKKKKKKKKKKKNKKKKQKNKKTNIQKKKTKNKNPKGPLF

SEQ ID NO: 242797 - protein, 72 aa, Glycine max
  Clone ID: PAT_MRT3847_61275C.1.pep
NYYIFYLLLHYTYQIFLLIYIKHLSFLNLLIQPPLLTTLLHLPSSNFLLHLCSPFFSLYKPHFQIPLYSHHN

SEQ ID NO: 242798 - protein, 94 aa, Glycine max
  Clone ID: PAT_MRT3847_61276C.1.pep
SFRIMFRPHQATHRISLTMKHLSRVAQHVAQHKALMPDTSFLLCSSCNISALARVIDILPPLATEYIEIVAPHLVNKEGIFPGTCCGPRDPHYY

SEQ ID NO: 242799 - protein, 67 aa, Glycine max
  Clone ID: PAT_MRT3847_61277C.1.pep
NIISKFPPQTYPITPVKNVFPLHVKPHSFKGNPPLNFKDPPGGKRSGGPPNYLNGRSLNRKVTPKAM

SEQ ID NO: 242800 - protein, 81 aa, Glycine max
  Clone ID: PAT_MRT3847_61278C.1.pep
FPNHLYTGVCLIFSHDNHLMTFSFLTYMYDARFQSTHVWSPPYYSQCEGSVTSSQVMRTQRQCSVVRISSCEEDPSQNSQY

SEQ ID NO: 242801 - protein, 50 aa, Glycine max
  unsure (1)..(50): unsure at all Xaa locations
  Clone ID: PAT_MRT3847_61279C.1.pep
RKTKREKWICSNELDMQEPSIETDXLSYEIFSILESKFLXRYDDPSFWFP

SEQ ID NO: 242802 - protein, 104 aa, Glycine max
  Clone ID: PAT_MRT3847_6127C.1.pep
RGVRHKMDGGGFLKNTTGKGYPWVLFGPKTESQKKPGNLWALPLEGNTKRTPGHRGPPKKGFSKDKIFLFPKTGGCKLFGARAKKPNFPWGIKPNRGGPTTSIK

SEQ ID NO: 242803 - protein, 172 aa, Glycine max
  Clone ID: PAT_MRT3847_61280C.1.pep
EDLPRSNVLYGYRIDGPGDRGKGHRFDSSIVLVDPYAKLVEGRRYFGDISLKLSKFLGTYDFDSLPFDWGENYKLPNISEKDLVIYEMNVRAFTSDESSGLDSNIRGSYLGVIEKIPHLLELGINAVELLPVFEFDELEKLTGFVICYDLICDLFDFLLCFILKTCPRVILV

SEQ ID NO: 242804 - protein, 58 aa, Glycine max
  unsure (1)..(58): unsure at all Xaa locations
  Clone ID: PAT_MRT3847_61281C.1.pep
HSLKRKKKKKKKKKKKKKKKKKKKKKKKKKKKKKKKKKFFXKKKKKKKKGGPLKGPNF

SEQ ID NO: 242805 - protein, 84 aa, Glycine max
  Clone ID: PAT_MRT3847_61282C.1.pep
LGVVLSHVACSTAARGVRVRLQRGSSEVIEHGVVRGRVIFGEVAGTTAAMRKYARILGRSRGHFVGLGIQLEVLLRSGQRAESS

SEQ ID NO: 242806 - protein, 65 aa, Glycine max
  unsure (1)..(65): unsure at all Xaa locations
  Clone ID: PAT_MRT3847_61283C.1.pep
TAARRQQKGIMDGTSLVHILDGGLEEQLFKLASRCSVVLCCRVSSLQKGXFLTLESTQTFDMTLV

SEQ ID NO: 242807 - protein, 47 aa, Glycine max
  Clone ID: PAT_MRT3847_61284C.1.pep
RSFNLKSTKYFMNVLAPVLPKWTPSKQFYPSWFTVLRSNPGPFFFPP

SEQ ID NO: 242808 - protein, 243 aa, Glycine max
  Clone ID: PAT_MRT3847_61285C.1.pep
MMSSFVVLHGLHGSLLRSQFLGQDTLTHLYPRNKASTIHNKPTTAQPRAKFDMLQVLGGRGLCNGEAGLKQELKRELGVDEKAPASATSDKEQELEEESSTTQSLASVAAEDGFEKELMGLTGGFPGGEKGLKKFIQENPPPLKPSQGSKSLKLALSKKPKPPELPLLLPGMIAIVKNPNNPFYMYCGIVQRITDGKAGVLFEGGNWDRLITFRLEELERREKGPPMKNPKSAVLEPFLEKKS

SEQ ID NO: 242809 - protein, 123 aa, Glycine max
  unsure (1)..(123): unsure at all Xaa locations
  Clone ID: PAT_MRT3847_61286C.1.pep
MKRKGLVFFVCTVLAAWLXHADDMWPVLMXTVYGALTREVKCTRRRLDEEAHTIXGYETIXPDNCGEATEKYMHGKQYRGDSKTDNQQAYFYAKYYEGHPKDTLGISIKGTVLSNMPYYNKHG

SEQ ID NO: 242810 - protein, 64 aa, Glycine max
  Clone ID: PAT_MRT3847_61287C.1.pep
TADRFFMFKTANSDTKPTAIVPPSLLLWARDGPGRRDGRWGGGCGVHSRLVSNAEVTGSTGRGR

SEQ ID NO: 242811 - protein, 147 aa, Glycine max
  Clone ID: PAT_MRT3847_61288C.1.pep
HEPDLRAVNGPPFSVSKGCAEESMHLKPDYRLCDEVKENMMFLSSSSNSKVVKGDFLSERPSSLLSMNVGVQEEENFGRTTVPKEEGWKRRESTETGRVPVKLNYEKISQDYRLANFDVKLDLNSHDDNDASSHCQQFDLNGFSWNC

SEQ ID NO: 242812 - protein, 55 aa, Glycine max
  Clone ID: PAT_MRT3847_61289C.1.pep
LYPGYIFNASTCPIYDVFKIHIIIIVTVKNNKISQSSLSKDLLGTYHHPFCRLLA

SEQ ID NO: 242813 - protein, 148 aa, Glycine max
  Clone ID: PAT_MRT3847_6128C.1.pep
MEEEKGKSSDLVILSTKEETSVPALVCLRKEDIKRFEETEECFVLDFDPFHSLDFSKLSLDHQDVSILAEKGEVACRDYPHPRHLCVKFPFTATPHGSYCEMCYCYVCDSAAPCKYWNPSTLSHCDADSDDDWKEERNRKKFQSILAS

SEQ ID NO: 242814 - protein, 48 aa, Glycine max
  Clone ID: PAT_MRT3847_61290C.1.pep
KKKKKKKKKKIKKKKKKKKKRGKKKKKKRKKKGRQDKRSKLWNRDHKN

SEQ ID NO: 242815 - protein, 73 aa, Glycine max
  Clone ID: PAT_MRT3847_61291C.1.pep
GTCSRNCSILLYAIQHASNYTDYYITPAENTTAHAALAADITVRAEGQDSSLISKLYGDAVFPINFNYMPMRV

SEQ ID NO: 242816 - protein, 58 aa, Glycine max
  Clone ID: PAT_MRT3847_61292C.1.pep
PIKAKIVKIECSNKIGSPVYVGMSVSNGGKYFGNGYKIGVGLTLGNFPPGKKLFAFWV

SEQ ID NO: 242817 - protein, 198 aa, Glycine max
  Clone ID: PAT_MRT3847_61293C.1.pep
MEPMAVVLDVSSDEEEEVACLEDKKGRNMTIDFDWVKEFLDISDEESNEVAVMHEVNKPQRKSKKSSISTPSVDDDDDDCVVLDTDPESRVTTVDDSSTGSDEVGAVGEKGQIACRDYPHPRHLCVLVPFSSTPHEKHCDQCHCYVCDYVAPCPKWGTGFLGTDHCHATEKSETGRSLRKNFKLGKTAPLPASTNHCT

SEQ ID NO: 242818 - protein, 71 aa, Glycine max
  unsure (1)..(71): unsure at all Xaa locations
  Clone ID: PAT_MRT3847_61294C.1.pep
SLLTLDEKDPRRLFEGDAILRLLNLFWVLXGDHKRLDHLLKVLIQDFLRRRLPTLCQERRDMAKYIHHPLD

SEQ ID NO: 242819 - protein, 98 aa, Glycine max
  Clone ID: PAT_MRT3847_61295C.1.pep
IRVFCHAETIKVICFLLFKDYQSLLSCRDNQGHMPFTFQRLLESFVLRRQSRSSAPLLFKDYQSLLSCRDYQQHLPFTFQRLSESFAFERTTSVGSQR

SEQ ID NO: 242820 - protein, 127 aa, Glycine max
  unsure (1)..(127): unsure at all Xaa locations
  Clone ID: PAT_MRT3847_61296C.1.pep
YNLYTHTFNIFIIRCIFTERAFFNPXGPQKNVVHQLNLMTDLLKTPPAQSISRILNEKTYKLLNSMRNIQPIPFFQKFPNAHPFALLLLKHLLAFDPKDRPSTEEALSEPYFTGLANIYREPFTQPI

SEQ ID NO: 242821 - protein, 31 aa, Glycine max
  Clone ID: PAT_MRT3847_61297C.1.pep
SLSPTSSSTYHHILTHHSFSSLSHITSKSSI

SEQ ID NO: 242822 - protein, 174 aa, Glycine max
  unsure (1)..(174): unsure at all Xaa locations
  Clone ID: PAT_MRT3847_61298C.1.pep
PKGLEESKVSFLWVIRKKEWGLPHGYEERVKARGIVIRKGVDQKKKFMHXSVEGFLTPWGWNSVMESVPPGVPIVGGPIMADQFFKARMVEEEIKVGFRVETFNGSVKGFFKREGFKKPVKEVMQGVKGKKLRKKVRELAKMAKLVPQKGGSSCSPLNSPLPQTCVGFPKNQIF

SEQ ID NO: 242823 - protein, 162 aa, Glycine max
  unsure (1)..(162): unsure at all Xaa locations
  Clone ID: PAT_MRT3847_61299C.1.pep
LEKMESAICLRYGPIPYFPKGFFGANPSRFHLKINHATPLSLPQISTTRSPVTRSFGHANCMLERFSSVPSENEGSGNKILRGVTLSSLVLTCVLGLFSFGGKNMNPKLTTAYASPYDKIASLFVRETEAQGSVALKPRLDXAQGSVALKSLLEIPSDAELA

SEQ ID NO: 242824 - protein, 75 aa, Glycine max
  Clone ID: PAT_MRT3847_6129C.1.pep
MHKESKSDLQRPKGDEQGPKDKVTAEDLKLGSEVTAKVSQIGAHGLVLDLGGGLRGIYRFEVGVIFVSSFLKISC

SEQ ID NO: 242825 - protein, 118 aa, Glycine max
  Clone ID: PAT_MRT3847_612C.1.pep
VAWEKEWNHVEVSYESVLAYQIIESSVIKATGIHIVREEGSTYEDIRFDDPYLSSSASESSREEDIRFDDPYLSSSASESPSFLQTLALGTRKFSIAFFLFFSCFLFYYFGFRCQKFT

SEQ ID NO: 242826 - protein, 70 aa, Glycine max
  Clone ID: PAT_MRT3847_61300C.1.pep
INFGSPFPVPPNWKKGQHFLTNIMHYPKIFQNLSSPQEGMPPPSPGPHPQTPVIIPFPKAIAPIPFPYWG

SEQ ID NO: 242827 - protein, 76 aa, Glycine max
  Clone ID: PAT_MRT3847_61301C.1.pep
NHDCTYLNISTIKELYLTNIYTTFTIFTHVLKKWGGILIMSNINTIWNNLTGHPDVTYVTYGTLVNVYTGIIRRKY

SEQ ID NO: 242828 - protein, 75 aa, Glycine max
  Clone ID: PAT_MRT3847_61302C.1.pep
HTGAFYFIIVGKWHCDEGTNVVCGDYVYFVFYFYLIILQQISTLRVPLLYILTISAQNVFKSDATHLPLWQFWNT

SEQ ID NO: 242829 - protein, 66 aa, Glycine max
  Clone ID: PAT_MRT3847_61303C.1.pep
KKKKKKKKRGKKKKKEKKKKKKKKKKKRKKKKKKEKKKKKKGGHYKGAKLTNHDMEQNNVSMGAPK

SEQ ID NO: 242830 - protein, 58 aa, Glycine max
  Clone ID: PAT_MRT3847_61304C.1.pep
GSLGPGVRHPRHKTEVCRMVLGGVGGPYGHRGHFRQALGAQGGAVVSRPKPRSVELER

SEQ ID NO: 242831 - protein, 104 aa, Glycine max
  Clone ID: PAT_MRT3847_61305C.1.pep
MSMSGFEGQCTNDEIRERRSDVENSEDERRPSRIGNLKKKAMNASSRFTHSLKKRGKRKIDYRVPSMFIEDVRDAREETAVHELRQKLVERGSLPPWHDDYHTL

SEQ ID NO: 242832 - protein, 69 aa, Glycine max
  Clone ID: PAT_MRT3847_61306C.1.pep
VIAYFNLFSPLPPTPSTMDSVPFRDGSIHTILDSRYFHSPLDVSHSLHTHSSLIRRLSQETELEVGNVS

SEQ ID NO: 242833 - protein, 78 aa, Glycine max
  unsure (1)..(78): unsure at all Xaa locations
  Clone ID: PAT_MRT3847_61307C.1.pep
MSMSGFEGQCSNDEIRERRSDVENSEDEMRSLRIXNLNKKAMNASSRFTHSLKNRRKREIDYRVPSMSIEDVRDAREE

SEQ ID NO: 242834 - protein, 87 aa, Glycine max
  unsure (1)..(87): unsure at all Xaa locations
  Clone ID: PAT_MRT3847_61308C.1.pep
NLFPXPWEGYSPLSCQEPTFPSFKKKILLPNSKLFHLLVLFSILTTLNQQDTYYSKHSKKLSPHHICSFSYPQILSSFIPLYFYPPT

SEQ ID NO: 242835 - protein, 73 aa, Glycine max
  unsure (1)..(73): unsure at all Xaa locations
  Clone ID: PAT_MRT3847_61309C.1.pep
EKNHPNWAFYSKALKAFQKFGSHLAEIXGKIPAKNQDSNXKNRYGPVQLPNTLLLPTNEERLTFKGISHRISI

SEQ ID NO: 242836 - protein, 88 aa, Glycine max
  unsure (1)..(88): unsure at all Xaa locations
  Clone ID: PAT_MRT3847_6130C.1.pep
RVSRKFKGCPLMPNIGYGSIKNARHYISDGFKNFVVHNVKDVELLIMQNRTYCAEIAPNVSTSKSKDIVEKVAXFDVVFTNKTSSLRI

SEQ ID NO: 242837 - protein, 160 aa, Glycine max
  unsure (1)..(160): unsure at all Xaa locations
  Clone ID: PAT_MRT3847_61310C.1.pep
FEKNFFENLFTFVRLESMMEXCSDSDEYSLCGQQIEHPRGGLLHNNGSTVSSNMDLTMSSVDSIVPVRSPHHMNITVRSSGQTSSQTEVDELEFLTICRDAGVVHILGNTVVRARRESRFYKKIAVDYIYAFLRKICRENCVIFNVPHESLLNVGQIFYV

SEQ ID NO: 242838 - protein, 141 aa, Glycine max
  Clone ID: PAT_MRT3847_61311C.1.pep
CFSFSLLGMEMGTRKSVHCGLIVEIMGGSSGLFTKVEHQDCGIWPIHGCDDDLINPNYVLLKIGPSSIKVQKFEMQRFATIVYFTDHHLRNLLQSDSCEIFSYNITLSPSSPLGYFTINNNITFVKCNRTLQVNTPKLSSK

SEQ ID NO: 242839 - protein, 70 aa, Glycine max
  Clone ID: PAT_MRT3847_61312C.1.pep
NLITYMYKQAQGVCNTGRHSYTIPTRIASIISYLDINYMDVKRPTYMIWLRLRLSLNFIGYLVQILSIII

SEQ ID NO: 242840 - protein, 62 aa, Glycine max
  Clone ID: PAT_MRT3847_61313C.1.pep
KRMTLSQATREHQVQQVYITRTKYNQTRNEAIPIGYPPINDQPYRTQPKGPQFNTTSNTSNQ

SEQ ID NO: 242841 - protein, 116 aa, Glycine max
  Clone ID: PAT_MRT3847_61314C.1.pep
MVGFNSVPNWLLILKEEKFFTRCLIHHSVKKNEKNIFCLDCCTSICLHCLPFHRSHVLLQIRRYMYNDVLRLGDAQTLLNCSLVQPYTTNKTKVVFSKQRPPTGSHRGSSNFCISC

SEQ ID NO: 242842 - protein, 69 aa, Glycine max
  Clone ID: PAT_MRT3847_61315C.1.pep
TFWENDKRHQSQDIERHLGVYSYKFDLHYYKYSNDNNTNSLMKALARTLGVRTPSIPCISFNQNLLMNT

SEQ ID NO: 242843 - protein, 102 aa, Glycine max
  Clone ID: PAT_MRT3847_61316C.1.pep
VVFFGLPGVQILPQTGLFLSPRLGINFDQPPQRMESRPFFLNRKPFSSPPNFPPGGDLNNHIGINPTLIGITFLLVQMDPATFPLGKQSLQPILEMPTPFLF

SEQ ID NO: 242844 - protein, 77 aa, Glycine max
  Clone ID: PAT_MRT3847_61317C.1.pep
RSYCVKRPIMAFPPYHSNHTLPLPPVYPMWGQSGSPTAGMQIWGSPGYPFWHTTAENWHWIPFPGMHADAWGCPVLP

SEQ ID NO: 242845 - protein, 64 aa, Glycine max
  unsure (1)..(64): unsure at all Xaa locations
  Clone ID: PAT_MRT3847_61318C.1.pep
LAASLLLFKKPVLRSNIAARXSPGIFSLHSNGLTQKRFTRHMNFXTRNKITVVHAVDIPVQPAP

SEQ ID NO: 242846 - protein, 77 aa, Glycine max
  Clone ID: PAT_MRT3847_61319C.1.pep
LLQKKTEGGRCVKLLSSLNRALVLNKEIIQIRDSRIYKKLSTEEVLTRIGPWSTNEQLLRRKAYDYVGGVQSTASWG

SEQ ID NO: 242847 - protein, 76 aa, Glycine max
  unsure (1)..(76): unsure at all Xaa locations
  Clone ID: PAT_MRT3847_6131C.1.pep
GDMFIATVTNGNPRSLAEWVAPPSVHPSSQRQAXWRXKDGVYIYSEDNAGVIVNHNGDMKCPPITGPIGNECAHLW

SEQ ID NO: 242848 - protein, 79 aa, Glycine max
  Clone ID: PAT_MRT3847_61320C.1.pep
GWNTKREKGFLPLKKRKGGPINHLSVLYKPCAPSPSLGGYKVKFFYPFFFFFQKNLKFGNKLRPFWPSFTGVREPPYNP

SEQ ID NO: 242849 - protein, 98 aa, Glycine max
  unsure (1)..(98): unsure at all Xaa locations
  Clone ID: PAT_MRT3847_61321C.1.pep
KKPQKKTPPPPKNGGGPPKLLGPGGTKGAPPTFLIGRGASPPFGRPQSQXKSGPKKTKNPLGGPLSKKKKTTGKKKNPPTFGVLKKKIKKKGGGRGLR

SEQ ID NO: 242850 - protein, 167 aa, Glycine max
  unsure (1)..(167): unsure at all Xaa locations
  Clone ID: PAT_MRT3847_61322C.1.pep
GLQLDQAILEDILIPTNSHQNTHGTIYDTDSILRIFSNFLNLDEEDEDDNSHLRDESEMVHDFDSPGSPKQSSILKVSKLMDNYLAEVALDPNLLPSKFISLAELLPDHARIVSDGLYRAIDIFLKVHPNIKDSXRYRLCKTIDCQKMSQEACSHAAQNERLPVQMA

SEQ ID NO: 242851 - protein, 145 aa, Glycine max
  Clone ID: PAT_MRT3847_61323C.1.pep
MRVLFSSMRVFLLLVWLLELVCVSVTAVNPSLNDDVLGLIVFKADIRDPKGKLASWNEDDESACGGSWVGVKCNPRSNRVVEVNLDGFSLSGRIGRGLQRLQFLRKLSLANNNLTGGINPNIARIDNLRVIDLSGNSLSGEVSDD

SEQ ID NO: 242852 - protein, 72 aa, Glycine max
  Clone ID: PAT_MRT3847_61324C.1.pep
IQASDRLQKEEERGSERGVLEPAAFGAPISAIREGSITDRQSCHRFVVHPPSRLHARNRTRLKCLILHLLRN

SEQ ID NO: 242853 - protein, 73 aa, Glycine max
  Clone ID: PAT_MRT3847_61325C.1.pep
GHKSSPPLLPPPLCHSRRCQRALSPQSSSGINSYAHFHLRSRFCFLHPTPSLLLFSFFLREIILGLERKEQPL

SEQ ID NO: 242854 - protein, 51 aa, Glycine max
  Clone ID: PAT_MRT3847_61326C.1.pep
LGPFHSQRTNKFQSQIVTLPVEKTCCNTQYYIPLSFVYLCNTNKWLMSQVK

SEQ ID NO: 242855 - protein, 458 aa, Glycine max
  Clone ID: PAT_MRT3847_61327C.1.pep
MSITHSLTTSLSSSSSAFLAPSSFNCRGQVSLPVKSVSICKCVATPEAETAYKTGVNRNPNMGKLQAGYLFPEIARRRSAHLLKYPDAKVISLGIGDTTEPIPEVITDAMSKRSHALSTIEGYSGYGAEQGEKPLRRALASTFYSDLGIEEDDIFVSDGAKCDISRLQIVFGSNVKMAVQDPSYPAYVDSSVIMGQTGLFQKNVEKFANIEYMRCNPENGFFPDLSSISRPDIIFFCSPNNPTGAVATREQLTQLVQFAKDNGSIVIHDSAYAMYISGDNPRSIFEIPGAKEVAIETSSFSKYAGFTGVRLGWTVVPKQLLFSDGFPVAKDFNRIVCTCFNGASNISQAGGLACLSPEGLKAMRDVIGFYKENTNIIMETFDSLGFKVYGGKDAPYVWVHFPGRSSWDVFAEILEKTHVVTTPGSGFGPGGEGFIRVSAFGHRENVLEACRRFKQLYK

SEQ ID NO: 242856 - protein, 106 aa, Glycine max
  unsure (1)..(106): unsure at all Xaa locations
  Clone ID: PAT_MRT3847_61328C.1.pep
MTTLPQSQGXGPQVSTAPVKNLGGGLPVRPHGKGALGTRRDYSGASTNETMVAYTTLKLPAERSGLAPFMHKTATAGLKPQVRDSGMQTGDPCXLTLADTLVCGTV

SEQ ID NO: 242857 - protein, 63 aa, Glycine max
  Clone ID: PAT_MRT3847_61329C.1.pep
VPKLKTKFSSAAFLNFFFSQFHNGGPFLAGQGIIIARAGPTHRAILHSREIPLPQGQFFFYPL

SEQ ID NO: 242858 - protein, 46 aa, Glycine max
  unsure (1)..(46): unsure at all Xaa locations
  Clone ID: PAT_MRT3847_6132C.1.pep
FWVGPSWALSFVRLHLFFFSRPVLPXLFQTIXXXLIKCVLNVVFIA

SEQ ID NO: 242859 - protein, 39 aa, Glycine max
  Clone ID: PAT_MRT3847_61330C.1.pep
RHQGEPVLIINSITLQYLTKSIHSNTNGLLISFAQRQSD

SEQ ID NO: 242860 - protein, 176 aa, Glycine max
  unsure (1)..(176): unsure at all Xaa locations
  Clone ID: PAT_MRT3847_61331C.1.pep
FDEPPWPSLSDEAKDFVKRLLNKDPRKRMTAAQALGHPWIKNYKDVKVPLDILVFKLMKTYMRSSSLRKEALRALSKTLAIEELQYLKEQFALLEPNKTNTISXENIKTALMNNATDAMNESRIPDFLASLNALRYKTMAFDEYCATALNVHQLESLWRREQHARCVYELLENDGN

SEQ ID NO: 242861 - protein, 93 aa, Glycine max
  Clone ID: PAT_MRT3847_61332C.1.pep
FSLPFDTPIAWVLSRECSKAILFQRSFYIERKNASTFSRKSKDLTECTSMCGGAIICDLIPTNPAGGAQRVPCYILWPNLTKRNSKFTLPYDS

SEQ ID NO: 242862 - protein, 94 aa, Glycine max
  Clone ID: PAT_MRT3847_61333C.1.pep
MEEGKRKLTMKRKRESTGGGKDRLSELPDSVLVHIMELMETRNAVQTCVLSQRWKNLWRRMTRLSFNHPRTFSRYHNFVSHVLSGRDHSVSLID

SEQ ID NO: 242863 - protein, 87 aa, Glycine max
  Clone ID: PAT_MRT3847_61334C.1.pep
RIQGCFWAKKKGGSPPKLGGPFGLPLKKPVWGEKPFFFFFPKFKKGNFLKKGVFLGKGGGKIFWALVGPPGIFPCPTGNPLFPYPKP

SEQ ID NO: 242864 - protein, 447 aa, Glycine max
  unsure (1)..(447): unsure at all Xaa locations
  Clone ID: PAT_MRT3847_61335C.1.pep
FGWRLELGWSTYFISKATHKWTRRKDLSHPNSQKGGTRNVGSGNLKMSFSSTSGQLKRMYDSKTGVDLPIQQSYLWYGSSEGDSDPQASGAYIFRPNGSPPNIVSRSVPTKVIRGPLVDEVHQKFSSWIYQVTRLYKDKDHAEIEFTIGPIPTDDGVGKEVITRMTANMATNKEFYTDSNGRDFLKRVRDVKLGXHGNTNFPFDILKLVKSSLMILXNEKXEFSVLVDRATGGASIKDGEVELMLHRRILHDDSRGVGEPLDEQVCVNNNNTCEGLTVRGNYYISIHKLGVGSRWRRTTGQEIYSPFLVAFTHEISENWKSSHLTKGTIMDPNYSLPPNIALITLEELDGGIVLLRLAHLYERSEDAEYSTLTKVELKKLFAMKTIRELKEVSLSSNQEKSEMKRMTWKVEGDKGQEPQAVRGGPVSYHNLVVELGPMEIRTFLLKF

SEQ ID NO: 242865 - protein, 68 aa, Glycine max
  Clone ID: PAT_MRT3847_61336C.1.pep
LFAMKTIKELKEVSLSSNQEKSEMKRMTWKVEGDKGQEPLAIRGGPVSYHNLVVELGPMEIRTFLLKF

SEQ ID NO: 242866 - protein, 78 aa, Glycine max
  unsure (1)..(78): unsure at all Xaa locations
  Clone ID: PAT_MRT3847_61337C.1.pep
ARGLSFRVAEVKDFKIXLQGAPKGRKGRLAVTAKVFEVAPKVAVVEFSKSAGDTLEYAKFCEENVRPAVKDRGCHVCC

SEQ ID NO: 242867 - protein, 67 aa, Glycine max
  unsure (1)..(67): unsure at all Xaa locations
  Clone ID: PAT_MRT3847_61338C.1.pep
ITFRRMECINPDLIFRMGVNQFPKKKIVVKSCKPGPIILLVCALRKGQGSPLNKKGKKRKKIKEXPX

SEQ ID NO: 242868 - protein, 129 aa, Glycine max
  Clone ID: PAT_MRT3847_61339C.1.pep
NNQILSITRSRSYECSANPSSDLNYPSFIVLYSNKTRSTVREFRRIVTNVGDGAATYKVKVTQPKGSVVKVSPETLAFGYKNEKQSYSVTVKYTRNKKENISFGDIVWVEDGGARTVRSPIVVAPNELA

SEQ ID NO: 242869 - protein, 125 aa, Glycine max
  Clone ID: PAT_MRT3847_6133C.1.pep
KSPFHLCPRGTCSRPVSRQYSALSVIERLIGTAITNNSSRLQPLVIRQGPSTTGLSPCTARPPTPLGCGPALTKLLQTTFRTRRTERSHGTLFPVRSPSLRRSVSVSHPPGINMFIPIGQLRPRA

SEQ ID NO: 242870 - protein, 69 aa, Glycine max
  Clone ID: PAT_MRT3847_61340C.1.pep
QLLTEYATFLRQCRFINEVKDASVDADVEAATGEREVPQIGNESPYWSCNHHFIQLIENLIVNVFARVA

SEQ ID NO: 242871 - protein, 75 aa, Glycine max
  unsure (1)..(75): unsure at all Xaa locations
  Clone ID: PAT_MRT3847_61341C.1.pep
MMTENLSTDLIEXILSLLPIPIXIRXSTVCKXXXSIISSSXFSSXSXXLXQPWFFLHGIHNISXXNNQSFXFDPA

SEQ ID NO: 242872 - protein, 119 aa, Glycine max
  Clone ID: PAT_MRT3847_61342C.1.pep
MAVTGTSVAAAATMLAAAAAIFITFVICFYLFLCAKRYRGAAPTIGGDRARPRFVFAGGAGCHGGLDEAAIAALPREEAAAAGGDCAVCIGELAAGEAARVLPRCGHAFHVECVDMWLR

SEQ ID NO: 242873 - protein, 78 aa, Glycine max
  unsure (1)..(78): unsure at all Xaa locations
  Clone ID: PAT_MRT3847_61343C.1.pep
FLGEGFITDGTYWSDWFLICKGFFCRGLPPIQLGGGIDYXKMGLISFWFSEQGKILGTWVNRLTFKQQGLISFGIKKI

SEQ ID NO: 242874 - protein, 52 aa, Glycine max
  Clone ID: PAT_MRT3847_61344C.1.pep
GNHSFCPQINPIRTPCLVCDQHANEFSIGFVRTSYNSIPTDKGHIKFMGKCL

SEQ ID NO: 242875 - protein, 80 aa, Glycine max
  Clone ID: PAT_MRT3847_61345C.1.pep
ESKLYAILDDHYRMMFGVEPEETYDERPQQNRPVSWHPSSTQFQASQAPSYFESQQDWSSASPQQSVPGSDFYSLSTRNS

SEQ ID NO: 242876 - protein, 64 aa, Glycine max
  Clone ID: PAT_MRT3847_61346C.1.pep
VGEHLLNQPFGYPHLLDATKIPDGIRFRSVTTVVVVVFFYLRALLRSEFQKHLSIFTTPTLINE

SEQ ID NO: 242877 - protein, 37 aa, Glycine max
  Clone ID: PAT_MRT3847_61347C.1.pep
WKTLTLVLSPLYAGYQTDPNTHMLATAVLQKAAHMGA

SEQ ID NO: 242878 - protein, 258 aa, Glycine max
  Clone ID: PAT_MRT3847_61348C.1.pep
SSEFGSRESTTKLISHTAGNFAGVFCHGKASAILPIAPPILPFFAEPLFRSRHGVFFEALGSLLSLLHSGARDAYRQFFVDSMSLIQDILYVSSLSVNGSSRSRVTLKCFSDSFSGVEDLPSTNRPVDGRGLLIDLTAPTRWQPFATWILKLVCKSLTEGTLYVEGLIRASFISAACSLLCYGNADLHMACFDFVHIIGMVTNYDAISYYLEFGQGGLPVFRFDYVCFFLKINYSYNWALIVNYGYSCLKADLVSVFL

SEQ ID NO: 242879 - protein, 76 aa, Glycine max
  Clone ID: PAT_MRT3847_61349C.1.pep
MGMKGLRSLEVWKLGVVNSLDALKLQEKLALDRKLHRRCDTILLSLQHPPTYTVGKRQTVHNLLIPQSEFVTWRNL

SEQ ID NO: 242880 - protein, 151 aa, Glycine max
  unsure (1)..(151): unsure at all Xaa locations
  Clone ID: PAT_MRT3847_6134C.1.pep
MVKTGDTAIMADVKEEQGNMALSNPLEERIFVSIRVRPLNDREKARHDVPDWECISGNTIRYKNNGHAEPRPLSMDTYAFDRVFGERCNTKQVYEQGIKEVALSVVRGINSSIFAYGQTSSGKTHTMSGITEYAVRDIYXIIEKHKDREFV

SEQ ID NO: 242881 - protein, 91 aa, Glycine max
  unsure (1)..(91): unsure at all Xaa locations
  Clone ID: PAT_MRT3847_61350C.1.pep
MAEAGDLQPFAGDNGTGMTQADFARDYAPRPXFPILLGRPRLLVYGGMGKGCHVVNAAHLXWGMLTLKSPIEHGIVSYRDAIEKMWHHTSY

SEQ ID NO: 242882 - protein, 53 aa, Glycine max
  Clone ID: PAT_MRT3847_61351C.1.pep
EKIFLNFKRRRNVKGVGPLNDLLIFERRETLRRWPLKRPLYFLKERIIKVLNL

SEQ ID NO: 242883 - protein, 36 aa, Glycine max
  Clone ID: PAT_MRT3847_61352C.1.pep
DFRLNIPDGDFCFPIQSIAILRQVKPNSLFKGETIK

SEQ ID NO: 242884 - protein, 264 aa, Glycine max
  unsure (1)..(264): unsure at all Xaa locations
  Clone ID: PAT_MRT3847_61353C.1.pep
MERIVGGKYKLGRKIGSGSFGEIYLATHIDTFEIVAVKIENSKTKHPQLLYEAKLYNILQGGSGIPNIKWSGIDGEDNVLVIDLLGPSLEDLFVYCGRKFSLKTVLMLADQMITRIEYVHSKGFLHRDIKPDNFLMGLGRKANQVYIIDFGLAKRYRDSTTNRHIPYRENKNLTGTARYASCNTHLGIEQSRRDDLESLGYVLLYFLRGSLPWQNLKAATKKQKYDKICEKKVSTPIEVLCKSHPVEFASYFHYCHXLTFDQRP

SEQ ID NO: 242885 - protein, 239 aa, Glycine max
  unsure (1)..(239): unsure at all Xaa locations
  Clone ID: PAT_MRT3847_61354C.1.pep
MERIVGGKYKLGRKIGSGSFGEIYLATHIDTFEIVAVKIENGKTKHPQLLYEAKLYNILQGGSGIPSIKWCGVDGEDNVLVMDLLGPSLEDLFVYCGRKFSLKSVLMLADQMMTRIEYVHSKGFLHRDIKPDNFLMGLGRKANQVYIIDFGLAKRYRDSTTNRHIPYRENKNLTGTARYASCNTHLGIEQSRRDDLESLGYVLLYFLRGXLPWQNLKAATKKQKYDKICEKKVSTPIEV

SEQ ID NO: 242886 - protein, 257 aa, Glycine max
  unsure (1)..(257): unsure at all Xaa locations
  Clone ID: PAT_MRT3847_61355C.1.pep
MERIICAKYKLGRKIGSGSFGEIYLATNIDTFEIVAVKIENGCEESSPXNLKTKHPQLLYEAKLYNILQGGSGIPNIKWCGVDGEDNVLVMDLLGPSLEDLFVYCGRKFSLKSVLMLADQMMTRIEYVHSKGFLHRDIKPDNFLMGLGRKANQVYIIDFGLAKRYRDSSTNRHIPYRENKNLTGTARYASCNTHLGIEQSRRDDXLESLGYVLXLYFLRGSLPWQNLKAAXKKQKYDKICEKESINSXLEVLCKSHL

SEQ ID NO: 242887 - protein, 105 aa, Glycine max
  Clone ID: PAT_MRT3847_61356C.1.pep
MEGNKDEALRCVRIAEEAIASRNKDRALKFLKIAQRLNRDLPLQSLLDKCNRLDSHTASTAGGSGASLANGHSPRREGLDVERNYTDVHLIREIKGKSDYYAILG

SEQ ID NO: 242888 - protein, 44 aa, Glycine max
  Clone ID: PAT_MRT3847_61357C.1.pep
LLITQTALHKALSKAMTNSSLNLQPHGIEILLKTETRSSYATTN

SEQ ID NO: 242889 - protein, 163 aa, Glycine max
  Clone ID: PAT_MRT3847_61358C.1.pep
RELKSVKADLAFAKARCAQLEEENKVLRDREGSDKGQNREDDDLIRHQLETLLAEKARLASENEKYSRENRFLREIVEYHQLTMQDVVYIDEGMEEVNEVYPVDDSRITRLLSVSPHSSDEDVLVSPSPPMLSKEIFTVPEEDSKSISKDGAPSTVSVSPHTK

SEQ ID NO: 242890 - protein, 90 aa, Glycine max
  Clone ID: PAT_MRT3847_61359C.1.pep
KNCLKRWVFSLQCPPPFPRCHAPKQKRNLKCFFFFPWGKQIGPPCLFPSLPKFFFPPFNQVGFSLPLDHGGAKNFFCIYKGPPAPKKKSF

SEQ ID NO: 242891 - protein, 122 aa, Glycine max
  Clone ID: PAT_MRT3847_6135C.1.pep
WFCLMDFVPFVICPCFTIQSNQRRKMFGCFIKQYIIFDTVQLLHVIIACNFFFQSGTCLVAFCGNWTLSKSLEGPPKLPTFLDAVPRPRVCLACQSSKININSGNSVLTINIFFPYNGGLLG

SEQ ID NO: 242892 - protein, 179 aa, Glycine max
  unsure (1)..(179): unsure at all Xaa locations
  Clone ID: PAT_MRT3847_61360C.1.pep
MNMDISVEQNETTWCRRPSSRFGSSEPRLLRQHRCWYLLAILQELQVXSCIFVGHSLSSMVGLLASISHPHLFTKLILVSASQRFLNDSXYFGGFQQEDLTQLYDGIRSNYKTWCSGFAPQVIGXDMDSVAVQEFSRTLFNMRPDIALSLAQTIFQLDMRPILSHLTVPCHIIQNTKCV

SEQ ID NO: 242893 - protein, 56 aa, Glycine max
  Clone ID: PAT_MRT3847_61361C.1.pep
MGHSNVWNSHPKNYGPGSRTCRVCGNPHGLIRKYGLMCCRQCFRSNAKEIGFIKYR

SEQ ID NO: 242894 - protein, 56 aa, Glycine max; identical to SEQ ID NO: 242893
  Clone ID: PAT_MRT3847_61362C.1.pep

SEQ ID NO: 242895 - protein, 422 aa, Glycine max
  unsure (1)..(422): unsure at all Xaa locations
  Clone ID: PAT_MRT3847_61363C.1.pep
MGPIPSYGAGSHVLLFPFMSKGHTVPLIHLAQILLRRSISVTVVTTPANHSFMAESLNGTVASIVTLPFPTATNIPAGVESTDKLPSMGLPLFYEFSTATSAMQPHFEQLLETLVPRVSFMVTDGFLWWTLHSAKKFRIPRLVYFGMSCYSTSLCMEARSSKILSGPQPDHELVELTRFPWIRLCKEDFDFEYRNPDPNTPGFVFNMKIIESTRESYGILVNSFYELEPTFVDYVSKECSPKSWCVGPLCLAEWTRKSKEKPRWVTWLDQRLEEKSSVLYAAFGSQAEXISREQLEEIAKGLEESKVSFLWVIRKEEWGLPDGYEERVKDRGIVIREWVDQREILMHESVEGFLSHCGWNSVMESVTAGVPIVGWPIMAEQFLNARMVQEEAKAWSIVLNYLAADELELAVNAVRDNMMNRI

SEQ ID NO: 242896 - protein, 116 aa, Glycine max
  Clone ID: PAT_MRT3847_61364C.1.pep
FTALRYGPAPIAIAPDGSSNRSIPFYRSFIFLVLEAGKYSELINSSLVNMSISLAIDEIRTNPAMFFRKIMQAMAHVFIMVMVECSPLFTVEAFPSYKEYVPWSCYTSIIHVYVYM

SEQ ID NO: 242897 - protein, 50 aa, Glycine max
  Clone ID: PAT_MRT3847_61365C.1.pep
GMRNEDGGLLSKVIDIHVTLWGDLIYEKVFSILKKKKKNIISEKKIYTYL

SEQ ID NO: 242898 - protein, 58 aa, Glycine max
  unsure (1)..(58): unsure at all Xaa locations
  Clone ID: PAT_MRT3847_61366C.1.pep
RPPRRXEEEAPXLRLIGLLLDRSTCVRRLLPRTRRSMHGGRTKSRGFDCPSMYIMCSY

SEQ ID NO: 242899 - protein, 146 aa, Glycine max
  Clone ID: PAT_MRT3847_61367C.1.pep
MALKSIGYRSVPVDGLPFDHKKGVVPNDRGRVLSDPPDPSVLEKGLYVCGWLKRGPTGIIATNLYCAEETVSSISADLEKGGLIWSSTLPKPGRDGLLQLLHDRNVRVVSLSDWEKIDSEERRLGSSRNKPREKLASWDELYKTTS

SEQ ID NO: 242900 - protein, 132 aa, Glycine max
  Clone ID: PAT_MRT3847_61368C.1.pep
FDEAANRRRPDDIRGSVEKNTLHMNRRVCMRSQGSPLWAASPLATRMRESNTILTCVRDTSRMTTITPTTCHRRRAHQSHTHLLSMPRRRRLGVDHQISCQSSLTSYSVDKCNSDTRLTTPEYLNLCDKDAQ

SEQ ID NO: 242901 - protein, 153 aa, Glycine max
  Clone ID: PAT_MRT3847_61369C.1.pep
ARALIPKQVGNMYTASLYAAFASLIHNKHSTLAGKRVILFSYGSGLTATMFSLQLRDSQHPFSLSNMARVMNVDGKLKSRHEFPPEEFVENLKLMEHRYGAKEFVTSKDSSLLSPGTFYLTEVDSMYRRFYSKKTKESSLTHAENGVIANGVC

SEQ ID NO: 242902 - protein, 256 aa, Glycine max
  Clone ID: PAT_MRT3847_6136C.1.pep
METNTLPNQQTPKTKRQIFILSGQSNMAGRGGVIRDANNRKRWDGVVPPESRSDPSILRLSATLQWEPANEPLHVDIDSRKACGVGPGMVFANALLRRRVVVGELGLVPCAVGGTAMKEWARGEELYENMVKRAKESVKERENSSEIKAVLWFQGESDAINEEDAAAYKVNMETLIHNVRQDLNLPSLPIIQVALASGSDYIEKVREAQKAIDLPNVICVDAKGLQLMEDNLHLTTESQIQLGHKLAEAYLTHFHA

SEQ ID NO: 242903 - protein, 55 aa, Glycine max
  Clone ID: PAT_MRT3847_61370C.1.pep
EQRDQVKSFSYRISIRLMCARMGVEATTSLFPRDELLSQRTFLLFLTSRANIYSF

SEQ ID NO: 242904 - protein, 40 aa, Glycine max
  Clone ID: PAT_MRT3847_61371C.1.pep
FQPLTAYLAVNYMDRFLDSSQLPVSSHFSAALKGCVISES

SEQ ID NO: 242905 - protein, 269 aa, Glycine max
  Clone ID: PAT_MRT3847_61372C.1.pep
VVDGKLSQTCYLMAVDSCYKNFCHKFQKFQGKQFSLFDAEYFVFHSPYNKLVQKSFARLFFNDFLMNSSSADEVAKEKLGPFATLSGDESYQSRDLEKASQLLAKPLYDQKVQPTTLIPKQVGNMYTASLYAAFASLIHNKHSTLAGKRVILFSYGSGLTATMFSLQLRDSQHPFSLSNMARVMNVDGKLKSRHEFPPEEFVENLKLMEHRYGAKEFVTSKDSSLLSPGTFYLTEVDSMYRRFYSKKTKESSLTHAENGVIANGVANGH

SEQ ID NO: 242906 - protein, 449 aa, Glycine max
  Clone ID: PAT_MRT3847_61373C.1.pep
MEKNVGILAIDIYFPPACVQQEALETHDGASKGKYTIGLGQDCMSFCTEVEDVISMSLTVVTSLLEKYGIDPKQIGRLEVGSETVIDKSKSIKTFLMQIFEKYGNTDIEGVDSTNACYGGTAALFNCVNWVESNSWDGRYGLVVCTDSAVYAEGPARPTGGAAAIAMLIGPDAPISFESKLRGSHMSHVYDFYKPNLASEYPVVDGKLSQTCYLMAVDSCYKNFCHKYEKFEGKQFSLSDAEYFVFHSPYNKLVQKSFARLVFNDFLMNSSSVDEVAKEKLGPFATLSGDESYQSRDLEKASQQVAKPLYDQKVQPTTLIPKQVGNMYTASLYAAFASLIHNKNSTLAGKRVILFSYGSGLTATMFSLQLRDSQHPFSLSNIARVMDVDGKLKSRHEFPPEEFVENLKLMEHIYSKKEFMTNKDTSALSPNTFYLTKVNSIYQRFYSKK

SEQ ID NO: 242907 - protein, 71 aa, Glycine max
  Clone ID: PAT_MRT3847_61374C.1.pep
NLTKAFGISILSECLSGRKTLKKSGYLWAPVLIYPNLRKTLCIHFIFTVSIVFIHIIERMLISTVWRCHLN

SEQ ID NO: 242908 - protein, 103 aa, Glycine max
  unsure (1)..(103): unsure at all Xaa locations
  Clone ID: PAT_MRT3847_61375C.1.pep
YVDSKDKIRPLWRHYFQNTQDLIFVADSSDRDRVVDARDELHRMLNEDELKNAVLLVFATKQDLPIAMNAXKITDKLGLYSLRQRXHCYIQSTLCNFLERVFY

SEQ ID NO: 242909 - protein, 121 aa, Glycine max
  unsure (1)..(121): unsure at all Xaa locations
  Clone ID: PAT_MRT3847_61376C.1.pep
YEESCLPPSHAQNAVAYIQSDTTNKTCITKWTVEHKMEAPIYIYYQLDNYYQNQLQKNLLPYFCLKLHIRYVKSRNDKQLRSKAAXGETTNCFPEDKTKDNQPIVPCGLIAWSLFNDTYKF

SEQ ID NO: 242910 - protein, 41 aa, Glycine max
  Clone ID: PAT_MRT3847_61377C.1.pep
INWIFHNRANKRRLNSKANERLLTTLLLNFAIALSNSIRFS

SEQ ID NO: 242911 - protein, 37 aa, Glycine max
  Clone ID: PAT_MRT3847_61378C.1.pep
VNYISPSLLLFLLPSIPLNHFTFFTYFYYYINTSIPP

SEQ ID NO: 242912 - protein, 78 aa, Glycine max
  Clone ID: PAT_MRT3847_61379C.1.pep
VSDDYSLQYLTRQFKLCSHYLVQRISCHASNKHTNVCDGPTLACRRISRHLEPRRSIHKQFFSLVILPSSRLSQLVQL

SEQ ID NO: 242913 - protein, 228 aa, Glycine max
  Clone ID: PAT_MRT3847_6137C.1.pep
MEPPRGPPVSGAEPSRAVGTVKVYLPNKQRTVVTVREGMSVYDSLDKALKVRGLNQDCCVVYRLIKGRKTVTAWDTAIAPLDGEELIVEVLEDVPLTMHNFVRKTFFSLAFCDFCLKFLFHGFRCQTCGYKFHQHCSSKVPTVCVDMSTNRRQFYHSIQDLSGGSRQQEAPSNLSVNELLTPQGPSPFTQQRDQEHFSFPAPANPPLQRIRSTSTPNVHMVSTTAPMD

SEQ ID NO: 242914 - protein, 61 aa, Glycine max
  Clone ID: PAT_MRT3847_61380C.1.pep
LVSYMCNVIIPLYVGRSAPRSREAGRAKYVARAKGTAHDRPPPKARGPGAATVPAVRAGGR

SEQ ID NO: 242915 - protein, 215 aa, Glycine max
  Clone ID: PAT_MRT3847_61381C.1.pep
MAITGNLNLNLVLPVARPMACPPRAPTSLLARGRGASSSPSLLVTRAIDVNEFLGDFGARDPFPAELESSFGEKVLGYSNTEHKILIPTITALALSQQECAPVSPSQPPISLDDAQTLIRKVVGWRLVNEEGGLKIQCLWKLRDFKCGVELINRISKVVEALGHFPNIYLEQPNQVRAELWTASIGGLTMNDFIVAAKIDEIKTSDLVPRKRVWA

SEQ ID NO: 242916 - protein, 97 aa, Glycine max
  Clone ID: PAT_MRT3847_61382C.1.pep
IEPLKPPLAVQTKTKDLCRSGELPLGCTNSTGATCVSDLNQSVFSCLTLIANPRADASMPSVPDQERAINPTTTDLGFSTCPNTFHMTMTDDGYECL

SEQ ID NO: 242917 - protein, 82 aa, Glycine max
  Clone ID: PAT_MRT3847_61383C.1.pep
KKIPCLHPPQGIYDQPSGDLQDAHYICRRNPHSITYVRRNLLNHTAYAWGVLHKMNWPATYLNPIIAGYPAFNSKLSDYDHA

SEQ ID NO: 242918 - protein, 118 aa, Glycine max
  Clone ID: PAT_MRT3847_61384C.1.pep
MAYSHSRIMILLFLLSLGTASEEKKTTYIVQVQQEAKPSIFPTHRHWYQSSLALADSTASILHTYQTVFHGFSARLSPAEANRLQGLCHVISLDWGTGWAAGATGWRGVLGLGAGGGG

SEQ ID NO: 242919 - protein, 31 aa, Glycine max
  Clone ID: PAT_MRT3847_61385C.1.pep
THIVRRNVILIFTKGDLREVMRTDCQVQVSR

SEQ ID NO: 242920 - protein, 83 aa, Glycine max
  Clone ID: PAT_MRT3847_61386C.1.pep
VGRPIGSNVVRSHLKLDILISYFPYCSYWVGGCLCQLFNFPLLLPFLCLTYVYLSIVECCPRSPAFVFLLHSPLGRDTRAHDP

SEQ ID NO: 242921 - protein, 118 aa, Glycine max
  Clone ID: PAT_MRT3847_61387C.1.pep
GLLASNPVCDSSFQQLSASCTILPRQAVHALTTTSGPPATPPQCYTSPSTTGPSHHHHGLSGPPHAYSTSSASGPPHHHSGPPEPGFYQHHGPPGPPYAYSTSSSSGPPGPPPSGSSH

SEQ ID NO: 242922 - protein, 51 aa, Glycine max
  Clone ID: PAT_MRT3847_61388C.1.pep
NTIIFLRCNLIVQTAELNKKGKNESRTKFQYGIILYPRLSFMIYVREDPKK

SEQ ID NO: 242923 - protein, 94 aa, Glycine max
  Clone ID: PAT_MRT3847_61389C.1.pep
LCLSCMDQSAECPPNRLLLQKIFTLEDWHPAQFVIFAPFAPASSALVGRGFLYSFHQVPCAFVTGFKVRQPAIAVCRYSPGRAAAWDHPGPSAA

SEQ ID NO: 242924 - protein, 261 aa, Glycine max
  Clone ID: PAT_MRT3847_6138C.1.pep
MEFQKHHEEAELGLPIAVAATSYEEFGMPLNHGEQEPVVEVIPMAVPMAVPVAPPTNIVAQNSGKGKYQECLKNHGVSIGKHIIDGCIEFLPGGQEGTLEALKCVVCNCHRNFHRKETHDTYSVPFHHHHPPLPPPVPFAAYYRTPPGYPHMTGHQRAMLAHPSLSGGGGPQPPLEDLEDSDPTSGATTHDGSGSSSKKRFKTKFTQHQKDKMLVFAEKLGWRMQKNDDSVVQEFCSEIGVQRHVLKVWMHNNKHTLGKKP

SEQ ID NO: 242925 - protein, 127 aa, Glycine max
  unsure (1)..(127): unsure at all Xaa locations
  Clone ID: PAT_MRT3847_61390C.1.pep
LFQVSVLKEYIATKAGLHHENGAGIDHSKLSDASISSAEYEDEMQDEFYDAITADSSTSYEESDYDHKLVLHEPIFXLKNISWAITTLSLNLTVSSDLTLKLVPFFTYITIPIYFLFFYPKEILFFI

SEQ ID NO: 242926 - protein, 58 aa, Glycine max
  Clone ID: PAT_MRT3847_61391C.1.pep
MTTLNSSFLINAITRAIEHYIETPRPFDLFFFFFFFFFFFFFFFFFFFFFFFLKINTS

SEQ ID NO: 242927 - protein, 93 aa, Glycine max
  Clone ID: PAT_MRT3847_61392C.1.pep
SVRSALCTLPSCQSFVMLLSLGRRELEYRKTQRKEKRERERRKHNTRGREKRIGAKYKKQPPKPSLPQTKSNNDFINAFRTRHASAPDMAKVH

SEQ ID NO: 242928 - protein, 63 aa, Glycine max
  Clone ID: PAT_MRT3847_61393C.1.pep
VITSDRTFVFAEISGYEPSPELLTDYHDEGGSIRTLGKSDLYKEVDILTFSMMPNRPFLCFLL

SEQ ID NO: 242929 - protein, 68 aa, Glycine max
  Clone ID: PAT_MRT3847_61394C.1.pep
KQMSANAAEEGQACMESSSSIMTFSGRCCISAIKRCPCMTVNNQGVNELELQRLVSCGIDSSHVSVCS

SEQ ID NO: 242930 - protein, 78 aa, Glycine max
  unsure (1)..(78): unsure at all Xaa locations
  Clone ID: PAT_MRT3847_61395C.1.pep
YARGVFGCNDLPYPRRRRTGIXKNYXHPNSEKPSDCVYLTRDVTLRHLKXSDFLAYGIKSVDQDHYPGLTDALDGNLL

SEQ ID NO: 242931 - protein, 47 aa, Glycine max
  Clone ID: PAT_MRT3847_61396C.1.pep
FNTCSCEIKVVVVFALDQLPSQNEFSLLIIYAALPLSLIQGIECNTW

SEQ ID NO: 242932 - protein, 132 aa, Glycine max
  unsure (1)..(132): unsure at all Xaa locations
  Clone ID: PAT_MRT3847_61397C.1.pep
KHDYRVLTGSESSLRNQNSSPSELIHGATALRHGGTHEAMKNLHTDKAVDHYCSTFDGSHLTYLEYEYLAIKTIDRXKDSSVADGPNIGVEKKTPILKVVHEDRAVNYLNTHRLGIVHFKADTSKLHYVRHR

SEQ ID NO: 242933 - protein, 42 aa, Glycine max
  Clone ID: PAT_MRT3847_61398C.1.pep
PTHPITHPFTLPLINKTIDISNLHKPSTHYYIPYMIISHNIL

SEQ ID NO: 242934 - protein, 456 aa, Glycine max
  unsure (1)..(456): unsure at all Xaa locations
  Clone ID: PAT_MRT3847_61399C.1.pep
LEAELSLLKEKQAELTEQWEHEKGVMTRVKAFSLKEEIDRVNLEIQEAEREYDLNRAAELKYGSLNSLQRQLESAEKELHEYXNSGKSMLRXEEVTGNDIAEIVSKWTGIPVSKLQQSEREKLLYLEEVLHKRVVGQDPAVKAVAEAIQRSRAGLSDPHRPIASFMFMGPTGVGKTELAKALAAYLFNTEEALVRIDMSEYMEKHTVSRLIGAPPGYVGYEEGGQLTETVRRRPYAVILFDEIEKAHSDVFNVFLQILDDGRVTDSQGRTVSFTNTVIIMTSNVGSQYILNTDDDTVPKESAYETIKQRVMDAARSIFRPEFMNRVDEYIVFQPLDRNQISSIVRLQLERVQKRIADRKMKIQVTEAAIQLLGSLGYDPNYGARPVKRVIQQNVENELAKGILRGEFKEEDTILVDTEVTVFANGQLPQQKLVFRRVEADSNSTVEDRREGFPQIL

SEQ ID NO: 242935 - protein, 66 aa, Glycine max
  Clone ID: PAT_MRT3847_6139C.1.pep
SCFFHGLFLNGWRLLSPLFLCLPLHLHGGKSLLKDPIEAQRSSLHRSPTSKLPSPLAIFKRIPLAI

SEQ ID NO: 242936 - protein, 90 aa, Glycine max
  Clone ID: PAT_MRT3847_613C.1.pep
NLECARGFVPMCLMSVYHGSWVCVNATPSSLLCFVSVMQRSHKQRPLDKQRTVPHCTMQAEPESMVYYRSDNFQCDVPFVRPRWHSFWPF

SEQ ID NO: 242937 - protein, 107 aa, Glycine max
  unsure (1)..(107): unsure at all Xaa locations
  Clone ID: PAT_MRT3847_61400C.1.pep
GHTLCSTSKILLLNRCPTCGHELVYGXVVSLKKIAXESLELPCIYIFFGGSKYLSISANLKHEAFCYFKPYNWLYAGSKSLVVGDIPSLCPHLRDDHXVIMHSGCTF

SEQ ID NO: 242938 - protein, 50 aa, Glycine max
  Clone ID: PAT_MRT3847_61401C.1.pep
GCEKTTEGTIFKSAYFQAQLDAEDPASSIFSSNLVCRFLRTWESSIHNTT

SEQ ID NO: 242939 - protein, 123 aa, Glycine max
  Clone ID: PAT_MRT3847_61402C.1.pep
KKQFGLFSFPIQRKKKGKANYLTPFLSIIRGDAGTKARGKGMDKGSIKLKPLNLPSGGKGKSPRVLCSFGSQGEDMFGSSKQKKTHLRHFFWDGLSSWGSFFTTSPLGVPKVTTLEMGGVRGL

SEQ ID NO: 242940 - protein, 72 aa, Glycine max
  unsure (1)..(72): unsure at all Xaa locations
  Clone ID: PAT_MRT3847_61403C.1.pep
ELGSXETKHTKWSSLVFNRVEILQPQKTEWGNLSARRIIMPSLSSITTFILHPRHSSFLLTTPXLQNLTNLI

SEQ ID NO: 242941 - protein, 35 aa, Glycine max
  Clone ID: PAT_MRT3847_61404C.1.pep
YLKVTHPYFSCTIVVSLIQFKETIPLNPKGLVAKI

SEQ ID NO: 242942 - protein, 69 aa, Glycine max
  Clone ID: PAT_MRT3847_61405C.1.pep
NCIQFLQIDLMLIFFKAFLGLRHYCLHLEISLPSPIYFDKNRGELFVGYLYDCMKYNCYMVGQKIHYAN

SEQ ID NO: 242943 - protein, 106 aa, Glycine max
  Clone ID: PAT_MRT3847_61406C.1.pep
QGDLGYGSKVSRLRTYVMSFYSETLQRYAPIRSKEALSIIEKHTEALFGRPEIVVTPEGVIDSLTDQSIKISFGGLKRLVLEAITFGSFLWDVESYVDSRYHFVLN

SEQ ID NO: 242944 - protein, 226 aa, Glycine max
  Clone ID: PAT_MRT3847_61407C.1.pep
MTRAFRILGSADNATSLAAVAAPPEAVALESDFVVILAALLCALICVVGLVAVARCAWFRQGSGGGSSPRQALANKGLKKKVLQSLPKFAYVDSNPSKWVATSECAICLADFAAGDEIRVLPQCGHGFHVPCIDTWLGSHSSCPSCRQILAVTRCQKCGRFPAPGAGASRTPATEPELKSREDNNVASYSNNNINNNSDRGGNNSNSNCNMEHHHHSHHVNSGFLP

SEQ ID NO: 242945 - protein, 62 aa, Glycine max
  Clone ID: PAT_MRT3847_61408C.1.pep
GLFGKRVLPTPTFIFFHQTPFLAGGFLSLKGPKKRFGELFGYPNTPFFRGVGFFPPFSPLWD

SEQ ID NO: 242946 - protein, 43 aa, Glycine max
  Clone ID: PAT_MRT3847_61409C.1.pep
FFFFFFFFFFFFFFGFFFFFFLAALLLKIIANTTTGSNKKMPH

SEQ ID NO: 242947 - protein, 35 aa, Glycine max
  Clone ID: PAT_MRT3847_6140C.1.pep
FQISFMVVGHCRGSYVWYNMLGPVYFKYFPLKSGP

SEQ ID NO: 242948 - protein, 70 aa, Glycine max
  Clone ID: PAT_MRT3847_61410C.1.pep
CSSSVHLHRIPEPDPNANLFLHSFPEIWYSWLLKMIALNHAAFRAGFFNYIGYKMCKPPCLPDKTFCSDL

SEQ ID NO: 242949 - protein, 77 aa, Glycine max
  Clone ID: PAT_MRT3847_61411C.1.pep
ILKHFIAKRIMNCLLPNNQKKSFCKKKLIVGPEKTLILLCYKKKKLFCSPPLYYKKLYGTGGMLKRNKGGLAFMFPP

SEQ ID NO: 242950 - protein, 59 aa, Glycine max
  Clone ID: PAT_MRT3847_61412C.1.pep
ALFSARAVLGGGLFRSLIRFEMAHVELRDEPGNPFDLTGAYGNPVWLTADKGFSGAPHR

SEQ ID NO: 242951 - protein, 154 aa, Glycine max
  Clone ID: PAT_MRT3847_61413C.1.pep
TPAPSTSPWSSSPSAHTPSTPLFLAGSLPPAARPKRRKHLRSPLSTPARTLPSCGPLTCGWTLTRRATPLLSALRPPSPSRLLLLLGLCASGSRGPTRRSARTLTSRSTPSPTRLYAQKEESAGWTMVEVRRWDKAQARNNGCIYARFMTNVHF

SEQ ID NO: 242952 - protein, 52 aa, Glycine max
  unsure (1)..(52): unsure at all Xaa locations
  Clone ID: PAT_MRT3847_61414C.1.pep
DHGATVSVXXNYITKTAYFFLLIGGKKNTQPLLFFFTAHKCSRSGLMVPHTL

SEQ ID NO: 242953 - protein, 60 aa, Glycine max
  Clone ID: PAT_MRT3847_61415C.1.pep
CYIIGGDLCVSLVLFICPKEIDTTNWCIFNCQIKLRIFISIIMFVCCVLVYHPKENINIH

SEQ ID NO: 242954 - protein, 84 aa, Glycine max
  Clone ID: PAT_MRT3847_61416C.1.pep
YGCRRRQKGRETREEANADVEVISPFAQLDIPLIGQSYMIFLAKLKKHHFSPGPESSACQLFPLDDIPFNSLSFSSMVVTLSLV

SEQ ID NO: 242955 - protein, 98 aa, Glycine max
  Clone ID: PAT_MRT3847_61417C.1.pep
PLILKPGNLILSFLEKTLNGLTGLKQNRGGDWPAYHIKNPGPLDQDWIKAGVWAMGLSGGLNFKFPGLSNGRGQNKGVEKPGNRGHQNPGDQGGFEVV

SEQ ID NO: 242956 - protein, 29 aa, Glycine max
  Clone ID: PAT_MRT3847_61418C.1.pep
RTAVGLALLVSISNTYGLDYVHNLNLLQC

SEQ ID NO: 242957 - protein, 337 aa, Glycine max
  unsure (1)..(337): unsure at all Xaa locations
  Clone ID: PAT_MRT3847_61419C.1.pep
GIVAAATGTXGQIKTSDRDERVICYIVNSAEYCHKTAGELAESVSKIIDPQYSDGVDMSEVQDEFSAVITKSLVXLVHGLETKFDXEMAAMTRVPWGTLESVGDQSEYVNAINLILTILILLRXDSVAATYRQFFLDKLASSLGPRFYSNIFKCKQISETGAQQMLLDTQAVKTILLEVPSLGRQTSGAASYSKFVSREMSKAEALLKVILSPVDSVADTYRALLPEGTXPMEFQRILELKGLKKADQQSILDDFNKHGPGIKQTQIAPSIVPAAAPVAPVVPSPSAIGLIASREDVLTRAAALGRGAATTGFKRFLALTEAAKDRKDGPFRKLFNP

SEQ ID NO: 242958 - protein, 153 aa, Glycine max
  Clone ID: PAT_MRT3847_6141C.1.pep
NFLVTLSLLSSIAELLEHMQPMLEHKDITSTIQQYYPSKSRITVRQQTHLLPAPPKLIKTKNSPTTQYLLCFLFFFFLYSKAKMKTFLHTHIPNSKSDTKTPILEDSNPTQFQRSKLESNPQFITLRQKSQTVIKESLLHKGEEIQAIKTLGD

SEQ ID NO: 242959 - protein, 127 aa, Glycine max
  unsure (1)..(127): unsure at all Xaa locations
  Clone ID: PAT_MRT3847_61420C.1.pep
NFPPVDSGAETYRAMXPEGTPMEFXRILELKGLKKADQQSIFDDFTKHGPEIKQTQIAPSIVPAAPPVAPVVPSPSAIGLIASREDVLTRAAALGRGAAPPGFKRFLALTEAAKDRKAGPFRNLFNP

SEQ ID NO: 242960 - protein, 102 aa, Glycine max
  unsure (1)..(102): unsure at all Xaa locations
  Clone ID: PAT_MRT3847_61421C.1.pep
XXCXXXXFXXXVFLWNXXXITISPXKXLXPRXXQXGXXXXXGKXXXPXXXXXEIIPGXXSPXLGXXPXXXXXSXXXXEXRXQHXAXTXRXEPXXEXTYACXR

SEQ ID NO: 242961 - protein, 149 aa, Glycine max
  Clone ID: PAT_MRT3847_61422C.1.pep
MSHQEQAVLSLLSKLALSFDGAVLGVALAFAAVRTLFKFTATSASLRKLRRAPSISVSDLRSLLAEPPSDADAGEIVIIRGTVDAKSAVDGTWKTLKPGVLVSRESGDKGVILQRTQTCIYNDWKGLLGWTSDLRALCARSLRQQDSTS

SEQ ID NO: 242962 - protein, 96 aa, Glycine max
  unsure (1)..(96): unsure at all Xaa locations
  Clone ID: PAT_MRT3847_61423C.1.pep
CFLALSLNRCLAEDNGLVMNFYKDSCPQAXNIIKEQVKLLYXRHKNTALSWLINIFHDCAVHSTESTLILDFTTMSLSNKETNRNSXLINYRFLTT

SEQ ID NO: 242963 - protein, 45 aa, Glycine max
  unsure (1)..(45): unsure at all Xaa locations
  Clone ID: PAT_MRT3847_61424C.1.pep
KXGIRLDGLPKSLLAFNDAIYARRPRSTFYCCHLTLNKYLSSHQL

SEQ ID NO: 242964 - protein, 81 aa, Glycine max
  Clone ID: PAT_MRT3847_61425C.1.pep
IMRMDLMVGIEFEGLEERASAAYLAVSEEPDSMWTTCLNEDVSAWTNVCRACVRWIASGHDGLLCSVMIILSYCRNGAHWC

SEQ ID NO: 242965 - protein, 96 aa, Glycine max
  Clone ID: PAT_MRT3847_61426C.1.pep
KSVQLAQSNKINKIYFKNFILLIPSFCAPSLLDSVTDRYHCPRLIDPASAEISKDMIRTTRNIATIDSNILVTINSKMNLLIDETGHISHIPLIAD

SEQ ID NO: 242966 - protein, 67 aa, Glycine max
  Clone ID: PAT_MRT3847_61427C.1.pep
RIKKNLKKKRPKLQKKLKTKFVPFPRELKKKKPIIRPKKGKVFFRPKNQLPKNKPLGPVPKKPLGGF

SEQ ID NO: 242967 - protein, 89 aa, Glycine max
  Clone ID: PAT_MRT3847_61428C.1.pep
KRQHVPTGPTGGPSLCNFWSHSLTHKQLIHPGEHFLLQTVNQCERTVALQPATRNHTRTTVKGGDHNAKTLLLVHSANRKVGVATSVAR

SEQ ID NO: 242968 - protein, 71 aa, Glycine max
  Clone ID: PAT_MRT3847_61429C.1.pep
IRLESIEFTFITFPCLVLVFLKLRLGLICYTSTKYSQVGAGFQIAKILVYIYIITVSEQLSVVTNIFHLCI

SEQ ID NO: 242969 - protein, 180 aa, Glycine max
  Clone ID: PAT_MRT3847_6142C.1.pep
MQGNDLQNGGKYYLLPVIQSSYAGITLCGRAKPLTQSPHPYIPTIISTPYPLPLIHKNFPFNITLPNSTIILPCEPLTSHYTPPNPQPQPPPPPHPPPPHSPTSPPPTPQIPTSPPLPSKTPHNLPHPVAPPLPIPPPPRKPPPPPTPPPLPPPPPPLPPPSTPSFPPQPPPPPTSPPPP

SEQ ID NO: 242970 - protein, 231 aa, Glycine max
  Clone ID: PAT_MRT3847_61430C.1.pep
MASAAIFSSLRRRRSPSLEAFLVPVDLSDVALLETLISVASDVASCFSGHRFPFQRRNSRALIGKVEIFRSMLECLRDSAAAGALTPTAVLCLKEFYLLLYRSKILLDYCAQSSKLWLLLQNHCVSGHFHDLSQEFSTLLDVFPVGEVGLSDDVREQIELLQRQSKRAKLFIDKKDDVLRTRFFWFLEEFESGRVPDSKDLRCFFVDKLRILDAKSCRVEIEALEEQIVNH

SEQ ID NO: 242971 - protein, 61 aa, Glycine max
  Clone ID: PAT_MRT3847_61431C.1.pep
LASSIAFVFFFFSTTNQHQGYPTYGPYHEQLNFINYLIHLYNTLYKPFYLPQNPKNWTKIL

SEQ ID NO: 242972 - protein, 79 aa, Glycine max
  Clone ID: PAT_MRT3847_61432C.1.pep
SVLLLAGSLHSTDLCSHKATTGLEQTHCASPLEDIQHTHCDPTGDHFWCRGTNYARIVSVDEGHAYQGTRYLDELIDYG

SEQ ID NO: 242973 - protein, 169 aa, Glycine max
  Clone ID: PAT_MRT3847_61433C.1.pep
FCIFSEFKKLTILAKKRTCVFRFLRANSIISALCAEWRIGHYSGDFCDTLCAGVDDGIGILPRNWTLADYTRSGNKHVLQLRLGWPRRYKRHLLRRIWPPLADDDGAVPAGSARGRQRGRALDAAEKRSVWALLQQDEFINSALLQLSRVTPKVSGTERKSPRVRPRVR

SEQ ID NO: 242974 - protein, 139 aa, Glycine max
  Clone ID: PAT_MRT3847_61434C.1.pep
MSTLGFAPTRAELSLLTSSLSNPENKSFSLFLVTSFHYLTLLLHLYHFQQCPLQTFPVLEPISHHCHLLYRMHKLSAPLLLPMAHFHYLALLLLVEGLCSLHFLLNCLPSILLRPQSQSELPHLNNDCRTLYVFSYLII

SEQ ID NO: 242975 - protein, 135 aa, Glycine max
  Clone ID: PAT_MRT3847_61435C.1.pep
LNLNRGNDTLGEILHSKIHSFSSLISLFSFFFCGTCFSSLTSFSMWFPSNSSSSFDSMKEKGRYDELERKKGKMVVLWANHATKSIYSGSGRLCAVVRDKGEGFKKEKNGVWCGIVLEASKRRIKKEEKGGEEEG

SEQ ID NO: 242976 - protein, 104 aa, Glycine max
  Clone ID: PAT_MRT3847_61436C.1.pep
ASGIDVSGEVHVQCLRLLAHDASKVPHHCMYRVSLAMRHNADQRTLVETWGHNLEKHAPILHLIIMMAIGRSSQQRWKWMTRTQLVQDTHNYVEGSLPWENLAV

SEQ ID NO: 242977 - protein, 56 aa, Glycine max
  Clone ID: PAT_MRT3847_61437C.1.pep
YRLFGHIFIGWMYQFIQAIDPLSIPHILTRPKHLKKKKGRQLDRSQSYPSATFARL

SEQ ID NO: 242978 - protein, 59 aa, Glycine max
  Clone ID: PAT_MRT3847_61438C.1.pep
MALVASEGALPPSPANKSTAAGRELDLWRTTMVWAPVLDAKRTAVLRLVPVHARDLTDG

SEQ ID NO: 242979 - protein, 67 aa, Glycine max
  Clone ID: PAT_MRT3847_61439C.1.pep
SRADKINPGSCSLCGRPMQFEMQLMPALLYFLQEALGDQRKMVEKWDWMTLIVYTCSEVGILPLSTS

SEQ ID NO: 242980 - protein, 84 aa, Glycine max
  unsure (1)..(84): unsure at all Xaa locations
  Clone ID: PAT_MRT3847_6143C.1.pep
XHPHXXNIHHXXXITXSIQXTXIXVXTTXPNILDXXFQHKHFIYXXXLYAKXXXQXXINXFXXTSKLXXSNSXINXXNXXXIXT

SEQ ID NO: 242981 - protein, 68 aa, Glycine max
  Clone ID: PAT_MRT3847_61440C.1.pep
KKLKKKKKKKKKKKKKKKKKKKKKKKKKKKKKKKKKKKKVYFLKKNQVLVLCLRKIKIFLLGDLNKIK

SEQ ID NO: 242982 - protein, 68 aa, Glycine max
  unsure (1)..(68): unsure at all Xaa locations
  Clone ID: PAT_MRT3847_61441C.1.pep
KNIHXKRKVNRTKTLQNEDFNLLFFSLTLXNSIKANQRKSSRDLRKLLEMSLSLSEYTRKPAXRRERP

SEQ ID NO: 242983 - protein, 52 aa, Glycine max
  Clone ID: PAT_MRT3847_61442C.1.pep
LSSILETDVIRMQRVHQLGSLVGLKGSATWDTRRRNSIYTPHRHQLTQSIYT

SEQ ID NO: 242984 - protein, 63 aa, Glycine max
  unsure (1)..(63): unsure at all Xaa locations
  Clone ID: PAT_MRT3847_61443C.1.pep
SSIPTCWKLREILSPGVVLGASMALXAAIFFWVIRESGFFWAKFGLRSIRNTPEKKKAALFPP

SEQ ID NO: 242985 - protein, 142 aa, Glycine max
  Clone ID: PAT_MRT3847_61444C.1.pep
MKVNIKETMEKEEEDRRREAAIASSSCLRPNFNPKGITQDQLSKFRELHKRRLQLKSKSKFKMKSKDRANKKSHGDVLSSQNGGTQGSNVDHKESNLWNDCEGFDSRYEDSKDDIPVMSAPKKQKLHWGLDTKNRWERKSNM

SEQ ID NO: 242986 - protein, 50 aa, Glycine max
  Clone ID: PAT_MRT3847_61445C.1.pep
ESLKIEHCYRPLIKKCWMRGNLKVAFFYIIQLVVVIVVRGLSSSFYKLPH

SEQ ID NO: 242987 - protein, 395 aa, Glycine max
  unsure (1)..(395): unsure at all Xaa locations
  Clone ID: PAT_MRT3847_61446C.1.pep
MGNSEEEKSTKTEKPSSPVTVDQANQTNQTNIHVYPDWAAMQAYYGPRVTMPPYYNSAVASGHAPHPYMWGPPQPMMPPYGPPYAAIYPHGGVYTHPAVPIGPHTHSQGVPSSPAAGTPLSIETPPKSSGNTDQGLMKKLKEFDHXGLAMSIGNGHAESAERGGENRLSQXDGEGKTEIQGSPISKETAASNKMLGVVPASVAGTIVGHVVSSGMTTALELRNPSSVHSKTSAPQPCPVLPAEAWVQNERELKRERRKQSNRESARRSRLRKQAETEELARKVESLNAENATLKSEINRLTESSEKMRVENATLRGKLKNAQLGQTQEITLKIIDSQRATPISTENLLSRVNNNSGSNDRTVEDENGFCENKPNSGAKLHQLLDTSPRADAVAAG

SEQ ID NO: 242988 - protein, 174 aa, Glycine max
  unsure (1)..(174): unsure at all Xaa locations
  Clone ID: PAT_MRT3847_61447C.1.pep
ELKLLKNPHFIAKPALLDFTRSIILTGGAPTHNILSAAISXIQDSLKHSNXSTHKATSLALTNIALSTASFLGFFKASCLXSLKSCQFNKVKPVKDAXIQXLKYXTILPTPPDTPNPSKTESSLKENIYRSNSSNLSTTTKSRHIQKVNMKSTIRKIPFSIKNYTKNNHQKPDD

SEQ ID NO: 242989 - protein, 60 aa, Glycine max
  Clone ID: PAT_MRT3847_61448C.1.pep
IKIKTDHLIKIAGELKWTTHTYHMKFSFCYNKMCSHYIDCDLIVLSQNTMSFNMNVVYLG

SEQ ID NO: 242990 - protein, 32 aa, Glycine max
  Clone ID: PAT_MRT3847_61449C.1.pep
KMFSTKLSHSLNLVYKHFYVVWNGLVFKKRLN

SEQ ID NO: 242991 - protein, 63 aa, Glycine max
  Clone ID: PAT_MRT3847_6144C.1.pep
IFLSPWYDFSVLLQLQQVFHRGKKSSNLLSLYAPFGRFCNLTHHPRRGRMLRETTWARWLSTL

SEQ ID NO: 242992 - protein, 163 aa, Glycine max
  Clone ID: PAT_MRT3847_61450C.1.pep
LFEMPIFFARPLPAEKKLPILNKTPEPTESQKDTLSDDGQDNQDRGASTSSQTNLMKNVRILRKEAAETSLEPYIQFQCFAHFAISRKCVNELCADVSSDGVDVHIFFEDDFPRLPRIGFSCLSLQELYEDRALLSEKNATPDQLSFIQLVRFVDNGLNEIPN

SEQ ID NO: 242993 - protein, 87 aa, Glycine max
  unsure (1)..(87): unsure at all Xaa locations
  Clone ID: PAT_MRT3847_61451C.1.pep
KRFFKTQWLTKALMGGFSKITQNGVPVLVNYPEKGCALVPQKAQPIFXKPKAIFNKAEGKSPPIWANLGFNPVRPPVKASNGFSYPV

SEQ ID NO: 242994 - protein, 48 aa, Glycine max
  Clone ID: PAT_MRT3847_61452C.1.pep
PIGGSSTSSSGSTWALPGLVITRAFIFFFFPNQTYHCLSRFLILILSL

SEQ ID NO: 242995 - protein, 95 aa, Glycine max
  Clone ID: PAT_MRT3847_61453C.1.pep
IWSSIGFMVRLLCLGPRLIAGPYCTLAPVPLSLSSSFRFFLWYLQLHIHSRVVLLICARVCSAVISNTPFYSVYRALSCECPVVGTTAFLLIIAF

SEQ ID NO: 242996 - protein, 57 aa, Glycine max
  Clone ID: PAT_MRT3847_61454C.1.pep
LAMFLTPVLHTLCVYHLAICNENGMVTVTGTLVVAALAENLMANLNRRVEVVPPRYC

SEQ ID NO: 242997 - protein, 807 aa, Glycine max
  unsure (1)..(807): unsure at all Xaa locations
  Clone ID: PAT_MRT3847_61455C.1.pep
MSQQGESSDPKSGKKDFSTAILERKKSPNRLVVDEAVNDDNSVVTMHPQTMEKLQLFRGDTILIKGKKRKDTICIALADENCEEPKIRMNKVVRSNLRVRLGDVVSVHQCPDVKYGKRVHILPIDDTIEGVTGNLFDAFLKPYFLEAYRPVRKGDLFLVRGGMRSVEFKVVETDPGEYCVVAPDTEIFCEGEPLKREDEERLDEVGYDDVGGVRKQMAQIRELVELSLRHSQLFKSIGVKPPKGILLYGPPGSGKTLIARAVANETGAFFFCINGPEIMSKLAGESESNLRKAFEEAEKNAPSIIFIDEIDSIAPKREKTHGEVERRIVSQLLTLMDGLKSRAHVIVIGATNRPNSIDPALRRFGRFDREIDIGVPDEVGRLEVLRIHTKNMKLSDDVDLERIAKDTHGYVGADLAALCTEAALQCIREKMDVIDLEDETIDAEVLNSMAVTNEHFQTALGTSNPSALRETVVEVPNVSWEDIGGLENVKRELQETVQYPVEHPEKFEKFGMSPSKGVLFYGPPGCGKTMLAQANANEWQANFISEKGARTLLSXFGEIYAKVRXSVERARQSALCVFVVSEIEFSDIDAGGSDAAAGVLFDRVLNQLSTEKDGMSAKKTVSIIGATNRPDIIDPALLXPGRLDQLIYIPLPDEDSRHQIFKACLRKSPIAKNVDLRALARHTQGFSGADITEICQRACKYAIRENIEKDIERERKSRENPEAMDEDTVDDEVAEIKAAHFEESMKFARRSVSDADIRKYQAFAQTLQQSRGFGSEFRFPESGDRTTTGSDPFAASAGGADEDDLYS

SEQ ID NO: 242998 - protein, 337 aa, Glycine max
  Clone ID: PAT_MRT3847_61456C.1.pep
QVVEVPNVSWEDIGGLENVKRELQETVQYPVEHPEKFEKFGMSPSKGVLFYGPPGCGKTLLAKAIANECQANFISVKGPELLTMWFGESEANVREIFDKARQSAPCVLFFDELDSIATQRGSSVGDAGGAADRVLNQLLTEMDGMSAKKTVFIIGATNRPDIIDPALLRPGRLDQLIYIPLPDEDSRHQIFKACLRKSPVAKNVDLRTLARHTQGFSGADITEICQRACKYAIRENIEKAIERERKSKENPEAMDEDTVDDEVAEIKAAHFEESMKFARRSVSDADIRKYQAFAQTLQQSRGFGSEFRFPESGDRTTTGSDPFATSAGGADEDDLYS

SEQ ID NO: 242999 - protein, 78 aa, Glycine max
  Clone ID: PAT_MRT3847_61457C.1.pep
KRSLAYLYRLPQFICPSPNHTIIRLSTFALCPSCHHVNAEPTLVITSLRLSCVPSPFRRMTAYYLSPFQSTFPTQFAA

SEQ ID NO: 243000 - protein, 43 aa, Glycine max
  Clone ID: PAT_MRT3847_61458C.1.pep
GVPEITLNNGEGVAVWQMRVMDIIRSEDGNTNWSSWLPAQVHV

SEQ ID NO: 243001 - protein, 71 aa, Glycine max
  Clone ID: PAT_MRT3847_61459C.1.pep
FQFIHCRSSCSHPEAAPPVCVQTSVFRANMVLSAGWGSYSCEWVPRSFRRGLGSSMSQGGLKSTLNSQSSI

SEQ ID NO: 243002 - protein, 80 aa, Glycine max
  Clone ID: PAT_MRT3847_6145C.1.pep
WANLTNIPGMRNEIASAIYSLLPLRAFESFKLSKARTYDLYPKFLYWKKFLSKSFVNMALNLLKLISLAIKMSITKRPLI

SEQ ID NO: 243003 - protein, 229 aa, Glycine max
  Clone ID: PAT_MRT3847_61460C.1.pep
NIHRLAFLAGAGLQAFQQFIGINTVMYYSPTIVQMAGFQSNELALLLSLIVAGMNAAGSVLGIYLIDHAGRRKLALYSLGGVIASLIILALSFFNQSSESGLYGWLAILGLALYIAFFSPGMGPVPWTVNSEVYPEEYRGICGGMSATVNWVSNLIVVQSFLSVAAAVGTGPTFLIIAIIAVLAFMFVVVYVPETKGLTFDEVELLWKERAWGKNPDAQSLLVRTENHS

SEQ ID NO: 243004 - protein, 57 aa, Glycine max
  Clone ID: PAT_MRT3847_61461C.1.pep
ARVSVRSPSLFKGNQLVLSTWITKVSTDSRVRQEAPSKAWKLVSELLPCGRLAVRKV

SEQ ID NO: 243005 - protein, 168 aa, Glycine max
  Clone ID: PAT_MRT3847_61462C.1.pep
MASLRIRPPLKDKDIIGRFMPDGRCCKKHPKHRQSPGVCSLCLRDKLSQLSSACSSSSSSSRKTTFISSCHSSSSSSSLTSYCSSSASSCASPTLPFPFHKDSKSGSNSVSIFLLSAKPGGILKSRSMSVVATRRRTKGQDEGDDRNKKTGMKSGFWSKLLHPRTKSK

SEQ ID NO: 243006 - protein, 101 aa, Glycine max
  unsure (1)..(101): unsure at all Xaa locations
  Clone ID: PAT_MRT3847_61463C.1.pep
QKSGWTTANFLRKEGGPAQGFALEKGKRAAWYSFKGGVDFRDTGTPVGWGPAPFFAGKTAGRTQGXAHIVEGAAWYAAHNAAELASMSAAAVKRLAASAGE

SEQ ID NO: 243007 - protein, 61 aa, Glycine max
  Clone ID: PAT_MRT3847_61464C.1.pep
YSPMRRSCIIHSDRVFKQYATESISTADHSLPHYWVSNRKPLSESDRQRLPMCQKILLQQS

SEQ ID NO: 243008 - protein, 37 aa, Glycine max
  Clone ID: PAT_MRT3847_61465C.1.pep
QLATCINKSQNLKLNYNTVYVQFFFLLYACYLATIES

SEQ ID NO: 243009 - protein, 36 aa, Glycine max
  Clone ID: PAT_MRT3847_61466C.1.pep
DGFPLILQFSIHSPGIIGLCSLLALETTCALVNLIH

SEQ ID NO: 243010 - protein, 100 aa, Glycine max
  unsure (1)..(100): unsure at all Xaa locations
  Clone ID: PAT_MRT3847_61467C.1.pep
TLTPKCAFFTHGNFIAIVAKNTMNXKFGPSYVYISYLPFSHIYYRSNHFMTLHFFISVGFYHGDSIKLMDDIASLIPTFFFIVPPLYNKIYSGITNSFKT

SEQ ID NO: 243011 - protein, 299 aa, Glycine max
  Clone ID: PAT_MRT3847_61468C.1.pep
LSKSKSLFDFADKYRGSYSGSCPFYCSYSGYQDELLWAASWLYKASGESKYLSYSIGNQGWSQAVSEFSWDNKYVGAQTVRTEEFYGGKKDLAKFKSDVESFICSVMPASSSLQIKTTPGGLLFTRDSSNLQYATSSTMVLFIFSKILNRNHIDRIHCGSALFTPSQIRAFAKTQVDYILGSNPMKMSYMVGFGSKYPKQLHHRGSSIPSINVHPTKVGCNDGLSVYYNSANPNPNTHVGAIVGGPDSNDRFSDARSDYSHSEPTTYMNAAFVASVSALLGKTTDRNQIQDSAVSPYRC

SEQ ID NO: 243012 - protein, 107 aa, Glycine max
  unsure (1)..(107): unsure at all Xaa locations
  Clone ID: PAT_MRT3847_61469C.1.pep
PPRPTRPXLLALALFGVLSAVSVAFSERGGLPLSDVQCFPRGALRIIFYAPGLLGSSPCQRAYCSYSDYVGACFSVGLTRIISPISHCLTFFFAASRLAGQLTLVFS

SEQ ID NO: 243013 - protein, 385 aa, Glycine max
  Clone ID: PAT_MRT3847_6146C.1.pep
MMHCASIVSAPSYAFPFLSGSASTTPTAISLTKRSWKPPPSMAKGPVRATVSIEKETPEANRPETFLRGVDEAQSSTSVRARFEKMIREAQDTVCSALEAADGGAQFKEDVWSRPGGGGGISRVLQDGAVWEKAGVNVSVVYGVMPPDAYRAAKGVPTDQKPGPVPFFAAGISSVLHPKNPFAPTLHFNYRYFETDAPKDAPGAPRQWWFGGGTDLTPAYIFEEDVKHFHSIQKQACDKFEPTFYPRFKKWCDDYFYIKHRGERRGLGGIFFDDLNDYDQEMLLSFATECANSVIPAYLPIIEKRKDLPFNDHQKAWQQLRRGRYVEFNLVYDRGTTFGLKTGGRIESILVSLPLTARWEYDHKPEEGSEEWKLLDACINPKEWI

SEQ ID NO: 243014 - protein, 47 aa, Glycine max
  unsure (1)..(47): unsure at all Xaa locations
  Clone ID: PAT_MRT3847_61470C.1.pep
KEASLIYLTSXPFLQFTIHTLSLXXSLXXXLSXLSLSQRNPNNXNRV

SEQ ID NO: 243015 - protein, 81 aa, Glycine max
  Clone ID: PAT_MRT3847_61471C.1.pep
MGKPAKIGESGGYAGDRRDLRATPDRLIEVKVTADNSSCIRSISFIYIGADGKPYEEGPWGFGHAGTEYKIDLCRFDESLT

SEQ ID NO: 243016 - protein, 66 aa, Glycine max
  Clone ID: PAT_MRT3847_61472C.1.pep
GSFLAQKKTILWPIRSTFQGNLVKKGTSPSYTTQRFFHYKVARRATFALKKTFNIKEDFPLRPFAG

SEQ ID NO: 243017 - protein, 115 aa, Glycine max
  unsure (1)..(115): unsure at all Xaa locations
  Clone ID: PAT_MRT3847_61473C.1.pep
MSASLIFSGHNRVTETTFFNCRDLDISVAHYTIATQFRILLPHYIRWHLYTLLIYILPSFLTAVSEYQRDQSNIQISGVFYDGRYRFWTEHETHLALTEEDRWKXDRNRGIPADV

SEQ ID NO: 243018 - protein, 124 aa, Glycine max
  Clone ID: PAT_MRT3847_61474C.1.pep
MGDEVILLNFWLSPYGMRVRIALEEKGIKYESREEDLSNKSSLLLQMNAVHKKIPVLIHNGKPVCESLIIVEYIDEVWNDQSPLLPSDPYQRNQARFWANYVDTKMYEIALKFWRTEGEEKEAA

SEQ ID NO: 243019 - protein, 234 aa, Glycine max
  Clone ID: PAT_MRT3847_61475C.1.pep
MERGRRSSSFGPMSSTVPCFLLLLFCLSGSAEAYKNYTVGDSLGWFDNTEKSNVNYQKWADSKEFSLGDFLIFNSDTNHSVVQTYNFTTYKECDYDDAQDKDTTQWSASDPSNTQTHPVTVAVPLVKEGMTYFFSGDYDGDQCKSGQHFKINVTYGQGLPKSLKSPEDAPSPASPVAGDDDSAPDTIVPSNFSHPKEENDDDKASDDQKSSSSVSILMHAQLHIVLLGILLFLF

SEQ ID NO: 243020 - protein, 64 aa, Glycine max
  Clone ID: PAT_MRT3847_61476C.1.pep
KKKILPLNCFIPKKGYLFLSKQKPPAFFSKLVFNFFEINSDPPVFFPVKGHFFIPCYKAAPPPA

SEQ ID NO: 243021 - protein, 47 aa, Glycine max
  Clone ID: PAT_MRT3847_61477C.1.pep
QPWLWEPSAQNSLSRGFYIWLESVDKTGGNKKVALRIRDGGYRYVSA

SEQ ID NO: 243022 - protein, 117 aa, Glycine max
  unsure (1)..(117): unsure at all Xaa locations
  Clone ID: PAT_MRT3847_61478C.1.pep
KPQSRAWAQNKHDFEKKKKDAADDDIDDWELPHGIADTMGCLQREGHLLQGEHNLLGEAFLVMSSSAGXDQTKEIILWLLEPLSVQWTQLEWQDKYLSGPHGLVQLCSDVPVMWSIF

SEQ ID NO: 243023 - protein, 69 aa, Glycine max
  unsure (1)..(69): unsure at all Xaa locations
  Clone ID: PAT_MRT3847_61479C.1.pep
FQPKITHSTLPPQGGGHTPXXXHTKKRPQPGGEGGNTKYYLKGGSPLKVPPLRSPCNQHHRPPPFPQGF

SEQ ID NO: 243024 - protein, 87 aa, Glycine max
  unsure (1)..(87): unsure at all Xaa locations
  Clone ID: PAT_MRT3847_6147C.1.pep
MLGGLRGRGHKIKGTXVLMLKNEYDVNSVSSDPGRIAQGAYLIRTTLHTITAYXGRSTFVQLITATQADGDCNRNLRKATLCRMYHY

SEQ ID NO: 243025 - protein, 399 aa, Glycine max
  unsure (1)..(399): unsure at all Xaa locations
  Clone ID: PAT_MRT3847_61480C.1.pep
MPGLTCNACNTEFKDDTEQKLHYKSEWHRYNLKSKVDAVRGVTEAKYPAXNLYVLGGKDEWVELEEFYDYSSSYVDDQGKQLVASCDASNNVELVGGSELIITRKSGERPSTKTLIEVANSENEESEDEWEEVDPEEDLVDGAAKSLTDWDVNEDGEDVDXEEDDDFEELDPSCCFMCDQEHKTIEDCMVHMHKHHGFFIPDVEYLKDPKGLLTYLGLKVKRDYMCLYCNDRCYPFSSLEAVRKHMEAKSHCKVHYGDGDDDEEVELDEFYDYSSSYVDDQGKQLVASCDASNNVELVGGSELIITTKSGERSSTKTLGSREFLRYYRQKPRPSLANMAITAALASRYRSMGLTTIQSREKIVRMKVLKEMNRSGVDNMRTKMAMKSNVIRNLPKNVPY

SEQ ID NO: 243026 - protein, 293 aa, Glycine max
  Clone ID: PAT_MRT3847_61481C.1.pep
PPPFTSKTPQQVHDVFLSFRGEDTRYTFTSHLYAALTRLQVKTYIDNELERGDEISPSLLRAIDDAKVAVIVFSENYASSRWCLDELVKIIHASGKNGQIIVPVFYHVDPTHVRHQTGSYGHAFAMHEQRFVGNMNKVQTWRLVLGEVANISGWDCLTTRVESELVEKIAMDILQKLDSITSGGLERRIATYKQMAQQKLEKSLKTSNMRDMEDLITTLLQLGELKLEKAMRTDDSSVWDDLMATYERVLQLKQDKWMRTFNTKDMEDLVATRQHVMQIQREQSNRKIGFRGI

SEQ ID NO: 243027 - protein, 73 aa, Glycine max
  Clone ID: PAT_MRT3847_61482C.1.pep
TPPFLFFPKKGVGLINIPSLPKTFKCFSFKRLAPKVSWGTCFIFKKGPPPGFSKNLFYLWGFLKKRAPLFFLS

SEQ ID NO: 243028 - protein, 63 aa, Glycine max
  unsure (1)..(63): unsure at all Xaa locations
  Clone ID: PAT_MRT3847_61483C.1.pep
ELGPMAEAAETCNPTQMTPCGWAINXGSAPASACCHKLEEQKPCCCGXIKDASLMQYVNSANA

SEQ ID NO: 243029 - protein, 81 aa, Glycine max
  Clone ID: PAT_MRT3847_61484C.1.pep
ARLDELFVVVVVVVGSGKHNTLLIKKLQHDMSEQNNEYLFLFLFFHDLKDRTGRVLQTLAIKILGLEFGIQEQGTTKGIKF

SEQ ID NO: 243030 - protein, 54 aa, Glycine max
  Clone ID: PAT_MRT3847_61485C.1.pep
SKSQVWLTSCTTQVHRGSQYVEIGPCEYSENQWPQIRSEKPYLKYMREKAGNIM

SEQ ID NO: 243031 - protein, 105 aa, Glycine max
  unsure (1)..(105): unsure at all Xaa locations
  Clone ID: PAT_MRT3847_61486C.1.pep
PXYXXTXXPXNGPXXNQPCLXRNQXRXLRCPLSKCRXLRXWYTXILXNMXXGGLXXESQGSSXCLTVGLRXXAYFXRDXGXLPCXXMHYIGWGXLXICLLEXIXG

SEQ ID NO: 243032 - protein, 86 aa, Glycine max
  Clone ID: PAT_MRT3847_61487C.1.pep
CSRQRNPPAKGNSAKINSVSFSHRRIFELEFDALGRALFLDSKFQSQNFNGKSFNFQQPFLSYLLNQKKIRKDTHCFVHSCHVGAS

SEQ ID NO: 243033 - protein, 137 aa, Glycine max
  unsure (1)..(137): unsure at all Xaa locations
  Clone ID: PAT_MRT3847_61488C.1.pep
CTRGVRAIRVINSSQDMFVDEWGVHNNITAVNQFELHSGWTLSMLHSFNESERMHLLFFLXVEALMALFSDILKNPVVTEIAXRLWKTPSQAALIWGLHSRHIVLSMSTIEPIIKGIFDISDLPRRKTLMMCTLFLS

SEQ ID NO: 243034 - protein, 88 aa, Glycine max
  unsure (1)..(88): unsure at all Xaa locations
  Clone ID: PAT_MRT3847_61489C.1.pep
CDKSLNLISTKKDNPAMGTVESLKFVVWSEYIRDRATLVVAYGISINLVEVTXKSKLKAQFPSPIEYAGFTGDFAPAPGIATFRGMRC

SEQ ID NO: 243035 - protein, 141 aa, Glycine max
  Clone ID: PAT_MRT3847_6148C.1.pep
NALTQMGTDFSVIQKTFFPDKTRHQIKLKYKKEERQQPLQLTDAVNNSAKDHPHSKLFIELLKLASTKAEEYPGRDASDLVMAEEVVDLTAGTHEEVPKAATKKEDADVKAQEDSVAVPSPEQSDDSDDDFQKWSQYKCGY

SEQ ID NO: 243036 - protein, 60 aa, Glycine max
  Clone ID: PAT_MRT3847_61490C.1.pep
TTATLWLGHAAASSAATSTTSAKCCRDLQLELCIVLAVDPRIETCMLPVADGITICRRIS

SEQ ID NO: 243037 - protein, 101 aa, Glycine max
  unsure (1)..(101): unsure at all Xaa locations
  Clone ID: PAT_MRT3847_61491C.1.pep
RGFTDRKKPSPPKNLRFDLNPPQEIELSPGIISLGGKPDLEDEHKESEVVLRQFDLNMAYGPCLGMTRLARWERAQRLXLGNRRLLKSGKVPTESLWDGRI

SEQ ID NO: 243038 - protein, 104 aa, Glycine max
  Clone ID: PAT_MRT3847_61492C.1.pep
MALVSGNMKGFYRQKKTIATKKSPILSPAIISLGGKPDLEDEHKESEVVLRQFDLNMAYGPCLGMTRLARWERAQRLDLNPPQEIERLLKSGKVPTESLWDGRI

SEQ ID NO: 243039 - protein, 68 aa, Glycine max
  Clone ID: PAT_MRT3847_61493C.1.pep
KNETTLIHNCVREKQPPLIAGNCFSYRNSNTDTKETNSLLSLAIVYVENIYLFFTWCIYSHIETSRAD

SEQ ID NO: 243040 - protein, 73 aa, Glycine max
  Clone ID: PAT_MRT3847_61494C.1.pep
EKVLLGMVGLIFCLGLEGMGGDRKQNGIDIGLRLGQQRVVRSQRQKFWIRREEGKNLLKQNGVFFKFSLLLFF

SEQ ID NO: 243041 - protein, 114 aa, Glycine max
  unsure (1)..(114): unsure at all Xaa locations
  Clone ID: PAT_MRT3847_61495C.1.pep
VRCKVGINPYSMVRTGLANRILNKVNYILFWKNARCDGLITKQGISKMAEMINRVCGGYEKLMRERTHLLVAWCSRMGICKKDVRRVEWGIPSXYSFTDICNRIFNEMLIRYSY

SEQ ID NO: 243042 - protein, 61 aa, Glycine max
  Clone ID: PAT_MRT3847_61496C.1.pep
RSKRTKRSSNSMRRRSRSRGPQRRRRPSRRHRQSAGRRHRQCSRRRKNRSHQQCLARPKAP

SEQ ID NO: 243043 - protein, 74 aa, Glycine max
  Clone ID: PAT_MRT3847_61497C.1.pep
THFNLNVVHSCVLLKILKFLKNFKVYLSKLKNASQIFCTGCNLNKNLIKHSNELYRPLRFPKLEYYKVFSYPTD

SEQ ID NO: 243044 - protein, 61 aa, Glycine max
  Clone ID: PAT_MRT3847_61498C.1.pep
WVALPLGGAIVVFPLPPPFGEALSALHSSFVKLSCWGLVSQFPFFQGLNDPASVNKEMGLL

SEQ ID NO: 243045 - protein, 58 aa, Glycine max
  Clone ID: PAT_MRT3847_61499C.1.pep
SRVDPGFRPGVRPGFRPRVRKTTFFGSTQILPFKPPNTLRLNPPPLKWLLLPNFFPPR

SEQ ID NO: 243046 - protein, 99 aa, Glycine max
  unsure (1)..(99): unsure at all Xaa locations
  Clone ID: PAT_MRT3847_6149C.1.pep
AAWQCHSYNMFPLRMNTGYGARSPEVKCTKXNLPNKIPFIFXVRRVTKKCLFSSTEYIPFEQYISDSKTVNQQSNFYATYLHFHPNHISDPRLWARSLY

SEQ ID NO: 243047 - protein, 69 aa, Glycine max
  Clone ID: PAT_MRT3847_614C.1.pep
KSFLPITGIFSIRMNEIRVCEREEGKRNYGGFLENSLSSSSIKGRLALLRDDSAAIEEEISPFSFFLFP

SEQ ID NO: 243048 - protein, 88 aa, Glycine max
  Clone ID: PAT_MRT3847_61500C.1.pep
MDDMERTEIRCLLRLHTLVRVAPPPQIRVSVIGCNGSQTSRRAKDVTLCTDPHRYLPKCIKDEAIVHSLIWTMSPRAVDTQYGVHQLP

SEQ ID NO: 243049 - protein, 40 aa, Glycine max
  Clone ID: PAT_MRT3847_61501C.1.pep
DDQCIFWVGPMVGPAGAAFYHQYILKAAAVLALGSLRSNA

SEQ ID NO: 243050 - protein, 112 aa, Glycine max
  unsure (1)..(112): unsure at all Xaa locations
  Clone ID: PAT_MRT3847_61502C.1.pep
PLDLGSISAALNGVVGLDYMERIALATSEGFTHVLSRTNGETGKRRFDHGDGEKMTLLPLTKVENAYNMLIPKLLKRVPTLIGIESSKDXKLPCRKIVLKRRTLGFTILHME

SEQ ID NO: 243051 - protein, 59 aa, Glycine max
  Clone ID: PAT_MRT3847_61503C.1.pep
MYNHYITIASPLDQFEIRNLFSIDTPLLADINIFITNIGLYITIAAIIAFYLRVVATNL

SEQ ID NO: 243052 - protein, 200 aa, Glycine max
  unsure (1)..(200): unsure at all Xaa locations
  Clone ID: PAT_MRT3847_61504C.1.pep
SIFNEDTGGKVKQLSAAQNAKITVPRGYTNAGVDSSRLKRSEMLLGMRLFKHLPSISLHPLHVPFTRKGQVWICPHPADVVEIFIYLGEPCHVXCSVLLTISHGADDSPYPSAVAVRTGGHLXGLKLVXQGASIPQCASGTILLIPLPGARNAEDMAITGANSRLHAQDASPLSLLDDSEELGGNWNFLTRGVALTFYPT

SEQ ID NO: 243053 - protein, 60 aa, Glycine max
  Clone ID: PAT_MRT3847_61505C.1.pep
KNTLIKTIDCGGVKENPKIGERTDATNLSKFSRLDTVHTYIRLSTKFAHVCNGDTLNNNS

SEQ ID NO: 243054 - protein, 68 aa, Glycine max
  Clone ID: PAT_MRT3847_61506C.1.pep
LINHQLSTINMYERLVVKLEKEGNIEEKSNCRRKKQCLLSGYSKKSKMRLSSLLATTLMQNTLGNVNK

SEQ ID NO: 243055 - protein, 73 aa, Glycine max
  Clone ID: PAT_MRT3847_61507C.1.pep
ILLHEYLVKTSSMCISRTQSSVRYDGWYAEPFSVQLTNTGPKNATMYSYGGLSPTRPIIHAETLRVRPDSSRI

SEQ ID NO: 243056 - protein, 283 aa, Glycine max
  Clone ID: PAT_MRT3847_61508C.1.pep
MYRFSNTVIGFLNLFTLLASIPIIGAGLWMARSSTTCENFLQTPLLVIGFVVLVVSLAGFIGACFHVACALWLYLVVMLFLIAALMGLTIFGFGVTSKGGGVEVPGRVYKEYHLQDYSPWLRKRIQDPRYWNTIRGCILGSKTCEKLASWTPLDYMQRDMSPIQSGCCKPPTACTYNVATMMMTQDPDCYRWNNAPNLLCYECDSCKAGVLEDIRGNWHKLSVLTVTMLVLLIGIYSIGCCAFRNTRRAETDYPYGENRMTKVRPRWDYHCWRWLHDRREQLY

SEQ ID NO: 243057 - protein, 242 aa, Glycine max
  unsure (1)..(242): unsure at all Xaa locations
  Clone ID: PAT_MRT3847_61509C.1.pep
RIVPSYELVRRFLESDKKTMDCIRGCGHFFGSDRASQNVKLLIDEGATDSVIAFLLQRXXSVILCSGFKETLDEIKEMGFEPFKKKFGVALIAKKIVPKSHWEAKVDVFKRWGWSEELVIGMFKRQPLFMLVSQDKIDRVMRFWVKQLGWDSLALAKKPEIFGFSLERRIIPRALVVQYLVAKGLRKKSASMIVPFAVSDKEFLEKYVMRFKEEEAELLKLYQGKMSGHGNKEDGAAPLTVV

SEQ ID NO: 243058 - protein, 54 aa, Glycine max
  Clone ID: PAT_MRT3847_6150C.1.pep
SSCSGSSKFELVTDCYNCEVFPFFKPLGYKVANATYIATYCQYCDRNIVSVVLP

SEQ ID NO: 243059 - protein, 56 aa, Glycine max
  Clone ID: PAT_MRT3847_61510C.1.pep
TRRAVGNRLRHYTMALFLPTNSQPFPSEVHNLLLCVIVIPSQRRSAFDPRPSRRQP

SEQ ID NO: 243060 - protein, 213 aa, Glycine max
  Clone ID: PAT_MRT3847_61511C.1.pep
MSGTSEKKLVRIDVSSDTVCPWCFVGKKNLDKAIAASKDKYNFEIIWHPFQLSPDAPKEGIDKREYYRRKFGSQSERMEARMSEVFKNVGLEYSLSGLTGNTIDSHRLIYFARQQGLDKQHDLVEELNIGYFTQGKYIGDHKFLLESAAKVGIEGAEEFLKDPNNGLKEVEEELKTYSGNISGVPYYVINGNHKLSGGQPPEVFLRAFQVATN

SEQ ID NO: 243061 - protein, 120 aa, Glycine max
  Clone ID: PAT_MRT3847_61512C.1.pep
PPLPPPPNRPHKANGAPTQQQGPRAGGPAPQGHPPGPPFPNSAKGLGDPVNQDNRGGGGGALTSSNGPHKNNLIFQGSPFGPHKVMGHALSLLGSGAKAKDKDFKTSFPPGFSNISKFFG

SEQ ID NO: 243062 - protein, 170 aa, Glycine max
  unsure (1)..(170): unsure at all Xaa locations
  Clone ID: PAT_MRT3847_61513C.1.pep
MSGISEKKLIRIDASADTVCPWCFVGKKNLDKAIASSKDKYNFEIIWHPFQLNPDAPKEGIDKREFYRSKFGSQSERMEARMSEVFKNVGLEYSLSGLTGNTIDSHRLIYFARQQGLDKQHDLVEELNIGYFTQGKYIGDHKFLLESAXKVGIERAEEFLKDPNMVLKGV

SEQ ID NO: 243063 - protein, 433 aa, Glycine max
  Clone ID: PAT_MRT3847_61514C.1.pep
MAKTFKYIILGGGVSAGYAAREFAKQGVKPGELAIISKEAVAPYERPALSKAYLFPESPARLPGFHVCVGSGGERLLPEWYTEKGIELILSTEIVKVDLAAKSLISAGGETFSYQILIVATGSTVIRLTDFGVEGADAKNIFYLREVDDADKLYEAIKAKKNGKAVVVGGGYIGLELSAVLKLNNIDVTMVYPEPWCMPRLFTAGIAEFYEEYYKNKGVNIIKGTVAVGFTSNSDGEVKEVKLKDGRVLEADIVVVGVGGRPQTALVKGQVEEEKGGIKTDAFFKTNLSDVYAVGDVATFPLKLYGELRRVEHVDHSRKSAEQAVKAIKAAEEGRTVEEYDYLPYFYSRSFDLSWQFYGDNVGDTVLFGDNNPASSKPKFGTYWIKDGKVVGVFLEGGTPEENQAIAKVAKVQPPVADVDQLAKEGLSFASKI

SEQ ID NO: 243064 - protein, 88 aa, Glycine max
  Clone ID: PAT_MRT3847_61515C.1.pep
TQTFSIISKLIFNVIVFINPILETLYIKKMWVVFFFFLFLYTYEWWQKYRSLGKNKCVSNINCTLLNEGTPSYIYIYIYIYIYIYIYI

SEQ ID NO: 243065 - protein, 48 aa, Glycine max
  Clone ID: PAT_MRT3847_61516C.1.pep
DQFTWDVKLLHLYDLITFYRYYKINQFKPFDHISYSLYNYVYIKLQTS

SEQ ID NO: 243066 - protein, 118 aa, Glycine max
  unsure (1)..(118): unsure at all Xaa locations
  Clone ID: PAT_MRT3847_61517C.1.pep
KEPKNXNFFLXXNNFEFNYKFTDKMRRIKIPLPPVDEKKKVIEDVDKDRRYAIDASIVRIMKSRKVLGYQQLVVECVEQLGRMFKPDVKAIKKRIEDLISRDYLERDKDNANMFKYLA

SEQ ID NO: 243067 - protein, 56 aa, Glycine max
  Clone ID: PAT_MRT3847_61518C.1.pep
VVRLLGYHQLVMECVEQLGRMFKPDVKAIKKRIEDLISRDYLERDKDNANMFKYLA

SEQ ID NO: 243068 - protein, 104 aa, Glycine max
  unsure (1)..(104): unsure at all Xaa locations
  Clone ID: PAT_MRT3847_61519C.1.pep
MVETLEHALLSFTLVVKQIISCCYKMDATTPKYSKVWFDEIVKELSYYFKIVRYNPDKIPYVTISGFDGYNIIEKSTNLYXHKGPTLLDALYLIIDPKKSSDKP

SEQ ID NO: 243069 - protein, 63 aa, Glycine max
  Clone ID: PAT_MRT3847_6151C.1.pep
RNSPFKGQVQKTFSECNKIGPSPSPWRDSPLSSQLKKSSKSGANNPFRMFTISSGKQPKTGGD

SEQ ID NO: 243070 - protein, 59 aa, Glycine max
  Clone ID: PAT_MRT3847_61520C.1.pep
LFVVSPKYLTSPLFYLSVYNINDFFFQEINLVETELMINHIVYILLKKNMVYNNKYRIF

SEQ ID NO: 243071 - protein, 53 aa, Glycine max
  unsure (1)..(53): unsure at all Xaa locations
  Clone ID: PAT_MRT3847_61521C.1.pep
MALKHILEELMDXQNVPSTSCNAITVILDMFHWQATIIGTADSPYAGSLFRST

SEQ ID NO: 243072 - protein, 84 aa, Glycine max
  Clone ID: PAT_MRT3847_61522C.1.pep
KNKISLTMSRDSSTTPIGRKTNPKFNKKNSYPITTFLLPFIPPIKLLHRHLIPTHRGRPMLPQPLVNTITKKPMLTWQCPLPPH

SEQ ID NO: 243073 - protein, 90 aa, Glycine max
  Clone ID: PAT_MRT3847_61523C.1.pep
KVCLPFKWWVILVRLHENQLFQAARANTPLKSKSTLRGVKVPMLLFPDTNLGKKYFKWRWDGNLKKQNYIKVYNHSMAIIGHTSPILKYK

SEQ ID NO: 243074 - protein, 48 aa, Glycine max
  Clone ID: PAT_MRT3847_61524C.1.pep
HVFTINVNDLLLLLRKLLEYLVSRENNTIHLLTLISRENNAIHLLALF

SEQ ID NO: 243075 - protein, 64 aa, Glycine max
  Clone ID: PAT_MRT3847_61525C.1.pep
KTCFFTPKKKNLKPFVQIFSPGVQREIPLYFPPRKCVPLRAGGCPKQKKQIFFLPDPGVNPGIS

SEQ ID NO: 243076 - protein, 89 aa, Glycine max
  unsure (1)..(89): unsure at all Xaa locations
  Clone ID: PAT_MRT3847_61526C.1.pep
MAGGGIFHLFKRKLQSQPPSSSFTPSITTKNDRYDSTGSDYLRVLAMAGAAANRLLRFAATAFADEDAHGLTXPSFPRTNKGVPTALDH

SEQ ID NO: 243077 - protein, 62 aa, Glycine max
  Clone ID: PAT_MRT3847_61527C.1.pep
PHAFVFEFMSERSLAERATVAKMSPACAATMALIAVDPVTLQKQRLTGRSNETVPMMESHLP

SEQ ID NO: 243078 - protein, 84 aa, Glycine max
  unsure (1)..(84): unsure at all Xaa locations
  Clone ID: PAT_MRT3847_61528C.1.pep
QRERAENASGGPPVXKQSAGQLGLYKDISELYTTIFXTVQFCIGIHDLRNVESSIRPRDXYYLGGTLMVSLQVSTIYSHEAPLV

SEQ ID NO: 243079 - protein, 77 aa, Glycine max
  unsure (1)..(77): unsure at all Xaa locations
  Clone ID: PAT_MRT3847_61529C.1.pep
SNXTQTRAQILFVFPFASFFSPLFIFSNTENACTSTSSKHVRXSSREARFSHSLQPSNISGICETWQQAVWETTYLR

SEQ ID NO: 243080 - protein, 79 aa, Glycine max
  Clone ID: PAT_MRT3847_6152C.1.pep
MFVVVQGFTVGLVVDVHRGKGSYHGASAEGVGFRDADLVDEDYEGPAGTRRIGAGVYGHQEHVGDSDRETSHDDARREV

SEQ ID NO: 243081 - protein, 91 aa, Glycine max
  Clone ID: PAT_MRT3847_61530C.1.pep
HASVRLREDDRRARLMLRPRSSRVTLDLLSIMEEPVTTIRILGIEIQPYLPPPPGSVRILGVELRPYLPPPGPLWEPDAPVSNTNMKPQPS

SEQ ID NO: 243082 - protein, 227 aa, Glycine max
  Clone ID: PAT_MRT3847_61531C.1.pep
MESKESIFVKLLLILHLSVLCVSQDFDFYYFVQQWPGSYCDTTQNSCCYPTTGKPAADFGIHGLWPNYKDGSYPSNCDSNNRFQPSQISDLTSSLQRNWPTLACPSGNGVQFWTHEWEKHGTCSQSVLKQHDYFETALDLKQRANLLQALTNAGIQPDGGFYSLSSIKGAIKNAIGYTPYIECNVDTSRNNQLYQVYLCVDTSGSNFIECPVFPRGKCGSQVEFPTF

SEQ ID NO: 243083 - protein, 180 aa, Glycine max
  Clone ID: PAT_MRT3847_61532C.1.pep
MANNVVVVLKVAPVSLPPFPITNNALTFKSQRHTLHLNCFQTKNRTTSFPSSSSILRNKASCSVLACLPPESSTSSSTAKPSFPSPQTKLYVSGLSFRTTEESLRNAFKNFGQLVEVKLVMDRIANRPRGFAFLRYATEEESQKAIEGMHGKFLDGRVIFVEVAKPRSELAPRKQEDTRL

SEQ ID NO: 243084 - protein, 97 aa, Glycine max
  Clone ID: PAT_MRT3847_61533C.1.pep
RSCRAPRSCLWIQTCCDPHESFFNPVQFLANASIHASVSIATRVKLQVRQARAPYARSARVRRRVGSRMSGRISALASSQHRTERAAAQSQEPDPVR

SEQ ID NO: 243085 - protein, 52 aa, Glycine max
  Clone ID: PAT_MRT3847_61534C.1.pep
LSWTQNLAASLLMVPLILDKSIPEGRAKAQSVATITERHVIMTETPKQADRH

SEQ ID NO: 243086 - protein, 68 aa, Glycine max
  Clone ID: PAT_MRT3847_61535C.1.pep
DCVCRERKVKNSVEGMKGVTDVVAYRMASKVSVSGYVEPSMVAPRIAHRTGQRAQLWPYFPYDAVAAP

SEQ ID NO: 243087 - protein, 114 aa, Glycine max
  unsure (1)..(114): unsure at all Xaa locations
  Clone ID: PAT_MRT3847_61536C.1.pep
NYSPGEGFQSAKENPRYSSYQGSRNGYLGGQGFNARVMLETXELFSQEQSWKEQQMKKQPLSXGPSNYDLYKKVQDPSYAPPKGPFRQDVPPSPSQVARVARLQTLEKGRPFYS

SEQ ID NO: 243088 - protein, 102 aa, Glycine max
  Clone ID: PAT_MRT3847_61537C.1.pep
IQPALCQPNTGCTLVTRPVHKQSTGRLATLVARVSICFVYIQPPSTTQGRLPTIISLVPTLHGVTRCQSTGPILPNNFRSAHCGGVGPPIMCANCCRYWSPL

SEQ ID NO: 243089 - protein, 37 aa, Glycine max
  Clone ID: PAT_MRT3847_61538C.1.pep
RQIISEDGLDYMCNPSLIHAQSMLAIWPTLVTLMGGR

SEQ ID NO: 243090 - protein, 42 aa, Glycine max
  Clone ID: PAT_MRT3847_61539C.1.pep
TEITGCRTLKPETKALVTGFQESCNKLLLLGVRFLTGRKITL

SEQ ID NO: 243091 - protein, 51 aa, Glycine max
  Clone ID: PAT_MRT3847_6153C.1.pep
TLTTCVCMVYKHGKRIKGGARSGGTKFTKRGGCRYCLSNRRPELMLRSPPI

SEQ ID NO: 243092 - protein, 79 aa, Glycine max
  Clone ID: PAT_MRT3847_61540C.1.pep
LWAGLCCGLSVGCAGPSLLPWLGLACGAFPWGAPVLPGPAASAAAPLGRSPSGSGVLWSFARVLECSCRGAPGRVGRPG

SEQ ID NO: 243093 - protein, 287 aa, Glycine max
  unsure (1)..(287): unsure at all Xaa locations
  Clone ID: PAT_MRT3847_61541C.1.pep
MDGIFAYIILILVTIFSFMFLPKPNRRRPQNQTLAKLPPGSMGWPYIGETLQLYSQDPNAYFSTKHKRYGEIFKTNILGCPCVMLTSPEAARFVLVTQAHLFRPTYPKSKERLIGPFALFFHQGEYHTRLRKLVQRSLSLEALRNLVPHIEALALSAMNSWGGDGQVINTFKEMKMFSVXVGILTIFGYLEPRLREELKKNYRIVDNGYNSFPTCIPGTQYQKALLARRRLGKIIGDIICERKEKRLLERDLLSCLLNWKGEGGEVLSDYXIADNIIGVLFAAQDTT

SEQ ID NO: 243094 - protein, 117 aa, Glycine max
  Clone ID: PAT_MRT3847_61542C.1.pep
ILFLSLFQSSLMLISTSLIHGNYQLDDWVLCRIYKKGNTQRSHERDDSIDDMIGEVPPSINVGHMSARFHLSRMSTSYSGALLENDRNTLEGVVIGNGSVNGISNTNNITSVISSSQ

SEQ ID NO: 243095 - protein, 365 aa, Glycine max
  Clone ID: PAT_MRT3847_61543C.1.pep
MESTEDSSTSSQQQPNLPPGFRFHPTDEELVVHYLKKKVDSVPLPVSIIADVDLYKFDPWELPAMASFGAEEWYFFSPRERKYPNGARPNRAATSGYWKATGTDKPICSGTQKVGVKKSLVFYGGKPPKGVKTDWIMHEYRVTENKPNNRPPGCDLGHKKNSLRLDDWVLCRIYKKGNTQRSHERDDSMDDMIGEVPPSINVGHMSARFHLSKMSTSYSGALLENDRNTLEGVVIGNGSVNGISNTNNITSVISSSHQFGTSNSKAELLPFVPSNNTSNSASKRTLSSLYWNVDDDNDDDDHKHFNLDSNGNVSVLRTEENNNNTNGTSGSFATLLNQLPQTPSLPQIDGLLRTPYQIQGTNWYG

SEQ ID NO: 243096 - protein, 78 aa, Glycine max
  unsure (1)..(78): unsure at all Xaa locations
  Clone ID: PAT_MRT3847_61544C.1.pep
GRWVGKRXYISIVVIGHVASGKSTTTGHLIYRLGGIVFFVIERSEREAADMAGXSXHDAWALDKRGGEGDPPPPLDIA

SEQ ID NO: 243097 - protein, 164 aa, Glycine max
  Clone ID: PAT_MRT3847_61545C.1.pep
MAGFSGDETAPFFGFLGAAAALVFSCMGAAYGTAKSGVGVASMGVMRPELVMKSIVPVVMAGVLGIYGLIIAVIISTGINPKAKSYYLFDGYAHLSSGLACGLAGLSAGMAIGIVGDAGVRANAQQPKLFVGMILILIFAEALALYGLIVGIILSSRAGQSRAD

SEQ ID NO: 243098 - protein, 115 aa, Glycine max
  Clone ID: PAT_MRT3847_61546C.1.pep
INGKQSPSKPVKRASKNKLHQEDTKETSNISNPEETTTSKAYKMYSGGSDEEFNGGFNEITTKEKKSNKNTKSVFRGKRLKKEKNFYYRKETNEEKHDYFERLSYNRESVPQCSS

SEQ ID NO: 243099 - protein, 40 aa, Glycine max
  Clone ID: PAT_MRT3847_61547C.1.pep
SLFHSIFKFTLLHFKYANPTLCSYLGSQPKFTKKLISFNK

SEQ ID NO: 243100 - protein, 44 aa, Glycine max
  Clone ID: PAT_MRT3847_61548C.1.pep
LLHGILSVSMIRWSRVQSLPPLFFSNKKLNYSNSLVKKYSQIAI

SEQ ID NO: 243101 - protein, 35 aa, Glycine max
  Clone ID: PAT_MRT3847_61549C.1.pep
TIRNAFDTSNHTVISKYRYHGRHTSLKSKLNGRVG

SEQ ID NO: 243102 - protein, 35 aa, Glycine max
  Clone ID: PAT_MRT3847_6154C.1.pep
NNTTGKEYRLIPIGDTGPAINVGGIFAYARKTGMI

SEQ ID NO: 243103 - protein, 34 aa, Glycine max
  Clone ID: PAT_MRT3847_61550C.1.pep
QRNYQRCPLLRSLPSRHMTMPSTDASSQHKGVHG

SEQ ID NO: 243104 - protein, 44 aa, Glycine max
  Clone ID: PAT_MRT3847_61551C.1.pep
NKAIRYKGPGLFKIRQIGQTTLGKAAIFGLFLGAGSLKHCGKSN

SEQ ID NO: 243105 - protein, 57 aa, Glycine max
  Clone ID: PAT_MRT3847_61552C.1.pep
QRYTSLDNQGKGISGSLKSYNVFRGGSIIETPHLLRVTQKTCTFLIPTHIFKFFQRM

SEQ ID NO: 243106 - protein, 77 aa, Glycine max
  Clone ID: PAT_MRT3847_61553C.1.pep
RCEKTTEGVSTNSTFGRLSVSCQQSTYSFVFLWLKLFIRNKLLFLDKVISERTPNNTLMKGCKERYKYTLHVHISIL

SEQ ID NO: 243107 - protein, 129 aa, Glycine max
  Clone ID: PAT_MRT3847_61554C.1.pep
MEMNTVQVVLVAVVVVLIHVFNVLLLRSRSLRAKLHRQGIHGPSPHFYFGNIPEMKTLLLQVQSAPITQVKDKDDHDSLSHKWPFTLFPHIQKWISQYGPIYLFSSGTIQWLMVSDIEMVKEIIMYTSL

SEQ ID NO: 243108 - protein, 42 aa, Glycine max
  unsure (1)..(42): unsure at all Xaa locations
  Clone ID: PAT_MRT3847_61555C.1.pep
LPTGCKRHPXGPLSQVYLPFNWGAFFKVGGAYLHILLNIGGF

SEQ ID NO: 243109 - protein, 59 aa, Glycine max
  Clone ID: PAT_MRT3847_61556C.1.pep
EVKLWNDKREREMNDNCGELYVFFKAADRIEKAHVRDIISPQEYELECPKLIARRKTLG

SEQ ID NO: 243110 - protein, 44 aa, Glycine max
  Clone ID: PAT_MRT3847_61557C.1.pep
SIIPLSACHFYELFFIQSVAINMFRELFNMQIPEFSYCPNLFCW

SEQ ID NO: 243111 - protein, 112 aa, Glycine max
  Clone ID: PAT_MRT3847_61558C.1.pep
TGLNQYTTCSDVGSFTYTEQALHSFLLTTTTGYYYNITSHEAKDFHRYINQFAHGLNTCLLNVHHVSFHPPPPHDNKLISNIYTPQILTFTNRLTITWCVEIICNLTLAKPN

SEQ ID NO: 243112 - protein, 56 aa, Glycine max
  Clone ID: PAT_MRT3847_61559C.1.pep
LFRLLERPIPKMPNQKKKTLLLPPMGRKLTVPPNISLSTVPLFKHKLPKPVYPPHE

SEQ ID NO: 243113 - protein, 364 aa, Glycine max
  Clone ID: PAT_MRT3847_6155C.1.pep
GFQEELRFIFQCLPENRQNLFFSATTTSNLQKLRGRYQDKMYVYEAYEGFKTVETLKQQAIFIPKKVKDVYLMHILDKMEDMGIRSAIVFISTCRDCHRLSLMLEVLDQEAAALYSFKSQAQRLEALHQFKSGKVSILLATDVASRGLDIRTVDLVINYDVPRFPRDYIHRVGRTARAGRGGLALSLVTQNDVDLIHEIEALIEKQLEMIEYKENEVLSLMKKVFSAKNVAEMKMIDDGFEEKAKERKKQKLKMLADKGLLNKRSKKRKRNKEFAEEGEEQKNEVFTVRNVTEMKRMDEDGIEEKAEEGGIQKLKMRTQKGLSKKKKLKERNNEFADEGKKQRKEEVEPLADIATPKKRSKKRQ

SEQ ID NO: 243114 - protein, 41 aa, Glycine max
  Clone ID: PAT_MRT3847_61560C.1.pep
IFVILFLPETKGIPLDLMCAIWGKHWYWSRFTVRGQVNQDN

SEQ ID NO: 243115 - protein, 75 aa, Glycine max
  Clone ID: PAT_MRT3847_61561C.1.pep
RPAKSSKRICDAPKLGSSFKNHIPPPNYDFCSRLKALSKKVYGTQGGYGGPEKNCPFFFPSNQTLVFQKKKKPNP

SEQ ID NO: 243116 - protein, 86 aa, Glycine max
  Clone ID: PAT_MRT3847_61562C.1.pep
FTWVNVEVFLSYGCKGAFVLCQIWVKNICNGFRHWSSRKFILPVNVPRARFLHGVATTARLSKAKIDRTRIHHPGNQPKPHTFSAW

SEQ ID NO: 243117 - protein, 49 aa, Glycine max
  Clone ID: PAT_MRT3847_61563C.1.pep
IPSKTREFDNEFFLTFVSTSFLHTIIPHHLSMTLFMSLKAWPRYCHCLR

SEQ ID NO: 243118 - protein, 86 aa, Glycine max
  Clone ID: PAT_MRT3847_61564C.1.pep
PQQAQPAYHLGYWLHSALYLGPYANTHLAPYRYCTYYGNVTVLGCTLISSTISINISLALSRTHLSLPRSTCAIPAFFASYYTSHN

SEQ ID NO: 243119 - protein, 438 aa, Glycine max
  Clone ID: PAT_MRT3847_61565C.1.pep
MKPHKLPSPALSRAFARALGSATTATQCGVAFPSKTVTTANFEPSLAELRRHVRTSDFVAIDLEMTGVTSAPWRELFEFDRSDVRYLKVRDSATKFAVVQFGVCPFRWDPSNHSFVAYPHNFYVFPRQQLAGLGPCDEFLCQTTSMDFLAKYQFDFNACIHEGISYLSREQERKALRSLNSTYDSEWSDIGKLKDVRDIPLLSAADILFTARMKNKFSEWRDGLFQEQNQEDQIQGISNDSKFQVTFFEMHPALRLNRFTSHQLKLIQLLIRKHFKDLSYVSVNSEASGSQQLVVYTDLKDELNLLLKKVKEENHRAEEMKIQAAVGFRHVIDLLSSEQKLIVGYNCFLDIAHVYSKFIGPLPGTPEEFVASVSKCFPHIVDTKILLSTNLMFQEKMKRSRKSLASAFTSFCPQIAAGSRSTDLGSLSHVKVNVEVDD

SEQ ID NO: 243120 - protein, 130 aa, Glycine max
  Clone ID: PAT_MRT3847_61566C.1.pep
SSRSSRSSRFGSSSPASFCTCNPQDLPHLPLRLLFFPSRPSSYSAALLLVAPYASPCARQLLNATVGRQQPQSCLSSATSGCPHTMKTTMSRPPTITLPRARNTRFPPRHPHPSDRALLRPRSNVCSTNM

SEQ ID NO: 243121 - protein, 316 aa, Glycine max
  Clone ID: PAT_MRT3847_61567C.1.pep
PTRPPTRPPTRPPTRPGELTELTNCSVKKTFSSMMLIMHELQSHALQTRESLCGENLQGVMTKLEREMDASFVWLFQQVFWKTPALMVYVMVLLANFLVFSMNDNTVKVITPSSMITKALTLTSNESKVQHSHVDVDQGEYVNRELTEEEHMLWNSFLEEASMLQKELSGEVLDHETRQRLVAPVSVELEGDQYEEYVKTEPYYKKHLFRTPHCSLLLSNYAQFLFLVLHDIDGAEEYYKRSVLAESPEAEAFSRYADFLLMVRKDVWAAELRYLQALEADPGNTYYLSKYASFLWNTGGQDANSFPIEELDNLQL

SEQ ID NO: 243122 - protein, 61 aa, Glycine max
  Clone ID: PAT_MRT3847_61568C.1.pep
DCFTSQCDSSWPIIYLSTRRHRLTGYIIVHRLNIWKCVEPHIGSTPSPETPEQEDFAIQQA

SEQ ID NO: 243123 - protein, 98 aa, Glycine max
  Clone ID: PAT_MRT3847_61569C.1.pep
MASAVRVALRSFGSRARSFVKSSTTPFVFTSSSASCISRASRVLSVMISVDSLMPLHSAVANARLTSNIAFDSTCWSSLSRGTTSLLVILLVLSYFAQ

SEQ ID NO: 243124 - protein, 55 aa, Glycine max
  Clone ID: PAT_MRT3847_6156C.1.pep
GPVIDQIINSSTSSVRHLCRGIVYNMEQAHLPLSRGTHQFQNPNSNPSKLVLEKR

SEQ ID NO: 243125 - protein, 78 aa, Glycine max
  Clone ID: PAT_MRT3847_61570C.1.pep
SLDMRTLANQLPMETIPTSPYVLTYVKEQRLLKTLASITLSYAGIHVRSTSYNVTVMNALPWIVLMRRPEPPDATATS

SEQ ID NO: 243126 - protein, 89 aa, Glycine max
  Clone ID: PAT_MRT3847_61571C.1.pep
YYQFSESGGSITMASAVRVALRSFGNRSRSFVKSSTTPFVFTSSSASCISRASRYSVIQLLYFELFLSICIAFLGLTLWISCLIGFCRL

SEQ ID NO: 243127 - protein, 128 aa, Glycine max
  unsure (1)..(128): unsure at all Xaa locations
  Clone ID: PAT_MRT3847_61572C.1.pep
MASNSKSETFLQRNGYDFLLGSIAAFYVLTVPYTKVEESFNVQAMHDILYHRLNLDNVXLLVSLIAAPFVLTANLLHLPKFYALLIVWMALGCIILYTLRFFRHQIRNKFGHQVEAFFVILTATQFHF

SEQ ID NO: 243128 - protein, 55 aa, Glycine max
  Clone ID: PAT_MRT3847_61573C.1.pep
SFVKLPVILFLFQSPFSTQSKFLLVSSNPRSASNLVNGSILFWNILMGSFALQTI

SEQ ID NO: 243129 - protein, 232 aa, Glycine max
  unsure (1)..(232): unsure at all Xaa locations
  Clone ID: PAT_MRT3847_61574C.1.pep
SKSSIFLQRYGYDFLLGSIAAVYVITVPYTKVEESFNVQAMHDILHHRLNLDNYDHLEFPGVVPRTFLGALLVSIIASPFVLTASLLHLPKFYALLIVRMALGGIVLYTLRFFRHQIRNKFGHQVEAFFVILTATQFHFLIYCTRPLPNILALSLVNLAYGYWFEGRFYAALNSLIFATAVLRCDMLLLLCPIGLQLLLGXTKKISVWGALKHCTGMALFCIGLTIWXDSIM

SEQ ID NO: 243130 - protein, 80 aa, Glycine max
  Clone ID: PAT_MRT3847_61575C.1.pep
QRQDSLALLSRLWTPLRPVPLRCNALPWQCSLIPAGGCEAPLIVASVSLSRSYNAIAGKPSVIQFIPALWYHWAFAVFGP

SEQ ID NO: 243131 - protein, 49 aa, Glycine max
  unsure (1)..(49): unsure at all Xaa locations
  Clone ID: PAT_MRT3847_61576C.1.pep
LVATLASGVSLGTREXIMDEFVGTHPEHLSLILDTGSEINRIQCDPCNA

SEQ ID NO: 243132 - protein, 62 aa, Glycine max
  unsure (1)..(62): unsure at all Xaa locations
  Clone ID: PAT_MRT3847_61577C.1.pep
PSQSIFYXPQATPPSRQFQNPLRTTHIFLINLFTTSNNPYIHYQTNLILHFNSIILILPILS

SEQ ID NO: 243133 - protein, 41 aa, Glycine max
  Clone ID: PAT_MRT3847_61578C.1.pep
PQLGMGPAPPINPQFPSRIHYERIVRKNGGLVGPGSNGAAV

SEQ ID NO: 243134 - protein, 126 aa, Glycine max
  Clone ID: PAT_MRT3847_61579C.1.pep
TQAFYSARGIINSPIFSTLSSSSSEGMGGRWRTLSSSENRINTSSSSKPHFPSVYRCLCLSGATSEIPDPDPTGSGATALDPCVKIPAKAHDLYTSLNPKGIHAEKHTDADTSSSRPVLNYGALRS

SEQ ID NO: 243135 - protein, 54 aa, Glycine max
  Clone ID: PAT_MRT3847_6157C.1.pep
KGWSRRLNKRQDVSAFAYCIILHEKLARTSQRIFRSIWIAAMRIAYGGHLTLYN

SEQ ID NO: 243136 - protein, 114 aa, Glycine max
  unsure (1)..(114): unsure at all Xaa locations
  Clone ID: PAT_MRT3847_61580C.1.pep
MGSAGALRNIVRSLSVASSRALLPRISTNASMAPICFALPSPCKPPQRLLPLWSHFHSLTDTRFPKRRPSERPRRKRASLRPSGPYAWVQYTPGQPILXNKPNERSVKRRNEKK

SEQ ID NO: 243137 - protein, 37 aa, Glycine max
  Clone ID: PAT_MRT3847_61581C.1.pep
GSSSTKIDKLNCKRQRISGDKDSDRASSSYQYKIGSG

SEQ ID NO: 243138 - protein, 442 aa, Glycine max
  Clone ID: PAT_MRT3847_61582C.1.pep
MQTPKTRSGSSEVPQKVSPRAVRKLKPTTLDIDSASSLSQATKSSKERSPKVTDRRSPRSPVVERKRPSKISELESQISQLQNDLKKVKDQLILSESCKKQAQQEAEESKEQLLALSAKLEESQKQVLDLCSTGEARVLELQNIVEERDMACQSELESSKKQLSVESAALASATNEIQMLKAQLELVANCESVQSQHAESADIELLNLKQNLSETLSLVDALKNQVRDCKESEAQAQALVNETTVQLEAAKGTVEFLRADVARAVDGYNSVALELDQSKARVNSLEALVSKIEKDPINNKCIPSENVADDHKSEHQPEILKEGEDPNQLEAEVVSLKSEVEQLRSAIETAETKYQEEQIRSMVQIRNAYELVEQIKSESGKRECELEAELKKKKADIEELKANLMDKETELQGIVEENDNLNLKLEESMSSCPYLKLFVNCT

SEQ ID NO: 243139 - protein, 173 aa, Glycine max
  Clone ID: PAT_MRT3847_61583C.1.pep
MTGGHDRVKGSWSPQEDATLLKLVNEHGARNWSVISAGISGRSGKSCRLRWCNQLSPEVQHRPFTPAEDKMIIKAHAIHGNKWATISRLLPGRTDNAIKNHWNSTLRRRRAVESSSSSSASPPAKRHSSLFDTLHPFKKQCIEKENEEERVLSPVTTSLSLLEREPRLSTACH

SEQ ID NO: 243140 - protein, 44 aa, Glycine max
  Clone ID: PAT_MRT3847_61584C.1.pep
AVGRKFLLWVMNVRGFKYEIAGHCTHVCSNCFGYIHKKNEIWLR

SEQ ID NO: 243141 - protein, 73 aa, Glycine max
  Clone ID: PAT_MRT3847_61585C.1.pep
KGSDWPKIVYMATVHISGHVFKGFLYDHGADARNDVPSVSELQLGNNGSGKNNNRECSSAIGVPTSAYPASVC

SEQ ID NO: 243142 - protein, 99 aa, Glycine max
  unsure (1)..(99): unsure at all Xaa locations
  Clone ID: PAT_MRT3847_61586C.1.pep
XXHXRXXXXXXXXIXXDNXXXXXHXXXXLXNLLXXLXSXXXXXNXXXXLXVXXXXTXXXXXXXXXXXXXCXXXXXXXXXXXXVXXXXLXXXXXXXXXXX

SEQ ID NO: 243143 - protein, 64 aa, Glycine max
  Clone ID: PAT_MRT3847_61587C.1.pep
SLINERVKHKVYISSTRTHVTSWVFFSHPSQTNHIIPILLLDSIPLPVARPSSDSNANIVDMID

SEQ ID NO: 243144 - protein, 46 aa, Glycine max
  Clone ID: PAT_MRT3847_61588C.1.pep
EAKRVYRAFFYLFQKCGGKPKKTFKTCPKNLWKSISILRESLTYFF

SEQ ID NO: 243145 - protein, 144 aa, Glycine max
  Clone ID: PAT_MRT3847_61589C.1.pep
APFYHVALQSWSFAHMVIISLLITISCNKIWHTIPTALFYSQLAQTPLPEEIFYTPCVLVPQQYSISLLFYMSSVIHGSDKASLRSFYITKCSCLPCSVLCLACIFTICLCHANITVFDLFSETPKHDRKVRPGFPRRFRQGST

SEQ ID NO: 243146 - protein, 135 aa, Glycine max
  Clone ID: PAT_MRT3847_6158C.1.pep
GQGLMPASFKVRTVALDEDNHEEVLDPDFGESAIGRVAPVDSGLWWIILLRAYGKLTGDCSLQERADVQTGLKMILNLCLTDGFDMFPSLLVTDGSCMIDRRMGIHGHPLEIQALFYSALRCSREMLVATDGTSY

SEQ ID NO: 243147 - protein, 58 aa, Glycine max
  unsure (1)..(58): unsure at all Xaa locations
  Clone ID: PAT_MRT3847_61590C.1.pep
DIARGMNYLHECXPYPAIHCDWEPKNIVLDSGSQLXIAGFGSVRCSLILPDDAQLLQL

SEQ ID NO: 243148 - protein, 315 aa, Glycine max
  Clone ID: PAT_MRT3847_61591C.1.pep
MGSAVLSQTIPAVKVSRLFIYPIKSCRGISVSYAPLTPAGLRWDREWVVVNSQGRACTQRVDPKLALVEVELPNDALVEDFEPTSDSYMVLKAPGMKPLNICLSKQHEVTDAVTVWEWTGSAWDEGAEASQWFSDFLGKPCQLVRFNSASEVRQVDPDYVRGQHRTYFSDGYPFLLLSQESLDALNELLKERIPINRFRPNILVEGCDPYSEDLWTEIKISRFSFLGVKLCSRCKVPTINQETGIAGSEPTETLMKTRSGKVIRPNAKNKNKVYFGQNLVWNWMDSSVKGSGKTIKVGDPVYILGNVSSAEEAAA

SEQ ID NO: 243149 - protein, 60 aa, Glycine max
  Clone ID: PAT_MRT3847_61592C.1.pep
DFFFFLKSKKRRRYCVWFQYFCFSVFLGPFSITESLFDISPHFHTTHYSFFYIFLVDLLL

SEQ ID NO: 243150 - protein, 220 aa, Glycine max
  unsure (1)..(220): unsure at all Xaa locations
  Clone ID: PAT_MRT3847_61593C.1.pep
RWIHWYVQQRFVARNWQQPSVRLNNALIHMYASCGILHEAYQVFVKMPRKSTVSWTSMIMAFAKQGLGKEALDLFKTMLSDGVKVDGVRPDEITFIGVLCACSHAGFVDEGHQIFASMKHTWGISPSIEHYGCMVDLLSRAGLLDEARGLIETMPLNPNDAIWGALLGGCRIHRNSELASQVENKLVPELNGDQAAGYLVLLSNIYAXGQRWQDVITVRQ

SEQ ID NO: 243151 - protein, 81 aa, Glycine max
  unsure (1)..(81): unsure at all Xaa locations
  Clone ID: PAT_MRT3847_61594C.1.pep
FELNIPLISIIMLLQSIRITHHDEAYLHXXIXXLQSITQRSHFHLKAFTQSNXEEFHFFLTLPLEXVILVWKMPTKTYXNM

SEQ ID NO: 243152 - protein, 125 aa, Glycine max
  Clone ID: PAT_MRT3847_61595C.1.pep
RLREDDRRARTSQFIVSVNKYLEAINQKCNVGMRFKMRFEGDESPENDKRFSGTILGVEDISPHWVNSNWRSLKVQWDEPASFPRPDRVSSWEIEHILACVPTTSSQPAVIKNKRPRQASEVPDL

SEQ ID NO: 243153 - protein, 52 aa, Glycine max
  unsure (1)..(52): unsure at all Xaa locations
  Clone ID: PAT_MRT3847_61596C.1.pep
FSQLYLSLNXPNLSKTLFKHRNPINLLFLHLDPPTRFPLLISSNTLPILIIH

SEQ ID NO: 243154 - protein, 80 aa, Glycine max
  unsure (1)..(80): unsure at all Xaa locations
  Clone ID: PAT_MRT3847_61597C.1.pep
HYHPQTNGQAEVSNKEIKRVLENIVGSSRKDWPLKLDDAXWAYRMAFKXTPIGLAPLQLVYGKACHLSVELEHKAYWALK

SEQ ID NO: 243155 - protein, 80 aa, Glycine max
  Clone ID: PAT_MRT3847_61598C.1.pep
TLHVCLSNSISCKHAIVISNINHQQILKHLYIKTHMIKVFTYLVSISYIFLFISLIIFCQHQAPITLKCVSKFYKRRTMG

SEQ ID NO: 243156 - protein, 150 aa, Glycine max
  Clone ID: PAT_MRT3847_61599C.1.pep
MALQMTWQPSLLSQKRKTGTGPPLGLRNLGNSCYLNSVLQCLTYTPPLANFCLRLQHSSLCDSSGSSCPFCILEKQIARSLRLDLTHDAPSKIQSCIRIFAENFRCGRQEDAHEFLRYVIDACHSTCLPLKKLRRKGAEASGRGDVTGGR

SEQ ID NO: 243157 - protein, 71 aa, Glycine max
  Clone ID: PAT_MRT3847_6159C.1.pep
KKNRIGYKIPNLNIKIREHSLFFGHAGEQTMLKKDAIFPMVSSYHALYMVSYSHWIGNKHLRYLPLQKKPS

SEQ ID NO: 243158 - protein, 127 aa, Glycine max
  unsure (1)..(127): unsure at all Xaa locations
  Clone ID: PAT_MRT3847_615C.1.pep
MPLSIGGGAGAKNAILMNMPNAVLSMRRYLVGDLAFEVPKMTSAYIKCTVCFFIAFGSFXDDTIYCEAFTHKLVQFEEIHVKVVLKVSQEEFLTVRSTKARSASTLLADGGPYLFALVHDMFIVYNT

SEQ ID NO: 243159 - protein, 451 aa, Glycine max
  Clone ID: PAT_MRT3847_61600C.1.pep
MGIQHVLVLPFPAQGHVNPLMLLSKKLAEHGFKVTFVNTDFNHKRVLSATNEEGSAVRLISIPDGLGPEDDRNNVVNLCSESLSSTMTSALEKVIKDIDALDSASEKITGIVADVNMAWALELTDKLGIKGAVFCPASAAVLVLGENIPNLIQDGIINTEGFPIIKGKFQLSPEMPIMDTADIPWCSLGDPTMHKVIYNHASKIIRYSHLTDWWLGNTTSDLEPGAISLSPKILPIGPLIGSGDDIRSLGQFWEEDVSCLTWLDQQPPCSVIYVAFGSSTIFDPHQLKELALGLDLTNRPFLWVVREDASGSTKITYPDEFQGTCGKIVKWAPQQKVLSHPAIACFISHCGWNSTLEGVSNGVPFLCWPYYTDQLVDKAYICDMWKVGLGFDLDDKGLISRWEIKKKVDQILGDENIRGRSQKLKEMVLSNIAEGGQSYENFNKFVEWLKE

SEQ ID NO: 243160 - protein, 74 aa, Glycine max
  Clone ID: PAT_MRT3847_61601C.1.pep
QCPHTKGSLLAHFMYKFPIFKQFRCICCSGHILHKRNPLKPMVKKSLEVYIQLKYMSVEIASASNFDLVSYSKA

SEQ ID NO: 243161 - protein, 60 aa, Glycine max
  Clone ID: PAT_MRT3847_61602C.1.pep
SANLEGLRARMHTVSHWITVRPRTQLVVMDDGYKWWRYCKTTVKSRPSPRNYYMCSGEGC

SEQ ID NO: 243162 - protein, 44 aa, Glycine max
  Clone ID: PAT_MRT3847_61603C.1.pep
QVANMQKGWVILLASHDACFCMLMTCWVAIKVLELINVYRVLLQ

SEQ ID NO: 243163 - protein, 95 aa, Glycine max
  unsure (1)..(95): unsure at all Xaa locations
  Clone ID: PAT_MRT3847_61604C.1.pep
KNEKRTKRGKAPAATXGGXRXQXNKXHKXXXXXKXXRNPHKTGGKDRLLCXKXERXXGKGARAXRXQRNKTXRXQKRXXXXKEKREPXGXRXXPR

SEQ ID NO: 243164 - protein, 67 aa, Glycine max
  unsure (1)..(67): unsure at all Xaa locations
  Clone ID: PAT_MRT3847_61605C.1.pep
GFSLLLLXPFPLPFFPLSGPRVLGLPSXFLGFRXXFLXLXCSARSXFXXXFPXLSCXFSAXXXPPPP

SEQ ID NO: 243165 - protein, 85 aa, Glycine max
  unsure (1)..(85): unsure at all Xaa locations
  Clone ID: PAT_MRT3847_61606C.1.pep
NSRDCKPNLXTYSLLFNSLXRXLNXLXVXYVYLQAVRSLTKXMKASGXIPXXIVLXMIIXXXXKCLEXXEAIRVFREXGLGLMPA

SEQ ID NO: 243166 - protein, 68 aa, Glycine max
  Clone ID: PAT_MRT3847_61607C.1.pep
AAVLFFFFFFFFFFFFYFFFFFFFFFWGPTPIFSRGGEAQMHQKGKGGVKSQTNKGGEWVPAWAPPKV

SEQ ID NO: 243167 - protein, 83 aa, Glycine max
  Clone ID: PAT_MRT3847_61608C.1.pep
SWSYFGALFFLWNKFIFLYERVKIHIWIRPPALDLQRLSPDDQVTLERTPNIDLTVSGGARLIWLKGKYRRTACRRLQPLTFL

SEQ ID NO: 243168 - protein, 29 aa, Glycine max
  Clone ID: PAT_MRT3847_61609C.1.pep
LSNAQSANHVIIWSRSQLKKIQYEKLGFN

SEQ ID NO: 243169 - protein, 90 aa, Glycine max
  unsure (1)..(90): unsure at all Xaa locations
  Clone ID: PAT_MRT3847_6160C.1.pep
TNDRTPPSYSTNCADLHPDSQKILPQIQERILYFMDESQTLHQCIPLYDSSTSNVXFELYASHIVHELAEINTSIEQQKTFLHEPMSTFN

SEQ ID NO: 243170 - protein, 84 aa, Glycine max
  Clone ID: PAT_MRT3847_61610C.1.pep
AGKNPVDSRVRKFKKKKKKKKKRGERKKKKKKEKKKKKKKKKKKKKKKKKKKKEKKKKKKKKRGEAFFYKSYEGGGGWAFGWLV

SEQ ID NO: 243171 - protein, 100 aa, Glycine max
  Clone ID: PAT_MRT3847_61611C.1.pep
RCFVFSMGMYGYFSFSKQKICNCASILLGQKIITQPQDSRTNKDICFFLSQYRALKPVMCRGLSFYVSEEFTRKASSCFFISVMLSAPTKHCCLLYNLAD

SEQ ID NO: 243172 - protein, 36 aa, Glycine max
  Clone ID: PAT_MRT3847_61612C.1.pep
HLNFSKLPTFAKRYLIITEHLESPHQLGPIFFLYGN

SEQ ID NO: 243173 - protein, 54 aa, Glycine max
  Clone ID: PAT_MRT3847_61613C.1.pep
SFMGTRLLEAHSVAARVHARFGFGKKKAAAPKKVSRASAYTSTVCVVTSSTRPF

SEQ ID NO: 243174 - protein, 119 aa, Glycine max
  Clone ID: PAT_MRT3847_61614C.1.pep
KLSFFKKVFFLSFFVVLWRLEREKTEVLASQASIHCVQFFTSFVFCSFFLLFHHLHGSTVIHHKSCFFFFSFFFISYSIIFLMKSFQNLIFGLNFQFLKSSLISLLILLKNWYLFMFMS

SEQ ID NO: 243175 - protein, 42 aa, Glycine max
  unsure (1)..(42): unsure at all Xaa locations
  Clone ID: PAT_MRT3847_61615C.1.pep
XHXHRRHRXSLRGPALKLHXSXRTPXXILNFPXTRVNLGKGG

SEQ ID NO: 243176 - protein, 166 aa, Glycine max
  unsure (1)..(166): unsure at all Xaa locations
  Clone ID: PAT_MRT3847_61616C.1.pep
LFYFFYIFXQTGNTFRIISELGFKSTRSYTESTLGNNTRKLVARETTAKSNTLQELLNITGKNSTRLEHLHHLNTYQTRSFFTTLSPKERKKEKRGDDNYTALQTYSNIFGCYFLSKDPKKYLLLDLFPDSGDYDILLLLGIVFKLVLVIAINRLLATSFSLSYEA

SEQ ID NO: 243177 - protein, 84 aa, Glycine max
  Clone ID: PAT_MRT3847_61617C.1.pep
MLETNNHTNAWQVFKTGRWNKNIDVREFIQLNYSLYEGDDEFLEGPTKATETLWDQVMQLSKEERERGGMWDMDTKVASTITSH

SEQ ID NO: 243178 - protein, 42 aa, Glycine max
  Clone ID: PAT_MRT3847_61618C.1.pep
VYLQVNAECVTSAGAFLANYSRYLLCLRCGNTKEVNKNKNIN

SEQ ID NO: 243179 - protein, 66 aa, Glycine max
  Clone ID: PAT_MRT3847_61619C.1.pep
SIVSTTCAEKSRLHGLLNDSQAVLLCFFVSDYIPCLRWIDKLTTMATRLEKTFEALDGVICMKCDD

SEQ ID NO: 243180 - protein, 82 aa, Glycine max
  Clone ID: PAT_MRT3847_6161C.1.pep
VPPVPVRAPFAGWFRQWLCLYGVFLLPLCRPWRRHERVFSLSLIPLPSGGAFGLCCFTLSFASLPWSVLFLSGSFQSRCRAS

SEQ ID NO: 243181 - protein, 70 aa, Glycine max
  Clone ID: PAT_MRT3847_61620C.1.pep
YYTKENCIWASINGTAPTSGRRISGMGIIEGKSIRHVFSTRNAPRGGVLCHLCFGGKEGPCMFLSTWYWY

SEQ ID NO: 243182 - protein, 189 aa, Glycine max
  unsure (1)..(189): unsure at all Xaa locations
  Clone ID: PAT_MRT3847_61621C.1.pep
MRTDDGVIMHQGRYARDVLKKFKMVDCNSANTPIATGVNLVKDPNEEEVDATLYRQMVGSLRYLCCTRPDLLYVVGLISRYMENPKLSHFRAAKRIMRYVKGTLDYGILFSSAAKKCNVLGYSDSDWCGDKSDRKSKVGYVFFYGDAPISWSSKKEQVVALSXCEAEYIAAAMAACQAQWLDNFLVNRR

SEQ ID NO: 243183 - protein, 49 aa, Glycine max
  Clone ID: PAT_MRT3847_61622C.1.pep
PVRLKITDPGTAYHPMMDDDCSTSVDRRSFNACIDDQNYTSACSSNMDC

SEQ ID NO: 243184 - protein, 76 aa, Glycine max
  Clone ID: PAT_MRT3847_61623C.1.pep
MAAKIFAILALLALSASVATATIIPQCSQHYLSPVTAARFEYPTIQSYRLQEAIAASILRSLALTVQQPYALLQHH

SEQ ID NO: 243185 - protein, 61 aa, Glycine max
  Clone ID: PAT_MRT3847_61624C.1.pep
ETSKTELRSIYSQLYQDGMCMDRRSGASHRSAFAAPGGYAHLNAQLMSMSDDLLLCDLDTS

SEQ ID NO: 243186 - protein, 53 aa, Glycine max
  Clone ID: PAT_MRT3847_61625C.1.pep
HDLTHASNATIRHHEGYSSSQASLSHCGYSKRFMRDHTRGKAAYTECTTLEPH

SEQ ID NO: 243187 - protein, 67 aa, Glycine max
  Clone ID: PAT_MRT3847_61626C.1.pep
ISRSLVTRSENVTQHLRFVAFSLPRSPLLPVSTNHTSCHVILANERSPRSILASFPSLPAYQIPRAE

SEQ ID NO: 243188 - protein, 155 aa, Glycine max
  Clone ID: PAT_MRT3847_61627C.1.pep
MADLKQLMDNEVLMAFTSYATIILAKMMFLSSATAFQRLTNKVFANPEDCAGFGKGENAKKFLRTDEKVERVRRAHLNDLENIVPFLGIGLLYSLSGPDLSTALIHFRIFVGARIYHTIAYLTPLPQPNRGLAFFVGYGVTLSMAYRLLRSRLYL

SEQ ID NO: 243189 - protein, 163 aa, Glycine max
  unsure (1)..(163): unsure at all Xaa locations
  Clone ID: PAT_MRT3847_61628C.1.pep
MSSSKGQFEQGYQPPVQQQSSIPGKESELDPQPEYDHLPTPDGGKELYKAAGKLKGKKAIITGGDSGIGRASAILYAMEGADSFIAYLPEEEEDAQHTKKLVEANGAKCYTFATDLTDRAXCKKVVDEAIKQMGGIDILFNNAAYQNMVEDIKDLDEDQWVHT

SEQ ID NO: 243190 - protein, 47 aa, Glycine max
  Clone ID: PAT_MRT3847_61629C.1.pep
FYSIFSYLYYPNYTLWFSSITFMESPIPLFSVLSILDVVKRINVLIY

SEQ ID NO: 243191 - protein, 89 aa, Glycine max
  Clone ID: PAT_MRT3847_6162C.1.pep
LSILFTSYFFYLFFANNLIVGIVNGGPFEPKCSYLKLNLSTNWTETAYSFRICQKKLVPIAFLFLYVLLLIRMAAPLACVVGSGSSIQS

SEQ ID NO: 243192 - protein, 60 aa, Glycine max
  Clone ID: PAT_MRT3847_61630C.1.pep
VNLIPRSHFTFFFFLKKMWNYLASSSNTHTHTHTKQPHHVILSITHRFKSPLTKTNNINN

SEQ ID NO: 243193 - protein, 58 aa, Glycine max
  Clone ID: PAT_MRT3847_61631C.1.pep
SSKTQKQKIKQEKWKKSSQSGSFCFRACPKRTPSKKHSVAFYNFQNDAQSCFLEMTVR

SEQ ID NO: 243194 - protein, 65 aa, Glycine max
  Clone ID: PAT_MRT3847_61632C.1.pep
FKGIHKLPPESVTKAKTQPILHPSILKKKKVLYLNFGRSGITFRQTPGLFILPMIALHPRLIKKL

SEQ ID NO: 243195 - protein, 47 aa, Glycine max
  unsure (1)..(47): unsure at all Xaa locations
  Clone ID: PAT_MRT3847_61633C.1.pep
XSYEENFDHVIHRVSYPSPIKYQDKREQIICDLMSSHXHPTCPVSFC

SEQ ID NO: 243196 - protein, 164 aa, Glycine max
  Clone ID: PAT_MRT3847_61634C.1.pep
MPAGHGLRSRTRDSFSRPFRKKGTIALTTYLRTYHVGDYVDVKVNGAVHKGMPHKFYHGRTGRVWNVTKRAVGVEVNKQVGNRIIRKRIHVRVEHVMPSRCTEEFRLRKIKNDQLKAEAKAKGEKISTKRQPQGPKPGFMVEGATLETVTPIPYDVVNDLKGGY

SEQ ID NO: 243197 - protein, 171 aa, Glycine max
  Clone ID: PAT_MRT3847_61635C.1.pep
LKKHKFLSTMESENGVAVEEEKRVIGVTTKVENVKKEVENDCNGAEIMTKNEVSKPTVVAKRPISAGDKVAVEASKTYANKNSKGATTKETVGRASVASKNNKYAKDKPILKGPSSISQKQRPSLSQSLSFPAKSAGEDAMQKSIDGYLVKPKVRNNQGNGIRGEAPIRHL

SEQ ID NO: 243198 - protein, 128 aa, Glycine max
  Clone ID: PAT_MRT3847_61636C.1.pep
DKHKLGACCESQSLGVREQREKKKERYRIGRRRSSGFHLFPSFETVVRLLALQVGLGFNLKDLDLHFETWRVFVSGQIATSIGFLHSKKCLIGEFSSLEIFFGFPLLIVLSVLLPFKDQHRVRDATFF

SEQ ID NO: 243199 - protein, 85 aa, Glycine max
  Clone ID: PAT_MRT3847_61637C.1.pep
PGLEFGSVLELNVFFEQALNLDSRDFFRSKWVMAEAELSFKEEKFRTQVADSRRGERKKKCIDCLTSGAIMMQPSLLYGGSVYSY

SEQ ID NO: 243200 - protein, 78 aa, Glycine max
  Clone ID: PAT_MRT3847_61638C.1.pep
GNGRPGPSDPVGSWRLNPPRSSGRKNIEFLTLFSVLLIAGFSVTGTALLSVLQIYRMGLNYSRGVHTGHFTHVRPDSL

SEQ ID NO: 243201 - protein, 401 aa, Glycine max
  unsure (1)..(401): unsure at all Xaa locations
  Clone ID: PAT_MRT3847_61639C.1.pep
TRPIPKSGLTRAVLDRIHRHWSNCELVRLKFHEFLAQNMKLAHQIVEHRTRGLVIWRSGSYMWVYRGKNYQFPVESDATSMEKSEAVWWKGENMTPEEAEFNRMLDGFGPRFVEWWGTGILPVDADSLPPMVPGYKTPLRLLPAGMRPQLTNDELTNMRKLAKSLPCHFAFGRNRNLQGLASAILRLWEKSLVAKIGVKRGIVNTNNELMAQELKALTGGTLLLRNKYYIVIYRGKDFVPTSVAAVIAERQELTKQVQDVEEKVRCKALDSTPSGEDESTAQAGSLAEFYVAQACWGRDISTEERERMMQEVAKAKNAKLVKKIECKLAVAQAKRLRAEKLLAKIEASLLPVGPDYXXGNITDEETCYVSVQVGLRMKAYLPLGIRGVFDGVIENMHLHWE

SEQ ID NO: 243202 - protein, 137 aa, Glycine max
  unsure (1)..(137): unsure at all Xaa locations
  Clone ID: PAT_MRT3847_6163C.1.pep
VPSSYTLGATELKAVTKYKYSDLKAATKNFSEKNKLGEGGFXAVYKGTMKNGKDVAVKKLLSGKSSKIDDEFESEVTLISNVHHKNLVRLLGCCSKGQERILVYEYMANNSLDKFLFGNXKGSXHWRXTYDIIFGHG

SEQ ID NO: 243203 - protein, 40 aa, Glycine max
  Clone ID: PAT_MRT3847_61640C.1.pep
CSIKIQSLFLSLVIARGQTRHLSFFRSRAEVKMQAWSDGW

SEQ ID NO: 243204 - protein, 110 aa, Glycine max
  unsure (1)..(110): unsure at all Xaa locations
  Clone ID: PAT_MRT3847_61641C.1.pep
LPSSDKTPISTTHTSNREAHHPAVQLPHTSILHMIINPTLDLDLLEIISTTLPAVNLSLSDISSRIPTXTTPDAPVMKHPILRPSDCYKILSXTIRTLPNGKVDRIYLPS

SEQ ID NO: 243205 - protein, 66 aa, Glycine max
  Clone ID: PAT_MRT3847_61642C.1.pep
QKRVGRLEKLKVDECTLYPRKNGLRLTGNNDTLIQRIKKHLEVKKYPPSSSVLNCKELEFSASGPP

SEQ ID NO: 243206 - protein, 201 aa, Glycine max
  Clone ID: PAT_MRT3847_61643C.1.pep
ATSEKKGLEDYRPEDISLSLLRMISYNIAQIAYLNALRFGLKRIFFGGFFIRGHAYTMDAISFAIHFWSNGAAQAMFLRHEGFLGALGAFMSYEKHGLDDLMVHQLVERFPMGAPYTGGKIHGPPLRDLNEKISWMEKFLQKGTEITAPVPMTPLAGTTGLGGFEVPLSKGSTLRSDASALNVGVLHLLPTLEVLPLLADP

SEQ ID NO: 243207 - protein, 325 aa, Glycine max
  Clone ID: PAT_MRT3847_61644C.1.pep
MEFALNYLNATVTGVLSLTLFFLFLYNPFKIALGKKDAPTVAGAWPILGHLPLLSGSETPHRVLGALADKYGPIFTIKISVKKALVISNWEIAKECFTKNDIVVSSRPKLLAIELMCYNQAMFGFAPYGPYWREQRKITTLEILTSRRVEQLENVRVSEVQSSIKELFNVWSSNKNNESGYALLELKQWFSQLTYNMVLRMVVGKRLFGARTMDDEKAQRCVKAVKEFMRLMGVFTVADAIPFLRWFDFGGYEKAMKETAKDLDEIFGEWLEEHKQNRAFGENNVDGIQDFVDVMLSLFDGKTIHGIDADTIIKSNLLACILDLL

SEQ ID NO: 243208 - protein, 38 aa, Glycine max
  Clone ID: PAT_MRT3847_61645C.1.pep
SIFLEVESSDTIDNVMAKIHDKEGIPSDHQMLIFAFMH

SEQ ID NO: 243209 - protein, 110 aa, Glycine max
  unsure (1)..(110): unsure at all Xaa locations
  Clone ID: PAT_MRT3847_61646C.1.pep
GGTNRXDELRLSLLVDGFSKVSVDKWMNITEMGYVIASRYNVILVSLSRQQNMTFFPLRSQPPPVSSVHRIIYVGHVFGNYFVQVYLKDRCPLPPLALLWSRNSYPQVKQ

SEQ ID NO: 243210 - protein, 42 aa, Glycine max
  unsure (1)..(42): unsure at all Xaa locations
  Clone ID: PAT_MRT3847_61647C.1.pep
AAFFFLCGCYDYVHGKNNYFLYLFLQTXTFSIVGFGYVGTIV

SEQ ID NO: 243211 - protein, 65 aa, Glycine max
  Clone ID: PAT_MRT3847_61648C.1.pep
MEWEDECRTPRLVQNQIPAVFICPPPPPRKKPVAGKRRPPPKEGYFQPPDLDSLFSVPARKEACV

SEQ ID NO: 243212 - protein, 53 aa, Glycine max
  unsure (1)..(53): unsure at all Xaa locations
  Clone ID: PAT_MRT3847_61649C.1.pep
RLRVXEDAEERLCSQLGELEGRAVYHARDYHARIVYLMDQLSLAQSLLLKTGA

SEQ ID NO: 243213 - protein, 320 aa, Glycine max
  Clone ID: PAT_MRT3847_6164C.1.pep
MEKKEMAVKTEDAIGSSSFPCYNSNLYPFSNAFDFSEVDKSSLGFMELLGVQDYSPLPELPQLSTVSVQPHHSTVKVPSDNGKECSEVLNHQPATPNSSSISSASSDAVNDEQNKTLLDQAEEDDDEEEGQQKTKKQLKPKKTNQKRQREPRFAFMTKSEVDHLEDGYRWRKYGQKAVKNSPFPRSYYRCTSVSCNVKKRVERSFTDPSVVVTTYEGQHTHPSPVMPRSGVSAGYANNFGSVLPPGNYLSQYQHYHHQQQQQHLVNTLSSLGFPYNDSSSPKNAVFTQERRLCSNHGTNAFLRDHGLLQDVVPSHMLKEE

SEQ ID NO: 243214 - protein, 83 aa, Glycine max
  Clone ID: PAT_MRT3847_61650C.1.pep
PEIKHVFSDRDGDGGDRFVGSVSKANDVPTCCRDGSGDWMHHLRAHKRKTFLDSLKLLFSIIGHSSLMEKRVESALKFDVCVH

SEQ ID NO: 243215 - protein, 69 aa, Glycine max
  Clone ID: PAT_MRT3847_61651C.1.pep
SQTNGLKWIIVTMAVHGMDGLSILQWTMELLGFGLLLRVFNISPRSFLVLWIVSGKDPEIMMLLADIKL

SEQ ID NO: 243216 - protein, 104 aa, Glycine max
  Clone ID: PAT_MRT3847_61652C.1.pep
EFRCSVISFTILFSLALAGESHVHASLPEEDYWEGVRPNTPIPTALRELLKPLPASDEINDHPKQVDDTQYPEAFSCDKDVTADSPEEKQCSTRPYAQHYGVYT

SEQ ID NO: 243217 - protein, 65 aa, Glycine max
  Clone ID: PAT_MRT3847_61653C.1.pep
GKPPPSLKKTSCYVLHPKKLLMCVIKCSSLLKFIDLKCTFVITLVCTKYHILLMLQPLAPFIVLI

SEQ ID NO: 243218 - protein, 104 aa, Glycine max
  Clone ID: PAT_MRT3847_61654C.1.pep
LNYSEISQYLKVMADSSRLEILDLLSCGELCACDLLQHFSFSQPTLSHHMKVLKDNNLITSRKDGNKNLYKLNHAVLDDITSRLTLLSSSTVPCICETVEKGEC

SEQ ID NO: 243219 - protein, 77 aa, Glycine max
  Clone ID: PAT_MRT3847_61655C.1.pep
DTPPCFTTEDISFFNASTAEPFIGYHSFFLCQCALLLGAIPLCFFSYNYNRAFGMTSYAGITVVCVRDRDYGSAGFL

SEQ ID NO: 243220 - protein, 99 aa, Glycine max
  Clone ID: PAT_MRT3847_61656C.1.pep
NYTTTIVYRDIKWYCPIKVVFACLIFFSNLVGELTLLQQAVQRPLLKTFSLFSFFMQWLKWWWVFSSQNLGTKTEEKNGIFGFVELREADAFWDQTICV

SEQ ID NO: 243221 - protein, 52 aa, Glycine max
  unsure (1)..(52): unsure at all Xaa locations
  Clone ID: PAT_MRT3847_61657C.1.pep
VXAGXXXXQXSAPXPXGGVXSRTXRXXPKYXXRKSEKCPVATKTEASIFHTT

SEQ ID NO: 243222 - protein, 42 aa, Glycine max
  Clone ID: PAT_MRT3847_61658C.1.pep
LKSNDPVGFNIDDVLASGFIGHVVAYYILSNTSNGYDPAFFG

SEQ ID NO: 243223 - protein, 70 aa, Glycine max
  Clone ID: PAT_MRT3847_61659C.1.pep
MAALRWTNLAAERGSPSQDLRIDGVTRIKRPHCTLFSHNLLQDILESMGDYHDGLKVAGGYDSMMPKATI

SEQ ID NO: 243224 - protein, 150 aa, Glycine max
  Clone ID: PAT_MRT3847_6165C.1.pep
TKEDILSLPCFQNQEIIAIKAPKASCIEVPDPDEELGFRQRQYKMIVRSAIGPINLYLLSKDDSKFEDDSAKRMKLMDPSWNSDPIRKRGVGLLESQHDEKNPSEHFSLQGSQAFGIQEITPTDFEMEDDYWFQSDPGVSQTELWGSNIF

SEQ ID NO: 243225 - protein, 165 aa, Glycine max
  unsure (1)..(165): unsure at all Xaa locations
  Clone ID: PAT_MRT3847_61660C.1.pep
RRKHTEPGRNTRNDTRDRQRERERESRQNRKAEENGKKKHVKKKGERAEGEEKHGVQEPGYKRRHENREKRTYGQRAEEQDKRAXEEERHDNEKEKNKTTGRAENNKNRTRTKNKVKRKEGTKKQRSYAIGIPRSGHKVCKKKSRNYAKQEKERYQRNNKGGKNQ

SEQ ID NO: 243226 - protein, 110 aa, Glycine max
  unsure (1)..(110): unsure at all Xaa locations
  Clone ID: PAT_MRT3847_61661C.1.pep
MGTSLYRNSDIYIPLANTTIMASFAIKQSAFTGQTALKQIXDVVRKTDGAXKGRTNMRRTIQSAAQSIWYGPDRPKYLGPFSEQIPSYMTGEFPGDYAWDTAGLSADPET

SEQ ID NO: 243227 - protein, 166 aa, Glycine max
  Clone ID: PAT_MRT3847_61662C.1.pep
MVNLSQQKRLAAAVAGVGQRKIWLDPQEAAEIGQANSRSGVRKLLKDGHIIIKPTTIHSRARTRELHAAKRLGRHTGTGKRKGTAEARMPTKVQWLRRMRVLRRLLKKYREGGKIDKHLYHTLYLEAKGNRFKNKRVLMEHIHKAKSEKLRTKNLQEQAEARRVKN

SEQ ID NO: 243228 - protein, 133 aa, Glycine max
  unsure (1)..(133): unsure at all Xaa locations
  Clone ID: PAT_MRT3847_61663C.1.pep
TVKSAPQSIWYGPDRPKYLGPFSEQIPSYLTGEFPGDYGWDTAGLSADPETLCRNRELEGVTNKWARLGSPWRGLRRNAGKNGGKIGEAGGGRRCTRSITRGLDYLGXPNLMHAQAXCIWAAQDVLMGLLRYR

SEQ ID NO: 243229 - protein, 103 aa, Glycine max
  Clone ID: PAT_MRT3847_61664C.1.pep
GDTMHRIQLEYPNEVLTCISGYYGPIAKDEQHVIMKSLTFNTSRGKYGPFGEEVGKFFTSTTTEGKVVGFHGRSSLYLDAIGVHMQHWLGNQKTSRSSLFKLF

SEQ ID NO: 243230 - protein, 175 aa, Glycine max
  Clone ID: PAT_MRT3847_61665C.1.pep
ARGWARVEGCGVSCINVYEDAAVLKLSGDKILSSRLIIDAMGNFSPVVKQIRGGRKPDGVCLVVGTCARGFETNSTSDVIFSSSSIKKVGDSKAQLFWEAFPAGSGPLDRTTYLFTYVEPQPGSPKLEELLEAYWDLMPEYQASFLFFIGFSDGSFFHFFILEDISSPLSVLSFL

SEQ ID NO: 243231 - protein, 63 aa, Glycine max
  Clone ID: PAT_MRT3847_61666C.1.pep
SPLAAAKTSCMKIIPLSENARRASVLTESYPSSVQRDSLSFTTRRPLDRDTSSTSDVIFFRFP

SEQ ID NO: 243232 - protein, 70 aa, Glycine max
  Clone ID: PAT_MRT3847_61667C.1.pep
KSWVRGLSFSPPQGRDVMVPSPLRVEITRNGVKVSRVGMQLSGCYVKQLLNLDIIARLHRERSSKVFFLQ

SEQ ID NO: 243233 - protein, 196 aa, Glycine max
  Clone ID: PAT_MRT3847_61668C.1.pep
MISEKLKHPLTGLLKFVLWLLSTWFGTLIFCGMGCFSTQFPFIHTYPDLPLQKRQQIMRSWSLSYLRHFRMLFRTIKLLTLLIFFTQIDESEDNVAWKAIGYCGPDPEFKARLKSHFLDGTSKGGQEDKEDEDAEEVIGPLYKGLVHLNYPRDITADALKRLGFPVSVIRQKHKAAANLSSPSLVIQCDAVVVGSG

SEQ ID NO: 243234 - protein, 97 aa, Glycine max
  Clone ID: PAT_MRT3847_61669C.1.pep
GNWWHGLASNSWWAFEQHGKQCAYLMPGFYKDTSVHWSLVWVHCSWRDINTSRIIGCCCQGIIGLMHYVCQNLVSFMEPSFFTDQDSTPFCRLLAAV

SEQ ID NO: 243235 - protein, 41 aa, Glycine max
  Clone ID: PAT_MRT3847_6166C.1.pep
IYLYSTSHMLSPSAIASIESSVPDLLASLRLCGSLVVTPHA

SEQ ID NO: 243236 - protein, 167 aa, Glycine max
  Clone ID: PAT_MRT3847_61670C.1.pep
MNVIDLSNNILSGSVPLEIYMLTGLQSLNLSHNQLLGTIPQEIGNLKQLEAIDLSRNQFSGEIPVSMAVLHYLSALNLSLNNFVGEIPTGTQLGSTNLSYIGNPHLCGAPLTKICPQDEKSNNTKHAGEEDDDDKSELYSWFYMGLGIGFAVGFLGVLGAIFFNRRC

SEQ ID NO: 243237 - protein, 57 aa, Glycine max
  unsure (1)..(57): unsure at all Xaa locations
  Clone ID: PAT_MRT3847_61671C.1.pep
INXXCMMXXFTSERVMIHKHVLILNISIHFFVFLSFSSYHVTNSIIPIFFSYFYLFF

SEQ ID NO: 243238 - protein, 161 aa, Glycine max
  Clone ID: PAT_MRT3847_61672C.1.pep
MKKLCPNLTREDGLETVLEVPIPEEIFTIKSGTSRAWHNMKSWMKPNVESSRSSSLFGGQNTDIQLLLGVVGAPLIPLPVTSHNQPITIKSHNIEASMAKYIVKQYVAAVGGESGLNSVESMYAMGEVRVGSEFSEGEECVSSMKTKKVQMKEEVGGFVVW

SEQ ID NO: 243239 - protein, 131 aa, Glycine max
  unsure (1)..(131): unsure at all Xaa locations
  Clone ID: PAT_MRT3847_61673C.1.pep
LLITKSTLAEGGAFKGSLGDLKIPQFKIALPKIPPVVTLLRIAPIVNXLTQATFRNRVDLPLTHRFKGIIKMVATSXLPDNTCIALARAMNTSFRWRPISDINTLCSXTLXLWNPACTKTMTISFNPNLRF

SEQ ID NO: 243240 - protein, 29 aa, Glycine max
  Clone ID: PAT_MRT3847_61674C.1.pep
IYIYLRLECIGSSLIHLYYYSLANFIYEF

SEQ ID NO: 243241 - protein, 138 aa, Glycine max
  Clone ID: PAT_MRT3847_61675C.1.pep
MDPFIHKLRRHLLAWFHRSRSGAVFFVRRISYKDVRRATDGFHRVLYSNSEVSAYAAKFGDGGGACLVREVKGFDEGNDDFYRHVQFLGRLRHRHLLSLRGFSVGRNHKRLLIFDNIKNGSLKDHLNGKFRKPNKNNG

SEQ ID NO: 243242 - protein, 111 aa, Glycine max
  Clone ID: PAT_MRT3847_61676C.1.pep
NLLVPQKVKLANPHFVLEGFQRLPFLWTQETCNLEKVKLGQGPQLISVTPQQEHPILYFHKQNLLPLDLLLYPKQGQILYPQVLEKKNPQGDPPDGVGMNPFFYAQQMYVF

SEQ ID NO: 243243 - protein, 49 aa, Glycine max
  unsure (1)..(49): unsure at all Xaa locations
  Clone ID: PAT_MRT3847_61677C.1.pep
PVLPPIFYMFGFYVQAIVTGKGPLXNVADHLADPVNNNAWAYYTNIVSG

SEQ ID NO: 243244 - protein, 90 aa, Glycine max
  Clone ID: PAT_MRT3847_61678C.1.pep
GSGGVDAYRGNSWDEGGDHTDKYRGGGRANLNIRATRHAIGVGENNRYKTPKQEDRPTPPKSNKKTHCGIVKIKDRCLIYKGKYVWGSGG

SEQ ID NO: 243245 - protein, 98 aa, Glycine max
  Clone ID: PAT_MRT3847_61679C.1.pep
DPTKVDMSRAYLARSAAWTIVAHGLAMRAIVQLSYAIAVPEPLSAFVDTYSPVNTPDEVILYIVQERFDCKTDMISIFLDLSRDGNGKFLKTAAYEHF

SEQ ID NO: 243246 - protein, 60 aa, Glycine max
  Clone ID: PAT_MRT3847_6167C.1.pep
IFQKKKPKDVRNYIKKIINCYILEVQRFLHSQREKDENETSASVFQTGVFARKTNSLICT

SEQ ID NO: 243247 - protein, 77 aa, Glycine max
  Clone ID: PAT_MRT3847_61680C.1.pep
NIRVVMYFNCKQSQNKTKLEVASNLISKKQILCLCKSPSSISNFCSLPMMIINYSTLYPSKFRWINSAAFINKFMGP

SEQ ID NO: 243248 - protein, 44 aa, Glycine max
  Clone ID: PAT_MRT3847_61681C.1.pep
LDSSLSLLSEEEGEDGEKRKKKKKEKKGSKEKTEEKTEGDYYYY

SEQ ID NO: 243249 - protein, 84 aa, Glycine max
  Clone ID: PAT_MRT3847_61682C.1.pep
REKENPAKKDSKKDLLFKAFPFKKNSKDDENGKKKNQKKKKDPIAPKGAMSGFLFFFNLKKEILKKTNPEISFTGCGKSPWKEL

SEQ ID NO: 243250 - protein, 71 aa, Glycine max
  Clone ID: PAT_MRT3847_61683C.1.pep
ISFFQLIVQLLKLKYELPNTTTFAFDSKVISSKTCCNSLLMHHFNERWVKNPFFHNSFVTHLSFHNFLFNM

SEQ ID NO: 243251 - protein, 62 aa, Glycine max
  unsure (1)..(62): unsure at all Xaa locations
  Clone ID: PAT_MRT3847_61684C.1.pep
SRAQIAPKPGPYLXXNKXFIFKFFLVQGPMIFNRXRYWHLDITHPLVHWRQSECLXXGVPAS

SEQ ID NO: 243252 - protein, 212 aa, Glycine max
  unsure (1)..(212): unsure at all Xaa locations
  Clone ID: PAT_MRT3847_61685C.1.pep
TVVLSTQHDPDVSLEQIQADVKEQVIKAVIPAEYLDDQTKYFINPTGRFVIGGPQGDAGLTGRKIIVDTYGGAAHHGGGAFSGKDATKVDRSASYAARYIAKNLVAAGYAKKLEIQVAYAIGVAKPVSISIDDFGTGTKSEEEMIAAVRQVFDLRPAXIIKMLDLQRPIYKQTAAYGHFGRTDIDLPWEKLXQVAGLKIGLITNEKRGGGHL

SEQ ID NO: 243253 - protein, 70 aa, Glycine max
  unsure (1)..(70): unsure at all Xaa locations
  Clone ID: PAT_MRT3847_61686C.1.pep
NRDSGSYPGLPGXYVLHTLSAPVKGLPQGDFSPYEVDEYGGVFQDKIVADKAVSVKKHHWTWVSADSMHT

SEQ ID NO: 243254 - protein, 242 aa, Glycine max
  unsure (1)..(242): unsure at all Xaa locations
  Clone ID: PAT_MRT3847_61687C.1.pep
FFILSLRRCNFALLPKSSSKEFMDTQRLVTHAFMSHKTGLRAKHLGLHKAICVLMGWDTVVPQDTVTWVPQVLPQAEALAQKEDLILWPPIVIIHNISMSDDNPXTGRXVSMETIEAFLRGKGXVRGRIKLCLGKPADQSVVLVKFLGTFGGLGDAERLHKYLSDNNHGRAEYERVKSEGIKSCNISETDEGDKVENILYGYVGIAEDLDKLDFNSKKWSMVKSRKEIDDLDKAPVKTDEKR

SEQ ID NO: 243255 - protein, 69 aa, Glycine max
  Clone ID: PAT_MRT3847_61688C.1.pep
TILNIFYQLVHFNKLLFQTEFFFVITTAGLALSVWRVNLGCPPPRPCVFIVYVMRSVVCKKNCGPWLVP

SEQ ID NO: 243256 - protein, 265 aa, Glycine max
  Clone ID: PAT_MRT3847_61689C.1.pep
MVHENFLMFLKKLNLNLYVQRRYQDQGKAGSLYCIVCGRSSSKEFMDTQRLVTHAFMSHKTGLRAKHLGLHKAICVLMGWDTVVPQDTVTWVPQVLPQAEALAQKEDLILWPPIVIIHNISMSDDNPQNWKVVSMETIERLLEGKGGVRGRIKLCLGKPADQSIVLVKFLGTFGGLGDAERLHKYLSDNNCSRAEYERVKSEGIKSCNTGETDEGDKVENILYGYVGIAEDLDKLDFNSKKWSMVKSRKEIDDLDKAPVKTDEKR

SEQ ID NO: 243257 - protein, 112 aa, Glycine max
  unsure (1)..(112): unsure at all Xaa locations
  Clone ID: PAT_MRT3847_6168C.1.pep
GCHPKSAPDGETKLHSQNGNYRIPGTPKHNSPVTDXTRDMLQARPENRPDTTQAWQRXNEQLPINXQKSRPDRPPELPTSNDHESVSMPSNRTPAKPTRNPPPPPASGEPKT

SEQ ID NO: 243258 - protein, 106 aa, Glycine max
  Clone ID: PAT_MRT3847_61690C.1.pep
MQFSSIYANSDAEVFRYKGDEIKSIYGCIMCFQQIPKNILLEVLGPSKVFNEVIKKIINSTVAEYVEKECLIVSKDLRVEQSFEDLETTFEEGEKFSFDVVLELQK

SEQ ID NO: 243259 - protein, 44 aa, Glycine max
  Clone ID: PAT_MRT3847_61691C.1.pep
SNSIYFYLECTQVAVRNFWVKPWVRPRVCVDECPHKYGPINQWG

SEQ ID NO: 243260 - protein, 96 aa, Glycine max
  unsure (1)..(96): unsure at all Xaa locations
  Clone ID: PAT_MRT3847_61692C.1.pep
AFFMRSQVKFXRRREGKTYYPPTIRLIHQDKNIYNTPQYRFVDRSINMDIVAQIISASIAGDLDVAASYAHELAHYGLDSWLTNYAADHCTGLLLA

SEQ ID NO: 243261 - protein, 175 aa, Glycine max
  Clone ID: PAT_MRT3847_61693C.1.pep
NLENLPKRLKSSIEVPKTSRNAKSRKNSKSASTSNDEDDRSLSLQVQRNNSCFSQSDSNAYLEPNGGASKDPAPPNLDRKSRATTSAAADPQSLYARKRRERINERLRILQNLVPNGTKVDISTMLEEAVQYVKFLQLQIKLLSSEDLWMYAPIVYNGINIGLDLGISPTKGRSM

SEQ ID NO: 243262 - protein, 65 aa, Glycine max
  Clone ID: PAT_MRT3847_61694C.1.pep
IPLSFFFSHFFFLHPFSGPPLCFHFFCSSVIIIHFGTWWSFFAWFLFWSLLLFLSPPLFDIGFIL

SEQ ID NO: 243263 - protein, 132 aa, Glycine max
  Clone ID: PAT_MRT3847_61695C.1.pep
MREIVHIQAGQCGNQIGSKFWEVISDEHGIQPDGTYKGESDLQLERINVYYNEAHGGKYVPRAVLVDLEPGTMDSIRAGAYGQLFRPDNFVFGQSGAGNNWAKGHYTEGAELVDNVLDVVRKETEGCDCLQG

SEQ ID NO: 243264 - protein, 87 aa, Glycine max
  Clone ID: PAT_MRT3847_61696C.1.pep
SKKIKTTCQIIISSGQKGHPNLNGVQFGIHLKPKLGTLTRYYLILYTSKGFNLGTKLFLCKLLRFHPQYGRGASFFHNTKGLLSFLF

SEQ ID NO: 243265 - protein, 70 aa, Glycine max
  Clone ID: PAT_MRT3847_61697C.1.pep
CYFFFLFSSFLLVLTRKRNVTKRKIHTILPNFFSRRTLPHWTLNPYTCNNVVVKDGPHLKSSPYKKKLTF

SEQ ID NO: 243266 - protein, 149 aa, Glycine max
  Clone ID: PAT_MRT3847_61698C.1.pep
LEIYILRCHVNGKFSEKSDVFSFGVLVLEVISGQKNSGIWNGEKKEDLLSIAWRNWREGTAANIVDATLINGSQNEIVRCIHIGLLCVQENVAARPTMAFVVTVFNSHSQTLPVPLEPAYYDDSAQLPEFNSGATIEYTTRSTSGEEGQ

SEQ ID NO: 243267 - protein, 79 aa, Glycine max
  unsure (1)..(79): unsure at all Xaa locations
  Clone ID: PAT_MRT3847_61699C.1.pep
VESPASTSFLIKSVIGLSRKSSLQPTFVTPLXLCFSLFIDGSTSSSITFSIFFSLANFASSFFVSSPPQRVWXLITEXS

SEQ ID NO: 243268 - protein, 407 aa, Glycine max
  Clone ID: PAT_MRT3847_6169C.1.pep
IIVHAKQVCSFFCKHPRRPGKNTKLSYPLEKFSSDISGRSFHNGRFIQRMREKASSLPNVKLEQGTVTSLLEEKGTITGVHYKIKSGQEFTAKAPLTIVCDGCFSNLRRSLCNPKVDVPSHFVGLVLENCNLPYANHGHVILGDPSPVLFYPISSTEIRCLVDVPGQKLPSLGGGEMACYLKTVVAPQVPPELYDSFIAAIDKGNIRTMPNRSMPASPYPTPGALLMGDAFNMRHPLTGGGMTVALSDIVVLRDLLKPLHDLHDASALCRYLESFYTLRKPVASTINTLAGALYKVFCASPDPARKEMRQACFDYLSLGGVFSDGPIALLSGLNPRPLSLVLHFFAVAIYGVGRLLIPFPSPKRMWIGARLISGASGIIFPIIKAEGVRQMFFPATVPAYYRTPPVH

SEQ ID NO: 243269 - protein, 168 aa, Glycine max
  Clone ID: PAT_MRT3847_616C.1.pep
MDNTTTTHSTSSTYSITLLLLRVLTFIFLVMALIFISINKLTFDEIDAEIKFHDVYAYRYMLSTIVIGFAYNLLQMGFSIFTVVSGKRVLSSNGGYLFDFFGDKIIAYLLISGSAAGLGFTVELLQHIPSDSFTQKANVSASLLLVGFLFTAIASIFTSFALPKKDIN

SEQ ID NO: 243270 - protein, 78 aa, Glycine max
  Clone ID: PAT_MRT3847_61700C.1.pep
ILKHAYTVRREWRMEVRTGIVKGNKKLNASSMCVRGVYNMLMERVNSSLNKKPFAALCRVDPTEYLLVGTTSEATDAV

SEQ ID NO: 243271 - protein, 119 aa, Glycine max
  unsure (1)..(119): unsure at all Xaa locations
  Clone ID: PAT_MRT3847_61701C.1.pep
KKSFSFFFFFFFFLFFFFFFFFFFFFFXGVGGXVFWGVWGGFFWVFFKVVMGCEGGKNFLYFFKKKGIKKGGGGGGKRPPPGSPKLKNLGSPTTRGKKKKNPQGAPTPPFRGPGALAWS

SEQ ID NO: 243272 - protein, 49 aa, Glycine max
  Clone ID: PAT_MRT3847_61702C.1.pep
DPIVVALGIGVIIYKGSRGHLYFIVKGENFGFNKNGQLGKHLPRMFSFI

SEQ ID NO: 243273 - protein, 137 aa, Glycine max
  unsure (1)..(137): unsure at all Xaa locations
  Clone ID: PAT_MRT3847_61703C.1.pep
MTVHTTSYLSKWKKGKLVGRRTLGHVYLRINRVRGQASALNEGKXACDDSSXMECRRQFMEGIHELDARGRSYIDECIGSDVERXTLCVHLEYVFGGCIRGLLEEYGALTEPSIQGYTRHTGCVLYYIHSRNTVHRD

SEQ ID NO: 243274 - protein, 55 aa, Glycine max
  Clone ID: PAT_MRT3847_61704C.1.pep
SSFKGMLDKKASSSPDTKLGMVRYIYKAVRDTRVAARINIGKEIPHLCFELLLRL

SEQ ID NO: 243275 - protein, 157 aa, Glycine max
  unsure (1)..(157): unsure at all Xaa locations
  Clone ID: PAT_MRT3847_61705C.1.pep
GNPVRRDLEERQGGNVILTDMKRSRPVQMRSQINTAYEELAPLVIVKPEGCHTIAHIPTKPFLSLCYWVLPVIDQIGPTIAVVRQARSHNITRLGVMHELPPSMNTNLVEILISQSPRGKARNTPSRGXVFLWLTRSLDFSSALLQSLESAPHKDLE

SEQ ID NO: 243276 - protein, 62 aa, Glycine max
  Clone ID: PAT_MRT3847_61706C.1.pep
QSDIFCFLFVTSIPWCKVCCVACFIVNYFLSLTFEFGRSRIYFCVRTTYTETIELCHEAESA

SEQ ID NO: 243277 - protein, 65 aa, Glycine max
  Clone ID: PAT_MRT3847_61707C.1.pep
WVLQSPVHVCTTDPFPHLSIKDIPIISPLLLFRDHIELGSEIVSFLLIIKLCCLRSVDIIIIMSC

SEQ ID NO: 243278 - protein, 161 aa, Glycine max
  Clone ID: PAT_MRT3847_61708C.1.pep
MGDNNVNLPPGFRFYPTDEELVVHFLHRKASLLPCHPDVIPDLEVYPYDPWELDGRALAEGNQWYYYSRRTQNRVTGNGYWKPTGIEEPVVSSTSNKRVGMKKYFVFHVGEAPAAGIKTNWIMQEYRLSDSSSSTRSSKRKSQPKIVSIHIFIHNQEAHQT

SEQ ID NO: 243279 - protein, 81 aa, Glycine max
  Clone ID: PAT_MRT3847_61709C.1.pep
IKPYMCRKCATAFSVKGHWATHEKTCGQIWNCLCGSDFNHKRSLKAHIKAFGFGHGSFGIDCLQEEDEAASAIEHDGESSM

SEQ ID NO: 243280 - protein, 182 aa, Glycine max
  Clone ID: PAT_MRT3847_6170C.1.pep
LFYRSEIPGSTHASVELYDSFIAAVDKGNIRTMPNRSMPASPYPTPGALLMGDAFNMRHPLTGGGMTVALSDIVVLRDLLKPLHDLHDASALCRYLESFYTLRKPVASTINTLAGALYKVFCASPDPARKEMRQACFDYLSLGGVFSDGPIALLSGLNPRPLSLVLHFFAVAIYGVGRLLIP

SEQ ID NO: 243281 - protein, 50 aa, Glycine max
  unsure (1)..(50): unsure at all Xaa locations
  Clone ID: PAT_MRT3847_61710C.1.pep
MRQKINPLGFKLCTTQTHDSIXNAQPTKYSDNIQKDKKIRYCIKNYIQKN

SEQ ID NO: 243282 - protein, 178 aa, Glycine max
  unsure (1)..(178): unsure at all Xaa locations
  Clone ID: PAT_MRT3847_61711C.1.pep
ARELFTTAPSLGIPKDSIRCWSXASQIESYETNDAFSAGDLANQEFFALNPEKVTVYGGTVSAGHPLGCSAARILVALIGVMRQKRGLYGVAAICTGGGGASAPVLELTPVILGRYLLCQRSYYFAPHVLLFFSLKKKDKPFNKDSYQQSMSHTRFNPLKQSLESEDWESKKMSIKKR

SEQ ID NO: 243283 - protein, 67 aa, Glycine max
  unsure (1)..(67): unsure at all Xaa locations
  Clone ID: PAT_MRT3847_61712C.1.pep
EDPGTAREKPTLTRKMENYNLAGGXHKKLWWRPSPILTCXLSVRLGYRGQRLNKPASILCPPQFLSR

SEQ ID NO: 243284 - protein, 81 aa, Glycine max
  Clone ID: PAT_MRT3847_61713C.1.pep
HPPKDTNKCIKVFTGKNGMTTYYDGDYKYSLEELLISSFKFNITGRTLYTLQGLDLLAYLTMDIPRGLESLRLEFYQPTIV

SEQ ID NO: 243285 - protein, 364 aa, Glycine max
  unsure (1)..(364): unsure at all Xaa locations
  Clone ID: PAT_MRT3847_61714C.1.pep
MIKNNSSQDWPEPIIRVQSLSERCTDSIPERYIKPLSERPSDDVVAVDDDDDVNIPIIDLAGLYGGDPDARASTLKQISEACNEWGFFQIVNHGVSPELMDMARETWRQFFHMPLEVKQHYANSPKTYEGYGSRLGIEKGAILDWSDYYYLHYLPLSLKDHNKWPTQPPSCREVCDEYGREVVKLCGRLMKVLSINLGLEEDVLEKAFGGEDVGACLRVNFYPKCPRPELTLXLSSHSDPGGMTLLLSDDQVPGLQVRKGNNWITVKPLRHAFIVNIGDQIQVLSNANYKSVEHRVLVNSNKERVSLAFFYNPKSDIPIEPAKELVKPDQPALYTPMTFDEYRLFIRLRGPCGKSHVESLKSPR

SEQ ID NO: 243286 - protein, 107 aa, Glycine max
  unsure (1)..(107): unsure at all Xaa locations
  Clone ID: PAT_MRT3847_61715C.1.pep
XXXXXGXXXXXXXXXEXXXXRHXRXXGXXXXXXXXXRXXXXXXXXXADDXXXXXESGXQXXVXEXXAXRXXLXXRGRXXSVXGXRRGXENGYXGXXXXAXXXAXXGX

SEQ ID NO: 243287 - protein, 84 aa, Glycine max
  Clone ID: PAT_MRT3847_61716C.1.pep
LEVLSNANYKSVEHRVLVNSNKERVSLAFFYNPKSDIPIEPVKELVKPDKPALYTPMTFDEYRLFIRLRGPCGKSHVESLKSPR

SEQ ID NO: 243288 - protein, 48 aa, Glycine max
  Clone ID: PAT_MRT3847_61717C.1.pep
YYYLVFFSWLQVAPYKKIRRVAFVDSIPKNALGKILRKDLNKLALSRL

SEQ ID NO: 243289 - protein, 125 aa, Glycine max
  unsure (1)..(125): unsure at all Xaa locations
  Clone ID: PAT_MRT3847_61718C.1.pep
LRNVGELLGVAIRKGWVLTLTSYRNLVRLVCMKGRVQFTLSLKNLMLALCPLDWLIIYNILMFYLLSAGNSLDVNKILTEIEEKKVXLDEVGHNFLVYGFLHCKDLSSFLHYLTTMISKGLKPSY

SEQ ID NO: 243290 - protein, 152 aa, Glycine max
  unsure (1)..(152): unsure at all Xaa locations
  Clone ID: PAT_MRT3847_61719C.1.pep
MFLGKRLVIGRMFLKFWGFSHSKHTSSSQRKYPTIIEELCHQFSLADLRKSTNNFDPKRQIDLRAFGIKVYKGCLQHDDGSDYTVAVKRFNVKDSQAREEFKNEIELLCQLHHPNCVSLIGFCNHKDEKIIVYEYMSNGSLYERLQXGELSW

SEQ ID NO: 243291 - protein, 174 aa, Glycine max
  Clone ID: PAT_MRT3847_6171C.1.pep
MGYEYLLGGIIASSLVLVFVVYGSVSKKMTKGSVVHAESNGGSIIRTSSENRNHHQEISETTDIIIVGAGVAGAALAYTLGKEGRRVHVIERDLTEPDRIVGELLQPGGYLKLIELGLQDCVDEIDAQQVFGYALYKDGKNTKLSYPLEKFASDVSGRSFHNGRFIQRMREKAS

SEQ ID NO: 243292 - protein, 204 aa, Glycine max
  unsure (1)..(204): unsure at all Xaa locations
  Clone ID: PAT_MRT3847_61720C.1.pep
MATMGLTLLAGLICVXSLALRPSVAEEGQNNGLDMNYYLESCPQAEHILTEHVQLLYRRHKNTAFCCLRNILHDCAVHSRDAXLLLDSTRRSLSESETDRSSGMRYFRFIDTIKEAXDRESPGVVSCAEILGLSARDGIASLGGPHIPLTTGRRDGRRSRADVGEQFLPDHIEYISAALDXFGAMAIDTPGVDALLGAHNVGRT

SEQ ID NO: 243293 - protein, 181 aa, Glycine max
  Clone ID: PAT_MRT3847_61721C.1.pep
MNLNTSSNLETRSLLDELCNFHKKGLFDLGHPLLNRILETFVKAAGIGAVQAVSREAYFTAIEGTGTDNSGGLPPEISSAKKNRLPSLKGETNNKSLEAMVKNTGKESLQWGVAAGLYAGLTYGLKEARGAHDWKNSAVAGAITGATLALTLEDSTHEQIVQCAITGAAISTAANLLTGIF

SEQ ID NO: 243294 - protein, 155 aa, Glycine max
  unsure (1)..(155): unsure at all Xaa locations
  Clone ID: PAT_MRT3847_61722C.1.pep
AALLNRGSSPNVFHWVLGFRLKGSIFHGFDPPPLLVLRCLVRLCXFANCCPSCFIGAYVSLGPLLKGHPLWPXHCFKWPRVSSHPLLGVAKFXGELVYIHAYFAKYGGDPTREMNFLGVGSFFGVGFLLKGAPWVPSKPIVPIFKSEKSVGLCPT

SEQ ID NO: 243295 - protein, 136 aa, Glycine max
  Clone ID: PAT_MRT3847_61723C.1.pep
DIGAVQAVSREAYFTAIDGTGADNSGGLPPEISSAKKNRLPGLKGETSNKSLEAMVKSTGKESLQWGVAAGLYSGLTYGLKEARGAHDWKNSAVAGAITGATLALTLEDSTHEQIVQCAITGAAISTAANLLTGIF

SEQ ID NO: 243296 - protein, 80 aa, Glycine max
  unsure (1)..(80): unsure at all Xaa locations
  Clone ID: PAT_MRT3847_61724C.1.pep
QKIRRKKYIIVCNIMLTSHHFLAPSVLFKSNKKNVYILFEVFCCFHLFWRIKKTSSPTNSTRSNKNALCGGDQXLNFYYF

SEQ ID NO: 243297 - protein, 42 aa, Glycine max
  Clone ID: PAT_MRT3847_61725C.1.pep
MSQVKMRILMGTYALSAGYYDAYYKRAQQVLLIFFFSLICLI

SEQ ID NO: 243298 - protein, 66 aa, Glycine max
  unsure (1)..(66): unsure at all Xaa locations
  Clone ID: PAT_MRT3847_61726C.1.pep
QXXXXXXXXRXIQQKLGDISTVLKAFADYVDSLCGTPYPIDYDIWLRRLRRNIHEDDHGKEIDGTG

SEQ ID NO: 243299 - protein, 141 aa, Glycine max
  Clone ID: PAT_MRT3847_61727C.1.pep
PEPHRLLAELHSTTTPFESSTSTTNYNAFDINTILVDETEDENREKVNPHEAYRLGPKISIWDEQRSRWLRENPNFSNFLRPNKPRVLLVTGSSPKPCENPVGDHYLLKAIKNKIDYCRLHGIEVFYNMALLDAEMAGFWA

SEQ ID NO: 243300 - protein, 64 aa, Glycine max
  Clone ID: PAT_MRT3847_61728C.1.pep
SLQSDNPSKKSMAGVFMEIAPKKIRGLMGVLFDRCRILGATNSYHCRQYRGFKLQQTRLKPVRG

SEQ ID NO: 243301 - protein, 66 aa, Glycine max
  Clone ID: PAT_MRT3847_61729C.1.pep
PRVRTHPNLFSCPSLGFSLLLRFSVFHTYHHAYALFELGLLPAELWLLPTTLCGSLPLRFIGEWHF

SEQ ID NO: 243302 - protein, 88 aa, Glycine max
  Clone ID: PAT_MRT3847_6172C.1.pep
RGKQYCRSPCHLGIVWLLIGSVLVVADLFNDEDAHLGGLIPSWSYYNPLACWSRLAVQFAVASGLRCHIPIPPIPPIPIPIDAFMPPP

SEQ ID NO: 243303 - protein, 80 aa, Glycine max
  Clone ID: PAT_MRT3847_61730C.1.pep
LKENEAEHDGSFDWINWCSPHFICLLTNLRITRSMHHTWSYCPHVGLACRRRSDIFLISSCFSFPFQSFPHLCISLVYVQ

SEQ ID NO: 243304 - protein, 83 aa, Glycine max
  unsure (1)..(83): unsure at all Xaa locations
  Clone ID: PAT_MRT3847_61731C.1.pep
MGCVIAPLKFWMCWTALDIGSPDGPXQAPHAVKFMEIVIHGVQGFSELPKYCLQRCGGFVLAPIVISLLTDVTPKKFSQYIAN

SEQ ID NO: 243305 - protein, 70 aa, Glycine max
  Clone ID: PAT_MRT3847_61732C.1.pep
PSQQVIIHHEFLRREIHGTTRTHDLCQGRLDPRTNHGHPSASLEKNLNHGPLRTVSAVVTQRLGATRKVP

SEQ ID NO: 243306 - protein, 62 aa, Glycine max
  Clone ID: PAT_MRT3847_61733C.1.pep
YEQDGKPLPKFGEWDVNDPASAEGFTVIFNKARDEKKTGRGGSGRATSQRRNNSCKDDDRPL

SEQ ID NO: 243307 - protein, 48 aa, Glycine max
  Clone ID: PAT_MRT3847_61734C.1.pep
LAIRLEEALNKRLGTVGLYLHDILVEADMGVIPSDELLTIPEHDEWVY

SEQ ID NO: 243308 - protein, 163 aa, Glycine max
  Clone ID: PAT_MRT3847_61735C.1.pep
MSASGGAAISGGSRNRNRHLGENRFYSPPPLRKHKEKQEQQRSSLSRASSENRPGSSSDCSISSRATSDMSNLDRLLEHITPLVPAQYFPKTNSRRWKSREAELHPYFVLGDLWESFKEWSAYGASVPIVLHGNESWTQYYNVFLSAIQLYIDPYKPFTRLRK

SEQ ID NO: 243309 - protein, 67 aa, Glycine max
  Clone ID: PAT_MRT3847_61736C.1.pep
LKETTLTTYTKQAHHSLFMTKKLQLGQSLPFYEQFTNFLSLNGIFLKLRFKSKYLNSVRYQFFKNEI

SEQ ID NO: 243310 - protein, 284 aa, Glycine max
  Clone ID: PAT_MRT3847_61737C.1.pep
MVVKAEKAMSVREESGDSRGTIDPLKLHFVLVHGVGGGGWCWYKIRCLMENSGFKVSCIDLKSAGIDQSDVDSVLSFDDYNQPLMDLLSALPENEQVILVGHSAGGLSVTQACHKFAKKIRLAVYVAATMLKLGFLTDEDLKHGVPDLSEFGDVYRLGFGLGQDKPPTSALVKKEFQRKIIYPLSPHEDSTLAAMLLRPGPILALTSAMFVEDGEVEEVPRVYIRTRQDKVVKPEQQEAMIKRWPPSTSYELDSDHSPFFSTPFLLLGLLFKAAALDVGLNAIN

SEQ ID NO: 243311 - protein, 75 aa, Glycine max
  Clone ID: PAT_MRT3847_61738C.1.pep
HSKEIMGQTTSNNCINLLISISKRTQMASSFTSANQLMNGGMFNIELSYTRLWKSKRCWTPHSKKKLNVTYIDRY

SEQ ID NO: 243312 - protein, 95 aa, Glycine max
  unsure (1)..(95): unsure at all Xaa locations
  Clone ID: PAT_MRT3847_61739C.1.pep
PPLQTPVPNSRXRPTPSEKKKKKKKKKKKKKKKGKKNKKEKKKKKAKKKKKKKIKKKKKKGGALFRGSNLPSPGKPCLIFFLGPPKSIPLPRFSK

SEQ ID NO: 243313 - protein, 73 aa, Glycine max
  unsure (1)..(73): unsure at all Xaa locations
  Clone ID: PAT_MRT3847_6173C.1.pep
MGIERGGFTGFTIAWSESLIQRDYCKPASAALLCRPDYTCLCISCDSNTDCSIKLSLHHKHLXMCEEFKLAPA

SEQ ID NO: 243314 - protein, 138 aa, Glycine max
  unsure (1)..(138): unsure at all Xaa locations
  Clone ID: PAT_MRT3847_61740C.1.pep
KKKKKKKKKKRGAVFKIPGLPTHACERYSFFIGSPKSTSLPEVLQLGDWKNFGVTKFNGLAPHPLFFNXINTQKAGTNSLSKDLLNVNGYWDPPFMGALIAGGVGVTPRVLFTFVTALSPVFLVLFLYLGATLGSFSY

SEQ ID NO: 243315 - protein, 50 aa, Glycine max
  Clone ID: PAT_MRT3847_61741C.1.pep
RQFKSDLTSNWALAQGNEEEDDTVYEKYDISKEKGQHFCQSRRNHSREVN

SEQ ID NO: 243316 - protein, 123 aa, Glycine max
  unsure (1)..(123): unsure at all Xaa locations
  Clone ID: PAT_MRT3847_61742C.1.pep
MPPKQKQKKADLAKEAEXVKDKTLGLKNRNXSKNVQKYVQNLKQSVQPRPNAAKVNAKKKKEEDKANFKELNELFKIADTQTKVPEGVDPKSILCEFIKGGQWAKGFKCKLSHDLNRHRKGEK

SEQ ID NO: 243317 - protein, 63 aa, Glycine max
  Clone ID: PAT_MRT3847_61743C.1.pep
AVQVLFVQVLRTNSLITARTCVTLRPTQQRVKELAKFGKSHNDSHHLSLNSARYSLHSIINTP

SEQ ID NO: 243318 - protein, 320 aa, Glycine max
  unsure (1)..(320): unsure at all Xaa locations
  Clone ID: PAT_MRT3847_61744C.1.pep
TSSRRGNSRDNIIIPAFPLCTAWLDCPLKGGERGNFIAVGSMEPSIEIWDLDVIDEVQPCVVLGGFEERKKKGKKKSIKYKDDSHTDSVLGLAWNKEYRNILASASADKQVKIWDVVAGKCDITMEHHSDKVQAVAWNHHAPQVLLSGSFDHTVVLRDGRMPSHSGXQWSVTADVESLAWDPHTEHSFVVSLEDGIVKGFDIRTANSDSSSDPSSTFTLHAHDKAVTSVSYNPSAPNLLATGSMDKTVKLWDLSNNQPSCVASKSPRAGAIFKISFSEDNPFLLAIGGSKGKLQVWDTLSDSGISRRYGNYNKNRSQSGS

SEQ ID NO: 243319 - protein, 477 aa, Glycine max
  Clone ID: PAT_MRT3847_61745C.1.pep
MISAISWVPKGVSKSEPVVAEPPPEEEIQEIIANHATKSGDSDNEDANNDDVVAQALNVADAVGKASTGTCDEITLALKDLDMDLYDDEDEGIEVFSSGIGDLYYPSNDMDPYIKDKNDDDSEELEDMIINPTDSVVVYACTEDEVSYLEVWVIEDADSSEMNMYPHHNIIIPAFPLCTAWLDCPLKGGERGNFIAVGSMEPSIEIWDLDVIDEVQPCVVLGGFEEKKKKGKKKSIKYKDDSHTDSVLGLAWNKEYRNILASAGADKRVKIWDVVAGKCDITMEHHSDKVQAVAWNHHAPQVLLSGSFDHTVVLKDGRMPSHSGYKWSVTADVESLAWDLHTEHSFVVSLEDGIVKGFDIRTANSDSSSDLSSTFTLHAHDKAVTSVSYNPSAPNLLATGSMDKTVKLWDLSNNQPSCVASKSPRAGVIFKISFSEDNPFLLAIGGSKGKLQVWDTLSDAGISRRYGNYKNRSQSGS

SEQ ID NO: 243320 - protein, 118 aa, Glycine max
  unsure (1)..(118): unsure at all Xaa locations
  Clone ID: PAT_MRT3847_61746C.1.pep
THLRIYPQYNEVEGQKEAXEAQRALDKECTARGSMLDLXSVNLKFVFPKTQIGGTILGTELRTNFLTEDNLXQAVDLHRTXHRIKGMIKMVATVGTPENTCIALALCYEKVLLGGRTT

SEQ ID NO: 243321 - protein, 36 aa, Glycine max
  Clone ID: PAT_MRT3847_61747C.1.pep
HDEINGHIIQRLVGDDVNFGHDVARDKVKVVNAILS

SEQ ID NO: 243322 - protein, 78 aa, Glycine max
  Clone ID: PAT_MRT3847_61748C.1.pep
YLHRIRDADYRSRFADSLLFSLALHLRTLLFESQAFRSCLEEFRDLRFSSTDVADNWDGMLPLKTTSKCNNVLMLVGL

SEQ ID NO: 243323 - protein, 152 aa, Glycine max
  Clone ID: PAT_MRT3847_61749C.1.pep
MFCLPGTRSPEWFEQQSIGPSLSFWFRNKFPVMDLCFVIGPMGKDSILFRPIMTINGNTMETQLTEKRCCLDFRALDYHILIIGTKYMKFGECLDKPLTKNEWNHVVVSIGIEPTPKDVIVKQTGLHVIKPESSMDDVQFTNPYKQPSFKEK

SEQ ID NO: 243324 - protein, 92 aa, Glycine max
  Clone ID: PAT_MRT3847_6174C.1.pep
LGNLTSLHSLDLCFNFLSGNPAPFIGHLVSIENLCISFNEFEGIFSLSIFSNHSRLKSLLIGNMKVDTENPPWIAPFQLEQLAITSCKLNLP

SEQ ID NO: 243325 - protein, 117 aa, Glycine max
  Clone ID: PAT_MRT3847_61750C.1.pep
MADATKYVPIAGTNGSSVLKTRKTVAAAYSFILAFVAFTVFLAFSPSSNASSPWFTNIFSPTSTTDGSYKPQIPNIFSLLFPNTTSPSNSSDPLHNNTHSFRSTNATSLSPYPKTAL

SEQ ID NO: 243326 - protein, 174 aa, Glycine max
  Clone ID: PAT_MRT3847_61751C.1.pep
MASTVFSYPSPLHLKTYPHKTSSNPSEFSIHIQPKKHFSIRCTSLDSIPEAEFPTPDPSSSTVNSAESFPIEKRRRSEIVRKRRGEKLVQPEPPNFEIGWKTTKEINLERPIGHVIADFLEKLETLMGKEFGSTELLAKVGEIVAERAREEAEILMDEGKVEERMVTELFRVLK

SEQ ID NO: 243327 - protein, 140 aa, Glycine max
  unsure (1)..(140): unsure at all Xaa locations
  Clone ID: PAT_MRT3847_61752C.1.pep
AEEYYVIVLGTALTECILTGLLCVHGLIVLHMDRNDYLGGESTSLNLIQLWRTFRGDDKPAPIRRCRDXNIIINPKLSWMMAIXVRVLIHTDVTMYLYIKDVHGSSVFDIRKVHKVPAHDMXALMCPLMALLERRRPLKY

SEQ ID NO: 243328 - protein, 90 aa, Glycine max
  Clone ID: PAT_MRT3847_61753C.1.pep
DGFGENDDHIVPHASDKHNNQFVIQEDSCKKSRHELHGIRNSDYVNSYGTQGKEELYLENMTQKERMQEKDSWPHTPEDVFSSCGSDSSK

SEQ ID NO: 243329 - protein, 79 aa, Glycine max
  unsure (1)..(79): unsure at all Xaa locations
  Clone ID: PAT_MRT3847_61754C.1.pep
DGFGENDDHIVPHASDKHNNQFVIQEDSCKKSRHELHGIRNSDYVNSYGTQGKEELYLENMTXKERMQEKDSWPHTPED

SEQ ID NO: 243330 - protein, 61 aa, Glycine max
  unsure (1)..(61): unsure at all Xaa locations
  Clone ID: PAT_MRT3847_61755C.1.pep
NLKGEREPPREGGIKRGGXVVTRKGTGTLARALDPAPFVWFPSFGETVAGFPRKALNGGLP

SEQ ID NO: 243331 - protein, 36 aa, Glycine max
  Clone ID: PAT_MRT3847_61756C.1.pep
TRVRVLYEVICHTGSFCRSSDPQWACCLQTCLLSIL

SEQ ID NO: 243332 - protein, 163 aa, Glycine max
  Clone ID: PAT_MRT3847_61757C.1.pep
MASKAAAKPKAKPAPKEKKERRLGVTVKDVSAEAFIREYAAHLKKAGKLRLPKWVDYAKTAVSKELPPLDPNWLYVRAASIARKLYLRSGIGLGTFKRIYGFRERRGVMPRRSRDGSGSIPRWILKELERLKVVEKDKNGGRKLTTTGQRDLDRIAGTVASKN

SEQ ID NO: 243333 - protein, 90 aa, Glycine max
  unsure (1)..(90): unsure at all Xaa locations
  Clone ID: PAT_MRT3847_61758C.1.pep
FLPISFFFFYLLYSLCFFFPLFSLLFLFFKSIHNFLIIFIFXFLLISLYSQFFLSFFVAXLIFFYSLIFLANLRYHFFFFLLFINTFFFN

SEQ ID NO: 243334 - protein, 86 aa, Glycine max
  Clone ID: PAT_MRT3847_61759C.1.pep
MAAARLCLSLLLLSTCVALLLQPLLGAQGAPLEPVYPGDNATPEQMAQYAADLRRYINMLTRPRYGKRHKEDTLAFSEWGSPHAAV

SEQ ID NO: 243335 - protein, 94 aa, Glycine max
  unsure (1)..(94): unsure at all Xaa locations
  Clone ID: PAT_MRT3847_6175C.1.pep
DRITSVVTTLEDRALGTEHEVYNPCLVCIQQVDPLMTTLTKKWLPPCAQTMVDDWLDCTDEXDPFQARALTVSLTGFTPLAYTPRNSNASTVCT

SEQ ID NO: 243336 - protein, 68 aa, Glycine max
  Clone ID: PAT_MRT3847_61760C.1.pep
LLVSFKKVPSLSAGWGHVFQNGGSECHPYLCMFSCKNTSFEADKCDFDRVNYFRSFHYWKVCFQEHVV

SEQ ID NO: 243337 - protein, 75 aa, Glycine max
  Clone ID: PAT_MRT3847_61761C.1.pep
VLYFFGSGCFVEHSVIYISLCNICYPMFRFTCACQRGRLFQIFMDNLMLEGWISNCWMLHHLFLYDFLCSPSYDT

SEQ ID NO: 243338 - protein, 156 aa, Glycine max
  Clone ID: PAT_MRT3847_61762C.1.pep
TSGDGDGDLVDQICKKTPFYDLCSSILHSNPLAPKSDPKGMALIMVNGILTNATDTLSYIEELIKQTSDEQLEQQLAFCAESYIPVVKYILPQAADAINQGRFGFASYCIVDAQKEVNACDKKFSGSTQAPLSDRNDIMQKLVDVAAAIIKLLLNG

SEQ ID NO: 243339 - protein, 62 aa, Glycine max
  unsure (1)..(62): unsure at all Xaa locations
  Clone ID: PAT_MRT3847_61763C.1.pep
DPPQNLTGESPPAKSNLSLSNLGFSXSQMXAXKXXKRXQXTRVQLQHRHGEQRRERKLRRRT

SEQ ID NO: 243340 - protein, 40 aa, Glycine max
  Clone ID: PAT_MRT3847_61764C.1.pep
ICFMKCLAKNKKRGRRYFCRRVPLMFKHQRIVKLAFFKLY

SEQ ID NO: 243341 - protein, 77 aa, Glycine max
  Clone ID: PAT_MRT3847_61765C.1.pep
IRYHQISWKSINHFFWPLHNFRVIHICKITFHFIVNVKHLHCSESRKGVFIIGGYIMPFSIRENLKIPNDADVLLLL

SEQ ID NO: 243342 - protein, 98 aa, Glycine max
  Clone ID: PAT_MRT3847_61766C.1.pep
LKGATTTTFYILMIEIRVALALLCAPCRSLPFPLYASSGSFPSLSSAPPGRGGVRSRRFRFWTLAMVLVVWAAAPVLVRVVVLVRRWLGLSYCCLRPA

SEQ ID NO: 243343 - protein, 91 aa, Glycine max
  Clone ID: PAT_MRT3847_61767C.1.pep
KLFSLFLIQTLENRNKKHFLKPNTPLDLLSSNHTNTFNQILFLEGIKKNTHKLPLTYFKNLKGKPKQKDILCNNGVGHCLEPILLETKFSS

SEQ ID NO: 243344 - protein, 125 aa, Glycine max
  unsure (1)..(125): unsure at all Xaa locations
  Clone ID: PAT_MRT3847_61768C.1.pep
MQSFAKTLTGKTITSEEESWHTIDDVWAKIQDMEGIHPDQHRLILVGRDLXDGRTTXRYNIHNASMLDIGLRLRGCAKRXQKNTYTMRTKINHKLKNVKLSILQLYKXDDSGTSPRLSXECPNAE

SEQ ID NO: 243345 - protein, 91 aa, Glycine max
  unsure (1)..(91): unsure at all Xaa locations
  Clone ID: PAT_MRT3847_61769C.1.pep
DPYRLFKCNDTYGDTYPLAVRQTGILTNGQLPGPDIHIVTNDPLIITALNSSDEPXLLSWNGIHQRRNSLEDGVCXTSCPIPPGKTCTYIL

SEQ ID NO: 243346 - protein, 87 aa, Glycine max
  Clone ID: PAT_MRT3847_6176C.1.pep
LFKIIAAISNATGCLCCDECKSFQGGTMSEGVKSRPFNLAEHFPSVELGPKAQANIIRWFLHIRLGLALTFKLNLVTRRSFMHSPSV

SEQ ID NO: 243347 - protein, 76 aa, Glycine max
  Clone ID: PAT_MRT3847_61770C.1.pep
TFISTVNRTQIFISCTNALLIFDTRHINCTLLMNVNCTLNNILFSCLFYTNYYIHCNNRNNPLTKVIKLMLSSNFF

SEQ ID NO: 243348 - protein, 95 aa, Glycine max
  Clone ID: PAT_MRT3847_61771C.1.pep
GYGGYPMEYGVQDYAQYRYALVGGWQLSMGPPHHQLQIAYSSEKNVRFLQQFSVSTLSRWVSLLVWCKTDSATLCLYSPCLLNNIKLFWKRHLDP

SEQ ID NO: 243349 - protein, 56 aa, Glycine max
  Clone ID: PAT_MRT3847_61772C.1.pep
PKYCTINQFHLSNPTLSPSISSSPFKFNSYSVVNYPRFFFSFSLLFIFLNLSIGSL

SEQ ID NO: 243350 - protein, 58 aa, Glycine max
  Clone ID: PAT_MRT3847_61773C.1.pep
QLERKKETSFPYYNFHINNHYIFLCFFSHNSVPLHWNESSSQHLIITIFVPISNLNAT

SEQ ID NO: 243351 - protein, 229 aa, Glycine max
  unsure (1)..(229): unsure at all Xaa locations
  Clone ID: PAT_MRT3847_61774C.1.pep
VLREHEXARAKEDADSDRKKDLFDILLNLIEADGADNKLTRESAKAFALDMFIAGTNGPASVLEWSLAELVRNPHVFKKAREEIESVVGKERLVKESDIPNLPYLQAVLKETLRLHPPTPIFAREAMRTCQVEGYDIPENSTILISTWAIGRDPNYWDDALEYKPERFLFSDDPGKSKIDXASLIQCFDWIVNDGKNHHVDMSEEGRVTVFLAKPLKCKPVPRFTPFAA

SEQ ID NO: 243352 - protein, 513 aa, Glycine max
  Clone ID: PAT_MRT3847_61775C.1.pep
MLDIKGYLVLFFLWFISTILIRSIFKKPQRLRLPPGPPISIPLLGHAPYLRSLLHQALYKLSLRYGPLIHVMIGSKHVVVASSAETAKQILKTSEEAFCNRPLMIASESLTYGAADYFFIPYGTYWRFLKKLCMTELLSGKTLEHFVRIRESEVEAFLKRMMEISGNGNYEVVMRKELITHTNNIITRMIMGKKSNAENDEVARLRKVVREVGELLGAFNLGDVIGFMRPLDLQGFGKKNMETHHKVDAMMEKVLREHEEARAKEDADSDRKKDLFDILLNLIEADGADNKLTRESAKAFALDMFIAGTNGPASVLEWSLAELVRNPHVFKKAREEIESVVGKERLVKESDIPNLPYLQAVLKETLRLHPPTPIFAREAMRTCQVEGYDIPENSTILISTWAIGRDPNYWDDALEYKPERFLFSDDPGKSKIDVRGQYYQLLPFGSGRRSCPGASLALLVMQATLASLIQCFDWIVNDGKNHHVDMSEEGRVTVFLAKPLKCKPVPRFTPFAA

SEQ ID NO: 243353 - protein, 54 aa, Glycine max
  Clone ID: PAT_MRT3847_61776C.1.pep
PNGFPKSGSHLFRVSFLSQFSWRLRNTFGCFKKAFSFRSAMVNEAVGESCRREC

SEQ ID NO: 243354 - protein, 155 aa, Glycine max
  Clone ID: PAT_MRT3847_61777C.1.pep
LGYLAPEYAMWGKVSGSCDVYSFGILLLEIVSAKKPIEKLPGGVKRDIVQWVTPHVQKGNFIHIADPKLKGHFDLEQLKSVVMIAMRCTDNSPEKRPTMQEVVEWLKGGIGRRKKEIPYLSYKTEDDKYEENYGEIRTTQSKFKIASDNDKLKIR

SEQ ID NO: 243355 - protein, 42 aa, Glycine max
  Clone ID: PAT_MRT3847_61778C.1.pep
QKKALEEDPSVFDYDGVYDQMKEKVARPLVQDREERKVWLQF

SEQ ID NO: 243356 - protein, 59 aa, Glycine max
  Clone ID: PAT_MRT3847_61779C.1.pep
SLSFFYCTKDHIMMIYQYNFLMQIAYVQQGHSNQLFIPGTSKYFFVLGSIFLRTQTVLV

SEQ ID NO: 243357 - protein, 63 aa, Glycine max
  Clone ID: PAT_MRT3847_6177C.1.pep
FILRDFLFPTAIYFSEIGCFWEGSRLLQFVGPPFFWPPGMGKFGCLPPAWGFWPGVCQLFCFF

SEQ ID NO: 243358 - protein, 141 aa, Glycine max
  unsure (1)..(141): unsure at all Xaa locations
  Clone ID: PAT_MRT3847_61780C.1.pep
KRGKGKGNKQRXXXTDNXXXEQXXGKXGNKSEEEQNQENRXXGXHGKEANXXQGPKKRKAPQGGQEKKRKXXXEGGXAGNREEDXXEXXRRXXEGPQTERGKKRRENTTRKGGKKGKKEGTGETEKKKKEKGQTRKENRET

SEQ ID NO: 243359 - protein, 302 aa, Glycine max
  unsure (1)..(302): unsure at all Xaa locations
  Clone ID: PAT_MRT3847_61781C.1.pep
EGRNSGGTQHYPLRPEAEDCAFYMKTGNCKFGFNCKFNHPIRRKTQAVKEKAGEREETTERSGMTECKYYQRSGGCKFGKSCKYNHTRGKISTAPXSAPLLELNFLGLPIRXGERDYYMSFSIQSVSLLICSLNWSXSTRTLNVLKTFGCAIDAFLSTSRYVYTGXISDWRIPQSGHLSIYLRGAFIPPSTSVMNNPAIDTNVYMHHQKQMPVDEFPERPGEPECSCFLKTGDCKFKSNCKFHHPKNRVTRLPPCNLSDKGLPLRPDQSVCSHYSRYGICKFGPACKFDHPDKLAARDDSWT

SEQ ID NO: 243360 - protein, 96 aa, Glycine max
  Clone ID: PAT_MRT3847_61782C.1.pep
EKGEGRRHVLLSSAEKKEIAESYMDNKSPSNKASEELARELLIAISDSLPDKTLDSDFVPESKDADSFARPNGDWDDKFRSELISISYVESPDVKI

SEQ ID NO: 243361 - protein, 283 aa, Glycine max
  Clone ID: PAT_MRT3847_61783C.1.pep
MATLSLTLNCWSTVELAHTRFSSTFTSLGRRSRYSICSFAKKSLKKSRRDVTEAAGDLLDDKFVQNDNLDTSLNPAAPNSNPLPSRSAVLQACIITCGLIAALGIVIRQVSHVASVEGLPVFDCSTEVSFGFEMWHLELITGLVVLISSCRYLLLKTWPDFAKSSEAANQQVLSSLQPLDYIVVAFLPGISEELLFRGAILPLLGMNWNSIGIAALIFGVLHLGNGRKYSFAIWATFVGLAYGYATILSSSVAVPMASHAVNNLIGGLLWRYTSNTPNQKLNE

SEQ ID NO: 243362 - protein, 55 aa, Glycine max
  Clone ID: PAT_MRT3847_61784C.1.pep
RIPGSTHASDRCYITTQGDINLRQTLKYLSWEEINYRIRSGFNLRNLHVHVSNLC

SEQ ID NO: 243363 - protein, 82 aa, Glycine max
  unsure (1)..(82): unsure at all Xaa locations
  Clone ID: PAT_MRT3847_61785C.1.pep
CFKNNGFWXRQLTVREGRTGGNAVDAETFGGIAEVMLIVQVSTASFDDAKVAAEFKRLAQAFVVGATSHCSTLPLTALVVQD

SEQ ID NO: 243364 - protein, 47 aa, Glycine max
  unsure (1)..(47): unsure at all Xaa locations
  Clone ID: PAT_MRT3847_61786C.1.pep
PPPXXKXQSQLSKSPTKLSLYFSIRSPPGPWGKLFSYAKTKHXQRMK

SEQ ID NO: 243365 - protein, 58 aa, Glycine max
  Clone ID: PAT_MRT3847_61787C.1.pep
HKQMALLFLRKRPNYSTSMKKHFLIWTGYIFFRSNDTYLSGCNFEEPYFIGIKKSLSS

SEQ ID NO: 243366 - protein, 92 aa, Glycine max
  unsure (1)..(92): unsure at all Xaa locations
  Clone ID: PAT_MRT3847_61788C.1.pep
VIFMLVSCLFVACWVARFLHFKGPRPSSLSLVWMSXSSPLSWPSFTLPVPLSGLSSMGAWSCLPDRVSGPPIGNSVMCRKLVMSRDSCVSCQ

SEQ ID NO: 243367 - protein, 156 aa, Glycine max
  Clone ID: PAT_MRT3847_61789C.1.pep
MVENNPARVFGSSMFLCLLVLITWNNIVVVVPQAEARAFFVFGDSLVDNGNNNYLFTTARADSYPYGIDYPTHRATGRFSNGLNIPDIISEKIGSEPTLPYLSRELDGERLLVGANFASAGIGILNDTGIQFINIIRISRQLQYFEQYQQKVSALI

SEQ ID NO: 243368 - protein, 81 aa, Glycine max
  Clone ID: PAT_MRT3847_6178C.1.pep
LFTLQKKKKKKKKKKKKKKKKKKKKKKKKKKKKKKKKKKKKKKRGGAFLKDPILLPRACKGIVFFWGPQNQFPGPGFKTGG

SEQ ID NO: 243369 - protein, 87 aa, Glycine max
  Clone ID: PAT_MRT3847_61790C.1.pep
DFMSALFENILCAIVSSGKLLGTLPSPSMIRPVLVSARSSYLGEKINTLAVQAQGLCSFPMCKICCVWQEACSTSGLALLVLMSPLE

SEQ ID NO: 243370 - protein, 118 aa, Glycine max
  unsure (1)..(118): unsure at all Xaa locations
  Clone ID: PAT_MRT3847_61791C.1.pep
MQKMPGTKQRDTSQNPDSPEGNSEPEKPTDSDERVDFDGDNDQEETMEEEVEYEEVKEEEEEEEEEEEKXEEEETKLSDKTRVADTKDEVEKKKHAELLALPPHGSEVYIGGIPKKVF

SEQ ID NO: 243371 - protein, 42 aa, Glycine max
  Clone ID: PAT_MRT3847_61792C.1.pep
LPINEFRSNFMFPFTPFCSDRKFISSFSFSFFFSMFSFIHLV

SEQ ID NO: 243372 - protein, 77 aa, Glycine max
  unsure (1)..(77): unsure at all Xaa locations
  Clone ID: PAT_MRT3847_61793C.1.pep
KEKXKQRAYVIWGASFDKASLWSQLHNDSRNNLEMQEAYLVNLXNVLRELYLHSPEEARQMRRKASLYAIEMACKKA

SEQ ID NO: 243373 - protein, 68 aa, Glycine max
  Clone ID: PAT_MRT3847_61794C.1.pep
YAKFRFLNSNYLQIYKMRACTFDFIGAPEIIELAIYFFSLLKRIGVFAINPQVYYMEFEFLAKEQSTG

SEQ ID NO: 243374 - protein, 69 aa, Glycine max
  Clone ID: PAT_MRT3847_61795C.1.pep
KNETPHSLEQPSACTCKFCSQGALFQKKQGEYGILCMLEYWGLMFGAQSFFFFFAGGVEKGGGNLKGGG

SEQ ID NO: 243375 - protein, 125 aa, Glycine max
  Clone ID: PAT_MRT3847_61796C.1.pep
MNKGQSPEPLDFFIWTVEDVGLWLETINLGSYSQIFKENGVNGEYLEGMSMFTTEQILRFIRRCHMKWGDFITLCKELRRIKVACLKGEQKVRRPWWAPACLSTVFLKVAKSNRQSRVVSLKLEP

SEQ ID NO: 243376 - protein, 57 aa, Glycine max
  Clone ID: PAT_MRT3847_61797C.1.pep
YSSLCSRPTIWFGQAHHNNISPLIRYSVPNLIIYEKMLKKVTARSLSLGGPVSCQPP

SEQ ID NO: 243377 - protein, 180 aa, Glycine max
  unsure (1)..(180): unsure at all Xaa locations
  Clone ID: PAT_MRT3847_61798C.1.pep
PPPTPPPRPPPPXPAPPPPPPVPPPSPPPPPPPPPPPPPVPPPAPPGIPPSHPPPPPPPRLPPPPPLPTCLPLPTVLPPPPXPQPPHSPPPWFHSPATPPVPPPIPAHPPCQIRPCPLAPPPPQCPRRRPTSLPPANPTQCQHRSCPFGNCTHGSSQCIPRCQGRRSTRASGPRGGARSR

SEQ ID NO: 243378 - protein, 490 aa, Glycine max
  Clone ID: PAT_MRT3847_61799C.1.pep
MDGGGSTPAAPIPNANAPPPFLSKTYDMVEDPSTDAIVSWSATNNSFIVWDPPQFARDLLPKYFKHNNFSSFVRQLNTYGFRKVDPDRWEFANEGFLKGQKHLLRSITRRKPAHGQNHQQPQQPHGQSSSVGACVEVGKFGLEEEVERLKRDKNVLMQELVRLRQQQQTTDNQLQTMVQRLQGMEQRQQQMMSFLAKAVQSPGFFAQFVQQQNDSNRRITEVNKKRRLKQEGMAETEHAATPDGQIIKYQPMVNEAAKAMLRQIMKWDTSCVESLNKNSDNYVIGDASSSSSGMDSSSSSGWTSGVTLKEVSPASVQSSHVPAATGTQGHVPSTVKPEILSVPQAVASEKVMKDGAHDPPSIPVSQADVMIPDLPPITEMVTGNILDIPEENYMATETDEGYMDSSLGAGGSFPIDFEGISPDADIDDLLANPIWDEILQTSVPEDIDTNVAEASKGNEVQPMENGWGKTQHMDHLTEQMGLLSSDAKRV

SEQ ID NO: 243379 - protein, 81 aa, Glycine max
  unsure (1)..(81): unsure at all Xaa locations
  Clone ID: PAT_MRT3847_6179C.1.pep
HLXXGWXPTTXXSRLYPFTPNITKAVFWTQPPPXKKFVLHVDLPPRRRGKKKKRVLVTGMQTWLISLSKQFPLEHNTTLCM

SEQ ID NO: 243380 - protein, 104 aa, Glycine max
  Clone ID: PAT_MRT3847_617C.1.pep
ESNDGNLSTKDFKRIKRLKAKSEAKNALAQQGLAKSAATKVPSSGQLNLKRVDGTMLEAHIRKKLNKDERLALVRDKVSRTRIEKKRKNQRSGKQFRGKKAWKQ

SEQ ID NO: 243381 - protein, 86 aa, Glycine max
  Clone ID: PAT_MRT3847_61800C.1.pep
GILIHILSLVDSRRVFHRTVKTIACKKGSLATIAMASTSSALTISSSSILLDGKVPRQSRAGSSQCVSLSPPPLDSQNRSCETTAY

SEQ ID NO: 243382 - protein, 82 aa, Glycine max
  Clone ID: PAT_MRT3847_61801C.1.pep
AHVTSIAFSISGRLLFAGYTNGDCYVWDTLLAKVVLNLGSLQNTHEDRISCLGLSADGSALCTGSWDTNIKIWAFGGYRRVV

SEQ ID NO: 243383 - protein, 54 aa, Glycine max
  Clone ID: PAT_MRT3847_61802C.1.pep
GFLPPGPCTDFADMLCSVVAQEIRKIGVARDGDQEDRELEHVGLHEVMTLKEQS

SEQ ID NO: 243384 - protein, 58 aa, Glycine max
  Clone ID: PAT_MRT3847_61803C.1.pep
WYDIFMHFSISTKVWSRRSFSVRKFGNEDLKHKLVQFLVQRDPPKKRFDFAVHVTSYC

SEQ ID NO: 243385 - protein, 100 aa, Glycine max
  unsure (1)..(100): unsure at all Xaa locations
  Clone ID: PAT_MRT3847_61804C.1.pep
KKAFSGFKTLIIKNVKSVWPPKQALVXSGLTQPFITKVWERPKEPNQAVEKSQGNILKATPMKGKTWFPKNFRVFSRKNTWEWGCSPTHKRVPGAPIKAK

SEQ ID NO: 243386 - protein, 85 aa, Glycine max
  Clone ID: PAT_MRT3847_61805C.1.pep
WNLLTLYQQLKLLIAVTKKRKEKENITLEMCQSNEGMMHGHISRELYACNLKLFVLYFDYASIIPQKIEKVDILYCKSIFSFNTM

SEQ ID NO: 243387 - protein, 242 aa, Glycine max
  Clone ID: PAT_MRT3847_61806C.1.pep
SILQSEIGEQKERALAAAATELERFFKKEDFSRMKVIGQFNLGFIICKLDQDLFIVDQHAADEKYNFERLSQSTILNQQPLLRPIKLELSPEEEIVASMHMDIIRKNGFTLEEDPNAPPGCRFKLKSVPFSKNTMFGIEDVKELISILSDGDGHVECSIVGSYKLDTSDSVCPSRVRAMLASRACRSSIMVGDALGRNEMQKILEHMAELKSPWNCPHGRPTMRHLVDLTKIHKSYELTMQM

SEQ ID NO: 243388 - protein, 64 aa, Glycine max
  unsure (1)..(64): unsure at all Xaa locations
  Clone ID: PAT_MRT3847_61807C.1.pep
ILNYQKSMRTFYSSDNGNSNSNSHFISGXSPFIAAADENTNTNNINNNGKTKSPNLRGSNDDGM

SEQ ID NO: 243389 - protein, 55 aa, Glycine max
  Clone ID: PAT_MRT3847_61808C.1.pep
RYRGNPNYLSISNHLRFYLPEIFPNLNKVLFLYDDIFVQNDLADLWSIDLQGTLN

SEQ ID NO: 243390 - protein, 77 aa, Glycine max
  Clone ID: PAT_MRT3847_61809C.1.pep
HHQESPKMVTSKFCSSKALLFSLNGNEDYEYNLTILMIFGALTIVKEKFGLTKPLIFCDCNFIRACVIDDVSFIVAV

SEQ ID NO: 243391 - protein, 67 aa, Glycine max
  Clone ID: PAT_MRT3847_6180C.1.pep
YSCYKCDPVFSIVHSDSSSEKVYTTLLKSLHGKLSIQGCWPWGHLISLILLVPWPERRCSITSDLIC

SEQ ID NO: 243392 - protein, 87 aa, Glycine max
  Clone ID: PAT_MRT3847_61810C.1.pep
GRLSIFLAGAFPKFKNPGFFWLSPPPVEASPPSFCGGAPHKFCPPCGFVFSQPGCPWGFFFTKMGFFPLIFFKTKTFPLFFFKGGDF

SEQ ID NO: 243393 - protein, 64 aa, Glycine max
  Clone ID: PAT_MRT3847_61811C.1.pep
QTILLTKKASIHFTPQQKVFPWTFSLAPKALQLWSIENILILPSDISPSSLLGKITSYINFINN

SEQ ID NO: 243394 - protein, 64 aa, Glycine max
  unsure (1)..(64): unsure at all Xaa locations
  Clone ID: PAT_MRT3847_61812C.1.pep
MALNPQLFPYGMPVPLVNEMFVLDXDGVEFAVYKIPASGTHGGNLKTKGIVYVSYIRLVFVAKS

SEQ ID NO: 243395 - protein, 50 aa, Glycine max
  Clone ID: PAT_MRT3847_61813C.1.pep
QDTIHRELIPVSLAKNNHQVYDLGGRPRVCQNACEVKVCSHTVVVTNYQP

SEQ ID NO: 243396 - protein, 35 aa, Glycine max
  Clone ID: PAT_MRT3847_61814C.1.pep
ITESMVTHPTPLMEVAQHTKWLEETLRENHEGTRP

SEQ ID NO: 243397 - protein, 129 aa, Glycine max
  Clone ID: PAT_MRT3847_61815C.1.pep
MMIITPLFLSQLSQHKKMASISQGLLLTTAMLLSTTLLYVAFSRPSFQIHHSNKPTLRSCLYSEEKKRERKKKKKKKVKFADSVKDGRERNEQRSNCRRQSGGMPLPANRMALYNGILRDRVHRMECSY

SEQ ID NO: 243398 - protein, 143 aa, Glycine max
  unsure (1)..(143): unsure at all Xaa locations
  Clone ID: PAT_MRT3847_61816C.1.pep
FYAVFQMSSLNTNVTSVLVGFRLQITYYMLQLMVWVDGPFRLRVRLTVHMQLNHGWEFKSFLEALLKASFQWLNIDVFDALLADSCMCYRYAFTGSIYHLYPFTRDLLCWIASFLNQKRIXGSVLTILKNFSSQKIIKIKELV

SEQ ID NO: 243399 - protein, 82 aa, Glycine max
  Clone ID: PAT_MRT3847_61817C.1.pep
GVFFFFFFFFFFFFFFFFCFFFFFILFAWLYVFKKGHRGKQTRILKKNGQRLRGGAPKKPQQRQKKEKRARRTKKEPTSSEK

SEQ ID NO: 243400 - protein, 98 aa, Glycine max
  Clone ID: PAT_MRT3847_61818C.1.pep
PPENSLSQHIRGYILCGTSRGYIYLGIVILRTREGTSLVDQFKWRVHPLGYSKRTREGTSLVDLWLVKDFTRLKEISRTTGCMGTECRHGLLLNQYKS

SEQ ID NO: 243401 - protein, 61 aa, Glycine max
  Clone ID: PAT_MRT3847_61819C.1.pep
LVFGRAFFFFFFRYNPSVELKSNKVCPCCKLHGMKQMMSGMRATTATPISCMMIQVCPIRK

SEQ ID NO: 243402 - protein, 81 aa, Glycine max
  Clone ID: PAT_MRT3847_6181C.1.pep
HISYKGESCQEYLKLRNKISLQSSKVVIHPTTASEKSKSTRMNINNSQLLCKTFYGLLQYQAKCVIQIHFPTLIGERETER

SEQ ID NO: 243403 - protein, 96 aa, Glycine max
  Clone ID: PAT_MRT3847_61820C.1.pep
VTVVTSVQDSRGSVHVFSSMLVSGAMLALLSGRGPLFGFPSLLVSALVCPGLCWSGFFMLPMVFSVFLFPFILFRCCELRLSLWDLSVVVLPSLLW

SEQ ID NO: 243404 - protein, 106 aa, Glycine max
  Clone ID: PAT_MRT3847_61821C.1.pep
NTFKNLSQSNFHSMVINLLNMWKGECTKSNSNTRHVHFGLCQMPIFGCMVAELSDCIGWWKRDARSGTEGKQSKSNVLSPFCRLSQPYPSVVFSQPYPFCRLLAAV

SEQ ID NO: 243405 - protein, 178 aa, Glycine max
  Clone ID: PAT_MRT3847_61822C.1.pep
NWNFYPQPRPQPQPLILPFERCNCRRRWFGREKGLLKFDSLSEEHGKIAEESEEVRDLKTNEEIGDLNTGEVERKRRSLYDLPEKNGKKKKRIDHDGDGSEKKPNESATNKRKTEKERRDTLKQLRAESHRLLRETRDAAFKPAPLVQKPISSILEKIRQRKLEILQKSADNVEKAGP

SEQ ID NO: 243406 - protein, 128 aa, Glycine max
  unsure (1)..(128): unsure at all Xaa locations
  Clone ID: PAT_MRT3847_61823C.1.pep
KGTKSSPVLVPPASRIWARXNIPFFPVXXGAMFAQRFQGPRVFPNLAQGLRIPGHNDILGPYPVHHFFKTFPVYVEGAFELRVFIDAFTGTVKTFPKICVPRNGRFPFSKNGETFVKLPWIKFQKGLF

SEQ ID NO: 243407 - protein, 108 aa, Glycine max
  Clone ID: PAT_MRT3847_61824C.1.pep
MAPKKDKAPPPSSKPAKSGGGKQKKKKWSKGKQKEKVNNQVLFDQATYDKLLSEAPKYKLITPSILSDRLRINGSLARKAIRELMARGSIRMVSAHASQQIYTRATNT

SEQ ID NO: 243408 - protein, 55 aa, Glycine max
  Clone ID: PAT_MRT3847_61825C.1.pep
VVITQPLKSQLIVRSEGFLIMVHVMMTPESAGIYLMVAVVLAYFKASLILILTYT

SEQ ID NO: 243409 - protein, 576 aa, Glycine max
  Clone ID: PAT_MRT3847_61826C.1.pep
MLGRAAFSRTGSFRPENLGQNAMAMIGNVCFSFFVIGVLVFTIMAATYEPEDPLFHPSTKITTFLTSKSNATFKSDNSVVRTGEDFMAANETAFGSIINSTDVDNLASAEIIDAGDAAAATQCDVSGPIDCKDPEVFHLMMRATIDKFQDIHFYRFGKPAPGSNDSTCDMAWRFRPNQGKAAAFDGKAAAFYKDNRRFVIDRSANCSLSVVSIGEYHTGVNARKRKKHQKAGLEKTPLDMYQANTLPVVGEIVNDSLPVVESESSFSHGKYLLYEGGGYRCKSMNHYLWSFLCALGEAQYLNRTLIMDLSICLSSIYTSSKQDEEGKDFRFYFDFEHLKEAASVLDKEQFWADWNQWQQKDGMSLHLVEDFRVTPMKLMDVKDALIMRKFGSVEPDNYWYRVCEGETESVVQRPWHLLWKSRRLMDIVSAISSKLNWDYDSVHVVRGEKARNKELWPNLDAHTSPDALLSTLRDKIDEGRNLYIATNEPDTSFFDPLKDKYTTHFLDEYTELWDENSEWYSETTKLNNGIPVEFDGYMRVSIDTEVFFRGKKQLETFNDLTSDCKDGINTCNVAAN

SEQ ID NO: 243410 - protein, 93 aa, Glycine max
  Clone ID: PAT_MRT3847_61827C.1.pep
TVRSSNCKLGFGFQNPLDKLLLLHLNLLLQNQKRISTRNHVQIPLLYSASTTLPIMLCPSLIFFGYQHGNIRHGWLMFDSLTKCMLIVVALTE

SEQ ID NO: 243411 - protein, 49 aa, Glycine max
  Clone ID: PAT_MRT3847_61828C.1.pep
HGAETLVSLHYHPHVLHQCSISAVVFVARRASRQIRYLIVVLCYASEDE

SEQ ID NO: 243412 - protein, 166 aa, Glycine max
  Clone ID: PAT_MRT3847_61829C.1.pep
SEHTKPQQQLQDLVQPQSSSSKNFNIPPMKTTPKKQQGFKLYERRNNNNHLKNTLMINTLVPNFAHSSGFSSSPSSPCNKPEILSPSLLDFPSLTLSSPVTPLNDDPFDKSSSLPSLGSTSSEEERAIAEKGFYLHPSPMSTPRDFEPQLLPLFPVTSPRVSESTT

SEQ ID NO: 243413 - protein, 216 aa, Glycine max
  Clone ID: PAT_MRT3847_6182C.1.pep
MLKLGSLLSMHGCYQHLKKASGDKVGNVDGDAEQGIYDASTPPQGSNPSNHEKGLGAPQEHLVRQPASTWGYIFQILFQMIAGAVMLTDCVFWFIIVPFLTIKDYNINLLIISMHTINAVFLIGDTALNSLRFPWFRIGYFCMWTITYVIFQWIVHAIVKLWWPYPFLDLSSPYAPLCYFSMALLHIPCYGIFALIMKLKHSVLSTRYPDSYLCDT

SEQ ID NO: 243414 - protein, 90 aa, Glycine max
  Clone ID: PAT_MRT3847_61830C.1.pep
ASYIHMVQHMIEKCLIFHMSKEECMEALSKHANIKPVITSTVWNELEKENKEFFEEYAKAKSKDERMSEEETSQMIQKMISDSSKGAGND

SEQ ID NO: 243415 - protein, 76 aa, Glycine max
  Clone ID: PAT_MRT3847_61831C.1.pep
RKVGWKIQKPPEVFFPEICPKVGVDKSVFKVWMHNPKNPFSKKDTNKIVPSNDLNFPPEKKFSPENEANGGDAQVF

SEQ ID NO: 243416 - protein, 54 aa, Glycine max
  Clone ID: PAT_MRT3847_61832C.1.pep
NAMNYHHVIYLHTPTITLDTYPALRLKPYNDTRHLTSLFIDHICHYHQSHDNIY

SEQ ID NO: 243417 - protein, 51 aa, Glycine max
  Clone ID: PAT_MRT3847_61833C.1.pep
FEAIFGIKLFAYEQRCYTNPHTSMVFIMCLTSEIRGGAMCAKGCWSEEVVL

SEQ ID NO: 243418 - protein, 55 aa, Glycine max
  Clone ID: PAT_MRT3847_61834C.1.pep
LKDDYSKFELPNTDSSIVNALQNTMITEEPTVSKEPLEIKVKCPELNNEDIAHRL

SEQ ID NO: 243419 - protein, 65 aa, Glycine max
  unsure (1)..(65): unsure at all Xaa locations
  Clone ID: PAT_MRT3847_61835C.1.pep
YYDGRSWTMWKLPMFGCTDASQVLKELQXAKPASPTGFIRIIGFANVRQVQCIXFIAYKPPPFSV

SEQ ID NO: 243420 - protein, 68 aa, Glycine max
  Clone ID: PAT_MRT3847_61836C.1.pep
KDPLSQCTLFDTPWEPVLGFFANKIGLNKKNPRRMFHLFILTTFLWAGKLFALFFLKLKIFFKAPFMR

SEQ ID NO: 243421 - protein, 90 aa, Glycine max
  unsure (1)..(90): unsure at all Xaa locations
  Clone ID: PAT_MRT3847_61837C.1.pep
YKVANKLKSEGHNVTTLDMAACGVNPKQRQEVHSVSEYNEPLMTFMASLPPEEKVILXGHSLGGLSASIAMENYPEKISVAVFITATVVS

SEQ ID NO: 243422 - protein, 78 aa, Glycine max
  Clone ID: PAT_MRT3847_61838C.1.pep
TPCTTLGLTRGAREKIHYDQTMMTTDRREARPRIRACEMVVSLTLSLHTQSSDSITNNNNTASSSPIALALSTSQLWN

SEQ ID NO: 243423 - protein, 52 aa, Glycine max
  Clone ID: PAT_MRT3847_61839C.1.pep
GYANLSLQCAWSFQLSIYGPHFAPCVKPNNDLGLYLLFINVSTLYPLTVTNP

SEQ ID NO: 243424 - protein, 41 aa, Glycine max
  Clone ID: PAT_MRT3847_6183C.1.pep
QGPERVSIYFSSFTVKKSIKQVSVFQTDMQWHQSPDGKKQA

SEQ ID NO: 243425 - protein, 65 aa, Glycine max
  unsure (1)..(65): unsure at all Xaa locations
  Clone ID: PAT_MRT3847_61840C.1.pep
LLASRPSFFFFFXKHKNTIFSVEGKKLHNHQPSYIHTYHHKRLFPNYFHRSIKRHLRLLINVQLI

SEQ ID NO: 243426 - protein, 91 aa, Glycine max
  Clone ID: PAT_MRT3847_61841C.1.pep
LSRSNCPRSCHCHFKSCHSCHSCHGIRIRRKGSKKASAVGNSLIMPSARIQHANNVGSQSKANNHYTDRRGNSHQPVTCRIRQKCPPFYSP

SEQ ID NO: 243427 - protein, 100 aa, Glycine max
  Clone ID: PAT_MRT3847_61842C.1.pep
IVRHVFTSDWYPYTSSPLQITPYFLPQPCNHLPHCHTTTYKKTVGSSKKQWSQYAPNLHTACLKLIVHRQSLLYSIHVTSGKRFSTEKLLASRNLNKLAP

SEQ ID NO: 243428 - protein, 36 aa, Glycine max
  Clone ID: PAT_MRT3847_61843C.1.pep
GSRWAPLGDGTWNLNHRHSCEDLAQDRMVKHKKNFK

SEQ ID NO: 243429 - protein, 47 aa, Glycine max
  Clone ID: PAT_MRT3847_61844C.1.pep
LIHEREQQHEVVVNVQRQDGDVNQKDKLVRSMGSKKVCLARVVYVTA

SEQ ID NO: 243430 - protein, 114 aa, Glycine max
  Clone ID: PAT_MRT3847_61845C.1.pep
PDVIEDGMPQSGSQHVLEKYVSIAVLCSHPQLYARPTMDQVVKMMETDESVPSIPERPIPLVAGRLDIERSVSSSGSGQLSSPTGYRSYTIESDRQSSNSRDERSSSSRILSTD

SEQ ID NO: 243431 - protein, 302 aa, Glycine max
  unsure (1)..(302): unsure at all Xaa locations
  Clone ID: PAT_MRT3847_61846C.1.pep
MVKKGNIVQYRERLDNTLALPDLTNEQILKTLVKSQLQRSSEVEIEGCNEKEVETKTTELCNLLDMLRSASGDNGGGSSSTSHADWKLKQDNEEFRVMYREGPEGTPIHTLLVEGYVDGPLDLSLCLSWETPLYKKWWPQFTLPSFKVLVSDRLQRVQIGEQISLVIKGXRFPWALSTREAIVHYYLFEYFQDDLVVILLNTVSESKTDNLNKDAIPEAKDVVRIDLVGGYAMQKVTSERSYFRIIANLDLKLDFLPPTLLNFISRQLIXXGFRLYQKAVTSMMGNDKDKDFSKALEDTLYV

SEQ ID NO: 243432 - protein, 53 aa, Glycine max
  unsure (1)..(53): unsure at all Xaa locations
  Clone ID: PAT_MRT3847_61847C.1.pep
IYYFVLSFGALNCNLLGLLYFVLRWSLLHSTGEGGGGGDXYPNNHSGKQVPTR

SEQ ID NO: 243433 - protein, 256 aa, Glycine max
  Clone ID: PAT_MRT3847_61848C.1.pep
LAYEYLSNGSLDKWIFKKNKGEFLLDWDTRFNIALGTAKGLAYLHEDCDSKIVHCDIKPENVLLDDHFMAKVSDFGLAKLMNREQSHVFTTLRGTRGYLAPEWITNYAISEKSDVYSYGMVLLEIIGGRKNYDPRESSEKSHFPTYAFKMMEEGKLRDIFDSELEIDENDDRFQCAIKVALWCIQEDMSMRPSMTRVVQMLEGICIVPKPPTSSSLGSRLYATMFKSSSEEGATSSAPSDCNSDAYLSAVRLSGPR

SEQ ID NO: 243434 - protein, 66 aa, Glycine max
  Clone ID: PAT_MRT3847_61849C.1.pep
TFHKEYLLCKYVSLILYSFILICYHYVNYLSMPHFICSFAAINTKCFKLNFPLQDRSIKIACLLYL

SEQ ID NO: 243435 - protein, 74 aa, Glycine max
  Clone ID: PAT_MRT3847_6184C.1.pep
LAYFTNKKSPKDSWYIQCAVKTYMNLEVFASLGKQKHTRIHFIKNLKEQIFKGILTCIIYSAAFITCNEELIKM

SEQ ID NO: 243436 - protein, 66 aa, Glycine max
  Clone ID: PAT_MRT3847_61850C.1.pep
RERERGREGFVLLLLLCSVLLRNPRSQISLDEVAPARSTNYLSPRLPKLSCLNNYLASCVYSKFTF

SEQ ID NO: 243437 - protein, 48 aa, Glycine max
  Clone ID: PAT_MRT3847_61851C.1.pep
QTLSLAPKLTHSGYGLHRPAILHCAATRDTGNHAAQTLSVPSRAVVFQ

SEQ ID NO: 243438 - protein, 105 aa, Glycine max
  Clone ID: PAT_MRT3847_61852C.1.pep
WGHLCSAAGSEHVDSLSEKDLVGNSVAELYTKESEAGVSDQENQVVQENAMEDMEHEYLSEKDLVGNTAAKLDTKESEAGVSNQERQENELDIEKSPPSAAEGSS

SEQ ID NO: 243439 - protein, 48 aa, Glycine max
  Clone ID: PAT_MRT3847_61853C.1.pep
IGRIHAEDVIVRVCYNQCMNNRAVRAAQEAVHNQKQFDIRRSAVSIAA

SEQ ID NO: 243440 - protein, 98 aa, Glycine max
  unsure (1)..(98): unsure at all Xaa locations
  Clone ID: PAT_MRT3847_61854C.1.pep
PLLPNLHTHILSPSGLCMGGGMYGKGYVTGATARSTGAXACDQETDHWTRNWRMIPRVYASVNAPAHAPALDDQVDDQEHATDHVTNIDRECDTGRDT

SEQ ID NO: 243441 - protein, 171 aa, Glycine max
  Clone ID: PAT_MRT3847_61855C.1.pep
LVKNPGFEVGPFPFFNSTNGVLLPPEQEDHVSPLPGWMIESLKAVKFIDAKHFNVPFGQGAVELIAGRESVIAQILRTVPNKIYNMKFPIGDARNGCHGSMMIEAFAAKNTLKVPFKFEGKGEFKTVSFKFRAIENRPRIPFYSSFYHTRIHDYGSLCGPVIDQVIVYPVA

SEQ ID NO: 243442 - protein, 98 aa, Glycine max
  unsure (1)..(98): unsure at all Xaa locations
  Clone ID: PAT_MRT3847_61856C.1.pep
QPSSTPELRTPSSSRSRIKVREPKEENVTLWSXTVIDGEHVSGVARIFASFNXTFIHVTEFVXGCETLVRITGGITVKADIDESSPYAAMHAAQDVAA

SEQ ID NO: 243443 - protein, 180 aa, Glycine max
  Clone ID: PAT_MRT3847_61857C.1.pep
MFSSLQFEPFGGMPFFTHAPPPAMFYPVAETPLTNTIANQIDYYFSDANLVKDEYLRSNMDEQGWVPISLIASFPRVRSLTSNIKLILDSLRTSTFVEVQGDKLRRRTEWMKWLPSVQLLAKSGSISPSESSSNNLAADFEKITVDDAKVNAKPTANDDAAGESSTQSQVPNDATTVSSN

SEQ ID NO: 243444 - protein, 58 aa, Glycine max
  Clone ID: PAT_MRT3847_61858C.1.pep
LAAVPFCGFFEAVPFCGLSPAVPFCGLLEAVPLCCFLAAVPFGGFFQPAPFCCFLAAG

SEQ ID NO: 243445 - protein, 179 aa, Glycine max
  unsure (1)..(179): unsure at all Xaa locations
  Clone ID: PAT_MRT3847_61859C.1.pep
VSSEFGSSTCWAPTFMKDISFAGLSTSSRSESLNSLFDNYIQIDTSLRAFIEQYRMILEDRHEEEAKANFDAWHETPDLKSPSPFEKQMLSVYTHEIFRKFQVEVLGAAACHLKKENDGVTSAYTVKDFENNQNYMVEWNTSTSDICCSCHLFEYKGYLCRHAIVXLQMSGVFSIPPKY

SEQ ID NO: 243446 - protein, 86 aa, Glycine max
  Clone ID: PAT_MRT3847_6185C.1.pep
ASQENFMDTVKTGNHESTVKVNLHQSQEKIMIGSKIKDRIETIAIKQSQKKDMLLTGENRKGQERAVSRSGYGMSFLCRGEKRVLD

SEQ ID NO: 243447 - protein, 48 aa, Glycine max
  Clone ID: PAT_MRT3847_61860C.1.pep
IISPFYNLSVAIMDPCLINIPLKGPTTIENSKFKQTTCHNISNLVSCQ

SEQ ID NO: 243448 - protein, 46 aa, Glycine max
  Clone ID: PAT_MRT3847_61861C.1.pep
MVSAGTSALLVISYGIRCKKGKRKGDSDSKTALVFESHRLFARRDV

SEQ ID NO: 243449 - protein, 82 aa, Glycine max
  Clone ID: PAT_MRT3847_61862C.1.pep
MGISRDSMHKRRTTGGNNKAWAKKRKYELGRHPANTKLSITSTVRMIRVRGGNVNLKSLTLETGNYSWGSETVTLKTRILNV

SEQ ID NO: 243450 - protein, 95 aa, Glycine max
  Clone ID: PAT_MRT3847_61863C.1.pep
ILWPGWSLVDPHCFLKAPNQMLSKPLLVPPPAFVSFAHRNPSFCRNCLLPFGGKRPPLLYPLKSPSRGSSPPTPPFNKTPLGLKKKTFPFSQFPS

SEQ ID NO: 243451 - protein, 55 aa, Glycine max
  Clone ID: PAT_MRT3847_61864C.1.pep
GGKKSRPCFLNMFLLSLKKKKRVRLPMGLLPIVPAPPYVDFPISIPWRNKVEYPK

SEQ ID NO: 243452 - protein, 147 aa, Glycine max
  Clone ID: PAT_MRT3847_61865C.1.pep
MAGDSSLLAAVSLLSACQQSYFALQVGRVRLKYKIAPPAVTGSLEFERIFRAQQNSLEFYSVFIISLWMAGWYFNQVFATCLGLLYIYARHKYFWGYAEAAEKRIIGFRLSLGILALLTVLAVLGVASRFLDEYLDFHVAKKLKRPF

SEQ ID NO: 243453 - protein, 46 aa, Glycine max
  Clone ID: PAT_MRT3847_61866C.1.pep
NCENLTIQHRYHMCHMLQQAIIALTIGELGSSPAFDRNKFAVFRAL

SEQ ID NO: 243454 - protein, 91 aa, Glycine max
  unsure (1)..(91): unsure at all Xaa locations
  Clone ID: PAT_MRT3847_61867C.1.pep
HSNGSFTSSNITPIGIDCKIRSLELDGEQLKLQIXDTGRDEPVPTFTTGYYRGAMDILLDYDVTDETXFNNIRNGILTNAQHASDNVNKIL

SEQ ID NO: 243455 - protein, 60 aa, Glycine max
  Clone ID: PAT_MRT3847_61868C.1.pep
NKILSNLILFALFFPLFLTRHNWVQSENHRAEHLLHQSQSIFPLCSQTLPHLHLLHLLHN

SEQ ID NO: 243456 - protein, 54 aa, Glycine max
  Clone ID: PAT_MRT3847_61869C.1.pep
MPTPNDVVDMTIGGQSVGCIVMEFYADVTPLIVENFCEHCTGDKGAGLGCKFLQ

SEQ ID NO: 243457 - protein, 73 aa, Glycine max
  Clone ID: PAT_MRT3847_6186C.1.pep
LDCILSLVSCHPIPSDRILRVCAPGLDRTELNSTITSTVCSQLRYDSTLPSSPPDYPKPYVPNTTSRYRKTSP

SEQ ID NO: 243458 - protein, 110 aa, Glycine max
  Clone ID: PAT_MRT3847_61870C.1.pep
MTTRFKKNRKKRGHVSACHGRIGMHRKHPVGGGNAGGMHQHRILFDKYHPGFFGKGGMRLFHKIPNKLFNPIINIDKLRALLPHVDNDKATDGNGPLLDVNQFGFFYVLG

SEQ ID NO: 243459 - protein, 114 aa, Glycine max
  unsure (1)..(114): unsure at all Xaa locations
  Clone ID: PAT_MRT3847_61871C.1.pep
KCLFCLLPQFWDQKNGNGPNNKSFLPKLKPGFGGHYTIKVQFAIXRLALKPTTLSNCKMVPAPCGNYIPDYFLGHQYISDPNTFTQHPYLYAKSLTLTNRDLFVVDVDDTTLSN

SEQ ID NO: 243460 - protein, 70 aa, Glycine max
  Clone ID: PAT_MRT3847_61872C.1.pep
YIARSLRWASSSNSLIRCTKPTVSDLRLADTMVAVDTLHKSVRMLGSYLRVRKPFPPFPRPDRMAIMIVL

SEQ ID NO: 243461 - protein, 203 aa, Glycine max
  unsure (1)..(203): unsure at all Xaa locations
  Clone ID: PAT_MRT3847_61873C.1.pep
SARDEEEGEDLCNIEQFNLAYGAKILLHHANMRLKRGHRYGLCGRNGSGKSTLMNAIINSQVEGFPPPTEVRTFYVQHDIDGSEAEISIIDWVLSDKRLLATEQEIRDTLESVGFDEKKQKHSIGSLSGGWKMKLXLARAILFKGDILLLDEPTNHLDVLNVDWLINYLTSLTTCTSIIVSHDSDFLNRTITRVLHLNHFKLK

SEQ ID NO: 243462 - protein, 71 aa, Glycine max
  unsure (1)..(71): unsure at all Xaa locations
  Clone ID: PAT_MRT3847_61874C.1.pep
PXTXXPXYCFXXSTLTSLHXXXXXXXXXNKRKGVMGVRLSVXFLXCNKVLHILFXTEEVXIQHHNATXGXX

SEQ ID NO: 243463 - protein, 48 aa, Glycine max
  Clone ID: PAT_MRT3847_61875C.1.pep
MYMSITCIGVTIVSLKVSSRFLTLVAPNVLCPHDNILSTAWTRSSCTV

SEQ ID NO: 243464 - protein, 62 aa, Glycine max
  Clone ID: PAT_MRT3847_61876C.1.pep
TSDTCLKFLPKKHPFAKNQFHYTALLSLMPKAMKQGPPRSNKPKRLLLCVGEPSGSFNACLL

SEQ ID NO: 243465 - protein, 94 aa, Glycine max
  unsure (1)..(94): unsure at all Xaa locations
  Clone ID: PAT_MRT3847_61877C.1.pep
MPAVTKIWKQDGLLGFFREPGPLVQLGCGTISGAVGATCVYPLQVIRTRYNAVSITVGMFDAFRRTFQLEGFIGFYKGLFPNLLKVXPAASITY

SEQ ID NO: 243466 - protein, 240 aa, Glycine max
  unsure (1)..(240): unsure at all Xaa locations
  Clone ID: PAT_MRT3847_61878C.1.pep
LTFPLPILAATHLQLIHGVSLVGSEDDLTAIIKVWEKVYGVKISDAANADVYNPEQLASEFTTDSKSGRRVGFIGLGAMGFGMATHLLSSKFCVVGFDVYKPTLTRFSNAGGLIGNSPAEVSKDADVLIIMVTNEAQAESVLYGEYGAVSALPPGATIILSSTVSPAYVSQLEHRLHNEGKNLKLVDAPVSGGVVRASMGTLTIMASGTDDALKSAGLVLAALSEKXYIIKGGCGAGSGV

SEQ ID NO: 243467 - protein, 105 aa, Glycine max
  Clone ID: PAT_MRT3847_61879C.1.pep
IFGPWSETFYSFFSFIEPGPLVQLGCGTISGAVGATCVYPLQVIRTRYNAVSITVGMSDVFWKTLKDEGFRGFYKGLIPNLLKVVPAASITYMVYESMKKSLDLE

SEQ ID NO: 243468 - protein, 50 aa, Glycine max
  unsure (1)..(50): unsure at all Xaa locations
  Clone ID: PAT_MRT3847_6187C.1.pep
RTGXEPARTIYTSQLFGAAIKQTMGVYYELGSHCQMKSSKMYVSTARTKR

SEQ ID NO: 243469 - protein, 251 aa, Glycine max
  Clone ID: PAT_MRT3847_61880C.1.pep
GSSASIMPAVTKIWKQDGLLGFFRGNGLNVVKVSPESAIKFYAFEMLKKVIGEAHGNKSDIGTAGRLVAGGTAGAIAQAAIYPMDLIKTRLQTCPSEGGKVPKLGTLTMNIWVQEGPRAFYRGLVPSLLGMIPYAAIDLTAYDTMKDISKRYILQDSEPGPLVQLGCGTISGALGATCVYPLQVIRTRLQAQPANSTSAYKGMFDVFWKTLKDEGFRGFYKGLIPNLLKVVPAASITYMVYESMKKSLDLE

SEQ ID NO: 243470 - protein, 89 aa, Glycine max
  Clone ID: PAT_MRT3847_61881C.1.pep
EPGPLVQLGCGTISGAVGATCVYPLQVIRTRYNAVSITVGMFDAFRRTFQLEGFIGFYKGLFPNLLKVVPAASITYVVYESLKKTLDLD

SEQ ID NO: 243471 - protein, 35 aa, Glycine max
  unsure (1)..(35): unsure at all Xaa locations
  Clone ID: PAT_MRT3847_61882C.1.pep
XIVQGRVIDTLICLVPLYSLFEIARLNNLLCHCTR

SEQ ID NO: 243472 - protein, 51 aa, Glycine max
  unsure (1)..(51): unsure at all Xaa locations
  Clone ID: PAT_MRT3847_61883C.1.pep
KWRYIVSYTXSKXXMLTSRXDQTLIFPKKRPXKXXNLLSVYFLVSSKSGPX

SEQ ID NO: 243473 - protein, 473 aa, Glycine max
  Clone ID: PAT_MRT3847_61884C.1.pep
MSVQDYLDKHMLSRKLEDAVNAAVRAKTSDPVLFISNHMRKAVQSVITKIKARQILDSRGIPTVEVDLHTNKGVFRASVPSGNSTSMYEAVELRDGDKGVCLGNGVAKAVKNINDKISEALIGMDPTLQSQIDQAMIDLDKTEKKGELGANAILAVSIAACKAGAAEKEVPLYKHIADLSGKTSPTLPVPAFTVISGGKHAGSNLAIQEIMILPIGASKFEEALRMGTETYHHLKAVITEKYGAHNCNVGEDGGFAPNISSFREALDLVKEAISRAGYDEKIKIALDVAATDFCIGKRYDLDFQSPQKSGQNFKSAEDMIDLYKELCSEYPIVSIEDPFDKEDWEHIKHISSLGICQVVGDDLLMSNAKRIERAITESACNALLLKVNQVGTITEVIEVVKLAKEAHWGVVTSHRCGETIDSFIADLSVGLASGVIKAGAPCRGERLEKYNQLLRIEEELGDQAVYAGEDWRQ

SEQ ID NO: 243474 - protein, 103 aa, Glycine max
  Clone ID: PAT_MRT3847_61885C.1.pep
SYDVLIFTTSVGGLGLNLTGADTVILEERDWNPQKDIHAMDRAHRIGQKKVVNVYRIVTRWTLEEKNLNLQRFRIDVACSALNQHNACLGFMPTDQILDLINI

SEQ ID NO: 243475 - protein, 95 aa, Glycine max
  Clone ID: PAT_MRT3847_61886C.1.pep
KKTGQETITEQTPKSVRPGNAPKHVKKAPRSWRVKTPLLSRFIKRKAWARSPRTLTAATSDPSPETPGRTPVGVWLPTESLLFVVEAAEENPDPN

SEQ ID NO: 243476 - protein, 146 aa, Glycine max
  unsure (1)..(146): unsure at all Xaa locations
  Clone ID: PAT_MRT3847_61887C.1.pep
DPNIRTIELEAFFVHIKRASNMVKHFSXPVSMFAPPKSTPGVPGAPAPPASKFKTQLCQNFPQGSCSFAERXPFAHGAVEKRKSGVGVCFSICISQGMVIMINIAVEGVRGYYMALRLSMDVRVMQYLGNVPKFFWAKAEKKKKKK

SEQ ID NO: 243477 - protein, 65 aa, Glycine max
  Clone ID: PAT_MRT3847_61888C.1.pep
HSLLQLSRGASFTMDVRAEDALLFEPSVFRISRKTGNGKRPGRGAKCVWKCLALGHHTPTEAIER

SEQ ID NO: 243478 - protein, 196 aa, Glycine max
  Clone ID: PAT_MRT3847_61889C.1.pep
MGSLMFSLTLTLVLALVSLSLPSQTSADKYEYSSPPPPEKPYNYHSPPPPPPKKPYKYPSPPPPVYKYKSPPPPYKYSSPPPPPKKPYKYPSPPPPVYKYKSPPPPVYKYKSPPPPPPKKPYKYPSPPPPVYKYKSPPPPYKYPSPPPPPYKYPSPPPPPAYYYKSPPPPPKKPYKYPSPPPPHYVYASPPPPYHN

SEQ ID NO: 243479 - protein, 29 aa, Glycine max
  Clone ID: PAT_MRT3847_6188C.1.pep
MDLLLLEQTLISLYIAAVVCMIEYQLRKL

SEQ ID NO: 243480 - protein, 72 aa, Glycine max
  Clone ID: PAT_MRT3847_61890C.1.pep
KAYFPTTRGQTSKAYFCPSQSCQGPFTGSSKKTKQTLKTKPTFFYIKKKNRGTIIKPNPGQVLLPENPIFPS

SEQ ID NO: 243481 - protein, 107 aa, Glycine max
  Clone ID: PAT_MRT3847_61891C.1.pep
DMSAFKAANPDAIFEDFIRWDSPGDWEEDDGPEGSKSSSSSAHDIKKSKDSWPPQGRLSKRMSEHGNLWRKLWNNAPALPASEQKPLLDPNREGGKVLHYLETLPPH

SEQ ID NO: 243482 - protein, 131 aa, Glycine max
  Clone ID: PAT_MRT3847_61892C.1.pep
HFGLKIIANVLKLDEDHPDVHQLYPTIYRNVVEAIDAVDNGVNQYDLDVPPKYEINTILSSRIKRLNLSWMDSDQSSDRENEAFLHAIVLAGAEFLENVNYYAKSWLPARSTVMESLAARGSADSSGEIIL

SEQ ID NO: 243483 - protein, 44 aa, Glycine max
  Clone ID: PAT_MRT3847_61893C.1.pep
DLNPRYVFHIGLFLMSLSRFGSGLFFMTGGSKFEAQCFIKLVVD

SEQ ID NO: 243484 - protein, 65 aa, Glycine max
  Clone ID: PAT_MRT3847_61894C.1.pep
QVLYAGFSSGRKIITGNKPYVTRQSFHHSMPLQVIWGTNDLQGKVLQNLTTIQKNESIPTATYTL

SEQ ID NO: 243485 - protein, 99 aa, Glycine max
  unsure (1)..(99): unsure at all Xaa locations
  Clone ID: PAT_MRT3847_61895C.1.pep
IKENYWIFSPKLKDIPSHNKKRLGYTLSXHQFADWTWEEFXRHRLTPSANWSVLLNSYHMLTDIFLPTTKDWLKTRLERISKHQWCCGSFYSLSRTTAN

SEQ ID NO: 243486 - protein, 68 aa, Glycine max
  unsure (1)..(68): unsure at all Xaa locations
  Clone ID: PAT_MRT3847_61896C.1.pep
LNACGFNLXINILQFTITSKVDLTIGLHVLQMYTKYYQLFILMIFARDIIEILPPGPYHKRYIYLVDL

SEQ ID NO: 243487 - protein, 69 aa, Glycine max
  unsure (1)..(69): unsure at all Xaa locations
  Clone ID: PAT_MRT3847_61897C.1.pep
ARNRVRXXXXLLVLLGXVXXAXVCXSLKXXXDENNXXXLRSSXXXQXLFENXNGXIXXXQRFNKXSTQD

SEQ ID NO: 243488 - protein, 105 aa, Glycine max
  unsure (1)..(105): unsure at all Xaa locations
  Clone ID: PAT_MRT3847_61898C.1.pep
MGPEKVHINIVGIGHVDSVKSTTTGHLIYKLGGIDKRVIERVEKEAADMNKRAFKYXAWVLDKLKAWRARXITIDIAVRKFATTKYYCTIIDAPXHTDFIQNMIT
